United States Patent Application Publication US 2005/0228172 A9 - sequence listing, part 89

SEQ ID NO: 402993 - DNA, 609 bp, Homo sapiens
tggctatttgtaagacagagaccacattttctagtctcttggctcaatatatgactcagtgactagatataactactgaaatgtagcagaactgatgtatggcaccactgagctgaattattattatttgttttaatcaggcatctttttacctctggtcaaaatcagagaattcttaaatcaaacacataggagtcacaagaaggaaggaggctccatctctcaatgactacctggagaaaagctgcctgataatgaggaatatgtgcattgggctctaattttaggtagaaaaaaataaatatttcaatccactagaatttctggaagctagtgttaccttaactaatgctgtagttgctaccacaagtacaatamcgctttaataaaaaactaaaccatctaacattccattaatagtaaggtggcaagcaattgggtaactataaatggaaaatggaaatattcatcaacattaaaatatttggttaaaaaatctttggttaaataatatcatttgcaatatcttggaaggaaaaagaaatgtgtattgaacctgcagatttaaagaaataagtttaaaagcacaatattaatagttgtattagt

SEQ ID NO: 402994 - DNA, 627 bp, Homo sapiens
aatgagtgaagggaagaattrgctggttaaagcaaaaaatgaaagtgaaaagaacaagtccaaaactggggactcccaggttcagacttttctaatagttccaatattagaacttctaatattagaaacttctactttctaatacttctaatacctgaacagtaagagaaaatattgaaaatggtttaagcaagaaaagttcaattaggacttctcaattaaatagagttagccttcagacaaaggtatttgttttactctgaaacattgttttagatgacctcaaagcagccacctataaataagtagaaagagaaagccaagggagtgaagtgcaaagaaacaaattgagcttgatcattatttctagaatataactttaaatatggttattggtatgtagaagtaatgggaaacaaatcaaaattctactaatttgcaaacaaaaccaggagtgtagcttacagaatctttgtctcttcatatcttaaaaccggaaaaggcaataaacagtttatgaaatacacagagccccaggggcaggatattccccattgccaacttcaggtgtagtgtggagcacaacagactagaaagagcctcctattggaagcacagcttaaggag

SEQ ID NO: 402995 - DNA, 627 bp, Homo sapiens
aatgagtgaagggaagaattggctggttaaagcaaaaaatgaaagtgaaaagaacaagtccaaaactggggactcccaggttcagacttttctaatagttccaatattagaacttctaatattagaaacttctactttctaatacttctaatacctgaacagtaagagaaaatattgaaaatggtttaagcaasaaaagttcaattaggacttctcaattaaatagagttagccttcagacaaaggtatttgttttactctgaaacattgttttagatgacctcaaagcagccacctataaataagtagaaagagaaagccaagggagtgaagtgcaaagaaacaaattgagcttgatcattatttctagaatataactttaaatatggttattggtatgtagaagtaatgggaaacaaatcaaaattctactaatttgcaaacaaaaccaggagtgtagcttacagaatctttgtctcttcatatcttaaaaccggaaaaggcaataaacagtttatgaaatacacagagccccaggggcaggatattccccattgccaacttcaggtgtagtgtggagcacaacagactagaaagagcctcctattggaagcacagcttaaggag

SEQ ID NO: 402996 - DNA, 627 bp, Homo sapiens
aatgagtgaagggaagaattggctggttaaagcaaaaaatgaaagtgaaaagaacaagtccaaaactggggactcccaggttcagacttttctaatagttccaatattagaacttctaatattagaaacttctactttctaatacttctaatacctgaacagtaagagaaaatattgaaaatggtttaagcaagaaaagttcaattaggacttctcaattaaatagagttagccttcagacaaaggtatttgttttactctgaaacattgttttagatgacctcaaagcagccacctataaataagtagaaagagaaagccaagggagtgaagtgcaaagaaacaaattgagcttgatcattatttctagaatataactttaaatatggttattggtatgtagaagtaatgggaaacaaatcaaaattctactaatttgcaaacaaaaccaggagtgtagcttacagaatctttgtctcttcatatcttaaaaccggaaaaggcaataaacagtttatgaaatacacagagccccaggggsaggatattccccattgccaacttcaggtgtagtgtggagcacaacagactagaaagagcctcctattggaagcacagcttaaggag

SEQ ID NO: 402997 - DNA, 619 bp, Homo sapiens
atcaaaaaaatcatctgacctttctctgaagtagatcataagaacctcatgtgagaggtgcccactctatacccggaggaaaggagcttccatatctctgaaaacttggggacacagagaagaaactgaacgcacaggcctcactaagtttcccccagttgattatcattagattatacccctttttttcaatcgtgcttctccacagctatccacttcatcaaatgttacattaaaaaaaaaaaacagggttttccattacttcagatgttcatttctaatagctcctatgtcacgtcaaacttgtaagtacctttgtatgcttttctcttatcaatatgtcttttattataggtgcctcagccaaagtgcagcgatgggtaagaaaaaaggttcccctccatgcccaccgagccatactcagaggtaccctatacttttctcctcctacaccttayatacccttcatctttatttcttccctaggctacacttcattttttttcttattttctctcctctttttctcaacactttattatataatagatttaatctgtatgaaatagacctttttagaaggatttgtagtagaaagagaacaaggttgaaaagaaaa

SEQ ID NO: 402998 - DNA, 599 bp, Homo sapiens
gtcatgtgcagtttttctaaccaaaaaactattyaaattattctagagcaggcccaaatgtagaagataaaggaaaaatctcctgttccgttcttagatagaatcacatcaatcctaactaaatttctgatattaagagaaaaatagaatgtattttaaagtgttctgtggcaaccaggcctgtatttataaaagagttgagcatttccttctctgatatctatgattcatgattaaaaacagtgctatagagacagaactaactcaaacaaaaattccaaagaacctattctgataaatgatacatgacaaaattacatttaaacagttatgaggcttgaaggaatccagcagagaataagagcaaatgatgtgggggttttctactcttaattcctgtgacaaaaatgataaaatatggttctttcatacaatgacagggagaaacaggaaacctgagaacagaaagtatattgttgttcagaaagagagatggtgttcccatatatttcagattggcagttttatttgaaaagggcctctggatctttgtttttaagaatggggaaggataagagcagtagaaaaaggggaaaaac

SEQ ID NO: 402999 - DNA, 599 bp, Homo sapiens
gtcatgtgcagtttttctaaccaaaaaactattcaaattattctagagcaggcccaaatgtagaagataaaggaaaaatctcctgttccgttcttagatagaatcacatcaatcctaactaaatttctgatattaagagaaaaatagaatgtatttkaaagtgttctgtggcaaccaggcctgtatttataaaagagttgagcatttccttctctgatatctatgattcatgattaaaaacagtgctatagagacagaactaactcaaacaaaaattccaaagaacctattctgataaatgatacatgacaaaattacatttaaacagttatgaggcttgaaggaatccagcagagaataagagcaaatgatgtgggggttttctactcttaattcctgtgacaaaaatgataaaatatggttctttcatacaatgacagggagaaacaggaaacctgagaacagaaagtatattgttgttcagaaagagagatggtgttcccatatatttcagattggcagttttatttgaaaagggcctctggatctttgtttttaagaatggggaaggataagagcagtagaaaaaggggaaaaac

SEQ ID NO: 403000 - DNA, 599 bp, Homo sapiens
gtcatgtgcagtttttctaaccaaaaaactattcaaattattctagagcaggcccaaatgtagaagataaaggaaaaatctcctgttccgttcttagatagaatcacatcaatcctaactaaatttctgatattaagagaaaaatagaatgtattttaaagtgttctgtggcaaccaggcctgtatttataaaagagttgagcatttccttctctgatatctatgattcatgattaaaaacagtgctatagagacagaactaactcaaacaaaaattccaaagaacctattctgataaatgatacatgacaaaattacatttaaacagttatgaggcttgaaggaatccagcagagaataagagcaaatgatgtgggggttttstactcttaattcctgtgacaaaaatgataaaatatggttctttcatacaatgacagggagaaacaggaaacctgagaacagaaagtatattgttgttcagaaagagagatggtgttcccatatatttcagattggcagttttatttgaaaagggcctctggatctttgtttttaagaatggggaaggataagagcagtagaaaaaggggaaaaac

SEQ ID NO: 403001 - DNA, 579 bp, Homo sapiens
ggcaattcctcaaagagctaaaagcagaactaccatttaacccagcaatcccattactgtgtatatacccagaggaatataaatcattctatgataaagacacaagcacttgaatgtttaacacagcactataagcaccattcacaatagcaaagacatggaatcaacctaaatgctcatcgtgactgattggataaagaaaacatggtgcatatatataccatggaatactatgcagcaataaaaaggaatgagattatgttgtttgcaggaatatgaatggagctggaggttattagcaaactaagacagaaacagaaatcaaaatacttcatgttctcatgtattagtaggagctgaatgatgagaactcatgaacacaaagaagggaacaatagacactggagtctacttgagggtggaggatgggaggagggagaggagtagaaaagacaacttttggggacttggcaatgaaataatctgtacaacaaacccccataacacaagtttacctatgtaacaaacctgcccttgtaccycgaacctaaaataaaagttagaaaaaaaaacccacaa

SEQ ID NO: 403002 - DNA, 521 bp, Homo sapiens
taagtcatgtttttaacgttttgaaaattatacactggcaattgtcagtacttgatttcttctttattttctatattgattttctaccaaccagaaatggcaaatttaaatgtctacaaggatcagaatgagaacatmaataggctaaatttattaatcaggactgtggcaaatctagatgatggccagaaagtatacacctacctaaaaaaggcagcctcaacttcagcacttgttttgatctagagacgctttgttgcttcaaagaacttcaaaacatgatttccacatttcagttgaaatctctcaattttttaatgttataaactaatttttaaaatttacaaagcattttgtgtgttcagccaaacctatctgcaaccatattggaccaagggccactagtgtgatgacaccacagcaaagaaaacactgtatatcattcggttcagcctagccctctaattaaacatgtttttgaaaaggttactaacatcaatgagagtaactgtccttatatt

SEQ ID NO: 403003 - DNA, 601 bp, Homo sapiens
gaatgactactgggtaaataacgaaatgaaggcagaaataaagatattctttgaaaccaatgagaatgaatacacaatgtaccagaatctctgggacacatttaaagcagagtgtagagggaaatatatagcattaaatgcccacaagagaaagcaggaaagatttaaaattgacaccctaacgtcttygcccaattttaatgaggttggacaaacattttagatattaaactcacttgatttgtcaaaattaattacataatggtcataaaatggcacaagttcttggagacataaattataaaaatcaataagtgcctttgattgctgttttttcaagaatcaagtccaacaatcaaaaccaatcaccaaatgacttgtttaatttgtttgacatgggtagaaattacttccaggaataacactgaggcatcctgaaagttgttagaacatctgtgaattggggaatgatatgagagaaatccggatttgggatggtcctgcaatggccagtttatggtcctccacctcagatacttcacttccaaaggtagcctaggactagtccaaatagaaattggggtgttattttcctgagaga

SEQ ID NO: 403004 - DNA, 601 bp, Homo sapiens
gaatgactactgggtaaataacgaaatgaaggcagaaataaagatattctttgaaaccaatgagaatgaatacacaatgtaccagaatctctgggacacatttaaagcagagtgtagagggaaatatatagcattaaatgcccacaagagaaagcaggaaagatttaaaattgacaccctaacgtctttgcccaattttaatgaggttggacaaacattttagatattaaactcacttgatttgtcaaaattaattacataatggtcataaaatggcacaagttcttggagacataaattataaaaatcaataagtgcctttgattgcygttttttcaagaatcaagtccaacaatcaaaaccaatcaccaaatgacttgtttaatttgtttgacatgggtagaaattacttccaggaataacactgaggcatcctgaaagttgttagaacatctgtgaattggggaatgatatgagagaaatccggatttgggatggtcctgcaatggccagtttatggtcctccacctcagatacttcacttccaaaggtagcctaggactagtccaaatagaaattggggtgttattttcctgagaga

SEQ ID NO: 403005 - DNA, 587 bp, Homo sapiens
ttaatgttcttatgatcactttacggtttagaaacttaagacttggaaggatcaagtgatctcttcagggtagctcacatagctagtaagtagaagactggatgtgaaacagtctgtcatcaagcttatgtttctaactactataccatactgccttgttaactcttacttaactctttagttttgtacctctcagtttgtttaatatctctttattgttgtgttayggcatagaatattaatgtgagcagaatacagttatgtaaatttactgactgggttctagataactagtttaacaatatactgactctctactatttgaaaaacctgcttgagatactacaattttatcaaatttaaagacataagtaaaaatattaacatcttttaatatttcattaagcatatgtgttcaagcacatgccttcctggcaaatctatcttgttttagaattagtgattggcatatttatataagactcattttatacttttaccaatgtctctcttgtaactcttacccagaattttcagattttttttctgcaaagtctctattttataatctagacagagttataggc

SEQ ID NO: 403006 - DNA, 587 bp, Homo sapiens
ttaatgttcttatgatcactttacggtttagaaacttaagacttggaaggatcaagtgatctcttcagggtagctcacatagctagtaagtagaagactggatgtgaaacagtctgtcatcaagcttatgtttctaactactataccatactgccttgttaactcttacttaactctttagttttgtacctctcagtttgtttaatatctctttattgttgtgttatggcrtagaatattaatgtgagcagaatacagttatgtaaatttactgactgggttctagataactagtttaacaatatactgactctctactatttgaaaaacctgcttgagatactacaattttatcaaatttaaagacataagtaaaaatattaacatcttttaatatttcattaagcatatgtgttcaagcacatgccttcctggcaaatctatcttgttttagaattagtgattggcatatttatataagactcattttatacttttaccaatgtctctcttgtaactcttacccagaattttcagattttttttctgcaaagtctctattttataatctagacagagttataggc

SEQ ID NO: 403007 - DNA, 564 bp, Homo sapiens
tactacacgcaagccttcctccaaatctgtattactcccagtattcagaaaccattatgaaaaagatcccagattctgaaaaaggcttccctctcagatcctggtggctgagttaaaatgagcaagcctgaaggcactccaagaatgatcttcttatctggttctagatgaacagtgatcaccaacttgggggcaagacacctacatgctatttgtaaaggacataccctcctgacccagttccttccttactgctactgcccaaggagttctcattcaaacaacctgggccctgggctttctatgtcatttttctgcaattttcttttccagcccctctctcccatgccctaaaccctgtacataattcaagttcataaatgaaattccctgagaggaagggaggtgatttytatgcacagcctctatacaagaatttgaggtgtacactcttggttgtcagccacaggtctgaagcatgaaacagcatctgtgtgagggacctcccatcctcatttcctctgtgacaactcacgtgataaggtcagactgcagtgccccaac

SEQ ID NO: 403008 - DNA, 477 bp, Homo sapiens
tgacacccaggaaaatcacaaatgggagaaagagctccagaccttgtaaaggccacactaggaaagagaaggcttcaggacccgagcagagctccccacacaccagcctatggacagtatctgttcagtatggagccagcttatcattggtcctcagaaaaatgagagaaactaggacagatacagtgaatatgtgtatgtgtgtcaatgtgaggtggttccttactagagaaaaaccttctgtagtctgagattgtatgcctactacaatcttctttataagaaatcacggtagtatcaaaagatcattgccccaccctcaatgtctttaacatgtcaaagagttggcaaccrtctaaacctgttttggaatttcatgagacttgaagttctgagagctgtcatatacaagctgttccctaaaaccggcacacagacttccttcctcctggctaaaccaggagtcactacaggttt

SEQ ID NO: 403009 - DNA, 581 bp, Homo sapiens
cccaccgcaactcaccttgaatctgattttgaaacctgatctaggactcctgcttatccaccagattcactttgtaggtttctgtctctgttttcagtagggtatttyaccatattatgaaatatattttgtttatccctgcaattattcctttgaggtagcttatttgatagcaatgcactcccccttccaataaaaacaaataagccaaacaaaacaagccatctttctgagtatgcatttatctggggcttccaatgagatgttttaaataggttccacgctaccagtagttattaatcttaaaaaaatctacttttccttataaagaaggcatataaatcagtaagaccggcactatctccctaactaatcaatggacaaggatataaataaattttttaaaaaaggtaagaaatattcagctttacttggaatctaagaaaatcagttttaaaaccaaccaggtacaaatttgtttactagaaaattcagggagaatgaaaggatttagtatttcaaaatattatgcagcacacaagaactgaaagcacatgcttcttgaaggtcataataagagg

SEQ ID NO: 403010 - DNA, 581 bp, Homo sapiens
cccaccgcaactcaccttgaatctgattttgaaacctgatctaggactcctgcttatccaccagattcactttgtaggtttctgtctctgttttcagtagggtattttaccatattatgaaatatattttgtttatccctgcaattattcctttgaggtagcttatttgatagcaatgcactcccccttccaataaaaacaaataagccaaacaaaacaagccatctttctgagtatgcatttatctggggcttccaatgagatgttttaaataggttccacgctaccagtagttattaatcttaaaaaaatctacttttccttataaagaaggcatataaatcagtaagaccggcactatctccctaactaatcaatggacaaggatataaataaattttttaaaaaaggtaagaaatattcagctttacttgkaatctaagaaaatcagttttaaaaccaaccaggtacaaatttgtttactagaaaattcagggagaatgaaaggatttagtatttcaaaatattatgcagcacacaagaactgaaagcacatgcttcttgaaggtcataataagagg

SEQ ID NO: 403011 - DNA, 566 bp, Homo sapiens
atttttaaatcaattttataaatactgtgatggaatatgtaggcaaaatatgcataactaaacaacctcttttctttcattaaaatatttccatatctgcctatctatctaatgtatgttattttatctaaccctatgtggtaggtgttagtgraataattttatctttgagaaaaccaagccccaatcaaattagataatgtgcccaatcatccagtaagtgacaaagctagggcacaaatcagggcttgtgagtcaagccttgttctttccattgtgtaattgcctctccttttgtctattattctactagtgcaattaaaagcctacagcaacaccatgaatatcaccaaaagaaagacccctcacccccaggaaagatcttaaaggctaaaaggactctgtgggagataaacctgatgacaaaagtagagatctgagggggcaagacccagaagcacagctgattgtgggtatgttgagatacaggtgagaaagctttgtagagtctttgaaacacctctcagattctactattacagtctacacctaaggcagagccatta

SEQ ID NO: 403012 - DNA, 566 bp, Homo sapiens
atttttaaatcaattttataaatactgtgatggaatatgtaggcaaaatatgcataactaaacaacctcttttctttcattaaaatatttccatatctgcctatctatctaatgtatgttattttatctaaccctatgtggtaggtgttagtggaataattttatctttgagaaaaccaagccccaatcaaattagataatgtgcccaatcatccagtaagtgacaaagctagggcacaaatcagggcttgtgagtcaagccttgttctttccattgtgtaattgcctctccttttgtctattattctactagtgcaattaaaagcctacagcaacaccatgaatatcaccaaaagaaagacccctcacccccaggaaagatcttaaaggctaaaaggactctgtgggagataaacctgatgacaaaagtagagatctgagggggcaagacccagaagcacagctgaytgtgggtatgttgagatacaggtgagaaagctttgtagagtctttgaaacacctctcagattctactattacagtctacacctaaggcagagccatta

SEQ ID NO: 403013 - DNA, 417 bp, Homo sapiens
tatgagaaactatgtgaaaatgactttgtagaaatagtttatacagtcagaaaagttgaaagaaggtataattcccaaatctcagaaacgattactgttaatattttggtgtacctggtttcatgtatatagaaatacagataaactgtattacacaaatgggttcatgccaataattttaccctgtgaattagtgtaggtgtctattagtattttaaagcaaggattccattatgttcatttaccataggatttaactggttcctattaggtgggtaattaggtggttcccaattcttaggttaagaaaattttgaaacaaaatctaaagtaatctggtgwttactttatttcagcttgtcactgatctttctgttacatccaggttggagtaggaagaggtgatctgtgacaggt

SEQ ID NO: 403014 - DNA, 592 bp, Homo sapiens
gtctggtagtgactccatataactcatcacccagttatataacagcttttaactttttgccataatcgtttcattgtcttctctctttatgttttttcatcatcctctcaactatcctatgatttcaccctaataccaaacgctttacctactcccaggactgatatttcagcaagctggaaagaaaggaaagtacaacagggctctgggggcctggtcccaagctggagtgaagaaatgtgccctctcaaaagtatagcccctctaaaaccaaagccccaggcaagcyagagataaagccttcctccaaaacagtattatggggcgttttcagaggctggcaggttagaaaacagccgctgcttgctcactacaagctgtgcttctccctactgcccagtctaagaagcagagtcctggtgttacaatgggttgcccaaagtgactgcagggtaagcttcaggatgattgttgagcaaggtgagctttctcctgtgagcaaggaattagccacagactgaacactgtgggggacctgtctttctggctcactcctcacccctcctcttttacagttgagagaaccaaggaa

SEQ ID NO: 403015 - DNA, 623 bp, Homo sapiens
ttgactgtgtatttattgaatcctgggtcactggggcaagcttgaactgctcatcctgtcctgcccaacacacttttacagctgccacaggatgctctaggaacagctctcccacaatgtcgccccagattcaccctgtctttcatctcttcactcttttttttttttttttttttgagacagaatctcactctattgcccaggctggagtgcaatggcrtgatctcagctcactgcaacctccacctcccaggttcaagcgattctcctgcctcagcctccctcagtagctgggactacaggcacacaccaccacgcctggctaatttttgtatttttagtagagacggggtttcactatgttggccaggctggtctcgaactcctaaccttgtgatctgcccgcctcagccgtccaaagtgctgggattacaggcgtgagccaccactcctggcctatctcttcactcttatactcacctccagtgatcatgcctgcactcaaaatagaaatgtggtcggttgtaatgcaatgtttctaccctgcgcatgcactgcctgtatgatttttccctcacatgtctttctaccatttgttaattttttcttggtatgccttttgt

SEQ ID NO: 403016 - DNA, 623 bp, Homo sapiens
ttgactgtgtatttattgaatcctgggtcactggggcaagcttgaactgctcatcctgtcctgcccaacacacttttacagctgccacaggatgctctaggaacagctctcccacaatgtcgccccagattcaccctgtctttcatctcttcactcttttttttttttttttttttgagacagaatctcactctattgcccaggctggagtgcaatggcatgatctcagctcactgcaacctccacctcccaggttcaagcgattctcctgcctcagcctccctsagtagctgggactacaggcacacaccaccacgcctggctaatttttgtatttttagtagagacggggtttcactatgttggccaggctggtctcgaactcctaaccttgtgatctgcccgcctcagccgtccaaagtgctgggattacaggcgtgagccaccactcctggcctatctcttcactcttatactcacctccagtgatcatgcctgcactcaaaatagaaatgtggtcggttgtaatgcaatgtttctaccctgcgcatgcactgcctgtatgatttttccctcacatgtctttctaccatttgttaattttttcttggtatgccttttgt

SEQ ID NO: 403017 - DNA, 608 bp, Homo sapiens
gtggcatatacattgaataattttcatatgatgaaccacctgtgtattcttaagataaatctcacttggttgtggtgtatagtccatttaataggttactggacttggttttctagtatttggaagatgtctgcatctgtaaccrtaagggtttgttgtagtttttcttgtggtatctttgtctgaaattggtatcaggatattgctgatatattgagatacaattgtttatagcattctcttaaaatcctttttatttgtgtaaagtgggtggtggtttctcccatttcgtatctgatttcagtaacttctgccctcatcctcattctcctatagtcagtctagctctaggcttgttaattttgttggtatttttatagaactgtcttttgattttgttgattttctgtactatttttctgtttccaatttcatttatttctgctctaatctttgtctgtccttcggctagccctcggtttagtttgttcctctttttttctggttccttaaggtgtacagttaggttattgctatggtctgaatgttgttgactctcaaaattcatatattggaatctaatatccaatgtaagagtattaagaggt

SEQ ID NO: 403018 - DNA, 603 bp, Homo sapiens
cctttttcagtttccatatctgaaaagtcaccatagcatctaccatttacaaaagcttaaaaattcactgattactacagcaactttcatgggaaaacttgttgattacttccatgaagtagctaccaattatcaatcccatttacaaaaaaggaataagtacaaataagacagttgagtgctttttggcaacatcagggatagaaacaggaaatacaacccaatttttaaaatttcattagaaagtgtttttaaatgatcatggctatcaacaattkatttcaagtatttctttttattacttattatttacttgtatttattttatttactttaaaaaaatagagatggggtctcactgttacccaggctggtctcaaactcctgagctcaagggatcctcccatctcggcctcccaaagtgctggggttgcaggtgagagccaccatgcccagcctcaagtatttcttgtaatctcttagagtaggtgctataatcaccagatggattaataggaaggatagatgactggaatagccgcaggcggggctgctggctaaggtgtgggttgtttccactctatgaaatcctgcatagtacta

SEQ ID NO: 403019 - DNA, 582 bp, Homo sapiens
tagtgctgaggttgataaaccctgctttaaaattatgctgtccttaaacagttcagatactcacacaactttgattttgatttctagttggttgcaaatcaataataaaaatcattatagctaatgtttacataatcctttaaagtgtatagctgaacttttgcatacattatctcattagctgagctgtaagtttagttttcttcctactctaccacaaatgtctccttaatcataagatttatgtaattattattgacatttattagcacatattttacacwtggattgtaattttaatttctcaagattttcgatggaactattaaaatacttctgtgagttaaattttattactaggtcatatttcaactccattcttatggttccttcactagtatgggtataaccctctagaacttgttgtggggaggtctgatgtgtatatgttttctttctcttatgattacctgaatttatagccccatcaactttcttctctcccgcatccccatccagatcccacatactctcacctctgtctagtaagggcaaaataatttagtctctttcctctgctta

SEQ ID NO: 403020 - DNA, 409 bp, Homo sapiens
cagatcccacatactctcacctctgtctagtaagggcaaaataatttagtctctttcctctgcttatgcaattctcacttttataacattctctaaaatattctatgtatagactgatttctagtaagacctaggaatccatattaagtcataggaaggaatttttttctacyaagttttaatgaaactagtaaggataataagaaaaataaatcaccagggtacaccccatttgtttgaagtgttaagcaccaaacagtcagtgcttaataaagaaaattaatattttcagaattacaaaggaaaatgctaaagcccttagtcatgaaagaaacattaagttttcagtaagataagtggaaaggaaacagccatgaattgtgagaatttatcctgaaaggtcaccata

SEQ ID NO: 403021 - DNA, 409 bp, Homo sapiens
cagatcccacatactctcacctctgtctagtaagggcaaaataatttagtctctttcctctgcttatgcaattctcacttttataacattctctaaaatattctatgtatagactgatttctagtaagacctaggaatccatattaagtcataggaaggaatttttttctaccaagttttaatgaaactagtaaggataataagaaaaataaatcaccagggtacaccccatttgtttgaagtgttaagcaccaaacagtcagtgcttaataaagaaaatyaatattttcagaattacaaaggaaaatgctaaagcccttagtcatgaaagaaacattaagttttcagtaagataagtggaaaggaaacagccatgaattgtgagaatttatcctgaaaggtcaccata

SEQ ID NO: 403022 - DNA, 564 bp, Homo sapiens
aaagagaattacttgccctaaaacaccataacatgtcataattccaccttaagcaatacagttatgaaaggggctatttttagctttcccatggttgttatggcaaccacctcctggctcyagctgtacacaatgtttataattccagggaagtgaaaagagcaactttcctctataatgtaattatgtactttctacatctatggtaacaataccttagtttgattataggtatttgtttagcgatagtcagttggccctaggctatagttctagagggtttggaaaatctcccacatcagaggtggaagcagtggaaggaaaacaacaacaaaggatcatgataaaggactctgctgttactcaatggagatactaatgctatggaaaccagccataggaaataagccatttggggatggtgtaaagagcaggctataatgaaaccacttataatatgtaaggtaagaatgctttcaatatgatctgctaacttggaatttttctctcctctttgggcatacagctaatatttctggccttctgtgcagtagttgtagcctg

SEQ ID NO: 403023 - DNA, 556 bp, Homo sapiens
gaagcagttatccatagatctactctttttcccataactggtatcagccacaacaataagaacaataataataataataatagcagcagctaatactcactgaaggcttactatgtaccaggcaatctcatgcgttatctcattktattaacacaaccaccttataagaaagacattgttattaatttaattttactgataagaaaaccagggatcagagagttacttaactgtaatttgcttaaaattaacaactactttgaatgaaagagccaacaatcaaagccatgtctgtcaccaaaagccctgctgcagaaactgtgggagttgagagaaggctgtcctgaaggctgagagaaagctgactcctattctgatgcatgagtaacaaaaatgaagccagtacagttggtctttcatatctgtgggttccacatccaccatggatcaaaaatactcaaaccatggatcaaaaatactcaaaaaatatataaaaattacaaataacaataccacaataaaaaacagtataacaactatttacatagcacttaca

SEQ ID NO: 403024 - DNA, 556 bp, Homo sapiens
gaagcagttatccatagatctactctttttcccataactggtatcagccacaacaataagaacaataataataataataatagcagcagctaatactcactgaaggcttactatgtaccaggcaatctcatgcgttatctcattgtattaacacaaccaccttataagaaagacattgttattaatttaattttactgataagaaaaccagggatcagagagttacttaactgtaatttgcttaaaattaacaactactttgaatgaaagagccaacartcaaagccatgtctgtcaccaaaagccctgctgcagaaactgtgggagttgagagaaggctgtcctgaaggctgagagaaagctgactcctattctgatgcatgagtaacaaaaatgaagccagtacagttggtctttcatatctgtgggttccacatccaccatggatcaaaaatactcaaaccatggatcaaaaatactcaaaaaatatataaaaattacaaataacaataccacaataaaaaacagtataacaactatttacatagcacttaca

SEQ ID NO: 403025 - DNA, 646 bp, Homo sapiens
taattttttgttcctttcgtccatcctttttgccatcttcttccctcccttcgtatgtaacatggtataaattggactactttgatcttgtaggagaattaagttgcactgcctgactgaaccacttggtggtgccacaagttaactcttcatgcagctaaaccatagagctagtctagagaacccccagatcaaggggtggggacaagagatgcatactcaggaattccaagttgggttatgtttttccagctaagaaatgtaaattcttttctagaaagtatatttatttccacgatggtttaaaatcaaggcagttaacatggcctagtggagggttcaaagacgaaacagcgtttgagctaagtcttaaatkaagtgcaagaatttccctaattgtaaacaaataagggaacagcaggagccaagaaaaggagccacagaagagcatgatgtttttcagggaactgcatagctcaggatggttcaaatgttggaaatgtgtgaagagtggcaggagggaggcaaaacggtacagaaaactgaatccaatcactgggcagtatccatttctagaacacaagctccatgaaggcttggtcatattcatatattttaatgttttagaacagtacttggtacatag

SEQ ID NO: 403026 - DNA, 380 bp, Homo sapiens
aaaatgaccagaacatcagatgacaatgacctgggaaaatgaagacccagaatacactagggtctagtgtatttgcacagtatgagatttcakacatggtgtcacatctgcctttaccgagcattaaattcaaccgtgtagccagcacacactcttaaggcagaagctggggctcctatgaagaatattaggaaaactccatttcctgaaatctgtgtattcatctacgatttcaggatctggtatacaaaaacttaaataattatacacctatattatagttttggagtgcgtattactttacttgcagaccacgaaattagcttttccatataaaggcccttgattatctacttggcagaaacccttagactttctag

SEQ ID NO: 403027 - DNA, 380 bp, Homo sapiens
aaaatgaccagaacatcagatgacaatgacctgggaaaatgaagacccagaatacactagggtctagtgtatttgcacagtatgagatttcatacatggtgtcacatctgcctttaccgagcattaaattcaaccgtgtagccagcacacactcttaaggcagaagctggggctcctatgaagaatattaggaaaactccatttcctgaaatctgtgtattcatctacgatttcaggatctggtatacaaaaacttaaataattatacacctatattatagttttggagtgygtattactttacttgcagaccacgaaattagcttttccatataaaggcccttgattatctacttggcagaaacccttagactttctag

SEQ ID NO: 403028 - DNA, 546 bp, Homo sapiens
atgctcccacggctccctgaagatgacctgagtggagcttccgggcagagcctggcttccacgtccccttgagttctccagagtctgtctggggttgtgtcacagggcgtagtgtgagtgaggtgcaggctgaccagcagaaacatggtcaaagggcatgggctgctatgaattttctgcctctagactcaccacagctgcagtgggtggaaacagacctggaagagatcaccagtgyccccgggcgctctgggaggcagggcctttcatcttcttcaacctgggcacacctgagcatttttatcttcatgtacaaggaccatcgttgctctgtgatcataaccctccgcatgtctatcttctgagtcacggcggcagtctggaccagctgctcgctattgctaggccggagcacagctgtcctcccaggagctcccttgtcctccgccggcttcaggatccctgtatcccgtgtctcctttttcctggcactacttcttcatctgggggagcacatcatctgatagtttcctgagaaagggcgaa

SEQ ID NO: 403029 - DNA, 611 bp, Homo sapiens
ttaacatgtacctttcaatccttttaatttccttttatcaaattcctgtcatttaaaaaattcacataaaacagcaccatttaaaattgcttctttcaacgcttaagaataccagcaacaattagaaagcaactacgtatatttttgcctgaagaatatattttatgtcagaaaatggcctttttgcatgtattttttccgttagcaaataaaaaactcccgcctcttgtccttaacatcaaatattgctcatgattactgtttaatactgtgtttcttccagtctgcactaaagccacacggtaaagccgcttttgcataaactaggtcagtcatattcrtctccaattaggggtcagggttttttgaaccattgcttttaacttcagataaagtggcagacaaaatagtttcttgcccaatggaaagcacagaaggtagaatttgctacttctacttattttctctgggtggctagagagagttaattatcaggcttaaacaaaataaccatgatcaaggagcttatttaggaaccaggttgagcatcttgatgatatactgtttttgtttttaattttaaggtaatgtttgtaatagtttttaggtat

SEQ ID NO: 403030 - DNA, 509 bp, Homo sapiens
ttccacttttgcatcttcctcattttcctcttgctactgacatgtaagaagggcctttcaccttccaccatgaatctgaggcctctgcagccatgtggaactgtaagtccaattaaacctcttttcgttaccagtttcaggtatgtcttcaacagcaatgtgaaaatggcctaatacaggtgggaatcacagtttgatatgtgatttgggtggggacasagccaaaccatatcaaaatcttataattgacttctctctctgctttgatcagagttgagtttgtaacccaactctaacaattatgcacaatacttttttatattaaatacaacttctttgtagtaaatttacagggactttctttcccactgtacctttattttttttactttgcgttgattcattttttttctcctgtgacttatgcaagtacttttatgattatttatcaggttaagtctccagtagtggattattgtgtaaatgtatataaatattctagtatcttt

SEQ ID NO: 403031 - DNA, 608 bp, Homo sapiens
gtatactgtttgtggcatagtaatctccactgttacagaagataaatttaagtcagatgtattgaaatctgagtgaatgtcaccttacagacttttccaacagaatgtctatgctggaatgcccgatatgctctctgtcttggtggttggctcccaaagtctacttctttgagttgcactttttgtagacacttacatctagacttttcacttacagccctcaatctcagtctcagtttcttcaggtcgtattgtttagtatcttatactttcagagatccaaactttttccttcagttcactccatatcatcctactcctctcaatgcctctcatttttcagaaaatgctgaatgtattatatagctacagtatatggtcatatactaygtactattactatatctatggtagtcaatactgtgtggtattggctaagggctaaacacatagattaaaacaatagaccagctaatccagaaatagattcgtacaaatatacccaacttttctgacaaaagatgtacatgcaattcaatcaaggaaagatattctttcaaaatgtgttgaaactattggacatctatagtaaaaaaaaaaaaaaaacc

SEQ ID NO: 403032 - DNA, 490 bp, Homo sapiens
cctttctagtagtcctacttttcttcaaaatggctcaatatattatcacatatggtatctcaattgcactctcaattttactgttacagatctaacagatatgaggaagatcttattcattgtttaccataaggaaaatcgtaacaaaagattttgagcaacacaatacaagttttaaggcatttggataatcttatttattatattcaactyctcttgactcagtactaatgtataggtttgtattgtgtttttataatcaaaaagcaaactatttttccaaaatgtattccacataatctaataaaatgaacatgtgcctaattacagaaaccaccaatttgaaaccatgacattcctgggcattcacggtgattctgccttgtgattttagttctttccttccttgagaagtgggatttctgggctgtccaggaattagagtgtctgtattctacatgataattagcatgcccaattcttaatcact

SEQ ID NO: 403033 - DNA, 615 bp, Homo sapiens
gttgctataattaaggcaagataagaaattagtttcaaaagacttatttttttaaaaaaagaagagaaacaacaacaaataaaaaacagagccacctccaagtttaacccagttcttatttcctttgaattttcttccaaaattatatattatgccatcagagcctagtggtgatgcatgcattgtggacaactgccttcaaacatatcccaggatgccatcttagcacagcagtagtataaatgacctaggaaagacacactatacagtgccagtctatgggctttctaaagcaggaagagtggtgagcattcgttattgattacatttatttaatactcccatggtgtcaaaatttrgattcaggaagcaataaagcgaatgaaactggaaagcctaagcttgaaaatccaagtagatccacaaggtaaggcaaaagccaggtgtcagaatgtggaataaggaaaggagtgaactatttcagataggagcgctcagagataagtgaccaaatgagggtcagaggacagatgagcgtactcagatgacatatgcagaatgaccatgagtcagcagacaaaacacacagagatctaagcaactgtctactccagc

SEQ ID NO: 403034 - DNA, 649 bp, Homo sapiens
cccttacaattaagaaggttatatyttaattgtaaacatggctcttttccaaatttctgtcaatattttctagcatctcatgtccagaactggacctcatgattatttttaaattattctaaatacaaggatagagttttgtttcttttgtttttgtcttctaagcatatttgagtttataatatttaaattttaaactttctgtaattttgacttcctcaatatttttaatatttatatcatatttcaccaattttatgattgcctaaaatattttctataaataataagattatcagtattttcaaggttgagtaaataggctaattatatatctttatatttgtattgctaaggtctggttttatggctcgtcaaaattcagtattaagagatagatgacactcaggaaaaaaaacagataaaaataagaacaaaatagtaattattgatgactttaaattgtgttcaactatgtgtgttctatttaggtaaatagcaattattgatataataccacatccacttagtaattaatattttttcttttggttttggccacataggaaattttacaaaccatggaaacagaactctcaagtttgcacttaaagtaattaatctgcaactcatatccatattaaaatga

SEQ ID NO: 403035 - DNA, 649 bp, Homo sapiens
cccttacaattaagaaggttatatcttaattgtaaacatggctcttttccaaatttctgtcaatattttctagcatctcatgtccagaactggacctcatgattatttttaaattattctaaatacaaggatagagttttgtttcttttgtttttgtcttctaagcatatttgagtttataatatttaaattttaaactttctgtaattttgacttcctcaatatttttaatatttatatcatatttcaccawttttatgattgcctaaaatattttctataaataataagattatcagtattttcaaggttgagtaaataggctaattatatatctttatatttgtattgctaaggtctggttttatggctcgtcaaaattcagtattaagagatagatgacactcaggaaaaaaaacagataaaaataagaacaaaatagtaattattgatgactttaaattgtgttcaactatgtgtgttctatttaggtaaatagcaattattgatataataccacatccacttagtaattaatattttttcttttggttttggccacataggaaattttacaaaccatggaaacagaactctcaagtttgcacttaaagtaattaatctgcaactcatatccatattaaaatga

SEQ ID NO: 403036 - DNA, 552 bp, Homo sapiens
tgcacttaaagtaattaatctgcaactcatatccatattaaaatgagtctgatattatygacccacttcccctgagccagctttcccctttatcttgttcagtctggcttcctccctaaataaaatacttaaaccacagttactaaggtctttaaatatcttacataatgtctctaaaatctatccctgtgtcatgtacatattccagtggtttacactctactgttgcctaagtcctgccactttaataagttaatccccagaatccagaacatatacatacccattcacacacattatgcatttttatcatattttctgggctatgaggtcctaatattgaggatatttcagctgcaagaaaagtctagcttaaatatgatgtaattaactagctcatgtaatgaagtacaagtgtagggtagttctctaggttagttgattgagaaactcaataatttcctcaagtgtccagcctcttgttattacttatctctgcaaaccacagccacatataagactggttctcttaatggtcttaaagtatctctg

SEQ ID NO: 403037 - DNA, 497 bp, Homo sapiens
aatctatttaaacattgaattaaaactaaaatgccataaaaactatagttgtacaatggaatctaaatattagtctaataatataaaatcaaatttataatgtaaaaattggatgataaggcaaaataagaatgctgattacatcataacaagaactacattgaaaactaaatcttgtggtttttgaaacatatatcagaaaaggactggggatacaggtgtccattcaaatgccagttctatcatttgccagcagtgtggccacaggtaaattatttactatcttaatgattttcataatcgctttttaatcttgcatgatactttgaaaaatactagatattacagtaaaggaacatttattacatgtttaacatttgtttagttttacttyactttctcatttttaaaaaatgtaatacttttcaacagaaatattctagtttctctaaacacatatgtcttcatttgcaagaacagaaagctgattagttaat

SEQ ID NO: 403038 - DNA, 603 bp, Homo sapiens
gggtaatgagatgcttctggctttcttcttcttgacgaggattgctttggctatgcaggcccttttttggttccatatgaattacaggatagttgctttttattctgtgaaaaattaccttggcaatttaatagaaaaagcatttcatctataaattgttttgtgctgtgtattagtacattttcactctgccataaagaatacctaagactgggtaatttatgaaggaaagagctttaattgactcacagttcctcatggctggggaggccttgggaaacttacaatcatggctgaaggggaagcacacaccttcttcacaaggcagccggggagagagagaacaaagggaaaagagccacttataaaaccatcagatctcatgagaactcactatcatgagaacagcttgggggaaaccaccctcatgatccaatcacctcccaccagatcgctccctcaacacatgggaattacaattccagrtgagatttgggtggggagacaaagccaaaccatatcaggcaatatggctattttaacaatattgattcttccaatccatgagcatggaatgttattctatttatttgtattgcctgt

SEQ ID NO: 403039 - DNA, 543 bp, Homo sapiens
  misc_feature (1)...(543): n = A,T,C or G
ataattttcattctaacaagacaatgatataaaagataaaaactgacatgtgaggcygggcgcggtggctcacacctgtaatcccagcactttgggaggctgagatgggtggatcacgaggtcaggagatcgagaccatcctggctaacaaggtgaaaccccatctctactaaaaatacaaaaaattagctgagcgtgttgcggggcgcctgaagtcccagctattagggaggctgaggcaggagaatggcgtgaacccgggaggcggacttgcagtgagtcgagatcgtgccactacactccggcctggtagacagagcgagactctgtctcaaaaaaaaaaaatactgacgtgatcagtgtagaaagtttaaaagttttcagcaataatataaaagatggaaaattttaaaatttttgtatgtgctttaaatttttttctgatattcaacattttctattaaagtcaaaatgcattatacaaattatgattaattaatataaagattnnnnnnnnnnnnnnnnnnnnnnnnnnnnnnnnnn

SEQ ID NO: 403040 - DNA, 543 bp, Homo sapiens
  misc_feature (1)...(543): n = A,T,C or G
ataattttcattctaacaagacaatgatataaaagataaaaactgacatgtgaggccgggcgcggtggctcacacctgtaatcccagcactttgggaggctgagatgggtggatcacgaggtcaggagatcgagaccatcctggctaacaaggtgaaaccccatctctactaaaaatacaaaaaattagctgagcgtgttgsggggcgcctgaagtcccagctattagggaggctgaggcaggagaatggcgtgaacccgggaggcggacttgcagtgagtcgagatcgtgccactacactccggcctggtagacagagcgagactctgtctcaaaaaaaaaaaatactgacgtgatcagtgtagaaagtttaaaagttttcagcaataatataaaagatggaaaattttaaaatttttgtatgtgctttaaatttttttctgatattcaacattttctattaaagtcaaaatgcattatacaaattatgattaattaatataaagattnnnnnnnnnnnnnnnnnnnnnnnnnnnnnnnnnn

SEQ ID NO: 403041 - DNA, 542 bp, Homo sapiens
cactatgatggagataaaaagatgatgaaatttctccatttttcttttcttttttcttctgttttttctcacytcagccctgaagcaatcaccaacagtggtggcaccaacaatggcagagataggagccaacaagagcctaattttcttatagagagtaatctttcttataagaaaaactgtgatttgaaatggataaatcaaatcttcattgctttttatttctgtgtatccttgtatcgcatagtgcaagatgcaggcacaatcatgtgaaatgtatgatagactagggcaaataaaatcccagctttctgacaagggcaaagtaaaggaaaggattgcagaaccataaagcagaagaaggataaaagaggaaaactttcatgaaagtgaccccataagttgtctttgaaatttcagcctcaccctcaagctgcatatacatggatctgatcttaacagcattccatagactttgagaagtaaacaatggaatagactaccactcaggtccccaaatggccagtgagtattataaccat

SEQ ID NO: 403042 - DNA, 542 bp, Homo sapiens
cactatgatggagataaaaagatgatgaaatttctccatttttcttttcttttttcttctgttttttctcacctcagccctgaagcaatcaccaacagtggtgkcaccaacaatggcagagataggagccaacaagagcctaattttcttatagagagtaatctttcttataagaaaaactgtgatttgaaatggataaatcaaatcttcattgctttttatttctgtgtatccttgtatcgcatagtgcaagatgcaggcacaatcatgtgaaatgtatgatagactagggcaaataaaatcccagctttctgacaagggcaaagtaaaggaaaggattgcagaaccataaagcagaagaaggataaaagaggaaaactttcatgaaagtgaccccataagttgtctttgaaatttcagcctcaccctcaagctgcatatacatggatctgatcttaacagcattccatagactttgagaagtaaacaatggaatagactaccactcaggtccccaaatggccagtgagtattataaccat

SEQ ID NO: 403043 - DNA, 542 bp, Homo sapiens
cactatgatggagataaaaagatgatgaaatttctccatttttcttttcttttttcttctgttttttctcacctcagccctgaagcaatcaccaacagtggtggcaccaacaatggcagagataggagccaacaagagcctaattttcttatagagagtaatctttcttataagaaaaactgtgatttgaaatggataaatcaaatcttcattgctttttatttctgtgtatccttgtatcgcatagtgcaagatgcaggcacaatcatgtgaaatgtatgatagactagggcaaataaaatcccagctttctgacaagggcaaagtaaaggaaaggattgcagaaccataaagcagaagaaggataaaagaggaaaackttcatgaaagtgaccccataagttgtctttgaaatttcagcctcaccctcaagctgcatatacatggatctgatcttaacagcattccatagactttgagaagtaaacaatggaatagactaccactcaggtccccaaatggccagtgagtattataaccat

SEQ ID NO: 403044 - DNA, 605 bp, Homo sapiens
taccgttgaaagagatacaataagaaggcaatgtgtatatagttctagcattaaaactacctactttcatctaaactcatataccttgtcttactccaactggaacagacgactctccacgcttctatttaaggtccgtctctccatatatgcagtaaatgacatttcctctgactcacttatgaatattgctcctacacttgatccttttccatctttgagaattgatttcctcccccctgcttaattttttgattctctgtgtaaaaattctgcaatgtcttttttttgtaattcaacttttattttagattcatggggtacatgtacaggtttgttacatgggtatattgtgtgatgctgagktttggggtacagttcatgccatcacccaggtactgagcatagtactcaatggttagtttttcagcccttctttccctctttccctctctcccctctttagtagtccccagtgtctattgttgccatctttatggctatgagtgtccaatgtttagctcccaattataagtgagaacatgtggtatttgtttttctgttcctgtgttaattcgcttgcaatgtcttctattttaaaaaat

SEQ ID NO: 403045 - DNA, 539 bp, Homo sapiens
catggagctgtgttctcagtaactagaagtccaagaaaaaaaaaaaagactggagccttcttaccatcactcttggtgaccctcttgcagaagttttgtttcctaactctgcaaaattagtctctgccaagttagttaacttggttccccaaatgccaagttagttaactggttcccaaaatgaaaatgtttttccagaagctgttattaccatctggctaccatcagcaagccagtcagaaatgaaagaagctagttttctcagtggattaatacataatttctttaatgagctgagagtgatatcatacaattgaggcaagaggaatatatctcccaccagggactttctagggggtctcttggtattacatcatccagtgataactgtgattggacaattgtagcakccaccatcccctaaatggtagggcaactgagatcttagactccttgtggatgaaaggctgggggaccccattaggcaagcaaccaagactagttaaagtcttggtcaagaaaaatctcaagttggcaat

SEQ ID NO: 403046 - DNA, 607 bp, Homo sapiens
atatttaaaccaatcaaaataagcacttttataaaagcaacgtgttgaaatcaaggtccccagctggttcacactcagcaaccaagaagaatcaggtacttgatcatttctacgtgtgactggaatgaatcctttcctttttttttttttttttttttttttttgagacagagtctcactctgtcactcaggctggagtacagtggtgcgatctgagctcactgcaacctccacctccagggttcaagctattctcctgcctcagccttccaagtagctgggattacaggcatytgccaccacatcctgtttttgtatttttagtagagacgaggtttcaccatgctggccaggctggtcttgaactcctgacctcagatgatccacccatctcggcctcccaaagtgctgagattacaggtgtgagccaccacacccagcccaaccatacctttttgataagaaccaaatgtttcatttacaattatccaagattcacaaagtttgttttaattgagagattctgctaaattcaaaataagaaaagtggtcacaattatgatcagaccacagaagttccacacgtctgcccagtattttaagcact

SEQ ID NO: 403047 - DNA, 622 bp, Homo sapiens
gaagatggacagggaaaggggaggaaatacattactggaacacaaggagagcaggggtcctggaggaaggcacctagacagcagctgaggccactggtaaagcacacgctgccagaaccatgtggcctctgccctgtgaatgtggccagagccttcattaagagaagggagcagaactcagccaagggagcctgaacaatgcattctatagaggccatcttactggacatggagcagggtagggtggggcacagcatgcacctgagggggcaaaattaaatagcccatacagtactagtaacttcacagggtaatactaaatccatatgcatatataygtgtgtgcgtgtgtgtatatatatatatacatgcatatatatatatatgcatatataaacagcacagagtcagacacatataatgatgttgattttgtcattttgggacaagataccaatgtatgagttcttcagtgactttagaacaacaaaacaacccaaccacagcatttgatggtaagagaaatctaatcagattatgccacaaaacaagtaagatgtgtttcttattcccattattttcagcaaagctccactcagtactgcattccctagcaaaggct

SEQ ID NO: 403048 - DNA, 622 bp, Homo sapiens
gaagatggacagggaaaggggaggaaatacattactggaacacaaggagagcaggggtcctggaggaaggcacctagacagcagctgaggccactggtaaagcacacgctgccagaaccatgtggcctctgccctgtgaatgtggccagagccttcattaagagaagggagcagaactcagccaagggagcctgaacaatgcattctatagaggccatcttactggacatggagcagggtagggtggggcacagcatgcacctgagggggcaaaattaaatagcccatacagtactagtaacttcacagggtaatactaaatccatatgcatatatatgtgtgtgcgtgtgtgtatatatatatatayatgcatatatatatatatgcatatataaacagcacagagtcagacacatataatgatgttgattttgtcattttgggacaagataccaatgtatgagttcttcagtgactttagaacaacaaaacaacccaaccacagcatttgatggtaagagaaatctaatcagattatgccacaaaacaagtaagatgtgtttcttattcccattattttcagcaaagctccactcagtactgcattccctagcaaaggct

SEQ ID NO: 403049 - DNA, 569 bp, Homo sapiens
gataatgatttagggccaagagatggtgagtaactttgcagaaagatcaattcacaaaaaaagtaatttgatcctgaagacctgtgtattgcagagtttatgggaaacattctgktgttactgaaggacaaaaagactgggggcaagaaaacctgattctttcttacaagttttctccaaggtgtgtgatattgaacaaatcagttaacaatcctggacctcagttccttctgtataaaactgaacttttattgattgttccccctgactctcagacttatgcaataataatctaatattacagataacaaacgttggaaagtataaagctgttgttattactatttattaatatcactgttattattgttatattattgttatatcttaaatgagtttacattaaacaaaacattatgcagagattgtgattaatatagggccaatatcagctcttatggctgcattgagaaaacacattgattattttaaaatacaaccaatgagcaatttttccaggcataagttattttgaaaattataaatgcatatattagttacgataaaca

SEQ ID NO: 403050 - DNA, 569 bp, Homo sapiens
gataatgatttagggccaagagatggtgagtaactttgcagaaagatcaattcacaaaaaaagtaatttgatcctgaagacctgtgtattgcagagtttatgggaaacattctggtgttactgaaggacaaaaagactgggggcaagaaaacctgattctttcttacaagttttctccaaggtgtgtgatattgaacaaatcarttaacaatcctggacctcagttccttctgtataaaactgaacttttattgattgttccccctgactctcagacttatgcaataataatctaatattacagataacaaacgttggaaagtataaagctgttgttattactatttattaatatcactgttattattgttatattattgttatatcttaaatgagtttacattaaacaaaacattatgcagagattgtgattaatatagggccaatatcagctcttatggctgcattgagaaaacacattgattattttaaaatacaaccaatgagcaatttttccaggcataagttattttgaaaattataaatgcatatattagttacgataaaca

SEQ ID NO: 403051 - DNA, 569 bp, Homo sapiens
gataatgatttagggccaagagatggtgagtaactttgcagaaagatcaattcacaaaaaaagtaatttgatcctgaagacctgtgtattgcagagtttatgggaaacattctggtgttactgaaggacaaaaagactgggggcaagaaaacctgattctttcttacaagttttctccaaggtgtgtgatattgaacaaatcagttaacaatcctggacctcagttcctyctgtataaaactgaacttttattgattgttccccctgactctcagacttatgcaataataatctaatattacagataacaaacgttggaaagtataaagctgttgttattactatttattaatatcactgttattattgttatattattgttatatcttaaatgagtttacattaaacaaaacattatgcagagattgtgattaatatagggccaatatcagctcttatggctgcattgagaaaacacattgattattttaaaatacaaccaatgagcaatttttccaggcataagttattttgaaaattataaatgcatatattagttacgataaaca

SEQ ID NO: 403052 - DNA, 569 bp, Homo sapiens
gataatgatttagggccaagagatggtgagtaactttgcagaaagatcaattcacaaaaaaagtaatttgatcctgaagacctgtgtattgcagagtttatgggaaacattctggtgttactgaaggacaaaaagactgggggcaagaaaacctgattctttcttacaagttttctccaaggtgtgtgatattgaacaaatcagttaacaatcctggacctcagttccttctgtataaaactgaacttttattgattgttccccctgactctcagacttatgcaataataatctaatattacagataacaaacgttggaaagtataaagctgttgttattactatttattaatatcactgttattattgttatattattgttatatcttaaatgagtttacattaaacaaaacattatgcagagattgygattaatatagggccaatatcagctcttatggctgcattgagaaaacacattgattattttaaaatacaaccaatgagcaatttttccaggcataagttattttgaaaattataaatgcatatattagttacgataaaca

SEQ ID NO: 403053 - DNA, 577 bp, Homo sapiens
gctctcccgtgtgcctctctcttacaggcactcaaaggcagggaagacatgaccttttcgtatacctacctgacatacctgtcttgtatgtgctgttcatttattctcactaaaactcttacaggtgattgctgtcactcgcattttgcagagtggcactgtgaagcccatcaaggtggggcaccacccagggtcaccagacctgcagtgggagaggcagaacaggagcatgagtctctgggagaccagagttctttccactgtgccggtggactccctggcatgcattcctcttgcaaattccacctgaaacaatttgtgagtccgttctggtcaagaaacaagatctcatctcaccagaagacctcatagattratcttgggccttttctcccattctttgtttactgatcctaccattgagactgggctcaccttagttcctgggtcaggcagggagtcttccctgaaagcaatgcctgtcaactggagaccttgaaattccactgacttcatactaacaacaccctctcacacacatacccctggaaatgtatgctttgaccaaaacccccta

SEQ ID NO: 403054 - DNA, 535 bp, Homo sapiens
ctgattacttgctgaagataaacttatagcaggacctgtctgatgaaaacccaggattacggtaatgaaggatcatcgtggcagttctctgttagtctaaccagacattacctccatgctcctaacacatctacaaggatcagataatttcatgccttcttgcgcctatgtagggtgttctaaattataatataaaccacaataaagattaattttgcttttaatactaattactctttactattatcttatctagcaactgaacacagctctcatagttattgacttcaaatcccagatgtggcaattattaattktactcagaaattgtcaactaaaggaaaaaatgtatatcatttatctctaatgtgtcttatctctaaataaaatcaagtaattcagagatactggttcatttgtgtattataatacaagaagcaaatatatgtatatattttcttggctttatctgtgacaaaacttgcataagctgatatgacaatgaatttgcattctaacacaactcaaacacatt

SEQ ID NO: 403055 - DNA, 535 bp, Homo sapiens
ctgattacttgctgaagataaacttatagcaggacctgtctgatgaaaacccaggattacggtaatgaaggatcatcgtggcagttctctgttagtctaaccagacattacctccatgctcctaacacatctacaaggatcagataatttcatgccttcttgcgcctatgtagggtgttctaaattataatataaaccacaataaagattaattttgcttttaatactaattactctttactattatcttatctagcaactgaacacagctctcatagttattgacttcaaatcccagatgtggcaattattaattttactcagaaattgtcaactaaaggaaaaaatgtatatcatttatctctaatgtgtcttatctctaaataaaatcaagtaattcagagatactggttcatttgtgtattataatacaagaagcaaatatatgtatatattttcttggctttatctgtgacaaaacttgcataagctgatatgacaatgaatttrcattctaacacaactcaaacacatt

SEQ ID NO: 403056 - DNA, 535 bp, Homo sapiens
ctgattacttgctgaagataaacttatagcaggacctgtctgatgaaaacccaggattacggtaatgaaggatcatcgtggcagttctctgttagtctaaccagacattacctccatgctcctaacacatctacaaggatcagataatttcatgccttcttgcgcctatgtagggtgttctaaattataatataaaccacaataaagattaattttgcttttaatactaattactctttactattatcttatctagcaactgaacacagctctcatagttattgacttcaaatcccagatgtggcaattattaattttactcagaaattgtcaactaaaggaaaaaatgtatatcatttatctctaatgtgtcttatctctaaataaaatcaagtaattcagagatactggttcatttgtgtattataatacaagaagcaaatatatgtatatattttcttggctttatctgtgacaaaacttgcataagctgatatgacaatgaatttgyattctaacacaactcaaacacatt

SEQ ID NO: 403057 - DNA, 560 bp, Homo sapiens
atattgcactctgcaactcacattaggaaagtaatctgacatatatgataatatatataaggaaagtatgcgcatatatgagtattttatgtgactttgattacataattttagtcttttttaatctgacagcagaaaaatgcaatccaattattctctgaagataacactctacataggaaagatatcaataatcttgctttttgtaagaygatcctcattctcattaggtcaggttaaagttcaaaacccttaatgataaaaatgttcaacaaactagatatagaaggaagattcatcaacataataaagcttacatctgatgagtccacagccaacatgatgctcaatcttgaaaaattgaaagctttccctctatgatcaggaacaagataatgatgcccactctcaccatgtctattcaaaataatactggaagttctagccagagaaattaggcaagaaaaagaaataaaatgaatgcaaatgagaaaggaagaagtaaaattatctctgttgataattatctctgatgatatgatcctatatgtagaaaaccc

SEQ ID NO: 403058 - DNA, 576 bp, Homo sapiens
gtatatacacgattagtgtaacatactcatatttattcagggaacttacaatacgaattgtttttctgctggtatcttataaaaggtaaataacagctttgaaaacatttttaaggaaacatgagataaaatagaaatcttatgccagatgtaaagcacttctataattaaattgcaaacagtaaaaatgaattggaaataagtttacttctatttttgcctcacttctcttcaaattataattatttaacctcattttagatggtggcagactgtttttcataaattctgctccacaattcaatttgactacatggctatcataattaagtacagaattgttatttttttgtctccaggagtaaacaataggcgaaacagkaaacagtgttttactttatgtgtatctcattgtaaagacacatgtttttcacctctttggattacagtctataactcaaatatgattttattttataaataagtctggcactcatttatatcctaactaatgggcactttaacaagtttttaaaaatctcaagtcaaaattctttgcataagtaaacaaagcat

SEQ ID NO: 403059 - DNA, 630 bp, Homo sapiens
aaaaatcataccacagtctaaaaaatggataaaaagcattatgacaaacactgtaaaatagatataaagagtaaaacagaaattctaagcaagacaaattaaaaaacacaatcagcattgtattagaggccatgaagtcagtgagaacmcaaagaagaaattgtgatgttattagagatatatgatcaattttcatatgctctacctcctgcccctgaaattaaaaaaaaaacatttatggcagggtgtggtggctcacgcctgtaatcccaacactttgggaagtcaaagcaggtagatcacttaaggtcaggagtttgagactggtctggccaacatggtgaaaacctgactctactaaaaataaaaaattaaccagtcttggtggtatgcacctgtaatctcagctactcaggaggctgaggcaggagaagcacttgaacctgggaggtggatgttgcagtgagtcaagagtcgtgccactccactctagcctgggtgacagagagagactgtctaaaaaaacaaacaaaaactatgagtttattcacttttaatggtaaattatttcaaacataaatgaaacacaaatacctaaagctgggtaatttataaagaaagaggttgaat

SEQ ID NO: 403060 - DNA, 615 bp, Homo sapiens
tcctggcacattcctgggcatgttatttaagaaacagcattagcagcagcgatggtaatggcaatgaaccatgygctgtgagagccagctgtgtaccttggactccattaagaactggataccctaaatgacatgacagccattttagggatgagagaaccggggctcaggaaaaggttgaatatcctgtcctagctactacagctattaagtgacatacaagaaatgcagccccatctcctaggcgctgaagattcagcactatgcacgcaacaacaaaattgtcaagctttataaatatagcaacgggagagacgtaagtcttaggttgatctaaatgtgctttgaaatgtgaggaacaggaaaaagtgttacattttccacagccttaatggcacagaattttcactgtatctgtgaggggattgattctggctggatgggatcatcctgttttatcagagtactcccaatgttagacattttacagaatacagagctcacaaaggctgtgcatttttatgagcttatattgttttggaaataacacaaacctaggtcattaactcctaatggctattttaaaacacagctctcctaattgttcagtaatag

SEQ ID NO: 403061 - DNA, 615 bp, Homo sapiens
tcctggcacattcctgggcatgttatttaagaaacagcattagcagcagcgatggtaatggcaatgaaccatgtgctgtgagagccagctgtgtaccttggactccattaagaactggataccctaaatgacatgacagccattttagggatgagagaaccggggctcaggaaaaggttgaatatcctgtcctagctactacagctattaagtgacatacaagaaatgcagccccatctcctaggcgctgaagattcagcactatgcacgcaacaacaaaattgtcaagctttataaatatagcaacgggagagacgtaagtcttaggttgatctaaatgtgctttgaaatgtgaggaacaggaaaaagtgttacattttccacagccttaatggcacagaattttcactgtatctgtgaggggattgattctggctggatgggatcatcctgttttatcagagtactcmcaatgttagacattttacagaatacagagctcacaaaggctgtgcatttttatgagcttatattgttttggaaataacacaaacctaggtcattaactcctaatggctattttaaaacacagctctcctaattgttcagtaatag

SEQ ID NO: 403062 - DNA, 399 bp, Homo sapiens
taagtcacttgctcactacttggctgaggaaaacagggttttttgattgaaatttgccctgagagccacataataagatgataatgtcacaaaagagaagcaaatatcattattaaaagaaaaagaaatatattttgaaagaatcaaaatgcccacattttcacttaagcttttgtctctgcttctctagttcaaaggatgagcatgtggtatgttgtccaaaaacaaatctgcattttaacaaggtccccaggkgactcctgtgcagacactggtgagaggtctgctctgaggacccacgtgagctggtctgaccccagccaggtagcgctgacatgtggctgctcagagtgcaagacagagacacccccatggtcacctgctgcatgggcaggtgtc

SEQ ID NO: 403063 - DNA, 597 bp, Homo sapiens
ccattagtctctttggtagtttgccaaatcatacactccagaattaagtgacttcaatgctgatactctgaaaggccttggagtcatatttttatggaatagcattactatattttaagcattctctacttccatagcaatgcttctgcagatgctrtatgagaacaggtgtacacacatcagaacattttctcccaaaccatgctattgcttagagatagtctcatgttaagataccaaggcccaaattatggtgctggttccttcaaagaacagagtaacaaccatatatatagcacattctatagcattttaggttcacctctgaaacaaattcacatacaaaaataaacaagtagctttgccaggaaagaaaggtctttcctgttttgaaaaacaagtgatgaatctgtactcgctatagactaaatgtgtcccccaaatttatatgttgaaatcctaactcccattgggatggtgttaggaggtgggacctttgaggagtgatgagggtggagcccccacgacaggattagtgaccttaaaaataggccccagagaacttccttgtcccttccaccatgtgaggacacagag

SEQ ID NO: 403064 - DNA, 597 bp, Homo sapiens
ccattagtctctttggtagtttgccaaatcatacactccagaattaagtgacttcaatgctgatactctgaaaggccttggagtcatatttttatggaatagcattactatattttaagcattctctacttccatagcaatgcttctgcagatgctatatgagaacaggtgtacacacatcagaacattttctcccaaaccatgctattgcttagagatagtctcatgttaagataccraggcccaaattatggtgctggttccttcaaagaacagagtaacaaccatatatatagcacattctatagcattttaggttcacctctgaaacaaattcacatacaaaaataaacaagtagctttgccaggaaagaaaggtctttcctgttttgaaaaacaagtgatgaatctgtactcgctatagactaaatgtgtcccccaaatttatatgttgaaatcctaactcccattgggatggtgttaggaggtgggacctttgaggagtgatgagggtggagcccccacgacaggattagtgaccttaaaaataggccccagagaacttccttgtcccttccaccatgtgaggacacagag

SEQ ID NO: 403065 - DNA, 597 bp, Homo sapiens
ccattagtctctttggtagtttgccaaatcatacactccagaattaagtgacttcaatgctgatactctgaaaggccttggagtcatatttttatggaatagcattactatattttaagcattctctacttccatagcaatgcttctgcagatgctatatgagaacaggtgtacacacatcagaacattttctcccaaaccatgctattgcttagagatagtctcatgttaagataccaaggcccaaattatggtgctggttccttcaaagaacagagtaacaaccatatatatagcacattctatagcattttaggttcacctctgaaacaaattcacatacaaaaataaacaagtagctttgccaggaaagaaaggtctttcctgytttgaaaaacaagtgatgaatctgtactcgctatagactaaatgtgtcccccaaatttatatgttgaaatcctaactcccattgggatggtgttaggaggtgggacctttgaggagtgatgagggtggagcccccacgacaggattagtgaccttaaaaataggccccagagaacttccttgtcccttccaccatgtgaggacacagag

SEQ ID NO: 403066 - DNA, 597 bp, Homo sapiens
ccattagtctctttggtagtttgccaaatcatacactccagaattaagtgacttcaatgctgatactctgaaaggccttggagtcatatttttatggaatagcattactatattttaagcattctctacttccatagcaatgcttctgcagatgctatatgagaacaggtgtacacacatcagaacattttctcccaaaccatgctattgcttagagatagtctcatgttaagataccaaggcccaaattatggtgctggttccttcaaagaacagagtaacaaccatatatatagcacattctatagcattttaggttcacctctgaaacaaattcacatacaaaaataaacaagtagctttgccaggaaagaaaggtctttcctgttttgaaaaacaagtgatgaatctgtactygctatagactaaatgtgtcccccaaatttatatgttgaaatcctaactcccattgggatggtgttaggaggtgggacctttgaggagtgatgagggtggagcccccacgacaggattagtgaccttaaaaataggccccagagaacttccttgtcccttccaccatgtgaggacacagag

SEQ ID NO: 403067 - DNA, 605 bp, Homo sapiens
aaggcccaaattatggtgctggttccttcaaagaacagagtaacaaccatatatatagcacattctatagcattttaggttcacctctgaaacaaattcacatacaaaaataaacaagtagctttgccaggaaagaaaggtctttcctgttttgaaaaacaagtgatgaatctgtactcgctatagactaaatgtgtcccccaaatttatatgttgaaatcctaactcccattgggatggtgttaggaggtgggacctttgaggagtgatgagggtggagcccccacgacaggatwagtgaccttaaaaataggccccagagaacttccttgtcccttccaccatgtgaggacacagagaatgcatgctgtctgtgaaccaggaagcagcccttgtcagacattcaatctcccagcaccttgatcttggacctccagcctccagatgtgtgagaactaagtgtttgctgtttaagacaagttgatgatatttttgttatagcagcccaaactaactaagatagtgccttgtaagatacagaattggtattaaaaattaaaactgggtcccaaattatatgaacaaaaaaaaagttacaaaagaat

SEQ ID NO: 403068 - DNA, 543 bp, Homo sapiens
ctttcaggcttatgcatagccttcattgctgctaccatgatttctccactcataaatataatattcaacactagtgtagctgatgataaaggctggctgatgtcacctggccaggtcatattgtggtatatatatgccatggaatactactcagccatagaaaggaatgaaataatggcattgatagcacctggatggaataggagaccattattgtaagtgaagtaactcaggaatggaaaaccaaacagtggatattctcactcataagtgggagctaagatatgaggatgcaaaggcataagaatgatacaatgaattttggggactcaggggaaagggtgggaggggtatgagggataaaagactacatattgggtacagtgtacactgctcaggtgatgggtgcaccaaaatctcagaaatcaccactagataattyatgtagtcaaacacaacctgttccccccaaaaacctattgaaatttttaaaagtttatgaaaactgaggcaccatgttgtactttgctgatagtgcacagc

SEQ ID NO: 403069 - DNA, 543 bp, Homo sapiens
ctttcaggcttatgcatagccttcattgctgctaccatgatttctccactcataaatataatattcaacactagtgtagctgatgataaaggctggctgatgtcacctggccaggtcatattgtggtatatatatgccatggaatactactcagccatagaaaggaatgaaataatggcattgatagcacctggatggaataggagaccattattgtaagtgaagtaactcaggaatggaaaaccaaacagtggatattctcactcataagtgggagctaagatatgaggatgcaaaggcataagaatgatacaatgaattttggggactcaggggaaagggtgggaggggtatgagggataaaagactacatattgggtacagtgtacactgctcaggtgatgggtgcaccaaaatctcagaaatcaccactagataatttatgtagtcaaacacaacctgttycccccaaaaacctattgaaatttttaaaagtttatgaaaactgaggcaccatgttgtactttgctgatagtgcacagc

SEQ ID NO: 403070 - DNA, 326 bp, Homo sapiens
tggttccattctccctgtcactttcaggtacaccaatgacacgtaggtttggtcttttcayatagtcccatatttcttgaaggctttgttcattccttttcattatttttttctttaatcctgttttcacactttattaagttgatcttcagtctctgatatcctttcttccgcttcatagatttggctattgatacttgcatatgcttcatgaagttctcgtgctatgttttgcagctccatcaggtcatttatgttctcctctaaactggttattctagttagtaattcctgtaaccttttttcaaggttcttagcttccttgc

SEQ ID NO: 403071 - DNA, 603 bp, Homo sapiens
ggctcacacctataatcccaatactttggaaagctgaagtagaaggatcgcttcagcccaggaattcaagaccagcttgggcaacatagtgagaccctgtctctataaaaatcagtgcaaatagattgttgaataataggcatcagatacttagcatgatggaaggttggggggcggaggtggatgacgagaaattacttactgagtacaacatacaaaatttgggtgatggctatactaaaaacctaaacttcaccgctacataatatatccatgtaacaaaattacacttgtatgccttaaattaatacacaaaaaagtcaacttgaggccaagtgtggtggctcatgcctataattccagcactttgggaggccgaggcaggcagatcacgaggtcaggagatagagaccagcctggctaacatggtgaaaccccaactctactaaaaaatacaaaaattagcttggcgtggtggygcatgcctgtagtcccagctactcaggaggctgaggcaggggaatcacttgaacctgggatgcagagattgcagtgagctgagatcgcgccacggcaccccagcctgggtgatagactgagact

SEQ ID NO: 403072 - DNA, 542 bp, Homo sapiens
aatggactgcactcagaaagctaaagcaacctttttgacttttgcttggaatattgccgatccttgtttttcagagtcaaggaaactcattttgaactatttacagcctttaataattgagtaatgtatactccggtgaatgaaatttagagcacatttgtttctctctgcctggtttctccagaatttggaaactatctgtgagtattcttaacttatggcaatacagttttttgtaccagtgcaataagaatctattttttttttttttttttttttttttttgcaataggacacaattggaaaaaaactgcttattctaccaaggctttgactggaaaggtatgttttcctttaaggaatcaagcttgatgtgcaaagccaataaaagtgcctcggggaagactggcctcataccttrtctacacagtccctgtacggtgttcctaacctgtggtcagtaaagaatgtaactttctaacaggtacaggagctccaagtttatcttgggaccttaagagaaaaggatcacccaactcaca

SEQ ID NO: 403073 - DNA, 564 bp, Homo sapiens
aaagccaataaaagtgcctcggggaagactggcctcataccttgtctacacagtccctgtacggtgttcctaayctgtggtcagtaaagaatgtaactttctaacaggtacaggagctccaagtttatcttgggaccttaagagaaaaggatcacccaactcacaagtatttgaggatacaaacccatggctgagcttggctttaaaaggtcttatctaagattccttgtggaacagatttccagcaaagccaatccaaaaggcctatgtagaaataattattcttcccgtactttatgcaaataatcaggccaattataagagcaaagtttattctacgaacaacatgcacagttccatcacaatttgtttttaccaaaaaaaattaggaccagagacagaaattgtgctccaaagattatcatacatttgtcattaaattttcgtctcattgattgtttttaagttttttgtgtacattttagactaaccctgcttattcctttaaatcaaataatgacctcctgcagctcagaagaaaccaaaagggatggggaatataaa

SEQ ID NO: 403074 - DNA, 564 bp, Homo sapiens
aaagccaataaaagtgcctcggggaagactggcctcataccttgtctacacagtccctgtacggtgttcctaacctgtggtcagtaaagaatgtaactttctaacaggtacaggagctccaagtttatcttgggaccttaagagaaaaggatcacccaactcacaagtatttgaggatacaaacccatggctgagcttggctttaaaaggtcttatctaagattccttgtggaacagatttccagcaaagccaatccaaaaggcctatgtagaaataattattcttcccgtactttatgcaaataatcaggccaattataagagcaaagtttattctaygaacaacatgcacagttccatcacaatttgtttttaccaaaaaaaattaggaccagagacagaaattgtgctccaaagattatcatacatttgtcattaaattttcgtctcattgattgtttttaagttttttgtgtacattttagactaaccctgcttattcctttaaatcaaataatgacctcctgcagctcagaagaaaccaaaagggatggggaatataaa

SEQ ID NO: 403075 - DNA, 597 bp, Homo sapiens
gagttaagaagaaattacttaggcagatagtgagggtactgaagtcctcagcaaggttttccttttagtgaaaagcagctccaaattattttcctttctaagaaacagcagcatgtaaagtcaaactgcagacatagatgctggcagctgtgccaatcatgttcaagatggcagctccatcttcccttctctttgtcagccacatgtacaataaggagcagaccagatggcactggctaagaggaaagttcatttgcttgataagattatgggggggcagccagtcttccccacatgctatgtaaacgtcacacttgatcaaactaatctgtgagcactacgtgaatcagacaccacctcctcaagccagactataaaatctggcacatccaccrccagctgatcttttctgttggaagtcacctctctctcaatagagagagagcgcagttttactttctctttcatctgcctattaaacctctgctcctaaactcctcatgtgtgtccatttcctaaatttctggtgcaagatgaagaaccccaggtgtataccccagataatgtagctgcttcatactgggggctcatccagga

SEQ ID NO: 403076 - DNA, 625 bp, Homo sapiens
atctttcaaggaggtgcacatgacagaggatgtgtgtcacatacaccagagtgataatgaaactttaattaaacatatgattaactttgacctgaaatagtaggtgcctctgctaaaatcacacacagaaaaatgatacttggtgtgatttattgtttacattgtacaagtgccctaaaaatcaacaaaaagtttaaaataaaatgaggtataagttttggagaagaggaagcaaaattactattatgtgyagtcaatacgattattacataaaaaaatcaagaaaagtgacaaattatatttgggctaaaaagataataaagtggtttattacaaaataaacacagataaattattaacttttccatatagtcatggagtaatagcatttaatggtataaataaagtacacatcacaacagaagcaaaatataaaattctataaatataaaaacctctgtttttgagaaaaaggaaataaaatgtgagatcttgaagaagatagttacctttttcctgtatgagaaaagtaacattttatattaatattctccaaataattctaaaacgttaatgccattcatataaatctaaatgatatgttgagcctgaaaaaataatttca

SEQ ID NO: 403077 - DNA, 652 bp, Homo sapiens
tttttcattgtaaaaaaattgcctggccaagtattttggggtccatttttagatatgttctgttctgttaatctacatttattttttcatcaatacacactgttttgattactgtaacattattataaatcttgaaacttggcaatataaatcttccaatattattctttattgaatactctaaaagttattctgattcccttatcctttcattacattgtagaattagctgatcaatttctacaaaaattctgttagcttttgaatgaaattgcatggactatataaatttggagagaactaacattttgcaagaattatcatccaaactacgaacacactatatcccttatttaggtcttcttcttcctttttttcttcactgttaatcattgttagtatacagatctggcacatatattttattagatttatacctaagaacctcatagttttgtttctattattaataggaatctcttagaatttcaattttctattttcattgccatacaattgttttttgtttgtggatcttgtatcttataccttgctaacataatttattagttctaatgctttttttcatattctttggggttaactatataaacaatcttgtagyctgtaaatacaggtttatttcttcctc

SEQ ID NO: 403078 - DNA, 460 bp, Homo sapiens
aataaaataaggatattaaaaagatcatataagttaataaaaacytaaataatgcatctaaaaatggatgcatgataatgctagaaataggtaataaaactctcaggaggaaaatttcaccataaaaaataggaagtatgaaggttagaataagttaaaataatttcaatgtactttttaaaaacatatgactaaatgatgaaaggaagtcgtatacaagattaagaacaagcattttttaaaaccaggaacactaagtaaaaaataaaaaataaattcaattaaaatttggaaagtagaatagctaaatagaataagaaataaagttaaataacaaaacaggtaagatttgaagaggaaataaagtccaaggtcattcaagtagcatagaattctaagatgtgagcagagtaggtgaatagccgagtagatctcccaagggcagaaccaagaaggctac

SEQ ID NO: 403079 - DNA, 555 bp, Homo sapiens
ccactccacacagtggcctggacaaaggacaatgatgacagacttgcaggtggttctaatcacttcaatgagaacagtccgtggcagctgggcagttctcaagcccacataagcttggctaagatctggccagtggattctagtttaattgatagcaacaattttgaggtctcatctaggtaccctataggcaaagggaagtttgtgccaactgctgaggtttaacatctgaactggcatttacacctgggataaaccataggcctgaacgtgtgtgcgaatcaaataaactttccttccttccttccttccttccttccttccttccttccttccttccttcttttttgyctgcctgcctgcttttttctccctttatctttcactggaatttgcttttcattatgaacagtttagctatggaggatctcaattgcacactgtcttttgtaagttactattcttgctattaggtgacattttttgttgttgagaaaaattgaggaaaaagcggctcctttctgctatacaaatctttgtctgtagcatagtgta

SEQ ID NO: 403080 - DNA, 655 bp, Homo sapiens
tctccctgtggcctttccccagtgcttctggcctccctccccaaggacccctgtgagacagggcagaaatcacttgctagggaaccctgtgagcccacaggcttttcccactgcctcctgtacccctgtatttcacttggctctctaaattgactcagctccaggtaaggtcagaatcttctcccataatctagaacttcgggttccccagtaggtgggtatgttccagggtagacggtctccctttcccacttccacagtctgggcactctcagtatttggggtgtctcccgagtcctgcaggagccatctgctactgtgsgttctcttggctgtcctaatgtattcctgcagttgttctggagcaaaagttcacaacgtgagcctccacacactgctcagtacgtccgagcaagagctacaatctagtcctggctcccatctgccatgatccactgaaccctctcgtgcttaattcttatgaatcactcccttcttcttatcactttggcttcagtacgaatcagcgcaggtggttaagctcacagtcaggggttccaccataattcaaacatttggggtgacattgtaagcttttgcagcgcaagagatgctcagcacaatatggattcatcgtgaatgccaaactataatg

SEQ ID NO: 403081 - DNA, 585 bp, Homo sapiens
actttctttcttcactcttccagcttgtttcaatcattattcatccaaaaaaaaccacttttcatgaaaatacccctgagtagtacatgccaggagagagtttcaaaattgggagccatcataataaatgctatgaggtatgcatctactttgataggtgtaacagttatactttaaactataatagtattttaaaatggaaaattattgaaacatattaraaactacaaatggatcactgtggtggattttttttctgtgaagaactaataatatatgcaaatgattttagcagataaatatggaacaaagaaaatgccctttctgaaatcattgcagctctgacattcccaatatgttaagttccaattgtgaataagctttcagaaacaaaagtaatttgcttaactaattagaactttaaaactcaaaacttatgctaaataggagagcatccatggtttggcttaaagaaggaatatgaaaatatgctgttgagagataattctccataggtctggtgtttctgcacatcctgtgaacaatgggtattgacaactttgttcaagaaagttctcagacacc

SEQ ID NO: 403082 - DNA, 552 bp, Homo sapiens
tgcaattgaatgccagctgtggagatggggtgcatatcagatatataaataaagctcaggtttgctagggaaccaggtatagagaaaaataagtctgatatgaggaaaattgctactatttagagtagttatgccgtagagaaaatttccacaaactaggaaatgtagagagttattctatagaatactcaaaagaggaaagtatgtgatttttggaaacaggaaaatcttcaaacttctttcttcacttccctttgtgtttagctgaccctccaatgtgatcattgcctttggagtttgggagaggtaygggaagtggcctgatgcctgcttccatacttcactcctccatccatccttccctccctcttcccctccagctaaatggacaattctagccaacattgagtcactcaataagtctcaacagtgggtgtgtttgctgagattgtccagcagttgagcagtttggtctcacctccctcgctagttgagaccaaaaagagacaaataactttttcatggtctttgaaacataatgcttatttcgtg

SEQ ID NO: 403083 - DNA, 620 bp, Homo sapiens
  misc_feature (1)...(620): n = A,T,C or G
cctgtggcagaaagaaagtagcccatggtgagcgtagtagtgcctgatagagctggaatttgaagataggttgtctgactctagagcccatgcctccggctactctggaagtctgccttctgtaaacaggtaaacttggaatgtctgcgtcgcaagacatacccccttgtcctcngtagcgtgtgaaagctgaggatccttacacttggcttgtcctagagcaagaaacctagaggagacgcacttttctaacgcatatttttcagcccgccttcttgctatgcgtgcggccccagaaggcctgactgggggaccctacccactagtacttgctggtcgttgcggcaggtcagtggtccttaggaaggaagagaaaacaacatttctggaagagaaggagccgagctgtttaacagctctcttccagactccacttctctgtattctttgkgcaatgcttttttttttttttccctgggggcggggtggggggagttgtgatgaaatttattaccctcaaacacagcttcgatcatgtctcctactgctcaagaacctccngaacccgatttcccaggacctaaatcagcaatcttcaaacttctctaaatatgtaaccc

SEQ ID NO: 403084 - DNA, 582 bp, Homo sapiens
ccagggcgatggtgtatttatacaaatctgcattttttgtgtatcatctaagacwtttcaaaaatatagtttttttatttgttaacaatttttatgcttttgttctctaattttgggtagttttgtttgttcagtagcagcatttttaggtaaatttttttttgcaaatagtagtgcatttattttataaaataaagcgattccttttctttaattttctttaatgttacctacataaaaagaagttgtttcaaagttatcctgattgtttattgtcatttcttttatgttttattaatatcaattgctattgactgaagccctttcccatgacaaatatacagtatatctgttataaacttcatttttgctgcccccttgacctgacctaactttacctcctctcttgtgctatttggcaagactatcctgaatcttgtcaaacttcccactcattgaatttgatttctgacaccattttcctggaaagatatctatctgatcagttggaaaagaaaagagataaaaacacctatttcacaagtttcacgggacctgacctttgcgcaagagcaaaaaatt

SEQ ID NO: 403085 - DNA, 582 bp, Homo sapiens
ccagggcgatggtgtatttatacaaatctgcattttttgtgtatcatctaagacttttcaaaaatatagtttttttatttgttaacaatttttatgcttttgttctctaattttgggtagttttgtttgttcagtagcagcatttttaggtaawtttttttttgcaaatagtagtgcatttattttataaaataaagcgattccttttctttaattttctttaatgttacctacataaaaagaagttgtttcaaagttatcctgattgtttattgtcatttcttttatgttttattaatatcaattgctattgactgaagccctttcccatgacaaatatacagtatatctgttataaacttcatttttgctgcccccttgacctgacctaactttacctcctctcttgtgctatttggcaagactatcctgaatcttgtcaaacttcccactcattgaatttgatttctgacaccattttcctggaaagatatctatctgatcagttggaaaagaaaagagataaaaacacctatttcacaagtttcacgggacctgacctttgcgcaagagcaaaaaatt

SEQ ID NO: 403086 - DNA, 448 bp, Homo sapiens
cactctaatcagtcattcttaccctccactaagaatatctcacatccatacctctatggaaatcacaggctctaatcatttactctctgggtggccttggaaaagcaatttatcacctctgagcctcaatttcctcatctacaaaatgatgctatctaacaggggaggatttccatgaagaggaactgagataatatacaagggcatagcacagtacctcaaacatagtgagagarcaacaaaagttagctttaatcataatcatcaaaataataatgacattgataattgtcattgataattggtctagctcatgtcatctcttccatgaagccttctctgatcttcaatctgagtgtgattcctccttcttttgaagtcaccctatacttgtagggccatccccatatgctacaggggatcacagtgacttctccacttatcctgt

SEQ ID NO: 403087 - DNA, 634 bp, Homo sapiens
tgtgatggtatttggaggtgaggcgtcttgtagataattaccgtaggagggtgggacctcatgaatagcatcggtgcccttataaaaagatctcagggagctctctagcacctgaggtaccatgtgagtgtaaaacaagaagttggcagtctgcagcctagatgacggccctcaccagcagccgaccatactggcactctgaccttggacttccagcctccagactgtgagaaaagatttttcttgttttttgttgccatgcagtctacaccactttgttgtagaactcaatctgacagtgasattctagttgcatcccatcattgcatagatggggaaatggagactcagagaagtggagcaatttgttgccagcttgtgatacaagtgtttgttggagccacggctgtgaatggcatctcctgacccccatgcctgtgctcttttcactccccacctgcttctcagactctcatggcctggggaagatcctgaacacgggaggatgagcagtgatatctaacaaatatgccaaaagcgaggtgaactgctttgagatttcaccttgagtctatctaacagatgatatctaacaaatgtacctcctcacaaccaggcacaagctcctcagaga

SEQ ID NO: 403088 - DNA, 565 bp, Homo sapiens
gcagaagttgcagtgagccaagatcgtcccactgcactccagyctgggtgacagagtgacactccgtttcaaaaaaaaaaaaaaaaagttggggccaggcacagtggctcctgcctgtaatcccagaactttgggaggccaaggaggacagatcacctgacatcaggagttcaagaccagtctgggcaacatggtgaaacctcatctatactaaaaatacaaaaattagccaggcatggtggcaggcacctgtaatcccagctattcaggaggctgaggcaggagaattgcttgaacccaggaggcggaggttgcagtgagtcgaggttgcaccattgtactccagcctgggcgacagagcgagactccgtctccccaccaaaaaaaaaaaaaaaaaagttgggatctaatttgtgtatcattaataacaaggcagctcagaatcaaagcatttatttctgtatattattttaggtcctattgatatagaaagctcctaaaaatcagtttttctatttttctttattttaggaacatttgtagagtagttataatatggcagcac

SEQ ID NO: 403089 - DNA, 565 bp, Homo sapiens
gcagaagttgcagtgagccaagatcgtcccactgcactccagtctgggtgacagagtgacactccgtttcaaaaaaaaaaaaaaaawgttggggccaggcacagtggctcctgcctgtaatcccagaactttgggaggccaaggaggacagatcacctgacatcaggagttcaagaccagtctgggcaacatggtgaaacctcatctatactaaaaatacaaaaattagccaggcatggtggcaggcacctgtaatcccagctattcaggaggctgaggcaggagaattgcttgaacccaggaggcggaggttgcagtgagtcgaggttgcaccattgtactccagcctgggcgacagagcgagactccgtctccccaccaaaaaaaaaaaaaaaaaagttgggatctaatttgtgtatcattaataacaaggcagctcagaatcaaagcatttatttctgtatattattttaggtcctattgatatagaaagctcctaaaaatcagtttttctatttttctttattttaggaacatttgtagagtagttataatatggcagcac

SEQ ID NO: 403090 - DNA, 565 bp, Homo sapiens
gcagaagttgcagtgagccaagatcgtcccactgcactccagtctgggtgacagagtgacactccgtttcaaaaaaaaaaaaaaaaagttggggccaggcacagtggctcctgcctgtaatcccagaactttgggaggccaaggaggacagatcacctgacatcaggagttcaagaccagtctgggcaacatggtgaaacctcatctrtactaaaaatacaaaaattagccaggcatggtggcaggcacctgtaatcccagctattcaggaggctgaggcaggagaattgcttgaacccaggaggcggaggttgcagtgagtcgaggttgcaccattgtactccagcctgggcgacagagcgagactccgtctccccaccaaaaaaaaaaaaaaaaaagttgggatctaatttgtgtatcattaataacaaggcagctcagaatcaaagcatttatttctgtatattattttaggtcctattgatatagaaagctcctaaaaatcagtttttctatttttctttattttaggaacatttgtagagtagttataatatggcagcac

SEQ ID NO: 403091 - DNA, 565 bp, Homo sapiens
gcagaagttgcagtgagccaagatcgtcccactgcactccagtctgggtgacagagtgacactccgtttcaaaaaaaaaaaaaaaaagttggggccaggcacagtggctcctgcctgtaatcccagaactttgggaggccaaggaggacagatcacctgacatcaggagttcaagaccagtctgggcaacatggtgaaacctcatctatactaaaaatacaaaaattagccaggcatggtggcaggcacctgtaatcccagctattcaggaggctgaggcaggagaattgcttgaacccaggaggcggaggttgcagtgagtygaggttgcaccattgtactccagcctgggcgacagagcgagactccgtctccccaccaaaaaaaaaaaaaaaaaagttgggatctaatttgtgtatcattaataacaaggcagctcagaatcaaagcatttatttctgtatattattttaggtcctattgatatagaaagctcctaaaaatcagtttttctatttttctttattttaggaacatttgtagagtagttataatatggcagcac

SEQ ID NO: 403092 - DNA, 594 bp, Homo sapiens
tggctgggacttgccttccaggggagtgggggatgtgggcacatctttcctttggccaccatcctcggctcctgaattaccacgttgctagagtcagtctttctgacgccctgcctcaggtttccccctctaatccattctcccctaagggcagattttggagatggtacaatttttataggccaatacaacatagtggtcaagaactctagaatcagagagcttgttcttgactcgtctcctcaggtgaatctttccccacctcctcagagaagctctccctatcccatgccagttactcttgatcacataacyctttatttacttaacagtagtgattataactagcggttatcttgtttgatgacttgtttactttctcccacttgattgtaaggcttatgaggccaaggacactgtcttaattgctgttttcccaacacctaacatagggcacgatacataggttctcagcaaaagtgttttgaattaatagatgaatgatggaatcccagcttcatgactgcctgaccttgagtaagttgcttaacttcactgagcctcagttttttacctgtgaaatagaaaaagagt

SEQ ID NO: 403093 - DNA, 600 bp, Homo sapiens
aaggcaggaaacctggaggggagcagaacagtggaagtgtgacaaaggcagctctgtgaggccgttgacaccagccctggcctttatctagtctcttccttccacacggtccctggtgaggggatacccacctctggtggggcagagtgagggagacctgcccttcagggggaggtgctggctccacttagctaggggagtgtgcaagggatgccgtgaacttgccaaggaggttagwagggaggccagctggtcaacctccctctgtcctatcactacctctcatctcacccactctcctctaccctgagggaaacaacggagtctcccactccctccctacctctttgtttcttatctgtgaagtgcagttaatgatacctggggttgttaatgaagctcaagtgagataacacatgaaagtgtgagagttgggtcttctaaattacatctgctgctctactttcctgcatattcacatttactcctcatctcattcccatgctcaggagagaaacagttaaagcgagaaatattttagggaacccaagcagagctgctcctagttctgccataatcactcatgcgctacaattcacc

SEQ ID NO: 403094 - DNA, 600 bp, Homo sapiens
aaggcaggaaacctggaggggagcagaacagtggaagtgtgacaaaggcagctctgtgaggccgttgacaccagccctggcctttatctagtctcttccttccacacggtccctggtgaggggatacccacctctggtggggcagagtgagggagacctgcccttcagggggaggtgctggctccacttagctaggggagtgtgcaagggatgccgtgaacttgccaaggaggttagtagggaggccagctggtcaacctccctctgtcctatcactacctctcatctcacccactctcctctaccctgagggaaacaacggagtctcccactccctccctacctctttgtttcttatctgtgaagtgcagttaatgataccyggggttgttaatgaagctcaagtgagataacacatgaaagtgtgagagttgggtcttctaaattacatctgctgctctactttcctgcatattcacatttactcctcatctcattcccatgctcaggagagaaacagttaaagcgagaaatattttagggaacccaagcagagctgctcctagttctgccataatcactcatgcgctacaattcacc

SEQ ID NO: 403095 - DNA, 485 bp, Homo sapiens
ttttttttttcctttttctttttttttttttaatgtctctttgtttggggaacttttgggatactctgattaaacccctgattaagcaccacggggcgccattcacatcacaggtaaatggtttgcaaatattttcttccattctgtaggttaccttttcattttgtgggkggttccttttccttaaagaaagtttttagtttgatgaagccctgcttgtttatttttgcttttgttgcctgtaattttggtgtcaaattcaaaaaatcattacagataccaatgtcaaggagcttttctcctgtgttttctttgagaagttttacagtgtcaggtcttatatttaagtctttaattcattttgaattaatttttgtatatggtaccagagaaaagcccaatttctttctctcttttttttttttttttttttgcgtgtggctatccagttttcttaacatcattgattgaagagactatccttt

SEQ ID NO: 403096 - DNA, 547 bp, Homo sapiens
acaccgccatctactgaactgtataaaatcaaatcctgactgtgattactgattccttccttttcctcacctctcatcttcaataccatcactattacatctcactttcagcccccaaagctgtactgatcctactgctctccatctccactgccactactctaatttaggctttcatcacctgtcactacgttaccaaaattgtctccccatcaatctgcccacctctgctcttgttctcctaaaaatccatcctcccctcagcaattaaggtaatcttttctttctgacatcaaattccaaaatgtttccaacataaaaaaagctgaaatagttttagtcctctggatctagttggtacctagatcctgccattaatatttgcctcttcatatgtttatctctctattcatccatcaatccrtattatttcttcatgtatttcaaaataaattctaagaatcaatacacttccttcttaaataccatgcttatgtttacttttgtttacatttctcctctacagtgaaatttacatacaaagaaa

SEQ ID NO: 403097 - DNA, 590 bp, Homo sapiens
aagcttctttccttcctccaggaccctgaactttggcccaccctcagcctgggctagcatacaatgccggtttagaataagctggtctcgaggtcagacattctctcatatactatctgatcgcaccatcttttattctrctttctcacacctggctcttcctagctttatttattcctctctgaaaaagaaaaaaatctttttctttttcttttttttttttttgcctaacttttgagatgcttgcagatctcatggtcagagcattcttcctgttacaatagtcctcctcccccattgcaatagtttccttacaataatcttcccttacaataatctttttgaataaaatctcttcttactaagtccagatttgtttttatttgacaaatatatagaaggatattctatgaaagagatctgcaaccactagcatattatcaagaagattcatagagtgaatgattttcttttggtggctgcttatgacatggtcctatagctcatcactggtcacttggagggagatcagggtaaggtctagaaaagttgcaggagggtgggaaatagaactcttgtgaccagcaaaa

SEQ ID NO: 403098 - DNA, 481 bp, Homo sapiens
agtggttccatcttaactctttagtggcagattatgatagtcttatcacacttaacagaagttggtttagataaggtcctgtctaaaccaatttaggccaataaaacttgagaagagtcttgcttaggccccctgggaaagaagcttcctgtgtctaataaggttggtaggagtagtatttctctgtctttctctctctctgacacacacatgcacacacacacacacacactgtcctcaaacatgaacaaggaattctgttgccctggctactgttggcaaccawcttgagataatgaggcaagtcagcccggggaccaaaggccaaagctgactcaaagagaagagagaagctaagaaaataacatgaagtggtgcctagtactctgatatccattgtctgaagcccaaattacctctggctgattactgttacttacaattgaaaacatcgtgactgatacatattaagtcttccaag

SEQ ID NO: 403099 - DNA, 590 bp, Homo sapiens
aagcttctttccttcctccaggaccctgaactttggcccaccctcagcctgggctagcatacaatgccggtttagaataagctggtctcgaggtcagacattctctcatatactatctgatcgcaccatcttttattctactttctcacacctggctcttcctagctttatttattcctctctgaaaaagaaaaaaatctttttctttttcttttttttttttttgcctaacttttgagatgcttgcagatctcatggtcagagcattcttcctgttacaatagtcctcctcccccattgcaatagtttccttacaataatcttcccttacaataatctttttgaataaaatctcttcttactaagtccagatttgtttttatttgacaaatatatagaaggatattctatgaaagagatctgcaaccactagcatattatcaagaagattcatagagtgaatgrttttcttttggtggctgcttatgacatggtcctatagctcatcactggtcacttggagggagatcagggtaaggtctagaaaagttgcaggagggtgggaaatagaactcttgtgaccagcaaaa

SEQ ID NO: 403100 - DNA, 543 bp, Homo sapiens
caatagaaacttcccaaatttaaatgcaaagagaaaagaggaaaggaaaagtagaaaaacagaacattcaagaactgtgggacagtttaaaaaggtgtaaaatacatgtagtataggaataaaaggaaattctcaaacaaaatcataatgatgrggttatgtcaactggacacaggagccaactgaaagagtcctcaggggccaaacttgaaacaatttcattaacaaaataaagaaatatcaaattataccccaaaatatagaataaatatccatgagtctatcctgatataaataaataattgaataaatatatggggaagaatagataaatctttagggtgaaatttcaaataatttatgtagatactcgatcctcatggaagaggagcataactccccagtctttaagtgtggtctatatatagtgacttccttatcaagagtagcatgaaaagggtaacttcactgtggagaaacatgataaaaactctctctgccaagtgttcaaggttcacatcaacagtgatgtcacgttgacaa

SEQ ID NO: 403101 - DNA, 543 bp, Homo sapiens
caatagaaacttcccaaatttaaatgcaaagagaaaagaggaaaggaaaagtagaaaaacagaacattcaagaactgtgggacagtttaaaaaggtgtaaaatacatgtagtataggaataaaaggaaattctcaaacaaaatcataatgatggggttatgtcaactggacacaggagccaactgaaagagtcctcaggggccaaacttgaaacaatttcaktaacaaaataaagaaatatcaaattataccccaaaatatagaataaatatccatgagtctatcctgatataaataaataattgaataaatatatggggaagaatagataaatctttagggtgaaatttcaaataatttatgtagatactcgatcctcatggaagaggagcataactccccagtctttaagtgtggtctatatatagtgacttccttatcaagagtagcatgaaaagggtaacttcactgtggagaaacatgataaaaactctctctgccaagtgttcaaggttcacatcaacagtgatgtcacgttgacaa

SEQ ID NO: 403102 - DNA, 543 bp, Homo sapiens
caatagaaacttcccaaatttaaatgcaaagagaaaagaggaaaggaaaagtagaaaaacagaacattcaagaactgtgggacagtttaaaaaggtgtaaaatacatgtagtataggaataaaaggaaattctcaaacaaaatcataatgatggggttatgtcaactggacacaggagccaactgaaagagtcctcaggggccaaacttgaaacaatttcatyaacaaaataaagaaatatcaaattataccccaaaatatagaataaatatccatgagtctatcctgatataaataaataattgaataaatatatggggaagaatagataaatctttagggtgaaatttcaaataatttatgtagatactcgatcctcatggaagaggagcataactccccagtctttaagtgtggtctatatatagtgacttccttatcaagagtagcatgaaaagggtaacttcactgtggagaaacatgataaaaactctctctgccaagtgttcaaggttcacatcaacagtgatgtcacgttgacaa

SEQ ID NO: 403103 - DNA, 619 bp, Homo sapiens
ctcttgggaaaaaatgaacaaattgctagttctcatggtagagaaaaatcatatataaatatacagaataagaaattacaatgagggtccaggcgcagtggctcatgcctgtaatcccagcactttggsaggctgaggcaggtggatcacttgaggtcaggagttcgagaccagcctggccaatatggtgaaaccctgtctctactaaaaatacaaaaattagtcgagcatggtgatgggtgtctgtaatcccagctactcaggagactgagacaggagaattgcttgaacctgggaagtggaggttgcagtgagctgggatcatgccactgcactccagcctaggtgacagagtgagactccatctcaaaaaaaaaaaaaaaattacaaggaggaaataaccattcaaataaaaaaaaattaactcgtaagatgttaatttgtggccctctatgcaaataaatttaaaagcctagaaaggaatgataatttctagagcaatataaccaaaactgatcccattagagagtaaaagcttgaatagaatgatttctttaaacaaaataatgttatcaaggaattatcccaccaaaagcactgggctaagacagtttcacag

SEQ ID NO: 403104 - DNA, 619 bp, Homo sapiens
ctcttgggaaaaaatgaacaaattgctagttctcatggtagagaaaaatcatatataaatatacagaataagaaattacaatgagggtccaggcgcagtggctcatgcctgtaatcccagcactttggcaggctgaggcaggtggatcacttgaggtcaggagttcgagaccagcctggccaatatggtgaaaccctgtctctactaaaaatacaaaaattagtcgagcatggtgatgggtgtctgtaatcccagctactcaggagactgagacaggagaattgcttgaacctgggaagtggaggttgcagtgagctgggatcatgccactgcactccagcytaggtgacagagtgagactccatctcaaaaaaaaaaaaaaaattacaaggaggaaataaccattcaaataaaaaaaaattaactcgtaagatgttaatttgtggccctctatgcaaataaatttaaaagcctagaaaggaatgataatttctagagcaatataaccaaaactgatcccattagagagtaaaagcttgaatagaatgatttctttaaacaaaataatgttatcaaggaattatcccaccaaaagcactgggctaagacagtttcacag

SEQ ID NO: 403105 - DNA, 619 bp, Homo sapiens
ctcttgggaaaaaatgaacaaattgctagttctcatggtagagaaaaatcatatataaatatacagaataagaaattacaatgagggtccaggcgcagtggctcatgcctgtaatcccagcactttggcaggctgaggcaggtggatcacttgaggtcaggagttcgagaccagcctggccaatatggtgaaaccctgtctctactaaaaatacaaaaattagtcgagcatggtgatgggtgtctgtaatcccagctactcaggagactgagacaggagaattgcttgaacctgggaagtggaggttgcagtgagctgggatcatgccactgcactccagcctaggtgacagagtgagactccatctcaaaaaaaaaaaaaaaattacaaggaggaaataaccattcaaataaaaaaaaattaactcrtaagatgttaatttgtggccctctatgcaaataaatttaaaagcctagaaaggaatgataatttctagagcaatataaccaaaactgatcccattagagagtaaaagcttgaatagaatgatttctttaaacaaaataatgttatcaaggaattatcccaccaaaagcactgggctaagacagtttcacag

SEQ ID NO: 403106 - DNA, 589 bp, Homo sapiens
  misc_feature (1)...(589): n = A,T,C or G
ttgtgaactccacatgtgagggaactaggttgttctcctcatgagaatctaatgcctgatgatctgaggtggaacaggttcatccggaaaccattttccccaacccccaatcccttgtgtggaaaaattgtcttccacgaaattggtccctggtgccaaaacatttggggactaccgttcagagcattganatgaacaaccgacttatttctttaagaagaagtagacattgatattattctaaagtccaacaatgaaactaaaggccagtgatatcctgcaaaagtgctaggtaaatgttggccagcagtgtccaacctaggaaagaaaataccaccccatgatcaagtaagatttaccccagaaatccaaggtgtattccacattatttaaatccactaatataataaactatcttaatagatctgagggaaaaatgtgttatttttataaatgctgaagaaaaactttgacaaattcaacactcatttctggtaagaaagttaytcagagaataaaaattggtggatattttcttaactacctaaaatacatacaccttagccttaaaaagtcttaatgaggaaac

SEQ ID NO: 403107 - DNA, 623 bp, Homo sapiens
gtccttattttcataaatagaaactagctcaaggaggtaacattctcaatattacaagactagtaagtgaacacagaatttactcaaactcaattctttgtaattcactcagttctcaacactgtactgctttcatcaaagttacatggaaaatatktgtaactggaaagttggtaggttccttggaatgtaaacaatcgaattatcttggagtttatatagtctaagtggaaggtgacttggagaaatgaaacttatgtgatagaaaaaaaatacagatttacacatcaaactatctggctctgagtcctagctgcatcatttcctgaggaagaaattttgggtgagttacttaatttagttgagtctcaggttccctacctttgtggggaagaggttataacaatatctgcctcacaggagcgtttcaaggtttctctaatttgttcaggtatattacctgctttgcaaattacaaaacaccagtaaaaaattagtgagttaacctttattttccttcctaattattgaccaaccaaacttcagagggtgctattaacaagattaaagctcatcaaagttagctagaatgttctatagagttgttgacatgttaagttgaa

SEQ ID NO: 403108 - DNA, 623 bp, Homo sapiens
gtccttattttcataaatagaaactagctcaaggaggtaacattctcaatattacaagactagtaagtgaacacagaatttactcaaactcaattctttgtaattcactcagttctcaacactgtactgctttcatcaaagttacatggaaaatatgtgtaactggaaagttggtaggttccttggaatgtaaacaatcgaattatcttggagtttatatmgtctaagtggaaggtgacttggagaaatgaaacttatgtgatagaaaaaaaatacagatttacacatcaaactatctggctctgagtcctagctgcatcatttcctgaggaagaaattttgggtgagttacttaatttagttgagtctcaggttccctacctttgtggggaagaggttataacaatatctgcctcacaggagcgtttcaaggtttctctaatttgttcaggtatattacctgctttgcaaattacaaaacaccagtaaaaaattagtgagttaacctttattttccttcctaattattgaccaaccaaacttcagagggtgctattaacaagattaaagctcatcaaagttagctagaatgttctatagagttgttgacatgttaagttgaa

SEQ ID NO: 403109 - DNA, 623 bp, Homo sapiens
gtccttattttcataaatagaaactagctcaaggaggtaacattctcaatattacaagactagtaagtgaacacagaatttactcaaactcaattctttgtaattcactcagttctcaacactgtactgctttcatcaaagttacatggaaaatatgtgtaactggaaagttggtaggttccttggaatgtaaacaatcgaattatcttggagtttatatagtctaagtggaaggtgacttggagaaatgaaacttatgtgatagaaaaaaaatacagatttacacatcaaactatctggctctgagtcctagctgcatcatttcctgaggaagaaattttgggtgagttacttaatttagttgagtctcaggttscctacctttgtggggaagaggttataacaatatctgcctcacaggagcgtttcaaggtttctctaatttgttcaggtatattacctgctttgcaaattacaaaacaccagtaaaaaattagtgagttaacctttattttccttcctaattattgaccaaccaaacttcagagggtgctattaacaagattaaagctcatcaaagttagctagaatgttctatagagttgttgacatgttaagttgaa

SEQ ID NO: 403110 - DNA, 281 bp, Homo sapiens
tctctctcctttgatttgaaatgcattctttttatawtaaattctcacacatggaaagatatgcttctggatgtctggtgtttggctgatttatttatctttacaaaagtgccacactgttttgagtagcatagctttttagtatggtagggcaaaacatactaccaccaccatcacaactattctgtctagtatcacacactttcacctccaaatgaactttggaattgagttgtcaagtgttttttaaagagccctaggcattttcactgaaactttct

SEQ ID NO: 403111 - DNA, 281 bp, Homo sapiens
tctctctcctttgatttgaaatgcattctttttatattaaattctcacacatggaaagatatgcttctggatgtctggtgtttggctgatttatttatctttacaaaagtgccacactgttttgagtagcatagctttttagtatggtagggcaaaacatactaccaccaccatcacaactattctgtctagtatcacacactttcacctccaaatgaactttggaattgagtygtcaagtgttttttaaagagccctaggcattttcactgaaactttct

SEQ ID NO: 403112 - DNA, 281 bp, Homo sapiens
tctctctcctttgatttgaaatgcattctttttatattaaattctcacacatggaaagatatgcttctggatgtctggtgtttggctgatttatttatctttacaaaagtgccacactgttttgagtagcatagctttttagtatggtagggcaaaacatactaccaccaccatcacaactattctgtctagtatcacacactttcacctccaaatgaactttggaattgagttgtcaagtkttttttaaagagccctaggcattttcactgaaactttct

SEQ ID NO: 403113 - DNA, 570 bp, Homo sapiens
ataaatcaaaagtgctactcccttgaacatacaaatgataacaaagcaaaatagccttatcactgatatggagaaagtgaaatatgaggtgggtctagactcaaaggcagggcttcaaccaaattgagaactagctaaagcagggatgaaggggaagcagctttccataagacatgcttgccagcgtcccatgtcagtttaccattgccatggcaacacccagaagtgatcayccctttgggctggatgcggtggctcacacctgtaatcccaacatattgggaggccaaggctggcagatcacttgaggccaggagttcaagaccagcctgtcccacatggcaaaaccctgtgtctactaaaaatacaaaaactagctaggtgtggtggtatgcacctgtaatcccacctacttgcagggctgaggcacaagaatgcttgagcctgggaggcagaggttgcagtgagccaagatggtgtcactgcactccagcctgggtgacagagcaagactctgtgtcaaaaaaaaaaaaaaaaaaaaaagttatcactcctttctatagcaacaac

SEQ ID NO: 403114 - DNA, 542 bp, Homo sapiens
actgcactccagcctgggtgacagagcaagactctgtgtcaaaaaaaaaaaaaaaaaaaaaagttatcactcctttctatagcaacaacccaatcacmtggaagttaccacccttgttttagaaactgctgcataatctgaccctaagtatatgtataattaaaagtgggtataaatatgactgcaaaactgcctctgagctgctactctgggcacctgttttcaagtatccctgctccacaaggagcagtacctctgctgctgcatacttccacttcaataaaagttgctgtctaacaccactggctcacccttgaattatttcctgtgtggagccaagaaccctccagggctaagccccaattctggagtttgccttccctgcatcaaaagatttagtggtcagatagaggattaaatcagccacaatcagcttacaggtgcagtggtgtgatctcggctcactgcaacctctatctcctgtgttcaagcgattgtccttcctcagcctcctgagtagctgggattacaggcatgcacca

SEQ ID NO: 403115 - DNA, 542 bp, Homo sapiens
actgcactccagcctgggtgacagagcaagactctgtgtcaaaaaaaaaaaaaaaaaaaaaagttatcactcctttctatagcaacaacccaatcacctggaagttaccacccttgttttagaaactgctgcataatctgaccctaagtatatgtataattaaaagtgggtataaatatgactgcaaaactgcctctgagctgctactctgggcacctgttttcaagtatccctgctccacaaggagcagtacctctgctgctgcatacttccacttcaataaaagttgctgtctaacaccactggctcacccttgaattmtttcctgtgtggagccaagaaccctccagggctaagccccaattctggagtttgccttccctgcatcaaaagatttagtggtcagatagaggattaaatcagccacaatcagcttacaggtgcagtggtgtgatctcggctcactgcaacctctatctcctgtgttcaagcgattgtccttcctcagcctcctgagtagctgggattacaggcatgcacca

SEQ ID NO: 403116 - DNA, 441 bp, Homo sapiens
ctttgagtaaacttacccatatattatgtgcagagctatagctcatagaataaaagccagccacctctctgcagtgtctcttaaattaaagccttagctataagaaagccaagtgtctcagcccagtggaggggtgcttttccatatagcagcatggaagttcaagctgaagcctcatcccagccttgtttttgtgctgtgctcacatggatggtgtgtacagtatcatgacagacacacatttccttatatctttaccccgcatttttctatacagtggttacacggtgggtatgttttttgtttgctgttttcactactccttgttacaccaaggatcttttttttttggcatatcgttgttagaaagtatttttctttyaattataagagtagttcatgctcattgtaaagaacatgaaaaaagttcaagaaagagca

SEQ ID NO: 403117 - DNA, 593 bp, Homo sapiens
agggggaaaggacccaacctgctctatgcccaggaaaaggtaaaaacttatatcaggaaaagataactcagaaaaggaaaaatattgagcataaaatcatctcccctatacttccagcctttcccttagcttctttcataaggtgataagcatttccatccccacttcacatttttgcctaccttagcaaaaaaattttgcttgatccataatttttgataagggaagattcatcagaataaaaagaactataatatttaatatacttgaatgagttttaggatggtagttaaayggaacaatagaagtattcatattatagtaaccatttctaatgatctaattctaagattttgttagaagttgatagtagaactcacacaaacattgagtgaaaggtactaatagcaaaaattcctcagagccatgaagattagtctttgctgtaagttaggataatattctgttagaagaattctgactttagtattgtgtaagctgttttcttaatacgtatctaccctctgcctaggtgatattcacgaaataaggcatagataatgcatttagtaacactgagctgaatcatgcaa

SEQ ID NO: 403118 - DNA, 598 bp, Homo sapiens
ccacaaacttagtgcattaaaacaagacaagtttatgagcaagcagttctgaaggtcagatgtccaaaatcagtgtcactgggctaaagccatgtgcaggcagggctggttccttctgcagactccaggggagaatctgttcctttgtccttttgggtttctaaaggctgcctgtacttttttgcctgtgacctcttcctccaacttcaaagcacttcaacctcttgttccattgacaaatctcttttttctgattttgagcttgttgcctccctgttacaaaatcctggttcttatccacccggacartatgaaataatctaaccatttcaaggtccttaattacatccgcaaagtccattctaccatgtaaagtaacatgtttacaggttctggggattaagtcatgcatatgttgggagacaccattattcagcctcccacactttctgagctaagtatattgatatcactgagtgacttagtgaatgaatgattgaagactttttagcaattcgacaatatttattactaaatccattatgtacttggtcatgtttcatactgttttcagaggatggctaggaaaccagtgttt

SEQ ID NO: 403119 - DNA, 604 bp, Homo sapiens
gtgttctaacagcagcttgattatcctgatccatttagagtctatcccacccccattccaacaaacagcatatctccatcaaactggccagattcaactttttttttcatttctacctacatgccgataccgcttcctgtgacatacagcgttttttttaatccattagttctttttcttatatcaactgaattcttatatttaaatatcactttattcaatttgtattcatatctcagaaattcttatgtagctcttcatctacatccttctataattgaccactacacaaagacctagaaattgttcctccaaaagggagataagatgtttaataagtgcttattgatgattaatcactgaaatggaagtagtggtctgctgttatgttttaaaacaactgataagaataaatggcttaatacagagctaattttgtagggagcctaaaaatataattaactgagaaatttgycccagaaaagggcacaggagcacagggtatataattctaattataatttcaggaagttcatggacttcaggtcaagaacccctgtctatggcaattctgtgtggagcatgagctaacttgttagtattc

SEQ ID NO: 403120 - DNA, 582 bp, Homo sapiens
aacagaacaataataaacaacaagcttctggttggcaataatggcctcaagagacaatggaatagtatagtatcttcaatgttatgagggaaaataattttgaacccagaattctgtaccgactcaagtgatcattgaaaggcaagatcaaaataaaagtattgcaggatacaaaagtctgcacaattctcactataagaattcctgaaagctctaatctttaaaatgaaaaaggaatacaatgggaattcataagaragagaaacattcttgagtaacgaaagaaaatttaaaattaaatctcaataattgttggactataaaaaatcaatattatgctagatcccaacccccaaatgatccctatgtaggatgtgggtagtaggaagttattgttttcgttattataaataagggagactatagatagcttaattttagatatacaaaaatgtttattgtgttgtttggactatagcaataagtgtgaactgcttttggagtttgaaaggaaaatcaacaagatatgaataagaagaaaaagaaaacactccttcattaaaatgggaataacattcttag

SEQ ID NO: 403121 - DNA, 582 bp, Homo sapiens
aacagaacaataataaacaacaagcttctggttggcaataatggcctcaagagacaatggaatagtatagtatcttcaatgttatgagggaaaataattttgaacccagaattctgtaccgactcaagtgatcattgaaaggcaagatcaaaataaaagtattgcaggatacaaaagtctgcacaattctcactataagaattcctgaaagctctaatctttaaaatgaaaaaggaatacaatgggaattcataagagagagaaacattcttgagtaamgaaagaaaatttaaaattaaatctcaataattgttggactataaaaaatcaatattatgctagatcccaacccccaaatgatccctatgtaggatgtgggtagtaggaagttattgttttcgttattataaataagggagactatagatagcttaattttagatatacaaaaatgtttattgtgttgtttggactatagcaataagtgtgaactgcttttggagtttgaaaggaaaatcaacaagatatgaataagaagaaaaagaaaacactccttcattaaaatgggaataacattcttag

SEQ ID NO: 403122 - DNA, 501 bp, Homo sapiens
aagagacaatggaatagtatagtatcttcaatgttatgagggaaaataattttgaacccagaattctgtaccgactcaagtgatcattgaaaggcaagatcaaaataaaagtattgcaggatacaaaagtctgcacaattctcactataagaattcctgaaagctctaatctttaaaatgaaaaaggaatacaatgggaattcataagagagagaaacattcttgagtaacgaaagaaaatttaaaattaaatctcaataattgttggactataaaamatcaatattatgctagatcccaacccccaaatgatccctatgtaggatgtgggtagtaggaagttattgttttcgttattataaataagggagactatagatagcttaattttagatatacaaaaatgtttattgtgttgtttggactatagcaataagtgtgaactgcttttggagtttgaaaggaaaatcaacaagatatgaataagaagaaaaagaaaac

SEQ ID NO: 403123 - DNA, 574 bp, Homo sapiens
tggagctgtcctttgcaatgcaaaaggtctgtcattcctggctcttgtccactaataacagtagcaaatcaaatgatcccattaaattttaaaacatgccccgtgaccagtattagttccagtgagaagcactgactcattacaataaaatcttctgatggaaacaacatgtgatgttaaaaacaaagaagtctrtagatcctaaagtccgtaagtaaagcaaagccaatgttccagtaactgctctgagaagctgtgatatgctctgggttgcacagaaacgtgggagactatcaaggcccctcccatagttcattctctcccagtgattcaggtagtgagtcagctagtagcggtgttcacaaaaacttggaagttcctagtccacatgtttgtgtgacctctctgtagcctctgtgtctaggttcttgagtatacaatgcactgtggactgtttgtggcttggtgcaatcagaagtcatggaagatggatagaataaatagaaagggtggtaatggaattgtcaaaccacaagattgacaacttcttcttctgggaagggtcccaagcaac

SEQ ID NO: 403124 - DNA, 578 bp, Homo sapiens
tgctcacctcgctgaaatcttggttagaactctctttcatgtctttttttcttcagcatgcacagtatttactccttacatagcacatatcctacactgttgtatttgcctgctactttttcacttccctccaataaagaatacacattttatatacatattagtttgagccatataaaatttttgctatttgaccatttttgagatrcaaaatggaaggtttcccctgattcaaactaacatgtatacaaaaaattattatttatacatacacagagaagtggtgggatctcaaatagcactggtctcttataacatgttattaatgggagagttctcctttatagtaatcctttcccggaacttttgaaagtggccctaccacattctctaattcttattagaattacagagactgttatgaggatcaaatgagatcatgtatacagagtgctttaaaaagtgctgggcccatgatatgtgcccaataagtttagttgcgacggctatttcattggtgtttttatgcggtggttgcttcaactaggccttgtctttgttggatgccagtcaagttc

SEQ ID NO: 403125 - DNA, 578 bp, Homo sapiens
tgctcacctcgctgaaatcttggttagaactctctttcatgtctttttttcttcagcatgcacagtatttactccttacatagcacatatcctacactgttgtatttgcctgctactttttcacttccctccaataaagaatacacattttatatacatattagtttgagccatataaaatttttgctatttgaccatttttgagatacaaaatggaaggtttcccctgattcaaactaacatgtatacaaaaaattattatttatacatacacagagaagtggtgggatctcaaatagcactggtctcttataacatgttattaatgggakagttctcctttatagtaatcctttcccggaacttttgaaagtggccctaccacattctctaattcttattagaattacagagactgttatgaggatcaaatgagatcatgtatacagagtgctttaaaaagtgctgggcccatgatatgtgcccaataagtttagttgcgacggctatttcattggtgtttttatgcggtggttgcttcaactaggccttgtctttgttggatgccagtcaagttc

SEQ ID NO: 403126 - DNA, 528 bp, Homo sapiens
aaggccaaatactgccacaggtagctactctatgttcaccttatcttatatgtagtgccaattactgaggagacaaatacataattgactactcacatacctgctcctgtttccttgcaatatgtagattcagtaatgtgaccayatgctccctctttcccctccagcctgcttttcccctttaaatttgaagccctcaaaatcatctttgaaggaaggcacatgttagagtaggcagataattagacatgagcaggagaggaagccccagggggaggaagctctgcaaaatctcatgccccagagaccacccaaaacctacatgctaaatatgagcagagaggaggggagattctgtgcggaaaggaactccccaggacccgccttaagatgcccagtaatcactctttctgtggttaagctgtgagaacatagctagctacatgctggtaagaagggaagaaggacaaaggcaaaagtcctaagaggtacacaggtacaataagtacagatttaaccgctatacaa

SEQ ID NO: 403127 - DNA, 547 bp, Homo sapiens
aattccccataatttcctacacaatgattccagaaagcagaaggcaattgattttcaccagcacacgcattaatttttatgacaccctctctgagttttggaaacaaatgaagttattaatatttgaagatgtcgggtagtattttctggcccatctaattaaagagactccattgcaaccagacaaggagggggatctaaatccaaagtctagaattcgagctgggccagcgaaaagctctgccattgtgaagggaagtyggggtttggaaacattgcaggcattgaacgcattcttcaaaattgatgtttctcaatctcatgtgaacaaaatgggaagcatgagggaataggcaaaaagagataagaattcccaatttgagtcttcagtgccaccctgaaaaagggctgagattggtttttatctttctacagtagaaacaacgatctctacctccagaatacaattgaaaagaagaccaggctataaaaatgagggtttcttttaactacagagctatgtaaaaatgttagtactgctttcaaa

SEQ ID NO: 403128 - DNA, 566 bp, Homo sapiens
ggttacagttcagtttgttcttgtttctctagttccttgaggtgtgacattaggttgtctatttgtgctttttcatattttttgatgtaggcatttaatgctatgaactttcctcttagcactgcttttgctgtatcccagaggatttcacaggttgtgwaactataggtttgatagatgatgttcagttcaaagaattttttaatttccatcttgattttattgttgacccaaagatcattctggagcagattatttaatttccatgtatttgtatagttttgagggatccttttggagttaatttctaattttattccactgtggtcagagaggtacttgatatgattttgattttcttaaatttattgaaacgtgttttgtggcctattatatggtctatcttggagaatgttccatgtgctgatgataagaatgtatattctgcagttgttgggtagaatgttctgtaaatatctgttaagttcattggttatagggtatagtttaagtccattgcttctttgttgattttctgtcttcatgacctgtctagtgctattgac

SEQ ID NO: 403129 - DNA, 566 bp, Homo sapiens
ggttacagttcagtttgttcttgtttctctagttccttgaggtgtgacattaggttgtctatttgtgctttttcatattttttgatgtaggcatttaatgctatgaactttcctcttagcactgcttttgctgtatcccagaggatttcacaggttgtgamactataggtttgatagatgatgttcagttcaaagaattttttaatttccatcttgattttattgttgacccaaagatcattctggagcagattatttaatttccatgtatttgtatagttttgagggatccttttggagttaatttctaattttattccactgtggtcagagaggtacttgatatgattttgattttcttaaatttattgaaacgtgttttgtggcctattatatggtctatcttggagaatgttccatgtgctgatgataagaatgtatattctgcagttgttgggtagaatgttctgtaaatatctgttaagttcattggttatagggtatagtttaagtccattgcttctttgttgattttctgtcttcatgacctgtctagtgctattgac

SEQ ID NO: 403130 - DNA, 572 bp, Homo sapiens
ctgctctgtgttgctctgtgctgagggatcactgcctgtggagggcttagtggtctactctcaaagaggagaggagaggagagaataatattcgtgagcaccagctatgtgtcagacacattcaacatttcatctgtctgtcatcagatatgtgtatttcatgtccgctatgttccaggtatgggggatttaacagtgatgagttaggcagtttttgtcctcatggcacttatgaaatagtaagggagaaagactttattttttattttattttattttttggagatgggatttcattcttgtcgcccagcctggagtgcagtgatgtgatcccaactcactgcaacctccacctaccagrttcaagtgattctcctgtctcagactcttgagtagctgggattacaggtacccgccaccatgcctggctaatttttgtatttttagtagagatggagtttcgccatgttggccaggctggtcttgaattcctgacctcaagtgatccacccaccctggcctcccaaagtgctgggattacaggcatgagccactgtgtcaggccgggagaa

SEQ ID NO: 403131 - DNA, 570 bp, Homo sapiens
ttataaaatcacagtgattaaaacactataatatcagcacaaggatgtagtcaatgaacttgactagagaagccacagacagactccagcagagataagtacttgatatgtgatataggtcataatgcagagcagtagagaaagggtattttttttatctaagtaaaagatactaagcttgatccctatctcacaacacgtgcaaaaactaatttcaagagmtttgagacctaagtgtgacagacttaacaaaaaaatacatatttttataagataaaatagaagaatttctatttccagtaaatatttatttatttatttatttgtttgtttgtttgtttgtttattttttttttcttgaggcagagtttcactcttgtttcctaggctggagtgcaatggtgagatctcagcttaccgccaccttcgcctcccgggttcaagcaattctcctgcctcagcatcccgagtagttgggattacaggcatgtgccaccacacctggctaattttgtatttttagtagagacagagtttctccatgttggtcaggctggtctcgaactcctg

SEQ ID NO: 403132 - DNA, 570 bp, Homo sapiens
ttataaaatcacagtgattaaaacactataatatcagcacaaggatgtagtcaatgaacttgactagagaagccacagacagactccagcagagataagtacttgatatgtgatataggtcataatgcagagcagtagagaaagggtattttttttatctaagtaaaagatactaagcttgatccctatctcacaacacgtgcaaaaactaatttcaagagatttgagacctaagtgtgacagacttaacaaaaaaatacatatttttataagataaaatagaagaatttctatttccagtaaatatttatttatttatttrtttgtttgtttgtttgtttgtttattttttttttcttgaggcagagtttcactcttgtttcctaggctggagtgcaatggtgagatctcagcttaccgccaccttcgcctcccgggttcaagcaattctcctgcctcagcatcccgagtagttgggattacaggcatgtgccaccacacctggctaattttgtatttttagtagagacagagtttctccatgttggtcaggctggtctcgaactcctg

SEQ ID NO: 403133 - DNA, 596 bp, Homo sapiens
tatctatttatgtcctttgttcatttttaaattgggtttctttcgtcctattgaattgtttgagttctttatatattctggctattaacctcttatcagttacatagtttggaaatatttccccccattctagagttggtctctttactctgttgtttcctttggtatgtgtaagctttttagtttgatgcaatttcatttgtccacttttgcttttgttgcctgtgcttttagagtcacatccaaaagatttttgctgaagccgatgacaagcagcttttatcctactttttttctagaagttttatagttttagggctgatatttaagtccttactccattttcagttgayttttatatataggataaaataagggtccaaattcatttttctgcatgtggatattcagttttcccaacactgtttattgaagagactatttcccaattgtgtgtggaatctaaaaaaagttgaacccatagaagcagagaatagaatggcgattactagaggctggggcagcaggagtggggtggtgaaggggagatgttggtcaaagggtgccaagtttcaattagatggaaggtgtcaatt

SEQ ID NO: 403134 - DNA, 497 bp, Homo sapiens
aaggaaggcattcctgttccctgtaatatgatattccatgactgcaatgattcccctctcatctttggagaaggatcactttaattttaccaacccccccatcctcccttcctttctttccttaaatgtacacaatgtttcactattcacaaaatcttttatattcattttcacactttgtgtccacagtcacctatgatagcagttattattatttctactttcaagataatacaatgtggcttgggatagtgaagagatgaacacaaaagctggctaatagcagatctagacttcaagtctaaatctttaactttaaattcaattctctttccatttcctamaatgttttcttctaaaaatagtgttttcctgagtttgaaataggtgaattggagagcaggtgtatccctgacagtggaggagtttgcactagattagcactcttctgagattctgcagaataaattcaagcagtgattgtggtgttagagtaa

SEQ ID NO: 403135 - DNA, 560 bp, Homo sapiens
ttagaagagttttcctggtagtgcaggggaacaatcgcacagccaccacagctctcccgagactggtcttggcacggcctcacacctggaatgacaaagcccgtaccacactcacactttaagacaagcaaagagcagaatgattctttyagctctgagaggccatgagattcaaaagacagacactgtgaccaacacaattagggacaggaaagagggcatgagcaggcagaattgaggtttcatctaggcttcttgggtaagacagtaatgtttccttcagggtctattgctacaacttccttgtatttactcccaactcccttgcctctccttctcttctgtgtgctgtactcgctttgcaaaaccacaaccctacccaggcttgttgtcaatcttgtgtttctccacccaatagaaaaaacaaagtcttcctgtttcagggggaaggacagaggattggcatggagaagacttgacaaatgacctactcactgctagccagattcccggcccaccacttctccttcctgagccacagcttatacattatggagctg

SEQ ID NO: 403136 - DNA, 587 bp, Homo sapiens
ttgtctttctagatattttgcagatggcttgtttgaagccatgtcatagccgctgaggcctcagctaagtgctggactcttcacagctatgtgagaagcctgtgggctcagaggacagtgcatgcattaagtattgtcctttgggagattctcttgggagttcttttgggattaaggatgtatgatccaaataatttttttgataactttacagtcacttttcaggatcaggtttgttatttcacaagctgcaggccactgagaaatcagtaaaacatctacttcccatatcctcttaatgccttctcaaaagaactgattacctgccctcccaggatcaattccttcaaaaattaattattgtgtacagtggtctttaaactctcaaatcccaccccaaattcagcaagyagttgggctgggaagcacagataagggtgccaacatgtatttcttctctatataccaacttatttaatgatcacaatctgcccaaaaagtagttactgttttccactttttaccgaaaacaagatgttaaaattaagttttgaggaaggcaccaagacgcaacaggtgtacatgcc

SEQ ID NO: 403137 - DNA, 596 bp, Homo sapiens
aaaagccacgttgaaagttaacgacttaacagtgcctgagggatggagggattggggagatgttggtcaaaggacacaaaatttcagttagacaggaggaataagttaaagagatctatcttacaccacggtgattgcggttaagaacaatacattgtatacttgaatattgctaagagaatagcctatatgtgttcttaccacgaaaaaggtatatatatatataatataatatataatatatataatatatataccttttattatatatacacaatataataaaagatatatatacttttttatatatacctattatatataatataaggtatatatataatatataatatttatatatataaaggtatataaaggtatgtgtaaaaaggtatatayatgtacatatataatgttgtacaccataaatataatttttccttgtcaaaaagattttttaaaagtcagagacttaagacaataatcttttatttagctcagaattctgcgggtttccattttgggctgagctctgctgggaacttcgggtctaggatggtcccactcatgtatctgtggtagctgctgggttggct

SEQ ID NO: 403138 - DNA, 596 bp, Homo sapiens
aaaagccacgttgaaagttaacgacttaacagtgcctgagggatggagggattggggagatgttggtcaaaggacacaaaatttcagttagacaggaggaataagttaaagagatctatcttacaccacggtgattgcggttaagaacaatacattgtatacttgaatattgctaagagaatagcctatatgtgttcttaccacgaaaaaggtatatatatatataatataatatataatatatataatatatataccttttattatatatacacaatataataaaagatatatatacttttttatatatacctattatatataatataaggtatatatataatatataatatttatatatataaaggtatataaaggtatgtgtaaaaaggtatatacatgtacrtatataatgttgtacaccataaatataatttttccttgtcaaaaagattttttaaaagtcagagacttaagacaataatcttttatttagctcagaattctgcgggtttccattttgggctgagctctgctgggaacttcgggtctaggatggtcccactcatgtatctgtggtagctgctgggttggct

SEQ ID NO: 403139 - DNA, 571 bp, Homo sapiens
ataaattgcaaaaatggccataaattcctttcctcccataaagaaatggaatctatttcttcaccctttgaatctccaygtacagtgtgatttgctttggccaacaggacattagcaaacttgatgtgatcagaggcttgaaaagtgcttgagcattctgacttgccaacctgctgagcttgggaccctgagtccaccatgtgattcagtccaagctagcctgttaaaggagaaccgaggcaccccagccaacaggcatccagaccctggctgccagcctaccaaccactagacatgcaagggaggccattctagatcagccggcagatctgccagctgatggtagcagcataagagagccagccatgatcaagctgagccagcccaagacagaagaactgaatgatccacagaattgtaaactaaagagaatggcttttgttttaagccacaaagctaagggatgctatcttacacaacagaaattaaccaccacacagtcctgatgcattttttaatctgttatatacctaagccatacaaaaagacaagaaaaccatagaatggcaag

SEQ ID NO: 403140 - DNA, 600 bp, Homo sapiens
ctccgttagccttacctcattaagatcccaaagtggtctagaacaggtgtctctgggtctcgtttcatctcattaaaattccaaaatgatgcagaaaagttatatacatctctagactttatctcattaaaatctcagggtaatccagaacagagtggctccagaagaaaaggattttctgaagtctcagaggagatactttgtcccattgaggtatgcatgaccactctaaaaaaatgaaaaataatgagtggagccacaggggcaaagttggagagaggaaggcagtgggctcctttcttgttacataaagttctgtaatacaatcctcaatttggaaagatatcaccaattctagggttcgtcctttcttttctgcacgytagctgaggtcactttgttttggaaaatcaaataaaattgtcttgatctcatctgacatgccgtgggaaacccatgccctgctcaaggtctcactgaattctcttacatctttattgttctcaaagtcacatgaaccgtgatggctagcagctctccacctaactctcaccacactctctatgctttctactttgacccaggggtgaacactttgac

SEQ ID NO: 403141 - DNA, 593 bp, Homo sapiens
ctaatcactctgaacttcagttacaaatatcatctgtaaaattaagatgatatttcccagaaaaccaaatacctcatgttctcacttataagtgggagctaaatcatgagaacacatagacgcataaagggaaacaaccgacacaggggtctacttgagggtgaagggtaggaggtgggagaggataaggaaaaataactaacggatgctaggcttaatacccgggtgacagaataatctgtacaacaaacccccatgataccagtttacctatgtaacaaacctgcacatgtacccctgaacttataagttaaaaaaataaaaataaaaagaagataataatatttgcctttcattgctsttgcagaaaaaattagacaaggcatccagtgttcagcattagcagtttaagttgtgttcccagggcagcagctgtggtgttcccattgcttccaattctgcagtgagattttaggaattgtttctggctgcacagcttccaaatcctgttcatcagctttgctggagattctgtgcacaatctaatattccctaataaattgcccttctgctcaaaccagttttgattgtgt

SEQ ID NO: 403142 - DNA, 590 bp, Homo sapiens
ggtgagacatgttttcacacagagcataagataatgagaatttctaatctggactctcctcattattaaagcacatcactcagaattacctcagtagggaatcttccgtgaatgaagccttatgtcactaaagtcattaatattacttgtttcaggcatgaatgagaccactacataaattttgctttgaaaaatggggaagaagggaaaaacaaaaagtcagtatgtttttcttaygttggttattatgatcagcagcagcaccaacaatgagtgagctctgaaattaataaacataaatgcagaaaatataaacagccagagctatcttcagccaaagatcaatcaagcagcaatctcctgatattgtgcaactctaggggtatgcctcagagtggattgattgcttgctttttggaggcattcttcctgtttgagaaggaactgtaggataatcatcagacaggtttttgcagcctgaaatggggtctctctatagcttggttttgttttgtttgtacaactcctcagtaaaagttaccaagaaggtataaaatgacaccgcacagctctgttgcaccatagtattc

SEQ ID NO: 403143 - DNA, 574 bp, Homo sapiens
tgggttgccactgggaggaggaaaaaataaggcttttaaaataagtgccaagaaataaaaagctaagcataaaggaatgaaaggcgagaatgatgcacttaaaaatgtagtctttcctttcctccagacttcccataggacgagtttctaaataacactaaaagtggacttttcaaactcaaactttaaaaatggttaaaaagccatggtttagatttttaaagtgaaaggtgccatttgcctgcaaccttttcaaagtcaccctaatgaaatattgggaaaattttccagtccacagaggcactttctgaarcctctgtcctttctgttaattagcacaattaacctctaagctggcaagcccctctggctcgccactaacaggcccacagaaatgtcagattttcaaagggcttcacataagtgaatggcaaagtccaccttttgagcaactacatttagagctgggggtctccatgaaaatcttttttctgcacctgtagactgcactcctgactccttacctacaacttccagcacctgtgctcactgacatgcacttgaattctctcca

SEQ ID NO: 403144 - DNA, 602 bp, Homo sapiens
tattccagtgtcttctaatctcagctatgttatagaacagagattggaaaactaaagcctatgggtcatatctagtctgtcacctagttgtgtaaataaagtttcatggaaacacagtcatactcatttgtttacatattgtttatggctgcttttgtcctgcaacagtaaaactaatagttataacaaagactatatggcctacaaagcctgaagtatgtactaccctttacaggaaaaatctctgggttcaaaacacctgyaaactctggataaaatgctcaaaataaatttttaagggaggggtgagatggcaagaaaattagtcaaaaatgaccccccaaaaaagaagtcacaaaagtgagtgagcacttaagctagtgaatggccttgacgatacaggatcgtcatacaaagaaacctgcaatcagtgacacccacaaaacctggagccctaaagagtgacaaccccaccaggcaaactagcaaagaacctatctcaaaaagagtgacagtaaggaagtttgcctcatttagccttgtttctgagtaaaggggaaacaagtcgcccctaagaatttataaccactacccaaccctca

SEQ ID NO: 403145 - DNA, 560 bp, Homo sapiens
ggcaatttgtgccaggtttattcaggtgtttcttccactgatctcacttgcaatgactcatatagctacagtggattggtgactcaaatggacggattcatctaaaacagtctcctttcatctggttattaggaagtcagaatatcctaattccctttcatgtgaccctactagcaggttagctccatgcagcacatccaccctatgggttcagagttccaatcagtcagaggagaacaaacctattgtgcaagcactttttaagtccttgtttgcatcatatttgctaatttctctaaatcctatttgctaatttccttaaagcaaatcatgtgattatgatcagattaaatggatacagaaataaactccatttcttgattgaggatcaacaaagttgcattgtatagggacaaatgcacatggataagagatattattgaagtcgtctttgcaatctaccatagagatccagcaaagaactactaagttggagaattgkatgcagaaagcccaagagcatcttaatgcacaatccaagggacagagtttggagaatg

SEQ ID NO: 403146 - DNA, 581 bp, Homo sapiens
ggagaataaattccacatttcagcatagccatccagttgccaggattatttattcccacatagcaatgaccccctaacttgcagtttctctctcacattctttcttatgcccccaattttatttttgcttctatgtgataaatttcaggcaatctggagccaacgagaagcaaattttgagataaggatgtaaaggtgttaaaagcatttattatgagcccaagggtgtctacttaaaatgctgatgttctgttatccacctgatataattgagaagctgagaatctggagtggggaatttcattccatggctcttcacaatttcaaagccttttcatatgccttaatttactgtcacgtcattccctccctcactattgacctcctaattgctaaattccatggaaattctgggtttacactgaccttggccttcctgcagcatttgaagctcttgacacatttgctgctatgttctcagcagtgtgattckatccagtttcttcccatcactttctttactagacctcattggtagacatctttcttaacacactccagttttggagtttccctgggtt

SEQ ID NO: 403147 - DNA, 549 bp, Homo sapiens
ccaaattgttcttgtagttctgtcaagttttgtttttttttaatatcgtgaggtaattttttggttcattaagtttgaaattgttatttctacttggcgaattgggccttttatcattagacagtgacttcctttttctctagtcatacttttcgtcttgaaattattttttgtgatgttattttatgtgctgatatatatacacacacacacacacacatgcacacacaaacacatatatatatattccatttatttgatagtatttctgtgctttyaggtttcatgaggttaggggtataggatgaagggtatagagaaggggagggctctggttacctattgcttggttaaggcgtccacacttgttgggctgactgtctagacatcctctctcccagctccctcaaacccaaaatatatttgcatgaattccaataaagaaatcttctcagagaagcatgtgctggtaccacccacaccagctggaacatttttctctcagctctgacctacactagaaaatacgtggaaggaatttttcaaaac

SEQ ID NO: 403148 - DNA, 539 bp, Homo sapiens
atgcttcacaggcccttctagttttctgggccatatgactagatctggccagtgaaaggaaagcagagatgaagcgcgtcatttcagagctgaagccgcatcacttcagagctgaagcagaaggcctgtgtaaaactgttactcctctctattctcctgctccaacaatcctggaggaggcctcttgttgaaaaccgtctgatattctcagtggctgccagcaggacagctgccctagggaatcacctggacctgctgaagactttgcaaggaaggtaagtaaagttcttttgtattaagtcactgagactttgggattgtttggttcccgtagcctgtcccttcctgacaaacaagagatttgaaaaaaaaaaaaccaccccattacctgtgtagacaagggtaactttgagtcataaagaggttgaccccagcagtggtcttgatccagtgctcccaagctgactgtgtcctgatgaatatatctgtgtrtaagataaagaagcccaatccagagagtcacagatttgggcacctaa

SEQ ID NO: 403149 - DNA, 500 bp, Homo sapiens
tactcatgaaccacattaatgttttacacattcaaaaataagttaatcatggaaggaaaaaagcaaacattaaaattaaaaatagagamaataaacacttcaactgacatttgaaaacagtatttggattgcataacctatagaataatacaacaccaaaaggcaatgtataagccttttttaggatcctgatcaggcaacccaacttcaaaagaaaatttgagacaatcaggtaaatctaaatatgaaatagaaacaaggtaatactcggaacttgttatttttgttaactgtcataatggtatggtggttacatgggaaaagttcttacagatgcatgatgaattatttaaggatgaattgatgtgatgtctgggaattcctttgaaagctgtcaacacggaaaaaactgtggttgggatatggggaaagatgagtagagcaaacagattggcaaaatactgataattgttaaaacttggtagtgggtacatgcaggt

SEQ ID NO: 403150 - DNA, 563 bp, Homo sapiens
gaccctatagcaagtatggacttagacatggcagagactttgagtatctctgagaggcatcagggagagtccaagggaggaatagtacctccagctcttgaagaaacagagaggctagtcacaccagccagggacatcatagcagcttctggctgaatgcttggggtgggactgacctcccctgagggaatacactctagagcacagcctagccctacctcttcacagcctaagccagaagagagtcatagggcaccaggtcaattcaaggacactagattcccttctctacagcccacccacctgataatacactcagggggatgagatagagcctatgagaagagcttcagaaatctcaagagagttggtcatagaattttgtgcatgggaggtcactgcaaatccrgaaaaaccagggaggaaaatccactctgtctagttctggcagatgtggaaggagggagggagatggaaatggggataaaggaatccaatggccagagctgtggatgggatggagttggcaaccatgagttacctttggttttccagtggcatga

SEQ ID NO: 403151 - DNA, 629 bp, Homo sapiens
gagagaacacttgcaatttttctagctgacctgtgtaggatttctagtttcctcttagctaggacactccagggtggaatggattttggcaacctgggaggaaggaaggcagctgtgtctgcgctccctaaagcagaaacttcctctcccctctcttccctcctatcattccaacatatcatgtgaattctcakggattttgctttacttgtaagaaatgtaggagtgtggggcagaagtgggctggcaaatcgtattctctgagaatatggcagtatgcaaggtacttcacacattatttgttttattctcataacagccttcctatacttttattatttctgttccatcagcacattcacttggctcttatattcagaatataaccaggatcaaaccatttcttatttccttacttgcctgttgatccaagccacaactatctctcacttggactgctttaatagtctcctaactggcatccctacttccacccttgactccctgctctccacccagtggccaaagtgattcatgaaaaacactgaggtctgatcatatcacttctctgtccaatgccatccaatggcttgccacactctgcagtaaacctgccattcttattgtgg

SEQ ID NO: 403152 - DNA, 596 bp, Homo sapiens
aaaagccacgttgaaagttaacgacttaacagtgcctgagggatggagggattggggagatgttggtcaaaggacacaaaatttcagttagacaggaggaataagttaaagagatctatcttacaccacggtgattgyggttaagaacaatacattgtatacttgaatattgctaagagaatagcctatatgtgttcttaccacgaaaaaggtatatatatatataatataatatataatatatataatatatataccttttattatatatacacaatataataaaagatatatatacttttttatatatacctattatatataatataaggtatatatataatatataatatttatatatataaaggtatataaaggtatgtgtaaaaaggtatatacatgtacatatataatgttgtacaccataaatataatttttccttgtcaaaaagattttttaaaagtcagagacttaagacaataatcttttatttagctcagaattctgcgggtttccattttgggctgagctctgctgggaacttcgggtctaggatggtcccactcatgtatctgtggtagctgctgggttggct

SEQ ID NO: 403153 - DNA, 596 bp, Homo sapiens
aaaagccacgttgaaagttaacgacttaacagtgcctgagggatggagggattggggagatgttggtcaaaggacacaaaatttcagttagacaggaggaataagttaaagagatctatcttacaccacggtgattgcggttaagaacaatayattgtatacttgaatattgctaagagaatagcctatatgtgttcttaccacgaaaaaggtatatatatatataatataatatataatatatataatatatataccttttattatatatacacaatataataaaagatatatatacttttttatatatacctattatatataatataaggtatatatataatatataatatttatatatataaaggtatataaaggtatgtgtaaaaaggtatatacatgtacatatataatgttgtacaccataaatataatttttccttgtcaaaaagattttttaaaagtcagagacttaagacaataatcttttatttagctcagaattctgcgggtttccattttgggctgagctctgctgggaacttcgggtctaggatggtcccactcatgtatctgtggtagctgctgggttggct

SEQ ID NO: 403154 - DNA, 537 bp, Homo sapiens
ggactcagttctgccacttgaacacacaagctcagacagtctgctggaaagtctacttctttacctgaaagtgattcaagttaagttcgattccatggaatcatctgtccaccattggtcacaatggagggggcacatcagcctctgtcaccttcctccccctccctgccacacttgctcatcatgctaattgatgtggatgcctttgtctgctcatgagtgggatgacaggctggctgttggaacaagaaggtgcactccatctaaagagtcttcatgtctcacttctccttgtgccagctgcttgaacacrtcatggaaggacgggcatggccccttcttcctgcttagtgtaaaatactccattgcacacctttgttaagctgtcataaaactgtttaaaaaccttaggtggaaggccgaggcaggcctactgtttccatgctacttaaaatgagatcattcactgttaaacctggaaaaccactgtgtgtgttatgtgtgtgtgtatgtgtgcgtgtgtgagagagagagaga

SEQ ID NO: 403155 - DNA, 522 bp, Homo sapiens
agccttgctcatttgctcagaagtcaaggcccaggatggaatctcattgcctgagaatgcrggagtacgaggagcttctagggagcccttgcttctgtcgtgggagggcagcctgtgcatttaccatcccactaggagagcatgcggtggaggagaggtgctccccaggaaaggactggcggctgtaagatgggagcacaggatcctttgggagcagggcaaccccagcccaccctcaccctcttgattcctgcctgttccattctcttccatggcatggaaggagccctcaccccaggctccttgctggagatatgacggggagcaaatagctgtgacactggtccattctgagctcctgcagtgatcctaaagccaaaatgaatagtacccaatgcctgtggccagggagcttgctgtactgggtgggaaatggtcctatgaagaatgaactagggatgggtcattggtgttaatcttagatccccatgagtaagaaaggacatacctttgttgtctgtg

SEQ ID NO: 403156 - DNA, 522 bp, Homo sapiens
agccttgctcatttgctcagaagtcaaggcccaggatggaatctcattgcctgagaatgcaggagtacgaggagcttctagggagcccttgcttctgtcgtgggagggcagcctgtgcatttaccatcccactaggagagcatgcggtggaggagaggtgctccccaggaaaggactggcggctgtaagatgggagcacagratcctttgggagcagggcaaccccagcccaccctcaccctcttgattcctgcctgttccattctcttccatggcatggaaggagccctcaccccaggctccttgctggagatatgacggggagcaaatagctgtgacactggtccattctgagctcctgcagtgatcctaaagccaaaatgaatagtacccaatgcctgtggccagggagcttgctgtactgggtgggaaatggtcctatgaagaatgaactagggatgggtcattggtgttaatcttagatccccatgagtaagaaaggacatacctttgttgtctgtg

SEQ ID NO: 403157 - DNA, 585 bp, Homo sapiens
gcttgtacttgggagacagaggttgcagtgagccgagatggtgtcattgcactttagcctgggccacaagagcaaaactctgtctcaaaaaaaaaaaataaaaataaagaaaaaaaaaagaaggcctcaggacactggctccttgtcctctgagtgcctgctgtgcgtccaggtcctcagcgtgatgctcacctggaaggcattctgaataggacaagacccaccatgtcaccccccctgctctagtttattcattaattcaattatcaaatgtcagtggaatgccttcaagggcggggcagggttcagagccctggggacacttccataaactcacaagcaaacgttccttgcgaaacctacagttcagtcaaggagacttctaataaataacaaagttaacaaataagagatttcatgatgtgtaggagracaggtgctagaaaggagcgggcagggggctggggagtgctggcagcagaggggcccggggtcagcaacactgagaagagaaagatgagcagagacttgaggaaggcaagaaccttgtccacgtgggtgtctgggggacagccctcaaatggg

SEQ ID NO: 403158 - DNA, 585 bp, Homo sapiens
gcttgtacttgggagacagaggttgcagtgagccgagatggtgtcattgcactttagcctgggccacaagagcaaaactctgtctcaaaaaaaaaaaataaaaataaagaaaaaaaaaagaaggcctcaggacactggctccttgtcctctgagtgcctgctgtgcgtccaggtcctcagcgtgatgctcacctggaaggcattctgaataggacaagacccaccatgtcaccccccctgctctagtttattcattaattcaattatcaaatgtcagtggaatgccttcaagggcggggcagggttcagagccctggggacacttccataaactcacaagcaaacgttccttgcgaaacctacagttcagtcaaggagacttctaataaataacaaagttaacaaataagagatttcatgatgtgtaggagaacaggtgctagaaaggagcgggcagggggctggggagygctggcagcagaggggcccggggtcagcaacactgagaagagaaagatgagcagagacttgaggaaggcaagaaccttgtccacgtgggtgtctgggggacagccctcaaatggg

SEQ ID NO: 403159 - DNA, 592 bp, Homo sapiens
tgtcatttaatacacaacttctatgagccagatgtattgcatatattgctctggaaatgattctcaaaacaggattctaagagagacaatattattcccgttttaaaaggacaaaattgaggctcaagagatttgagtgacatactcagagtcaagctgttataaagtagaccaatgtgagctcagagcaaatgttctactcatgagactctacacatttccgattggggccactgtcacatggtaggttgctggtttatacgttcagcagcagtggagaaatttaggtaggatttaaggaaggacctgctgagcattaaatggtagaatggatagayaagttatagatggttgctatcatttagacattcctctgccaagcctcatgttgaaatttgatccccaacgttgaaggtggggcctaaaggaggtgtttgggttgtgacggtggatccctcatgaatgtcttggtgctgtcctcttggtgataatttattgctctattaattcctgcaagagctggtggttaaaaagagcctggtacctccccattccttaacccttgcttcctctctcaccatgtgatttttgc

SEQ ID NO: 403160 - DNA, 591 bp, Homo sapiens
ttggccttaaattgtaatcatataaccatataataaagaatagaaaattatagtaaaaatacaagtgtacatataacttttacagtctgtaatagtgaattcctgtgatagtgtgttattaggattatatatatatttttaagatggctgccaygaagtgaaagtcaaagaaatatcaaaagtacgcctggtacctcttgagtgtttttgcattgtaggtggaataggaacattgttatgatacacatggacaatgttccctagtcatttctattccagtggcaactatgtttgtaacaccattgactataagggtaccagagctggacccaaaaaatgtgagctgaaagggtggggtcaaagacaaggaacatgaaagaaagaagttagaagctagaggagaatgggaaaattgtgtgcagtctgacgtaacagtggtcactctgttaaaataagcttatttccttgataaagtcattggcaacacctggaattatgcaattttatttgcagggtgatttccaaatagttggtgccctacccaaataaatgtctcttggaaactcgagttagaatgagggctgagctatt

SEQ ID NO: 403161 - DNA, 646 bp, Homo sapiens
tattatctcagcagtgaagtccctgcagatgatttggcagcctgctcaaatgcagtttacctctgtgtccctgactttccctgttctgtcctggaccatggctaggagacatgtctttgcactaatgttgtgaactgagaataaaactgaaggcaagcgaaaaacttttctgtgttagattgttgagcctgccctagaccaaggaggagtcctgtttgatagatgtacagattacctacaagaatgattatatgcagtattagatctttaacatcagagagagtgtcttgattccagttaaaccgccaggcctagcaaagaggctgttgcacattaagggtcaatagatatttggtgaataaatagaagaatgaaagactgattaaatgattaaatcatgaagagaccaktttattttcaccttctgaattacattgagaccttgtcctggtagaatgagcacatatagtatgggaaaatctggtttttgcaagatatgtaaataattttatgaggtaggaggaccaatgaactatcagattttcaaaaataagctaaagctgtaatgtcaggacaaggggaaagcaagatttgatttacaaaacttcaatgcatatacgacattgtagaaacatgtctattatat

SEQ ID NO: 403162 - DNA, 624 bp, Homo sapiens
gacatccaaaataaagactgcgtaactataacataaaatgattacaaagccaagaaactcatagcattggttgacagctaataaattagtttgaactttaagttttcaaagaatttyctaatggaaaaaaattttaatgtttatttaactgattatgtattctagagaactttatgatcttgcttttcttttgtgaccatgaattcctgatttcctggtgtttatgtttatgatttggctgataatcttgtttcaagtacttcttacatggcaagtggaattgctgttagaactcaccacatgtcgtcacaattctaaaattagttaagaatgcattgtttgagcccacatggacttcctttaaagttggggaatatccttcatgtatttgaatttggctactttacaaccaacatgtactaatttagaaattcacagcaccagtatgtgaacattttgtagtcttcaatttatgcctctgaaaacagtagtctccccaaagaaaaaaaatagcctcttctagaaaacgaagtaaaggcaaaaccaagttgatatatttcaaaagctgtatgcagcatccagttcagatataattttcaaagaatgaattttaatgcacacagc

SEQ ID NO: 403163 - DNA, 531 bp, Homo sapiens
ctcgtactttacctgcctcagacagcttctgaccttttctgatgtgcttctactaatctatcagaggctgagaagccagataactaagctttaaaagaactgcatatttaaaaagtcaataaagtttgcctgaacctctacgagccttactgcagggctttggtgtagatatttctggcttctctgaggcctttatcagagacttctgacaagctggaccttctgggtaagtggggagttactgtattttaatcgcttagtgtctactttatggaaacacagaataaaaatgtagacataaacagaatttaaactagaaggtaagcacaaactgacccaggccatttgaaatgtaatttaatataaaaatattcagtttgcattcagcttttctattatggagttgagaagtaaagggaccagcagataagaataatgaacaaattgttagattatcctctacwtacacttcaaataaaccagcaaatcatttatttatttgcctaacagttgctgccgtgagtatgggcc

SEQ ID NO: 403164 - DNA, 656 bp, Homo sapiens
tctgaattccataaatcttgcttttctcattaaagatattccattttatacatgcttgatcaacaaatatgaccaaggtctacggtgcaactttaaaagtaacatggaacctttagaacaaaaatgactaaaagataaatcgtgattttttcttaccgtttttctctgatggagatatttgttttcaagtgtatgctaatggcagacatgaaaactttaaaaaattaagatatagtaattgtaacttgtatctacatatgtacgttatgatacattaaatgttttaatattctatttgatgtaattggatattattcccattttataagagaattagagaattgaataattaaataattgtccagatagaaatctattcaagcctttactcctctactcgatggtcatgtggtctaggacattgtaagtgacattctgagcctaattttcatctagtattgtaaacagagctaatatctttttattgttagttatcttgacagctaaatacattgtagataaaatgctgggtacactgtagataatcaatrtgatttcttttctccattagaatacatcttctagttttataaagattcaaacatttgtaaaggaaatcaaaatattaaatagttttataaagttcaattgccctg

SEQ ID NO: 403165 - DNA, 551 bp, Homo sapiens
ctgtttttatttccttttttaacctaacttagatgccacgattcatcactataagcaatcccttgcaaacatcatcaactcaaacttggtttttctccaacatgttaaaaccctacttggtaaaactcggctgttttcttattccactactatatgtgagcagcctaagtaggtggaaaaaaaacccaccaaacttaataactgaacctactcaaaattttgaccatacatttaaagtggaacctcaacamtgacagcaagtctaccacatttcctaaattcatgctttcattttttaagaggactctttcacaccatttcctctcttctcaaatattcagtaagatctaactcactttattattaaatgatcacttcaatatttatgtagtcgaaaaaatagaagaattctgaatggaataaccctcacttctcttccctcaaatctaccaacctgcctgcacttggatcaatatatgctgccttttctcctgctaaaattgatgaactgccactgctctatctaaagacaacccctgcacatgtgcact

SEQ ID NO: 403166 - DNA, 585 bp, Homo sapiens
caccacttctttattttctctcttccttcttctcctgtttttatttccttttttaacctaacttagatgccacgattcatcactataagcaatcccttgcaaacatcatcaactcaaacttggtttttctccaacatgttaaaaccctacttggtaaaactcggctgttttcttattccactactatatgtgagcagcctaagtaggtggaaaaaaaacccaccaaacttaataactgaacctactcaaaattttgaccatacatttaaagtggaacctcaacaatgacagcaagtctaccacatttcctaaattcatgctttcattttttaagaggactctttcacaccatttcctctcttctcaaatattcagtaagatctaactcactttattattaaatgatcacttcaatatttatgtagtcgaaaaaatagaagaattctgaatggaataaccctcacttctcttccctcaaatctascaacctgcctgcacttggatcaatatatgctgccttttctcctgctaaaattgatgaactgccactgctctatctaaagacaacccctgcacatgtgcact

SEQ ID NO: 403167 - DNA, 627 bp, Homo sapiens
ccaggcaatttttggacaccggatttaatcaatcctcagacttctctttttaagcaagggcatagaaaagttcactcacagtttgactctcccagtttgtaagttctcttacctaattctgagcttcttttgccccagtcttcctgactataaaagtggaaacttatttctaactctctttttattaggtggcttttaccctagttcatgggtcagcatgacatatgtttaggccaagaggaaattcttagcacaacatgagggyctcatgcacttgaaatggtgtactcatttctcagtgaacatcaggaagatctgtgttctcaatgtgtgctagaatactttcattggggttcttagccactgacccttagtatgagtgtaattcatctatgaaaaattgaaacaaggaaaaatacactttcattcctactacataacaagaaaaggattttaaagcaaattttctatggcagtatcataatccaatgaatttatttgcacaacttttcttctccctttttctttcacttccacctgcctgaattgtacctgtgcttatctgatacatcagtgaagtagtttatgaagcccaaccatctgtacctttttctttcttaaatgcat

SEQ ID NO: 403168 - DNA, 579 bp, Homo sapiens
ttttttagccatacagcatttttaattaaggaatgcacattttcttttcacacataatgctattgcacatttaayagactacaatatagtatagacataactgttatatgcactgagaatccaaaaaattcatgtgacttgctttatgcaatattctctttattgtagttatctgaaagcaaacctgaaatatctctgaggtatacctatataaggataaaaatacaggaggacaggaatggtggctcacacctgtaaccccagcactttgggaggccgaggcaggaggattgcttgagcccaggagtttgagaccagcctgggcaacatggtaagacctgtctctccaaaaaatttaaaatattatccgggcataatggtgcatgcctatggtctcagctactcggaaggctgaagcaggaggatcacttgatcccaggagtttgaggctgcagtgaactgtgatcgccccactacacttcagcttgagcaacagagcaaaaccttgtctcattaaaaaaaaaaacatgaaaatacatatttcttcataaatatgatctttaatagtttattctttaa

SEQ ID NO: 403169 - DNA, 585 bp, Homo sapiens
atgggcagaatgggcggttttatttagaaatgtgttcattttcagtaattctgtggcttggtcaataataaagtgctatgaaggaatacataaaaatacctgcaataacatattttaaaaatacataaagtaggccgggagcggttgctcacgcctgtaatcccagcactttgggaggccaaggcggggggatcatgaggtcaggagatcaagaccatcctggctaaacagtgaaaccccatctctactgaaaatacagaaaattagccgggcgtggcggcaggcgcctgtagtcccagctactccagaggctgaggcaggagaatagccagaacccgggaggcggagcttgcagtgagccgagattgcgccactgcactccagcctgggcgacagagtgagactccgtctcaaaaaaaaaaaaaaaagaaaatatacaaaatacacacaaaaaaccataaagtagcacagagaagataatacaggggacattgcagtgcacttcccagataattmtttaggattaaggcacttcctgctccatgtgactggagtcttagctgctgattgctcatagctggatcc

SEQ ID NO: 403170 - DNA, 602 bp, Homo sapiens
tacaggggacattgcagtgcacttcccagataattatttaggattaaggcacttcctgctccatgtgactggagtcttagctgctgattgctcatagctggatcccctctcctgtagttggcattaaaggaaagtgcttcacccaaggctctactcctttcctgaggacaacctgcacccaataattggtcactgtgaggatacaaaggtatggaccccttgtatcaggtgggagagggagtgatcctggctccggaaatcccccatagtgttggtggaagcctctgttgtactgcattgctgttcagcttcaccctttgcccagtcctgtattcctatctctcataggtgttgtttccaagagctcttctaaaagctttcattagtaattttctgtctcagattctctttctcaaaaaacctgacctaagagctgtattcatctctggcttgccggcactgagtcyctcatttccagtggtaggtggggcactgatagcccctggcacctggttgcagtgaaattcttaaaacttccatcagtgtagaaaatttcccttcagtgtaggaaattttacaggcaatatcacaggtgcttaaga

SEQ ID NO: 403171 - DNA, 556 bp, Homo sapiens
gactgctgctgcattatccaaagtcccattcaggggtgaacctaaaagagaagagttaggcaaaactctttcactgggtagagatttgagtggtacacttgacattttttaagaaaataaaactgtcctgagataaaaaatatattggaattcaaaggaagcactgaataccttacctgattggccgggggcctgccaggacaatgaaagatagggttccagaatatctagagaagaagtagatagatggattctggaattccatgaagtgtgaagaaccttgaattacatattaacacatactgaagagcagctaacaagtaggagactgctactaaaaccaattasaggaattcagccagtgacattcaatgtcacttgacattagccattctctgtcatcagccatcccaagcgctgacacagtgtgtacctgaattgagtagccatggtgacaggaagtgaagctacgcatgagcccaacaccatggggtcccattcaccaagtctgatccaactgtctaaactatcagccacagagaccaatgctgagttt

SEQ ID NO: 403172 - DNA, 626 bp, Homo sapiens
tgaataccttacctgattggccgggggcctgccaggacaatgaaagatagggttccagaatatctagagaagaagtagatagatggattctggaattccatgaagtgtgaagaaccttgaattacatattaacacatactgaagagcagctaacaagtaggagactgctactaaaaccaattagaggaattcagccagtgacattcaatgtcacttgacattagccattctctgtcatcagccatcccaagcgctgacacagygtgtacctgaattgagtagccatggtgacaggaagtgaagctacgcatgagcccaacaccatggggtcccattcaccaagtctgatccaactgtctaaactatcagccacagagaccaatgctgagtttctgatatggcaccatctctcaaagaaagtaacaagtcacttggtagaaattggtacaatgggcccctaccactctttgcctcaactaggaccagcctcaaatgctcccaaattacctttagaatggtctgagatcttgaatgcagctacatggcagttctgcttctccctttgcccaacctcacttcctttgccccacatgggtattgttctgagagtgatccccaataaatct

SEQ ID NO: 403173 - DNA, 709 bp, Homo sapiens
gaagctacgcatgagcccaacaccatggggtcccattcaccaagtctgatccaactgtctaaactatcagccacagagaccaatgctgagtttctgatatggcaccatctctcaaagaaagtaacaagtcacttggtagaaattggtacaatgggcccctaccactctttgcctcaactaggaccagcctcaaatgctcccaaattacctttagaatggtctgagatcttgaatgcagctacatggcagttctgcttctccctttgcccaacctcacttcctttgccccacatgggtattgttctgagagtgatccccaataaatctcctgcaagaaaaaatctgtctgattgtttcccaggtagtccaatctaagaccgatggcaaggtccaggatttccccaatgmtccaaagtaattacctccagaagacaacatgaattaatatcaatggtcatttttccacatctgcaaattcagcaagatggtattacttcttaagaattttctttctgctcaagggtgagttagcagcagtaatttggagaaagaaattattgtatttacattctattgaagttacttaatgtctccctgtcatgacctagaaagtcacagaattgggtctgagaaaagaccccacaaatacgtacagtctaccagagggcttcaagcaagtaatactgtctctttttatatattatgaatg

SEQ ID NO: 403174 - DNA, 545 bp, Homo sapiens
actagctcagagaattggctctattcctgccaaatggatggcatgagaaaactcacttagcttctctgtgccttggcattttatttttaaaaatgaagccatggggataaattgtttgcagtacttctagtcctacaattctatagcaattcttgtttccccaggcttgttattttaggagatataaaatatttaataattttagaaatatttcttgagcacagactctattaataactgtttccatttatacgtaatgttatrcttttacaagttgttttcacatttctttacctcatttaatacaatgagtaagatgtgagacaagtaattatatctccattctataaatgagggattatacactcagagaagttaagtaagctacccaagattacagaggattgaaggacaggcagaaaactcaaagctggatcccctcattcccgggctgctccactgtctaagctatccacaactgcatatgaagagcttctttgaaacgaggtttcactggatataagaagtactcattgctcccaacc

SEQ ID NO: 403175 - DNA, 587 bp, Homo sapiens
aattcacttttcttcaataagcacaattatttaaagaaagttaccacatccccttctttattctattttccaatttcagttctctcagttaacttttgttgttccttccactatatctcaaatcaaagagatggtaataaaatcctgactgctatcctctagactcattccagtgtgtcaatggctgctttaaaaagtggcagtgccaagggaacacagtactgcatgtagggactggcaggtacgtagaacctaagactgggtaatccatgtaatctaaatagtacttcttctgttctttttcctattttgctttttgtgaggctttaatttgccttgaaatctgaatcatcaaaatttgtcatggaacagcrcatgaagttttgtctatacagacttaggtgaccccggcctttgaagctagaagagtatctagtgatcatttagtctaactggttcatttacagatggaggaaaatttaagaagatatgccgagtgggagagctttctgaaaagttcacatcttccttaagggatgtacacaatgggacattcagaaggcctgtagccgtatgtcatttaatac

SEQ ID NO: 403176 - DNA, 587 bp, Homo sapiens
aattcacttttcttcaataagcacaattatttaaagaaagttaccacatccccttctttattctattttccaatttcagttctctcagttaacttttgttgttccttccactatatctcaaatcaaagagatggtaataaaatcctgactgctatcctctagactcattccagtgtgtcaatggctgctttaaaaagtggcagtgccaagggaacacagtactgcatgtagggactggcaggtacgtagaacctaagactgggtaatccatgtaatctaaatagtacttcttctgttctttttcctattttgctttttgtgaggctttaatttgccttgaaatctgaatcatcaaaatttgtcatggaacagcgcatgaagttttgtctatacagacttaggtgaccccggcctttgaagctagaagagtatctagtgatcatttagtctaactggttcatttacagatggaggaaaatttaasaagatatgccgagtgggagagctttctgaaaagttcacatcttccttaagggatgtacacaatgggacattcagaaggcctgtagccgtatgtcatttaatac

SEQ ID NO: 403177 - DNA, 627 bp, Homo sapiens
acactaatgtggttagtggatttgttttcaagtacagtgcatgcctctgtaagatggacagttccttgccctcatccagaatatgtaaatacaaagattcctgggcagaacaaggagacaagatgaatgttatacagtrgttaggctttaatgttaacttcagagcaggctttgacacaatgctgaaattttaagctgttgtaaattttgtgtgacaggtaggctttgaaaaagttaaaaaaaagtcacggaattgaactttctttatgtggttttcaaactttattttttatttttttaagcagctgaactcttttttaaaagaaaaaaaatggaacctagtatataaaacacttatgaggatgagctgctttgaatgatgtggggataagggacccagagcctcacttgctcaactccaattcccaagtcaccccctattgaaattctagtgctccagaaagcccagtgtaaaaattactgtattaatgattctaccttttgcagagttcttcaaactatagtaaacagagaatgttgtgtaagatttactgttacatgacctttatcatttgactcatataaatgtctattttatcactggaaatacttgatatttccaaggtc

SEQ ID NO: 403178 - DNA, 627 bp, Homo sapiens
acactaatgtggttagtggatttgttttcaagtacagtgcatgcctctgtaagatggacagttccttgccctcatccagaatatgtaaatacaaagattcctgggcagaacaaggagacaagatgaatgttatacagtggttaggctttaatgttaacttyagagcaggctttgacacaatgctgaaattttaagctgttgtaaattttgtgtgacaggtaggctttgaaaaagttaaaaaaaagtcacggaattgaactttctttatgtggttttcaaactttattttttatttttttaagcagctgaactcttttttaaaagaaaaaaaatggaacctagtatataaaacacttatgaggatgagctgctttgaatgatgtggggataagggacccagagcctcacttgctcaactccaattcccaagtcaccccctattgaaattctagtgctccagaaagcccagtgtaaaaattactgtattaatgattctaccttttgcagagttcttcaaactatagtaaacagagaatgttgtgtaagatttactgttacatgacctttatcatttgactcatataaatgtctattttatcactggaaatacttgatatttccaaggtc

SEQ ID NO: 403179 - DNA, 627 bp, Homo sapiens
acactaatgtggttagtggatttgttttcaagtacagtgcatgcctctgtaagatggacagttccttgccctcatccagaatatgtaaatacaaagattcctgggcagaacaaggagacaagatgaatgttatacagtggttaggctttaatgttaacttcagagcaggctttgacacaatgctgaaattttaagctgttgtaaattttgtgtgacaggtaggctttgaaaaagttaaaaaaaagtcacggaattgaactttctttatgtggttttcaaactttattttttatttttttaagcagctgaactcttttttaaaagaaaaaaaatrgaacctagtatataaaacacttatgaggatgagctgctttgaatgatgtggggataagggacccagagcctcacttgctcaactccaattcccaagtcaccccctattgaaattctagtgctccagaaagcccagtgtaaaaattactgtattaatgattctaccttttgcagagttcttcaaactatagtaaacagagaatgttgtgtaagatttactgttacatgacctttatcatttgactcatataaatgtctattttatcactggaaatacttgatatttccaaggtc

SEQ ID NO: 403180 - DNA, 499 bp, Homo sapiens
gtcttaatcattctctcattcaggaatggcactaaagaactcttagataaataattccaactatctgttttattacacacacatagaatctggcacagagtaggtgatccctccaaaaagactgtcattaaatgaaaaarcagaagcagctaatatttacttgatgattatacttgtgtcagcttacaccatgtgctgacactatgccaggtatgtacataaatgttcatgtattcctgatgaaacctcatggtatgtcattatattcatgttgaagctgaaaaacagttaagatgaaggtgtttatgaaacttcccactggtcatagttaaacgatagtgcagctatggttgaaactcaggtctatctagttcaaaattttattttctcattatattacattatctttccacagatctcattagcatctcaaaaactctatatcttaatatattcttacagatttctttccagagagaaactttacaggcaaggaaag

SEQ ID NO: 403181 - DNA, 499 bp, Homo sapiens
gtcttaatcattctctcattcaggaatggcactaaagaactcttagataaataattccaactatctgttttattacacacacatagaatctggcacagagtaggtgatccctccaaaaagactgtcattaaatgaaaaagcagaagmagctaatatttacttgatgattatacttgtgtcagcttacaccatgtgctgacactatgccaggtatgtacataaatgttcatgtattcctgatgaaacctcatggtatgtcattatattcatgttgaagctgaaaaacagttaagatgaaggtgtttatgaaacttcccactggtcatagttaaacgatagtgcagctatggttgaaactcaggtctatctagttcaaaattttattttctcattatattacattatctttccacagatctcattagcatctcaaaaactctatatcttaatatattcttacagatttctttccagagagaaactttacaggcaaggaaag

SEQ ID NO: 403182 - DNA, 499 bp, Homo sapiens
gtcttaatcattctctcattcaggaatggcactaaagaactcttagataaataattccaactatctgttttattacacacacatagaatctggcacagagtaggtgatccctccaaaaagactgtcattaaatgaaaaagcagaagcagctaatatttacttgatgattatacttgtgtcagcttacaccatgtgctgacactatgccaggtatgtacataaatgttcatgtattcctgatgaaacctcatggtatgtcattatattcatgttgaagctgaaaaacagttaagatgaaggtgtttatgaaacttcccactggtcatagttaaacgatagtgcagctatggttgaaactcaggtctatctagttcaaaattttattttcycattatattacattatctttccacagatctcattagcatctcaaaaactctatatcttaatatattcttacagatttctttccagagagaaactttacaggcaaggaaag

SEQ ID NO: 403183 - DNA, 340 bp, Homo sapiens
aggcattgaactttcttttcaattctagaattattcatatacagactgatgagtagcacaaatactgtagaaatgattcctaaattgggtagaacatttagccgtatgacctatgagacacactcccaactaatgagtagtttatttctgcctcacttagcaccagaggagaaatacatctgcttttccgtctgtgggcctttgaaatcttagcagtctgtgtccacaattatctcaatgcctcctcagataaaagaaagtgaattatacratggtttaatgcaaagaggatctttggtgcagacagacccaggttcaaatgttaacacgatcattaata

SEQ ID NO: 403184 - DNA, 651 bp, Homo sapiens
ttgagtctatactctctgaccaagacactatgaagtgaaattttccgcatgccctaaaatcattattgattataatccaaacttatcagtctgataaagagcagcaacatctcaaattaatcataacttgtatttttctaagtgaggttcacatttttttgaaatttcccttacactatacatgtgtgataggaacattagcttcttgttcagttagaaatatgaattcttctgtatagaaaggcatggattttctgtcatgtgtttcaaatattcatatacatttagaattttctttttgattttagtaattaattatcaacatgactttccttgtgcagaagttttaaatttatgttttaaaataatttattcatttacttatggcttcagtcatttcaatctttttttggaaacactttcccccgattaaactttatgaaataaaattgcccataactcattctagtacatttatttatttatttatttatttatttatttattcattggygcttaattttaattagacacagaattttttttggtgtatgagataagatagggatctggtcttcctttttttttttctccaattgtcttactggttatctctctaacactttttcaataaattatttattcatattg

SEQ ID NO: 403185 - DNA, 554 bp, Homo sapiens
catgctttaaaacacacacacacacacacacacacacacacacacacacacacacaatgtagaaatagttgttgtttgcctgtgagtccttaccaaacccttttggaatttactgttatatcctggtactccatctcagaatactaggtatactactagagtaccccaggtaaaaccatcctatacgcttttacataaactaagttggtaaactatattgacacaaattttcttacaaactcaaaacaaggccagttgtggtggctcacacctgtaatcccagcactttgggaggccggggtgggcagataacttgaggtcaggagttccacaccagcctggccaacatgatgaaaccctgtctttactaaaaaaaaaataaaaattagccaggcaaagtgatgagcacctataatctcagctactcaggaggctgagactggagaatcgcttgaacctgggaggcagaggytgcagtgagccaagatcacaccactgcactccaacctaggggacagagtgagactccaactccgaaagaaaaaaaaaccctc

SEQ ID NO: 403186 - DNA, 578 bp, Homo sapiens
ggttaaacatttttgggtaaagtattatagataagccataaatctcccatgatatcacatgagaaagcacattattgctccagctaagtttgttaacttgattaagatggtacagatatatcaatttaaaaaaataaaaattttcccactgtaataaataatctgtggactgttagtttgagtctgtactcaaatatatgtgtgtgtgtgtgtgtgtgtgtgtgtgtgtgtgtrtatataaaacttaaaagcctttcatccagtcgtcttagcatttatcaatgctgactgcctgaattatttattattttaagggttgaatatggtaatttaataattacatgttttcacattaagaaacttgaattcttctgtaaataagagtttttctttctctccagaactaagtttagatgttatgtattttctcagaaaatatagttttattttacaaataggtatccttttaaatatagcatgtttaggtcatcccctaagaaaggaaaaaaggaataaagtgttggaattacaaaaaccttttctggaaacagtttgggagtttcttataaagttaaaaa

SEQ ID NO: 403187 - DNA, 578 bp, Homo sapiens
ggttaaacatttttgggtaaagtattatagataagccataaatctcccatgatatcacatgagaaagcacattattgctccagctaagtttgttaacttgattaagatggtacagatatatcaatttaaaaaaataaaaattttcccactgtaataaataatctgtggactgttagtttgagtctgtactcaaatatatgtgtgtgtgtgtgtgtgtgtgtgtgtgtgtgtgtatatataaaacttaaaagcctttcatccagtcrtcttagcatttatcaatgctgactgcctgaattatttattattttaagggttgaatatggtaatttaataattacatgttttcacattaagaaacttgaattcttctgtaaataagagtttttctttctctccagaactaagtttagatgttatgtattttctcagaaaatatagttttattttacaaataggtatccttttaaatatagcatgtttaggtcatcccctaagaaaggaaaaaaggaataaagtgttggaattacaaaaaccttttctggaaacagtttgggagtttcttataaagttaaaaa

SEQ ID NO: 403188 - DNA, 590 bp, Homo sapiens
gagattttgtagaaggaagtgtaaagaccaaaaaagagaaaaatatatatgattataagagatacagaaagcagagggaaaggaactaacataaattgaatcagagtgccagaagaacagaacagagaaaataaatggaaaaaamcataaataaataatagcttagagtttccaaaactgattaaagacatcaatccacaaattcaatattacaatcaattctaaaaatgacaaacaaaaacaaattctcatgtgtgattatatcaacatgaaatagtgaaaaataaatacaaagataaatagtaaaataaaattgaaaaacccattaccaacctaaaagatgcatattagaagaaaattcactatagaaaacatttttgaaataatttgggattttaaaatatggaatcgatattagataatataggtttatttttcttaagagtaataatgcactatagttacataagagaatgtccttattcttaggagacacacactgaagtatctagggctgaagttgcacatctttaatttattttcaagttttatatatatatttttatttactatatgatatatagttacta

SEQ ID NO: 403189 - DNA, 590 bp, Homo sapiens
gagattttgtagaaggaagtgtaaagaccaaaaaagagaaaaatatatatgattataagagatacagaaagcagagggaaaggaactaacataaattgaatcagagtgccagaagaacagaacagagaaaataaatggaaaaaaacataaataaataatagcttagagtttccaaaactgattaaagacatcaatccacaaattcaatattacaatcaattctaaaaatgacaaacaaaaacaaattctcatgtgtgattatatcaacatgaaatagygaaaaataaatacaaagataaatagtaaaataaaattgaaaaacccattaccaacctaaaagatgcatattagaagaaaattcactatagaaaacatttttgaaataatttgggattttaaaatatggaatcgatattagataatataggtttatttttcttaagagtaataatgcactatagttacataagagaatgtccttattcttaggagacacacactgaagtatctagggctgaagttgcacatctttaatttattttcaagttttatatatatatttttatttactatatgatatatagttacta

SEQ ID NO: 403190 - DNA, 590 bp, Homo sapiens
agttgcacatctttaatttattttcaagttttatatatatatttttatttactatatgatatatagttactatatatgatagtatatataattgtatatatataacttgaaattatgtgcatagttttatatatataactgtatatacaatcattttatatagatctatacttgaaattatatatatatattaatagtatatatataactgtatatactatctgaatatatagtacatatgtatatattctgtatgtttgaaatttttaaaaataaaaaagacaaagaacatactataagyagggaaaaaagaaatttctagggaggagcatgagatggactgacataatttctcagtaacagcaatgtaagccagaagcaattgaatgatgttctcaaatattccaaaaaaaagtacaatctagaattctatacaaaatgaaaatctttcaaaaatgaaggtgaactaaagaccaattcagtcaaaccagagaatttgccaccaacaaacttgtacaatttaaatagtaacatatttcttcttcagcaataaatgatctcagatgagagtgcatagatgaaaggacaaa

SEQ ID NO: 403191 - DNA, 553 bp, Homo sapiens
aaacttactaaaagaggatgaagtgatatcaaagatctgttggaatgcactgcaatatgtcagtgctaaaactaagactgcaacaatgagtttgcttagcaaagaactgattcatgaaatccatggaaagtagctttatgcaatgaggtaaactggatattacaagttgagtatcccttgtccaaaactggttgggaccagaagagttttggatttgggactttttcggtttagaaatatttgcattatacttaaagatgagcatccaaaatctaaacatctgcaaaatgtttcagtgagcgttctctttaagcaccrcgtcagcactcaaaaagtaacctattttggagcatttcagattttggattttcagatttgggatgcccaaccggtattagaatgctagatatcctctcatgtttctgtactttttaggagaaaaggtattgactgcttttattccagactaattttttgaagatgtttactgtggtcttttggtacaaattatgggttggtaccagaactccagtgtatactcaacccatgactg

SEQ ID NO: 403192 - DNA, 614 bp, Homo sapiens
caatgaacaattgaaaaatacaattaaaataccagttacaatagcatctaaaaatgttaagaatagtctttttaaaaggttttagaaatatttcatatgtatatgcaaaagagggagaagaagaaggagaaggaattaaaggaagataacaaggaagaaagaaaggaagggagagagaaaaagagggagagaaggaaaggaaaaataaaaataatttcaatttatatcacaccatatataaaaattaactaaaaatagattccatactttaatttaaaacataaaactataaaacttctaaaagaagacataggaggaaactttcatgactttgggttaggaaaatatttcttagatatgaaatgaaaagccaggtcataaaaggaaactctaatacagtgataaattgatcttcatcaaaattaaaatttctgctcaagtggataaaacgacaaggcccaggaaggaagaaaatatttccaaagcatatatctcataaaatgatactgctacctacctaatagaattgtttacattaaaaagaatgactatatcaaatactggtgctaatatgaaagaacttcsatacattgttgatggaaatataaaatgat

SEQ ID NO: 403193 - DNA, 546 bp, Homo sapiens
tttttatttttctggattatctaaggatctagggaaactgcttataacttgtaacaaccaagtttagaactagatcaattgctgcaatttaattgtatttttcacactatatgctttktagatattttatgtgtcttttataagctaaggtatccacataccttgaattcacagatagatttacatttatgaacattttaaaagaaatttgcaatgtattaacacttcccttagacacagataacaatattcaaatatgcttcattttggatcatttttagaatactgaaattatactaccactgtaaagcctaaatgaactaaatgaactgcacagaattcattcattcactcaacaagtatttttgaatacctattctgtgtgttgcctctgtcatggtatagtatcttatattaaattatttgatggtgatgtctaacaagtattctgtggaattgaacagtacatttaggcaatttaatcatgtcaagtctcatacccaatttttctttggtaagttagatgatttattaaagtgattctca

SEQ ID NO: 403194 - DNA, 546 bp, Homo sapiens
tttttatttttctggattatctaaggatctagggaaactgcttataacttgtaacaaccaagtttagaactagatcaattgctgcaatttaattgtatttttcacactatatgctttttagatattttatgtgtcttttataagctaaggtatccacataccttgaattcacagatagatttamatttatgaacattttaaaagaaatttgcaatgtattaacacttcccttagacacagataacaatattcaaatatgcttcattttggatcatttttagaatactgaaattatactaccactgtaaagcctaaatgaactaaatgaactgcacagaattcattcattcactcaacaagtatttttgaatacctattctgtgtgttgcctctgtcatggtatagtatcttatattaaattatttgatggtgatgtctaacaagtattctgtggaattgaacagtacatttaggcaatttaatcatgtcaagtctcatacccaatttttctttggtaagttagatgatttattaaagtgattctca

SEQ ID NO: 403195 - DNA, 558 bp, Homo sapiens
ttatatattgagttaaagagatatgagaaatcatataaaacaaaaattactaatctgagatagaaaaagaaaggcccaatattaagaagctaatgaatattctcttaaataaaacatggagacagaaaataaatacaaaatacattaacaacattttgaaagtaattgatatgaaaacagtatccccaagatgggctactgttaaatcagaaattatgtttataggtaaattcatgacttcagatatttcatcatcaaaatargaaaagaaaaaataagcactgtgcttataattaattgtaaattgacaaattatattgtatgcatacaaactggaaggattaaatcaagctaactaatagatccattaccccaaatatgtattatttttgtggtaagaacatttgaaatctatcctcttagcaattttgaaatataaaatacattattattaactatagtcaccgtgctgtggaatagctttccaaaaacatatttctcctgtctaactgcaacttggtcctctttgaccaacatctcatttccaacatcccccag

SEQ ID NO: 403196 - DNA, 635 bp, Homo sapiens
catctccttggcttcaagtgtcatacagtaaatgtgtacttagaacctcaatcctgagtaccaatttcaagcaatttataacttcctacaagagagaagttgctcatagttctgtcatgtctgcaaaataaagtccaaggttttctgagatggatatatggtccttgtgtgatcctrtttccaaaaaccactctctggagagctcccatcaacagacaccactttaaaccaggtgctgtggactcacaaaaacatgcagagattcttatcatgcaaacctgttttgtgtcttattaacatatttcacttttcctggaatgtactctacttaattcaataggaacttgctcaatttaagaatcagctctatcatgaaaccttttctgaactatactacacacacacacacacacacacacacacacacaccacctttatccaatcatctgttgatggacacttaggttgattccatttctttgctattgtaaataataatatgataaatacacaagtgcaggtatctattttatatgatttcttttcctttaggtagatacttagtactgggattgctgaattgaatggtagttcaatttttaatttttttaataaatctccatactgtcttccat

SEQ ID NO: 403197 - DNA, 588 bp, Homo sapiens
aaaagtgcagtcatgaaaaatataacacaggaacaaaaggaatatgtcattagattcaaaatacataaatgcaactatatttttggtagagtgggttaaattaaaatagcaataaaacggaacttaagaagagcaaaatctttttaatggcttaaatatcttaacaacttccaagtttaaaaagaacacagttttaaaatattcttaaaatatgtcaaataaagaagtagtgacaaaagaatgttctttaaggtgctttactgaactgtgctgtccaataagatggccactactcaagagactatttaaatttaaattaattgaattaaaatagcattaaaatttttttttcacttttactagccatatttgacatgctctatagccatatgtggctagtgactactgtattaggtagtgcagatagatggttttcatgagcacagttttattggagaatggtattctagaaktttaagaaaataccatataataaaattgcaattatcacctgtaggcaatgttctagatgtttaatatgatatttaaaaactgaggaaaattagctgagattatttgtatataatt

SEQ ID NO: 403198 - DNA, 521 bp, Homo sapiens
ataagaattaatattattaacattattattttaagaaaaacctgggctatttttaaaatacagatttttaaaacttgtaatatatcttgtaatcagaatttatgaggatgaagcttactaatcgacgttttacaaagtcccctagtaatcttatatgtttgcccacacttgagaacctttgatagtagaaaaactgtacttttgagaattgagactgattttgaatctagacactgccacatctcttggagtcttagctttytcatttgttaagtgaagaaatatttccttaattaaatcgttacaaggatgcttttattagcaaggatctcaacaaattccactgaacttgcaataatttaaagagagcttatttacagaagggctacttatgaagattagagtagtgcataggggcagtacaagtgaatccccatgtgaagctagcagcatcaagctgtaccttcaccaagtctgaaggaacgagggagccgaggttagcggaaggagtgggagttgtg

SEQ ID NO: 403199 - DNA, 592 bp, Homo sapiens
cattttttaattaaattagatagtatatgtcaaacacttaacacatcttttgaacatggtaagcaagaccatgtatgctacaatttctagactttttttttttttccacaatctcttaagcatgatccctgcatcaactgtcaccagccacatggtggcagcaaaaatactgtcagggccattactgaaaagagacattattcctttacatgatgaaactggatgtggcaatggatgaaccaacccaacacagctggattgaatctagtaattcccgttggctggatgactctctaagactcccttatactgattggcttttaccatgaattaaaatgaagaaargtagattagcctgaattcaggatgtactctgtaccagccacagagctgtgtgttttacatttatctcatttcattgttttaatagtttgtgatctagacattaaaacttcacacatgaaaaaaaaggagttcagttgaattagatagcttcttacgatccactgctaatacattttaaatgtaaaagattggaacacaactttgtctaatttaggcctatgctgatgaaatgctggtgaaagataga

SEQ ID NO: 403200 - DNA, 645 bp, Homo sapiens
aaacacaaatcaagtcaattcagtcattcaataatgtgatgatatataatattattataaaccatatatattttttctttctcaatattatatataataataatgttttctggatatattttgccacctgcttgtttgaaatatgaagatcatttttaggacttcaaaatacattttttataaaaagtatacacatatagctgatagatgcttcagcagttatccagaccttcccaatttatagacatattcatygggacttaaagtagtcctatatcctctttatcatgaaattttttcaaacgttcatgctgattatttcattgtggtgttctagagctaggaacagtgctactgatgtttacttaagaataattacattgataacagttttagatggaaagtaaacccacatttgcacgtaaaacgaacacagtggtttgatacttagaagagctaatcatgttatggatgacacctaaaggttctcattgaaatctatatgtaaatttatccgagagatggaaggttgtacagttgtacactccaggaatattaatcagcaaattttcaggctacaagacacatttctacccatcaaaacacaaacagagacctaaaacaagacaatttaaaaggacaaag

SEQ ID NO: 403201 - DNA, 555 bp, Homo sapiens
cttgtgttattttcatagaagagaaaaatacaaaccataacattataaaacataatttcaaaaacgaaacctatcatctaaagcaaaagcaaatgccatttcttttgtgacagtcatacaaaattaagataatctagaataaaatataaagaataaaatgtattaatggtaatgaatgatgctgaaactttagctataacrcatttttcatatttaaaggagcgtatcacctgattgagaatcaattagtgaaactgcctcgtgttcagctatatgatttgaacaaaattcttcacctgccttagttccacttttcttatgtaaagtgttatcattagaacacaagattccttagaccaagagtggacaaactgtggcctgtggaccaaattccatgagttgtttcaataaataaagtttttctaatgtacacatttaaaaaattttattgtatgtatttaaggtatccaacatgatgttttgatatacatatgcacaatgaagtggttactacagtcaagtaaatctatcatctcactatctatcatctcacct

SEQ ID NO: 403202 - DNA, 481 bp, Homo sapiens
aggtctctagaacttatcatcttgtataataaatattatatccattgagcaacaattcctacttctcccttgctccagcccctggtaatcacaattctattctttgcttccatgcatttgactattttagatatcagatgtaagtggaatcatgtagcgattgtccttctgtgacacgtagcataatgtcctccaggtccatccatgttgtcacaaatggaaataaatgttgtgaaaaatgtaaaagagggtaatggcatataaaatggtgagaagtgagtgatgtttagataagcgtgattaaaaatggcctctgagaaagtcatccttgatcagagacattaattaagtatgggaaataaatgcatgaagatctggggtagagttttcaaggaaaatgaaacaacrtgcaagacatctcaggctggaaagaatttggcacatttaagaaattgctagaagggtgatgtgtttagtgtgg

SEQ ID NO: 403203 - DNA, 459 bp, Homo sapiens
agacctttgttttttctttactctaaaaatgaaggtttggggcaatatatgcaaaatatgcactatatgcttaatgtataggtaaatgaaattgactttttctctattactaccttataaagtaagaaaaaaagctaggtcgatttttgccaaacttggaggatattttggggtgataggacttaacagataagctccaaggaatattcgcttcgggcacctattgakgaaagtaaggcagtctccactgtcaaagaattgaggagaaataggctttgatttcaaaatcaaagggcaggcaatccaaatttcaggacctgattgataatggagctgttccttacttgggtaactctaatagctagctcaagggtgaagaacagcaggaacatatttatttaaagattgttaattatttttctggaacaatcccagactagttataacataaatttaagt

SEQ ID NO: 403204 - DNA, 630 bp, Homo sapiens
  misc_feature (1)...(630): n = A,T,C or G
aaggcacctgtcttgcaggactgtagtcctaatgattcagttggtggaagggaaccacggaatcacagattctgtgtttgcacagccatgcagtactggaagacctttgcacatctagggatgctgatgtgggtggtgtattgattctgataatggtgattaaatgatgaccattctcattcattagcagaaattttacctaacctaaaaatgtttaaaaaaacctaaccattgtcttatctttcatarcatactgtgagattgactataaagatgaacattagggaaatgaagatggattaatgttcttggcagtctccaacaacccctgcctttcataggtagtcttacttcttgtcgatttatcagttactttctggctcttaagtcttatgctcctctgtgagacctgttaagagggatggtatatacttgtaggtagaagactgggaatggaagttgnagacttncattcattaacatanaaagaatctagggatataataatggactgtttaggggtatagtacaatggccatccctgaataaggaatatgctataggtttgctanattttagcttgttacagggtatttccaaattatcgaatttttgtttgttctttttcta

SEQ ID NO: 403205 - DNA, 630 bp, Homo sapiens
  misc_feature (1)...(630): n = A,T,C or G
aaggcacctgtcttgcaggactgtagtcctaatgattcagttggtggaagggaaccacggaatcacagattctgtgtttgcacagccatgcagtactggaagacctttgcacatctagggatgctgatgtgggtggtgtattgattctgataatggtgattaaatgatgaccattctcattcattagcagaaattttacctaacctaaaaatgtttaaaaaaacctaaccattgtcttatctttcatagcatactgtgagattgactataaagatgaacattagggaaatgaagatggattaatgttcttggcagtctccaacaacccctgcctttcataggtagtcttacttcttgtcgatttatcagttactttctggctcttaagtcttatgctcctctgtgagrcctgttaagagggatggtatatacttgtaggtagaagactgggaatggaagttgnagacttncattcattaacatanaaagaatctagggatataataatggactgtttaggggtatagtacaatggccatccctgaataaggaatatgctataggtttgctanattttagcttgttacagggtatttccaaattatcgaatttttgtttgttctttttcta

SEQ ID NO: 403206 - DNA, 592 bp, Homo sapiens
agcagtagccaggggctaggaggaggggtaaatggggaatgactgctaatgaggtacatgttacttcctggggtgataaaaatgtcctaaaattaggtaatggcaatggttgcattactctcaaatatcaaatatactaaaaaccagttaattgtacactttaaatgggttaattttatgataggtaarttagagcccaataaaagttatacaacacactgagctgttgttttagttttgcataatttacttatctaaattatttgcaataaacttgtattactcttgcaattttttaaaaatgaaggtttaaaaatatttaattataatttatactttttttctgtgaaaaggctgcataaacgcattccttgtcacaccatcatttctttttctcacatcaaatcagccctagctatcctaaagaactgtcttctttccgctttaggtggatgttagcacagcattcacgaggagaaacaccaccagctctagctccaaagaacgccaaggaatatgatcttgcaatactatagggctgccagatctgcatttggtttagacaaggagggcccagagaaaaggttgctgc

SEQ ID NO: 403207 - DNA, 579 bp, Homo sapiens
ctggcacccaagactctccaactttcagaaagtgctgaggggacttcgcaaatttcaggcagcatcagctttctctctttggaacaaaaggagaataataagatttgtgtttgtcagcaccagcttgtaagtaatgacagttttggttaagtttgttggttgcaggtaacagraataaactgtgatggacttaagcaaagtgagacttaaaggaaagtctcttcgggactcggtgggctagatcagcaccagccaagcttcttaagattcaagttcaagggagttcaatatcaagttcaagttcaaattcaatatcagttgggtctagtttcagtcatttgcctaccttttggtcaaaggaggttggggcaactagatggtctgtatctagcaaaggtgagtgatgataccagaaagagaagagaccagatgagggtctggccaaaataatagaagctcactaggtagacagctgagaatgtagactcaaaggaggtgctgatggcctggtgtatgaggtaactcaggccccttctggccttcagacttctcttccagacctgtgtgaggagtaaatga

SEQ ID NO: 403208 - DNA, 554 bp, Homo sapiens
aaattaaaaaacttatcaagttgtacactttatttttttatttgaattgtacaccttaaatatgtgcagttattgcatgtcaattacatctcaataaaactgttttattgattgattgattgattgattgattgagatggagtctctgttacccaggatggaatgcagtggccgatcttggctcactgaaacctctgcctcctgggttcaattcattctcctaccccagcctcccaagttsctgggattgcaggtgcccgccaccatgcccgggtaatttttgtatttttagtagcaatggggagacggggatttgccatgttggacaggctggtctcaaactcctgacctcaggtgatccacccgccttgacttcctgaagtgctgggatcacaggcatgagccaccgtgcctggcctcaataaagctgttttagaaaattataaatggggatagtcatacctacctcatagcattaggattatgattcagtgtgggtttttccatttggacccagacctgaatttcttgctgatggaggatgggacactgca

SEQ ID NO: 403209 - DNA, 601 bp, Homo sapiens
accacagcagtaaggtttattatggtgtgtattttcacttatttgaaccacatttattcaattgtaaatagggaagctgggtgtggttgtgtgcacctgtagtcctagctaatcgagaggctgaggtgggagaattgcttgagcccagaagttaaaggccgtagtgctctatatttgtgcctatgagtagtcattgtactccagcctggacaacatagcgagactccatttctaaaaaaataaaattaaaaaacttatcaagttgtacactttatttttttatttgaattgtacaccttaaatatgtgcagttattgcatgtcaattacatctcaataaaactgttttattgattgattgattgattgattgattgagatggagtctctgttacccaggatggaatgcagtggccgatcttggctcactgaaacctctgcctcctgggttcaattcattctcctaccccagcctcccaagttcctgggattgcaggtgcccgccaccatgcccgggtaatttttgtatttttagtagcartggggagacggggatttgccatgttggacaggctggtctcaaactcctgacctcaggtgat

SEQ ID NO: 403210 - DNA, 582 bp, Homo sapiens
gaaaaccaaacaccacacgttctcacttgtaagtggaacctaaatgatgagaacacatggacacatagaggggaacaatacacactggggcctttcagagggaggagggtgggaggagggagaggatcaggaaaaataactaattggtactaggcttaatacctgggtgatgaaatactctgtacaacaaacccccatgacacaagtttatctatgcaactaacctgcacatggagccctgaacttaaaagttaaaaataaaatataaaataaaatatatactccgcaaggcacctatatcaatgataccctatgtgcattcactaacataatactgaaacacataaatcgatacatttagaaatttcagattaaaaaaatcataaaagtctcctgcatacctcagaggctttgataagacaaaattgcagargagctaaactctgtaactgataacattgtttaaatatgtatggaacttcatacaccactaacagagaacactgtgtttcagatagcaaaagaaagttacaaaaattgcaaaaaacatttaaataaacgcccaaaaagtataaatactta

SEQ ID NO: 403211 - DNA, 632 bp, Homo sapiens
tctggctaattgttcaaacaatcaaggtactataccctgtatgtgtgcattgttggcacaccactggagtgttagactatttgtgtttgtttatgaaaagtacctgactctgtttctggtatagctgtgggttgatatgctaggtggtgatccaaagatacaacttcgcctaaatcgttttaaatgttctttaccataatgtcaaagtgttttggacaaactcctgctaggtgtgatatttcctgctatgagcaatgtatagcaagtcygtaaaacctatcaagtactgctagggcatttggtggggcaggaaatatgacaacctgggaacaatttttgggctacttgtagttgaccaaagagaccagatagatgcatgctgcttggtagaacgggaagagagggaaacaaaatgaggttgaagtagatcctgacaattgacaaagaaatgccagagcctctatgtagaagaaaagctattgaaattcaacctatctctgaaggtggaaagttgtaggttagtatgctttgcctgaatttgagtatatctggagtgctattggttagtcttttcaaagaaggaaaattaagcccaaagagaataaggaaaaaatagacccttttcccccacc

SEQ ID NO: 403212 - DNA, 495 bp, Homo sapiens
cagtctaccttgcattgtcattacttgtttccacacttatctcctccacatgactgcgagttccaaacagcaggtgatgtgtctgactcacccgtgtgcaccccrcacagtgcctagcctagtccctcacttaatgcttgctaaattgagaagagaatgacatttccctgcccccagccccaccggcaacattttagtaaagcaaaatggcagaaagacagcctaggaaagcagggaaaagaagagccttctgtctttggctttaaaggaagaagaggtggtgagagcagtagggtaatagccgtttctgtgggtggcccaggagaaagatataggaggttcctggagaagaaacatgaaagtctgacttctcgtggaagcctgtggagccctgactctctaagcactgaaagctagtgttaaagacctgactcctccatggaaagttttaggtaatggggtaaattttaagaaaatgaatattcagggtggccc

SEQ ID NO: 403213 - DNA, 495 bp, Homo sapiens
cagtctaccttgcattgtcattacttgtttccacacttatctcctccacatgactgcgagttccaaacagcaggtgatgtgtctgactcacccgtgtgcaccccgcacagtgcctagcctagtccctcacttaatgcttgctaaattgagaagagaatgacatttccctgcccccagccccaccggcaacattttagtaaagcaaaatggcagaaagacagcctwggaaagcagggaaaagaagagccttctgtctttggctttaaaggaagaagaggtggtgagagcagtagggtaatagccgtttctgtgggtggcccaggagaaagatataggaggttcctggagaagaaacatgaaagtctgacttctcgtggaagcctgtggagccctgactctctaagcactgaaagctagtgttaaagacctgactcctccatggaaagttttaggtaatggggtaaattttaagaaaatgaatattcagggtggccc

SEQ ID NO: 403214 - DNA, 495 bp, Homo sapiens
cagtctaccttgcattgtcattacttgtttccacacttatctcctccacatgactgcgagttccaaacagcaggtgatgtgtctgactcacccgtgtgcaccccgcacagtgcctagcctagtccctcacttaatgcttgctaaattgagaagagaatgacatttccctgcccccagccccaccggcaacattttagtaaagcaaaatggcagaaagacagcctaggaaagcagggaaaagaagagccttctgtctttggctttaaaggaagaagaggtggtgagagcagtagggtaatagccgtttctgtgggtggcccaggagaaagatataggaggttcctggagaagaaacatgaaagtctgacttctcgtggaagcctgtggagccctgactctctaagcactgaaagctagtgttaaagacctgactcctccayggaaagttttaggtaatggggtaaattttaagaaaatgaatattcagggtggccc

SEQ ID NO: 403215 - DNA, 549 bp, Homo sapiens
atacatatttttttagcatattttgaaatctctggggaagaattctacatcttttaatatcactatttgtttcaaaattatcttgrgtctcctggatctgaataaatcactaacattgaaagataagctagctcaccaacattttttagcatggtatggtgtaaccatcaccaattgaggatgcagttttacagcagcgtcactgtcaagaaaattttcactgctgtttacaaaagggaactagtgggaaggcctgtaataaaattgtttctaaaagggctagatgtaaacttggatatttgggatccattgttattttgcctgattccaagtttgtattatttgcaaatgaaattaacatcaggtttttattttttaggcctgctggagtcacaatactgaatctgctctgaaggattcatattttgtattttctaatttgaacctaaattctataggggttttgaatggaattgaaacatgaaacttagttattactaagtgtaaaaaaggttaagataaataggccaagtctatatgtttactgtc

SEQ ID NO: 403216 - DNA, 549 bp, Homo sapiens
atacatatttttttagcatattttgaaatctctggggaagaattctacatcttttaatatcactatttgtttcaaaattatcttgagtctcctggatctgaataaatcactaacattgaaagataagctagctcaccaacattttttagcatggtatggtgtaaccatcaccaattgaggatgcagttttacagcagcgtcactgtcaagaaaattttcactgctgtttacaaaagggaactagtgggaaggcctgtaataaaattgtttctaaaagggctagatgtaaacttggatatttgggatccattgttattttgcctgattccaagtttgtattatttgcaaatgaaattaacatcaggtttttattttttakgcctgctggagtcacaatactgaatctgctctgaaggattcatattttgtattttctaatttgaacctaaattctataggggttttgaatggaattgaaacatgaaacttagttattactaagtgtaaaaaaggttaagataaataggccaagtctatatgtttactgtc

SEQ ID NO: 403217 - DNA, 578 bp, Homo sapiens
gaatattgctgctattgtgggttgtayaagtgttggtacatttaggagtaaagatgatgtgggatagtggttgggattacaggcttgcttgtcatgagaacgtaaatttaaatcttagttttatcactgattcactgtgtgaatagggcagttcctcatctagcatatgggattgataatgatactcatgggtctttgtgggattaaatgagattatgattagcactcagagagggcagaagcaatcaatatctgtgaaataatgtgaagggaagagcttccaaccatttgcagactccaaaacattgacttcagatctaatccatccactgtgttagtccactgctaatatacaaaggtacttcatcaaggagaatataactgggaccttcatctttcatagcaaaatggcatccttgcatggggtctccctggattcatcaacagagattgcttatgcttaaagctctgttcttatagggtgttcaaggagaaactgacaactagcctgaaacttcatccaaactctggtaaaagcctgagtgatttgctataagaggagaaagttggatatatgt

SEQ ID NO: 403218 - DNA, 623 bp, Homo sapiens
tgaattccaaatagctattaatattataaagaaaaaaattgaagtttatttaagagtatagaaagaagacttaatctggactatggagtcaggtgggtttttttttttttaattaacctaaagctaagcaattaaaagtgagtagaaagtagcagattaagagaagagacaagagacatttagatagaaggacagtcagtgtggaggccccggctatattcaaagggctcagagaaggtaaagatgagaggcggtgaaagatgagtctggagagtcagccagggatcattaattttgttgttgttgttctgtgatagtattgcttggattcttgtagcctgttttctcctccactttttcctatttttgaccttttgtttcactgtattcattcacttattaaattcytttatgactcaaagctttggtgaggaatacttgacttttccatgagctatgttttcttccaggttgggtttttcacctgtcttcagtatgctatgctctatcatttgtttttctcttcttctttgttagatattcatggatatgtttatttgctgtatcttgtttgtaatgctgccttgcaatttctactcttgcctgtgcttaacataagcatt

SEQ ID NO: 403219 - DNA, 480 bp, Homo sapiens
tcaaataaaaaatttaattcaaagaatgtcttattgaggcttaaaccctaaatgattttttaatgaaatgttttctactccattccagttggcagtgtagcttatagttcttgagtgaagttatctaagcaatatcaaattcttttagtcatctttacaatgaaaaacattcattcatattcaatgccagagcatttttttctaatttggtatcttcaacttccttatgtccaattagtattcattagtgtaattatgatgatggaaaggctcagtccctgttcttcaagacattagkaagtttggggaaagccttgaaacaaaatagtaaaagaaatatttggacatcccaaatgcttctttgattcaatactgtgatttgattcatcagtgaaggttggttctatgtccaggagcttgctgggggagggaagagacccatagtggcttgctgccctagaaactctgcctgccattgtc

SEQ ID NO: 403220 - DNA, 466 bp, Homo sapiens
acaatttgtgtgtaactgaataacatgcaatagtaatctatggtgatagaattaagaatacctcttgctttaggtaggggcattgagtggaaagaggcaaaaggaaacctttttttccagtgttattgagatacagtggacaaaaattctatatatttaagatatacaacatgatatcttggtaaatgtatacatggtgaaataattatcacaatgaagctaattaacatatctattaacacaagtagttacaattttttttggttgtratggtgagaacaccaagtccttagcaaattccaagtgtacaatgcagtattattaactatattcaccatgccgtacattagatttccaggattaatttattcggcataactgaaactttgtaccctttgaccaacatctcctcattgtccctacccctagccactgacaaccattgttctttctactctgctttgat

SEQ ID NO: 403221 - DNA, 639 bp, Homo sapiens
tgtccagttcactggtttatgcccttttcatttgacagctatcacaagaagctccttcgtgagccttgcctcaggcaacattctagtaatgtgattcgagggatgctgaaatcctcccgacaaaaccccacccaaaaatatagatcccacatatctaccccctaggctggaattcccacgattagtcactgctcgggaaacagagatgcctatccctgggagaggaggctcatttagaactattaaatatgcctctgtaaaatcaatacattcaagttttctctgaacttgccataaattttctcacctctgtacctggtcagggacatttggaatgctcttacatctctttgctatttgtccagttgcttctcaaaatcagagatctggctcaaatgttgtatttctcataaaaaataatcacttataaccccagccaaaaatattgcctacccattgaaacatcagtggagcacatttatacttcactaattcaacattaaatggaaaccaggaagttagaaaatgttgaaaatagagaaataaacacgsgtgtctgcccctgggtcctcatgtcctccaagacagcttttcccaaagtgataaatgtcccaaaacagtatatgcaatgattttaga

SEQ ID NO: 403222 - DNA, 562 bp, Homo sapiens
gggatatttatagtaggggaggtggtgtgtatgtggggccagagggtatatgggcaatctctgtaccttccactcaattttgtttgaatctaaaactgctctaaaaagatgaatttattttaaaaatatataatggttgttttggtatttgggaggacagcaatggcaagaaaagacattatttctgaatctactatgtcatagacttcccacraatgttaaatgagctactgcaaaaggaaatgcttagcatgatagtagctcaataggttctggggcaatcattattttagtttcttgtataatggattagtagtacaatcatgcaccacctaacgactttttagtgaacagtagactgcatacaccacggtagtctcataagattataatggagctgaaatatttctattgccgagtgacatcattgccattgtaacattgtcatagtgcaacacactaccttttctatgtttagatatatttatatacaccaatatttgccattatgttacacttgcttacagtattcagtacaataacatgctgtacatgtttgtag

SEQ ID NO: 403223 - DNA, 476 bp, Homo sapiens
gtcattatgttgcccaggctgatctcaaactcctggcttaagtgatcctgctgccttggcctcccaaagtgctaggattataggtgtgagccaccgcaccctgcctgaattttctaaagtacatatacattgttttctataatctcctaaaacagcctacattttagaaattatgtcatacttttaagaatatatactttgggagcygtggtggctcaggcctgttgtcctggtgcttaaagaggagaggctaggcattcgaggccagcctgggcaacatagaaagctctgatctgtatttaaaaaaaaaaaaaagaatatatacttttactgggcaagtttattcactgtggccatatcctaattaatgaccatctttttgtcttacttctcatttaatccagtgacatttattagatagctcctttattctgggcactttgctaggtggtgaaaaacataacagtgaataaaat

SEQ ID NO: 403224 - DNA, 525 bp, Homo sapiens
tgtgaaactgttgacagtaagtcccaattccctgaagacagactgatcatttayttagcattctaccttgggggctacactgaagatctcagaggtcaagtcccaaatcaaaacttgagtggaatattttaaaatacagccagtaaccaagagagttaaaagctctttggcatgtttatatctgaccttcatctattaacctcaaggaaaggtaatgaaacttgcattcacgagagatggtattatctacttcaggataatctatttaatgaatgagtaataagcaaatttttaaagaaaatgaaattcctggggactcttagaaaatttaacatcgcaatttgggaatatgtttaccatataactatgaaaatgataatgagcccacaatttctgagccagaaaatttcttcattgctaaataatgcactagaaagaaaacaaaccagcaccacaggatctgcaacagccaatatggattaaatatggatttttagaaccttgttataattagctgtattaaaa

SEQ ID NO: 403225 - DNA, 628 bp, Homo sapiens
ctctccagatagctccctaactccccacctcccctgaaaatcacagttcagctctcctgcctcctcttcggttccctggaagacacacactcagcaactgaccatcagctccatgaggacaggaagcaggctcctgccatcttcatcatagccacatgggcaacctcagcatctaacaagcattaggtactgggtaaatactaggtgatgaaagaggcagagagaaggaaaagtgaaatgaggggagaagaagggagtctgagaaaggagaggcaaatgcaggtggtaacacaaatgcatgcaaaagcagccacccagagaargccagggaaggaaggaccaagtgggagagagtaggaagcagattagaggtggctatgattttcgccttagtggttgctgctgtcagcctgtaaatggctcctgcagctcttcagggggatctctgctagaataaagcagctctgtgtaaacaatatccctgtgtggtcatcaaagaatgtgcaataggctgtctgtgtgagggtatatataatagattctctgatgagatcgccactttgccccttgctatttctgtgtgctgctctgatgaaatctcagaatatattacaactaggaccactgg

SEQ ID NO: 403226 - DNA, 376 bp, Homo sapiens
agccttactcccaaattctcccagattggcctctgctttgtgaatgatcatgaatgsaggtaaggcacagcctacacatagcttgcaataataagtagagttacatctactatgtccatagtctagcactatgcattttacagacattatgtggtttgaattaatccctatatcaattgtatgcattcatatattcatttttacaacagatagatactaagcatctaccatgttccaaaaaaggtgggtaaaggagtttacaaaaccaagtccccactgtcattcctttacagaaacaaacaataaatatacaacatgtcaggggttacaaatgctctgacaaaaataagcagaacacagtcatggaatggagatg

SEQ ID NO: 403227 - DNA, 509 bp, Homo sapiens
cttctcttacagagaatgatttacaatagagccccctgcttcaggaatctatttctttacgtgtaaagtgtcaaaaccaacttcaaaggttgttattttgggtagaatagaaggcccagaaataaactctccatatatagtcmactcattttgacaagggtgccaagaccattcaatggaggaaaggacaatcttttcaaaaaaaaaaggcactgggaagtctgggtatccatatgcaaaagaatgaaattggacccttacataatgtacaaaaataactgaaaacagctcaaagacatgaatgtaagagctaaaaccatacaactcttagacaaaaacataagggaaaagcttcttgactttgaatttggaaattatttcttgggtatgaaatacaaatatgaaatataaaagtacaggcaacaaaggtaaaaatggataaactacatcaaaatttaaaagctgtggatcaaaaggcaaaatcaacagagggaaaagacaacctagca

SEQ ID NO: 403228 - DNA, 586 bp, Homo sapiens
caagtgtccataaaaaggtaaatggataaacaaaatgtggcatatgcttacaatagaatattattcatccacaaaaaggaaggaaattctgacacatactacaacatggataaactttgaggatattatgctaagtgaaataagccattcaaaaaaagacaagatattattccacatatatgaggtaacctaggagaggcaacatcayagagacacaaagtacaatagtaggtgccatgggctaacagaagggggaaatggggagttattttttaatgagtacagagtttcagttttgcaagatgaaaatagttctggagatgggtagtggtaacggttgaacagcaatgtgaatgtacttaacactctgaaccatacacttaaaaatggttaagatggtacattttaggttatgggtatttaccacaatttaaaatgtgtgtgtgtgtgtgcgcgcgtgcacgtgcatgcttgtgatttagaggctcagaacctctttgaaagtcttaatagaagcttttagccaaagaaatgttgaagaacgttttagaggcttcaagacctataaagtttgtggatttcaggc

SEQ ID NO: 403229 - DNA, 586 bp, Homo sapiens
caagtgtccataaaaaggtaaatggataaacaaaatgtggcatatgcttacaatagaatattattcatccacaaaaaggaaggaaattctgacacatactacaacatggataaactttgaggatattatgctaagtgaaataagccattcaaaaaaagacaagatattattccacatatatgaggtaacctaggagaggcaacatcacagagacacaaagtacaatagtaggtgccatgggctaacagaagggggaaatggggagttattttttaatgagtacagagtttcagttttgcaagatgaaaatagttctggagatgggtagtggtaacggttgaacagcaatgtgaatgtacttaacactctgaaccatacacttaaaaatggttaagatggtacattttaggttatgggtatttaccacaatttaaaatgtgtgtgtgtgtgtgcgygcgtgcacgtgcatgcttgtgatttagaggctcagaacctctttgaaagtcttaatagaagcttttagccaaagaaatgttgaagaacgttttagaggcttcaagacctataaagtttgtggatttcaggc

SEQ ID NO: 403230 - DNA, 586 bp, Homo sapiens
caagtgtccataaaaaggtaaatggataaacaaaatgtggcatatgcttacaatagaatattattcatccacaaaaaggaaggaaattctgacacatactacaacatggataaactttgaggatattatgctaagtgaaataagccattcaaaaaaagacaagatattattccacatatatgaggtaacctaggagaggcaacatcacagagacacaaagtacaatagtaggtgccatgggctaacagaagggggaaatggggagttattttttaatgagtacagagtttcagttttgcaagatgaaaatagttctggagatgggtagtggtaacggttgaacagcaatgtgaatgtacttaacactctgaaccatacacttaaaaatggttaagatggtacattttaggttatgggtatttaccacaatttaaaatgtgtgtgtgtgtgtgcgcgcgtgcacgtgcatgcttgtgatttagaggctcagracctctttgaaagtcttaatagaagcttttagccaaagaaatgttgaagaacgttttagaggcttcaagacctataaagtttgtggatttcaggc

SEQ ID NO: 403231 - DNA, 359 bp, Homo sapiens
tcactgtgttattaggtgacatttagataactgatttaatccccaccatcgggagctgcataattcactaagcttgtggatttcaatgcatggaagcaaagtgctggggctctgccttcttggatatgaacttaatcatgtcacatcaagcattcattttaaattatagcaccacatctgtattttgacttctgacaaatgctaagtrtgtcctgacacatatttttgtcgtggtaaaagcctatttgaaaaccagaagagatggtgaaaggtagaaaactgaattgcacacaggtttgaatttgagtttgtatcaattttgagttttttgttgtcttcattcaattcagagagcaagt

SEQ ID NO: 403232 - DNA, 537 bp, Homo sapiens
tcctcccccacccccacggttgctaggggtcccagtaaaccaaggaggagagtgtggaaatgagaacctaccarctgaattgtttttatttttggcagtgagggacaaaatttaacgtgtattaaaatcatctaggaagcttgctaagatgtggactttcagacccaaccccctgtggctctgtatacagacagaaaccaggaatctggtcattctgatacaggagagccatagaacacactttgggaaacattgatttactactttcaaccaaacaagtgcaggggctctgtttttttcacgaatgcatcccaaatgcccctagcacatggtctggatgcaatgagtaacttgtaggtgtagacgatggatacgtggatagatggatgagtggatggatatgtacattcagggatttaaagagaggatgaacaagagtagagaagagaattgtaaagtttccagggtttcaaagattctttgaacttattcttaagtgtttgatagatacgttgcatttgccccctgattttgtgt

SEQ ID NO: 403233 - DNA, 613 bp, Homo sapiens
agtgtggaaatgagaacctaccagctgaattgtttttatttttggcagtgagggacaaaatttaacgtgtattaaaatcatctaggaagcttgctaagatgtggactttcagacccaaccccctgtggctctgtatacagacagaaaccaggaatctggtcattctgatacaggagagccatagaacacactttgggaaacattgatttactactttcaaccaaacaagtgcaggggctctgtttttttcacgaatgcatcccaaatgcccctagcacrtggtctggatgcaatgagtaacttgtaggtgtagacgatggatacgtggatagatggatgagtggatggatatgtacattcagggatttaaagagaggatgaacaagagtagagaagagaattgtaaagtttccagggtttcaaagattctttgaacttattcttaagtgtttgatagatacgttgcatttgccccctgattttgtgtgacctttatttaaataccatctccccttggcaacagagtagttttgtcacttgagattaaaagtgattttgtttgtaaaatggcaaaccatcttgacatttcatctacaaaccacttaacaaattt

SEQ ID NO: 403234 - DNA, 537 bp, Homo sapiens
tcctcccccacccccacggttgctaggggtcccagtaaaccaaggaggagagtgtggaaatgagaacctaccagctgaattgtttttatttttggcagtgagggacaaaatttaacgtgtattaaaatcatctaggaagcttgctaagatgtggactttcagacccaaccccctgtggctctgtatacagacagaaaccaggaatctggtcattctgatacaggagagccatagaacacactttgggaaacattgatttactactttcaaccaaacaagtgcaggggctctgtttttttcacgaatgcatcccaaatgcccctagcacatggtctggatgcaatgagtaacttgtaggtgtagacgatggatacgtggatagatggatgagtggatggatatgtacattcagggatttaaagagaggatgaacaagagtagagaagagrattgtaaagtttccagggtttcaaagattctttgaacttattcttaagtgtttgatagatacgttgcatttgccccctgattttgtgt

SEQ ID NO: 403235 - DNA, 527 bp, Homo sapiens
tgtgacctttatttaaataccatctccccttggcaacagagtagttttgtcacttgagattaaaagtgattttgtttgtaaaatggcaaaccatcttgacatttcatctacaaaccacttaacaaatttctgttctcatccaaaactactcttccaagtagaatagagacttctaccagtggttttataaaacaaaatacttctttgtagtgaaagtccaatcagaggtaccccagaagaggcgggaaggggactaagctgtgtgctgggrgacctagatgccaggtgtagctgctttgctaacaagtcgagtgaccttgatcaagccatgtgcctggatgagcaccagtttccccatgtgtaaagtaagagatttaacaaaatagtccccaaggcccttggagcaccacatattatttaccatcgttttgaggctttgggtttcctcacatgtctcatttttgggtgtgaaaattaggctttcctgaaggcctcccttaattatatcatgatagatagaacaatgg

SEQ ID NO: 403236 - DNA, 527 bp, Homo sapiens
tgtgacctttatttaaataccatctccccttggcaacagagtagttttgtcacttgagattaaaagtgattttgtttgtaaaatggcaaaccatcttgacatttcatctacaaaccacttaacaaatttctgttctcatccaaaactactcttccaagtagaatagagacttctaccagtggttttataaaacaaaatacttctttgtagtgaaagtccaatcagaggtaccccagaagaggcgggaaggggactaagctgtgtgctgggggacctagatgccaggtgtagctgctttgctaacaagtcgagtgaccttgatcaagccatgtgcctggatgagcaccagtttccccatgtgtaaagtaagagatttaacaaaatagtccccaaggcccttggagcaccacatattatttaccatcgttttgaggctttgggtttcctcacatgtctcawttttgggtgtgaaaattaggctttcctgaaggcctcccttaattatatcatgatagatagaacaatgg

SEQ ID NO: 403237 - DNA, 523 bp, Homo sapiens
agcgggtggaagaggggcagccaggatacgagaactgattcttatctaagcaatcaacgcaccctggctagcaataggcacacrcagctcaaagtcataagcataacctctactttaaagtggtctacaatccacattggcctaaattatctggttaatttccatatcattaaacattaattgagcaccatctagaatattagagttggaagaaaccttaggagcatctagtttatcccagttatacaaatgcaaacaggcctaacaggttaagggttcctcctagtggccgagccaggatttcagccccattgattaatttccagacacttgcgctttctcctctcctcactagaaattggattctccctttttatgaagagcctcaaagcatcatgaaatgagttttcagtgtcagttccatgtactagcattgcctaactgttagtctaaaagtgtggcccctgaagtcagagttcatgtcctctggtagaagggaaaatggactcataatgtcatccca

SEQ ID NO: 403238 - DNA, 548 bp, Homo sapiens
ggcctattgagctgaaattcagtgctctgagaaggtgctggtcagctacagccagggtctcttgacaggttgaaaggctggttctgcaaatgttggaaaaactacatgctggatgtgattgctgctacaggaacacaatgacattggagaagtgggacgagcatgatgttcccaggagcaagaagcagacaggaaggagtgagtcccttctttctccagccttgtggtttccctctagtacctcctaggggagcacaaagccaaatacctcccagagaggttggagctaagagacagtaggttaattactggcaagagatcaaaaaggcaaaccaatgagtgggagaagatgcacaacaaacaacggacttggctctagatttgagtgatatatagcaggtaacaatagtgtaaccaaaatgtgggttagttgcttatcacttgcagagttcaattaacaagagtgaggtctggtmtaaagaaagtgatttatttccaaagctagcttagaggatgaagcacaggcatcccacctttaaatgtaccgc

SEQ ID NO: 403239 - DNA, 609 bp, Homo sapiens
aaatggccatgtgatgaagctcaaaagacatccagctggactgtaaatcagcagtgctctgactttctagatgctgactcattacagcagagcagaagacctaaccctccctatcctatgcattcctgctttgcagagcaaaagacttctgtgaagaccaagaattggagtagtaacaataaaatctctaaaaatgcatcagtcaaccaacataacaacaaaagcaagttccaatacttttctcaactctattaattaatgcaataagagcaacaacccaaacccaaaccaacttaagacagtgctgacgctgtataagtaatacagtatccttccagaaagttgtgggaaccccttggtctatgccygcacagtctcagtagaagctttgcaatattgtcaaagcattggttggctgccagacttcttgaaacaatataaaatgaaagtgtatagcaaactctaataatgccctaatttttgtttatgaaaaccaagttttagttattcatattttaaatttgtattaataaaaaaatctttagttgcacatcaaaatgaaagtccacaggcttgtcttcagtccccaaagaaaagacttaacattca

SEQ ID NO: 403240 - DNA, 629 bp, Homo sapiens
gattcataataaaacaatggtaacctttagagcctgatactgggcctaagctatggtctatttacagggatcctgttcagacaggaatggatctcaggtccaggatgtgactccatccagtaaagttaaagtcatttgctatgtggtatactcttataacataaagttcttatagacagcacttgccacattgggatgtatactattatttgtatatgtgtgtcttagctactagtatgacctctttggaagaaaacatacctccttttaatttttttataatgaaagtaattacttataattatgtttatttataatttcttataattatgatgtcttagaaaaatagaaagcttttagaagccagtagagaaaaaactcctagtatccagaagtacccactgtttcaaagtatttattttggtgtgcattattctgtctgtgcatttctttttaacgtatatatacacagatgcaataagcatacaacttgctgagaaaaaaaacagcttttgtctaagcaygcacctctgtggactaaattggatctaagccccagtaacaagtggacagggaagacatgcgtgagtgtgtgtgtgtgtgtgtgtgtgtgtgtgtgtgtgtgtgtg

SEQ ID NO: 403241 - DNA, 594 bp, Homo sapiens
agcagttgaagcagtgtggctgaaataaaccctctacttaatcttgcttctctaagatgatccctgcactccttcaccagcaaccaccatggttcatactgtttcttkggagaaaaaacatataatatatcctacttaactagatacctgttatgctgtttatatgtctgcttcccaacctctaccctcaagctgtaatccagcccagggcaaaggttacattttagtcatctttctcctctgctagcttattagcctcattcacccagggtaatggactcttctgttttcttttctgctgtacccctcgttcctataaaaaatacccggtgcataggagacatatagtgactatgttaattaatttgagttgaagaatagacaagtaattcagagtctacagtattagcatggtttttgtctctgaacacactggagttttgttctcatcttggtcttgcaagtcactttagcttttttctgtcttacgacttttcagttagctcctctactgaaacacattattagactcttatatccatttttctatttttcattaatgaaaagtcacattgctcatgcatccattaataa

SEQ ID NO: 403242 - DNA, 544 bp, Homo sapiens
cagagcaggcttccctgtttttcctctttctaggtctgcataaagctgacaagatccatctttcattccctcataactttgggatttacaggataagatgctgccatacacattctacagccatggcttccagcccctgcacttgatggtaagaagtagacttttaaaaaaaatgcattcctgaatacgttactatttktcctgatatataggttgccaaaaaagtttaaaagatttttccagtgggacaagtttaggaaactgtttgtagcctctgtagactgggaacttgagaattaccctgatttaattctaaagactttttaagttagtgacagcacgactaacatagttcaaagaaagttgatgaacatgattctctgtgactgaatcagagagagctacaaaggagttaaagagccatagttatgatccttcattgtcaagggaggctgaatatgactgggattccccaggcagataacgatgtccacatagccccatcacagtgctgcaagcacctctgccactctatatgtaggac

SEQ ID NO: 403243 - DNA, 558 bp, Homo sapiens
agggattattcacaggtaatgagcatggtaaagtaaaacaactgagaaattcttttccccctaattcttgttgacaatctatatattagactgtcttcaattaggccctaacatagatgcttcagaaattacatttcagtcatcagttttgccatatagggccaaagtaggacatgcttctgaacacatactgatgctctgatataacagtgtttgaaaatcattttatgacaaatccatcagttgtaaatcaagaaggtaaggaaactgctttctgcaaaataatcaactgccccaaaatgaccacacaggaccttgtcattgcacttayactctcagactcctttagaagcatttgagttttatattctttacaatgtctgtcttgaggagggttttaaaaacaagtactatttcctttgggtcatcacagaaaacatttagacatttagacaaaacaggcctgtctgccagctgtacccccaccccattttcatactaagatcctggtattatataaaactgaaggattaaaaactgtatagctcatacctcatt

SEQ ID NO: 403244 - DNA, 349 bp, Homo sapiens
gaataactttctcatgatgtaattcaatacagtcctttccgtgcaccttgtaaaatcatcayacattcatctaagattatctggcataaaagcagaggaacttctctcctgtttgtcccattctctggtaaacttcatcttgcagatgaaaaactgaagcccaggggtcaggtaagaagctcatccaactccatacagccagtagctgagatctgtctcagcttgggaggctcctaattctgtcccttggaaaaatagaaatacttaaatgtagttttctctttaagatatttgtttataattccagaaggttctgaaagtcaaacttacaattgtgatttgaagttta

SEQ ID NO: 403245 - DNA, 605 bp, Homo sapiens
tctttgtggctcattccttgtgactaaggactcagctttaatgtcacatcctcacagaagctttctctgaccactctgatgacacagacacccaccttctttctgcatgttagtactagtcctttcccttcccaacactattasgatttgtaattacttatctacttatgggtttgatttttggatctgcagtctagcatagttcctgacacacaacaggtactcaataaatatctgctgaataaatgaacgaaaagttggcttcctgagtcacattgcctacatttaaattccagaaccccacttcttaaactcttcagaaatttacttgttaagccttttttttaatgtgtaaaatgcacatcaccaacttcatgatgttgttgtaagtataaaatgagaatagcttagtatggtgcctggcacatagtaagcatacgagcaatatctatctatccatccatccatccatataacaactatttatcatctaccagctatatatctatcataatctatcctacctatctactctctagcaatcgtcatcatcattcaatttatgctcatttcttgaatgaataaattcatatcagagataatcc

SEQ ID NO: 403246 - DNA, 540 bp, Homo sapiens
ccttaggagttctgtctgcaaagtcaatgtagaaataggtttcctccttcctaaaattttctgttcaacaatcttcagctatgaagctggctactaagggcttaaaatatacttggaacgtgcaccccctggcttcatgtcaggatccattttattggtattgcctttttatacctttatgcggattaaagcaaaacagattgggaaatgttgtccctaaatgccctgttaagaaaataaaagaaggaatatctacaagcaagttgctttgaagcactgtgtgtgaacgcgcgagaaattacaggaaagaaaaacatcctccattacctgcaatgaaagagagttctaggtctgacttgaacctgaagttctggtaccattatttggaacccacccaagaagtttgcaatttgcaggaggaatatcgtggtaggctaaataacggcccccaargatatcaggtcctaatccctgcaacctataaatattaacatatgcagaaagggtcttcacagatgagattaaattaaggatattaag

SEQ ID NO: 403247 - DNA, 478 bp, Homo sapiens
ttgtatatttccatgtgcaatctgttgtgtgtatttgtatgtatgtatgcaatagattttcatccagcctttaaaaaaaggagatcctgtcatttgccaaaaatggatgaacctgaagaacacaatgctaactgaatgccagacacagaaaaaatattgcataatctcatttatatgygtaatattttttaaagtaaaatatatggagagaatacaacagtggttaccagaggaatggtggtaggaaggaaatgaggaaatgtagatcaaaggatacaaagtagcagatacgtgggatgaacaagtctgaagatctaatgtacaacatgaagactgtagttcataatgctgtaatgtactcagaattgttgttaaatgagcagattgtagctgctcttgccacagggaaggagaaatgggtaactatgtgggatgatggttgtagcaatttctttcactatagtaaccactttaatat

SEQ ID NO: 403248 - DNA, 470 bp, Homo sapiens
acactggcacgaaagcacgttctcatttatttacaacaggaactcacaagcgcagttttttgcgttttttgtggttttttttttttttttttggagtcaaatacagcaaaagcttcccaaaccttcccataaccaacagcacccaaagtaactcaaggaaacaaaaccaccaacagccaacctgggcattgttggtggcacaacctgacccgcaacaatttcttgagagaaattaaatatgtttggaaacgtcattccacttcatrtggcagaaagattttgaaatgaaggttatacaaaaatcaaagaaaagatactcacagtagcacggttcttagctcacggaaggagatccataaagatttgttgaatgaatattttttaagaaagtaagcactgcaattggtggtccacagtttaaatttttccctcaaacattgtgcttattgtgatacatacaaattccatat

SEQ ID NO: 403249 - DNA, 614 bp, Homo sapiens
gcagtagaaaaaaagagttcatgttaagaaaaaagtgytttttatattgatcttgctgtctcaggtagaagaggtggaggaggtagaaggggaggcaggcacacttgacataagttttattaaaaaaattacttataaatggccccatgcaattcaaagctatcttatttaaggatcaactgtttggtcttactgtttccaagagagacatgggatgatgaactcattaatttcaagtggtcattgctgcaaaataatttttttagtgttgggggaattgtcatccctggatggagaggatctaggagagaagagacagagcttgatcatcttcagcatccgccctgcctgggctgctcagtgccttccagggatctcctccagtccagcttccttattccgagctaaatcaagtttacagatttgttttatcgattgtgaatatttaacaatcgcatttggcttccaactctgtggatgaaacagccatttacacaactcatgaattctcttttcacatctataatgctggggaacaaagtgtatgtgtgcttccctggcagaaaaccaagccatattgactttttacagaaaaggctttttcctgtcattct

SEQ ID NO: 403250 - DNA, 614 bp, Homo sapiens
gcagtagaaaaaaagagttcatgttaagaaaaaagtgttttttatattgatcttgctgtctcaggtagaagaggtggaggaggtagaaggggaggcaggcacacttgacataagttttattaaaaaaattacttataaatggccccatgcaattcaaagctatcttatttaaggatcaactgtttggtcttactgtttccaagagagacatgggatgatgaactcattaatttcaagtggtcattgctgcaaaataatttttttagtgttgggggaattgtcatccctggatggagaggatctaggagagaagagacagagcttgatcatcttcagcatccgccctgcctgggctgctcagtgccttccagggatctcctccagtccagcttccttattccgagctaaatcaagtttacagatttgttttatcgattgtgaatatttaacaatcgcatttggcttccaactctgtggatgaaacagccatttacacaactcatgaattctcttttcacatctataatgctggggaacaaagtgkatgtgtgcttccctggcagaaaaccaagccatattgactttttacagaaaaggctttttcctgtcattct

SEQ ID NO: 403251 - DNA, 471 bp, Homo sapiens
tgcctgcctccccttctacctcctccacctcttctacctgagacagcaagatcaacctctcctcttcctcctcctcctcggcctgctcaacctaaagacaacaaggatgaaaacctttttgatgatctacttccacttaatgaatagtaaatatattttctcttccttatgattttcttaataacattgtctttatcttactttattgtaagaatacagtatatactgtatataacatgtaaaatatgtgatagtggactgtttttgttattagtaagtcttctaattctttttttgttattagtaacccttttgtagttagtaagactgaagcctgagacctagtctctcccctcctacctgcactttggcccctgattrtttagctggtgcagtggtgctaccttcaggcttgatggcatgatagacatgatacagtgaccactaccaaaccctgaaatggtgttggtt

SEQ ID NO: 403252 - DNA, 471 bp, Homo sapiens
tgcctgcctccccttctacctcctccacctcttctacctgagacagcaagatcaacctctcctcttcctcctcctcctcggcctgctcaacctaaagacaacaaggatgaaaacctttttgatgatctacttccacttaatgaatagtaaatatattttctcttccttatgattttcttaataacattgtctttatcttactttattgtaagaatacagtatatactgtatataacatgtaaaatatgtgatagtggactgtttttgttattagtaagtcttctaattctttttttgttattagtaacccttttgtagttagtaagactgaagcctgagacctagtctctcccctcctacctgcactttggcccctgattgtttagctggtgcagtggtgctaccttcaggcttgatrgcatgatagacatgatacagtgaccactaccaaaccctgaaatggtgttggtt

SEQ ID NO: 403253 - DNA, 545 bp, Homo sapiens
agtcacacaaaaatcaaaggcagtgtttgtccaaagataaagctcctatttttagtatttttccccaggccagactagctggttccactyagacaccaaacaaacaaaaaaaaactctgaaacgctaaatatgatcatcttattgtacattttactaaggaattccagatacaatattctatttaatcttcacaatattaacactggtcaatattattatcttctttttacgatgaagcctggtaccattctcatatgttgctttaaggatatcataaaaggtgtccgaccaacccaatagtattgtacttgaaaacactacatttataacaagaagaaagaaaaataaaattcattgaagttagaggagtgggagaaaatgctaagacactcagagaaagagagataacaatataaatgggatgactactaagcacctttctagttcttcagcgttctaactcaacatttcccaaagtggtatcctaaagaacactggtccacaggctattcatagatatgctgagaacctaagtgtttcatgc

SEQ ID NO: 403254 - DNA, 545 bp, Homo sapiens
agtcacacaaaaatcaaaggcagtgtttgtccaaagataaagctcctatttttagtatttttccccaggccagactagctggttccacttagacaccaaacaaacaaaaaaaaactctgaaacgctaaatatgatcatctwattgtacattttactaaggaattccagatacaatattctatttaatcttcacaatattaacactggtcaatattattatcttctttttacgatgaagcctggtaccattctcatatgttgctttaaggatatcataaaaggtgtccgaccaacccaatagtattgtacttgaaaacactacatttataacaagaagaaagaaaaataaaattcattgaagttagaggagtgggagaaaatgctaagacactcagagaaagagagataacaatataaatgggatgactactaagcacctttctagttcttcagcgttctaactcaacatttcccaaagtggtatcctaaagaacactggtccacaggctattcatagatatgctgagaacctaagtgtttcatgc

SEQ ID NO: 403255 - DNA, 616 bp, Homo sapiens
tacagtgtggtagacactgttgcaagccctttgtattacctcttttaacccccgaagacatccctatgactacagttaataataaaaaataatcaataatatatcattaataataagtttgcagatatggaaactgaggcttatataactcacayagctggagttgttgaatggacatttcaactctgttgatttgattctaaagcacattcttgtaaccattacattttacagcctcttttctatgaaatccctatgtgatattcctttaaaacaaatatgtgtggggctacttgggctgtgaatgtgtgtgtttgggtgtgtgtagtgggggtgggggtctggatcctgttggtggtttcacaataacaatataacttgaatactactgatccagtccaactgatatcattacataaggaagaatttgaagcccagagaggtcaagtgacttgctctaggtcacacatctggttagtgactaaggcacacctcttgactccaggtctgttacttcctcaacataatgtcaacttgcaatacaaagcccatttggaaatgttaatacaaatattcccttaacgcacccaaaacaaaaatcagtaggaaacttaac

SEQ ID NO: 403256 - DNA, 560 bp, Homo sapiens
tttcattaattcatttcattgacaggactccatccttgggatttctagaaagctggcgatatttactgggctaccagagaagtttcaggttgccacactttttagtttgaaccatttttgcckcactttttaggttgaaccatttgaaatggctaccaccaaaccactttgacctacagaaatgaactatatatggttcattataacacacactgatacagaaatttatattccatatgatgtatgagatggtgccttcagcagcccattagttaagaagtggcatgtatttaacctgaccaggtatttggctccccaagtttgagtgatgtaaaaagttgcagtcacacagtgggtactgtgtacttttgctaacattggtttaaaacctttagtagaaactcagttgttctagccatgggtctctcctccactttattgcatctatattgcagtgctcatccctcacactcaccacaagaagctcttaccataggcttattgtttttacttccaagaactattaaacacaaggcataacataaaatcagactgtgacg

SEQ ID NO: 403257 - DNA, 560 bp, Homo sapiens
tttcattaattcatttcattgacaggactccatccttgggatttctagaaagctggcgatatttactgggctaccagagaagtttcaggttgccacactttttagtttgaaccatttttgcctcactttttaggttgaaccatttgaaatggctaccaccaaaccactttgacctacagaaaygaactatatatggttcattataacacacactgatacagaaatttatattccatatgatgtatgagatggtgccttcagcagcccattagttaagaagtggcatgtatttaacctgaccaggtatttggctccccaagtttgagtgatgtaaaaagttgcagtcacacagtgggtactgtgtacttttgctaacattggtttaaaacctttagtagaaactcagttgttctagccatgggtctctcctccactttattgcatctatattgcagtgctcatccctcacactcaccacaagaagctcttaccataggcttattgtttttacttccaagaactattaaacacaaggcataacataaaatcagactgtgacg

SEQ ID NO: 403258 - DNA, 560 bp, Homo sapiens
tttcattaattcatttcattgacaggactccatccttgggatttctagaaagctggcgatatttactgggctaccagagaagtttcaggttgccacactttttagtttgaaccatttttgcctcactttttaggttgaaccatttgaaatggctaccaccaaaccactttgacctacagaaatgaactatatatggttcattataacacacactgatacagaaatttatattccatatgatgtatgagatggtgccttcagcagcccattagttaagaagtggcatgtatttaacctgaccaggtatttggctccccaagtttgagtgatgtaaaaagttgcagtcacacagtgggtactgtgtacttttgctaacattggtttaaaacctttagtagaaactcagttgttctagccatgggtctctcctccactttattgcatctatattgcagtgctcwtccctcacactcaccacaagaagctcttaccataggcttattgtttttacttccaagaactattaaacacaaggcataacataaaatcagactgtgacg

SEQ ID NO: 403259 - DNA, 640 bp, Homo sapiens
acttttctctgggtttggggaatcgagaaacaaagtttgaatgcaaagttgcctccaacttacttggagtgtcttggtaaagtaaaacaattggagaagaagggaacaaactgggcactcctaaggaaaataaaaacatcaggcaaggttatgaattttaagccttgtgtaacctttgcagcatgtcagaacttagagatcatcatcatcttcttccatacttttaaaatgaccatgacaatatatgctagcccacaagtccagtgctagaagaaattaaggtacttgactgaagtaggtttaaaaaatattgttcacytaagaggcatctaatatcctagcttctgtgctttaaaacatttttatttggctttcatgggactttgagattagaagagcctggacccatcaaaacccaagaataaatcagtcctcagtgaaacacctggtcatacaaataaaaacattttccagccctaaaactgcagcttccagtttgaaatgattagaggatatacgtttcaattagaatgagcccctactgccaaagtaagttgactagatgagattaatatttgtaaaactccaggtgagccattccttggaatcaaaaaattgcttttctgaaaaatggattgtg

SEQ ID NO: 403260 - DNA, 657 bp, Homo sapiens
actgttctgttctagaggccatgccagcaatgactatgtagcagaacctactcaacacacaagatgttaacaaacactctttttgatcaaaaaaccatgagataattctgattatgctctgacttcaacataacaacttgtgcatggtgcctaactcttcccacccaaaccagataaattctcagataaagtaggaaagtatctcccagaatgggggattgaaacactggttgtttgaaaatgtttttaagtggtacatgatattaaataccattractaacatgtaacctcctgatgggttcttcctgcctgctgcacaaatacagaccatggcattgcagtaaggaaactttaattgacaccaggccagccacaccacacaggagattgttattactcaaatcaatctcattgaaggtttgtaggtttgggttttttcaaaggcagtttaggggaaggggtaggggtggctaggcagtgggtgattgctgctgattggttggggatgcaatcataggggtgtggaaaatggtcctcctgcactctaaattgcttctgggtggggccacaggagcagtgggtgggtccaggtggagccatcattgtaggtgtcagacatgtaaaaaacctgaaaagatatctcaaaaggccaatct

SEQ ID NO: 403261 - DNA, 585 bp, Homo sapiens
gccagcaatgactatgtagcagaacctactcaacacacaagatgttaacaaacactctttttgatcaaaaaaccatgagataattctgattatgctctgacttcaacataacaacttgtgcatggtgcctaactcttcccacccaaaccagataaattctcagataaagtaggaaagtatctcccagaatgggggattgaaacactggttgtttgaaaatgtttttaagtggtacatgatattaaataccattgactaacatgtaacctcctgatgggttcttcctgcctgctgcacaaatacagaccatggcattgcagtaaggaaactttaattgacaccaggccagccacaccacacaggagattgttattactcaaatcaatctcattgaaggtttgtaggtttgggttttytcaaaggcagtttaggggaaggggtaggggtggctaggcagtgggtgattgctgctgattggttggggatgcaatcataggggtgtggaaaatggtcctcctgcactctaaattgcttctgggtggggccacaggagcagtgggtgggtccaggtggagccatcattgt

SEQ ID NO: 403262 - DNA, 556 bp, Homo sapiens
ttatagttggccaagtgttttaaagtttatctccatggtctcactgggccctgaccattcataaataagaaacctggggctcagaactgggagtaatttattgccgggctttcagcccagagcttggcctgtgactcaccctcccttgatgtaatcaacaaaagtgaattcagagtccacagagaaggagagcagcgtcacctgtgggacagaataggcagccctggcactttggaaaaggcagttggggtggcagaaggaagtgaggcccataggggcttggaaagaggcacgtgatgggaggcacatgattccacccgctcccccagtcagtcccaccctgttcarcttctgacaggggaaaaggggaagctgtcagaaacatcgttggatttccaaaagtatattaaattgggaaatacaacttaggtttttttcttttattctgcaaaagagtgaagtcagaaaaatttcctgagtgagaaaaaaaacaaagaaaaacttaagtggtgctccttgtgcccaatattactattccaagtaatctgtgcccact

SEQ ID NO: 403263 - DNA, 565 bp, Homo sapiens
gagccatcatatggcttcacatcacgttaatggcacgctgggttgtataaggacaaaagagaaaaatacatttagttttaaatgcccaacaacagtgcagcaaaagacaggagttctggaaacttgagctctactaaaaacgaccttgtccaagtctgcagtttcccaaccaagtgagaattctagaattggtccagtaggattattaaaaagtataaataaggtagatccctaacccctggcacttcaacctctctctttttgcaaaaaccaggaaaattatgcaatggtgtgaagtagctcacgtaaagatgcacttataattcagtgggtcacttcatgggtttctcacctaaytaatttatgcaaaataagtaataagtttaaaatttcgtaacggcaagcaacagttgtatagaaaagggcagaggcagtatgcttgagtttgtctgtttaaatagagattcggggccgccaccccagaactagttaaccaccttctcctggggtggagctcgggaacgtgcgtacttttaacaagtgacctccccgagtgctgcacagg

SEQ ID NO: 403264 - DNA, 575 bp, Homo sapiens
ttaaacaatattttagttatatttccaaataatatgctgaatatttttttcttcaacctccagaccgcctttcaggtgaagcatctctaaaaataatgcaatgggtccaattgttgatctgaaaaaagtacaataaaaacactacaagagcatccagaagtctggaaacacaggtgaaattgtgcacttcttgtttcagatttacarctaaatccactgccttaaatgtagagattcatcacctgaaacatggttgaaaacaaaaatatattgagtattttttaaatgtgaataccataattttaaaatgccattttctcctatgctttgtcctgtaatttaaaaaatttaacaagtggacactatgattggtgtacattcctgcctacaatcttccaagttaattggattaatgtaagagctacttatctacacataaaccatcctatgaaaaaggctgaccatttcaaattaggagtgagcttctaatatttatcagaaaataccaaaactgagcttgatttggagctttgcattatagtgaaatcctgaagcctccaataagagtaggaaag

SEQ ID NO: 403265 - DNA, 538 bp, Homo sapiens
tgtgtagtgttacttcctaccrttaaggcaggataaaaagagggcaatagtttcactaaaaacgaaggttttgttcatttttttctcttcatttctctgtttactgctgcatgacaagtagagaaaagacgaagcatgttagaatccatggcagagtctgctatgtatcttggctctggtagactatcaaaacctcaatgggctggttttcaaaataccgctatgatagaagtttctctccctcaaggaacccgattcacttatagttactaatctgcaaaaaggcacagggagactttcatgaagaaaaaagatacatatggtaaacaaacctatgtattattttctttacaaaatacacaagctaaagctttgaatgaaacaccaggtgggggttggcaagatattctaaatatttccaaaagctcagtaaaaatgttattgacattaaaacaaaagttcctgatcttgcttttggcttgcattgctatgttgactaaatgccctaattaggggttatatatgtctaattggggat

SEQ ID NO: 403266 - DNA, 419 bp, Homo sapiens
gttttcctcattgtgtgaacatcatagggtacttatgcaaacctagttggtatagcctactgcacatctaggctatatgggatagcctattgctcctaggytccaaatctgtacagcatgttactgtactgaatactataggcggctgtaacacatggtgttgtgtatctaaacatagaaaaggtatggtaaaaatatggtataaaatggtatacctgtgtagggcacttaccatgactggagcttgcaggactgggaggtgctttgggtgagtcagtgagtgagtggtgagtgaatgtgaaggcctgggacattcttgtacactaccatagactttgtaaacactgtgcacttaggctacactaaatttatttttaagatttttctttcttcaataataaattaacattagctaactg

SEQ ID NO: 403267 - DNA, 578 bp, Homo sapiens
tcttgtgctcaacacgtttggaactcacttgattatttccaatgcagcagagttgagcagcgctcctccgcagagcaggtgcctctytgaatgcccattgcaacctggaccccagctttcactgccagggcttccagaggagggagggggtcctggggatgcgcagacatgggctaggctgcatgagcagcacaggcagaggggcctcacagggctgggcccaaaggaggcctgccccagaaaagatgcagctcttacatcttcagggccctgggagatggggggcggggcccagagaacccagcaccacctggacctgagagctgcccccagcatcggagaggaaggcctgccggtcactgccacgtcatgtaccctgggcaagtctactgtcctctctgggctcgtaggacggtgtttgtccacatcagaacagtctcggctggggatggacacgggctttcagcttctgggagggatgtgggtattcacccaggcagacttgactctgttctcccccagacacccaccagggtctcatctctgagccagaactgccatacttcctagactctgca

SEQ ID NO: 403268 - DNA, 560 bp, Homo sapiens
attcttgtgatgcattcgaacccaaatcatcaacatgtcttatatcatcttgtctaactctgcagcaggtcagacaatttatctcagtttttttcttcaattcctttgagcctcccaggcaattcataaattgtctctcagatttttctgaggtcagatcatgctgagatgtacaccttccttctttccacttaaaatctcttttcctgtcctttacatacatagatcctaaaatctcacttttgacatgtaagttgttttgatgaactagaatatgagtttctctgaccataactatcacaaaaatagtagttttctggaaaactcatccgttgctatacagtacaaatactatgtatttaatttacttaagcattatattcttgatcacgtccatctayataaatggtgtctatgtagacagatgtgttgctttagctggtgaagcctatgtttcccttcccttgaatatggaaggcttatgactgattcaaccaataaagtatggttgataggtaagtatatgacttctgaggctaagtcataaaaagtcctgtagc

SEQ ID NO: 403269 - DNA, 620 bp, Homo sapiens
ccacatcttttttgttaaatactgtagtggttccttgcccacagttatatgctctctctttaaaaataacttttaaggcaggcatagtggcactgtaatcccaaggcactgtaatcccagcgctttgggaggccaaggcaggaggatcacttgagtccaggagttggagagtggcctgggcaacacagtgagaaccccatctctccaaaaaatgaaagaattatctgagcatggtgrtacacccctgtggtcccagctactcaggaggctgaggtgggaggatcacttgagcccaggagatcaaggcttctgtgagctgattgtaccactgcactccagcctgagcaacacaatgagaccctgtctcaaagtaataatgataataacaattgttatatagtataatgaaaaagctttcggatgattaaactcccagatgtctgactaagtggcctctagaagaataatttaccatcaataactaaacaaatctctgcttatcgccgtgaagcaggttacacattcccaaaagagaaacacgccaatgcaaatcaacacctgcaattcagaatgtttgttcttgtgcctttggatttgaggctcacgtttgaaacttgttt

SEQ ID NO: 403270 - DNA, 574 bp, Homo sapiens
attctctggagacaagaccgtaggtgcatagctccccttttggtcttcaaagcagaggctagtggacacctggaaaccgtaggtgaattttcagtggagggaagaagtttatagattcaatacaaaactatcttagttggcttgggctgccataacaatataccatagactgggccacttaaacaacagaaacttattttccacagttctggaggctgcaagtctggtatcagggaaccagcatggtggggctggtgagggccttccttgttggcagacagctgccttcttgctatgtgctcacatggtctctccttggtgagggcatttagagagcgagatctctcctttccttttataaggccatcagtcctactggattagggcacygcccttacaacctcatttaattacctcctaaaagccctgtctcgaaatacaactacattgcaggttagggctttaacatatgaattctgggaaaagagttcagtccatagcacaatcctcatcatttctcatcaacctcagccggaattatgttccattagaaaggctaccatctctaaccagg

SEQ ID NO: 403271 - DNA, 576 bp, Homo sapiens
atagaatgggagggctggagttggagacagtgaatacagataactttttgagggattttgctatatagggaagcagggaaatggatggtagctagaagaggagtctggccaacagggggacttcataaagctgggacaggtaataacatgcttctatgctgatgggaatgctccagtagagagggaaaagtagtcatattttttctcttcactttttccccttcccttcacatactttttcacttcactcaaggacgtcactcccttattctccctcagtaattctcccctgagggaagtcagaattactggaatgatgtccttgagtagacaagagacaatgtggacatagctgcaggtggtgggtagatgtgttacttggarcatgtggaaattctcttttgatcctttcagtttttttcagtgaataagaagcaaagtcatcagctgagaatgaggatgctaaagaggtataggaagtttgataagaagaaaatatatgaaattatagtttaggaaacagctaatgaaaggactgggggaacttagtataactgccaggaattaaggtttatt

SEQ ID NO: 403272 - DNA, 580 bp, Homo sapiens
gcttttttttttttcatggttaaagtggagacaattgagtgagacattagggtttttttttttttwaaaaaactgtttgcttgtattactttctgcatttgaacaaatacttgttacctagccaaataaaaagtgttttggaaacactccctcctcatactcccaccacagaaaggataatgtgtctgcagcggggctctgttgtcttgaactggtgaggactatgcctgaactgggtccctattcctttcctatatttatccaggccatagttgtggggcagcacgtggccagggctacaggagaggcttctgctgagggtttgggctgcagatttgagcacaagcactcagtctatctcagtcaagtaaagcgttgttttaatattacttaatagacttatttcatggctagattttacctccttgaacttggcttatcatttttaaaacgaatcttgtgttgtcccacgtgagaacctgcagagtagcacacacaggtaaggcttcttctgggcctcatttgcttctggaacctgttgttgcctccactttacttctgtagtgggaaactcagaaac

SEQ ID NO: 403273 - DNA, 509 bp, Homo sapiens
tgacaggccgagacccagtctcagggaaagggaataaaagtgaagttatgactgacaattgggtaaaatgccaattcacaaaacaaaacagtgtgctgagaactctgttgtgacctaaaatcccctcttcctcctagggcaacatttaaatctgtttctcaaaggggccaccagcattagaatccccagaggtacttgttaaagatgcaaatttgagccccaccccagttttagagaatcagaatctccatggggtagggagccccagggctaaccaactcccaggtcattgttaaccagggaagggctgatttacacaaccacacaaaataacgamgacgcgagaaagcatgggtaagcacatagtgggcagtcactacagataatttccccgtaaaatacttcggctctcatagtttttaggacacttattttctctatagttcacattaaaacatcttgagactctaaccagaaaaaagtgcgtttatctggagttatttgcataa

SEQ ID NO: 403274 - DNA, 564 bp, Homo sapiens
tttgacatcagaaaattaacattagtggggatagagagtaatatctctctaaacataatttgcttaataaaggttattcttgatcatttagcagagtaagcaataattctacaacccttgggaactttgctrttgaatcctccatatgaggcactgtatatactggaaataatgctttgtcattaagaaatatttataagaaaatttaataagcttcaagaattgtagtataagtttgtatatacagggtactatttttttcttcatccttttaatgaggaaccaatggatataagagataatgtgacatgatgagaagaaaacagatgtgttttccacagagccatggctagagtgaagagtgtagcatatttgctaagatatatattgtttcaatcactaaataccgcttattgtctacaaccatgatatctgtggctatatttgtgaggctatttcagggagttacaatctcttagctaataaatagctgacataattaattgataaaagctacaagtatgccagaatgattttatagaaaagatatttagcgattcatat

SEQ ID NO: 403275 - DNA, 572 bp, Homo sapiens
ttttaaaaattggtactttcatattggttgcaaaaagttgtattagctccttcaaatatatacatcaatttgttgctcagggaggaaaaaaaatccctgaaaactgtataaaattagtatgcayatatttgtaaacaagtatagcatcataacacagttcttttcttatcagtttttcctcttcaaacgttgtgttcttaaagcaagtcatacatcaggccaggcgtggtggctcatacctgtaatcccagcactttgggaggctgaggtgggtggattacaaggtcaagagatcgagaccatcctggccaacattgtgaaaccccgtctctactaaaaatacaaaaattagccaggcgtggtagcaggcgcctgtaatcccagctacttgggaggctgaggcaggagaaccacttgaacctgggaggcggaggttgcagtgagccgagatcacgctactgcactccagcctggtgacagagcgagactccatctcaaaaaacaaaacaaaacagaacaaaaaaaacacgtcatacacctatgacactgtatttcaatcttagttgttacag

SEQ ID NO: 403276 - DNA, 436 bp, Homo sapiens
cacactgtaccatttctgacaggagggagcatctattttaactatgccctaatgagcactaaaccttytgatttcaattttatacatctgatgatggcatgaatttttttgagactggcttctggcttgatacttttcaaactttggcataccatgcccttgtgtcagtagcttgatgagtgggcaaagtggagaataaggagtattcccaggcattcctctgggaaggtaagcaccattgtaaccacacttggaaggatggcaaaacacatcactatcccccataatctccaaatcaatgtattcccaactcaactttctctttactaaacattgaaaatgcctgcagtcactgcaatgcccccgacacaaaggaaagtatgatagagaagtcaaaatgaaaagagacaatgtcttaactaatgatggtttaaaa

SEQ ID NO: 403277 - DNA, 596 bp, Homo sapiens
gtaaattgtgcaatattaccatcataatttcaaaggaaagaatgaaaagcaaacacaactctcaaaatgctcgggctagtgttcactaaattctgttgtcgtagttgttaaaatgatttcagggataaaaagaaaactgaaaactaaaccttttatataagatgccaataaagttgctacatcatctgagttactcaaatccaggttttatttcataaattttaacctagcaaatactaaatctttaatctyagcaaggttacatagtataactgtaggtcaactagagcagacaccaagagacctggagtgggggacctcgttccacaatggttgaacatacttgagaaaatcaattcaagtctcagtacttactgtcaaactgtcagaggagttttaaagatatatgagcataattctatactagatgagagattagggccacataaacctatggatgctcagataaacatcaaagaattgtgacattgaccaaatcaaatttaacaacacaaaccagattttaaattttaatacttagggaagacaaaaaaaatttcattaaaatggtaaccaccagaaataatctgaactaa

SEQ ID NO: 403278 - DNA, 596 bp, Homo sapiens
gtaaattgtgcaatattaccatcataatttcaaaggaaagaatgaaaagcaaacacaactctcaaaatgctcgggctagtgttcactaaattctgttgtcgtagttgttaaaatgatttcagggataaaaagaaaactgaaaactaaaccttttatataagatgccaataaagttgctacatcatctgagttactcaaatccaggttttatttcataaattttaacctagcaaatactaaatctttaatcttagcaaggttacatagtataactgtaggtcaactagagcagacaccaagagacctggagtgggggacctcgttccacaatggttgaacatacttgagaaaatcaattcaagtctcagtacttactgtcaaactgtcagaggagttttaaagatatatgagcataattctatastagatgagagattagggccacataaacctatggatgctcagataaacatcaaagaattgtgacattgaccaaatcaaatttaacaacacaaaccagattttaaattttaatacttagggaagacaaaaaaaatttcattaaaatggtaaccaccagaaataatctgaactaa

SEQ ID NO: 403279 - DNA, 637 bp, Homo sapiens
caggtagtctttcttgcaaggtctaaaagagagagagatcctgaaaggaaatggatcatctgggcctgtacagaccacacagamttactactcatcagtcactgaaacaaactgtgtgtcagtgcaggaattggcaccatagaaagcttcatctgctggtttgggacttcccagctgctgggttggtaatatccctaatatccccctctaatcattagtaaaccttggtgcatgaggcattgtactagtccattttcatgctgctataaagacatacccgagactgggtaatttataaaggaaagatgtttaattgactcacagttctgcgtggctgtggaggcctcaggaaacttggaatcatggtggaagggggtgcaaacacgtccttcttcaccaggcagcaagagagacaagtgcagagtgaaggaggaaaagccccttataaaaccatcagatctcgtgagaactaactcactaacaagagaacagcaagagggaactgcccccatgatcactatcaccttccacgaggtctctcccccaagaagtggggaattacaattcaaattacaattcaagatgagatctgggtgaggatacagagccaggccatatgaggtatctatctctaccc

SEQ ID NO: 403280 - DNA, 596 bp, Homo sapiens
tgtaacaaagtttggctttagtctgagtatcagcataaaatttgttatatttttgccctgggcttttggagatagaatacttactacaaagtcattctggaattcccaaaatatgagtaatcaatgacaatattatcaaataggttaatatcatctctattcaggtcaaaaatgtagctaatatgtaaaaagcatgacatcaaatgtagagttgayatccatatatacacattcaaatacaatacacattgtagatgaaacttagtaatgtctcctcatgtcagctcaaatatgaatatgaataatgtaaatattattgtaaaatatgttgaaataattcatgatagttgtgaagctgttgatttaatatacaaaaataattcttaataattttaaatagttaaacaaatagggaaatcagttgtgagtttctatatatgtaaagagattgtactggtgtacctaggtaactttaggtagaaagaaaatatttataaaaatgtcaccaataaaaggaaaagaaaagaaattagataataacataactagttttgtagacttgttttatgtgctaaaattcataacattaaaataca

SEQ ID NO: 403281 - DNA, 507 bp, Homo sapiens
tttactatgtatgagcatatcaaaataacttgtataccttaaataaatatataattttctttagaaacaagtaaatagtaaaaaataagatttgttttgacattataactgtttcaggatccttagggtgttaacttttccacccagaaacctctgtggccagtgttgcctttgtcagagttttggttgggcccactgggctcattccactcactcagcctggcagactgcacctgtcttgtgctactggcctgtatcccatgcctgccaagggtragccaggcatgtagtggcaaggggtgtgtgagcgagtgtgtgtggtccagacactgcacacaaccaggcagaccggtggctgtggtggtgtgggcagctccaggcaccggctccatgcaaggctgtggctgtatcagatttactacaagtggcttctactatgggcaccgatatctggatgagggaaatatgctggtacctggaagcttggagacaccaggaatcatagag

SEQ ID NO: 403282 - DNA, 529 bp, Homo sapiens
gccactgcactccagcctgggcaacagagataaaccttgtcttaaacaaacaaacaaaagaaaaccacatttaccctgactgtcagcaggataataaataccactttccccttcaatgctcacctctcttgccagtgatttctattgggttaacaaaaccagaagccagagtacagagataattgcttacagagtccatagagatcagtcttctaggtattaagcaaggtggagaaaggtagagtataaaactagatgggtgagaggaaaatgtcttgcacagtaatcaattctattatctgcgcaacagtagaaacaataatttcctgacttgcttggcttacagggaagrtttaagactaaaatgatgtttcagataataattcataacctctaaaacatgtcacaatgaagtgtcaaaatatctggctgtttagcaatttagagaaaatatgcaaaacaaaattagttttcttattttaagtctatttttttctaatgaaaagcttaagaaactgagagattttga

SEQ ID NO: 403283 - DNA, 631 bp, Homo sapiens
accactttccccttcaatgctcacctctcttgccagtgatttctattgggttaacaaaaccagaagccagagtacagagataattgcttacagagtccatagagatcagtcttctaggtattaagcaaggtggagaaaggtagagtataaaactagatgggtgagaggaaaatgtcttgcacagtaatcaattctattatctgcgcaacagtagaaacaataatttcctgacttgcttggcttacagggaagatttaagactaaaatgatgtttcagataataattcataacctctaaaacatgtcacaatgaagtgtcaaaatatctggctgtttagcaatttagagaaaatatgcaaaacaaaattagttttcttattttaagtctattttkttctaatgaaaagcttaagaaactgagagattttgaaaatcatggtactgaaaacattccctgttgtgagacattcaaattgtttttaattctcatttgtgtaaatgaaacaaagatgaatatctgggtttctaacacttgtttctctgatacaaattcttgggctcttgacactccattgtcaaattgttttcacaaaacctgcacctattcacactctttattttataatggtaa

SEQ ID NO: 403284 - DNA, 581 bp, Homo sapiens
caactctataagaaacaatctaataatctaatttaagaatgggcaaaatatttaaatagacatttctcaaaagaagacatatggatggcaaacaggcatatgcaaaggtactcaacatcattaatcatcagaaaaatgcaaatcaaaactccaatgagatatcacctcaccccagttaagatggctkatatccaaaagagaggcaatagcaaatgctggcaaggtgatggagaaaagggaaccctcctacgctcttggtgaaaatgctgattagtaaaatcactatggggaacagttagaaggttcttcaaaaaactaaaaatagagctaccatatgatccctgaatcccactgctgggcatatatcccaaaaaagaaaatccatgtatggaagagatatctgcactcccatgtttgttgcagcactgttcacaatagccaagattggatttaacacaagtgcccataaatagataaataaagtgtggtacttatgtacaatgaaatactatttagccatgaaaaagaatgggatactgtcatttgcaacaacatggatagaactagaggacattttgtga

SEQ ID NO: 403285 - DNA, 604 bp, Homo sapiens
acacaatctacaatctgttccattattctagaagtgtcttagcactttttgataaataagaaagatgcaaaatatataatttcataatctacacttacatatcacrttttatatttttatatctgactactccttttaagaagtacttcattgataatattccataatggcactgtatgaaatacattgcaacaccagttcctctatgaattctgttcattgatgacttcacttaagaaaggtttgtgcttagtggacagtattacataaataatccctcttaacatctctctttgcagaagacccacatgaaattccatcttcagtttaaagactaagttctgtgttcagaaacattcttaccccatctaagaaactatattcaaggggaaaattatggggtgtttttctcaactgaggtcaaagcttagtctttggctatctagaaataggatagaaacatcaaccaccagaaagaaagaaaatgttcacagggagaactcagagtgaaatatgatttcatcttacggacatttgaatgggtgcttttgtcttcacgcctttaactaaaagcactcacacttaaaagaatgagagcacactt

SEQ ID NO: 403286 - DNA, 601 bp, Homo sapiens
gtatgaaatacattgcaacaccagttcctctatgaattctgttcattgatgacttcacttaagaaaggtttgtgcttagtggacagtattacataaataatccctcttaacatctctctttgcagaagacccacatgaaattccatcttcagtttaaagactaagttctgtgttcagaaacattcttaccccatctaagaaactatattcaaggggaaaattatggggtgtttttctcaactgaggtcaaagcttagtctttggctatctagaaataggatagaaacatcaaccaccagaaagaaagaaaatgttcacagggagaactcagagtgaaatatgatttcatcttayggacatttgaatgggtgcttttgtcttcacgcctttaactaaaagcactcacacttaaaagaatgagagcacacttcttacttcttggatattttatttctactaggatgctgagtagcaagtggaggttcaataaatgctcacaaaacgggcagaaaaagctttatggcttcatgaaactgtaatatagaggcttcttggtcactgaaaggcaaataaatatagatctaaaaagtacatatatgct

SEQ ID NO: 403287 - DNA, 568 bp, Homo sapiens
tctttcattcttgcacgctcttgcctttctgtgttctaacatgggatgacacagcaagaggaactcttaagatgccagccccttgattttggacttctccagctcctgaactgtaaaaaatatatcttatttataatttacccagtcttggttattctattataagagtacaaaatggactargacacaactcaataatacagaggcaaataacccaattaaaaatgagaaaaaattttgaatagtcatttatctaaagaagatctacaaatagacaataggcacattaaaatacacttaacatcattagttattagggaaattcaaatcaaaaccaaaatgagatactgcttctcacctactagaatggctagaataaaaatgacacacattttgtaagtgttggcatggatgtggaagaaattaaaacctcatatattgctggcgaaaatttgaaacagtgcgtctgctgtggggaacagtttaataactcaaaaagttcaacacagggataccatgtgacccagcatttccactccaacacagggttactacgtgacccagcagt

SEQ ID NO: 403288 - DNA, 496 bp, Homo sapiens
aaattctaaaccaactgtataaagcattgaatttcaatccaaaacatatttagaatatactcaaattttataaaagaagccaacttcaaacgattttttttaatcaggtaaagtaatcctgaaattcactctgatttacttcctgcactctaaaggaaaaagggtgctagaaaaaatatttacctttacatatataaatgaacagcttagcattaaggatacagcctaatactcaatcccacaactatcacagctaggaaagtcattaagaggaagctggtggttgaaaccctgccaacctgcatctatcattctcagtttttgctttatattagtggtaaatttagttcccaatatatagattatctawctctgactaaatttgtccaacttcttgacctttcatgaactgacaacccactgtcacacttaagtcacttgataattgtgactttgctgatctctggcaaggcctaagactcatgacttgaaagcc

SEQ ID NO: 403289 - DNA, 531 bp, Homo sapiens
atgatgagtacactatgaatatcacaagagcagttgaagaggcaagcattaaaagatggacagaaaaatctcaaacatygggagaatagttatatgttgctactgaatgtagaaaggggattatgaggacaacactaagggtgggagtggattacaatgtgtataagaaagaattccatcacagagagtactgccttccacaatgccatggtctgccttctaatcttccaaattccatctctctgaagttgttccatcagaagcaagacatctgcaaaacttactatggatgagtatccctttctctgtatagaactcactaaatgacttcagtatcatgtcagaaacagatatttcaactctacactctgtcatttttctattctacttctaatcaactgtaaacaaaatgggcataactaagagaacattttctagagatgtttataaagttttgttttgaagttagaaaataatttactttgaatttaactttagcgataattcgtgatcattttttcactaccctct

SEQ ID NO: 403290 - DNA, 566 bp, Homo sapiens
ttaagaaagtataagaaacagtgttgagacaggcctgcttcagagatcaatagtacatttgtataattggagaattagaggcaaggtattgggtctcactgaaactaaatggtcttaattggatcttgagtggttttctgtcataaaaacttattgatcttcaccactttccacccagaaattaaaacaccaaatggaacaactccatatgagttcagtctttcaattagagcactctaccttatgaagatttagaaattagttgttgaatcttttatgaaatataaggtgcttacagcttggtactttcttcaggtaaatataagttcaaacrtcccagtttttctgaaaatagcaactattttattagggctcaatttattatatcgactcatttagtgggaagacctctggcattctaaacaattttgaacatactcataaacctagaaaatcagcaaaaaagctacccaaatgccaaagtaatgctttaaagtgcaagcacttaattccataagaaaggttttattcagccattacaaactctttatatactacacaaaatt

SEQ ID NO: 403291 - DNA, 558 bp, Homo sapiens
tttttaatctattactgatgtttctgaaagaatgttgaataccatgtaaaaagtgggtttttttttttttagtatgcactctttacrgtaaaacactttggactatacccctaaaattggggagatatatatatatctatatatatcttatacatattaatataacatacatttatatggcttatatatatagcttatgtatttatatattgtatataacatgtgtatcagcatatttatattttacaaaccttattagtcaaaaaggtaagagttttttaagtggcgtaattaaagaaaaatgaaatttctgttttttttcctatggcacaaatactacttttgaaaatcagcaatctgggtcctgccttgcttccaaaaactacctttgaaactaatacaagaagaccagccttttaagatagctcaggaatacaatacttcatcttaaataaacaactttcaaaaaaaaatcagagcttgatctgtatcctatttcactgttagttacacgatgctataccttgtgctttgccatactgacatttctcatttttt

SEQ ID NO: 403292 - DNA, 558 bp, Homo sapiens
tttttaatctattactgatgtttctgaaagaatgttgaataccatgtaaaaagtgggtttttttttttttagtatgcactctttacagtaaaacactttggactatacccctaaaattggggakatatatatatatctatatatatcttatacatattaatataacatacatttatatggcttatatatatagcttatgtatttatatattgtatataacatgtgtatcagcatatttatattttacaaaccttattagtcaaaaaggtaagagttttttaagtggcgtaattaaagaaaaatgaaatttctgttttttttcctatggcacaaatactacttttgaaaatcagcaatctgggtcctgccttgcttccaaaaactacctttgaaactaatacaagaagaccagccttttaagatagctcaggaatacaatacttcatcttaaataaacaactttcaaaaaaaaatcagagcttgatctgtatcctatttcactgttagttacacgatgctataccttgtgctttgccatactgacatttctcatttttt

SEQ ID NO: 403293 - DNA, 558 bp, Homo sapiens
tttttaatctattactgatgtttctgaaagaatgttgaataccatgtaaaaagtgggtttttttttttttagtatgcactctttacagtaaaacactttggactatacccctaaaattggggagatatatatatatctatatatatcttatacatattaatataacatacatttatatggcttatatatatagcttatgtatttatatattgtatataacatgtgtatcagcatatttatattttacaaaccttattagtcaaaaaggtaagagttttttaagtggcgtaattaaagaaaaatgaaatttctgttttttttcctatggcacaaatactacttttgaaaatcagcaatctgggtcctgccttgcttccaaaaactacctttgaaactaayacaagaagaccagccttttaagatagctcaggaatacaatacttcatcttaaataaacaactttcaaaaaaaaatcagagcttgatctgtatcctatttcactgttagttacacgatgctataccttgtgctttgccatactgacatttctcatttttt

SEQ ID NO: 403294 - DNA, 534 bp, Homo sapiens
tatacttgggtggttgcaattcttggccattttaaagaaggctgctggtactggtattcaaacaaatttggtcatgatggtgactacaggtagaagctgaaagctattattagcaatactactgaaggtaaaggaggaagaatcactttgacaggcattaagaggtatgggaatttagtaaagggtaatgtaaacagaaaagaaaaatctattagattagtagtagygaatgaaggttctccttcctatgggaaaagtacaaatcaatacagtattttaataaatattaggtacctagtttgtgtcagttactgaggtaagagattatgtcaatactggatgtggggaaatttttaaactagcaaaaagataatctgaatgatctctgtagaaactatgagatttttcaagaaggaaacattgctgacaagtttaaaaagaaaagttaatggaaacaaataattcataccttacatgcaagatagaagcttctgatagtattattcctctttcagaaaatgtgtgctatttggt

SEQ ID NO: 403295 - DNA, 484 bp, Homo sapiens
tttatgttagaagactcgcataagaataataaggactagattataaataatccttcccatatgccaaccacttgtcaagtgctttatatgcattgtcttaattagtggctaaatgccttaaaaggcattggccgggcacagtggctcacgccagtaatcccaggactttgggaggctaaggcgggtggatcacgaggtcaggagatcgagaccatcctggttaacayggtgaaaccccatctctactaaaaaaatacaaaaaaaaaaaaaattatctggaagtgctggcaagtgcctgtagtcctagctactcaggaggctgaggtaggagaatggcatgaacccgggaggtggagcttgcagtgagctgagatcacgccactgcactccagcctgggcgacaaagcaagactcttgtctcaaaaaaaaaaaaaaaaaagcaaatattatcccataattctgattaacccaagtttagagaagt

SEQ ID NO: 403296 - DNA, 520 bp, Homo sapiens
ctcctccagcctcatgaaggtaaaacagaaggagccatttcactaaaaaccctagaagacattggagcacaagcagttcatccccttagaatcctctaacagagtgatgctgagcagggagagctgctcccttccttgttgccacaggtggctgtgcagcaggaatgccatgtcacatgtgcttcaagaggacatgaagaattattgatgatgcctgggggaggtgcagtggcctgaggacrtgtgctaggatggaaatagcaatgatgtctgtgtggtcaaggttccatcaggaagtaaacagcatctcaaactgggtgtctcaggagcatgtagtgaaggaccgcttgcagggatgtgggcaaggttaaggggtggtgaagcatgacagagctagcaacagcaggaagcctttacctctcctggatctgaggggggcaagggcaggtgtgtttagaatatcggccacttgataagagttgcagcctttgttatgggaataccaatttgttatgggaat

SEQ ID NO: 403297 - DNA, 598 bp, Homo sapiens
ctaacctccctgtgcctgcctcagttttctcattggtaaaatggatataataatagtacctaccttattttaggatgttattaaataatgtacataaagtatttagactattccctggcacatagcaagaacccaatgactgttggctattattgttgaacatttaggtaatttccagtttttttgctatttctcaacaatgctccaatgacattcaggatttttttttttatggtggtaaaaaacatataacatcacatttaccatgcaaggtcagattctagagtgaccacctgagtactcacactagagctctggcagcaaacacgagcctgggtctaacaaccttttggcttgggactcttggatctctttagagtaacagggtctcttcagactgcctgttccagttgctgcatggtcaagacctgtggctggaagtccccttccgatggtttcctgatttctgcattgccaatcccctggccagggccascttgagcttctggtgtgggtgagactccacagtcctaatctcaggtcaggtaggagaatgtctgtgcacagttgcatgacatgaagggacagcattgattca

SEQ ID NO: 403298 - DNA, 598 bp, Homo sapiens
ctaacctccctgtgcctgcctcagttttctcattggtaaaatggatataataatagtacctaccttattttaggatgttattaaataatgtacataaagtatttagactattccctggcacatagcaagaacccaatgactgttggctattattgttgaacatttaggtaatttccagtttttttgctatttctcaacaatgctccaatgacattcaggatttttttttttatggtggtaaaaaacatataacatcacatttaccatgcaaggtcagattctagagtgaccacctgagtactcacactagagctctggcagcaaacacgagcctgggtctaacaaccttttggcttgggactcttggatctctttagagtaacagggtctcttcagactgcctgttccagttgctgcatggtcaagacctgtggctggaagtccccttccgatggtttcctgatttctgcattgccaatcccctggccagggccagcttgagcttctggtgtgggtgagactccayagtcctaatctcaggtcaggtaggagaatgtctgtgcacagttgcatgacatgaagggacagcattgattca

SEQ ID NO: 403299 - DNA, 615 bp, Homo sapiens
tcaagttgacactcagtattaaccctcacacttgataacaggagatttctgtagacaggaaagtgaggaartggaaggtatctcacaagatggtcctgaagagacatcagagtcttccctctggccttgcaggggcctatgcaggtagctgcatggagcccttcttcgggtcaaggagatgatgtccccttcactgacttttgcacttccttgaatctgcaggggagtgtccctccaacttcagagtgagcagcagcagctgaccagattggaggacatttccactgtcttccctggcagctgtgatgtgttgtgcggtggcagctgaggattgcctgcgtgtaatctttgaggttccaagatgcttgttggaagtggagcctggtcaagcagcagaaaggacagctggatccatgctgggtggggtgaggtggggtgcttgtcagggaagttggcttcagctggaactggaggttggctccagcaaaggaggttgaacatcactgattcctgacctgcagcacccaaatggccacaaagagatgtcatgggttttgaggaggccacagagccaacagctttagtgtcttcagaaggatgaagaaaacttgaaca

SEQ ID NO: 403300 - DNA, 615 bp, Homo sapiens
tcaagttgacactcagtattaaccctcacacttgataacaggagatttctgtagacaggaaagtgaggaagtggaaggtatctcacaagatggtcctgaagagacatcagagtcttccctctggccttgcaggggcctatgcaggtagctgcatggagcccttcttcgggtcaaggagatgatgtccccttcactgacttttgcacttccttgaatctgcaggggagtgtccctccaacttcagagtgagcagcagcagctgaccagattggaggacatttccactgtcttccctggcagctgtgatgtgttgtgcggtggcagctgaggattgcctgygtgtaatctttgaggttccaagatgcttgttggaagtggagcctggtcaagcagcagaaaggacagctggatccatgctgggtggggtgaggtggggtgcttgtcagggaagttggcttcagctggaactggaggttggctccagcaaaggaggttgaacatcactgattcctgacctgcagcacccaaatggccacaaagagatgtcatgggttttgaggaggccacagagccaacagctttagtgtcttcagaaggatgaagaaaacttgaaca

SEQ ID NO: 403301 - DNA, 379 bp, Homo sapiens
atttcacttctaacgtgaagggatggaaaaagatattctatgtaattggaaaccaaaaaagagcaggagtaagtagctgatataagtaagtacttacatcagataaaacagactacagatcaaagactgtaaaaagagacaaagaagatcactaatgataaagggaataattcagcaggaggaaatatgtatcaatatctatgtactgaacaacagagctctcaagtatataatgcgaacattaacaaatctaaagggagagatagactgcaatacaataatagtaggggacttcaacatgctactatatgtratggacaggtcatccagacagaaaatcaagaaacactggagttaaactacacaccagatcaaatta

SEQ ID NO: 403302 - DNA, 578 bp, Homo sapiens
ataattcagtggaattaagtactttcacagtgttgtacaaccatcactactatccatctccagaacttttcatcaccccaaattgaaactcagaaggtatcaaacaataattccccatttcccttctgtaacccatggcagctctattctacctctggtgtctatgactttgcctattctagatatctcatctaagtggaatcatacaatctttgtctttctgtgactggctcacttagcataatgtcttcaagactcgcccatgctgtagtatgggtcagagtttccttcctcttaatggctgagcacgtaagtttttaatccgtggatttcaccaaaggttgatgtttctaatgcattcggcaaaattcctgcagacacttactaaatgtggagttgacttctctttttcctgcatcattctcttcattctctatacagtgactgtgtgacatctggtagtgcgtggttaggtgtttcattcattctctcgaatgagaggaggtcctcccaggttggaggtctatgctagcarcaggtgctctgtggagcggtgccaacagtgacaccgagagacg

SEQ ID NO: 403303 - DNA, 346 bp, Homo sapiens
taaatgccctgatttgggagaaactcacataatttctgctcacaacaaattggccagggccagtttcatggccctgccctaccacagaggggccctgagtgtgatcttaccacgggcctggaagacagagagtagggaatgcattcatgacaaccacagtgaccttgggaaagttgtcttagttctctgggcctcctttttttcacctgaaagtastgttcttaaagcaaagacagagtggttaaaatggctcttagaatccctccagccactggagatagccattggctaaaaatgaacctcaaattaacctcataccccatacaaaaattaactcaaaatggat

SEQ ID NO: 403304 - DNA, 542 bp, Homo sapiens
ttgaagcccattgtttgatgagtattaaaaacttatgcagccacgcctctgtcaccacaatcccgctttagcacattcccatggcccaagcgagttccccggagcccctctgcagtcagtccccaccctcaaccccaccccaggcttccaccaactggttgagtttatagtgtagtgttatttccatgacttggttatttaaatttttttctgcttctaactgggtaagagttataacttaaatgtgagtaaaatatgtcaataacgtgaccctcagttattgtccttgtgtgatatcatacaagtctccacacatgccaggtactgggcaaaatgcttagggcatcagagcaacctgcgaagaagcgaccagcaccagagtttacaggtgtgggaaatgaaagttccacaaggtcactgatgcccccagatcacgtgatccatggcagaattgagctccttcccacatctcattaatgccagacacragttttctttcaatctgaatgctctgccctgttccggatttttaaaaaataata

SEQ ID NO: 403305 - DNA, 614 bp, Homo sapiens
cagtgtgggtggcataagttagcaaaggcatccaaagtggggtgaatcacaggcctggtgtgggaggaaaccataaatatgacggtgacacgcaggctcgcccgggagacagccagcttaagcacacgtgcagaggagaagcaagtgaaatgcgtaagggagcaggagaaaaatcagctttgaggcttcaaggacactaccaggcttgtcttacctggacaccagacagacaaaacttttttttcctcttttttttttaagtatagcatagatactaggaaagtagacataccataagtgtcctgctcaatgaattttccagactgaacatgcccatgcactcagcacttagatcaacaaacagaactggccgggaccctgggagctccccttgtgttgtactccagtcrcggcctcccccaggatcagccttgaactcctggagtcaagcaatcctcctgccttagcctcctcagtagctgagactacgggcacacaccaccagacccagctaatttgttttattttattttgtagagacggctcccactgtgttgtccaggctggtctctggcaactcctagcctcaaactattctcccacattgccctccc

SEQ ID NO: 403306 - DNA, 539 bp, Homo sapiens
gggtgaaaaacatgcttgaatgtcattaggattgtatttcataccagactcatcaaatattctcatggggtaacacctttgatcaagacaaagtttaattaaacaaatgactaccactggcacttggtcaaaacataaatgttacagcaatgattattcttccctcttctatatattgagtgaattagaccactgtatgatctcatctgattctaacattccatccattccaaagagcaagtccaagagccttgtcagtggcacagccaggaccagcacgaaggtcctcaattcctactccactttgactctctaaacataaatatgatactcagtaatatggttcagaacatcacaaccagtgtactatggaccacttgtttactctgagagactgatagttgaaaatcatgtatagagataaaaaaatcaaatcattatttttattgatccraaagttcacacgagttgaaataatatttaaatagtatttggatggctgtctcagaaaaattcctaaattcagtaattatgtattt

SEQ ID NO: 403307 - DNA, 611 bp, Homo sapiens
tttattttgaaaaacatactattcactgcctttctggtttctaaatcaatctctggtttagttgaggtatcagttcttctgggtctgaaccacacgtgttcactcacaaaactgagctgctgaggagaagtagagcttgatcttgttatcactagmtagctctgtgtagtcagagcgcctaaatatcctgcactatgctgactgctacctcaagcggcagagacagtaatacccaccacccttacagacagcacaaatgacatgctagcacattcaggccagaggcaggaagaaggcatgtgttttcaagacagaaaggcagacttaataacacacattctcttggttttctcatctgtaaaatgggaggaatgatgccttgcccaagtgttgccaggattgagtaagataatgtagtgaaagcacccagcacacagagggtgctgaataaatggttgctactgttattgccctacgtccaggctgactacaacaaaagtgatattaggcaaacacagtaacaagcaaggaatgttttattgtgtacattttctcaaaaaaaaaaaaacccacaaaaacagaacccacaaataggagcaaagaacagtttt

SEQ ID NO: 403308 - DNA, 467 bp, Homo sapiens
cagttgggtgggtggggtatggtatggaaagagaaggtgtcagtgagtagaggaataagtagggagtaagacagcaaggatggtgtgtgagtacgggaaatgagctttatttggatgatgggagtgatcttgccatacttgctacacttaaataaacaccaaaatctatcagactctgctttgatccgygccagggattctggatgtgaaatcccgcagtccggcggcctcagcatcacctgggaacctgttaaaagtgcagattctcagttctcatctagacctcctgagtcataaactctgggggtgggctgtagcaccagtgtgttttaatgagcctttggaatgagtttgagaaccactggctgtgacataattttgagaaaaattagcacagttgagctaattttcctctgaagaattagtttctgagagagttctaaagctagaagccaagatttacagag

SEQ ID NO: 403309 - DNA, 467 bp, Homo sapiens
cagttgggtgggtggggtatggtatggaaagagaaggtgtcagtgagtagaggaataagtagggagtaagacagcaaggatggtgtgtgagtacgggaaatgagctttatttggatgatgggagtgatcttgccatacttgctacacttaaataaacaccaaaatctatcagactctgctttgatccgcgccagggattctggatgtgaaatcccscagtccggcggcctcagcatcacctgggaacctgttaaaagtgcagattctcagttctcatctagacctcctgagtcataaactctgggggtgggctgtagcaccagtgtgttttaatgagcctttggaatgagtttgagaaccactggctgtgacataattttgagaaaaattagcacagttgagctaattttcctctgaagaattagtttctgagagagttctaaagctagaagccaagatttacagag

SEQ ID NO: 403310 - DNA, 487 bp, Homo sapiens
atctcgtccgtggtgatcttgtcggtgatctcttttacccccggagggtaagcgatcttcccgtcggcactcacgacgccacagagggcagtggcaggcttgggctgcgcggtgaagtccatcctgggggacaacttttggttcacagtcctctaccggcctctatcggtcagaaaaccaaagttcagcgggaaaggggcgactttgtaacctcttttttcatttcaaatctctctaatctggaaaaggccctgtctccccagaggccggggacccggcagcggcctcgccacccgctctttcccagggatcgaaccccgccggccccgccaacccggccctgccagccccaggctcamggggctcctccgcaccagccgccgtggccgccgaacagcgccaggagtttcccattccgcctttcacaatgaaatccacccccgagcaccagggtccgaagtttggcggccccgggaggccggcaagg

SEQ ID NO: 403311 - DNA, 548 bp, Homo sapiens
gtgtggaattacagctggtgagaggtcagaattcactcttggagcccccacccccaccccaccacctccaggccactccaggcctccgaggatcctatagtttctcaggtgttaatactcttggggatactttgaaatagatgctaacatgcagcccttgtagatgaaattggtttctccactacatggcaaatggtagctgtcttctatggaatctaaaggcactcctaaagacctcctctggctaattctcttgactcttacctggggaactatctctccataaacatggccttaggcaacacagcakctatgttcttactgtttgcaacggctgccacactctggattaggcaagctggaaataacagggaacaaatataccctgacacctaaaatacttccgagttcacaggcaaaccactggttcagaaaagtctgcctaaaaaatcctccacgactttagccaacagccaatattctccagacttggatcccaagggacatgagactaactcagacacatcctggtttgatgctggtgttgg

SEQ ID NO: 403312 - DNA, 548 bp, Homo sapiens
gtgtggaattacagctggtgagaggtcagaattcactcttggagcccccacccccaccccaccacctccaggccactccaggcctccgaggatcctatagtttctcaggtgttaatactcttggggatactttgaaatagatgctaacatgcagcccttgtagatgaaattggtttctccactacatggcaaatggtagctgtcttctatggaatctaaaggcactcctaaagacctcctctggctaattctcttgactcttacctggggaactatctctccataaacatggccttaggcaacacagcatctatgttcttactgtytgcaacggctgccacactctggattaggcaagctggaaataacagggaacaaatataccctgacacctaaaatacttccgagttcacaggcaaaccactggttcagaaaagtctgcctaaaaaatcctccacgactttagccaacagccaatattctccagacttggatcccaagggacatgagactaactcagacacatcctggtttgatgctggtgttgg

SEQ ID NO: 403313 - DNA, 548 bp, Homo sapiens
gtgtggaattacagctggtgagaggtcagaattcactcttggagcccccacccccaccccaccacctccaggccactccaggcctccgaggatcctatagtttctcaggtgttaatactcttggggatactttgaaatagatgctaacatgcagcccttgtagatgaaattggtttctccactacatggcaaatggtagctgtcttctatggaatctaaaggcactcctaaagacctcctctggctaattctcttgactcttacctggggaactatctctccataaacatggccttaggcaacacagcatctatgttcttactgtttgcaacggctgccacactctggattaggcaagctggaaataacagggaacaaatataccctgacacctaaaatasttccgagttcacaggcaaaccactggttcagaaaagtctgcctaaaaaatcctccacgactttagccaacagccaatattctccagacttggatcccaagggacatgagactaactcagacacatcctggtttgatgctggtgttgg

SEQ ID NO: 403314 - DNA, 548 bp, Homo sapiens
gtgtggaattacagctggtgagaggtcagaattcactcttggagcccccacccccaccccaccacctccaggccactccaggcctccgaggatcctatagtttctcaggtgttaatactcttggggatactttgaaatagatgctaacatgcagcccttgtagatgaaattggtttctccactacatggcaaatggtagctgtcttctatggaatctaaaggcactcctaaagacctcctctggctaattctcttgactcttacctggggaactatctctccataaacatggccttaggcaacacagcatctatgttcttactgtttgcaacggctgccacactctggattaggcaagctggaaataacagggaacaaatataccctgacacctaaaatacttccgagttcacaggcaaaccactggttcagaaaagtctgcctaaaaaatcctccacgactttagccaacagccratattctccagacttggatcccaagggacatgagactaactcagacacatcctggtttgatgctggtgttgg

SEQ ID NO: 403315 - DNA, 592 bp, Homo sapiens
ctctgtgttttcacccccaaggaaacccaaattactcaatgtccccagagctgtgtccatactttgttgaggatcaawcactttattttaaaaatatattttatggaaatggtgtagctgtattttttctttttattcaaatgtaacatagtgatccaaagagaaaaatatggctctcaacctagaagtaacttttagaaagaaaaattgggtgaagaatgatgtaataaatagttttctttctgaaacaatctatttacctatcctataacacattattatagtaacataaatatagtcttatcacaatactctggtattgcatgctaccataaaattatgtcaaccagatatcatcacataactctttcagttaggattgaaatgagaaaagctcaaaagtttctacatatcatcgtcattgtggttctattactaatttgttgctaatgccaaaaatgcaaaccctgtgactatctagagatagatccaacatggtttagaagcagtggaagaaaaatcaatagatggagaaccagaaagaagactgagctaggaggatcatttgggccaagaggtcgagactacagta

SEQ ID NO: 403316 - DNA, 575 bp, Homo sapiens
tagtgtagtaatagccaaatatcaaaatatgtccatggaaaaaatttaggtgaggtagaaaaacataagccataataaaagtccaaaaaactgaagtccagggggaaaaaaaagcacacagattaaattatctgaagtgaaagggatctaaagaagagtgtattcaacagtgccaaatactgcagcaggattaagtaggatgaaaacaaaacccagggattggatttattgaygaggaattcattagtaattgtagcaaaagctctttctatgtagtcatagagatagggaccagatttaaggcattagggaatcaagtggaaatagagacattgacattaactgtttcagttgatgaatgctattatggaaagaaataaataggacatgaaattgtgagtagagtagtttcaattttttttaagcataagaaagactaatatatgggttaatggagggaagaaagaacactggggaatgagaaatggaaaagacatgacgaagagaacagaagaccaaatgaggtcaagaactatgtgataaagccttagaaaggtcaatctttccttcgaata

SEQ ID NO: 403317 - DNA, 575 bp, Homo sapiens
tagtgtagtaatagccaaatatcaaaatatgtccatggaaaaaatttaggtgaggtagaaaaacataagccataataaaagtccaaaaaactgaagtccagggggaaaaaaaagcacacagattaaattatctgaagtgaaagggatctaaagaagagtgtattcaacagtgccaaatactgcagcaggattaagtaggatgaaaacaaaacccagggattggatttattgacgaggaattcattagtaattgtagcaaaagctctttctatgtagtcatagagatagggaccagatttaaggcattagggaatcaagtggaaatagagacattgacattaactgtttcagttgatgaatgctattatggaaagaaataaataggacatgaaattgtgagtagagtagtttcaatwttttttaagcataagaaagactaatatatgggttaatggagggaagaaagaacactggggaatgagaaatggaaaagacatgacgaagagaacagaagaccaaatgaggtcaagaactatgtgataaagccttagaaaggtcaatctttccttcgaata

SEQ ID NO: 403318 - DNA, 575 bp, Homo sapiens
tagtgtagtaatagccaaatatcaaaatatgtccatggaaaaaatttaggtgaggtagaaaaacataagccataataaaagtccaaaaaactgaagtccagggggaaaaaaaagcacacagattaaattatctgaagtgaaagggatctaaagaagagtgtattcaacagtgccaaatactgcagcaggattaagtaggatgaaaacaaaacccagggattggatttattgacgaggaattcattagtaattgtagcaaaagctctttctatgtagtcatagagatagggaccagatttaaggcattagggaatcaagtggaaatagagacattgacattaactgtttcagttgatgaatgctattatggaaagaaataaataggacatgaaattgtgagtagagtagtttcaattttttwtaagcataagaaagactaatatatgggttaatggagggaagaaagaacactggggaatgagaaatggaaaagacatgacgaagagaacagaagaccaaatgaggtcaagaactatgtgataaagccttagaaaggtcaatctttccttcgaata

SEQ ID NO: 403319 - DNA, 599 bp, Homo sapiens
agtgagtcaatactgcagttatactactacactaaatccttgggcaacattatgtaataaaactaattaaaatgtctgtagcaaaaattatgaatattcacattacatgggctaaatgataaccctaagtgttctaacaccatttattgtgakattttttttccacttaataaattgaggtcagatcagatttcgcaatgaaattcgttattaaaacattatattttcaatgagattttaaaataaaaatatgcaaaaacttttgaatttttgcatcttagtcattggcatttggaagttgttattttaaacaccacattactacagcataaaagttcatacttagaaataaattttagagaagatgtgtaagacctcaacactgtaagttataaaacattgtcgatgaaaattaagaaatatctaaattaatggatatatatataacatgtgtgtatactggaaaactcaatattaagatttcattgcttcccaaatttatttctaaattcaaagtaattgcaaataaatattatagtgagacttttgcaaaaatatacaagttactctttgtttatttggaaaataaatgtattcta

SEQ ID NO: 403320 - DNA, 492 bp, Homo sapiens
tatttattccatgtttccatttttcttctggttagtaaatgaaattttatatgctgaattttgacatgacttaacttctataatgaaagcagttattttcactccatagaaaacagaaaccataggttttggttaagtatttgcaagtattcagaattttaaartttgtatttagtggaaaagagcattctccaggaagaacacttaactcttggtaattagaacaatggcatgcacgggtaataaattactcatgggaagatttgaacaaggatacctgagcaaaacctgtaaatcttctaaacatttttgtccccacagaatgcaataaaatgtcatttataataaataaaccatataatataaactcaacatgaagaatattaccaagtcaactgaaagccctggcatatggtaagtttcctgcatgtgaaatgtcagtgatgatttttaggattaacattgttataccacttcatgaattaatttatt

SEQ ID NO: 403321 - DNA, 478 bp, Homo sapiens
tctaccatgttttataaatgtatgcgatgtgagagtgaggacgacaccctctactctgtccttgctggaattggaagtcaaccattaagtcttaattaagcctttctcttcagctttcttgtcttccctccttatattatctctctatgcgatgtcattcttcaataaatcacatctcaatctaacttcagtcttaattagagccttgagttatcgaaccctatatctaggtttttactgaaaatttccacttgcattgtctacyagaaaatcaaacataacatgttgattccaaaattattgccttttccactgatttcattgtcctacttcagttcattttattattgacttctccttcaatccaactaaaatctctgagatcaaaatataatccatctctcatagtccctgatgacaacacattttcaagtattattaatttttttctttgtgatatatttcacatctgctatta

SEQ ID NO: 403322 - DNA, 550 bp, Homo sapiens
ttttaaatacctaaactaacattaagtgtggaatttatgcrcagaaaaatgttaagatgtgggtgactaaattatcaactgaaccaaaaagaataacaaaaataagccagcaaaatatcatttattgcggatttgagatcaaatctgcaaatcaatacatttaggtaaagtgaatcaaataattgaggtttactacaaaggacaggattgttttctaccacagatactaaaccattatattataaaggctagtaaatgtgtttcctccttgggactccaaattgcacatagtgaccctttgagagtaagtactccaaattgcacaaagtgaccctttgagtaagtactcagaacataatgacataattaaagactttctataattttccattcgcttgacattagaattagtatgttcttttttaaaggtacacatgcacacatacaaagagatgctactaccaattgaacagttatttatgccaaaactaagtaatgaaataaaatgcatctatatttttcagaaggaaagaagattcaagagaattgc

SEQ ID NO: 403323 - DNA, 506 bp, Homo sapiens
aattccatgaaaaagttctggttctaccatttgggctgatgataggacttctgaagaaytgaatgctcctcatgctgaatggacagcaaggtacctcacttactacaaaaaaaaaaaaaaaatctgcatatggaggcaatccagtttggaattctactcctgtattcacatggatagtaaaaacttagttgaataaggcaagggtaaatctccataatgagaataactaaaagcagtatatctaatagtacaatcattgggttcttgttccaagagttttgattgaatatttatagtctcatgagtttggcaaatgacttttcaacagggaaaaggtaattgtacctaattaattagacaatcaagaacactacaataagaatagtgaattatgggaatctcagtgggaattctgaggtgaagttattgtggcactatataatcactcactaatgcataatggagggaaactgtttactttaaagaagactagaaattaaggactg

SEQ ID NO: 403324 - DNA, 447 bp, Homo sapiens
tgttgttgtcattcaaataactgtgtgagatactggatatgttaatttgattcactatagtaaatattttactatcaatatgtatcctataacatcatgttgtaaacctcaaatatacataataaactttatttttaaaatgagactcaacaataaaaaatacatcacagtaacagctaaarttatgtttgaccaaataggtatgtactgtgtcttagcaaaaatgacacataaaattaaccatcatacctgaatatatcatttcatgtttgttcagactcagaacctgagtccgaacttgatactttcaaaataccctgtttaaccaaatatagacattgtacatttatttcatcttggagtcaaaactgataattatacacataatgttttctttcttttttccctggaactgactgagtacatgaccatctgagataaacatta

SEQ ID NO: 403325 - DNA, 602 bp, Homo sapiens
ggtcaggctggtctcgaactccctacctcaggtgatctgcccacagtggcctcccaaagtgctgggattacaggcatgagccactgggcccagcctacatctaagtacttcctattatctatctctctgtctgtctatcatgagcattgcaaaaaactattaaaaatgtaaataaatttcaagcttaaattgtaatgcttgcaactgatacatggttttagaaagtccaaggaagtgatgttggagatattctgaaatgtcagacaaaatactatcaaataaagagtatggtagcrgtattgaacacttactatgtgtcaggcactgtcctaaaatatatacctatttttagtcctcacaggaagtctaccaagtaggtactgtatccccacttttagatggagaaaataattcatacagaggttaggaactcatctctgtaatttatctcagaaggaataagctaggcttcaaattctggcaatctgaatcagaggacacaacactctactgtctcttgtactggcataattaaatcagttaaaaataaatttaaaattaatgatatgactggtatttaaaaatggaatgacttgaatata

SEQ ID NO: 403326 - DNA, 522 bp, Homo sapiens
cctcacaggaagtctaccaagtaggtactgtatccccacttttagatggagaaaataattcatacagaggttaggaactcatctctgtaatttatctcagaaggaatragctaggcttcaaattctggcaatctgaatcagaggacacaacactctactgtctcttgtactggcataattaaatcagttaaaaataaatttaaaattaatgatatgactggtatttaaaaatggaatgacttgaatataaaggattagaggaagctctcagggaaattgataaagttcttgaataatttgaagaaactgtcatctttattgtgttttaaatgttaaaatttaagaatattacattgggctaatatacaatttggctggaataaccacatatatacaattcatgatttctagaacttaatgcacagtctaatttgtgttaaatgtatgacaaaaaacattattttaaataaaatttagctttacttttgaagtcctaaagtttttttccctatttaccagtaa

SEQ ID NO: 403327 - DNA, 469 bp, Homo sapiens
ataagtagcccaatatcttactaattttcaaagaataaacagctccattattagaaaatgtgctttgagaagtctggtaaaaatagtttctgaagccaattcatgttgaacattatcagcttcagtgaagcattttcatagtagctctgggtgagtttgtgtttcttccttcctaacgttattctagtctttttcaggctttagaaaaagtgttaaattactatgaggatggtgcattatgcaattctgtttccttagaaaatatcaaagatagtcatgtccacagggtgccttgagaaaaacagatttttaygtactttccattatcactccaagcctgttttactctatgcctgaggttcatgacttttaaaattgatagttcctttaaaaatgaactggttaagatagtcaatctctgttcttgtatttttaaaataaatctttctatgaaagccaggtacattca

SEQ ID NO: 403328 - DNA, 530 bp, Homo sapiens
gacaccactaccttaagtgaactaacagaagcaaaaaatcagctatcacatgttcttgcttgtaagtgggagctaaacaaaagatatacgtggacataaaaatggggaaattagactctgaggactccaaagagggagggttctcgcttaagtggaagctaaacaaaggatacatgtggacataaaaatggggaaattagactctgaggactccaaagagggagcgttctygcttaagtggaagctaaacaaaggatacatgtggacataaagatgaggaaattagactcaggactccaaagagggagggcagagggcggggggcagggaggattgaaaaatcatctactgggtacaatgtccaatatttgggtgatggatacactagaagcccaacctccaccattatgcatgtactcatgtaacaaataagcccacgtaccctctgactctgaactaaatatatatatctactgctatcttgtcatccaaaggaattagtatcaattttgactgcaactggcaatcta

SEQ ID NO: 403329 - DNA, 491 bp, Homo sapiens
caatgtgaaactcggggggatataccaagttgtttttcatggaattttttcaggaatcacggatcatggcacatacttttaatgaaatataatgggaaaaagtgtatttgattataataaaattaggtattttttaaggaaaataattcatatatacagtatacatatgtctgtagttatattcaggcttataataaaaaagacaattgatagtatggattatggtcaaataaattttaaaaatactggaataaaacaacttatgaagttgtagacctggcagatagatggagcttagtgagagaagtgattcacattaaattgttattatagaacacyaaggtcagagtgtgaaaatgtgatagatagtaggaatgaaaagtagggtaaacaaagacagattaaaagaaaatctggattaatagtgcccatctaaattaggagaatattatggatgtcagggactaagaaaacaaatgagaaatcacttc

SEQ ID NO: 403330 - DNA, 508 bp, Homo sapiens
ataatcattaccatcattttttatcacaatgagaaaattatcctttgtttagcagcctgggagcttgagtttttctattaccctaagatattatttctttaatggcatcaatctttttrgaaaagcccacttcaggacacttagttccaggggttctagtttctagtcttgactacaactcttatatctcctaaatagatatttaattttgaataacttactaatatttcagtttccttattttaaaaatgaggggtgttacattatacaaacaactcacagggttgttgtagaaaaacaaatataacagcattcaaagatggtctgtgaaaataatatatgattttacatgtgtatatatgtattttttttctgggactgctacattctgagctgcaaatattctaattttggtatcattttgtattcagtgaatgcatttttcattgtaaacatcattctatgagtagcatctagaaattgtctgttttttctctctgaatcctca

SEQ ID NO: 403331 - DNA, 507 bp, Homo sapiens
ttaactacaatgccatatccataacaccaaaagttttgtttaaatcatcccactcaataaattaaaaarataagcttcactatcagaaaaatattcattgagctactctgttataaaatctaagaacaagagagaagtccacaatctataaggccacagtaagagagctattttagataatggaaagctggaaatacttgcctgccttatgacttctgttctttttcagactgtcttcaaatatttgaactactgaaataaggaatatgtttattttgtatgtccaaaaagaagaaaagtaggataaatagagaaagggagaccagttttaatatattagcagatttcctgtagggtggctattgtcaataagcatggacaagcagagtttaggaaaaatgtcatagaggtgactcaagtaccagatgaaatgttatgccaggtaacctttaaagctcctttagaacttaagatcctcgcattaaaattattgaaaagccttcagtt

SEQ ID NO: 403332 - DNA, 197 bp, Homo sapiens
gttttgttgcctaattatttctatattttattttggttgcatgaaatttctgaaatcccatttcatacataaatatttacaactagtagtttttcttttttwaaaaaaatttatgcataataggtgtacctagtttcaaagtatatgtgataaattaatacattcatataatttgtaaagatcaaattagtgtacct

SEQ ID NO: 403333 - DNA, 409 bp, Homo sapiens
aatggattgaatgtgactttttaaaaaattatattttaataccaaagtgccttgttgtcttgagaggatatagtcaatggctcgttcttattgaaaacaattaatgtaaatttgtatrtgagttttattgttgattacatagatttggctggtagtgtttctaaagtacaattcaattgattgattaaattcaatccattacttgttttgagattcttttctatttaggattaatttgtatcattaaaatattaagattaaagcatttgtttaaaaaggttgtcagtatttcaaaataatataaaattaatactagcaaattacttattgctttgtttactaaaccagataatatacactttgatccaaatgtaatatgccataggggaatagaaaaacagacacatca

SEQ ID NO: 403334 - DNA, 573 bp, Homo sapiens
gggttgagaaggtaatctacccctgcaatctggccatctccagccagattcttctctgaagttacgccatcaagctgtcctctgaagtcaaactgcttttctctgatgtccagatatagtctctgatgtccagctgcttctcctctctctgctagctgaataggggatttttataggcacaggatgaggaaaggcaaggccatgggtggttttgaaacaggcaacattcgagtgggaaaacagggtgtaaattctcactctggaccactgtttcaagstttttggcttgagtttctgcctagaatttctctgtctcctatcactatcaattacacactgtactctatggaaaggattgtcaatgctaaggaagaaaacactgacagagagaacaacatgacagtctaaaaagattacaccattgagcttgttatcattgttctagaagaggccatggaagccatcaatcttaaaacaatacattccaactggagcaaactgtgtccagatgttgtacatgacttcacaggatttacaacaataccaatcaatgaaattatgaaagagattgta

SEQ ID NO: 403335 - DNA, 547 bp, Homo sapiens
tagtcttgcctcctcctttttctctgcttgttctcaggggtatttcttttcataagcacttataatacttcctgtgagttgaggcaaggacaggtctcctgctaggagacatgggatggtggggaagctggctgtctcacttttttcagtgtacaaatcatgagttggtagaaaattttctgtgcacttagtgtcaggcagaatgggaagaggggtgttgcagatgtgaaaatccatttctcttactatctgctaagagttttttcacttcttgatggcctcagaaagtgtctcattttcatatttgaattatgaaatattgatggtaataatcttggtgtttatttgactttggttttctgtggtagggaatgaagtcagtttgcttctatgctgccattttggaactgaaggttgagtagyatgatttttgacattgacaggtcatattacaatatcagcatttaattaaactgatttggaaggttgtaggataattagaaatatatatactttaaaattaaatcattaagtatattttataatt

SEQ ID NO: 403336 - DNA, 559 bp, Homo sapiens
aatactaccccaaatgccatcacaactaaaacaataaaagtatggacatttaagcttttgcaaagttccatgagtttgaaaaagacacagcttggctagtgggtggatttataaaacaattttttttttggtgcatcttcagttttcttttttcttctaggttccatttggttacctattttctccgtttttctcacactttatacctttgcacttgtttcttggttggatcatatttttaagtctctaattgaaggggccacctgcggacggtgcctaatgtctggtacactgtcattgaaaattccctgtttctcttgcactggggttttatgcaatttcaccagcctcaatttttaaatttcacactggcaaaatatagacttccatgaaaayggaaaatatagaaattagtcaggttaatggtgtgcagcaatacgttgtttaaggaaaagaaattgtaatctattttgattgtagacagactttaatccatccttactgtcagtgcagtcatggcctgccttatttattccgactttatgattgccaccacatt

SEQ ID NO: 403337 - DNA, 532 bp, Homo sapiens
gttgacctgaatctgaagaaagacagagagttagctaggccagaagagagaaagcgatatgctctgggttgaagagcatcaccctaatttatgtctacaaggaaccgtattatgtgaccttttttgaaaatagtgtctttggaaatgcaatcaatttaagatgaggtcatagtgtatgagaatgggctctaatccaaagaccagtgtccttatcataagagggaaatttgaacacaaatatgcaaagagagaagatgatgtgaagacatayagagagaaggccatgtgaagactgaggccaagactggattcttagtctccaagctgaggcatgccaagggctgctggcaacaactagagtctaagagaaagtcatgagatggtttctcccacagagtcagaaactgacccagatgacagatcattatcctccagaactttcagagaataaatttctgttgttttaagcactcagtacttaaactttgtaactttgttagggcagatctaaaaaactgatattgggtagaaa

SEQ ID NO: 403338 - DNA, 557 bp, Homo sapiens
gaacacaagtggtgttagctgtgatccaaaaaataggcaataataatagggtttgtaattgtctcattcagcacctagaaggcaaagaagatgccactctgagtgccacgtggaacaccaaactgatcaaagatacccattggaaggaaataccattgcaggcatttggaaaatatgagtaggttgattcaatggctgccatgaaaatwcaccttgcagaacttcaaatataaataacttgaccaagagctctagatgctatgcaccgaaatacatcacatttatctccaaggctatgctttccataaacttaccccagccaatgactgaacacttgaagggttgtaaggcaggcatgctcctgggagacatggaagacatagtaggcaatttcgtctgtaggacactctgttggccatgacaaagattcattagactttgtaatagtgtaggacacctttacccatcttccttccctcttagctccatattgtctcacagttctcctactattttctgtctctacctcaattttttctcaccaatactttcctaat

SEQ ID NO: 403339 - DNA, 603 bp, Homo sapiens
gaggtaactggttcatgggggcagtttccctcattctgttctggtgatagtgagtgagtctcatgagatmtgatggttttataagcatctggcattttccatacttacactctctctgttctgctgccctctgaagaagacacctgcttctcctttaccttctgccgtgattgtaagtttcctgaggcctccccagcaatgcagaactgtgagtcaattaaacctctttcctttataaattacccagtgttgggcatttcttcacagcagtgtaagaacagactaatacagtagagtaagaatctgatgcagtctcagagattcagaatcatttaaatggtcaaggtaggtctgttatgcagggtctcagctgaaaaaattctagcagcctgaaacataatgtaaggacgtctgattagattcctctgagaatgtcttcagacccttatgtaccctcagacctttcagatttgcccctttcttacctattaatagctaggaattctccagtttcataagacttggtacagggctgtccccaacagaacaacagatacctcccttggaatctgaattcaccttctctcatagctgccagactta

SEQ ID NO: 403340 - DNA, 543 bp, Homo sapiens
aggaaggaaatccttgctgaagttgcaaggaacttttcccaaaattttaaaacagcctaaatattgagagtaatttaataaattatactgtacttacatgatgctgtatgaccctaagaggtactaaatagagtattttatatgtatataatatatatagagaaagtactaaatgtattctctagaaagaggtttataatatactttttgaaaaaatatactgctgctgaggctggaggatctcttgagcccaggagttcaagaccagcctggaaaacttagcaagactgtctctataattaaaaaaaattagccagaatggtggtccatgcctgtaataccagctacttgggaggctgaagagggaggattgcttgaacccaagagcttgaggctgcagtgagcaatgatagcaccactgcaccctagcctgggtgacacagcgacactccctctctaaaaaaaaaaaaaaaaaaaaaaagaatgtctcaatwtacatactttagaatatgattacaatcatccttcggtatctgcagagga

SEQ ID NO: 403341 - DNA, 335 bp, Homo sapiens
gtatgtggtgtacactaactggtgtatgcaaacatgtctataattatttcttcctatayattcatttgtatctatattaaactaaatattagttcatgctgatatctccaactctaatccagtacatgaatcattctagacttattttcttgcttctctgtaaactcctactccaatagtgagaaacctagtttccaccatctgccatttatttacttaattgttcaattctaggatgcacatatggtggtttcagaattgttaacccctattctcatgggcaataattttaccaattagagtacagtgcttatgtacagttttactttccactc

SEQ ID NO: 403342 - DNA, 335 bp, Homo sapiens
gtatgtggtgtacactaactggtgtatgcaaacatgtctataattatttcttcctatatattcatttgtatctatattaaactaaatatkagttcatgctgatatctccaactctaatccagtacatgaatcattctagacttattttcttgcttctctgtaaactcctactccaatagtgagaaacctagtttccaccatctgccatttatttacttaattgttcaattctaggatgcacatatggtggtttcagaattgttaacccctattctcatgggcaataattttaccaattagagtacagtgcttatgtacagttttactttccactc

SEQ ID NO: 403343 - DNA, 596 bp, Homo sapiens
ttgtgctttaacaagtaccttggatccttgagagaataaactagtcatggctttacaggccttttagggaaagctactgctgcgctccgtgctctctggcgcttgggaatgcacagcagtgctggatgccaagaatataaacagccagaacgatatgttcagcatttaggaaatacagctggaccyagcaaatgtatatgacagatagactctggggccaaagaaatttcctctgcacattttacccacttaagtaatgttaaactgaaggtcctagtatatcgccccatcatgacaggtctttgaatatatgctaattaaagggcatgtctattcacttcatttgtgtctcctgtgtctttctctagagttgttttaaggcagagtatcatatcgcatcaaaaccgctccataagtcctgccactccacgtgcaatgccatgaacttgaagaaactgctggtaagagaaagcaaatgctgtgaccaggcaagtaagtgttgtcaaagtgttgtaaaactaccctgaacttttggatccagagtactttccttccttccccttccctcgtcctctcttttctttgagtataagtgg

SEQ ID NO: 403344 - DNA, 596 bp, Homo sapiens
ttgtgctttaacaagtaccttggatccttgagagaataaactagtcatggctttacaggccttttagggaaagctactgctgcgctccgtgctctctggcgcttgggaatgcacagcagtgctggatgccaagaatataaacagccagaacgatatgttcagcatttaggaaatacagctggacccagcaaatgtatatgacagatagactctggggccaaagaaatttcctctgcacattttacccacttaagtaatgttaaactgaaggtcctagtatatcgccccatcatgacaggtctttgaatatatgctaattaaagggcatgtctattcacttcatttgtgtctcctgtgtctttctctagagttgttttaaggcagagtatcatatcgcatcaaaaccgctccataagtcctgccactccacgtgcaatgccatgaacttgaagaaactgctggtaagagaaagcaaatgctgtgaccaggcaagtaagtgttgtcaaagtgttgtaaaactaccctgaacttttggatccagagtactttccttccttccccytccctcgtcctctcttttctttgagtataagtgg

SEQ ID NO: 403345 - DNA, 613 bp, Homo sapiens
caaacaacacactccatgccctccaggagcccatgtttagtagagaagaaggacaactgaacaaatagtcactacataaaagttcactggtcaaggkttatacaaagtatgatgagcatacctggtatgtatgagtatcttccaagcagggaaaatttcttatgttttctgttgcaaaacaaatttcctctgttaaaaaaaaaaaaataagttggcatcattcaaatcgtcaacccaaattaactggtctctaagttattgatgccctgtagctagaaagtctttaattctgttactgaaatctactgaaacatagccaagtctaatatcatacaacccaaaggggaaatatcacatttatctagatatgtaattgaaaaaatctgtatacttagaaactatgatattttcactgcataacaatttggggaaatcacatcaggccacatatttagaaggtatcccatggcaaccatgagaagttgctttggtctcacatagctgaacataaaaatgaatcctggcttatcagatgtctggaagaaggggcagcaaaagttatatctcctttgaattattaaattaagttcctctctgggtctccacgagctct

SEQ ID NO: 403346 - DNA, 597 bp, Homo sapiens
aatctgtatacttagaaactatgatattttcactgcwtaacaatttggggaaatcacatcaggccacatatttagaaggtatcccatggcaaccatgagaagttgctttggtctcacatagctgaacataaaaatgaatcctggcttatcagatgtctggaagaaggggcagcaaaagttatatctcctttgaattattaaattaagttcctctctgggtctccacgagctctggtgaagcaagaaaatgcatgtcctactctcagtcccatggatgtagtagacgttcttcatgcttgatttttttttttttaaggattgtgtcttacttatacttacgggcttgtggttcagcggagaccacactggactggactgaacagacaactgaagggctctctctacctttcagcatctctgtctgcctttctgactacctaaaaattactgcaacctctgattctgtttctaaggtggattttccctactcatgcttcctagagatttggtgaggatttgttgagtcttgggacatttcagcttgccaaggtaaggcttcattttggctttgtatggcccttctgggatcactgatgt

SEQ ID NO: 403347 - DNA, 597 bp, Homo sapiens
aatctgtatacttagaaactatgatattttcactgcataacaatttggggaaatcacatcaggccacatatttagaaggtatcccatggcaaccatgagaagttrctttggtctcacatagctgaacataaaaatgaatcctggcttatcagatgtctggaagaaggggcagcaaaagttatatctcctttgaattattaaattaagttcctctctgggtctccacgagctctggtgaagcaagaaaatgcatgtcctactctcagtcccatggatgtagtagacgttcttcatgcttgatttttttttttttaaggattgtgtcttacttatacttacgggcttgtggttcagcggagaccacactggactggactgaacagacaactgaagggctctctctacctttcagcatctctgtctgcctttctgactacctaaaaattactgcaacctctgattctgtttctaaggtggattttccctactcatgcttcctagagatttggtgaggatttgttgagtcttgggacatttcagcttgccaaggtaaggcttcattttggctttgtatggcccttctgggatcactgatgt

SEQ ID NO: 403348 - DNA, 597 bp, Homo sapiens
aatctgtatacttagaaactatgatattttcactgcataacaatttggggaaatcacatcaggccacatatttagaaggtatcccatggcaaccatgagaagttgctttggtctcacatagctgaacataaaaatgaatcctggcttatcagatgtctggaagaaggggcagcaaaagttatatctcctttgaattattaaattaagttcctctctgggtctccacgagctctggtgaagcaagaaaatgcatgtcctactctyagtcccatggatgtagtagacgttcttcatgcttgatttttttttttttaaggattgtgtcttacttatacttacgggcttgtggttcagcggagaccacactggactggactgaacagacaactgaagggctctctctacctttcagcatctctgtctgcctttctgactacctaaaaattactgcaacctctgattctgtttctaaggtggattttccctactcatgcttcctagagatttggtgaggatttgttgagtcttgggacatttcagcttgccaaggtaaggcttcattttggctttgtatggcccttctgggatcactgatgt

SEQ ID NO: 403349 - DNA, 597 bp, Homo sapiens
aatctgtatacttagaaactatgatattttcactgcataacaatttggggaaatcacatcaggccacatatttagaaggtatcccatggcaaccatgagaagttgctttggtctcacatagctgaacataaaaatgaatcctggcttatcagatgtctggaagaaggggcagcaaaagttatatctcctttgaattattaaattaagttcctctctgggtctccacgagctctggtgaagcaagaaaatgcatgtcctactctcrgtcccatggatgtagtagacgttcttcatgcttgatttttttttttttaaggattgtgtcttacttatacttacgggcttgtggttcagcggagaccacactggactggactgaacagacaactgaagggctctctctacctttcagcatctctgtctgcctttctgactacctaaaaattactgcaacctctgattctgtttctaaggtggattttccctactcatgcttcctagagatttggtgaggatttgttgagtcttgggacatttcagcttgccaaggtaaggcttcattttggctttgtatggcccttctgggatcactgatgt

SEQ ID NO: 403350 - DNA, 610 bp, Homo sapiens
aatgtagggcagggtggaggtcagaaacacaggcaggacttccaaaggctgtgggcactgtccctgtgaggctcaagtgacaasgtgggagacaggattgggtggaggccacagttcttccatgttgaagaactctctagcatcctgaagactgcctacctagagaccaacccagcgatgctggtgctttcttggtagactccttggagaggcagtcgtgaggagtctttgtggtcagtggacaactggggactggaacatggggaagttgggtggttacaactgtaattaatagaccaatctgtggcccacatgagatccacctgaaagaattcttgcccagctctgtgccttcttcctaagatgtggcacccagaatggcaccaaacatgcctagtgaggtttggatcacgataagctggcttctctgctatgttttcagtagccttcctgataacacccagcatttgtttagcttctttagctttagcacgtgtttccaccagtgtcccttaacggagaggatgactatgtcactgaagaagtagaggggctgaaaatggactcagctcttggcccctgtagagactgcaagactccgtgcacaacg

SEQ ID NO: 403351 - DNA, 610 bp, Homo sapiens
aatgtagggcagggtggaggtcagaaacacaggcaggacttccaaaggctgtgggcactgtccctgtgaggctcaagtgacaaggtgggagacaggattgggtggaggccacagttcttccatgttgaagaactctctagcatcctgaagactgcctacctagagaccaacccagcgatgctggtgctttcttggtagactccttggagaggcagtcgtgaggagtctttgtggtcagtggacaactggggactggaacatggggaagttgggtggttacaactgtaattaatagaccaatctgtggcccacatgagatccacctgaaagaattcttgcccagctctgtgccttcttcctaagatgtggcacccagaatggcaccaaacatgcctagtgaggtttggatcamgataagctggcttctctgctatgttttcagtagccttcctgataacacccagcatttgtttagcttctttagctttagcacgtgtttccaccagtgtcccttaacggagaggatgactatgtcactgaagaagtagaggggctgaaaatggactcagctcttggcccctgtagagactgcaagactccgtgcacaacg

SEQ ID NO: 403352 - DNA, 585 bp, Homo sapiens
cctttgctgatatgagaggggggtgtcaaacttttgagtgatcactgtgggtcctcagcttagacatcttctctggcccaagatggcaccccttgctctctttccatgggacacagggaccttgccatccttccatcttataagccttctgtcatgatttttacttcatcctagatagccttaatttgggccaggtctccaggttcctccactttcttctgtcccatccatacccctcaccaatcctctgtaaattcctttccaggattttactgagaacwacagagaaacaggctgggaataacaaacatggggagttatgtagttaacatacactttgacatcacctagtcattttcctgagtatatagataactctgttattactggttataaggtccatgagaagcctttatccttttctggaaaccaagaaagcacctgccctccctcagtcctaaggggagaatctttatgggtgtaacaataaaatggataatgggaaattctgatgtcctcaagcatacattcagatgtccccaatgagcatcatttgtatatcaagggaactccagagagatgatc

SEQ ID NO: 403353 - DNA, 585 bp, Homo sapiens
cctttgctgatatgagaggggggtgtcaaacttttgagtgatcactgtgggtcctcagcttagacatcttctctggcccaagatggcaccccttgctctctttccatgggacacagggaccttgccatccttccatcttataagccttctgtcatgatttttacttcatcctagatagccttaatttgggccaggtctccaggttcctccactttcttctgtcccatccatacccctcaccaatcctctgtaaattcctttccaggattttactgagaactacagagaaacaggctgggaataacaaacatggggagttatgtagttaacatacactttgacatcacctagtcattttcctgagtatatagataactctgttattactggttataaggtccatgagaagcctttatccttttctggaaaccaagaaagcacctgccctccctcagtcctaaggggagaatctttatgggtgtaacaataaaatggataatgggaaattctgatgtcctcaagcatacattcagatgtccccaatragcatcatttgtatatcaagggaactccagagagatgatc

SEQ ID NO: 403354 - DNA, 406 bp, Homo sapiens
agactacaggcacccaccaccaagcccggttaatttttgtatttttagtagagacagggttttgccatgttggtcaggctggtctcaaactcctgacctcaggtgatccacccaccttggcctcccaaagtgctgggattacaggcatgagacacctgtctcataggtatctgttcctcatatttctgcatgtgagaacttgagggcaggacttttcctatttttgtctccacaggacccagcacaacgtcttgcacatggccctccatcagtatttttggaatgaaaaaattgcttttgycagtgacatttcccttagatcaggggaaacttacatgctctggataatatttcaaaattttcctattagttaagattatctcataactcttctcctatttttaaa

SEQ ID NO: 403355 - DNA, 628 bp, Homo sapiens
ctcctgagtctatcatagaagaggaagaaaggtgttattatttcataaacaatctaataatagactttggatgtgttgagatagaagagatgaggggaaaagataagcaaagacacagatacaaagtttggaggaacattgagtatgtcaaataggaattaagtatgaatgaagagagaagtagaagatgaagttaaaaagaaagattggggaatgtattagtcagggttcaccagagaaacagaacccataggataaatatagagatataccaaaagagatttattatgaggaactggctcaagctgttatgaaagctgaagactcccactatctgctgtctgcaagcgaaaggcccaggaaagctgatgctgtagttccagtccaaaactgaaagcctgagagccagggaagccactggtgtaagtctcagtttaattccraaggccaagaaccaggagcactaatttctgaaggcaggaggagacggacgtctcagctcaagcagaaggagcaagtttgctctttcttcacctttttgttctatttgggccctcaatggattggttgatgcctgcctatgctgacaacagcaatcatctttatgctgcctactgattcaaatgct

SEQ ID NO: 403356 - DNA, 493 bp, Homo sapiens
gtaagtgcactcatcccatttttgagctcatgacctaatcgcctcctaaagactccatctctttaatactgttgcactggaaattaggtttcaacatataaattttgaaccaatattcagaccataacaggttctccaaaatattaagggagaaaataggacattaatgtaggatttcagggtggattacttttaggtagagataagaatcactatatacaaaagcatgatgtttgtgtcaggaaaggataaatagatttgcctggctggaataaaggattcttgtagggcagtagagaaaaataggtagaatgggaaaagkaggttggagccagaacatggggtcttcaaggccaaatcgaaagtaaacaatagggaatcttcccctggccccattttttttctttctttttttttttttttggtgaagagaggaacatgatttaaaaaaaaaaaaaattaaggcattgtatacaaaaaagccatagtagaa

SEQ ID NO: 403357 - DNA, 493 bp, Homo sapiens
gtaagtgcactcatcccatttttgagctcatgacctaatcgcctcctaaagactccatctctttaatactgttgcactggaaattaggtttcaacatataaattttgaaccaatattcagaccataacaggttctccaaaatattaagggagaaaataggacattaatgtaggatttcagggtggattacttttaggtagagataagaatcactatatacaaaagcatgatgtttgtgtcaggaaaggataaatagatttgcctggctggaataaaggattcttgtagggcagtagagaaaaataggtagaatgggaaaagtaggttggagccagaacatggggtcttcaaggccaaatcgaaagtaaacaatagggaatcttcccctggccccattttttttctttctttttttttttttttggkgaagagaggaacatgatttaaaaaaaaaaaaaattaaggcattgtatacaaaaaagccatagtagaa

SEQ ID NO: 403358 - DNA, 628 bp, Homo sapiens
ctcctgagtctatcatagaagaggaagaaaggtgttattatttcataaacaatctaataatagactttggatgtgttgagatagaagagatgaggggaaaagataagcaaagacacagatacaaagtttggaggaacattgagtatgtcaaataggaattaagtatgaatgaagagagaagtagaagatgaagttaaaaagaaagattggggaatgtattagtcagggttcaccagagaaacagaacccataggataaatatagagatataccaaaagagatttattatgaggaactggctcaagctgttatgaaagctgaagactcccactatctgctgtctgcaagcgaaaggcccaggaaagctgatgctgtagttccagtccaaaactgaaagcctgagagccagggaagccactggtgtaagtctcagtttaattccaaaggccaagaaccaggagcactaatttctgaaggcaggaggagayggacgtctcagctcaagcagaaggagcaagtttgctctttcttcacctttttgttctatttgggccctcaatggattggttgatgcctgcctatgctgacaacagcaatcatctttatgctgcctactgattcaaatgct

SEQ ID NO: 403359 - DNA, 338 bp, Homo sapiens
ccagcatggagatatatgaattaatatgaacwctgagaaagaaattggtcagctaaaaaatatatggctttcctgaatagacaaaagaacaaagattttccctttggtatgtaacctgtttcatttagtcacttatattttctctgagtgtgagataaatgttatgaaaaaatttgttttgattatgcaagagaggattgtttacctagtcaggtcaaaactggaaaaaagaactgctgcttcattatacatcccccacaacttcatagaaagtgattttaaaaagaggaaaaccaaagatttatagagttgggtgcccatcttcatggctgactttc

SEQ ID NO: 403360 - DNA, 559 bp, Homo sapiens
ctttctcttaatgacttccaacatagttctctcaaaccttactcctccagaaggccaccctcacctggctatggctacttcagaaaaaacttggcctctggtataatagagcagaatcaycacctcacattctatttcaagccaaagtcaatatctcaaaggctggttctgtgatttatttggcccttgggagctcctactgaaagtgctgaaatgtcgtactgacacttcagacttatagctacctagactccaagtaagatttatctctgactggagggtttctcctattaaaaaccaaagagtgtagggtgccttcacctgctaggtaatcttctatgccctaatgggaagaatgggagcagcagacaagtaagttcaggaaggagaaccaaagctgtgtccatgcccttgaggaaagagaaattggaccagacaagttcagtggaaactttctaatggatccatcaacttcatcttgtctaagcagagtcatagctagaagtgtgactgaaataggagaaccacgtccaggggttcaggggggattcctctgaaa

SEQ ID NO: 403361 - DNA, 563 bp, Homo sapiens
gcccagaacagagaataacatgagcaaatgttccagcctatgaaacagtatggtatgtccagataatcacaagccattgtgtgttattgagctttgaggcagaaaatagatgagtttggatttataaagaagagtcagattgtagatgacttttatgttgtgcaatgaagcttgcattttattctagggataagagactgctgaaagatttttaaatgaggaaatttaaaggtttttagatagattcctttggtgatagygtggaggatgtgaagttgggggaaggcaagattggaattaaggcaatcagctggggactattgcaatcatttaggtgaaaaaagacaaggatataaattatggtgctgaaaggtgggaacaaattgaaggagcatttgggaggggaatcagtatgatacagtgaatatagggaacgagcaaatgtaaagaataattatcaggtttctctgatggtggtaacttggataatacagaaaaaggagcaggtggggctgagataaattcattttggagtattgtgggtttgagggaggtctgtgaaa

SEQ ID NO: 403362 - DNA, 471 bp, Homo sapiens
tcaaaaaataacagatgctggcaaggttgcagagaaaagggaatacttatacactgctggtgagaatgtaaattagttcagccattgtagaaagcagtgtagcaatttctcaaagaacaaataacagaagtattatttgatgcagcaatcctattattgggtatatacccaaatgaatagaaattattctaccataaagacacatgcatgcttatgttcatcacagcacttttcacaatagcaaagtcatggaatcaacytaaatgcccatcaacaatagactggataaataaaatgtcataaaggttggtgcaaaagtaattgtgattgttgccatttgacagtaatagcaaaaactgcatttacttttgcaccaatctaatacatatacgccacagaatactacacagccataaaaaagaacaagattatattctttgcagcaacatgtatggagctggaggccataat

SEQ ID NO: 403363 - DNA, 559 bp, Homo sapiens
gcctgtagttccacctgttcgggaggctgaggtgggaggattgcttgagtccgggaggttgaggctgcagtgagccatgatcatgacactcgctgaagcctgggcaacagagcgagaccctgtctcataaaataaagaaaaaaaataaataatgggagtcttgatgatgttttacaattttagggggacccggattatttaaaaatgtatgcataggaaatgagcctttattacagctttcagattgtagtattttagataaaatacctaagatttcctaaaatgctatgttgtatctttatgtctctctcctcattaaaccctgagttcagcaaaggaagtgactgagtcttagtcattcttttatccttagtacttagcacagtgctggcatgttataggtgcttaataaatgttagctggaaaactgaaatgtaatagattgagtaaataaataagtccaaagttctttttggattcagartgagtaaataaataggaatggctgtgttccaataaaactttatttacaaaaacaggcagtgggccagtttggccc

SEQ ID NO: 403364 - DNA, 554 bp, Homo sapiens
aacaatctctgtcataaccatatgtgtctttcatccctgaagttattccgaagccagagttggggcagggtaggatgtyggcactgaaaaggactggagaaacaacctagtctccgtctgttgagaaggtaagattttctagtctgagagccagaaatcaaatgcattaccccaggtgagctcaagtcagagttgagaccagaatccagagcctttgatggtaaacttgcaaagttacatgggaagttaggtagggtcaacaattctggtggtatactaatgataaactccctaaagggcagggaaaggcatgcatatgtgtgtttgggtgtgtgttcatgtgtgtgcaatgggttgtgctgaaacgatagcatttaactatttttaaaaataaaagaaatgagcgcttcttgttttagaatgagaaaaaagggccttgtatcattattattattttttgtaatcagcatgagtttgtgcaaatccatcttcattttctagcattcatagtaagcagtgaatggtttggagagtgaccagaggtatcatagatg

SEQ ID NO: 403365 - DNA, 586 bp, Homo sapiens
atagtcctagctactcaggaggctgagacaggagaattgcttgaacctggggggcggaggttgcagtgagccgagatggygccactgcaccctagcctggtgacagagcgagactccatttccaaaaaaaaaaataaaaaaaataaaaaaaagatatctttatgtgctcatggagaaagacattacaagagcacatgaagccttataattttctggctttctatgatcccctcattgacccttagccagggagagtgggtaagggccctggaccaaagtttctgtggtagagaaggaaagaccaaatgcattagacagggttctccagagagacagaaccaataggatgtgtgtaaataaagaaagaaagaaagaaaaagatttgttttaagaaattggctcatgtgattatggggactttgtgaatccagaatctaatgggagaggctggcaggctggagacccaggaaagagttgcagtttgagtccaaggctgtctgctagtgaaccgggaagagctgatgttgcagatgaagcctgaaggcagtctgctgaggaattccatcttgcctatgggaggtcagcc

SEQ ID NO: 403366 - DNA, 622 bp, Homo sapiens
agggacattttccgcattctaaggctcacaaagcctgaccttgcctcatttgtatgtgaccccaaagttttcacatcattaataaaaagagaatcaaaacaaagcctacagacattaggggaggggaaagtrtgttgtttggcactaccatcatccatactctcaaaatggaaagggaaaaaaataaaatgcacatagacgaggtggtgacccctataacgactatggttcccaacattttttttcctactggtaataaaccattttgcagacctcccaattgtggccaccatgatagttactgttttgcaggtttatgtctttttcttgtagttagaagtgttatcaataaaaatttcaaatgaagcctttcccgtcaaataaaaacattttaaaatgtgaagccaacagcaggattagggaggaaaaatacaaatgacaccagggctttgttttgtatatatatttttcttttaccaagtcccttaattgattagttttaaagacattccttgcaagtcttgaaagtgagataaatgcatcctaaatggcactggggtaatttaacagtcttaaaagttgattttgttgtatgctactaacttttctaaaaagcatctta

SEQ ID NO: 403367 - DNA, 622 bp, Homo sapiens
agggacattttccgcattctaaggctcacaaagcctgaccttgcctcatttgtatgtgaccccaaagttttcacatcattaataaaaagagaatcaaaacaaagcctacagacattaggggaggggaaagtgtgttgtttggcactaccatcatccatactctcaaaatggaaagggaaaaaaataaaatgcacatagacgaggtggtgacccctataacgactatggttcccaacattttttttcctactggtaataaaccattttgcagacctcccawttgtggccaccatgatagttactgttttgcaggtttatgtctttttcttgtagttagaagtgttatcaataaaaatttcaaatgaagcctttcccgtcaaataaaaacattttaaaatgtgaagccaacagcaggattagggaggaaaaatacaaatgacaccagggctttgttttgtatatatatttttcttttaccaagtcccttaattgattagttttaaagacattccttgcaagtcttgaaagtgagataaatgcatcctaaatggcactggggtaatttaacagtcttaaaagttgattttgttgtatgctactaacttttctaaaaagcatctta

SEQ ID NO: 403368 - DNA, 621 bp, Homo sapiens
tctgtcaaggtgtggctggggtctctgcctgtggctggggtctctgcctggggtattacaagggtgaaatcaagacgtcagccagaagagcatctctctggaggctctagggaaaaattcacttccaaatccatcatattcatagtcccaggcattattcaaagcacatacaacagggaagtgggaaagctcaggggtccatcttagaattctatctaccacagtacttttgttagagttataaatgacttttataaaccataattgtattatctaaggactgattatatgtgggtgctactgctggttctcaaaatcagcaatctaaaaaggaggtatgataaaaatgttatgacaaaggctccaaattgccatatagtttgtgccattaatttagaatacaacttccatgaaaacagtctgtttaaagcagttacatattttagtctgcaraagttgtagtataatcaggtgagtacaaaggaaagtacaaagtacaaagactgcagtatcagaacagtagaaaaatgctattacccacagtaactgtgaagcaatatgccccacaagaacacattacccttactttacatttatacttatgggaaactaaaacaggta

SEQ ID NO: 403369 - DNA, 538 bp, Homo sapiens
ggtgagtcccttgtaatctctaggaattggctagctctgggaggggcagtctctcccagtccttagttgtttggagggtcagcaaggctccaaatgtcagagcattagaaacactgaaaaaaaggcatgattcatacactcaggtccttgataatgcaagaaaattgtttctytgggaattaaaagaacctgtgatatatatgtttgtgatataataataaatttatatttggttttcatcctggtccttggtacagagttcttaaaacctttggcatttctgagccctagggtaagggtagcttcctttgttacctgtgataagcccttttcaactacacctgagtttatgttaatgacgtgactcttgaagaatgggggctggttcctagaggaaccaaccctatggttagccctccccaagtctcaccttcgaggaggggataggggctggagaatggccagtgattgaatcaggcatgcctatgtaatggaactgctatcaaaaccctaaacattggggttcagagagcttctg

SEQ ID NO: 403370 - DNA, 621 bp, Homo sapiens
ctgcctacaggccattttccaaaaataatttataattccccttgtaatgtattgttaatatgctctaatgatatcaatgcttaaatccatcataattttaacattatgacagaatttaaaaaattctttccatgttcctttgggactttgttatgttgtatgtacattatattaaatatagttgcatttataatatagccaaaattyagggttttgagtttttaaatttaactttttgtcattaaacttgtgcccatgtagttataagcctcttaattttattcttaatcacactgtgtgtcatgatttcccttgccacacttctacttttgttcattgcagctatttctaaaatttttcacttgtatagttagtattgcagtgggaatatctttgaacatttggattactgggtcaaagggtataaccacttttatggcatattctgtgcactttgaaattgctttttaaaaggtgctcgtgtacctattataatacctcagcaaaagactgataccaaatttcctatagccttgctagtactgggtcttttaaagtgaaaatgttcagcataacactatcctgcctttttacaactttaattatattgcagggttgaat

SEQ ID NO: 403371 - DNA, 621 bp, Homo sapiens
ctgcctacaggccattttccaaaaataatttataattccccttgtaatgtattgttaatatgctctaatgatatcaatgcttaaatccatcataattttaacattatgacagaatttaaaaaattctttccatgttcctttgggactttgttatgttgtatgtacattatattaaatatagttgcatttataatatagccaaaattcagggttttgagtttttaaatttaactttttgtcattaaacttgtgcccatgtagttataagcctcttaattttattcttaatcacactgtgtgtcatgatttcccttgccacacttctacttttgttcattgcagctatttctaaaatttttcacttgtatagwtagtattgcagtgggaatatctttgaacatttggattactgggtcaaagggtataaccacttttatggcatattctgtgcactttgaaattgctttttaaaaggtgctcgtgtacctattataatacctcagcaaaagactgataccaaatttcctatagccttgctagtactgggtcttttaaagtgaaaatgttcagcataacactatcctgcctttttacaactttaattatattgcagggttgaat

SEQ ID NO: 403372 - DNA, 578 bp, Homo sapiens
agctagctggtagtacaggaatgtgccacaccacagtgcctggttggggttccaaggttcctgttgtaaaatctgatagtcttaaggaaattcctttttatgtgatgaatcacttttctcttgatgcttttaaaattatctttgtttttgacttttgagaatttgatcatatctcagtgaagatctttttatatttatttgggattcttttggcttcacggatctgaatactcatttccctctccagatttargtagttttctgtcattatttctttaaacaatcttctgcccctttctctttctctacttcttctatgactcacataatgcatatattgctttgcttaatggcggcccataagtcccatagacttattaaaatttttcttcttttgagttggtactttccaaggatctgtctttgagtttgtggattctttcttttgcctgattaaatctcctgttgaagtttgtcctagttcatttgtgttgctatcaaggaatacctgaggctcaggaatttataaaggaaagaacatttatttggcttatggttttgtaggctgtacaagaagc

SEQ ID NO: 403373 - DNA, 572 bp, Homo sapiens
ggcggcccataagtcccatagacttattaaaatttttcttcttttgagttggtactttccaaggatctgtctttgagtttgtggattctttcttttgcctgattaaatctcctgttgaagtttgtcctagttcatttgtgttgctatcaaggaatacctgaggctcaggaatttataaaggaaagaacatttatttggcttatggttttgtaggctgtacaagaagcatgatgctggtgtcagcatggtgagggcttcaggctgcttccactttttgtggaaagcaaataggagctggtgtgtagagagatcacatggcaaaaaaggagaygagagagaagagggaggtggcagactcttaaacaaccagttctcattggaattaacagagtgagaactcactcattactgcaaggatgtcaccaagccattcaagaggaatccactcccatgactgaaacacctcccattaggctccacctccaagattgaggatcaaatttcaacatgagatttggaggggtcacacaaatcagactataccaaaaatcccagtggaatttttcaagttt

SEQ ID NO: 403374 - DNA, 572 bp, Homo sapiens
ggcggcccataagtcccatagacttattaaaatttttcttcttttgagttggtactttccaaggatctgtctttgagtttgtggattctttcttttgcctgattaaatctcctgttgaagtttgtcctagttcatttgtgttgctatcaaggaatacctgaggctcaggaatttataaaggaaagaacatttatttggcttatggttttgtaggctgtacaagaagcatgatgctggtgtcagcatggtgagggcttcaggctgcttccactttttgtggaaagcaaataggagctggtgtgtagagagatcacatggcaaaaaaggagatragagagaagagggaggtggcagactcttaaacaaccagttctcattggaattaacagagtgagaactcactcattactgcaaggatgtcaccaagccattcaagaggaatccactcccatgactgaaacacctcccattaggctccacctccaagattgaggatcaaatttcaacatgagatttggaggggtcacacaaatcagactataccaaaaatcccagtggaatttttcaagttt

SEQ ID NO: 403375 - DNA, 620 bp, Homo sapiens
aatatttgttccctccaaatctcaagttaaaatgtgatcctcagtgttggaggtgggactgagtgggaggtgtttgggtccccagggcagatcactcatgcatgaatggcctggtgccctcctggtggtaacatggtaatgagtgagttcttgctctattagtttatgcaaaatctgattgttaaaaagaggctggcacatcctcccctctctcttgctccttctcttgccacatgacaggccctctcccccttcaccttctgctacgatttaaagcttcctgaggccctcaccagaagcagatactggcactatatttcttgtacagcctgcagagccatgagccaaataaacctctttataaatggyccagccttgggtattcctttatagcaacgttaaatggactaataatacagcacttttgtccctatctcagaaatgaggaaaaagtcacagagtagatagaccatttgcccaaagtcttacaaccaccaaggggtggccctacccaagcctggaatcaggggctcctgaccccaaaaccaaagactaaccactctcttgtattgcctagagcaggagttggtgaatgttttctgtaaagggccaaatagtaa

SEQ ID NO: 403376 - DNA, 563 bp, Homo sapiens
aaagaacaaatgaagagagagtctatagaatttgtgtaaacctgagttgaatattcgctttataatttggcaaattgagccttactctttatgaggttagtggttaaacatgtagtatctagaaatgacagtcatggtttgaatctcaacctggctgcttgctggctggctgtcctcgggcaagtttctctggctcagttggtctgcaagataggaagaacaggaatgcctattccaccggcttgttgtaaggttagggtgaattattacataaaagaccttagaacagtgcctagcacataaaaggrtactcaataaattagcagttgttgttattgttattattatctttcttctaagactgcttggctttttgcattatggctttgaacaacatgccccctgatctctgggagcagcttcttaattgtttttagggttgctaaatttaggaaatgaaaatacaagacactcaagtaaatcagtatgtcccaaatgctgctgaaggcgtacttatactaacagattattcattatttatctgaaattcaaatttaattggg

SEQ ID NO: 403377 - DNA, 537 bp, Homo sapiens
taggcaataatttcatcagttaaatragggaattgggtcacattctgggacaagcagcataaaactttcctcaattgcaccagactagcttattacacctatctacaatggatactttttcactaataccattgttttcactgctaacacatatatatataaattgagtgagagagcaagagagagctccattatatatatacacacacaaccattatatatataaaaccattacagatacatatatacgtatgcatacacattattgtatattatgtgtacacatacattacatatgtatagacattatatatacattacatacatatgtatattacatgtgtatagacattatatatacattacatacatatgtatattacatgtgtacctcatgtgaaagtatattttgtatatacataaatagttcttatatatgtatatgtaatggttataaatatcatggttatatattatatacaatgaaattaaaaccttggtttagagcaactgaatcattaattatccacgataaat

SEQ ID NO: 403378 - DNA, 417 bp, Homo sapiens
gtccgtttgttggattgagtatcccctgaagaactttccacacccaaacctgccctgggacattcagttcaaccctctgcagtgaactttggcccaaatagcaagagatttgcttccaccagggcttggccacagaccagccgtgtgactctgagataattctcactctgtgactcaatttcctcagctactcttgagataattttcaacacygaaaagaacaactattgctgtagccagaaataaaaactagatattagttatgctagatattaaatgccatccaagagacagtaaatttaagggccccaaagtggtttcaggtctctgagaggaatttactccccagctttggagaagaagctaagtgctgtccttctatttctgtcctgcattcaaaaagtcataaatagttaa

SEQ ID NO: 403379 - DNA, 518 bp, Homo sapiens
atctgctacatgccacgtgctatattggatgatatcaagattaacagtgcacagagcaggctcttgtgcagcccacagcctggtggagrgaaataatggtttataagctcctaaaacctatagaagagtaggttgagattcctctccttcactgccaagggcaagttaaaggaaaatggtttgaatataacttaggccaggtatgaaaaaatgctctcttagcaaaataaggctgtggtgcatgttcataagtgtatgttaataggagaaatattaatttcttgtatcaaattgagaagggcagaagttatgcttattctgtttttttttttctataataaaagaaatgtgagttttcaagatagttttgttaaaaggataaaaaatttctcttgtaaagttaagtacagtttggggccagaaggaagggaagatatctacacaggataaaatgtgcttgattttatatgctgcaggaaagaactagttacagctcaaaaagaaaaaaaccctgttga

SEQ ID NO: 403380 - DNA, 518 bp, Homo sapiens
atctgctacatgccacgtgctatattggatgatatcaagattaacagtgcacagagcaggctcttgtgcagcccacagcctggtggagagaaataatggtttataagctcctaaaacctatagaagagtaggttgagattcctctccttcactgccaagggcaagttaaaggaaaatggtttgaatataacttaggccaggkatgaaaaaatgctctcttagcaaaataaggctgtggtgcatgttcataagtgtatgttaataggagaaatattaatttcttgtatcaaattgagaagggcagaagttatgcttattctgtttttttttttctataataaaagaaatgtgagttttcaagatagttttgttaaaaggataaaaaatttctcttgtaaagttaagtacagtttggggccagaaggaagggaagatatctacacaggataaaatgtgcttgattttatatgctgcaggaaagaactagttacagctcaaaaagaaaaaaaccctgttga

SEQ ID NO: 403381 - DNA, 518 bp, Homo sapiens
atctgctacatgccacgtgctatattggatgatatcaagattaacagtgcacagagcaggctcttgtgcagcccacagcctggtggagagaaataatggtttataagctcctaaaacctatagaagagtaggttgagattcctctccttcactgccaagggcaagttaaaggaaaatggtttgaatataacttaggccaggtatgaaaaaatgctctcttarcaaaataaggctgtggtgcatgttcataagtgtatgttaataggagaaatattaatttcttgtatcaaattgagaagggcagaagttatgcttattctgtttttttttttctataataaaagaaatgtgagttttcaagatagttttgttaaaaggataaaaaatttctcttgtaaagttaagtacagtttggggccagaaggaagggaagatatctacacaggataaaatgtgcttgattttatatgctgcaggaaagaactagttacagctcaaaaagaaaaaaaccctgttga

SEQ ID NO: 403382 - DNA, 518 bp, Homo sapiens
atctgctacatgccacgtgctatattggatgatatcaagattaacagtgcacagagcaggctcttgtgcagcccacagcctggtggagagaaataatggtttataagctcctaaaacctatagaagagtaggttgagattcctctccttcactgccaagggcaagttaaaggaaaatggtttgaatataacttaggccaggtatgaaaaaatgctctcttagcaaaataaggctgtggtgcatgttcataagtgtatgttaataggagaaatattaatttcttgtatcaaattgagaagggcagaagttatgcttattctgtttttttttttctataataaaagaaatgtgagttttcaagatagttttgttaaaaggataaaaaatttctcttgtaaagttaagtacagtttggggccagaaggaagggaagatatctacacaggataaaatgtgcttgattttatatgctgcaggaaagaactagttacarctcaaaaagaaaaaaaccctgttga

SEQ ID NO: 403383 - DNA, 467 bp, Homo sapiens
gctgctgtaataaattaccacaatcaacgtggcttaaaataacagaaatttattctctcacagttctggagggcagaagtctaaaatcaaggtgtccgcagaactttactccctctggaggctccagggagattctgttccttgcctttccagcttctggtggctactgacatcacttggcattccttgacttgtagctgcatcarcttcaatttctgcccccatctttgcacaaccttcttccccatgtttccttatgtgtcctcttcagtttgtctaatctccctctgcctgactcttataaaggcatctgtcataaactcattgtaagttgaggagcatactgaatgcatatcactttcacacttaaagttgaaaaatcaaatacagagagatgtcatcaagattgcttacttgaggtgctctgcactcacttcctccacaaggaaggatgaaaatacaaatag

SEQ ID NO: 403384 - DNA, 467 bp, Homo sapiens
gctgctgtaataaattaccacaatcaacgtggcttaaaataacagaaatttattctctcacagttctggagggcagaagtctaaaatcaaggtgtccgcagaactttactccctctggaggctccagggagattctgttccttgcctttccagcttctggtggctactgacatcacttggcattccttgacttgtagctgcatcagcttmaatttctgcccccatctttgcacaaccttcttccccatgtttccttatgtgtcctcttcagtttgtctaatctccctctgcctgactcttataaaggcatctgtcataaactcattgtaagttgaggagcatactgaatgcatatcactttcacacttaaagttgaaaaatcaaatacagagagatgtcatcaagattgcttacttgaggtgctctgcactcacttcctccacaaggaaggatgaaaatacaaatag

SEQ ID NO: 403385 - DNA, 534 bp, Homo sapiens
aatctggcaacttacatgctccctgaaatttaaaaatacaacaaatttatctgaagcaacaaaattgtatattcattctttctttcattcattcattccaccaacatttactgagcacttattttatactaagcattgtgctaggtacaaacatatgagcatgaaggtcataatcccttaccttaagaagctcaagcctaataggccaacaagtgatttaaaaaaaacaaaacaaaaccccacacacaaaaaaaacaaaacaaaatggaggaagcttatgaagtaaaagattatgggctttgctggccaggtgcrgtggcttacacctgtaatcccagcactttgggaggccgaggagggtggatcacctaaggtcgggagttcgagaccagcctggccaacatggtgaaaccctgtttctacaaaaaatacaaaagttagtcagatgtggtggctcatgcctgtaatctcagcttctcaggaggctgaggcaggggaatcgcttgaacctgggaggcgaaggttgcagtgagc

SEQ ID NO: 403386 - DNA, 580 bp, Homo sapiens
aaaacaccaattacagtgttgccaatctgtgtgaattgggattcttccaaacaacagtgcaaatggatttgaggatgtggggaaggggatacggagggggcagggaagagagagctgccaaaatacaagacagggaggcttagagaaattgccccttggcgctctggcagcagtttaatcagccagagccctgtacattcccatgcaccaattccattgtgtatgttcacttgcagatttggcttctggcttgctctctttgtttgggtagctaggcatgaaaaagaatcatctgcaaccagagctcaacttaattcccarttcctctctggaaactatctgttggcatcatgaaatgttctgtgtaaaaggccatgctttgactgatcaaaagtgggatttcagaccctccatcagagtctttgtggatgaaactcagccaattctcggaaagtgacagaagaggcctgcacctctggcataatttgcgtctccccagcatctcactgttcctgccaatgacaagcaggaacccccgacaatttttcctctctctcctggcaatgcaatgatggcccag

SEQ ID NO: 403387 - DNA, 580 bp, Homo sapiens
aaaacaccaattacagtgttgccaatctgtgtgaattgggattcttccaaacaacagtgcaaatggatttgaggatgtggggaaggggatacggagggggcagggaagagagagctgccaaaatacaagacagggaggcttagagaaattgccccttggcgctctggcagcagtttaatcagccagagccctgtacattcccatgcaccaattccattgtgtatgttcacttgcagatttggcttctggcttgctctctttgtttgggtagctaggcatgaaaaagaatcatctgcaaccagagctcaacttaattcccaattcctctctggaaactatctgttggcatcatgaaatgttctgtgtaaaaggccatgctttgactgatcaaaagtgggatttcagaccctccatcagagtctttgtggatgaaactcagccaattctcggaaagtgacagaagaggcctgcacctctggcataatttgcgtctccccagcatctcactgttcctgccaatgacaarcaggaacccccgacaatttttcctctctctcctggcaatgcaatgatggcccag

SEQ ID NO: 403388 - DNA, 538 bp, Homo sapiens
gatcctcctacctcagcctccaagtatctgggactgtaggcacatgccaccacgcctggctaatttttttttattttttattttttagggatggtgtttcactatgctgcccaggcaggtctcaaactccgggactcatgtgatcttcccaccttggcctcctgaagtgctgggattacaggcttgagccaccacactgggcctataccattttcaaatagtggagccatccattacatatttgtaacatatgtgttgattaacaattaatactcttagttccaagctccatttggcaatayaaaataaatggagggtttgctcacatctgatggatatgactttctctgtgaagactgaagcaagatcatctgagtgtaaggaggcagtataagttcggaaattaaggaaggtagagatgcttaaggtagctttgcagagaataggagcgcatgtccaccagacagatgttataggattgccatggcttgaagtttgaaacccagctgtggatgattgagatgattcatgtatttaa

SEQ ID NO: 403389 - DNA, 579 bp, Homo sapiens
  misc_feature (1)...(579): n = A,T,C or G
atggaatcattcacaggattagagtactgnggaagagaactggttttcagggcataatgataaacttcattttgaataaactgaacaggagaggataatgagacatctaagtggcatagagggctggagttcagaagaaacacaggattcaagatatgcctttcagagtgaagaccagaaacattattgggggtcaggattcagtgatacctccaaaggagaaaatgtgaagactgaaatgcaggggttgaggaccattttgttaaaggaaagkgtataatgagaacctgttaacacagaagaaatggagttctctgtcattcaagacaaagagctgcatctgagtcaaggtaatctgctctgaatagtgcttcatccaaaaatatctcctctttttttcccaatcatctttattgtctggttatgcaagtaaaccttctacctcttaagcctcaggttccacatccataaaatgaatgcaatattactatctaccttccatggctgtgatgaggatatagtgaggcaaggggtgatatgcctggcacagagtacaaacccaaccaatgtgagctaccc

SEQ ID NO: 403390 - DNA, 579 bp, Homo sapiens
  misc_feature (1)...(579): n = A,T,C or G
atggaatcattcacaggattagagtactgnggaagagaactggttttcagggcataatgataaacttcattttgaataaactgaacaggagaggataatgagacatctaagtggcatagagggctggagttcagaagaaacacaggattcaagatatgcctttcagagtgaagaccagaaacattattgggggtcaggattcagtgatacctccaaaggagaaaatgtgaagactgaaatgcaggggttgaggaccattttgttaaaggaaagtgtataatgagaacctgttaacacagaagaaatggagttctctgtcattcaagacaaagagctgcatctgagtcaaggtaatctgctctgaatagtgcttcatccaaaaatatctcctctttttttcccaatcatctttattgtctggttatgcaagtaaaccttctacctcttaagcctcaggttccacatccataaaatgaatrcaatattactatctaccttccatggctgtgatgaggatatagtgaggcaaggggtgatatgcctggcacagagtacaaacccaaccaatgtgagctaccc

SEQ ID NO: 403391 - DNA, 584 bp, Homo sapiens
atgctaattagtaacataaaagtgtaaaaatcactgccaaaagtaagcacatagcaaaacttagaatattctagtactattattatgctctaccaatcaattgtatctccagtatggaggtgaaaagacaaatctattaaaagcaactataagtacaataatttattaaggaatacactttatacaatgacttaaagtgtggcagcaaaaacataaaatgatgaaaggggagtaacaatgtagtttttrtgcaatcaaagttagttgttataagcttaaaatagcctgctttgagtaaaaaaaaatgttttatgtaagtttcatggttatcacaaagcaaggacctattgtagatacacaaaagatggaaagaaaggaataaaaatatactactacagaaaatcgtaaaaccgcaaaggaagacagcaagagaggaagaaacaagaatctacaaaatagccagaaaagaattaaatgccagaagtaagtccttacctatcaataattaacttgaatgtaaatggattatattcttcagtcaaaagacatgaagtagctgaaaagatttaaaaaaactaacaccc

SEQ ID NO: 403392 - DNA, 601 bp, Homo sapiens
tgtgtatatgtgccacattttctttatcaattcacccattgatggacaygtagtttgattttatatcttggcctttgtgaataggactgcaataaacatgaaagtgaagatatctcttcgatatactgattttctttcttttggatacacacctagcagaacatacattggggaaaggacatgtatgagccactgagcctgagtaatttttaataaatagatatcagatctatttggaatttatcctggtctaatgtgtgaagaaaatggatccagttccatcattttttatattaccaagtggcccaaacatcacttattaaaaattcttctctttctcactgatttgagaaactagcctcagcatatactacattggatagtaggtatttgggtctccttcagaatgttctctattgcatagtctctctgtttttggtagaaaggtattataccatattttatattttggtatggctggccactttctgccccactccgtccagttcttccttttagcaaattttctggacatctgtgcttatttatttttctaaatgaactgtacgaataacttgtctagcacacaaaacacctgata

SEQ ID NO: 403393 - DNA, 631 bp, Homo sapiens
tagctctttggaaaacaacttctgtttattttcaggtaagacttcaccttatatcatgccaagaggcattcttagaaattttctctcagcacaattgccagtagttttgcaggacaaggggaatatacawcaattttctctaaggggaggacagaacaatgcaagtatgtacgtcaggcagaacagaatttaatgagttaaatcctttttcaagagagcttactttttatgcctctacaagagccttaataaccacaggcaaataatctcactcaaaatccttgacaaaaagaatgccacaatagctcagaatggattgatgaatgtttgaaagccttttattagaattctgcaaattgggaacacttctgtgaacaaacctcccaaagcaagaatttttcatttgactgccagagtaagcataatagcactagcctcattctgtgtgtaatgacaaagagatacctttttgtaatgtggaagccttatagtagctttgtttattttatctttgatcattgcctttagccctggtttggccttgctctaatcttgttgagctagctagctaaatagaaagccatcactatattttttagtttttctatctaccagacacatccattacaat

SEQ ID NO: 403394 - DNA, 562 bp, Homo sapiens
tcttttgttcataatttttttctcctaggtttgtctttygcttaattcaaaggagttctatatatatatgtgtatgtgtgtgtgtgtgtgtgtgtgtgtgtgtgtgtgtgtatgacattaattccttcatatatattataaatcctttactctcttttttgtcttgtctttttttctttctttatgttgcattttgaatggatgttcctaattttaatgtggttgaatttattagatttttaatttatgatttacaaattttgtgtcacatttaagaaatcattacttcccacatggtaataaagatattcttctatattgtgttaaaatgctttctagtttagaattatgaatattttgtagtttataactaattttaatatatcacgtgaagtagaggtccaattcatttttctccacatgcttaaccaatagtttcaactacattttgtgaaatcttatttcctactgacaggattttcataaaatatgttcggtcatagatacatctgtttctaaaatctctgctcgattattttagttaacttatctattcctgcac

SEQ ID NO: 403395 - DNA, 626 bp, Homo sapiens
aaattattttaagaaaaaaatcatgaataactatagccctccttttcattttaattgcaatcttggtgatgttagtttagttacctgaagcaagcattctaattgccaatttcattatgcaaatctaaaaacttaaagcaaatgtctttggagtataattacccaggagacaagaactggtattttttctcaacatgcaaaccagtataagatataaaataaacacaagatcacagggagccagcaggctttgggttgagtttatgccttgccacttagtaaatacgatcttgggcarcgcattagagctaggtgtcttgattacttcatattaaatatagggataataacactcttccaaactatctcaaagaagggctagaaggtgtaaatgtagtaatgtatgtgaaagctcattgtaatctctaaagcacaatcccaatataaggtattataaattagatgctgtaacctgactagaatgtgaagtagccctggaagttagagaagaggagatggagcattctgaataaaagcagtaaacaaatttactcagtgtacaaacattcccttttatccacagaaacaatcaaacttgaagaaacagtagaacggtggctagcaga

SEQ ID NO: 403396 - DNA, 621 bp, Homo sapiens
ggaaggctttatggaggagttgcatatagctaaaaaatattgatgtctaatacaccaggatccattctgtgtacttttatatattaaatcatgaagtcatctcaaaggcgttacagaataagctactcttattatctcaattttgcaaataaagaaatggaggcactgaaatctaagtaatttgtccaaagttatacacagctggcaagtgacaaagaaaatgctattaagtactacaccacattgtctctgtacttaggtcttatgctgacctaagtcaagcatcaaggatggaatggattgggaatgagagaatcaagggagaaaagtgctacagatgagcagcatgatttaagctgaagaatagcacrtgatatgcaaaaacaaaaggcaattgggagaatagtctgatattgtttggaatgtttgtattgggaggtagtggaagacagacttggataggttagtaagtaggttgtagacaggatataatgtcaaaatataaagtttaagctacagtacacaagaaggggtaagaacatagtgtgttcttgaataagtgaaagacatgatagaatcccttttggtaggggtaatataaggggatgtgcataatcaaaa

SEQ ID NO: 403397 - DNA, 621 bp, Homo sapiens
ggaaggctttatggaggagttgcatatagctaaaaaatattgatgtctaatacaccaggatccattctgtgtacttttatatattaaatcatgaagtcatctcaaaggcgttacagaataagctactcttattatctcaattttgcaaataaagaaatggaggcactgaaatctaagtaatttgtccaaagttatacacagctggcaagtgacaaagaaaatgctattaagtactacaccacattgtctctgtacttaggtcttatgctgacctaagtcaagcatcaaggatggaatggattgggaatgagagaatcaagggagaaaagtgctacagatgagcagcatgatttaagctgaagaatagcacatgatatgcaaaaacaaaaggcaattgggagaatagtctgatattgtttggaatgtttgtattgggaggtagtggaagacagacttggataggttagtaagtaggttgtagacaggatataatgtcaaaatataaagtttaagctacagtacacaagaaggggtaagaacatagtgtgttcttgaataagtgaawgacatgatagaatcccttttggtaggggtaatataaggggatgtgcataatcaaaa

SEQ ID NO: 403398 - DNA, 618 bp, Homo sapiens
agcagttttatctcaaaaaacagaatagctcaaggtgcataataagtagcattatctcaaagaaaaatatggcagttataacacccagataacttgtattttctaagaccaatttgttatacactttttttggcaraagcgttttttcttttcttttgcaatcatagaaacaaagttggtgtcccactgctatcgatgctggcaggaagaaaaatctaagaacatttacaaggaaccagtattttaagacttttcttatgcacattgtgggtttcattttatgaaaatttaaaatgtgttgacctttgcatttgattgctggtgttttcattaaaatggaaaccttcaattcttacagagctatttcataatatcactggttggaaattagatttgattatgtcgctgtctctctaaacttaacacctacaaaacagaaaagttcagtatcataatattcacctctctttcaaatgtaattgacttttcctgacatcagcatggcaaagaacaatcattttgtttctgatatatttctgtgtaatacgtctgtttatttaccgctcatcatgcaggccaggagagaaattaaatttcattccttcttcagacatgaat

SEQ ID NO: 403399 - DNA, 531 bp, Homo sapiens
cagaagtgacaaaaagaaaacacacaggatccaactattccttatttattaaaagatcacttagcaaaaactactcatataatttgaaagttaaaggatgaaaaagtatattccatgccattagtaaccaaagacaaagggtggttatactagtatcaaacagaattgactttatgtcataaaaactgttaaaagaaacaagaaagacattatatattgataaaagtataarttcgtcaagaagttataaaattatagacatatgtgcagaaaacatcagagctcctatatatgaagcaaacattgatgtaattgaagggaaaatacatggttctaaaataatagtaggagatttaaatatcccaccttcaatgaacaatcatgtgtcagcgaaatgtatgacatagatatatgtataacacagatgaataaccaattggtggaaatacacaatttatcaagactgaatcaaaaatacatataaaacctgaacaaacctacagttgtaaggagattgaataaataattaaa

SEQ ID NO: 403400 - DNA, 453 bp, Homo sapiens
aaaagtcaaaaaattataagttgaaccatcataagtcggggactctatgtattaaaaaagaaggacgatcctaagtcaataatctaactttctactttaaggcactggaaaaaaaaatagcaagtaaaatctaaagcaaaaagaagaaaatcaataatcaacaataaaattaaaattaatgaaacagaggacagaaaaacaaatattggcaaaaytttaaaaaacgaagcatattatccagcttaatgattatacaacccaattgccccaggaatgcaaagttggctccatatatgaaaatttgtcaatataatatactgtatcaagagaataatgtccaaaaaccacataatgtgatggtttgaatgtgagtcccttcccaaactcatgctgaaatttaatgtacattgtaacagtattaaaaggtgggaccattaagaggtgattaggcca

SEQ ID NO: 403401 - DNA, 453 bp, Homo sapiens
aaaagtcaaaaaattataagttgaaccatcataagtcggggactctatgtattaaaaaagaaggacgatcctaagtcaataatctaactttctactttaaggcactggaaaaaaaaatagcaagtaaaatctaaagcaaaaagaagaaaatcaataatcaacaataaaattaaaattaatgaaacagaggacagaaaaacaaatattggcaaaattttaaaaaaygaagcatattatccagcttaatgattatacaacccaattgccccaggaatgcaaagttggctccatatatgaaaatttgtcaatataatatactgtatcaagagaataatgtccaaaaaccacataatgtgatggtttgaatgtgagtcccttcccaaactcatgctgaaatttaatgtacattgtaacagtattaaaaggtgggaccattaagaggtgattaggcca

SEQ ID NO: 403402 - DNA, 265 bp, Homo sapiens
catcacatttttaaagcaataccttgtgatgaataaraaatggaatatgtgatccaagaattttatatcaagatatcagggaatggttttctcatgagcctttactaaggaatctactagtgaattactttcagataaccagaatgatgagtaaaatattgacataaggactcatgctgaagattcacattttactgtacaatagtgttctactctaacctaccatttatacaaggggttcctagagtccatacttaattcagaa

SEQ ID NO: 403403 - DNA, 265 bp, Homo sapiens
catcacatttttaaagcaataccttgtgatgaataaaaaatggaatatgtgatccaagaattttatatcaagatatcagggaatggttttctcatgagcctttactaaggaatctactagtgaattactttcagataacsagaatgatgagtaaaatattgacataaggactcatgctgaagattcacattttactgtacaatagtgttctactctaacctaccatttatacaaggggttcctagagtccatacttaattcagaa

SEQ ID NO: 403404 - DNA, 494 bp, Homo sapiens
gtctggttttagaaaatggaaactagaagtcaatttcacttaaatactcttctgggcatttttttttttctttcctgtagccaaaaccaagtgcttatgtagcattgataattattaaaagagatactatgactcagaactggttaatgtttgtaatgcttctttaactctcagtcaagaagtgctacaagtattacttgcctgacataatagttaaggggaattatataaagtagtaattatcccattttctgtaaattttatttctcccagttcaaaccttagtatcattttatttttcattcttggaaaccaatatatgtgatctgttttattttatccatataacatggctgttcattcacacagatgacacatttttgtagtcacttctcaaggcttttaaagcacatttttagcctaactcacataagttattgctatctaatgatatgtaatttaccaaatcccakctttggggacactttaaaatc

SEQ ID NO: 403405 - DNA, 581 bp, Homo sapiens
tataaacttattggaaaattctgagacagtaattcagtaacctcagggaaaatgaaaacctctgatagcaaagcataaatgcaagatcgtaaataaaatactgatacggttggctgcatatacattaaaattttctgtgacaaaatgtgccataaaccaacttaaaaccaaaatgagagaaaacaacaaaaaaatagtttttacttagataaaatacacacagaatatataaatattgtatacatatcaacaagaaaaaacatacaacagggaaaagtgcaaaaatatgagaagaaaattaatgaaagaggaaatctaataaccattaggaaaaattgtctagtatatatgggagaagactctcccctccattactaatcagggaaaaacaagataaaacaacaaattatttcaaaaattaaaaagacacatagttcccaacagtgaaagatccaggaggccagaacctctgctttgatctccactgatcagtaccaaacacagcacctgkcatagagaatatctgaacactggttgaatgaataagtaaatgaaggaatgaatactgatagacacaggga

SEQ ID NO: 403406 - DNA, 629 bp, Homo sapiens
atgtgttgtgggaaacgaggaaaaaggagctgacagagatgatgcctagtatccttctgctggtgttgatggtgccactagttaaatcacagaatgtcagagaaagaaaacctaacaacaaaggagtatggtttgaaaatattacatttgttgtttgtaaattcctttagtagacatgaaattttgtaaagtaataattataacaatgtattgttgggtttgtaacatgaaatggttcaatatgtatataacaataatatcactaaaaggtatatgtgtagcaataatattactatattgtcatataatrgatagtaatatcactatattgttatataacagctataagaataatttcactgaagagggatacaactgtaggggagtaacatttaaagatctcactggaattcagttagtaaaactctgaagtagcttctgatgagtttagatgtatgtgataagccttagagaaaccactaaggaaatcacttaaaactatagtgaaaaatgattaaaagtaataaaatgttacactagacaatatttacttgatgcaaaagaatatagtggaggaagactagcagcaaaatagacatgagacatgtagaataaaaactaaaatgaga

SEQ ID NO: 403407 - DNA, 559 bp, Homo sapiens
gacagtttctcacaaagtaaagcatgcacttaccaattccactcatagatagcgaccaaaaagaagtgaaaatatatatccacataaaaactgagaaatatgtagtcagtacatatccacatatatgtacttaaatgttcatagcagctttattcatagtagccagaaacaaaaaccaatacaaatgtcatcggctggttaagaaaaataacacatccatagattggaatattactcagaaataagaaggaaaaactattgatatactcaacaacatcaatacatttytaaagcgttatgctatgttaaagaagtcatacacacaagtgtacctaaggtttaggtccatttatgtaacattgtggaaaacgcagagctataaagataacaactaagtagttgccaaggatggcaagccacctaggtgcaaaggggccaagggaaattttctgagtgatgggaattttctatttcatggggtggtgggtataaaatggtatacatttttcgaaactcatcaaagtctacacttaaatttttttttttttttttttttttt

SEQ ID NO: 403408 - DNA, 596 bp, Homo sapiens
aaactctactggtcattggcctaagcaaagaatttatgactaaaacctcaaaagcaaatgcaacaaaaactaaaataaacaaatgggacttaaaagcttctgaacagcaaaagaaataatcaacaagagtaaacagacaacctgcagaatgggagaaaatattagcaactatgcacttgacaaagtactaatatccagaatctacaaggaactcaaacaactcaacaagaaaaaaaaaaaagcaacaaataaccccatcaaaatgtagacaaaatcatgaacagacatttctcaaaagcagawgtaaactggccaacatatgataaagtgctcaacatcactaatcattagggaaatgcaaattacaatcacaatgagatatcatatcacactagtcaaaatggctattaccaaaaagtctaaagacagacatttgcaagatgcatagaaaaggaaatgcttatgcattgttagtagaaatgtaaattagtacaaactttatgaaaaatagtacggacatgtctcaaatagctaaaaatagaactgccattcaaactggcaatcttactactggttatttacccaaaggaaaataa

SEQ ID NO: 403409 - DNA, 596 bp, Homo sapiens
aaactctactggtcattggcctaagcaaagaatttatgactaaaacctcaaaagcaaatgcaacaaaaactaaaataaacaaatgggacttaaaagcttctgaacagcaaaagaaataatcaacaagagtaaacagacaacctgcagaatgggagaaaatattagcaactatgcacttgacaaagtactaatatccagaatctacaaggaactcaaacaactcaacaagaaaaaaaaaaaagcaacaaataaccccatcaaaatgtagacaaaatcatgaacagacatttctcaaaagcagatgtaaactggccaacatatgataaagtgctcaacatcactaatcattagggaaatgcaaattacaatcacaatgagatatcatatcacactagtcaaaatggctattacyaaaaagtctaaagacagacatttgcaagatgcatagaaaaggaaatgcttatgcattgttagtagaaatgtaaattagtacaaactttatgaaaaatagtacggacatgtctcaaatagctaaaaatagaactgccattcaaactggcaatcttactactggttatttacccaaaggaaaataa

SEQ ID NO: 403410 - DNA, 596 bp, Homo sapiens
aaactctactggtcattggcctaagcaaagaatttatgactaaaacctcaaaagcaaatgcaacaaaaactaaaataaacaaatgggacttaaaagcttctgaacagcaaaagaaataatcaacaagagtaaacagacaacctgcagaatgggagaaaatattagcaactatgcacttgacaaagtactaatatccagaatctacaaggaactcaaacaactcaacaagaaaaaaaaaaaagcaacaaataaccccatcaaaatgtagacaaaatcatgaacagacatttctcaaaagcagatgtaaactggccaacatatgataaagtgctcaacatcactaatcattagggaaatgcaaattacaatcacaatgagatatcatatcacactagtcaaaatggctattaccaaaaagtctaaagacagacatttgcaagatgcatagaaaaggaaatscttatgcattgttagtagaaatgtaaattagtacaaactttatgaaaaatagtacggacatgtctcaaatagctaaaaatagaactgccattcaaactggcaatcttactactggttatttacccaaaggaaaataa

SEQ ID NO: 403411 - DNA, 609 bp, Homo sapiens
aactattgagggataaaaamcccatgaaggtttttgtgagtactctacccaatgctctgtaaatgatgagttttctccagacttgcttgttggaaaagatagtattttcagcctctctaaaactctgccatgtgaagcctatttacattagtttctttagactttttggttctgtgcactcaactcagagtttgttgggctttatctcagttccttctacatgcattgtagctgtaaactccttcaagataataaactagtacaatgttatggctcacattgtttcatttcctgtctctcagctctgtcttttgttactcgatatccagtgtcttaaaaaccattgctttatcttgtctgctttgtttgtttgtgtatttgtttcaagctggagtgtattctaatctttggtattccattttgtctggaagcacaaattgccatttatatgttataattcctgaatttaagtattcagctaggaatgtaagctcattctaatcttatatatccaattgcttattttatatctctttgattgctgctagttatctcaaacttattttggaaatgaagcttttgatgtactgatgtttctccaactcttct

SEQ ID NO: 403412 - DNA, 586 bp, Homo sapiens
  misc_feature (1)...(586): n = A,T,C or G
acatttctacacacacttttggccaaaaggcaacacaatgccttaaagggaaggattcccagtcctggtagcatttatcaactgctgactaaaaagcacttgggctctgaacaaccagtagtgatatccaggtcatatgccatgggccttgagctgtgagatgtgttgaattcaggggtgactcagcatatttctaactgtggtggctgtggtgaaagactccttctgtttgmgaaaagcacatggaaaagtaaagagtctttgccttgcaccttaggtaccagcttggccacagtaaggcagagcaagaaggaggctcttggggtccccaagaccagccctaggttcttggacagcatttctggacctgcccagggccagaggggagcccactatgatgaaaggcgagtcccaggcctggcagcactctccacaagctgacaaaagagcccatgggcttcacatgtacatcaatggtggcctggtcaaccccctcatggatcagttgtggtggtggccacagggagaggtttctctgcatgtgcaaaggggagggaagagcanaaataattttttgttgtggttt

SEQ ID NO: 403413 - DNA, 572 bp, Homo sapiens
tttatctggtcttggtatcagggtaatatcggtcttgtagaatgaatttggaagtattccggtttcctctgttttggggaayagtttgagtatcattggcattagttctttaaatgtttgggagaattcagcagtgaagctgtcatttcccaggattttctgtattgaaagatttttttattacagctttgatctcattacttgttattggtctgttcaggttttggatttctttatggttcaatcttgataggttgtatgtgtctaggaatgtacgcatttattctagtttttccagtttattggcatatagttactcacagtagcaactaaggatcttttgagttggaactaagtaaggagctatggatctttctgccgtgtcagttgtactgtctccttttttatctctgattttattttgttgggtcttctctttttttttcttagtctggctaaaagcttatcaattttgtttatcttttcaaaaaactaaatttttgttttattgatcttttgtgttgttttcttcatttcaaattcatttatttttgccctgatctttattattt

SEQ ID NO: 403414 - DNA, 516 bp, Homo sapiens
ttccggtttcctctgttttggggaatagtttgagtatcattggcattagttctttaaatgtttgggagaattcagcagtgaagctgtcatttcccaggattttctgtattgaaagatttttttattacagctttgatctcattacttgttattggtctgttcaggttttggatttctttatggttcaatcttgataggttgtatgtgtctaggaatgtacgcatttattctagtttttccagtttattggcatatagttactcacagtagcaactaaggatcttttgagttggaactaagtaaggagctatggatctttctgcygtgtcagttgtactgtctccttttttatctctgattttattttgttgggtcttctctttttttttcttagtctggctaaaagcttatcaattttgtttatcttttcaaaaaactaaatttttgttttattgatcttttgtgttgttttcttcatttcaaattcatttatttttgccctgatctttattattt

SEQ ID NO: 403415 - DNA, 576 bp, Homo sapiens
ttttgttctgaaagtcccagactaggaggacacatccacaaaagcaaatgtttactaggtatctgtggaagaataagacaatcttcactcactgtgccactgcaccatgagcagaaaagatcaaaacaaactcactactggtagagtttttctaaatgaaaatgatttaagagtccactcatttaaaaatggttaattttatgttatgtgatttcacttgaattaaaaacatatgtatgagcagagggcagggggagtccactaaagttattgacaaaaaatagtcatattttatgaaagawtacaatgaaaaattgtcaactagggagcacgcagaactgggttttagactgagctatttgagtaattagcaatattactctgaacatgacccttaacctctctggattttaagtttctacaaagggaaaactttggactagttggtgaccaagatttcttgtagttcaaaaaccaaatgaacctaagattctacttagattctactcacatatctgtaaaggagttccaattggtttgaaaacatgaaaaaaaaattgtcattatttggatacc

SEQ ID NO: 403416 - DNA, 633 bp, Homo sapiens
gaagtctccgaaataaatgagtttgtccatatcaggacatagtaacacaggtaattgtctcagtgtataaaacaaataaataaagtctattttgacacttcaaattttaacctagtaatttatgatttaagttttaacgatatgttttaacttattttctaaagattgctttgactgtaatctatgatctatgagcatgagtgaaaagagaagcacaggatggggcttctcacgtgaataaggactgacgatcctttgatgaccatcagtaactattatccastgagccactccaagtgtcaggcttgcagtcctagcaaaatccacagatcaaagagcatcattccatgattcgtggccatatgccaggttgttctgctgagtgattccctagctacctatggataggccagatttctggtgtatcaggcaaaattttaaagcatttattttagtcttactgcttcaggttagcttgatttcatgactaatgtgcagcagatattgagggctgcccaaatgtaatacatgttcaaaagagctgcatttgcaatagacatctttaaaatatcagaagtctagctatcattccaagttctgttttttattccccagagaaacagtatgtgaagg

SEQ ID NO: 403417 - DNA, 528 bp, Homo sapiens
gtcttgaaactcaaccatctcccagagttggggacatgctgtttcctgcactgtttcatttcttcatgaaggttttcttttttcaagccaaattccatattatctacttttttaaaccagctattctatctttagttgtaattcagcttcccaataatgtttttgctttgtttctaagggattattgatggaatgtcaagactgagtattactgttgtttctgattactgtgaatagcgggtgtgtcccacttcctttcagaggggctctgacagttgccttaggtccatgacatcgtcttgggtattttctacaatcgctttctaaattctaaagtttggatgtctaactttccagattttacaaaacatattaaaaatstatactagccaaatgaaagattttggttacatttgagtggttagtaaacattagctttcctttactatttaacctcagattagaatttcagagactggaatttactaactttaatgtaacattaacaatttccacagttcataaagc

SEQ ID NO: 403418 - DNA, 543 bp, Homo sapiens
gaaaaaagagtccaagtagccaaagcaatcctatgcaaaaagaacaaagccagaggcatcccattacccagcttcaaagytgggttgcctacaaggctatagcaaccaaaacaacaaggtactaatacaaaaatagacacatagacgaaaggaacaggatagagaacccagaaataaagccacagacctacaaccaactgatctttgacaaagttgacaaaaataaacaatggagaaaggacctcctgttcaataaatagtgctgggaaaactagctaaacatatgcagaggaatgctactggacgtctacctctcaccatttaaaaaattgactcaaaatggattaaatacttaaatgtaagaactcaaagtataaaaatcctagaaaaaaacctaggaattacactttcgggcatcagcctaggcaaataatttatgactaagtcttcaaaagcaaatgcaacaaaacaaaaattgacaattggcacctatttaactaagagcttctgtgcagcaaaataaactatcaacacagtaaataa

SEQ ID NO: 403419 - DNA, 577 bp, Homo sapiens
atatggtcatgcaaatggagcctcagacgatggctcccttttactgggaactcttaggcctctgagagagatcagactgctgtttttgcaaaacagcaccccgtcagcagaaagcagcaattgtggtcattgtccttatcctaatggcagttagatgtacttcttcagagggaggattgatagcagcaagagacaaattcccaggcagacaggggtgggtccatggtgaaacccaacattcaagtcaaaggtggcctgaagcctgaaaactgcatgccagttccggacagagtccacaactagaatgaaaacttcctcgatgcctaaggccaatccaatgcccgcccacagaccactcaacatgcactcccacattctgagcccataaaaaccctggactcagcaacacgtggggttacctacctttgggacccctatcacacagagggttatccactttgggtmccctctcatgttgagagctgttctgttgctcaataaaaatccttttccaccttgctcagtctctcatgtccatgtaatctcattcttctcagatgcgggacaaaaccctgga

SEQ ID NO: 403420 - DNA, 583 bp, Homo sapiens
aattctcacttatctacatcctcatcaacacgtgtcattttttgttgctttgatagtggccatcctcatgggtgtcaggtgatatctcactgtgcttttgatttgcaattctctaatgattagtgatgttaagcatcgtttcacatgtatgccttttttggataaatgtctgtttaagttatttgttcattgttcaatcargttttttgttgttgagttataggaattcttatatattatgtgacttacattattttttgagacagggtctcgctgcatgcccaggctggagtgatgtggtgcaatcttggctcactgcagcctgaacctctttgagctcaggtgaccctcccacctcagcttcccaagtagcagggactacaggtgtgtgtcaccatgcctggctaatttttgtatttttcacagagacagggttttgtcatgttggccaggctgatctagaactcctgggctcaagtgatctccccacttcagcctctcaaagtgctaggactataggtgtgagcctcggtgcccagttggaattctttatatattcttgatattaaccccttatcagata

SEQ ID NO: 403421 - DNA, 505 bp, Homo sapiens
ctacattttattactactccatatacctcttaaaagttccaggtttttttgttgagacagagtcttgctctgtcctccaggttggagttcagtggcacaatctcagctcactgcaacctccatctcccaggttcaagcgatcctcccacctgagccccccaagtrgctgggactacaggtgcatgccccacgctggctaatttttgtattttcagtagagacggggttttgccgtgttgcccaggctggtttcagactcctgagctcaagtaatctgcctgcctcagcttcccaaagtgctggaattacaggcgtgagccactgcacttggcctgaagttccaaaattaattattacctatggaggaaatagctggtatataactggcagatggtgtttactatggtcctgtgtgaccaatcccagtttcttgtcttactgtaaagagagcatttattgctttctcataaccaactcttttcacctcttctctttcctcattatg

SEQ ID NO: 403422 - DNA, 606 bp, Homo sapiens
actggggtttttattaagctaaaggaaccaagcaactcccctcagtgccctttagaggactccaattggccacagcccatgaaggattggcctgtgaccagaggctgacgtggaggcttggcacacaatcagaggctgatgtggaaacttctgtctcattatcacaggagcaaggatgtggcctgtgtgctgcccagttttgcctagacctggctgcacctgctgttcttttgtttctgccttaacccttgatggcctgaattccctattctcctgcctcagaattgttaagcaaaaaggaaccaggacttgatgatttggaaaattctcagcctaactatactgccaaggaggagaagttctggcctgaagagtgtgtctggacaataatttgctaaagagasttgtgtgactcatggatccactcaaccgtgtcagcgaagccaggaatagagttggggttatccaggaaagatccgtggagaacttgagagttctaatggtgtgcatccccgtgacatcaacagaaaactgacaagatttttgagaattttataccagcagaaatactcccagcctggatagaaagggacagagacagaacaa

SEQ ID NO: 403423 - DNA, 550 bp, Homo sapiens
actaccctgggcaaggtagcaaccccatctctatcaaaaataataataataataaaataagctgggcatagtggtgcacttgtagtcccagctactcaagaggctgaggcaggagcatcagytgagcccaggaatttcaggttatagtgagctacagtgactctaccactgtaccactacactccagcctgagcaaaagagtgagaccctgtcttatatatatataatatgtaaatatatataaattcagttagaatcatgccttcacgccactcctttcttgcagagtgaaattcacatgtctgaagaagctatacaggacatattggaacagacagaatcagacccagcatttcaggcactctttgatctctttgactatggtaaggagactatttatttcaagacagaaaaaaaaggcttctacaatttctttggtaacttaaccagagtgaatcaacattccccagagtatctaaaaaagttcttgttttcatttcatcaaacattatatggatatgttaaaggagtgtttgttgttttgttttta

SEQ ID NO: 403424 - DNA, 534 bp, Homo sapiens
ttctcttttgtcttagatggtccttctccttcagtcccttttcagtctcacttggcacattttattgttattatctttaaagcatatgcaccccaactgtaagcactttcccaacattgatggcagaaatcacatatgattcacttttgtttcccaggcttttattttctgtctagcacatttagatgttcaaaayttttcacttagttaataaattatcttggaattaagttgcattaactatttaggtacaattgctttatttttaatattctataaaatactagatgacttgttagatgtatttttaaaaattaaattacttagcttttaaactatgttaataaaatacctatgttaatgttgctcccacagcaacccattctggcagaaatggcgggttgtttttattttcctaggatgtttttcagggggaaatgggaggagagagcattctaattatctgccacttgtactataccttagagttgtagaattattgctttgaaacacacctggaggtaatcaccatga

SEQ ID NO: 403425 - DNA, 577 bp, Homo sapiens
cttactactcctcaaatcaagaggtgactattttttcacctccccctaaatttaagttggtctagttacttgctttggtttatagaatacgacagaagtgaagctatgtcagtctaggcctagccttgggtggcagctttcccctcttaaaaaccagatgccaggtaggaagtccaactaccatgagaccactatgctgtaagaaagcacaagctagctatgtgaagaagccacatagagagagaaagagagacaggcacacacatagagagaggctcagctcagcmagcccctagcaatccttgctgagactccagacatgtgagtggcaaagccatcttggatattccagccatagcagaagaactgcctagctgaacccaactcaaacacaggattgtaagaaataataaactactgttgttttaagacactaaatttggtggtggctctttattgagaagagaaaactgagaaaatttgtatttatgtaatttaattcacacaacaccaccatgaacagttactataattattcatagtgcacagataagaaaactgaggcactaaaaattta

SEQ ID NO: 403426 - DNA, 593 bp, Homo sapiens
ttgctggcctgacacctatagtgtggttagaaaagatcaatttggccaatccattcttgtttcacaatactagttcattaaacaagggatcatgcacactagtttgtgtgattatcatgctagggcgtatgcagactcatgacaaagagagaaagcaaattgataatgggaaacaacaacacagaaggctcattcagaaaaggagaggcaggagagtccttgagactctgagacatgagtcttagctcttgactttactaattttggttttatttcacatgaaatttgacagtacctcagtaactgttcctccactttacaataactcttytaacctgagcgactctgagtgggtttttattccttgttccaataaaaagctgtggctgtgatattcctttagtttaaatatagggataaatagaaatattacattagtaaaatagcatcgatgaagatgaatgcagagctgctttggaagaataaaaatgaaataaacaacttactttaacctattagtctcgtcaagaaaaaaaaaacctttccgtggtaatctcatttaccatcatgtattcaacaactatagatgtata

SEQ ID NO: 403427 - DNA, 593 bp, Homo sapiens
ttgctggcctgacacctatagtgtggttagaaaagatcaatttggccaatccattcttgtttcacaatactagttcattaaacaagggatcatgcacactagtttgtgtgattatcatgctagggcgtatgcagactcatgacaaagagagaaagcaaattgataatgggaaacaacaacacagaaggctcattcagaaaaggagaggcaggagagtccttgagactctgagacatgagtcttagctcttgactttactaattttggttttatttcacatgaaatttgacagtacctcagtaactgttcctccactttacaataactcttctaacctgagcgactctgagtgggtttttattccttgttccaataaaaagctgtggctgtgatattcctttagtttaaatatagggataaatagaaatattacattagtaaaatagcatcgatgaagatgaatgcagagctgctwtggaagaataaaaatgaaataaacaacttactttaacctattagtctcgtcaagaaaaaaaaaacctttccgtggtaatctcatttaccatcatgtattcaacaactatagatgtata

SEQ ID NO: 403428 - DNA, 641 bp, Homo sapiens
ctcatttgatttttagccattgccattctaagtttttgtcatctacagataatggcattgactcatctctataaatgttttgcaattagctacagcgcgaaattgcttcttcaaaaaatttatggtaaggactctggcaggtactctgaaacactttctgatgactttaaaccatattattagactgggtaagatttctagaactctaataataattttttaacaaaggactcataaaactgctaacccaacatctagttttatgagcccaaaatttgcattaaagaaataattaattatctgataagaagaaagaaaaattaattatgtgggactgaactgatgaaggactatattttatgacttttgtttgaaacattgctgtttctttttgtgttttgttttctagawttaaggaaacttttttcttttaagctttctatagcttacagcaatctggtaacatatgcttttataaacagaatttaaacatttatatttttctccctgcctaatttatccaaaatatggaaaccattcatcagtattcttactttatggcaatatttttatccacataagttcaataagaatctctgctctttgtaacaggacaattggtaacactggttacattacca

SEQ ID NO: 403429 - DNA, 641 bp, Homo sapiens
ctcatttgatttttagccattgccattctaagtttttgtcatctacagataatggcattgactcatctctataaatgttttgcaattagctacagcgcgaaattgcttcttcaaaaaatttatggtaaggactctggcaggtactctgaaacactttctgatgactttaaaccatattattagactgggtaagatttctagaactctaataataattttttaacaaaggactcataaaactgctaacccaacatctagttttatgagcccaaaatttgcattaaagaaataattaattatctgataagaagaaagaaaaattaattatgtgggactgaactgatgaaggactatattttatgacttttgtttgaaacattgctgtttctttttgtgttttgttttctagatttaaggaaacttttttcttytaagctttctatagcttacagcaatctggtaacatatgcttttataaacagaatttaaacatttatatttttctccctgcctaatttatccaaaatatggaaaccattcatcagtattcttactttatggcaatatttttatccacataagttcaataagaatctctgctctttgtaacaggacaattggtaacactggttacattacca

SEQ ID NO: 403430 - DNA, 588 bp, Homo sapiens
atatgtaaatattaacaactggaaaaaaataacagagggagatcaaacaggttcgtcaaaaggagggagctagggaattaattttcttttcattctaccttttttaactttatttttcctgttaatttggccgaaaactaaattccaaaccatttaattagttcaagaatggctttgctttttttaaaagaaaacatacacagcctctaccaaaacactgcattgtaaatatatcattcatatattacttgaaaaataatctatttaatatttgtattagccagggttctccagaaaaaacagaaacaatcggatayagacagataagataggacttacaatatgaaatagctcacataattatggaggctgaacagtcccacaatatgtcatctgcaagctggagatccaaggaagctgccagtggaattcaggctgagctctataggaccctacttctggagtgtaaagttgtcctaagaagacaatctttaagaactgatgttctaatataatctcctccttccacacacaagacaatgtgactcagaccctcacatgggagataagtgtctggccccaggttac

SEQ ID NO: 403431 - DNA, 476 bp, Homo sapiens
caggttatgctatagtacaagccactagcccrcctcttagaacctctcatttcctttccattgtggaaacctatcctcaaggaaataacttctcagtgttccatctgctattctactactcctcagggattcttcaggccccctcccttccctacacatcaagctcgaggatttgccccacccaggactggcaaattagctttactcaacatgccctgagtcagataactaaaatacctcttagtctaggtagatactttcactggataggtagaggcctttcctacagggtctgagaaggccaccgcagtcatttcttcccttctgtcagacataattcctcagtttagccttcccacctcaatacagtctgataacagaagggcctttattagtcaaaacagccaagcagtttttcaggctcttagtattcagtgaaacctttatatcccttatggtcctccgtcttcaagaaa

SEQ ID NO: 403432 - DNA, 476 bp, Homo sapiens
caggttatgctatagtacaagccactagcccacctcttagaacctctcatttcctttccrttgtggaaacctatcctcaaggaaataacttctcagtgttccatctgctattctactactcctcagggattcttcaggccccctcccttccctacacatcaagctcgaggatttgccccacccaggactggcaaattagctttactcaacatgccctgagtcagataactaaaatacctcttagtctaggtagatactttcactggataggtagaggcctttcctacagggtctgagaaggccaccgcagtcatttcttcccttctgtcagacataattcctcagtttagccttcccacctcaatacagtctgataacagaagggcctttattagtcaaaacagccaagcagtttttcaggctcttagtattcagtgaaacctttatatcccttatggtcctccgtcttcaagaaa

SEQ ID NO: 403433 - DNA, 476 bp, Homo sapiens
caggttatgctatagtacaagccactagcccacctcttagaacctctcatttcctttccatygtggaaacctatcctcaaggaaataacttctcagtgttccatctgctattctactactcctcagggattcttcaggccccctcccttccctacacatcaagctcgaggatttgccccacccaggactggcaaattagctttactcaacatgccctgagtcagataactaaaatacctcttagtctaggtagatactttcactggataggtagaggcctttcctacagggtctgagaaggccaccgcagtcatttcttcccttctgtcagacataattcctcagtttagccttcccacctcaatacagtctgataacagaagggcctttattagtcaaaacagccaagcagtttttcaggctcttagtattcagtgaaacctttatatcccttatggtcctccgtcttcaagaaa

SEQ ID NO: 403434 - DNA, 476 bp, Homo sapiens
caggttatgctatagtacaagccactagcccacctcttagaacctctcatttcctttccattgtggaaayctatcctcaaggaaataacttctcagtgttccatctgctattctactactcctcagggattcttcaggccccctcccttccctacacatcaagctcgaggatttgccccacccaggactggcaaattagctttactcaacatgccctgagtcagataactaaaatacctcttagtctaggtagatactttcactggataggtagaggcctttcctacagggtctgagaaggccaccgcagtcatttcttcccttctgtcagacataattcctcagtttagccttcccacctcaatacagtctgataacagaagggcctttattagtcaaaacagccaagcagtttttcaggctcttagtattcagtgaaacctttatatcccttatggtcctccgtcttcaagaaa

SEQ ID NO: 403435 - DNA, 571 bp, Homo sapiens
gtttaaaagttttatttattattaatcatattttaattgttgacacattgaaaatcatagaatcaaatagcacctgcaatctaacaccaccacctagagttacacacaataaaattttagacttcttcccattatttttctgactacttttccttcatgtcattgagttaatactatatcttatactgtgctttttgccagtktatgtaactagcattttaagtaattctgtgaacttgaagtatttttagcaaactctaaatcttttttacaaacataattttcataattatcatatgaaattatatttcatggtatactagaccatgctataatgttgggtttttttagtcggttttggtattctaaatataattattacaaaaacaattataagaaagttgtcttcataaatctctctcctcatttaaaaggataatttggtacagaattcacagaagaaagaattttatttaatgaacagaatttttattgaataaccagagttcaacacttgcatgatgacaagataagcatgttaggcccctgcaagtgaatgtacaaaagcata

SEQ ID NO: 403436 - DNA, 571 bp, Homo sapiens
gtttaaaagttttatttattattaatcatattttaattgttgacacattgaaaatcatagaatcaaatagcacctgcaatctaacaccaccacctagagttacacacaataaaattttagacttcttcccattatttttctgactacttttccttcatgtcattgagttaatactatatcttatactgtgctttttgccagtttatgtaactagcattttaagtaattctgtgaacttgaagtatttttagcaaactctaaatcttttttacaaacataattttcataattatcatatgaaattatatttcatggtatactagaccatgctataatgttgggtttttttartcggttttggtattctaaatataattattacaaaaacaattataagaaagttgtcttcataaatctctctcctcatttaaaaggataatttggtacagaattcacagaagaaagaattttatttaatgaacagaatttttattgaataaccagagttcaacacttgcatgatgacaagataagcatgttaggcccctgcaagtgaatgtacaaaagcata

SEQ ID NO: 403437 - DNA, 507 bp, Homo sapiens
aatactgagtgttaatttactttagaacttagacagattcttcagttgaaaacttttagttagagccaaagcctcttctttgactagagatccattgatcagagttctacctcttgatcttttgcataaaccacacccataatttataatataagatgctaatttattcaagatgaagcaaactgtttgatatgcamagcactctaaatgcagactccatcactgaaaatgtttgtaaaacacatttcttattgatttttccaattctcaaaatgtttttggctaatttgatagcaatatttttcttaggaactcatacataaaattttctaaaaatgcattaaatttagattttattgtaaaaataagtttcatttcacattcatatcattaggttacttactatttaatgctttgagtagtcatattagttagtaaaactggcttaataagggttggaaacaactgcaactaattcttgataagaatcaacaccaaaggagggaa

SEQ ID NO: 403438 - DNA, 403 bp, Homo sapiens
ggcatgaggactttggttatctattgatgacaaaaaaaggatatgtgcaattcaggtacattttctaaaatgttgataaattgatggagaaagacratttcttctatgccacagttttcttggaatagcctaatccaatgggatatcaagaatgtaataaacctaggtgtgaaaataattagaacagaggttgagttgtatggcataagaccaactggtaagcacagatcatggaatctctatgattgaggtgagtctatttgatgtacagtgtatattttcctaaagatgtccccacatggattttaaagatcaatgctaattcatgtcaccaaaaatactccagaaaccagattgcaaatatgtacactagtatgtttgactggtatattctgttataaca

SEQ ID NO: 403439 - DNA, 379 bp, Homo sapiens
tattttttgaaatttccaccatttagaacccattattctaagaggattgattaattttataaactgcttccacagtaagggaagtgattgaaaaaaaataaataaatgactgggcttttgtttttctgaatgggatgtgcaactttgagggtaaaaacttaaattgctcagaatgatagaggggacttgtttttaaaagctagaaaaatagaaagaggaagaatgaaaaaatggcagttcagaatagagatatttatttatttatttatttggagaaagagtctggctctgtcgcccaggctggagtgcagtggcatgatctggactcactgcaacytctgcctcctgggttcaagcaattctcgtgcctcagcctccc

SEQ ID NO: 403440 - DNA, 560 bp, Homo sapiens
tgaaatatagacatgtagatactgttgagttgtgactgcaggttaaaaatgtgcgtgtagccattaaaataatatcacttaaatatatatccctgcattgatcaggatttgccagagaaacaaaaccaacacagtgtgtgtgtgtatacgtgcgtgtgtgtgtgcgtgtatgtgtaaagaaagagagagagagatttatattaaggaattggctcatgtgattgcagagatttgaagaatccaaataaaatggggtagatcagcacgctggaggctcgaggacaagttgcaattgaagtctaaatgcagtctgctagctgaattccctcttgttctggaaaggtcagcttttgttctattatggccttcaactgattatatgaagcccacattatgatggaggacaatctactttacttaaaatccacagatttaaatgctattctcatctaaaaagaaaagcatctttayggaagtatctggaataacgtttgactaaatatgtaggcagcatggctctggcaagttgatgtataaaattaaccatcaggatgcccaaa

SEQ ID NO: 403441 - DNA, 637 bp, Homo sapiens
cagcatggctctggcaagttgatgtataaaattaaccatcaggatgcccaaactgttagtgaaaacaaaaaagaaacataaaattaacacagtaagatacaggaacttgggagaaacatgaaattaactaactgcatgatttaaaaaacactaacataatccaaatccaaatataacattaaaatatctacaaattgacttaatagtcaaaattcagaagaatttcaagctcagcgacataatgaataaaataatctgaaagctcttcctgttayacacaactaaatccttcataaaaatgctttttattataacactgcattttcttggataaaaagtaaatcttctagggtcagccacatacatcacctataaaaaaataaagctgagttcaaaatggttggcaataaacatgcttaaaagaaagagttgtctgaggacaaaagactaaataaactctgccaaaataggaataatcatgaggtgagtgcactatgaaggtgcagaatttgagatttctatattgggccagggatcttaaaatggagataaattgatctgaggtttgttgcactcttatcttacaggaaaataaacaaaaattaaaatcagccatgtatgaattcacaacctaaga

SEQ ID NO: 403442 - DNA, 637 bp, Homo sapiens
cagcatggctctggcaagttgatgtataaaattaaccatcaggatgcccaaactgttagtgaaaacaaaaaagaaacataaaattaacacagtaagatacaggaacttgggagaaacatgaaattaactaactgcatgatttaaaaaacactaacataatccaaatccaaatataacattaaaatatctacaaattgacttaatagtcaaaattcagaagaatttcaagctcagcgacataatgaataaaataatctgaaagctcttcctgttatacacaactaaatccttcataaaaatgctttttattataacactgcattttcttggataaaaagtaaatcttctagggtcagycacatacatcacctataaaaaaataaagctgagttcaaaatggttggcaataaacatgcttaaaagaaagagttgtctgaggacaaaagactaaataaactctgccaaaataggaataatcatgaggtgagtgcactatgaaggtgcagaatttgagatttctatattgggccagggatcttaaaatggagataaattgatctgaggtttgttgcactcttatcttacaggaaaataaacaaaaattaaaatcagccatgtatgaattcacaacctaaga

SEQ ID NO: 403443 - DNA, 578 bp, Homo sapiens
aaataaaacagaagatttttaaaagaactaaatggaactagtagaaaggaaaaatacaatatctgaaacaaaaacttcacttgatggttttagtagcagactgaacatggcaaagaaaagaccaatgaatataagttaatggccatggaaataatacaaaccaaagcatagacaacaaaaaggtagaaaattaaaacaaaaattaaaaattaaaaagaaactaagagattctggcctgcgggaaaatataaagcagtttatcataaaatatgagtccaagaagaaaagagacagaaaatatattataaaaaataatagctaaattttccaaaatcgataatgtctacaaaaccagagattcaaaaagctcagtaaaagaaaacctggataaaacaaaacaagaaaacacayaagggaacatcataatcgaattgacaaaaaaacagtgaatcagagaaaaaaattcattacatgaagtggaacaatgtaaagattaatcagtaatttttcatctgaaaaaaatccaagccaggacacataaaaaactgacatatctgtagctgagaaagaaaaaaaaa

SEQ ID NO: 403444 - DNA, 562 bp, Homo sapiens
ttaacaatgtttacagcctattcacaaggagtagagtccatctcaagaaactactttctttgttcatccataagaagctacttctctgttaaagttttatcatgagattgcagcaattcagacacagcttcaagctctacttctagtactagttmtcttgctattttcattaaatctgcagctaccttctccatggaagttgtgaagccttcaaagtcatccacgagggctggaatcaacttcttccaaactcctgttaatgttgatattttgacctcttgccatgaatcattattgttcttaatgacatgtaaaatgatgaatcctttctagaaggttttcaattcactttgcccagatccatcagaggaatcacaatctatggaagctacaaccttacaaaatgtattttttaaataataagacttgagagtcaaaattagtccttgattcatgagctgcagaatggatgttgtgttcactggcatgaaaaccacactaatcttgtacatctcccatcagagtgcttgggtgatcagtggcactgtcaaggaacagtagt

SEQ ID NO: 403445 - DNA, 454 bp, Homo sapiens
tctctgctactagagggtgtatttcttctaggcagtctctttacgggtactttataggacctaggataatgcatttgatctggtcaacactcaaattgtatttgtgcctttactgtgtgctatgttgttttttgattcttatatgtctcatgtttttctgtttgacttcttttagagcatctgtgacaggtagtttgtacctaaattacgggaaggagaacagaggatttgggcagscaagcaaactattgtttccactttagagccaaactttcctaaatgtttaaagtatgttgcatgtaatgtgataaatcctccatcaaagatccattaaagcacgattgcaattctttaacttccattgtatctaaagatattacccagattgataacgtgttagacctatgattataagaattgactgcaaattgcctttttaattatgcttcattca

SEQ ID NO: 403446 - DNA, 454 bp, Homo sapiens
tctctgctactagagggtgtatttcttctaggcagtctctttacgggtactttataggacctaggataatgcatttgatctggtcaacactcaaattgtatttgtgcctttactgtgtgctatgttgttttttgattcttatatgtctcatgtttttctgtttgacttcttttagagcatctgtgacaggtagtttgtacctaaattacgggaaggagaacagaggatttgggcagccaagcaaactattgtttccactttagagccaaactttcctaaatgtttaaartatgttgcatgtaatgtgataaatcctccatcaaagatccattaaagcacgattgcaattctttaacttccattgtatctaaagatattacccagattgataacgtgttagacctatgattataagaattgactgcaaattgcctttttaattatgcttcattca

SEQ ID NO: 403447 - DNA, 611 bp, Homo sapiens
gtgtattgcattacatttggaaggaatattggttataatattttaaaaataatttttgcctctattctcaataatagtagaggtttttatttttattttatttttatttatttattttttttcctggagtctcactctgtcacccaggctggagtgcagtggcgctatctcggctcactgcaacctccacctcctgggttcacaccactctcctgcctcagctacttgagtagctgggactacaggtgcctgccaccatgcctggctaattttttttttgtatttttagtagagacagcatttcacatgttagccaggatggtcctgatctcctgatctcgtgatctgcccaccttggcctcccaaagtgctgggattacaggagtgagccaccaygcccagccaatagtagaggttcttatggccagttttctttatgccagtattggtgctaagcatgtcacacataatttattatttaatcatcacaatcctatgaaatagcaattaaaatattgttctaaatttgcatatgaggaaactgaggtttagcgaggttaggtcatttttctgaggaatacacaactaatgacaggcggggccagaattcc

SEQ ID NO: 403448 - DNA, 596 bp, Homo sapiens
ctaaattaaccatagaccacagagatctttcttgccacaattatgccattctctggcaagtactaatggcaaaattataatctttcctcttgtcaaaactcattccttctgccttgactaatgctggataaaactgaacgaggtgtaggaactcataaagggcaaattctaaagtcactttagcatgttctaacatattgcttgttgtgtaccaaccccatatggcctaacaatgggtgattctttgtagacatgtctattgtagtcatacttaagagaaatattcaatrttacgagacatgtcttcaagatattttgatctactttattgttctttgattttacaaggtcaactatgcttttctccccagaagataaaatggcttcaatctctctttaaatcatgattttggcgtctaccccaaaacatcttggaaagtgaagtgtttcttctttggctgaatatttaaaagacagttattggctattttagcttggatagaggtaaatctataaattcttaagccttagtaaaaacttacacagaagagatacataaaattctttgtgggttgtttgcttcccaataaacagag

SEQ ID NO: 403449 - DNA, 561 bp, Homo sapiens
cttatctccgctctccaagttagcattccacatcagtatagattttagagaaagacaagagaaatcctgtgaattctgaggttcccggcactaagtcacctctgattttattgctctgcctgcccagaatggctggagagcttgcttcaatatgaatgcaaagtcagagttgccgcctgctagctgaaccctctttaatttaaagaacactgacttctytggcagccacaagttctgtgagcctttttaccatcccttccagctgaatttcatttggcttgattctagctggccttatataaatcttttatcatataaaaatgctcctgattcttttgcttcctaacttgaagaagaaaaaaaaaagagcccatatgaaaatgatggggatgcatgcaaacaagcagtggttacatcaagctgtgactgaaagccagtatagggcaactcttttgaaatcaggcagcaaagcagaatcagaagaggtcggctgaataacctactagcagccactaacagcagtaccataggagaaagagcaatttgactggctgtgaccag

SEQ ID NO: 403450 - DNA, 568 bp, Homo sapiens
gaatctgcagtttgactccccaaataatttgccataaatgtcaacatcccctctctttcttgccaccatggtccatgaataacaagtagcactcataagctgccaggaatggacagaagaataaatgggtctttgagcttcagtccctgtactcaggrccattgattagtttgtgtagcctacaagaaacaaagcctacctttctaaggagtgaaggaagttagagacgctattccgcaggctcacatctgccacgtggagggcaccacacacaacccccaacatggtgtcaggtcgctcagcctgaaaggaggaaaaagagggcagatcaaatgcatggtcacttggcaccacagcctctcaaatgaaatcaggctcaaatttgttgtgatgaaacagctagcaatgaaaatctccattctcactgcccaactgattttttagataaaaatgaacacattcacttttagaatttgattagaggcaccacttgaagagaaatgaaaaacaactttcttcttttctccctaagacttccacttagccaatcattgaatagctcaaaaat

SEQ ID NO: 403451 - DNA, 614 bp, Homo sapiens
tgtttgagtaagatctacttacagcctgccatcgtaatgtgtggcttgtggtttgggcgatttcctatacttgcttctaaaatgaaamaacgtgtcctaaagtaaagtaaagtgcacttgaattagcaccagtgtgtttgaatttggtatctcataggagtggggccagagaggacttgacttagcaataccactagaatccttttggccataatcccttgggtttgctcagatcattcttgaccatggcagccttaggcaaaatttgagttcagttttccttttctgtggagtattctttcatcactgggccactcctttggttaattgccaactcaatgcactatgccatccagctttgggttggctgaaaaatttggacagtgtttgtcaagacgaagagaaagtgaggtgtgggttccaaaagtgcctgagaccaaaagagccaaagacagtgtaaaataaaagtcttagctttttggtgttctcttttatttggagacttgagaatttaggcaataaatatttattaggtacctatcatagacaaggcactagctacatactaaagatgtatcagtaagcaagaaaatatactgccctcacctgcaaaa

SEQ ID NO: 403452 - DNA, 554 bp, Homo sapiens
taaaagtaaaagagtgagaaaatatatagtacgcaaatgcaaatcaaaagaaagctggcatattaatagtagaaaaagtagattttgaaacaagaggaattacccatgataaagaggagattatgtagttataaatgggtcaattgagctagaaagctctcaartaattaatataaaatttcaccttaagaaactagaaaaataaaagcaaactattcaaaaagcaaacacagggaagaaaataataaagataagaataaaaatatatgaaatccaaaatggaaatatatcaaaaacaggacaagataagaaaatcgatgaaaccaaaaattggttctttggaaagatcaatacaattgataaacctctatccaggctaaccaaaagaaggagtatggaagaagtgatgttggggagatggagggagaaaaagagaggataagagagataggacacaacttgccaagagcagtaatgaaagaggcaatatccctacagaccctacagatattagaagggtaataaggaaatgctgttaataaccctgcctgtaa

SEQ ID NO: 403453 - DNA, 327 bp, Homo sapiens
tttaatcccacacatgtaacaccttttactttctttctagtccatcrtaggaaccagaaaatttgcctttgttggagggaggaacaaatgaagcatgcaaatgtagtgacaggctcaccggccaccctccttaatccatgaaactgaaggccacaccctaacggcacaggccagggaactttaaggatcttgggtctggacttcatggagcagagcttctgtaacagctgtgatctgcctacctctgccctgtgcttgtgaccgtcaaaacttctgtctagtttaagctactcttacttgggtttcccttactcatgaataaaccta

SEQ ID NO: 403454 - DNA, 605 bp, Homo sapiens
accagtgaggaaactggattcactgaggttaaataacttatcccaagggaggctgggagaaggtatgtcatggtgggtcctgcaggccaggctgaagggtcgtctggaatgtgctcagttgtttgcttcttctctccagcctttccacgattcttcctcttgtgcccgggccattctgctcccttctctccaccccagtacacacaagagactagagtcaggcgccctgtggtccacagagtatttctgtttgaatggaaaagacagtgggctacccatgcccaaccctgttcgctccaatcctcactaactaggtgctttcctggcttcagagcaacactaacattcccatgaccccaagcaaccaasgcagctgggctggggacaacaggatatgatacccagggacatctgatccacacactctgctcccaccaggaaacttccaggctgggattatctgtccacttttgtccatttgtataattaaaaatcgagtctgacatctgtgacctgctcaagatttcctagagcctacctactctaaaccttagtttaatgtacattctaccaagccacatcatgtcgagaaaatgaacagattt

SEQ ID NO: 403455 - DNA, 504 bp, Homo sapiens
tattccaaggggagggctccttctccagtgccctcttgagtggagccaaatgctgagaccagctcagtcgtggagaccctaacccagcagcactagaggaattaaagacacacacagaaatatcgcatgtggagtgggaaatcaggggtytcacagccttcagagctgacagccccgaacagagatttacccacatatttactgacagcaagccagtgataagcattatttctataggttgtagattaataaaaagtattccttatgggaaacaaagggatggcgctggctagttatctgcagcatgaacacattcttaaggcacagatcgctcatgctgttgtttgttgtttaagaacgccttaagcggttttccctgcgtggaccaagtgttccttgacctcattccggtaaaccgacaactttcagtgtgggtgtcaaggccatcacgagcatgtcacagtgctgcagagattttgtttatggccagttttggggccagtt

SEQ ID NO: 403456 - DNA, 504 bp, Homo sapiens
tattccaaggggagggctccttctccagtgccctcttgagtggagccaaatgctgagaccagctcagtcgtggagaccctaacccagcagcactagaggaattaaagacacacacagaaatatcgcatgtggagtgggaaatcaggggtttcacagccttcagagctgacagccccgaacagagatttacccacatatttactgacagcaagccagtgataagcattatttctataggttgtagattaataaaaagtattccttaygggaaacaaagggatggcgctggctagttatctgcagcatgaacacattcttaaggcacagatcgctcatgctgttgtttgttgtttaagaacgccttaagcggttttccctgcgtggaccaagtgttccttgacctcattccggtaaaccgacaactttcagtgtgggtgtcaaggccatcacgagcatgtcacagtgctgcagagattttgtttatggccagttttggggccagtt

SEQ ID NO: 403457 - DNA, 597 bp, Homo sapiens
cctgtccgtcctgctgcaactcttgaagactgtagtactgatgtggcagatgggaggattaaagaagagtgattccaacacaataataggaaaaaatgcagcatttggccaaagacaggatatagcctcaaaatcctggtgggaggagaggaggggagcagcatcacagtaggcaggcaggtaacttgcctggcatgtggtggtgagtcagcaaatgggaataaatcagtggcctataaagagggtcctacccctcaccatcctcccagaacagaaggtgctttccacagctcacagctgctctgctcagctgaacagcccatgggtgaaggaagtgaggaacaaaagtcaaagagaaaggcagatgagttgagggccatttaaagaagttgtgaacagtaaaccaagccccggtgaactctacatgtgtgttgacctctctcaacctagacctgctggcactaccctggaaccataaaagttcatggctcctgagtccrctcagcaaatccctattcacccaggaacattcatcacctttcttccaaaagctttcatgacaccaggtagagctattttcttctcctcatacacaga

SEQ ID NO: 403458 - DNA, 631 bp, Homo sapiens
aagaaaccactcccccaaattgtatttagcttgtaagtttaccaggcagtggcccaggagggggtcttctgggctgaactagactgatcttggctggttttgctcacatgtgtgtgatcaggtggtagcgaggctgagagayggtggggaaagtctaggatagctttgctcacctgccaggtggttgactgcctgtcagctggagggaaagaggggactgagccatgtgtctttttttttttcctcctgacaacaaaagccacattcaaatgagccacgtgtcttacacatgtggtagaagcagggtttccagaagcagccaacaccagtctgcaagtgccttccacacttctgctggtgtcatggtagctgctgtggcatccatgagaagaacctggcagacctccaactccagggactgcgcctgactgcatgagtgtactaggatggctggaacaaaatacagttgtccctcggtatccatggctattggtttcaggaccccaaggatacaaaatccacaaatgctcaagtccctgatataaaatggcatagtatttgcatatcaccccacacatcctcccatctactttaaatcatctccagattacctataatacctgatgcgttg

SEQ ID NO: 403459 - DNA, 623 bp, Homo sapiens
actgcttggaaacatcttgttaacaaggcacgtcctgcacagccctagatcccttaaaccttgatttcatatgacacatatttttgtgagcttcaggttgggtcaaagtggctggggcaaagctacacattaacaacatctcagcaaagcaattgttgaaagtaaaggtctttttcaaaatggagyctcttatgtctttcctttctacatagacacagtaagagtctgatctcactttcttttgcctacactcactgaactgtccttcccctctgctgggccatgaccacggagaacaggtccactgtcctccctgcatggtgcacgatggaggatcagactccgtcctcaaggctggcaagaagacagggtgagacatgagcctcctgatacaggtgacgggtgtggagcccacaggactggaacctcacactgcagggctggaagcacagactgagtatttactgttctgtggcctggggggttcaagacacagagctcctcattagccaaagtcacccaagttccccagcctctaaggatttcctcataataatgcaagaagaagaagagaaaagtgagtgtccatagaagttttggggctcttcttctaatcaggagaa

SEQ ID NO: 403460 - DNA, 623 bp, Homo sapiens
actgcttggaaacatcttgttaacaaggcacgtcctgcacagccctagatcccttaaaccttgatttcatatgacacatatttttgtgagcttcaggttgggtcaaagtggctggggcaaagctacacattaacaacatctcagcaaagcaattgttgaaagtaaaggtctttttcaaaatggagcctcttatgtctttcctttctacatagacacagtaagagtctgatctcactttcttttgcctacactcactgaactgtccttcccctctgctgggccatgaccacggagaacaggtccactgtcctccctgcatggtgcacgatggaggmtcagactccgtcctcaaggctggcaagaagacagggtgagacatgagcctcctgatacaggtgacgggtgtggagcccacaggactggaacctcacactgcagggctggaagcacagactgagtatttactgttctgtggcctggggggttcaagacacagagctcctcattagccaaagtcacccaagttccccagcctctaaggatttcctcataataatgcaagaagaagaagagaaaagtgagtgtccatagaagttttggggctcttcttctaatcaggagaa

SEQ ID NO: 403461 - DNA, 623 bp, Homo sapiens
actgcttggaaacatcttgttaacaaggcacgtcctgcacagccctagatcccttaaaccttgatttcatatgacacatatttttgtgagcttcaggttgggtcaaagtggctggggcaaagctacacattaacaacatctcagcaaagcaattgttgaaagtaaaggtctttttcaaaatggagcctcttatgtctttcctttctacatagacacagtaagagtctgatctcactttcttttgcctacactcactgaactgtccttcccctctgctgggccatgaccacggagaacaggtccactgtcctccctgcatggtgcacgatggaggatcagactccgtcctcaaggctggcaagaagacagggtgagacatgagcctcctgatasaggtgacgggtgtggagcccacaggactggaacctcacactgcagggctggaagcacagactgagtatttactgttctgtggcctggggggttcaagacacagagctcctcattagccaaagtcacccaagttccccagcctctaaggatttcctcataataatgcaagaagaagaagagaaaagtgagtgtccatagaagttttggggctcttcttctaatcaggagaa

SEQ ID NO: 403462 - DNA, 573 bp, Homo sapiens
tctagcccctgctgaatgccaagcactgggctggaactctggggactgtggaggtggaataggagaatatgggctttctgtgagcagtgwttgcctaaaatatatacatcaaggttgtaggatcatgtgcaccactgcactctagcctgggcgcagagtgagaccctgtttcaaaaaaataaaaaaattgtaggatcatggagaaagtgtcttaagtgtttggtgctgtggacaggcaacacaggcagaaactggtggctagggaatcagagaagttttcaggagggagcatttgacttgggcttggactgagcatcacagggcaatatagaaacaagtttatggataattaactgaattggtggcagttgataacttgaatcttccttcagatgattgaagttagtagcccagctatgaaagtctaggttacagatgtctcagccagagcttgcgtatgtgggatgaggctcatacatatgcagacttgggctcctgccaagatatgagagttttggtcagtctgcatctcagttctaatacctctgcctaaatacttgagtccagagtggt

SEQ ID NO: 403463 - DNA, 444 bp, Homo sapiens
tgtgagcagtgtttgcctaaaatatatacatcaaggttgtaggatcatgtgcaccactgcactctagcctgggcgcagagtgagaccctgtttcaaaaaaataaaaaaattgtaggatcatggagaaagtgtcttaagtgtttggtgctgtggacaggcaacacaggcagaaactggtggctagggaatcagagaagttttcaggagggagcatttgacttgggcttgractgagcatcacagggcaatatagaaacaagtttatggataattaactgaattggtggcagttgataacttgaatcttccttcagatgattgaagttagtagcccagctatgaaagtctaggttacagatgtctcagccagagcttgcgtatgtgggatgaggctcatacatatgcagacttgggctcctgccaagatatgagagttttggtcag

SEQ ID NO: 403464 - DNA, 444 bp, Homo sapiens
tgtgagcagtgtttgcctaaaatatatacatcaaggttgtaggatcatgtgcaccactgcactctagcctgggcgcagagtgagaccctgtttcaaaaaaataaaaaaattgtaggatcatggagaaagtgtcttaagtgtttggtgctgtggacaggcaacacaggcagaaactggtggctagggaatcagagaagttttcaggagggagcatttgacttgggcttggactgagcatcayagggcaatatagaaacaagtttatggataattaactgaattggtggcagttgataacttgaatcttccttcagatgattgaagttagtagcccagctatgaaagtctaggttacagatgtctcagccagagcttgcgtatgtgggatgaggctcatacatatgcagacttgggctcctgccaagatatgagagttttggtcag

SEQ ID NO: 403465 - DNA, 444 bp, Homo sapiens
tgtgagcagtgtttgcctaaaatatatacatcaaggttgtaggatcatgtgcaccactgcactctagcctgggcgcagagtgagaccctgtttcaaaaaaataaaaaaattgtaggatcatggagaaagtgtcttaagtgtttggtgctgtggacaggcaacacaggcagaaactggtggctagggaatcagagaagttttcaggagggagcatttgacttgggcttggactgagcatcacagggcaatatagaaacaagtttatggataattaactgaattggtggcagttgataacttgaatcttccttcagatgattgaagttagtagcccagctatgaaagtctaggttacagatgtctcagccagagcttgcgtatgtgggatgaggytcatacatatgcagacttgggctcctgccaagatatgagagttttggtcag

SEQ ID NO: 403466 - DNA, 582 bp, Homo sapiens
gtgaaaatgccctctagccacacaaggaaacaggactcagggacaaaggacctgtgccctgaccaaggcaatgcgtccctcaccatatatgcagtrgtgcatcctttcctgttgactttttgatcagcaattaagactttagtcttttttgttggtgtgcaaagttattttcttaatggccctccagcccagccatcacaaaaatgctttccagctctcagggagaacatttctgatgcacgctgaatccagaattcaaaggaagcaaaataaaggcaccaggggctcttatgagactgagtgactcaaaatagagggaatgtggggacttggggcataagattgatcatgaatcaccaaatagaaaaaccctgggatggctttcaagaagaatcctccttgaggttttaactttcacctacaagcaagttttctcactgctcagtacagcaaggtaaggacagcagcctcacagcatcagtctgaggatagaatgggttaatgcagccgggcacagtggctcatgcctgtaatcccagcactttggaaggctgaagcaggtggatcatgaggtcaagagat

SEQ ID NO: 403467 - DNA, 582 bp, Homo sapiens
gtgaaaatgccctctagccacacaaggaaacaggactcagggacaaaggacctgtgccctgaccaaggcaatgcgtccctcaccatatatgcagtagtgcatcctttcctgttgactttttgatcagcaattaagactttagtcttttttgttggtgtgcaaagttattttcttaatggcyctccagcccagccatcacaaaaatgctttccagctctcagggagaacatttctgatgcacgctgaatccagaattcaaaggaagcaaaataaaggcaccaggggctcttatgagactgagtgactcaaaatagagggaatgtggggacttggggcataagattgatcatgaatcaccaaatagaaaaaccctgggatggctttcaagaagaatcctccttgaggttttaactttcacctacaagcaagttttctcactgctcagtacagcaaggtaaggacagcagcctcacagcatcagtctgaggatagaatgggttaatgcagccgggcacagtggctcatgcctgtaatcccagcactttggaaggctgaagcaggtggatcatgaggtcaagagat

SEQ ID NO: 403468 - DNA, 597 bp, Homo sapiens
accttttaaaaaaagaagatcgttgccaaaatgtgtcaattccagttttaaaaatcacatgaagccctgactctgtgcctggcaccaagttaagtcctctatggggagtttgtgtttaaatggagtggacagatgcaaacaagatggagcggtaaggccactgccattatcaaggtgcgaattaaggtctgagcaccccagaagatggagcggtcctgatggaagatgcctcagcacataccttgcttggaaaaaggacccctctggaaagactgcagggkcgtatcagcatttgacagaacctatgtggtcgtctctgcctgccctgcctgccctccctctctatcccgcattctccctgcactgcagccatctggagccacaggcagctgccccctgccccacacgcacaaacacacacacacacacacatacacacataaatacacacacacacacacgcttcatggtctcagcctttgcatgtgctatttcccctcttgcaacaaccacccttattcatccatttgaggtgtggcttctcatcttcaaaaagtcagctcatactgcatcttgagactttcttagaaacagccc

SEQ ID NO: 403469 - DNA, 616 bp, Homo sapiens
ggattacacagcagtgaaccacaattccacttcctatcagtttgactccagagccagagttcttaaggtctacaataggcaactaagctaaaggcaggtcccaggtactaagggagcacagaggagatgtgtgtctgggtgaatggatgtcaggttacctagaggaggtacaacttagactgatttctaaatatcgagtcagagcaagcagagccaccaagtatgggttctcagggtgtgcactgcacaagaagacatttctaaagacacagcatcccatctgagacagacgctaacctatggccatttctaaagacacagcatcccatcttagacagagagtaacctatggccatttctaaagacacagcatcccatcttagacagagagtaacctatggccatttctaaagacacagcatcccatcttagacagagagtaacctatggccatttctaaagacacagcatcccatcttagacagatgctaacctatggccatwtctaaagacacagcatcccatcttagacactaacctatggccatttctaaagacacagcatcccatcttagacagagagtaacctatgggcatttctaaagacacagcatcc

SEQ ID NO: 403470 - DNA, 549 bp, Homo sapiens
ggtccacccctctagctgttagctgtgaagaaaacaaagcaacttaatgaaagttaattcatcaaaagtcaatgcactgagaggtcacattgctgaaagtcaaatcatagagaaacacaatttgctggatttaccttatctcttttaactatttatgaacaatgtacatttttgtgcatagaatggaatggttctaacagctttgatcagtttctaagttcttcatcatgtctgcgtagtgaattctgtagaatgttttttttgttgttgttccttctgcttcagttccctgttgttatagctggaggttagtaaacagagagaagcctcagccaagtggcataaaatatacttttatccacaaaaagaatatatatatctttccctttccaaatccattttattccagaaatttatgcatacaacaggaaataggatttggatagcaagcgatatagcaacacatttatcgaatttattcattcawgcgtttggaaaacaggagtctggatagcaaaggttcagatagtgagagggattcctgcacat

SEQ ID NO: 403471 - DNA, 388 bp, Homo sapiens
aggcaaaaaaatcccttgagctcaggagtttgagaccaacctgggtgacgtagtgcaatcttgtctctaataaaaattaaaaaaaaaaaaaaaaactatccaggtgtggtggtgcatgcctataatcccagctacttgggaggctgtagcaggaggatcaccagagcccaagagtttaaggctgcagtgaaccatgattgctccacttcactctagcctggatgacagagcaagaccctgtctccctgccmcaaaaaaaaaaaaaaaaaaaaaaagaaacatagaatagaaaacatctcctggtttgtatcctggaatagagaaatgagcacaggctttcaaatcaaacagtagtgattcatatcctgtccctcacactcacccagca

SEQ ID NO: 403472 - DNA, 429 bp, Homo sapiens
tcactctagcctggatgacagagcaagaccctgtctccctgccacaaaaaaaaaaaaaaaaaaaaaaagaaacatagaatagaaaacatctcctggtttgtatcctggaatagagaaatgagcacaggctttcaaatcaaacagtagtgattcatatcctgtccctcacactcacccagcatctytgaacctgaatattttcatccaggttgacttaaggatgaaatggaaaaaggtttacaaagtacctggggtatagtgaaggattcaataaatgttctctcccttttcttctatattagttatctattgctaaataacaaattaacccagaacttagcggcttaaaacagcaagtgtttttctgatagtatctatgagtcaggagcccaggcaaagattcgctgggtcttctggctcacagtctcc

SEQ ID NO: 403473 - DNA, 587 bp, Homo sapiens
tcacagcacataaccctgacaataaactacaaggtaagcaactaattattccctttttaatattttttaaaacctaggaaggtaacttaatctctttgacttccaggtctcatgaactagaacattagagaatcaagatttgaacgagaggtgatggtttttaaaatatttctgctagatatcaaaatgaatgcatgggatttgatatatctacataartaggcatagaaatagagatgctcactgatatgtgtatatgcacatatgaatatgtgtgcatgtatatacatgtatccatttcccagctcttcttttaagaggatatagaaacaatgtcaccccagcaacaataaacaccctagtgcccacatcttgatttctctgtaccattttctactagaaggaaccctggtctccttggaaaaatggctgattccaaggcttggacagggaatatacaagatgagtctgacatatctcgtgttgaaaagtaaaaaactactcaaagaataatgacagcatgtcaaaaggacacaagaatcaacttaaagggctcccactaatcaaatctagggcaacctaaatat

SEQ ID NO: 403474 - DNA, 575 bp, Homo sapiens
ccacttcgcaaagacaaaatgaaaggctctactgcaggaacatttgaaggaactttctttggggggcggtgggggctatcascgaagggaggggaatgtgcgtggagctgaggaggagcctcccggctctccgagggccttggggttgggatccctaggtgcagcccgttgacagtcggccccacggccatggacgtcctttccccaagttagctgagcgcctgccaccgagatcccccgagcctgggcttcgcgcggccgcctaggaggaacccgcaggaaccagccctccccaactctccgcccggcgcctttctcctccaccggatcctggatgtgcagtggaggggacgagggcttgtcgggtgggaaacttaattcaaaatggctgctggaaacgcttgggttttattcgtagcaaatgttgccaatttctccggccagatacgctaaaccgatcctcagataccgtccatggctcagggcctccgacttcagggctccaggaggaaggggaggtgagcggtcacctgggtctgggggagggggaggaaaaggaaaaaagtagatgacac

SEQ ID NO: 403475 - DNA, 514 bp, Homo sapiens
ggggttttgttactctaggtaccagaaagtgttggttatcacacctcctccatgaagcctgctctggagtcagaaaagtacaatgaagaatatttcattctcccacaattatttcatatttatgttttttcctttcaacataaagctccttgaggacaagggcagcacggctttgrccatgatgggcttcccatcaactggtaggaagcctcatgccagggctgtttcatggctctgctggagcttttattaagtccacccactcaacgctattgttgaaccaattcttgcaaaagattccatgttaacagaaacaaataaatgcgaagtccatcagttgattcagattttaaaacatatctcaccaaacggaacacagacctggggacagttagatgcatctgcaacttggtagtgtaattccctctactcactatctgccatcacacaccaaatttattttacactcttggttaagtggtcccacgttaatatgagaacagaatggtcatat

SEQ ID NO: 403476 - DNA, 505 bp, Homo sapiens
caaaaaaaataaaatgcctgttattattaataagtttacgaagtgaaattttaaaaatggccacaaccttatgagtttaacaaatattagcaactgttatagttgtgctgctgcttttacgttttaaccaaatacaaagtcttacattttacaatggacttaaatatacattattttaactcatttagaagatatcagtaaataasatttttgagtgatattagaattactctaatatcaatatatgacaacattctagtatcaatacctggccacataagctagcttagaatgaattgttgcttgtgaatttccatttctatagaattttccttacactttacaatatggtagcatgtttattatccattaactttaaatttctgggttgttggttattatttagaaagatagaactatatctctttctttttctgatcacttttttttctgccctttggaaaccttctatgcctgagatttgaacttgagctagtttgctagg

SEQ ID NO: 403477 - DNA, 505 bp, Homo sapiens
caaaaaaaataaaatgcctgttattattaataagtttacgaagtgaaattttaaaaatggccacaaccttatgagtttaacaaatattagcaactgttatagttgtgctgctgcttttacgttttaaccaaatacaaagtcttacattttacaatggacttaaatatacattattttaactcatttagaagatatcagtaaataagatttttgagtgatattagaattactctaatatcaatatatgacaacattctagtatcaatacctkgccacataagctagcttagaatgaattgttgcttgtgaatttccatttctatagaattttccttacactttacaatatggtagcatgtttattatccattaactttaaatttctgggttgttggttattatttagaaagatagaactatatctctttctttttctgatcacttttttttctgccctttggaaaccttctatgcctgagatttgaacttgagctagtttgctagg

SEQ ID NO: 403478 - DNA, 537 bp, Homo sapiens
tggaattcacagttgctttggctgatctcttagttaagtatcttgaaatatagaaaacttgaccgttgtaggaaccagaaactcaaattaaatctcaagatgctttgagaaaggcctccctgattattttacccaagataaataatgaaggaagggaataatcttttcccaactccaaatttaacgttgtcagtgggcttaaagatgcagacattcttgaggaatgagagacacttaaaacacaaaatgttgtaaaaaatataaaaaatcagaagtgcttctaaagaaaccatagggaaattagaagataccctattaataattattagtggaaatcagcggtaaatataaatttctrtgattctgttattcaaagtataatgctatgaggtagtagaacaaaacaagactatatcttggctgaatttttttttcttcttatgtctcaattgtgtgttctctggctcgagagtttagaagtagaaaagagaaaacttcagaaacacttgagactaaacagttaagtgtattgcttgt

SEQ ID NO: 403479 - DNA, 554 bp, Homo sapiens
attattcctggggctgttaagtaaatagaccctgagcaccaaatgcctgagagcagtaagtgtgtgattatgccctgctgctgcgaatggcaaaatgcaggtgcaaatgttactgtaggcaacagtacaatccaaatagggctgtaaatgatcttgcactgtaaaccaattcaatgtgtccttatttttaaccaaactaaattccttgcagaaaagctgggtattcatttcatgtattagccagtatgaaatggttctgaagcagttctagacaccaaggtattatttaacccgtgtggtttagtgggacaatggcagtcccctgctgtaatccattcaggggcaataccggcagtcagtgtgaaatkaaatacattacagggaaagagcttaatgtgctttataggcagttgttcatccacatcaaactttagtttttaaaatcctaacatttgatcccacaacaggaacagtgcctcaagtcagagattggcatggtgagtcgccgggaggtggaaaagaggcacagcttcattgaagctacagttggctgc

SEQ ID NO: 403480 - DNA, 555 bp, Homo sapiens
ctgtgtgtacctgaagctggggaatggggatgctgagaaggctttttatgtctgagtatttaaagtcttgtcatactgaaactcgtactgaaatgcttggtggctcacatttgtatctgcttgataaccaaaacatagcatataatcattcaacccactcaactaccatgtattgagcacctataatttgctagatacagcctgctcctctcaaaacatactcctttggggctacatctactcaatttcaaattcaggtaattttggaaaaaaagttatgtggatttytaaaaaaaaaaaaaaaaaatccctagaaatcactaagcaaaattcatttaaccacaacaagtttaggcagtatgttttgttttgccttttttttttcttaacacaggaaaactgctcttaccttttgagcatttagatgttttgaaatgccataaacattcacaaatgaatatttcactgtgcacacgtgctgtggattcaggggccacattaaagtgttgtgaggaatgatatggacgtgaaatagcatactttagagaaaccttt

SEQ ID NO: 403481 - DNA, 562 bp, Homo sapiens
gcgctccgtttccaagacagcagcgggggcaaaaaaaagcagatcttctctcccccaaaaatcagtttaaaaaaaaaaaaagaaagaaagaaagaaarggaaaaaaaagagcgcccctcagacccaactaccaaatctcatggctttctgccactccagctgtcaatcacaggcgaggttgtcaacgtggtgaatgaatgatcatccgctctgtcttcttctggtcagaacacctcaaatgttaatattcaaatgcacaaagccctagcgctcgcttcccttgaatcagtcctaattcctaatcagtttctctcttctctctctctctttctttctctccctctctctccctctttgcaagtgctgcactggaaggagattagagaaggagggttaaaaaaaatgtctgtctgagtttgtcttaaaggagccacgatcgatgctgcccgcttgcagtccccgtgcgtgtgtaaagtgtgtgttgcacaggcggagaggtggattccgaccagaatgctagaacccggaagtagtggtggccataacaggtcgcgtcttacac

SEQ ID NO: 403482 - DNA, 637 bp, Homo sapiens
cttttctgctggagatcatcttcctcacactgtgattcttaaaggttatgtattttttttaccctgatcatacttacgtcttttgacaagagagaagacggacatccagctttgggtctgcagtgatccatcattcaacttccggtctttttcatcatattagattgtgctagtacttgctctttccttaagctatctccattacaggagggggaacttattgccccaaatataacagagatgcctgacttatggagagttacttcagagatgtttctggaagaaagagttctttgggtataaatgagaaacaaggggacagttgtgtttcccacaccatattttggtatctagcatgtaaattatactctcatagaccacctggatctgaatggctgcgatctggggccctttcccagttttgcatggcagatgaggaaaatgcaggaaaygctgaggctttgaagatgtgctagaacctcagcaacacagagccactgagcagcaagaggaggctgagacagggcagaaacacccccactgttaagagtgatgagggtttggagcacctaatctggatctagaaattggccgctgtgcaggcagctgggtggttcaagatctagcacccaaagag

SEQ ID NO: 403483 - DNA, 489 bp, Homo sapiens
tttagttttgttttgttttgcagtcattgaataactcttttmtgtaataagtgaagattatccatcttccaacctaattataaaacagcatcctgcactatcctttgttgtaaatacatttctttatatgtcactcaacattcaattatccacataaggattattcatgtcagaattgtcacctgctaatgtttaatttccaaatgaatttcccctgctgaccagggtggcctttcctgccatccatgagtatcggttcagaaagtcaagataatattgacaataatgtgcataggatctaattaaaagacatacctctgctgctgcaaaagcaaacaaacacacaaacatatgatacctcctgaggccaaacaacaatgattttgggattatctgttgctttggattttctgcattaccacgccctcccactggcacgcagaattgaaaaccggctgcccgacatgtttgcaatgactgttttaggag

SEQ ID NO: 403484 - DNA, 556 bp, Homo sapiens
actatgcattttccagatgataatcaaatcatgacctgaagggaattttagatcttctgaagccataagcaactactctcttatgaaggcatatgtaactaatggaaccagaaccttcaaagccaaattaccccagcccctccacaagagaatattctggtaaataaattaaaattttcagcatagcacaagccaaattatccagatttggccttactttttctttctttttttctgartctcactttgttgcccaggctggattgaatctcattctgttgcccaggctggagtgtagtagtgagatctcggctcactgcaacctccgcctcctgggttcaagtgattctctggcttcagcatcccaggtagctgggatcacaggtgcgtgccaccacatccagctaatttttctgtatttttagtaaagatgggtttcatcattttggccaggctggtctcgaactcctgacctcaagtgatccacctgcctcagcctcccaaagtgctgagattacaggtgtgacctaccacgcctggcctggccttacatttt

SEQ ID NO: 403485 - DNA, 604 bp, Homo sapiens
aagactctaataggaaatttgatttggcttttcataagaatactgtttcacagtataatttatatttttttcaaaagaataaaaaccctgctggttttaactgtgtacttttgcattttccaagaaaatatttcctttagcaatatggacaatatcaacttgatacaaagtaggcatgtaatctgaaataacactctgaagtgtaaagaaatgtaacctaaactcaaagtgaaaggctagaaaccacttacacaggcataattatttgaacccccgacctttcatactgaaattagtgagcattttcattttccatatgcaatcacttactgtcctttttcttctrttagtgtttcaagaagcaaggacatttaaatgaaaaaagaagaggaagaaagccctctgttaatttgaagctgagcatctgatccactaaaattgacaaaagtatcctcttgaaaactgccactttccaataatacagccccacaggaaggagatgtgctggagaaagagccagttagtatgactattcttttcttcctatcagtggagagtcatgtctttcactgcaaagagttatttttcagattttttgaaaaag

SEQ ID NO: 403486 - DNA, 604 bp, Homo sapiens
aagactctaataggaaatttgatttggcttttcataagaatactgtttcacagtataatttatatttttttcaaaagaataaaaaccctgctggttttaactgtgtacttttgcattttccaagaaaatatttcctttagcaatatggacaatatcaacttgatacaaagtaggcatgtaatctgaaataacactctgaagtgtaaagaaatgtaacctaaactcaaagtgaaaggctagaaaccacttacacaggcataattatttgaacccccgacctttcatactgaaattagtgagcattttcattttccatatgcaatcacttactgtcctttttcttctattagtgtttcaagaagcaaggacatttaaatgaaaaaagaagaggaagaaagccctctgttaatttgaagctgagcatctgatccactaaaattgacaaaagtatcctcttgaaaactgccactttccaataatacagccycacaggaaggagatgtgctggagaaagagccagttagtatgactattcttttcttcctatcagtggagagtcatgtctttcactgcaaagagttatttttcagattttttgaaaaag

SEQ ID NO: 403487 - DNA, 648 bp, Homo sapiens
taccaggcattatttaggcacttgggagtgtatatcatgtctcaggccagcattaaaatattgccataatgtgtcaagagacttcatggcaatctgaatgttgaygagccaacaaagagtgattttattcaaaaaattagttgaatatcatttgcaaaaatgtaaaataaaacaaggggagttgatgttgtttctattgcctattgtcaaatgaaataaaatacgccaaattgctaatgttcttaataaacctgccacaaggttggttttctgttagaattgtaaaaaaaaaatggagtataacttagaaggatcagcagaaaggggttatgatcctattggttcaattgtacacttctcttgtatgtattttccagcattacatttgactgaaagacaactttgacatcaaaaaacaattactcttccaatctctcaatttgttctttggaaatgttttctatctcccccagccactccctctttgtcttagtcatcatgacttccagttaattggttcaatctctgaacaaagcccagccctgctgggcagaattaggatgcatgtttgggtgctgaattacaccagtggtttagacaagagagaagtccttctcactttcatgttcaaacacaaacaacccaggg

SEQ ID NO: 403488 - DNA, 597 bp, Homo sapiens
gatgcatgtttgggtgctgaattacaccagtggtttagacaagagagaagtccttctcastttcatgttcaaacacaaacaacccagggttgacttgtaatcattacactgttgaacactcaggcaccctctctcttgaagctctgccatccctaggtgtcaatcttgttgacattgtcagcaatgccatcatcttctctttcctaaggatatcgagtgactggtatcattagctctaagtgtttccagaggagtggagctctagtctgggctaatgtgatggggtggggcagctggtgagatggcagtgcaggtttaagccccatttttcagtacaggccttgtgacatttcacttagcaacacaagatatggcttacaggtagaaagaggttgggggaaagaagagaagacatgccccactgagaaatgatacatatcatttctgctcatatccagttggaaaggatgtaacacctagctgcaagggaggctgagatatgtaggattcagctaagtggccatggttcccctaaaaatcctaccatcataaaagtagatgatcaggaaaaatagctttcatagaagacacagagag

SEQ ID NO: 403489 - DNA, 597 bp, Homo sapiens
gatgcatgtttgggtgctgaattacaccagtggtttagacaagagagaagtccttctcactttcatgttcaaacacaaacaacccagggttgacttgtaatcattacactgttgaacactcaggcaccctctctcttgaagctctgccatccctaggtgtcaatcttgttgacatwgtcagcaatgccatcatcttctctttcctaaggatatcgagtgactggtatcattagctctaagtgtttccagaggagtggagctctagtctgggctaatgtgatggggtggggcagctggtgagatggcagtgcaggtttaagccccatttttcagtacaggccttgtgacatttcacttagcaacacaagatatggcttacaggtagaaagaggttgggggaaagaagagaagacatgccccactgagaaatgatacatatcatttctgctcatatccagttggaaaggatgtaacacctagctgcaagggaggctgagatatgtaggattcagctaagtggccatggttcccctaaaaatcctaccatcataaaagtagatgatcaggaaaaatagctttcatagaagacacagagag

SEQ ID NO: 403490 - DNA, 590 bp, Homo sapiens
aatgaaacagcagggagaacctgtatttggtggtgaaagtgytggaatcttctaggccttgctcatctccaaccagctacttctccaaaataaagcaaaacaaaacaaaacaaaacaaggcaaacaacaaccaccacaggccttttgcatcaacttcctgtgactaagtgaccctaagcagagaactggctcaggtcacttagggcaggggtaggacattgaaggccttatttactccaggattaaaaacagcatcccctctaaccctgtctctcttgggcagcctgtcttttaaggatgtgaaaagcagcttcttggagtctaaacaggcacaataccccactgggatgtttaggtatcaggttcacaaaaacagcattttactcctgcttccccgaacccctttgcaacccaggctaccatactctttgcaagaatatccggtatcttttccgggcaaaatgaattgagttggcacttcctgaaatatttttatttttagcttcaaataattttgctcctaaaacaaattagttacttatcctcttctcaccatgccctaattatttttagctttattctaatttttt

SEQ ID NO: 403491 - DNA, 590 bp, Homo sapiens
aatgaaacagcagggagaacctgtatttggtggtgaaagtgctggaatcttctaggccttgctcatctccaaccagctacttctccaaaataaagcaaaacaaaacaaaacaaaacaaggcaaacaacaaccaccacaggccttttgcatcaacttcctgtgactaagtgaccctaagcagagaactggctcaggtcacttagggcaggkgtaggacattgaaggccttatttactccaggattaaaaacagcatcccctctaaccctgtctctcttgggcagcctgtcttttaaggatgtgaaaagcagcttcttggagtctaaacaggcacaataccccactgggatgtttaggtatcaggttcacaaaaacagcattttactcctgcttccccgaacccctttgcaacccaggctaccatactctttgcaagaatatccggtatcttttccgggcaaaatgaattgagttggcacttcctgaaatatttttatttttagcttcaaataattttgctcctaaaacaaattagttacttatcctcttctcaccatgccctaattatttttagctttattctaatttttt

SEQ ID NO: 403492 - DNA, 590 bp, Homo sapiens
aatgaaacagcagggagaacctgtatttggtggtgaaagtgctggaatcttctaggccttgctcatctccaaccagctacttctccaaaataaagcaaaacaaaacaaaacaaaacaaggcaaacaacaaccaccacaggccttttgcatcaacttcctgtgactaagtgaccctaagcagagaactggctcaggtcacttagggcagggrtaggacattgaaggccttatttactccaggattaaaaacagcatcccctctaaccctgtctctcttgggcagcctgtcttttaaggatgtgaaaagcagcttcttggagtctaaacaggcacaataccccactgggatgtttaggtatcaggttcacaaaaacagcattttactcctgcttccccgaacccctttgcaacccaggctaccatactctttgcaagaatatccggtatcttttccgggcaaaatgaattgagttggcacttcctgaaatatttttatttttagcttcaaataattttgctcctaaaacaaattagttacttatcctcttctcaccatgccctaattatttttagctttattctaatttttt

SEQ ID NO: 403493 - DNA, 590 bp, Homo sapiens
aatgaaacagcagggagaacctgtatttggtggtgaaagtgctggaatcttctaggccttgctcatctccaaccagctacttctccaaaataaagcaaaacaaaacaaaacaaaacaaggcaaacaacaaccaccacaggccttttgcatcaacttcctgtgactaagtgaccctaagcagagaactggctcaggtcacttagggcaggggtaggacattgaaggccttatttactccaggattaaaaacagcatcccctctaaccctgtctctcttgggcagcctgtcttttaaggatgtgaaaagcagcttcttggagtctaaacagrcacaataccccactgggatgtttaggtatcaggttcacaaaaacagcattttactcctgcttccccgaacccctttgcaacccaggctaccatactctttgcaagaatatccggtatcttttccgggcaaaatgaattgagttggcacttcctgaaatatttttatttttagcttcaaataattttgctcctaaaacaaattagttacttatcctcttctcaccatgccctaattatttttagctttattctaatttttt

SEQ ID NO: 403494 - DNA, 589 bp, Homo sapiens
cttaaactttggttatagtctaygtcctagcctagcttttatgataagcctgttgcattttaaaggtgcttattgattcacatgtctttcagtaaaaaatcttttgaggaacccagacttttgaaagctatttaatttgcatgtatttggtcattacaggctaaaactgaagaatgagtttggaaattggttctattagaaaacactgtttgcacatccaaatgttcccagtcaagatttcccaatagtggcagtgagaaagagaggcagagagaattaggatacttgggttcaaattttagcttagtcactgatgggctgattgagtgagaagaacttaatcacctgcaaaatgaattgcttacagtattttgatctctaaatacacttttgattctgatatttaatgattttgtattacaaaattgggcagaaaacgcatagcttcataacaagcaaaaaattttactgttaacacatcatacttattttagagtaaatttgaaggaggttgatgttttggaatttggttggagagttatccaaaagcaatgtttccctgactcaactacaaccaattacacacagt

SEQ ID NO: 403495 - DNA, 546 bp, Homo sapiens
tgtttcttagggttttttcccccttcttagatgaaactggaaagctagagggtgctagagttgggtaaatgtctttatcccaggtgaaggctctggtaaaatcctctgggtgtatttcaaaatggttactttcttcttccttctgcccaagatacagggaatcttttctggctcttccctgtaagaatttggtgagatttctgaaggtaaaacccacaaatgtgtgtggtggacatcctaagactgtggyctctggggtttctcactgtgatactcatccacactcagcctccagtaattcatcaaaattaccacagaggtggtcttaccagtttatggctctagttgcttctgttccaggtaagcagatatcagctgtggttctcttcatttgcctgtctctccagatactgggtggcattttgttctgtgacctcaattctctgatggatcctggaagagttgttgattttccagttgtttttttttttttttttagcttttttcttgttgtaaggatgtgaattcttcccaacttaatctgta

SEQ ID NO: 403496 - DNA, 461 bp, Homo sapiens
tttctcaaaagaaggcgtataagtggctaagaaatacatttamaaagcttgaaatcattaatcacaagggagatgcaaatcaaaatcatatggagatatcattgcacacctgtttagaatagctagtataaaaaggaccaaagataaccagtgttggcaaggatgtggagaaaagggaatttttgtatactgttagtgggtatgtaagttagtatagccattatgaaaaactgtatgcaggttcctgaaaaacctaaaaatataattaacatataatccagcaattccatttctgggaatttacctgaacgatttaaaatcagtatgtcaaagagatgtctgcatgcctatgttcactgcagcactattcacaatagccaagttatggaatatcaagctaagtgtccatcaatggatgaatggataaagaaaatgtggcatatgtacacaaaagaatacta

SEQ ID NO: 403497 - DNA, 599 bp, Homo sapiens
atgtccttttctctttgttttgagatttttttgtccttatttccctcaarttttcagaaattccagagttctttatatattaggaatattagtcctttattttttatatatggacaaatattttctctcaatttgtaggttttgttttggttttacttatgatctttttaacatgcaaatacttttatttgtatgtattcaaatctagcatgcttttcctttattatctctggattctgagtcataaggcctttcattcaagagaaattcacctatgttttcttgcaatatattgcttttttttttaacccttagatctctgatcattttggagtttattcttttctatagtattaagtatagatctaacgttatcttttttaaatggctaccgcatttgaatttaatatatggctataccatatattaaaaagtttatctatgccctagtgatttgaaatgctaacttcattatatactaaacttccacacatatttgggtttaattatggactttattctccttgtttattcatttgccattactgtactccatagttttaattacagactttatagtttgctttaatgtctattag

SEQ ID NO: 403498 - DNA, 599 bp, Homo sapiens
atgtccttttctctttgttttgagatttttttgtccttatttccctcaaattttcagaaattccagagttctttatatattaggaatattagtcctttattttttatatatggacaaatattttctctcaatttgtargttttgttttggttttacttatgatctttttaacatgcaaatacttttatttgtatgtattcaaatctagcatgcttttcctttattatctctggattctgagtcataaggcctttcattcaagagaaattcacctatgttttcttgcaatatattgcttttttttttaacccttagatctctgatcattttggagtttattcttttctatagtattaagtatagatctaacgttatcttttttaaatggctaccgcatttgaatttaatatatggctataccatatattaaaaagtttatctatgccctagtgatttgaaatgctaacttcattatatactaaacttccacacatatttgggtttaattatggactttattctccttgtttattcatttgccattactgtactccatagttttaattacagactttatagtttgctttaatgtctattag

SEQ ID NO: 403499 - DNA, 599 bp, Homo sapiens
atgtccttttctctttgttttgagatttttttgtccttatttccctcaaattttcagaaattccagagttctttatatattaggaatattagtcctttattttttatatatggacaaatattttctctcaatttgtaggttttgttttggttttacttatgatctttttaacatgcaaatacttttatttgtatgtattcaaatctagcatgcttttcctttattatctctggattctgagtcataaggcctttcattcaagagaaattcacctatgttttcttgcaatatattgcttttttttttaacccttagatctctgatcattttggagtttattcttttctatagtattaagtatagatctaacgttatcttttttaaatggctaccgcatttgaatttaatatatggctataccatatattaaaaagtytatctatgccctagtgatttgaaatgctaacttcattatatactaaacttccacacatatttgggtttaattatggactttattctccttgtttattcatttgccattactgtactccatagttttaattacagactttatagtttgctttaatgtctattag

SEQ ID NO: 403500 - DNA, 414 bp, Homo sapiens
gacaaatgtttgttaaggatgtggaaaaattggaatcctcctacattgcgggggaggcgaggaataaattggtgtagtcactgtggaaaacagttttgcaattcctcaaaaagctaaacatggaattattttatgacccagcaattccattcctaggtttatactcaaaagaatgaaaatatgaattcagatacatatatgccaatgttgtgcattgcaccattattaccaatagccataatgtaaaaacaaaccaagtgcccatcaatagatsaatgaacaaacaaaatgtaataacacacacacacacaaacacacacacacacaggaatattattcagccataagaaggagtgtagttttgacacatgctacagcataaatgaatcttgaaaacatgttatgctagttgat

SEQ ID NO: 403501 - DNA, 528 bp, Homo sapiens
taaagatgcaagatttctgattatgaaggcaaatcaaaactagctcacaaatttcactccgtcaattacttattaaaatacaaaattaaagtcagaaaaaaaattaccaacagctaccaaacaggaaaagcaaaataactaaatgtaataaacctcaaaaactagcaaccaaggaaagaaatagagatgatgtgcgtgagtcaacaaaatactaagaattgtcattaatatttccaaatctggaaagaagcaaactgaacaagttttgttatcttcttcattttcaatctgtagtagaaaagaaaaataagaagaaaaataatatagggaaagtgaaccacagggctatttctgtctgacagatgtaaataatctagtctatasaataaatctggtcaatgatccaaaaagtattcttctgaatgaatgatagaccctgatccccattcaaattgcaaaatctcagaggagacagctcagatcccaaataaaagctacatgtcacctcagctgagttctcccccacat

SEQ ID NO: 403502 - DNA, 540 bp, Homo sapiens
tttaatttaataattaaccacaccacaatttgttattaaagttctattcatgattcataagtttttgcagtaaacacagaaatacatatgccactatgctaacaatgtaagaatcccagaagtctagccagcatccagtttycaaagcttatattctataattactctcatgacttatctaggcaccctgtcaactgtctaatagccagagatgattcactgttgcgttgtagatcacattatcctagaaagccagaataatatgaaataatccttgacagcaaattagaaaagccatgctatactaaaggagaagatcctcaaacctgaaaaatttaaattaaaagggaaaatttacaggggaaatttgaaaagaaaaattataggctttttctgtaattctagtcccacaattctcaaaaaaagaagtaaatttcacagttaagaatatgacattctcatatagaggatgatcactgtttttgttgtttgattttggttttgtttttctgtttgtttaggtcaaagagtagtatgaaa

SEQ ID NO: 403503 - DNA, 540 bp, Homo sapiens
tttaatttaataattaaccacaccacaatttgttattaaagttctattcatgattcataagtttttgcagtaaacacagaaatacatatgccactatgctaacaatgtaagaatcccagaagtctagccagcatccagtttccaaagcttatattctataattactctcatgacwtatctaggcaccctgtcaactgtctaatagccagagatgattcactgttgcgttgtagatcacattatcctagaaagccagaataatatgaaataatccttgacagcaaattagaaaagccatgctatactaaaggagaagatcctcaaacctgaaaaatttaaattaaaagggaaaatttacaggggaaatttgaaaagaaaaattataggctttttctgtaattctagtcccacaattctcaaaaaaagaagtaaatttcacagttaagaatatgacattctcatatagaggatgatcactgtttttgttgtttgattttggttttgtttttctgtttgtttaggtcaaagagtagtatgaaa

SEQ ID NO: 403504 - DNA, 619 bp, Homo sapiens
tgatagtgtcacagacaaatgttaattgttttttcaccaatactttctaaccatgcagtggtcttctcatctcttagccagggctcatggtctttttctgaagcttatctagcttctaaagccctttagatccatcttgaccttactgtcattctgaaaaattcaaggaggatttagaagctggagaaaataaaaaatgaaagggaaaatactaaagagataggtgctgatacgagagagaaaaggcatttagaattggagtaactgttttaaatataattttaaaaggaagttatcagaattttgacacttggaatgttaaagttttatgggagtatgctttgcactaaggatttagtatttaaatctgcattcccttttggaaacatgacctatttgttaagatttgaggcttaaaagatacaaataaatagtggtaagcagtagcrccagttgcaaatccatttgcatagagagcagaaataactcattgagaaaaatttggtaattatcaagacattctaaagtttggatttctgtagtctttatgaatcttgataaaaacaagtgtaattactccctgtattttagtatgctatttagaaatacagtggggcaa

SEQ ID NO: 403505 - DNA, 597 bp, Homo sapiens
gatgattaacatctctggaactattaaaaatgtcagagaaaaactgaggagagtattctgtgcatcaatttgtgtagtaaattatatatacctagaaaattactggaaggatatttagtaaactgttaacagasgttgactgtgcagtaggaaatgaatggtttagggtggggctgatttttaaattttgtgctgcataattcgtactgtaggactttttaaaacgatgcgttatgcattgctttttgaataaaaaatattattttaaaaaagactgaataataaaggtgaaagggattagttttcttatttgtacaaaagaaaatggatggtactacctacttagcttctgaattttattgagagtgttagagagaaaatatgtactttatagggtggcatgaagtagggaatcaataaatgctacagtaggcaacaacacatcatattttagtacttgcaactgaaaatatttaatagaatgactagaaatgaagtgctcaaatttttgacaggagacatttgcactcttacatttttattgaggaccccacaaagcttggtttgtgtttgtttgtatctattctgtagaaatta

SEQ ID NO: 403506 - DNA, 597 bp, Homo sapiens
gatgattaacatctctggaactattaaaaatgtcagagaaaaactgaggagagtattctgtgcatcaatttgtgtagtaaattatatatacctagaaaattactggaaggatatttagtaaactgttaacagacgttgactgtgcagtaggaaatgaatggtttagggtggggctgatttttaaattttgtgctgcatarttcgtactgtaggactttttaaaacgatgcgttatgcattgctttttgaataaaaaatattattttaaaaaagactgaataataaaggtgaaagggattagttttcttatttgtacaaaagaaaatggatggtactacctacttagcttctgaattttattgagagtgttagagagaaaatatgtactttatagggtggcatgaagtagggaatcaataaatgctacagtaggcaacaacacatcatattttagtacttgcaactgaaaatatttaatagaatgactagaaatgaagtgctcaaatttttgacaggagacatttgcactcttacatttttattgaggaccccacaaagcttggtttgtgtttgtttgtatctattctgtagaaatta

SEQ ID NO: 403507 - DNA, 597 bp, Homo sapiens
gatgattaacatctctggaactattaaaaatgtcagagaaaaactgaggagagtattctgtgcatcaatttgtgtagtaaattatatatacctagaaaattactggaaggatatttagtaaactgttaacagacgttgactgtgcagtaggaaatgaatggtttagggtggggctgatttttaaattttgtgctgcataattcgtactgtaggacttttwaaaacgatgcgttatgcattgctttttgaataaaaaatattattttaaaaaagactgaataataaaggtgaaagggattagttttcttatttgtacaaaagaaaatggatggtactacctacttagcttctgaattttattgagagtgttagagagaaaatatgtactttatagggtggcatgaagtagggaatcaataaatgctacagtaggcaacaacacatcatattttagtacttgcaactgaaaatatttaatagaatgactagaaatgaagtgctcaaatttttgacaggagacatttgcactcttacatttttattgaggaccccacaaagcttggtttgtgtttgtttgtatctattctgtagaaatta

SEQ ID NO: 403508 - DNA, 621 bp, Homo sapiens
tctttggtgctaggcatggtgagcatttatgtcttagattaaactgtttttactagaatgctcactgcgtgtgaaaagctaagtgttttaaaaatgttacctcatttaatctttgcagcaaatgaagaaattgtggttcagttatacttcaggtgacaaaattattaggtgctaaaactggcattaattaggaatgttttaagatgcaagtatcyacaacaaaagaaaacaaataaaacaaaatactcaacacactgtagcttaaagaaataggtgtttaattttttcacatagcaggaagtctgaaggtaagtggtttctggtatgggtacaggaggttgacaatgttaggacttgattgcattcctgcaaatcctctggccttccctttatcattataagatggtcgcagcaggcccacattctgtaagagggagcagtggatggtgcatgacgaagaattattctatttataccttttttatttgggggacagaggtaatcaaggttaaaaaaattcttttccagaagacccatagcaggctttcttccatgtctcattatctagaactaggtcacatgactaatgaccctagctgcaaaggagactagtaatgcaaa

SEQ ID NO: 403509 - DNA, 538 bp, Homo sapiens
ggacatgtgtttcattattactgaaaaatcattcaaaataccaagcagattaaatgagcacagtgrtaggcacatgggacaagaatttgaataaaatacagctttaccagaagaggctcacaagggaaatagtagcgggtgggtttggtatggacgtaggggtagactgacatacgtgggtttctattgcacccacacttcctggatcatagctcttctaaaacacatttgcatttgcttggtgatgtacctgtattccctagtaaactgatgctcaaccagggaagggcaccgtgtttgtttaattcacctttttcttcccagaacctagcatattgcctagaacataaaaggcgatcaataaatatctgttggggagtgaatataaaagattatattaatataatatgttaaactatataatagaagcatgaataagaagggaaatgtagagtaaatggtacgagaactaaaacatcttctttgaagtgtgtaaaactgaaaatattctatatccacgtacagtaaaactaggttt

SEQ ID NO: 403510 - DNA, 538 bp, Homo sapiens
ggacatgtgtttcattattactgaaaaatcattcaaaataccaagcagattaaatgagcacagtggtaggcacatgggacaagaatttgaataaaatacagctttaccagaagaggctcacaagggaaatagtagcgggtgggtttggtatggacgtaggggtagactgacatacgtgggtttctattrcacccacacttcctggatcatagctcttctaaaacacatttgcatttgcttggtgatgtacctgtattccctagtaaactgatgctcaaccagggaagggcaccgtgtttgtttaattcacctttttcttcccagaacctagcatattgcctagaacataaaaggcgatcaataaatatctgttggggagtgaatataaaagattatattaatataatatgttaaactatataatagaagcatgaataagaagggaaatgtagagtaaatggtacgagaactaaaacatcttctttgaagtgtgtaaaactgaaaatattctatatccacgtacagtaaaactaggttt

SEQ ID NO: 403511 - DNA, 558 bp, Homo sapiens
  misc_feature (1)...(558): n = A,T,C or G
nnnnnatatttaatattagcatttaaagatataaatttccttctaagtattactttagctgcatcccacacatttcgttaggttgggttttcattatcatttagtttaaaatactttacaattttccttgttctttcttctttggtaartggtttatttagaaatatgtggtttaattgccaaataatttgaatttaaaaatgtttcatattgttattgatttgtacttcatttccatgtcagaaaatatacccattatagtttcattcattttacatttgagatttgttttatagtccagcatgtgccttatcttggggatgttccttattcccttgaaaataataattatccagatgttttttagtgtagtgttctagcaacatcagttaggttaagttgataattttgttcaggtcttctacagtcttacagatttttctgtctacttgttttatcatattctaaaagaggtgtgttaaaatcaccaagaataattagattgtggctgtgtctttttcttcttttagttctgtcattattttgcttcatgtattt

SEQ ID NO: 403512 - DNA, 526 bp, Homo sapiens
agatgaaatgaactaattccttgaaagatacaatctgcaacaattcacacaagagaaacgacacaatctgccaaaattcatgctgaaagtcctttatatattaaagaaattaaatcagtaattagtaaccttccaaaacagaagcaacaggcccagattatggaataaatgatgccaattctatatcatttctttcagaagatagaagcaaagggaatctttcctaactcattttatcaggtcagcattatcctaatatcaaaactagacaaggatattataagaaaataaaaaccatacatcagtaactctcatgaacacaaatgcaaaaatcctcaagaaaatattagctaattgaatcaaataatgtgttaaaagaattatataccacaatcaagtgggatttatcccagttatgctaggckggctcaccactcaaaaaatcaattaatggaatacatcacacatcaacaggctaacaatgataaatcatatgatcatattgatccagaaaaacatttgacaa

SEQ ID NO: 403513 - DNA, 565 bp, Homo sapiens
agtggttccatttctagattgtggatcttcagataaattctgccattttcatttcactttctgaaagtcagggttggcttgtgaaaagttgttaaaaacaagctaaatgtgaactgtcaaccctcactctaagctttccctgttcagagcatcagatgaagacttcattgggttttatagtggctttccaatttttggtagtccattgaagaagagagtttgaaagttgtataygttaatgattgtctgccctgtcctgcctgaaataccatgattgtttatggaaagtatctttaataaagctggatacagtttggcttgggaaaaaagagttccacatcaatataactgggaacacaatgaataatcattaagaactacaacaagcatttatgtgtgacatatggactttctaacttcaaagcagttgcaattaaagacatgtttaacatgaccattaaaatgaaaatagatcattagattctagattgaaggatggagaaataagtagagtgaaatctaagctaatgttttaccctgacttatgtataaatttctctgtaag

SEQ ID NO: 403514 - DNA, 557 bp, Homo sapiens
caagaaaagggaaaacagctggatcattaaaatgctcgtgtaacccactgtgacactggaaagggaaatcctttgttggatatgtagaaggaagaaacactatactttctgggaaaaaagttttggcggtcttgttacaacatatttaaaaartaattttaaaaagccagtttagaagggtttcttgtcagtcctaaaagacagaaggagatttgaaaggtggtagtacccctaaagggatgtgtttttaaaaaaggaactccagtttcccacattccaaggggtcccctgaggccatcctacacctcattaaatacatgaacaagcatgagacttggaacctctgtagagacttctggcctagcctggcagagaaaatgatgagagatttgtgggttgtatgaagtggatcacggtataatataaaaccaaaacaaatcacctcaggccctaccaagggagaagactattaaaagaggaaaataaacccaccatctcagttcattttttttctcctaaggaatattttttttctccacacatttatgccaagagaa

SEQ ID NO: 403515 - DNA, 606 bp, Homo sapiens
aaaaatacaaaatggctaacagatgttgctaattaccaccgaccatgtctggatcatatttgggaactagcagccaatataaacagtgggaaatgagtggctattgaaagcaactatcacattaaacttaattttataaccatttctcaagctggtggcaatccctaacgtgtccatgtgaactacaatatgttaaatgtcattaattgtttagactttgccagaaagccagtctagggtgacaggatttatggtagaaaatcctgtagtggcacaaaatccactaaaccacattagtcaggtgagaaacaagtattactctcagctgattcttattttacaaaaagatcttccatttccaaagtacaatgtatatcaagtccttatattaaaaaaggaaggcttcataatagaacaagtccacaactgaagtagatgtgagcagacattaagaaaaaataaagaggaaaggaaagaaaatgattgattacattacatagccacgcatagccttggagtttttgtgtaattttttgtgggatgagaaaatggaatctttcctcttccttcatatggrcagaggcaggtcagatgtgccagatgcag

SEQ ID NO: 403516 - DNA, 600 bp, Homo sapiens
actcatttatctttaagttaattggaaccatgtagacaatatacaaatatatatagacatatatatacatgtagacacatcatataacatatatgtctatatgtatgcatctaaaggccaaagagatcaaggagttgaatgcaaaagagagtaaagctttagacttgagagaaatctgtmcacttagaattcttggggatccatcaggaaagacagagcttcctctcaaaaagaggagtctgtggcatgtttgctgtttttctcaagtggttccagggcatcttctctgaccacaatggaataaaactagaaatcaataacaagaggaattttggaagctgtacaaatacatggaaattaaacaatatgctcctgactaaccgtgggtcaatgaagaaattaagaagaaaattgaaaaatgttttgaaacaaatgataatggaaacacaactatcaaaacctatgggatacagcaaaagcattactaagagggaattttagagctataagtgcctacaacaaaaaagaagaaaaacttcaaatgaacaacctaacaatgcatctcaaagaactagaaaagcaagagaaaactaaacccaa

SEQ ID NO: 403517 - DNA, 603 bp, Homo sapiens
tggctcacaggcagccacagcagcactgggatccagggcacaggtgctcagagcagctatgaatctcagttcctggggttggggtcttgtaaaactactatagcaccaaggacttgaggcacagccactagtgaatgcaattctactaagccaggatctgttgttctgaggcacacctagcagcttaggcctagtgggctgggatatagctgtagtgctgaactgtagagggcagggcatggcactggtatggcttcagggaagaagttctctggaagtttgagccctgggaacagctgtaattcatgtaattcatgatgcagaactaacagggcacactcaggctccaggaaatgaggtaccatccagtggtgaatcaggacctgggatggtgggatatggcagcatgttaggctctgtgaggccagctgcagcaggagcaaagacccaagaatggcaagatgccactgtggcttggaccctagttgtcggagagcagcacagatgactgstctcaggagtggggtgcctcagcagcttgtactaggggagctagtctagttctaggaggcagggtgctgcagttatttgttctggagggtg

SEQ ID NO: 403518 - DNA, 604 bp, Homo sapiens
atttgttccatttcatgggtggcamcagactaagaatagggcctttttataatattgatctatggcaacatttagtccaacacttctctgcaattcagtgtcacggtggaaatggaagctgcagaaattgataattaaaatactctttatatttgtggaggatagatagtaggtacgaaagaaaaaaaagttagaaaacatgattcttaagaagccataatacacagatgtggtaccctatgctaagtgccaacagagaaggagatcgggagggaactaacaattttatgaaggctttagactttaactcaatgatcttttcatggggtgggctagaatgtaccaggaaccttatagattttaggtaatttaattcctagtacaaataatagaagttctaaaagttagtgttgagaagatcgaacattattgtgggtttgattatttggagaaggtttcatggggtagctgaccctacaaataggtcttatgagacaagacagaattaattgatgttggaaaaatgtgtgtggtggttgtaggggaagaagtcatttgagatagattgatataagtaaggctaggtgggaggaattggtgaaca

SEQ ID NO: 403519 - DNA, 609 bp, Homo sapiens
agttttagaaataataaacacagagctcatatacacttcactcagtttcccccaaaggtaaaatcttgcataactacagtgcaatacctcaaccaggaaattgaaattggtgcgattcgtggacttcattcacatttcaacagtttttatacactcatttatttgtgtatgcrtttatatatgttttgtttaattgagcacatctgtagatcatgtgaccaccaccaaggtcaagatacagaattactctctcacaagggtcctttttgctacccttttatagcctcagatatctcccttctcactccaaaactactaggaatcagtaatctgttctctatctctacaattttgtaatttcaaaatattaaatggaatcatgtagtgtgcaaccttttgacattttcttcttttgactcagcataatgctattgagattcatccaagttgctgtgtgtatcaatactttattcctttttgttgcttaatagtgtttcatggtatggaagtagcacagtttatgtagccatttacctattgaatgacaactgagttgtttccagttgggatgactatgaataatcctgttatgaacattggtgtacatgt

SEQ ID NO: 403520 - DNA, 609 bp, Homo sapiens
agttttagaaataataaacacagagctcatatacacttcactcagtttcccccaaaggtaaaatcttgcataactacagtgcaatacctcaaccaggaaattgaaattggtgcgattcgtggacttcattcacatttcaacagtttttatacactcatttatttgtgtatgcgtttatatatgttttgtttaattgakcacatctgtagatcatgtgaccaccaccaaggtcaagatacagaattactctctcacaagggtcctttttgctacccttttatagcctcagatatctcccttctcactccaaaactactaggaatcagtaatctgttctctatctctacaattttgtaatttcaaaatattaaatggaatcatgtagtgtgcaaccttttgacattttcttcttttgactcagcataatgctattgagattcatccaagttgctgtgtgtatcaatactttattcctttttgttgcttaatagtgtttcatggtatggaagtagcacagtttatgtagccatttacctattgaatgacaactgagttgtttccagttgggatgactatgaataatcctgttatgaacattggtgtacatgt

SEQ ID NO: 403521 - DNA, 582 bp, Homo sapiens
tgtagtcccagctacttgggaggctgaggcaggggcatgacttaagcttgggacttcgagtccagcctgagcaacatagtaagaccccatttcttaaaaaataaggtgctattattaatttgtttttttagcataatttactttcaatccattaaaaatcaggactcaacaggagtcttgaattgtgaggaggggcttcctgtgaagtcgagacggttagaagaggatggcattaaataagaaggtctattttaattcatttccaatttagcagagttggaagtgacttgttctcttcccactgctccattcccccagtgtctttgcttgtttacttcctttgtatatacagtattgccattggttttctcttggaagatatttrggaaaggtaaaaataagtcctctccttttttgaaactggaggatacttcctttattgtaagaggaaggaagaagggatatgtatatgccacactagtgtaaaggtaaaactcaattaaaatataacatcataattttttttaatcattagacatgttaaaatgcaatcaccctgaaatgtattcatgatgaagcaca

SEQ ID NO: 403522 - DNA, 475 bp, Homo sapiens
cattaaacttctttcttttgtaaattgcctggtctcaggtacgtcttcatgagcaatgtgaaaacagatcaataaactgtgaatagatattaaatatgtgtacatgcatctttttactgagcaggttcagaacaataagtgccaatactgatgtgcttcagtttctccatgtaaaaaaataggaggctacaattaactgttttttaagatttttacactgcttgtgtacttgaagcattttcttatattaggagcttttctaccctgaaaagagatagttcttccagtaaacatatttgagaaaaagrtaatcaaattgctgagtcaagatttaattaatcaaatgtaagatgtaatttactgaattcaacagatggcatccattagcaagtcaaagaaaaactaaatataaagaggaagacatttggagaatgacaaagtgtttatgttcatatattttatgctaaagaaatta

SEQ ID NO: 403523 - DNA, 616 bp, Homo sapiens
gctcttaaaaacctttcaaattttttgcatggttaaagcagtgatttcaaacctttttcttcagaatgctaggatttcaaagtagtgactccagccttccacatttgatttagattttattttttgaaacatctatgcttgattattgtaacaggtgacgccagaactaccccttccagaaagttggaaggattccaccttctgagtatagctaaaaacctcatatattatatctaaaacaaacctaagactctgagaggcacagaaggtagacagactcaggacggaggacccaagccatgacacagtagtgagttacctgggatatccttttctctcatatattccatacttggagcagaagaagtaggcaacctggaaatgccaaaaaataaaaagcacatacaaaaagctctcaaacaaggcttgctctttctgcctgtaggaccaggaaatgggcagccttggtagaaagaaaagcttagataataacaaatatwctccagcagacaccacgaagaaaactggttcctgcctcgtccaggtcagcaaaggccaagtgaagagcatagacagtcctctaaggctgttatgaggcacctaagcacccccctgg

SEQ ID NO: 403524 - DNA, 607 bp, Homo sapiens
ttgttagtgtaaaagaattaggagaattgctagcagtccttgtaacactggctggctaggttttagtaataaaagcacctaaggagctttcttaaactgcaaattcctaggccttatcttccggatatttgcttttagtttttcaagtgaagatatcacgacccagtaagtttcaatgacctacccaaggtcatacagacaacttgctgtcagctggaactaactttcctagctctcactatagggttctttctattatagagactatgatgattgaaaacagctctaaaacttttgttaaatccctgaattcttagtttttaagaaaaggagacatgttactaacaagagatatttttgaaaagggcttgacattttatgtttatgtgttttgctggcatggttgataggaaagcatcttacmcagcacacacttacgtttgtatagttggttatccatggaatatgtttcataggtgtgaatacttatgtgtcttacttatcatttttacatagcatctacctgtccgtaatggattctaacaattgtttgaataattaaattaatacaaataataataactaatatttactgagctttgattac

SEQ ID NO: 403525 - DNA, 537 bp, Homo sapiens
aacaaagttggaggactcacacttcccatttacaaaacttatagcaaagttacagtaatcaagactacatggtactagtataagtacagacatatagatcattgacatagaatcaagagtttaggaataatctctcacatttacattaaattgatttttaacaagcctgccaaaaatttcaatgggtaaagaatggtctttgcaacaagtggtgctgggacaagtgattatgcagaacaacaacaaaatgaagtcaaaacccctctttacatcatgtataaaaatcaactcaaaattgatcatagacctaaatgtaacagctgaaactattaaactcttagaagacaatgtaggcataaatcttcctgaccttttgcagaacaaagccttcttagctataacagcaaaatcataagtgacaaaagaaaatgtaagtaaaktgggtttaataaaaattaaaaccttcaaaggatatcatcaagaatgaaaaaagaacacccacagaatggtgaaaatatttgcaaattatatatctga

SEQ ID NO: 403526 - DNA, 575 bp, Homo sapiens
tcttaatggccaaacatggaagcaagtcaattattcatattgataaggggatgaacaaaatgtgatatatccagaaaatgtaatcctattcatctatgaaaaggaatgaagtactgatgcgtgtggcaacatggatgaaccttgaaaataccatgctaagtcaaagaggccagccacatatcgtatgattacatttgagtaaatcaattaagacagaaattagattagccattgcctgggtctggggagaatagtaggagggtaggattgggaatgattgttaatgagtattaagtttcttttggggtgggtaaaatgttctaaaactgattttttaactattgggttttgacaattcttttcatattctagatacaattcctatgtcagatagatggtttgcaaatattttcaygcagtttgtagcttggctttttatctgcttatcagggtctatgtggagcaaaagtttttaattttgatgagattcactttatcaatttttcagtttttgcttttatggattatgcttttggtgtcaagtttaagaactctttgactagcttagtcctgaa

SEQ ID NO: 403527 - DNA, 576 bp, Homo sapiens
ttactcaggtagttacataatggcagcttttgccctataatgacagagttcaatggttgtaataactgagatcatacaggtaaaaatatttacttcgctaaccttgcagaaaatggttgccaacccctggtatacgatatgagaaagagatcaagtttacttattcatacatttayttttccacagaagtatttcataaccatttattgaaaaggctgtattttcttcactgaactgctctgaaacatttgctgaaaatcagctgggtctatgtctgtactccactttgtcctattaatctatttgcccttacacactgtacttcaatttatagtacctcttgatattaagtagtataaatactccaatttagatgacctttttcaagatcgtattggctatttgaatctttgttattccatgtaaaatttagaatcagatttagaattcctttgaagttagaattgcgtgagtttatagattgctttgaagaaaatgtacgtctcaacaatattgtgtttatccatcaatgtacatgatatatcactgcatgtatttaggaagcattaaatattt

SEQ ID NO: 403528 - DNA, 595 bp, Homo sapiens
gcacagcattgctgcaagacagtggaaaatagatctgggttcgaaaatcaccaatttgtacaataaatgggtatttctatggcaaaattaattaacttattttaggatcagttttctaatcaataaaaaataataaagacaataaaactaccttgctaagttttattcagaattgaacattatcaggatttgttacttacatacaatttaatagctacctctattgagtcctacataccttccattaagtactttgtatgtagttctcatttagtacccccagacaaccctatcccataggaaatattatctcttttcaaaacagaagcactggagctctgcgaagttcgtgcttaggttcttatagctaaaaagtacaagagtcagtgggaggggctcgtgtaattcagagcctgcttgctaattactatcgtatatagctagtccaaggccataggaaagaaaaactcatttttgtatcttcagtccttgtgtgatggagaaataaaaaagttgtctcyatggtcttctgcaatgccaaaattgttgacacctagaaaagaaaaatgatgattcctttaagcaacaggagata

SEQ ID NO: 403529 - DNA, 473 bp, Homo sapiens
acaaccaataggatgcatgtgtgtgggggtacaagtgtgtgtgtgtgtatgtatgtatgtacacatacatatatatgtagaaagtgtgtgtgtgtttgtgtgtgtgtgtatacacagatgttctttgacttataatggggtaatatcctgataaacccatcataagacaaaaacgcatttaatacacctaacttaacagacatcatatcttagcctagcctaccttaaatgtgctcaaaacacttccattaacctgaagttgggcaaaactaacacaaarcctatcatataataaagtgttgaatatcttatataatttattgaatactgtactgaaagtgaaaaacagaatggtcctatgggtattcaaagcatagtttctactgaattcgtatgtcttttgtatcattgtaaagtcaaaaaatcataagtcaaatcattgtaagtcaggaatcatctttgtgtatgggagc

SEQ ID NO: 403530 - DNA, 390 bp, Homo sapiens
aacctcaacctagaagaaatggacaaattcccagacacatcaaggaattcctagacaaactatcaaaactgaatcatgattagatagaaaatctgaacagatcaatataagtaaagagattaaagcagtaataaactctcccatcaaagaaaagctcaggacctgatggcttcactgctgaattctaccaaacgtttaaagaactaacaccaatgattctcaaactctttktaaaaattgaagatgagagaacacttccaaattcatatcacgaggccagcattaccctgataccaacgccagacaaagacactataagaaaaggcaattatggaccaatatccctgataaacatggatgtaaaaatcctcatcaaaatactagcaaatg

SEQ ID NO: 403531 - DNA, 603 bp, Homo sapiens
cagtagtactaccacttgaatttatttaatgacaaaaattaattgtatttctacattgtagaaaaatggaaagtaaaaccatttttaaatatttaaacatttatatgtattattaaacaaaatattagggaatattttaataaaaacatgtaagacctctagaatgaaagattaaactattgctaagaaaaattaaagagaacctgaataaatagagagatacaccatgtttgtggctttaaggacttagtaattatttactttttttaaacttttaagttcagggatgcatgtgcaggtttgttacacaggmaaacttgtgtcatagaggttgtcgtacagattgtttcatcccccaagtattaagcctagtacccattagttatttttcctgatcctttcactccttccaccgtccaccttgcaataggtcccagtgtgtgttactccactctatgtgtccatgtgttgtcatcctttagctcccactatcagaacatgtggtatttggttttctgttcctgtgttagtttgttaaggataatgtcctccagctccatccatgtccctgcaaaggacatgatcttgttcttttttatggca

SEQ ID NO: 403532 - DNA, 541 bp, Homo sapiens
cacccctctgctccctgagatcaatgcacatctcattgccccctttggagaggcttatcagaaactcaaaagaatgcaatcatttgtctcttatctacctatgacatggaaactggctccccatttcgaatcttcccacctttgcttcaagttgtcccacctttacagacgaaaccaatgtttatcttgcatacgttgattgatgtctcatgtctccctagaacatataaaaccaaactgtgctctgacaaccttgggcccatgtcatcaggacctcctgaagctgtgtcaaagggcgcatattctcaactttggcaaaataaactttctaaattaattgaaacctgtctcagattttcagggttcacagaaaacattagaaattagttatcagagttatctcatcattataatgtacctatagagttattgcagcaattcttataagagacagtatttaagtcaattccaaaaccatctatatatatagggcttaaattaartataaagctttgtagtatatgctcagggttgtacgcca

SEQ ID NO: 403533 - DNA, 603 bp, Homo sapiens
ataaatgtctatttcatatcaaatgctagttacatttcaaagaaatcatttgcattaaatcaaatgttgcattattcttcctgttctaaaatcataaacaggtatttaatcagaaagaagaccttgccaatattagaactttcttgtcttttaatttgcaatttacacattccttctaatagctcattcagtcctatgctaatataactaatgatttaacaacatttggaaatcaatttaaagactaagattgaaaaggcatgtttatatttctatgcaatttctacctaacagtgtttagactggtctgctgcatgtcctgtagtggcctatatctttaagcaaaagtatcaattatttttttctaaaacctgattcagaactcgttgcctctaggcagcctttaaggactaatttttggcayatgttttttccttattctgagtagcacctcagaatttagtcattttctgcttttctaagtcttacctgttatttggcgggaaacaggcagcaatcacataggttcatcagtagtgtttaagactaacccctccgtccaccacacaactgcaaatacatggaatatttaatcactaataa

SEQ ID NO: 403534 - DNA, 563 bp, Homo sapiens
ggaattaccaaaagggagagaagcatagccaatatccattcttccaccttctccagcaataactgggtttatcacgtcctgttcagcactgagactctttctctgcagacacaccagaaacactgtgatcctagactcctgctggggaatccaaggcaacttctaaagaaacatctgatttacaactcttcagcatgggatggctatacaaataaggaggtcttctagctgctctagcctgagggaattggatttgggaaagagaaatgaccagtcaaggcttggcaagtcctctagacctgcgcaggatcagagagtggatctttggtggcctgagaacatttgcacccactttaaagttgcttgtgttatatgcaggctaaatcaatacatgaagagtagtactgagtttaagaaacaaaagaataggcccatgggtatagctcaggaagaaacttccttacctgaragcctgaatgggtgaaagaaaaatgaatgaagcaggaacagaaaggtggaatttgaggctttgtggcaacagctcacagatatgattttgacag

SEQ ID NO: 403535 - DNA, 565 bp, Homo sapiens
cgctcctttgatcccccaaatcctcagaattttgcraaaagatattttgctctcaaagggcttttttattaaacacatcaaacatataaatatctaaaaaggaagttacggtatggaacaaattttggcaaatagctttgtcaccaccctactatactggttcttgacattaattccacatatgtattatatgcatacatatatgtgtgcattctcattatagaaaaaattctcaattgtctgtatatatttttaaatgttaattttataaagaattgaaaagtcacagctcaaagggcaggaattacttcaaaacagtctttttaatatgtggaaagaattagtcatataaaagagttcatctctactattattatgttgactttttgtaaaaacatgatactcttgtaagttagctatggaaactataacctgaagcaaagtatttccttaaaaggatcaattacaggaaagagatcttcccataaattgttaattgacattttctgtcaaatcacctttgcaaatgacccccaggagtattaaatgttgtgaaaacatcctc

SEQ ID NO: 403536 - DNA, 565 bp, Homo sapiens
cgctcctttgatcccccaaatcctcagaattttgcgaaaagatattttgctctcaaagggcttttttattaaacacatcaaacatataaatatctaaaaaggaagttacggtatggaacaaattttggcaaatagctttgtcaccaccctactatactggttcttgacattaattccacatatgtattatatgcatacatatatgtrtgcattctcattatagaaaaaattctcaattgtctgtatatatttttaaatgttaattttataaagaattgaaaagtcacagctcaaagggcaggaattacttcaaaacagtctttttaatatgtggaaagaattagtcatataaaagagttcatctctactattattatgttgactttttgtaaaaacatgatactcttgtaagttagctatggaaactataacctgaagcaaagtatttccttaaaaggatcaattacaggaaagagatcttcccataaattgttaattgacattttctgtcaaatcacctttgcaaatgacccccaggagtattaaatgttgtgaaaacatcctc

SEQ ID NO: 403537 - DNA, 565 bp, Homo sapiens
cgctcctttgatcccccaaatcctcagaattttgcgaaaagatattttgctctcaaagggcttttttattaaacacatcaaacatataaatatctaaaaaggaagttacggtatggaacaaattttggcaaatagctttgtcaccaccctactatactggttcttgacattaattccacatatgtattatatgcatacatatatgtgtgcattctcattatagaaaaaattctcaattgtctgtatatatttttaaatgttaattttataaagaattgaaaagtcacagctcaaagggcaggaattacttcaaaacagtctttttaatatgtggaaagaattagtcatataaaagagttcatctctactattattatgttgactttttgtaaaaacatgatactcttgtaagttagctatggaaactataacctgaagcaaagtatttccttaaaaggatcaattacaggaaagagatcttcccataaattgttaattgacattttctgtcaaatcacctttgcaaaygacccccaggagtattaaatgttgtgaaaacatcctc

SEQ ID NO: 403538 - DNA, 426 bp, Homo sapiens
ctgggtgttgttatcaatgaacagtgcttgaaaactccaggtccttcatctttggttttatttttgactctcagaataaccttagggaccctttcaagtttcagttggttcaaattaaaatgaagaggccaaactagattgtctctgtggtttctgtggggctgagaytcatgatgttggatgttaatggcaatgtagatttctaaatagtgtgaacaaacttcatttttagataggctaatgttttcctattgtagttggagccttgatcttaaaattatgtcatctggaaagtgatacttgaaaggttttaggccctcaatttattctgggaacaagccttttagtcatattcataaattttctaggtaaaaaatattcatttgctttattctcaaatagctcctgggaaagccccaagtgagg

SEQ ID NO: 403539 - DNA, 591 bp, Homo sapiens
accctcgttttcctagctttactttgtggtacgtgcgtttactgtagagtagagggctttttgaagaatgaacaaaggaaaactattctgctttccttatcttctctgtaatttcctgctagtgcccccacccttagctaccacccgcccccatactaattcaatcagcagactggcaaggctgattcctcatgcattatttagagcgcatgctggtggtgttagaactaggttaggcagctgtgaaaacctagaggctctcttgcgattctgatttgcatttttctgattcaactgtgttgttcccttgtgatattccccagagtccaaagtgaaggcttgagatgattcctgtaatttcttttttaaggtgaaaaatgttcctgtgatagagatgcaggaccaactgttaaagtttatgagagaatctgtttttaggagacaaaatgtatccaagatacatgtaaaagttgaagagcgaagacaaaacaacartgatgaaggtgtggaagacaggacaaaaagatattgaagctgggaaaaatatgatgaagcccttcaggcttttattcccaagatacttgtgatgag

SEQ ID NO: 403540 - DNA, 583 bp, Homo sapiens
tgaatttttttcccataaaatctccaacagcacctggaaagtcccttgcctgtaggaattgttcagaaattgttgaacaaaaaatgcaaagaaatggcagtttttaaaattgaagtctttaaaacgatagggaagcaagctctttctcttctgtgttttctgttcctttctcrggctggttacatagtttgagtcccaagatgatatgttagtgaaaaactttagttcttcacagatcgcctcctttgagggccaagagctcacaagatggcctgggtgagggttacttcaggacagcttcttaccccctgaagcaggagagttcttcctgtgtgaggtgtgcaggtgactttatccatcacactgaagttcccttcttagccaaacaaaggagtatagggttgagttagaccccctaacaatcaacttctcctggagtcatcctatttcatggaactttggggtccaactacatttcttttaacgagaaacttttagttgcctctggggtggggacagtgatctcccaagcagcaagaaccaggtctgtggaagtgaccccccatgcagtttgaaggtggca

SEQ ID NO: 403541 - DNA, 456 bp, Homo sapiens
aatacatatcataaacacacaaattacaccatttaaaatatacttactacaaaaagatcctgaacattattgattaatgcaaataaaactacttcgcattattataaaagtcaaaatattttacatcactttgtgcttttaaaactattgctagcttcccctgggaaaagtcaaaataactgtacattgtagaaaaaagtttttgcacttttgacccaaatacacgtatcaacacgagaagaggcacwataacatctaataattgttctaaatttccctgaaacaaacaaacaaacaaacaaaagctatttattcaatgaaatacatttctatggtaattgctaatttgatgtattcacgcgtgcacaaaagaactactttttcttggtcactaatgacagcaaacactagatgtctaggaatatatatatatgtgtgttatatatatatttacag

SEQ ID NO: 403542 - DNA, 456 bp, Homo sapiens
aatacatatcataaacacacaaattacaccatttaaaatatacttactacaaaaagatcctgaacattattgattaatgcaaataaaactacttcgcattattataaaagtcaaaatattttacatcactttgtgcttttaaaactattgctagcttcccctgggaaaagtcaaaataactgtacattgtagaaaaaagtttttgcacttttgacccaaatacacgtatcaacacgagaagaggcactataacatctaataattgttytaaatttccctgaaacaaacaaacaaacaaacaaaagctatttattcaatgaaatacatttctatggtaattgctaatttgatgtattcacgcgtgcacaaaagaactactttttcttggtcactaatgacagcaaacactagatgtctaggaatatatatatatgtgtgttatatatatatttacag

SEQ ID NO: 403543 - DNA, 567 bp, Homo sapiens
ctccttcctccaaaactgggggctcacagctcatatttaacctgtgccctcccccaccaagttcaastactgagttagaacttctgttctcctccaaactcgtatatatgtattaatttaatttaaaatccaccagtgctttttttttggccattaataatcaggggcattcatgttcctagctggtttatatttggatggttttttctctggattactccaaatttttgcctattgaattgatggtcacttaaaagacagaggaattactggcatgtagaatttggaaggaaatagaaaggcaaacgagaaataagaattagcactattctgcacggagatctatgatgagaaaagagaacgaaaccaaactccaagacgtttgtgtagctagtttgttagttactttgatatgctggtgtcatatcatcactatactggcaattggaaaaaatttaaataggtgcttgaatgattctcactataacattattttgattccatcctttgtccatgttaatgcgctttcccccaaatcctttgaagattctgtggaattcctcaaat

SEQ ID NO: 403544 - DNA, 567 bp, Homo sapiens
ctccttcctccaaaactgggggctcacagctcatatttaacctgtgccctcccccaccaagttcaagtactgagttagaacttctgttctcctccaaactcgtatatatgtattaatttaatttaaaatccaccagtgctttttttttggccattaataatcaggggcattcatgttcctagctggtttatatttggatggttttttctctggattactccaaatttttgcctattgaattgatggtcacttaaaagacagaggaattactggcatgtagaatttggaaggaaatagaaaggcaaacgagaaataagaattagcactattctgcacggagatctatgatgagaaaagagaacsaaaccaaactccaagacgtttgtgtagctagtttgttagttactttgatatgctggtgtcatatcatcactatactggcaattggaaaaaatttaaataggtgcttgaatgattctcactataacattattttgattccatcctttgtccatgttaatgcgctttcccccaaatcctttgaagattctgtggaattcctcaaat

SEQ ID NO: 403545 - DNA, 528 bp, Homo sapiens
cattagcctggaaaaaagatcacaattcaaaattcaaagcacaattattactgaatgtatatcactttsacaccatcataaagtcaaaccttcataagtctgggaccatctgtatatatttctgtgcgtgtgttgctgttattgctgttgttattcatttattggctttgtgtctttctttttgcatatgctgtttcatatgcctggaatcacccacttctccttttcacctggctgaccccactcatcttttgaacttccgtttaggtgtcagccccttgagggagccttcactcccccttcccactccaggctggatcagtcgcctatgtgctcctgtagcaccggcgcacacccacatcataacattcttcacaccagataaggggtattgacattgtgattttgaacactgtttagatccatgataattaataatttgcaataacacaaaatgattattttataatgattgtatgaatatatgattacagtattagtccattctcaggctactaataaagacat

SEQ ID NO: 403546 - DNA, 628 bp, Homo sapiens
agaggtaattttcctgtaatcacaggatgactcaggttagtagctttcagcgcttctgcaactcacataccatgaggtgtttttagcaatgtgcatatttagtgaacctaattcttcccaatccctataattttaaatttatgacaatgtgatataaagtaagttggaatttatttttgcatgaggtggaaaacagtatttgaaagtagttgtacagggtatgtaaaaattataagaacatatttagcatttttagaaagcaaaatacttttgtaggacttaaacatatttttaaatgagatttttatcacacaaaagtttacaatatcatttgtacttggaaatgatatatagwtgttaagtgtgaagttgcatgtattaaaaagtaaaatgaaaaagctatgcattttgtaattaggtcttttttataatgtaagttgtcttttaactgttcggaccaacttgcattttcactttagaattgtagtttaagtgtgtctttgaaatttaaagcagaattttatgctctctcttttttaattctgtgtcttctgtggcatttataataggagagccatttccaatatttgtatttctttttagttatgaaaaagtgaccatcgtatgc

SEQ ID NO: 403547 - DNA, 628 bp, Homo sapiens
agaggtaattttcctgtaatcacaggatgactcaggttagtagctttcagcgcttctgcaactcacataccatgaggtgtttttagcaatgtgcatatttagtgaacctaattcttcccaatccctataattttaaatttatgacaatgtgatataaagtaagttggaatttatttttgcatgaggtggaaaacagtatttgaaagtagttgtacagggtatgtaaaaattataagaacatatttagcatttttagaaagcaaaatacttttgtaggacttaaacatatttttaaatgagatttttatcacacaaaagtttacaatatcatttgtacttggaaatgatatatagatgttaagtgtgaagttgcatgtattaaaaagtaaaatgaaaaagctatgcattttgtaattaggtcttttttataatgtaagttgtcttttaactgttcggaccaacttgcattttcactttagaattgtagtttaagtgtgtctttgaaatttaaagcagaattttatgctctctcttttttaattctgtgtcttctgtggcatttataataggagagccatttccaatatttrtatttctttttagttatgaaaaagtgaccatcgtatgc

SEQ ID NO: 403548 - DNA, 566 bp, Homo sapiens
ataattttatctgccaataaaagtgctagtctgttagtttttgagggagtataatcacrgtattgtgtcaagagaaaacttcaaattatttttccctacatagatgcaccaatatatcagtgaggaaattaatctcaagcaaaattggaagattcttgttttgatatgagctgtgagggcagagacagagcctgagagggttgctctaagggtcaaaataatccaactgttagtggtgattttaggcaaactaatctttgtagtttaccttccacagaggcatattaaatatcaaaaatggggttgtgtacagatcaaactagtaaagaaatatcactcaacagatacattttgtatcgttagcaatcaagttttcattcctatcaacagcacacaaaccttggtatctctaccatgcagtaatgtaagaaagccagaggtgtgagggtgaaatgggtttgaagaacaacacaccagtgtatttcattctgctagaactttcggtaactagttttgtgatctttaaacaatcactctaccctcctggcctcagactgctgccaccc

SEQ ID NO: 403549 - DNA, 566 bp, Homo sapiens
ataattttatctgccaataaaagtgctagtctgttagtttttgagggagtataatcacggtattgtgtcaagagaaaacttcaaattatttttccctacatagatgcaccaatatatcagtgaggaaattaatctcaagcaaaattggaagattcttgttttgatatgagctgtgagggcagagacagagcctgagagggttgctctaagggtcaaaataatccaactgttagtggtgattttaggcaaactaatctttgtagtttaccttccacagaggcatattaaatatcaaaaatggggttgtgtacagatcaaactagtaaagaaatatcactcaacagatacattttgtatcgttagcaatcaagttttcattcctatcaacakcacacaaaccttggtatctctaccatgcagtaatgtaagaaagccagaggtgtgagggtgaaatgggtttgaagaacaacacaccagtgtatttcattctgctagaactttcggtaactagttttgtgatctttaaacaatcactctaccctcctggcctcagactgctgccaccc

SEQ ID NO: 403550 - DNA, 553 bp, Homo sapiens
gccaaaacctttttccactaaagattcaaagcattgtatagtgttgcttaattcaaaaaggttttctccgggttatagactgaatgtttgtggcctctgagaccaayatgtcgaagccctaacccccagtatgaaggtattaggaggcagaactttaggaggtttagatgaagttgtgagagtggggcccccattatgggcttaatggcctatttataagaagagaccagagagcttgctctatctctctcattctccccttcttcttccagtctcctgccgcatttcacgtgatgatgcagcaagaattaagccatctgcaacctggtaggagggtccctaccagaaccttaccctgctggcaccctgatctcagatgtccagcctccagaacggtgagaaataaatgtctgttgtttaagcgaagtctatggtattttgctatagcaggctgcaaaggctaagacaatcctcttaatgcttacaaccaaaatggatctaacagtttcaactgcaaatgagactatcagagagcaagtttccatagcaacca

SEQ ID NO: 403551 - DNA, 553 bp, Homo sapiens
gccaaaacctttttccactaaagattcaaagcattgtatagtgttgcttaattcaaaaaggttttctccgggttatagactgaatgtttgtggcctctgagaccaacatgtcgaagccctaacccccagtatgaargtattaggaggcagaactttaggaggtttagatgaagttgtgagagtggggcccccattatgggcttaatggcctatttataagaagagaccagagagcttgctctatctctctcattctccccttcttcttccagtctcctgccgcatttcacgtgatgatgcagcaagaattaagccatctgcaacctggtaggagggtccctaccagaaccttaccctgctggcaccctgatctcagatgtccagcctccagaacggtgagaaataaatgtctgttgtttaagcgaagtctatggtattttgctatagcaggctgcaaaggctaagacaatcctcttaatgcttacaaccaaaatggatctaacagtttcaactgcaaatgagactatcagagagcaagtttccatagcaacca

SEQ ID NO: 403552 - DNA, 484 bp, Homo sapiens
tagtcacactttcaaactcacaaggaatttgcttatataaataaaattcatgtggaaactattataggaaatttaaatccgcagcatttaaaatttaaatctgcagtgtttataaagttaactgtaaaatatcagaaaaacaaaatagatttatattacttatacacttaaaaataactatcttttaggttacccgatggtagtagaggccatagraaacttaggggaagatcttgggggtgctgttcagatactacaaattctgagcttgaaattgaagtcatttttaaattgcaatttgcaaggaacccagtttatgtcggttaccacttaacatttccaagtgcaacaaagaaaaacttgcttgttctagtgttctctaaaacgtattgcttgattgattccttgagaaaggggaaacgtaaatagactaaaatctactgagattttgatttaaatgaaaagcacacagtgtttctgtttt

SEQ ID NO: 403553 - DNA, 548 bp, Homo sapiens
tgtctttgacagacactttctaagtatgctcttctatcattttcttctgtatgggatatgctttttgtattacctgttgtttagtgggcaacctgtttttttaatacataagttagtgcattagatttattaaaatgataaacatgtgtggccttcactttatcactatatttactatttatacttttatcatgccttaaaaatatttcacagtacagtttggtttttattttctttrtattatatacataaatttctatttatttggaaagtatgttagattccctaatataagcaaggatacaattgctatagtcacactttatcctaaatctcttgaacaatgtgacttcatctgattacattatatttcttagtatatagttttataaattcaactattcttatacttctattgctcaatttaccagcacaatgttctccttggttataaaataggaaagcattagcatattcatattctcactctttctctttaaaaactatatttgtattttctttatattttcagtttattacctacatag

SEQ ID NO: 403554 - DNA, 640 bp, Homo sapiens
attattcttttacatgtggctagacagttttctgcaatatcattttaaaaatagggtgtccttcccctatcttatgtttttgaatccttcgtcaaaagtcagttggttggttgtaggtatttggctttacctctgggttctattctattccattggtttatgtgtctactcttayaccagtaccatgttgttttggtaactacagccttctaggacaatttgaagtctagtagtgtgatgcttctaaatttggtctttttccttagaattgctttgactatttgggaaattttttttggttctataggaattttaggatggctttctctaattctttgaaaaatgatgttggcatcctgataggaatttcactgaacctgtagtttgatttggcgatatggccattttcattatattattttctaatccatgaacacgggatttggtgccatttgtttgtgtcatctatgatttctttcagcaatgctttaaattctccttgcattcatcattcatctggttaagtgtatttctaggtattttttgttgtagcgattataaaaggaagtgaggtcttaatttgattctctgcttggttactgtttatgtatagaagttctacttatttgtgaacattgat

SEQ ID NO: 403555 - DNA, 640 bp, Homo sapiens
attattcttttacatgtggctagacagttttctgcaatatcattttaaaaatagggtgtccttcccctatcttatgtttttgaatccttcgtcaaaagtcagttggttggttgtaggtatttggctttacctctgggttctattctattccattggtttatgtgtctactcttacaccagtaccatgttgttttggtaactacagccttctaggacaatttgaagtctagtagtgtgatgcttctaaatttggtctttttccttagaattgctttgactatttgggaaattttttttggttctataggaattttaggatggctttctctaattctttgaaaaatgatgttggyatcctgataggaatttcactgaacctgtagtttgatttggcgatatggccattttcattatattattttctaatccatgaacacgggatttggtgccatttgtttgtgtcatctatgatttctttcagcaatgctttaaattctccttgcattcatcattcatctggttaagtgtatttctaggtattttttgttgtagcgattataaaaggaagtgaggtcttaatttgattctctgcttggttactgtttatgtatagaagttctacttatttgtgaacattgat

SEQ ID NO: 403556 - DNA, 640 bp, Homo sapiens
attattcttttacatgtggctagacagttttctgcaatatcattttaaaaatagggtgtccttcccctatcttatgtttttgaatccttcgtcaaaagtcagttggttggttgtaggtatttggctttacctctgggttctattctattccattggtttatgtgtctactcttacaccagtaccatgttgttttggtaactacagccttctaggacaatttgaagtctagtagtgtgatgcttctaaatttggtctttttccttagaattgctttgactatttgggaaattttttttggttctataggaattttaggatggctttctctaattctttgaaaaatgatgttggcatcctgataggaatttcaytgaacctgtagtttgatttggcgatatggccattttcattatattattttctaatccatgaacacgggatttggtgccatttgtttgtgtcatctatgatttctttcagcaatgctttaaattctccttgcattcatcattcatctggttaagtgtatttctaggtattttttgttgtagcgattataaaaggaagtgaggtcttaatttgattctctgcttggttactgtttatgtatagaagttctacttatttgtgaacattgat

SEQ ID NO: 403557 - DNA, 568 bp, Homo sapiens
cttaggtgcatataaatttagaattgtaatatcttcttgttggattgattcatttatcattatataatgatcttctttgtcttttttttttcctgttgttgcttttaagtctgtttcatcagyaataagaatagctaccctgcatgcttttggtttccatttgcatgaaatatctttttccaccccttcaccatgagttcacataaatccttacatgctatgcatgtctcttgaagacaacagatactgggtttctgatttttttcatttattctgctattaggtgtcttttaagtggagcatttaggccatttgcagtcaaggttaatattgagatgtgaggtacttttttggtggtcatgctaattgttacttagatacttgttttcctcattgtattattattttatcaaccctgtgagttttatgctttcaagaggttctattctggtgcatataaaccttttgtttcaggattcagaactccttttcgaatttttttgtagggctggtgtgatagtgacaaattctttcagcatttgtttttctgaaaatgacttgatttctc

SEQ ID NO: 403558 - DNA, 558 bp, Homo sapiens
aggtagtatcctcttttcatctgcagaaatgttgatgttccaaatagagaggacctgtgactctacctctcatgcatgcctgaacctggaaggtgtttcacttgtggggtggagtgtctttccagaaaaaaaaagtggtctagaaaggctgtctatakgtgcacccattctgagcttccatggaagaagtcccagttgtgtctgcagtggttgacatcaggataaagaagttcctttcttcaagactcttcacaagtgcagagctacatgtctgctaaggtagagcagcagactttccctgctaagcccagcactgcaactttgcctgtgctgaaataaacttcctgtcagtggaaaaatctgaaactcatggcctaccatccagattattttgttccatagagtgttcactagatgtggctcatccccccttcccttaggagaaagattccctgagaaccagactattatggatgctgctgctccttgaggtctagcctctcaatggggctgacactgcaggctggtattgaggaatgtctgccaggtgtccagtaa

SEQ ID NO: 403559 - DNA, 581 bp, Homo sapiens
attatgtttgaaaggtgtcagtgattttttttttatagataaaccccacctctatatatagtataagattttaagtactgttgatcaagtaaaaaactgtatgtaaacacacacatacatacatatatacacatacaattttatacacttttattttgataacagattaactttcagagggaatatagatataattccaayttcacttatatgtatatgaaaaattgtagtaaacaaatcacattaaactgacagcagtttgtgcactttgatatgtttacagctttacctgattaaatttagagcacaaaatttttccccgtagcaatttgtatgactgcaattctaacaaataacctgtttgttgggaagtaaaatatatatgtgactgcagcatttgaagcatgcatttcactcagatttgatatttaatttaagctgaacaagccaatagtatggagttgtttaaacatctaacatatcttaaaattcattaatagaaacttatatcaaaagcaaatacacattaatgattttcattaatcacccacattgcaggtattttgatcaattgtaaggtt

SEQ ID NO: 403560 - DNA, 488 bp, Homo sapiens
aggcctagtcttaatatgaaaaaaaaccagaaaagtgttttgtctactaaaagaaaaaaggaattttaaactggaggagctgcagaacctggaaaatatacactcacaggaccakgaaactatgcataggagtgaatattttaagagaactaagtaagatatgagtatgcacacatattttaaaagtggataatggattttgtcagtatctgagcactctcctgtgagttggaacttaatgctctggaatgttgctcaggccaattctgatgcatgtggagttgagttggcacgtggaaactaagaaaatagcaacaacccacattaaacaaaatgatgcttgcagaagagcaaaggctgagaataaatgaaaggagaaaagtcccagagaaataagaaataccaaatgtaagacacaagacaccagaaatctttgttcctcgacaagacacgtatgacactccatttacaatagcagcaataacagc

SEQ ID NO: 403561 - DNA, 488 bp, Homo sapiens
aggcctagtcttaatatgaaaaaaaaccagaaaagtgttttgtctactaaaagaaaaaaggaattttaaactggaggagctgcagaacctggaaaatatacactcacaggaccatgaaactatgcataggagtgaatattttaagrgaactaagtaagatatgagtatgcacacatattttaaaagtggataatggattttgtcagtatctgagcactctcctgtgagttggaacttaatgctctggaatgttgctcaggccaattctgatgcatgtggagttgagttggcacgtggaaactaagaaaatagcaacaacccacattaaacaaaatgatgcttgcagaagagcaaaggctgagaataaatgaaaggagaaaagtcccagagaaataagaaataccaaatgtaagacacaagacaccagaaatctttgttcctcgacaagacacgtatgacactccatttacaatagcagcaataacagc

SEQ ID NO: 403562 - DNA, 488 bp, Homo sapiens
aggcctagtcttaatatgaaaaaaaaccagaaaagtgttttgtctactaaaagaaaaaaggaattttaaactggaggagctgcagaacctggaaaatatacactcacaggaccatgaaactatgcataggagtgaatattttaagagaactaagtaagatatgagtatgcacacatattttaaaagtggataatggattttgtcagtatctgagcactctcctgtgagttggaacttaatgctctggaatgttgctcaggccaattctgatgcatgtggagttgagttggcaygtggaaactaagaaaatagcaacaacccacattaaacaaaatgatgcttgcagaagagcaaaggctgagaataaatgaaaggagaaaagtcccagagaaataagaaataccaaatgtaagacacaagacaccagaaatctttgttcctcgacaagacacgtatgacactccatttacaatagcagcaataacagc

SEQ ID NO: 403563 - DNA, 481 bp, Homo sapiens
ataatgttcaaatttacattaaactattcaggcaatgaacaatttgtttttattatcaacaaaatggcatatttgtctcaatttcaaataaaaaatctaaaataaaaattaataaaatagccaatgatagaaaaaactaaaaaaaataaatagaatttaattttactgtataatcagatctatatgatattaattttaataaaaagtaattattcaaaccatgttctcctttctttgtattactgctaagttactactagttgcatcaggtatgtaggagataccatagagaaaaaaacatttttatatatctttgcaaaaccatgttacaaatgttgttaaraaaggaatctggtgaagataaatatttcctctgctctagggatatattagagaataggttgataatgaaatgttagcaatataactcatatttactacaatgccagcaagcatcactgcaacctaccccactaaatat

SEQ ID NO: 403564 - DNA, 609 bp, Homo sapiens
tcccctttaacattgtaggaaggatcatctatgcagcttgaaaattgttttgtcgaggtgtatgacattttcatgtgagtgttttccagtgtccattgaagattaacttgtggtaatatgagtcagaattgttcatggattagttataaaagattaccacatttcaataggacaatacaaatgggaaatagtaccttatctattctgagtaggtccatacacttgagaagattttaccttgtccttagttttgtatttctcatctcacaactatcacagctgtcactccaactgtcttttatatgtggaaggtgtgaggttctattagatatgattagtgtaagtgcactgcctatttctatgtccaagcaatgtactcatttgaataatttaagtaatatacctcagttaacttaatttatacttaattatgaaacaatgtttttgactaaaacaatattacrtaacatagcctaagaaattcaatagttaattgtttcctgggattgtgagggaaagagtgtaaattactatttttgtgtattccaaagttatttttaacagccacatggattatattcttatattctactagccatatattactca

SEQ ID NO: 403565 - DNA, 596 bp, Homo sapiens
ggttgcatggactcattactgtaagccaaatgctaagttgaacctgtyaaattgagttctcctccaacgagtgagagaaaaggatgtcctgtgacatgcccagataactggtggctatagttatgtctgctaatatttggatgcatggagcttggctttggttagctcccttggttttactttcccaaaaaggaaacctccaggtgatgggcaccctatttattctcattgcctgacagcttttgcaggataatggctcaaaactagaatattgatctagacttttacattacccatcccctctgttccttctgaatgcccttaaaaattactggatggttcacaggcacaagcagggttagtctaaaatgtaggcaagaacctaaaacaactgagtctagaatttaatgatgaatgtatgataagttttcaaacataatttttctctctcccatcctcatttttgttaaaaactaataataataggactgagttgtttgcaaaatagactttcatcttatacttggcccgattatttgcataaagtgcagcaagaataattatctttacataggccttttagatgggctttcatg

SEQ ID NO: 403566 - DNA, 570 bp, Homo sapiens
tgtcatctttcatctctataagcttgtctgaatgaagaaaggatgyatttcataaattaccactttccttttttgaaataaatgttaatgtttatttgggggaaattatttctggagaattattggaaagaatgcaacaaaaatatgtaatttaaataatttatcatattttagagaatatgtaaatgactatgggaaaattaatttactacaggaactcattcctaggggaaaacaaacaagatacagcagtaaaatttagttttttcagatatatcccatctatgcatattatctcataaaggttgtatacatatcctttttgagtctcatttatttattgtaaaatgagaataataatgttatcataatattgttacaagaatttaaatataaaatggaatatacctaaaccaaaaacagataagtagtttaatggtcaataaataataaactgccattgatactatgtttcttaatgttagcaaggcttgttttgtttatatgtgatccacatgaggtctcccagtttgtttataaatatttctcaggatttctaaaaagcaaatg

SEQ ID NO: 403567 - DNA, 570 bp, Homo sapiens
tgtcatctttcatctctataagcttgtctgaatgaagaaaggatgtatttcataaattaccactttccttttttgaaataaatgttaatgtttatttgggggaaattatttctggagaattattggaaagaatgcaayaaaaatatgtaatttaaataatttatcatattttagagaatatgtaaatgactatgggaaaattaatttactacaggaactcattcctaggggaaaacaaacaagatacagcagtaaaatttagttttttcagatatatcccatctatgcatattatctcataaaggttgtatacatatcctttttgagtctcatttatttattgtaaaatgagaataataatgttatcataatattgttacaagaatttaaatataaaatggaatatacctaaaccaaaaacagataagtagtttaatggtcaataaataataaactgccattgatactatgtttcttaatgttagcaaggcttgttttgtttatatgtgatccacatgaggtctcccagtttgtttataaatatttctcaggatttctaaaaagcaaatg

SEQ ID NO: 403568 - DNA, 570 bp, Homo sapiens
tgtcatctttcatctctataagcttgtctgaatgaagaaaggatgtatttcataaattaccactttccttttttgaaataaatgttaatgtttatttgggggaaattatttctggagaattattggaaagaatgcaacaaaaatatgtaatttaaataatytatcatattttagagaatatgtaaatgactatgggaaaattaatttactacaggaactcattcctaggggaaaacaaacaagatacagcagtaaaatttagttttttcagatatatcccatctatgcatattatctcataaaggttgtatacatatcctttttgagtctcatttatttattgtaaaatgagaataataatgttatcataatattgttacaagaatttaaatataaaatggaatatacctaaaccaaaaacagataagtagtttaatggtcaataaataataaactgccattgatactatgtttcttaatgttagcaaggcttgttttgtttatatgtgatccacatgaggtctcccagtttgtttataaatatttctcaggatttctaaaaagcaaatg

SEQ ID NO: 403569 - DNA, 570 bp, Homo sapiens
tgtcatctttcatctctataagcttgtctgaatgaagaaaggatgtatttcataaattaccactttccttttttgaaataaatgttaatgtttatttgggggaaattatttctggagaattattggaaagaatgcaacaaaaatatgtaatttaaataatttatcatattttagagaatatgtaaatgactatgggaaaattaatttactacaggaactcattcctaggggaaaacaaacaagatacagcagtaaaatttagttttttcagatatatcccatctatgcatattatctcataaaggttgtatacatatcctttttgagtctsatttatttattgtaaaatgagaataataatgttatcataatattgttacaagaatttaaatataaaatggaatatacctaaaccaaaaacagataagtagtttaatggtcaataaataataaactgccattgatactatgtttcttaatgttagcaaggcttgttttgtttatatgtgatccacatgaggtctcccagtttgtttataaatatttctcaggatttctaaaaagcaaatg

SEQ ID NO: 403570 - DNA, 590 bp, Homo sapiens
ctcttgggcaccagagacattttgagcacgttgatagtgtttaaaatcttaattttgtgctcatagtttagaaaagtgaaacgtaaaaaaagtcatgtgkttttcctccccacgtatgccagttgggtgatacttcacgttataagcctgatagtagcagctagaagaagtatagtgttaataaaatgctgattatttcagaggcctggactttataaactattttcttctctggttctgctttgatgtctaatttaactttgcaaaaaaatacattagtgagtattagagtcacttctaagataatggaggaggggttatttaatatgttccatatagtaaatgagttatatattacaataaagtcacagtttcttacttcaactctgcatttattttaagtgacatagaatatgctgaaaaaatgcatgcggttatcactgatagcaatacaaatgtcattctgaatactcccaggacacttcaacagcctccatagaaaagtaatccagtgataatggtgagagtcaacacttactgaacacttaacaccatgttaagcacagcaagtatgttttatcatttcacct

SEQ ID NO: 403571 - DNA, 590 bp, Homo sapiens
ctcttgggcaccagagacattttgagcacgttgatagtgtttaaaatcttaattttgtgctcatagtttagaaaagtgaaacgtaaaaaaagtcatgtggttttcctccccacgtatgccagttgggtgatacttcacgttataagcctgatagtagcagctagaagaagtatagtgttaataaaatgctgattatttcagaggcctggactttataaactattttcttctctggttctgctttgatgtctaatttaactttgcaaaaaaatacattagtgagtattagagtcacttctaagataatggaggaggggttatttaatatgttccatatagtaaatgagttatatattacaataaagtcacagtttcttacttcaactctgcatttattttaagtgacatagaatatgctgaaaaaatgcatgcggttatcactgatagcaatacaaatgtcrttctgaatactcccaggacacttcaacagcctccatagaaaagtaatccagtgataatggtgagagtcaacacttactgaacacttaacaccatgttaagcacagcaagtatgttttatcatttcacct

SEQ ID NO: 403572 - DNA, 513 bp, Homo sapiens
agaatctacaaatagcagaattagaactctaacaattctctataggaaagagaagtaacagtaatagtgactaactttagaggttaaaaaaaatcaaggtaaatctaaaatatgggacaataataaggaaggagtactaaagattaagcagtctcagaatttcactcattcccaggaaatgacagacttcaggttttaattttttttctgttytgttacattgccatatcattcatgcatttatttatatttggattaagttccacatctactttttaacacattttgtctagtttcattagggtataatgaacaaaatctttatacatataaggtatataatgtgatatattgagaaatgattaccattatcaaactaattaacatattcatcacttcacatagaaaacatttttctgtgtgtgatgggggcatttaagatctgctctcagccagaagaggtgactcatgcctgtagtcccagcattttgggaggccgaggtggcaggattg

SEQ ID NO: 403573 - DNA, 568 bp, Homo sapiens
gagagttaaggattttgagcaagtgagatgacttgcagttatctgtgtgggttccctgttgtcataacatttcttaaaagctgaaaaccttttctggcccaggtcagagggacatgtcatttaaaaaatcgtcagtaagatgcaaccttgctggctttgaagatggataaagaaggccacaagctcaggaatgttggcagcctgcagaagactgccctgactccttcagaaaagaacacaggcccctcaacaccacggggtcggctcagggagacccatctgcaggttagaagccaacatcagccttccaacctgtggaaatatgaggtgagatctttgtggtttctatgccactacatttgtggtaatatctcacagcagccagaaaaaaatccaatgtgcttttcttctttctataatgaagaaaacatgtttattctcgatgagcaaacggaagactttctgtgaatccaagtaccttctrttattaaacagctgggtgtgaatttggaagtcagtgtagctgggagacttagaatcaaagagcagctgtggcactcaaaatatg

SEQ ID NO: 403574 - DNA, 638 bp, Homo sapiens
gtaggtggtaacttctgtgttgacaggtggtctccatggaaagcggtgaccacgtctgggtgttgctatgacaatggtaaactggcatggcacactggaggaggtgtcttatgaaaggctgcttctgccccagatctgttttagctagttctctatttggtccagtgtctaagccctgcttcctgagtcaagtcccacctcctacctcaccagccctgtaccaggagagctcctgatcattttcctccttcctgggcaaagcatttctcctgtcactgtgtgtcaaatctgatgctgcctcagcccatctgtgggagctccttcactccctccccaagccagcatgctgggcatgactttctcacaggaggggcagaggactgctctttgtttgtttctttgatgcttkcattttcatcctctactgttagattccatgtcaagtgtgggattgtgctgtgtcaagtaagttgtatgataccaactttgagacattcaaatccaactttttcttctcaggattttatagtggaaactggtgggttatataaatctcagtcattttaaacaaaaaagatcaagtttctaactttgaactgcaaacagacaataattcaggaaaattttcttctcttata

SEQ ID NO: 403575 - DNA, 629 bp, Homo sapiens
ttttcatgccgctgcttatcatgcaaagttatagctagcaacaattactcttcttgatataaaaatgcttctatctagatatgggatttagaatttgcagaagtctttcatataagccaagtgtccatgcaagcactgtgaatcccctgtgtgccaggtgctgccttggactctaacaatcaactatattttctctaatattagggaacttcatttcatgaaatataactctaatatagtttgacacattttataatggtgatataagacacgttataccatagctatacacagtgaattaaacacaggtaagggtcacatgactcgtccctggcatcaaggggasggagaaggtggtggtggaagtgtcttcttgaataaggaaggctttacgcagcaaaggtgtgagcttgaagggaaaccatttggtgaacaggcaagttatcttttgagaaactgttgaaaaagttgactcagttgacctcatcagaaaaaaaaaaaaaattaggagctaattttgttgtctgaatttaaagttttaggaaatacaactgtatgacttctatactctacggtgttataggatactggaacatttagggcaggattgttgggctaagagaccacag

SEQ ID NO: 403576 - DNA, 439 bp, Homo sapiens
gtggtagagaagacaattgaccacccattgattatctaagtgattttgtctttggtcattgtactcaatagttacttgagggtccctttctcsctgttccaggaattgttctagagaaatgctatgcaaactgtgttatagagcataaaaaagatgcggaaaagaaagcaatattgaggactgtgtgatttcctttccttttattggcgttttcttcactagaccgtacaacccatggggtagcccttggatgtcttcttcactttatattttaaggttttgaatgatatttagcacatatggggcgctgagtgttttataaataatacaataaatttctacttcgtctaaagtgtttccatagttttcaatattatctacattctctcttacaaagattttttgaagaaacatttatgcacggaaaaagtgtttaaaa

SEQ ID NO: 403577 - DNA, 439 bp, Homo sapiens
gtggtagagaagacaattgaccacccattgattatctaagtgattttgtctttggtcattgtactcaatagttacttgagggtccctttctccctgttccaggaattgttctagagaaatgctatgcaaactgtgttatagagcataaaaaagatgcggaaaagaaagcaatattgaggackgtgtgatttcctttccttttattggcgttttcttcactagaccgtacaacccatggggtagcccttggatgtcttcttcactttatattttaaggttttgaatgatatttagcacatatggggcgctgagtgttttataaataatacaataaatttctacttcgtctaaagtgtttccatagttttcaatattatctacattctctcttacaaagattttttgaagaaacatttatgcacggaaaaagtgtttaaaa

SEQ ID NO: 403578 - DNA, 594 bp, Homo sapiens
aacttctttacttttactgagccttaagttttactyattttgctagccatgctttctgttcctgcagcattaaagtttgactgagaaaagaaaacactagagagtagaacacttttcttttttactggtactgcagtggatggattcgtccactcagggcctggcagtgctgggtgccttcatgagtttctgacatgcccccactgggaacagtaagctccctttcctaaggtactatttttggggccaccctgaagggctcccttcacccttcaattttcttaagcaaaccttaatgattccagagaggctatcttacaagaatgacctacaaatatctcaggcttgttcacacaaactcaggaaattcaattcaatgctgtagccatttctcctgtactgctgacgatgaggctatgggtaatcccactctgcctttaggtttacccagtagtagcagataccacatcctgtccttatgacttgtccttctaagtgaatggatgcaagttcagctctacgcatgcagctggagttcctgccactgggttcaaggtgaaggatgttgccaccaactctgccgccctccccaat

SEQ ID NO: 403579 - DNA, 582 bp, Homo sapiens
gttttgttatgatctgatacatacaaatccctaggtacatagtgcctgggtggacctggattctgcacgtgtggaagacgcagctgttagaggaggcaccctctttgattgggccatgccaggctgtcaccaacgatttggcatccagaggccactggagcatatgagaagcagtcaaggtgccctgaatgttccagagaacattgtggaacactggaagctcaggacsgccaaactgtgttgccatactcactgcagcagaggggaaagtgtaaaattacaagagaaggaggcccgtgttcaaggttgggggcagtcagctttccaactgggactcctcatggcccagccctgggctgattcctatcttcgtgttgaatgcagcatctctgctcaccccaagacagtccagtccctgacacactgagagtaagtttacagagcccaggtttccaccttgtaaaataaggatgctaataaggaaaataaataaataaataagatggaatttaattacttattttgaaaactggtgacttcacagcattatacgaatataaaagacgaaataataggaagggt

SEQ ID NO: 403580 - DNA, 609 bp, Homo sapiens
gatgtttcagttccaaatcgaaggtactgtttaccatccacataagtttttacttggttcacgttctcgtctcctcattaaaaactgaccctaatttgtagtaattcacgagtcttctcagatcaktcttactcatgcattcctccacgggattgcacctgtcagccatgcagaaacatgactttcaaggaggagctgctgttttctcagggcactttttccgcaggggtccccgaccaagagtgcaaacttttctccagaggtgagggtgggagtgctggcctgacagtgtttgccagaagcatgtgaagactgttgaggaaccattttgaggtcttgtccactgctcttgagatgttataaatcacctgaagaatataaaatgtggtacttgctcaagtgacagcatccctttcccaaagcagtggcatttaccaatatcacaaggctttgcaagacagaatagtgtttaactgtgcatgctctggagtcagagtacctgaatttaattctgccttcaccatttgctggcagtgtctgggtttcttcatctgcaaaacagtaacaataataataagaatgataaataatgatagtacaaataccatc

SEQ ID NO: 403581 - DNA, 609 bp, Homo sapiens
gatgtttcagttccaaatcgaaggtactgtttaccatccacataagtttttacttggttcacgttctcgtctcctcattaaaaactgaccctaatttgtagtaattcacgagtcttctcagatcattcttactcatgcattcctccacgggattgcacctgtcagccatgcagaaacatgmctttcaaggaggagctgctgttttctcagggcactttttccgcaggggtccccgaccaagagtgcaaacttttctccagaggtgagggtgggagtgctggcctgacagtgtttgccagaagcatgtgaagactgttgaggaaccattttgaggtcttgtccactgctcttgagatgttataaatcacctgaagaatataaaatgtggtacttgctcaagtgacagcatccctttcccaaagcagtggcatttaccaatatcacaaggctttgcaagacagaatagtgtttaactgtgcatgctctggagtcagagtacctgaatttaattctgccttcaccatttgctggcagtgtctgggtttcttcatctgcaaaacagtaacaataataataagaatgataaataatgatagtacaaataccatc

SEQ ID NO: 403582 - DNA, 609 bp, Homo sapiens
gatgtttcagttccaaatcgaaggtactgtttaccatccacataagtttttacttggttcacgttctcgtctcctcattaaaaactgaccctaatttgtagtaattcacgagtcttctcagatcattcttactcatgcattcctccacgggattgcacctgtcagccatgcagaaacatgactttcaaggaggagctgctgttttctcagggcactttttccgcaggggtccccgaccaagagtgcaaacttttctccagaggtgrgggtgggagtgctggcctgacagtgtttgccagaagcatgtgaagactgttgaggaaccattttgaggtcttgtccactgctcttgagatgttataaatcacctgaagaatataaaatgtggtacttgctcaagtgacagcatccctttcccaaagcagtggcatttaccaatatcacaaggctttgcaagacagaatagtgtttaactgtgcatgctctggagtcagagtacctgaatttaattctgccttcaccatttgctggcagtgtctgggtttcttcatctgcaaaacagtaacaataataataagaatgataaataatgatagtacaaataccatc

SEQ ID NO: 403583 - DNA, 609 bp, Homo sapiens
gatgtttcagttccaaatcgaaggtactgtttaccatccacataagtttttacttggttcacgttctcgtctcctcattaaaaactgaccctaatttgtagtaattcacgagtcttctcagatcattcttactcatgcattcctccacgggattgcacctgtcagccatgcagaaacatgactttcaaggaggagctgctgttttctcagggcactttttccgcaggggtccccgaccaagagtgcaaacttttctccagaggtgagggtgggagtgctggcctgacagtgtttgccagawgcatgtgaagactgttgaggaaccattttgaggtcttgtccactgctcttgagatgttataaatcacctgaagaatataaaatgtggtacttgctcaagtgacagcatccctttcccaaagcagtggcatttaccaatatcacaaggctttgcaagacagaatagtgtttaactgtgcatgctctggagtcagagtacctgaatttaattctgccttcaccatttgctggcagtgtctgggtttcttcatctgcaaaacagtaacaataataataagaatgataaataatgatagtacaaataccatc

SEQ ID NO: 403584 - DNA, 529 bp, Homo sapiens
ttagtgtattttctgtgtgacccaagacagttctttttccaatgttgcccagggaagccaaaagattggagaaccctgccttatagtttaagcattcaaaaaaaaaaataaataaataaatgagaaaccgtaccattgyatttcttttagcatggatatatatgtcataaatcattattgttttacaataaatatcaaattcagatgagattgggcacgttcagggtggtatggctatagataataaataccaaatttaaatcatcggtgctatatgggatgtctatttattcaatgctttctcatttacttttaaagcaaatacaccaaaatagatggctgtttcgcagcacttggaattggcgggtcaatcatgtgttggaatgttcaataggtctgttgtcctattttcatatttggagactctttagttttttgcattatttttcagctggacttttttgcttttattccataatagtgggtacggaaatggtaagccattatcacagcatcatccctggcttaa

SEQ ID NO: 403585 - DNA, 529 bp, Homo sapiens
ttagtgtattttctgtgtgacccaagacagttctttttccaatgttgcccagggaagccaaaagattggagaaccctgccttatagtttaagcattcaaaaaaaaaaataaataaataaatgagaaaccgtaccattgtatttcttttagcatggatatatatgtcataaatcattattgttttacaataaatatcaaattcagatgagattgggcacgttcagggtggtatggctatagataataaataccaaatttaaatcatcggtgctatatgggatgtctatttattcaatgctttctcatttacttttaaagcaaatacaccaaaatagatggctgtttcgcagcacttggaattggckggtcaatcatgtgttggaatgttcaataggtctgttgtcctattttcatatttggagactctttagttttttgcattatttttcagctggacttttttgcttttattccataatagtgggtacggaaatggtaagccattatcacagcatcatccctggcttaa

SEQ ID NO: 403586 - DNA, 534 bp, Homo sapiens
ttctgaggaaaaaaatgatccaatatgtcagaaagatctggaaaaatgtcccaaacattatatactatagtcttctttgggcaattgtgacttaatctgggaaaagtgacttaatctacaggttactatatattttttgtattgaaatatatacggtaaactagacggcatgtgagccctgtcaccctcaaacattgtcatcttgaatcccattcagaatttctttattattacattgttattattttttgtggagagacggtctcaccatgttgcatgggctagtgtcaaagtcctcggctcaagcgatcctgcccacttggcctctcaaagtgctgggattacagcctcacaacaccacacctggccacattycgcatttcttaatgaagaacatatatttgacttgtcccaaggaaccaaagtcaacactgattccctgcaggttctgcgtcagctcgcaccatgaagagtttttctgtatgaggaatgcaagggttggaatggcttccaggaagcagagccgttcacacc

SEQ ID NO: 403587 - DNA, 588 bp, Homo sapiens
ctctttaaaaaagaaaaaaaaatgagttgttaataatcagttaacctggcactgagctttaaattgaatttaagaaaaaaacaaaaactctgccccattagtgcaagagtaaagttgggttgttgaaatgcaaatgcaaatgcatgtagtctccccctgtctttagtttgggaataagaaatacatatttgaacgtaaagrattttttgttgtcgttgtcactttctgtttttatttcataaggctgcttaacagttttactttagtttggagaagcacagttctgaaaactaaagggggtaaatcccgtcattatctctgcaggtgagatgggtctgtatcaactctaagactgaacgactctgaaggtgaaataataaatgacgcatgcctgaggtcttttctgggaaggaaatcgcccccaagagaagggttttttagcccagaaagcactcaggctgcctctttgcctgccctcatggttgctgagggacgtttaagtcaaactgaaagtactgcatgacccgatgagaatcattaacctcattagcaacatggacgagcaagatggcgaccacatatcccctc

SEQ ID NO: 403588 - DNA, 588 bp, Homo sapiens
ctctttaaaaaagaaaaaaaaatgagttgttaataatcagttaacctggcactgagctttaaattgaatttaagaaaaaaacaaaaactctgccccattagtgcaagagtaaagttgggttgttgaaatgcaaatgcaaatgcatgtagtctccccctgtctttagtttgggaataagaaatacatatttgaacgtaaagaattttttgttgtygttgtcactttctgtttttatttcataaggctgcttaacagttttactttagtttggagaagcacagttctgaaaactaaagggggtaaatcccgtcattatctctgcaggtgagatgggtctgtatcaactctaagactgaacgactctgaaggtgaaataataaatgacgcatgcctgaggtcttttctgggaaggaaatcgcccccaagagaagggttttttagcccagaaagcactcaggctgcctctttgcctgccctcatggttgctgagggacgtttaagtcaaactgaaagtactgcatgacccgatgagaatcattaacctcattagcaacatggacgagcaagatggcgaccacatatcccctc

SEQ ID NO: 403589 - DNA, 594 bp, Homo sapiens
taactttctcaaagtcatgcagcttaataatagaagaactgggaattaaacacaggcagttcaacttcagagtctgtacccaggagtcagagaaagcacatattrgttctgtactcatgtaatttaaatcactggttgttctacaagtgaaaaagtataagaaacaaaacaaaacaaatcagtatggcaaccacacaaataagaaaatcagaaaaccctccaaattctgtgttcaacttagaacatatatatgaaatggtgttttttgtttgcttatttttttttgctttggttttaaacagtttaatgttcttatttttcatagctggaaaatatctctttttgctgaaaaactatttttctccaaaatactgattatattctctgtgttataaatgggaaaatgaaacaggccctcaccagatttttcatttagcaaaactgtacaaagagaagaaatctgttgtttggccaaatttgaatacagatttccctgagagtctgactgtgaaaaataagctgtggtaagagttttttaggttaagataatactaaacactatattgaagatgggagaggtgattgccatttttc

SEQ ID NO: 403590 - DNA, 525 bp, Homo sapiens
atattggttctgtactcatgtaatttaaatcactggttgttctacaagtgaaaaagtataagaaacaaaacaaaacaaatcagtatggcaaccacacaaataagaaaatcagaaaaccctccaaattctgtgttcaacttagaacatatatatgaaatggtgttttttgtttgcttatttttttttgctttggttttaaacagtttaatgttcttatttttcatagctggaaaatatctctttttgctgaaaaactatttttctccaaaatactgattatattctctgtgttataaatgggaaaatgaaacaggccctcaccagatttttcatttagcaaaactgtacaaagagaagaaatctgttgtttggccaaatttgaatacagatttccctgagagtctgactgtgaaaaataagctgtgktaagagttttttaggttaagataatactaaacactatattgaagatgggagaggtgattgccatttttcaactagtccatctgggtcagtttgatatga

SEQ ID NO: 403591 - DNA, 531 bp, Homo sapiens
aacaaaatcccagccagtttctccttctggtaggaacctccattctttatgagtgactctcttagagcccctccttctcccagtttggctttagaaagaaaagaatctccatttctcccctaaggaggagtaagggatatatctaacacaatcactgcatgtatgacactttccatctctctaacctattcatttcatataagtgaaagatcataatacagaagggttagttccatcacttactactaactctgaaggaagtgtaaattatgggtacttaatacctcagacttttcagctttgaccctaaacattgaacattgagtcccactgaatatcctgatacaaaagcaaaatttaacatttttaatgctatcccacagcttttgtctactattttctaaagttgtattttgctttgtttttctaaaagcagtcaggaaaataaatattktattaaacccacagttatttgcatacaactaataattgaattttccagactactatgcaagaagtatatttactatt

SEQ ID NO: 403592 - DNA, 569 bp, Homo sapiens
ctatgtgctaagtacaaagtttttcactgagaaagtgatcaaattctattaataatgcaatcaaattttataaataatatgagtaagtcaagtcaaataaggactgagaaatgactgcttatgaggctcataaaaaagaaaacaaatatatttgaagtttgaaacaaacaaaatggaaagaaaaagatcaggaaaatactaacaaaagctaacagcaatttttaacattagactccaaaacaaaatttaaaagatggaatatttcacattgctgccagaaataaaataattgctatccacttggtatcagcagcctcacaaatctaccatcccagtagtggcatgtgaataaagtagttctggtaggaaatgcgtgggcccaacagcasagcttcgcatttacgagcctgctgctatgatttgaatgtttgtgttccctccaaaatttatgttgaaacttaatcgccaatgcaggagtattaactggtgaggcctttagcagatgattatttcatgagggcttctccttcatggataagattaaagcccttataaaagagacttcacaa

SEQ ID NO: 403593 - DNA, 625 bp, Homo sapiens
atgaattgatgagtgcagcaaaccaccatggcacatgtatacgtatgtaacaaacctgcatgttctgcacatgtatcccagaacttaaagtataatttttttwaaaaaaatctcaatttccaactatttagaaacaatttccaactactcatgcagtggatttcctgtgattatactcaagttttttagattttagctctggatctcaaaaccagacaatgaaattcatgaaagctctgaggagaggtgagtgttattctccaccagtttgtggacatggataagtaacacagatatttcagaaacgaagaaaacctttactccttgtacagcatgaccaccaattttgtgaaatgattataactttctctttgccaacaatgtcttaggaaatgaccgggtggttctcctctaccatccacaaactaagaagaaggtacaaatagctcttctttatagtattctaaggaaagacagatttcaaactagatagatcaaaacactggttattttctgatccctaacaatatatgatgcttttgtatgtgaagtctcagataaaatcatatttatatgatggaaagaattatgatggcagaaaggatagaaagttttgaatgtgtga

SEQ ID NO: 403594 - DNA, 625 bp, Homo sapiens
atgaattgatgagtgcagcaaaccaccatggcacatgtatacgtatgtaacaaacctgcatgttctgcacatgtatcccagaacttaaagtataatttttttawaaaaaatctcaatttccaactatttagaaacaatttccaactactcatgcagtggatttcctgtgattatactcaagttttttagattttagctctggatctcaaaaccagacaatgaaattcatgaaagctctgaggagaggtgagtgttattctccaccagtttgtggacatggataagtaacacagatatttcagaaacgaagaaaacctttactccttgtacagcatgaccaccaattttgtgaaatgattataactttctctttgccaacaatgtcttaggaaatgaccgggtggttctcctctaccatccacaaactaagaagaaggtacaaatagctcttctttatagtattctaaggaaagacagatttcaaactagatagatcaaaacactggttattttctgatccctaacaatatatgatgcttttgtatgtgaagtctcagataaaatcatatttatatgatggaaagaattatgatggcagaaaggatagaaagttttgaatgtgtga

SEQ ID NO: 403595 - DNA, 672 bp, Homo sapiens
tgattagtttcttttgaggcttctcttcttgactgatagattggtgagttctctttcttattacatgtattccctctgtgtatatctgtgattttatctttttataagaacatcagtcatattaggttagggcccaacttaatggcatcatactaaataaattacctctttaaagacccaaagtccaaataaagttacattttgaggtactgggggttaggacttcaacayagaattttgggggtagacaattcaactcataacatatagctactcacattttgtttcttttcttgtgcgagttttaagttgtatttttcaaggaatttgctcatactatttcagatgtcaaattcattggaataaaattgtttataatacttttaatatctacaagctttgaggtgatgtccctctttcatctgttatattagtaatttatacttactctatttctcctcttgatcagtcctgctagaagtttagcaatttcattaatcttttaaaaaggatggtcttttgactttgttgatttatctattgttagtgcgttttctgtttcattgatttctatttctatctttaaattttcacctttcctactttctttggttctaatttattcttcctttttcaaatttcgaaagagtaagattggataattcaatttaa

SEQ ID NO: 403596 - DNA, 616 bp, Homo sapiens
atccaatgcttcatgagctctagggaaatatacttggtagccaacccattttattgcaaaattgcctatataggttaaaaattaagagaaataaggcatccccctctctcctttgctgcagcctctggagcgccttgccctctccctaccctctgcctcctcactgtctcatatcctgtgactcacaggacatgtgctccgagccacagaatcccacagtgaatgtgtctggcagctgccaggtattctccccaccaggaggctccacacatgctccctgaaacgtgctgcagcaagcactgtgaaaaatgcactttctcgtcgcttgacttggagagagtcctatgtgtttgaagacttaacagatgccacagaagcctcagaaatgctctctccgaggttaagctccctcctccagcaagtgggacattttcacatccaccgtcttagcttagggcagtagggatttcctaaagatgaacaaccctgyctggttacaggtagattgttcttgagacacaggccacacccctcccggccttcccatccttggcagggtcctagaatgctgtttccacttttccagatgcaatggtgagaaatttggtggtgatta

SEQ ID NO: 403597 - DNA, 572 bp, Homo sapiens
aagatctcaaaataaaaagctattttaaaagcctgaatgattcaccttcctcactgatgatctttcacactgttatgtcaaaaggaaatcttggatttacatacagcccctggagatggttcattgtcttgtcatttctttttcattgagcccagaggagaagattgttgctatgctgttgtcattgcagcttttctttttttcagttgcatttccaaagtaaatatctctcttatttgcagcctctaaattgcaagattgtcgccatggttattcttgctgctcctctgagctttatcacttcctctccggatgcggtttgttctgcttgtaggtttgccttcgcctcaaaggagcgaaaaatgaatcatttcagagtgctctgtgcaccaacatagtrcgatgttgtctacctttatatgattcagtcgaaacgacatggaaaagttcctggtttaattgatatggtcctctgattgttgttgacaactacagatacactgtcctagccatgtggatggcaaaagcagccccatatatgtcatctggggtggcgttcaggtggtgaagat

SEQ ID NO: 403598 - DNA, 619 bp, Homo sapiens
ccctcagagagtgttctcacttctggctccacttcctcccaaggtgtctggggcacgagttctgccggatggcagcgtaactggctttggtgttgatttatgagtcaccactggggtgagatgagggaggcagactcaagtacgtgattacagggcaccaagagaccacctgcccaacagatcttcactcattgccttaccaaacctgaaattaccttagcaaaagcaagtaaatgtggccactctarggccccgacctggattcctagccagaccagccactggtgctctctatctgatgcagccaggttggtctctctcaacctccccaaacatgcccatgccttcctgctcctctctacctgggcatgggctatgcccacctccaggaggtccaccatgaaggcgtgagcccagtaatatggaaatgtctgttatcagggcctttagggtatcctgtgatggtgggaaggggatgctagcacggggccaggaacagcaggaggtttgaggctgcattggagaaggacagagctgggctcttgaatcctaaggctttcatctcaggcatgaatctggtgacatcaggacattctccagagcccattggtacaggcag

SEQ ID NO: 403599 - DNA, 489 bp, Homo sapiens
gtgatagagtaatttaagggctactctgaattagattggcaagaaagaccttttggaggagggatatttgagccaagagctcagtaacaaatagaagccagctatgcaaagatcaccacctttgctggtgcaaagrccctgggctgggagcagcctggcatgtgaaggatgagtataggaaactggaatcagggcctagaccacacgaagcctcccaagctgtggtggtgagtgattggattttatttccatctcaactgaaagccactgagtagttttcagtaggggagggtaacctgttctgattttcattttgaagggaccacgctaactgatatctggcagtgaattgagtggggctacagtgggaaagcaagtccttcagaggaaagatgttggcagcttcaactagggtggtcatggaaggggtaggtagaagtagatggatttggtgcacattttagatggtagatggtatgggacttacta

SEQ ID NO: 403600 - DNA, 546 bp, Homo sapiens
tagctattcatatatcagacaaagcaaactttaaagcaacagcagttaaaaaacacaaagagggacattatataatgataaaaggacttgtccaataggaaaatatcacaatcctaaatatatatgtacctaacactggagctcccagatttataaaacaattactactagacttaagaaataagatagacagaaacacaataatagtgggggacttcagtactccattggaggcagtagacaggtcatcaagacagaaagtcaacaacaaaacaatggattttttgtttcagaacattctaccccacaactgcggtgtatacattctattcatccacacatgcaacattcttcaagatagactataygataggctacaaaacaagtctcaacaaatttaagaaaattgaaattatatcaagtactctctcagaccatagaggaataaaattggaagtcaactccaaaggaaatgcttaaaactatgcaaatacatggaaattaaataacctgcttctgaatgatcattggctcaacaatgaaatt

SEQ ID NO: 403601 - DNA, 648 bp, Homo sapiens
aaaaatacagaatgtactacagaatgcaacccttcaagtttgcaatgatgggtactataaaaggaatgggtgcacaaatgaaccaatcgtgtagttttgactttataataagttcatttttaaaatgaggattaattttattcacatttggtaacaagaagctagagctgtcaacacagacatttatacatgtcacaaaaaccctaaaatagcccttgtagccagccactagcttccataaagctgatgccttaatggaaccattcttcccttattgcaaaaatagcctccacattgataaacatgttgtcaactgtggcaaagaaatgtaggtttgggttttttttaaatagtaatactgctgttttgtaggaagaactgtttacattatattttcagattaatattagattggtatattttaagtagaattttgaagggtgagagcsggttttcctctgtagaagtaagattaattcacactcttttaaagaaatgaatccaatctggtgtgatagctttcctgctgtttgctagctgcattgagggttttagcagttaatttggaatcccaacaaaatcatagcaagcaaaataacattcaacactttatatgcagagaaatttgtgatattatctgtacttaac

SEQ ID NO: 403602 - DNA, 648 bp, Homo sapiens
aaaaatacagaatgtactacagaatgcaacccttcaagtttgcaatgatgggtactataaaaggaatgggtgcacaaatgaaccaatcgtgtagttttgactttataataagttcatttttaaaatgaggattaattttattcacatttggtaacaagaagctagagctgtcaacacagacatttatacatgtcacaaaaaccctaaaatagcccttgtagccagccactagcttccataaagctgatgccttaatggaaccattcttcccttattgcaaaaatagcctccacattgataaacatgttgtcaactgtggcaaagaaatgtaggtttgggttttttttaaatagtaatactgctgttttgtaggaagaactgtttacattatattttcagattaatattagattggtatattttaagtagaattttgaagggtgagagcgkgttttcctctgtagaagtaagattaattcacactcttttaaagaaatgaatccaatctggtgtgatagctttcctgctgtttgctagctgcattgagggttttagcagttaatttggaatcccaacaaaatcatagcaagcaaaataacattcaacactttatatgcagagaaatttgtgatattatctgtacttaac

SEQ ID NO: 403603 - DNA, 372 bp, Homo sapiens
ctaatacagggtaggatgggccttaacaatcagataggagagctgctcttgacaaatatagctcaatggaagaaaatgagctctgtgagtctctttctcatgctcctgtttcatgcttctatagaggctattccttctgtctggggcatcttccyctacctgtctacctgtctgccttgcaggtgtggcctcaaatattacatcctatagaagtctcctctgatctctcctcagctggatagttcctctgtcttctaggatccctctgcttctccccacaccaggctttcttttatcacagccacgatttgttaggactcatttacctgtctgtccaccccacaaaaatgtgagcaacatgagggcagggct

SEQ ID NO: 403604 - DNA, 535 bp, Homo sapiens
cctcccaaagtgctgggattataggtgtgagccactgtgcccagcctaactttaattttcacaattaccatcagctatagccaggtgattatgagccctggttcacagatcatctgggaagaaatcaaatgccatctcttatgggaagtgcttttaacaggaaaaaaaaccaaaaaccaaaaaacaacaacaataaaaaaacaattcccrtctctccatctctcctctttattatgtgatcttggatatgtcacttcatgtctctgagcttcaatttccatatctggaaaaagaagataacagtagtttacaggatcactgaaggattaaatgaggcaagggctgtaaagcatttagcacacacagtgcctggcacatagaaaatgcttaatggatattgattattattatattcatattacaggtgagaaaactgggtcttagagggatgaagttcttgtctaagataataaagctaccgttgagagaagatggcccaaaacaatgttctttgttatttccttttaccttgcat

SEQ ID NO: 403605 - DNA, 600 bp, Homo sapiens
tttagggaagtgaaactactctgtatgatactataatggtgaaacatgtcattacatatttgtccaaacccatagaatatactgatacaggataggtgagcttcaaattggggcttagcctacaagggttcttggctttgcctgggaaagaattcaagggcaagctggtgatagggtagaaaaaaaaacggctttattgaagcagcagtgttacagctctggcagtgttacagctctgtggctgctcctacaaagcagggatattccataggcagctgctactgagagtagcagctcggggcagctatgcagtcatatttatacttactttttaattacatgtagattgagaaatggtttatgcaraaatttctgggaaaagggtaataacgtttgggttgtcaggtcattgccatggaaaagggcagtaactcccagatgttgccatggcaatggtaaactaatatggcataccagtgagcatgtcttatggaaagctgcttttgcccagtctctgttttagctagtccccaatttggtccagtgtccaatcctcacctctggagtaaagacccaactcctaactcggtacaacaccaa

SEQ ID NO: 403606 - DNA, 548 bp, Homo sapiens
acaaatttgatggcctagatgaaatgaatcaattccttgaaaaacacaatctaccaaaactcacacaagaagaaatagacaattcaaataggtctatatctactaaataaattgaatcaaaaattaataagctttcaaaacagaaagtaccaggcccagatgtattcacttgtgaatcctcccaaacatttaaggaatatcttataccaattatctacaatatcttccagaagatagaaacaagagggaattttcctaactcatttgatagggccagtattaccataatatcaaaaccagaaaggtattatgagagaaaaaaaatatcagaccaatatctctcatgaaaatagatgcaataatcctcaacaaaatattagtaaattaaatctaacaatgtataaaaagaattatacaccatgaccaagtggtatttatcccaagtaygcaaagctgtttcagcattcaaaaatcaattaatgtactctatcacatgaataggctaaaaatgaaaagtcacatgaacatacaactaaatgcaaaataaa

SEQ ID NO: 403607 - DNA, 547 bp, Homo sapiens
acttgtcacccttaagggaaggacacaagcttggctggctttgccacatgctgattttttgtgccctatagccttaaatgaacatgaacataggcagtaacaaggcagtggttaccacaggccttgggcaagacccagtgatatgtgggcttcaggtctgacccagaacagtctcagtggtggtagccagagggrtacctgtgttacccctctcccagctccaggcagcccagcacagagagagagagacttcatttgtttgggagaaagtaaggaaaaagaataagagtccctgtttggtaatccagagaattctggatcttatccaagatcatcaaggcagtacctctatgagtcttcaagaggcgcagcattactggtcttggggtgcaccctaatgcagatatggctgcagtgaccaaaaaccaattaaaacactcaagtctcttcaaatacctgggaagtcttcacaagaaggatgggtacaaacaagtccagacaatgaagactacaataaatacctaactcttcaatgtccagacactga

SEQ ID NO: 403608 - DNA, 629 bp, Homo sapiens
ataggatactccatcaatatttggttgcatacaaggtgttctaattttcacctagtggttgggtgagaggctgtggtttctcggtttktttaggctttggtgacccctgttatcactaagcagctaaggaaacaaacatactggcaggtcacagagacacctttctgtatacaactgaactcagcagaaagttgcttggaccccatccaaagtaattatttacagatgttcccaaggcacataattatagggtcacagtacagggacccatattgtgaggggagctcttgagtgaaactctagaaggttatacaaggaaatcactgaacttgttaaatctgcatttagggtgaagaaaaattccactgtgtcgggtgagagtgaggagaactgcattagcaacatttcacatgagaaagctttgaagataaaattttagagagaagcagaagcagctgtttcagggttttaaatttatttgaggtccaacactaacccatagttgacacagtggctaaaaaagctgacattatattcccaattaggcactctttccatggcaggaatatgatccagcagcttcaggcttacgggatccttatggctcatgatctcttaaagtaagaaat

SEQ ID NO: 403609 - DNA, 356 bp, Homo sapiens
aaatagacaaaatatatgaatagacgtttctcaaaacaaggcattcaaatggcaaagaggtatatgtaaagttgctcaacatcgctaattatcagagaaatgcaaatcaaaactacaatgagatatcatcttaccccagttaaaatggcctttttccaaaagaccggcaataacacttgctggtgaagatgtggagaaaaggraacccttataaactgatggtgggaatgtaaattagtgcagccactagggagaacagtttggagattcctcagaaaactaaaaatagagctaccatatgatccagcaatcccactgctaggtatatacccaaaggaaaggaaatcagtgtatca

SEQ ID NO: 403610 - DNA, 541 bp, Homo sapiens
gtttgtatgatatactaatttttaaaagcaactaaaaaatgattatttgtttctggaatatctagagcataaagcatatggaaacatctgtttggtatactaaagacataatgcttgctttgactgggaaaatcacaataacttgttcttgaatgtcacttgccattttcaaaagtatcaccaagttgttggcaaatggtagtgtgaacttggggttgccaaatattcagatctttacaagaaaagctggaagtaaaaatttttcatgtatgcaactaatttaactatttggaaacagtaaatgaatcaatacgatgaaggtcaaacaaagccatccatgtgtatgttgccaggctatgacctctgttctagaytcatagtctcttagaggtagtcttagtccccgagtgagtagggtcattccttttagataggacatgagctcttcagtatactccacaactccccattcttctcacatcctgccatcttcattcttctatattttctgcctggccccacgagatggcagtttgtaaac

SEQ ID NO: 403611 - DNA, 541 bp, Homo sapiens
gtttgtatgatatactaatttttaaaagcaactaaaaaatgattatttgtttctggaatatctagagcataaagcatatggaaacatctgtttggtatactaaagacataatgcttgctttgactgggaaaatcacaataacttgttcttgaatgtcacttgccattttcaaaagtatcaccaagttgttggcaaatggtagtgtgaacttggggttgccaaatattcagatctttacaagaaaagctggaagtaaaaatttttcatgtatgcaactaatttaactatttggaaacagtaaatgaatcaatacgatgaaggtcaaacaaagccatccatgtgtatgttgccaggctatgacctctgttctagactcatagtctcttagaggtagtcttagwccccgagtgagtagggtcattccttttagataggacatgagctcttcagtatactccacaactccccattcttctcacatcctgccatcttcattcttctatattttctgcctggccccacgagatggcagtttgtaaac

SEQ ID NO: 403612 - DNA, 548 bp, Homo sapiens
atagcatgacatctctccaagtgagatagaaggtttgccctagaccctgtaggacatctatgcacctatcaggatcatctgaaaacttccctagacctaccttgatctgctttaaatcagagagggggaaagggacatgtacccaggttgggccaaattcccctccccctacagcttgaaggggacataactgatagcctgggggtttttgtggtcctttggagatttctttgcttgtttccttctgggcaggggagattagaggaggcttatcattaataggaaggggaactatagggaggctaggatatggaggtaagctgagaggtcttcctgtgggttgtaaattgcaagctttgcatagttgtggattctccttcaatgaaaagaaagcttgggcataagatatttcactccatttgctttccctcttacagaaaaggtcaagctgcaggatagtaytgtaatttatacttccctcaggtggccatttttccccataagagagagcatactggggccaagctgtagtgcagaaaaaaatgagc

SEQ ID NO: 403613 - DNA, 366 bp, Homo sapiens
ggtaggtggcacaaggtacaataatttgttctttactctggagaaattatcttggcataccccagaccatggactcctagaaacttggatgacagttcctaagaaccaacatggcagttctctgaacatttgttagagtttatttcccactctctggtaagaatacatctttccaacatgtccaaagtacttgctacttcctagtctctacgtctaattaatgtgatgtcatcaacgttatggactaacctttgagtatcaggattcctgacatytggaaagtcaagattccttccaaatattgtaacatagaaggaacatttctttagcccaagggcaagattatgaatatgcactgctatccac

SEQ ID NO: 403614 - DNA, 540 bp, Homo sapiens
tatgggagcactggcttttggggccctgagtttccacatgagaagtctcgctaccctgaggtcaccatgctgtgaggaagctcaagctacatggggaggcactatatgaaggtgcttctgtccacagtcccccaggtgaaactacagactacacagagcagagacaagccatccccaccatgccttatccaaattcccatcctgaagaatcattagcatgataaaaatgggggctgttctatgccacaaagttttggggtggttttctacacagcagtagataatcagaacagtattattatcatctycatttcctggttgaggaagctgctgcaccacaaatgataaagatgacatcaagcccaggtctggtcccagaatccatgggcttaaaagccctcaataaatgatagtggttataattactacagccctgtcattattcataatacttttgtggcctaatcgcagaacctatgttgactccaaaaacccactttggcagctagagataattaaaagtaattacattctttacca

SEQ ID NO: 403615 - DNA, 442 bp, Homo sapiens
aagactttttagcaaatgaattccaggttccccaggtcttgctctgggcttgaatcaaattctgtcttggtggagctcagcaattggtattttaaagcaacttccaaggtgatcctgatgcaggcagtcagtgagctggcctgtggtatagacaccaccagtgggtggcttgttgctcagttgatatgtaattttatatttatttattattctagagaagaagtctcactattttgcccagtgtggttttgaactcctgagctcaagtgatcctcccacctcagcctcccaaggtgctagattacaggcatgagccactggccagttgatgggaaatttaaggctgctgaaggctgctgagcatccccctagtggctgggaggagamctgcaaccctgtcttctaaaatcacccctgattttgagagggggaccaggttccc

SEQ ID NO: 403616 - DNA, 545 bp, Homo sapiens
cactttcctcactgtcaaaatgtgatgatgttagaaggtacatccacatcacctcactattatgaaattttaaaaagtcatgtatgaaaaaaattatacaaaggcttattactattatcctttaaaatcccttgtttctctttctattctcagtttcaatgttgactatataaaacaatcaggacaaagagaaagaaagtaaaactgacataaatattgaatctaattttaaatggtgtattttaaataacatattaatacaaaaattcrcccaattaataatataataaacatttaatacaattgagaaaggaagatatgtttagctatattgtgattttggaaggacttgctggtattggtcaaacagaaaaagcatccaacaaaataaaaataaaataagtaatttaaaaaattctcacactgacaaaaactgtaagacatggcattcaaattgtcaacaaaagaaaaagatttcttagagactacataatcagtaatagacaacccattcttttccagcttgtcaccttgccagtaaagga

SEQ ID NO: 403617 - DNA, 541 bp, Homo sapiens
ctttgtatatacaagaaatgagaaggctttgagaatcattttagtgttgagaaatatttttgtcatttttaactgagcatgagattactgtaagccatctcaatgtcacagtggttggaaaggtggaatgcctcttaagaacctcttctggtttgtaggaagactatttgtctccyttctccacactaccaattatgccagctgggtatgtcccagagccagaagccagaagaggagtggatatgtacctaataccaaataccagtaatggagttggtgatggggatgaagaaacacttaccaggacttgagattttactttatttgaatatgttaggtacgttccactggaagacttcaaattcaatttcaatttgtttgtgtaaaaatatgtatcatactaaaagtgatatattaagaataaatataaatattcatccttattatacatacatatatgttggcattatatagaatataatacctgttctcagagtcgaaagaaacttcatatcgctactttgtctagcactttgctaat

SEQ ID NO: 403618 - DNA, 543 bp, Homo sapiens
gttctacctggttattcgtgttttttccaggtttaggaaggtttatgttgtcatttctaccttgatccctgtctctatatcctctttaataaaataactcttagattatcccttttgaggctattgtctagattttgtgggattasttcattctttttttattttttcacccctgactgtatattttcatacagtctatcttcaagtttactaattctttgttctgcttgatcaattctgcttttgagagactgcggcatttttcagttcgtcacttgaattcttcatctctagaatttttgcttgatttaaaaaaattatttcaatcactttgttaaatttctctgagaggattctgaattccttctctgtgttatcttgaaatttgctgaacttcctaagacaggtattttgaattttctgtctaacaggtcacatgtctttgccaatcaaggattggtcactggtgccttatttagttaatgtggtgaggctatgttttcctaatgtccttgatgcttgtagatgtttgttgatatctgg

SEQ ID NO: 403619 - DNA, 540 bp, Homo sapiens
tagttgagcagggagggtgggaggaaggtggggatcaaaaaactacaaatggggtactrtgcttattacctgggtgattaaataatctgtattaccaaccctccataacacacaatttacctatataacaaacatgtacatatacccctaaacctaaaatgaaagattttaaaaaataaaatataataaaaagtaaccccagagagaaattgttagcacaagtggtaatatacgaaggtcagataggaaaatgatatagaattatattccaagataatggataacccaaatactcctaagggagaactgagtgaaaagatatgaatcgaaataataagaaccacctatggcaaaaccatagtcaacatcatattgaatgggcaaaagctggaagcattccctttgagaaccagagccagaaaaggatgcccactcccaccactcctattcaaaatagtactggaatttgggagttgatcctgtctcttatgagagaaaaattttagttgacccaaccaactgtaatgagattctaattaa

SEQ ID NO: 403620 - DNA, 605 bp, Homo sapiens
ctatactctaacataggtatgtaatgtaactataatatcaatttttgagagtttggtgaacatatttctaggccttttcctaagtatataaattccttcttgatgaataaacaacatattcctcatatggaatcaattctaacaaactcaattcagaatataatactaacacaacttgaaaacataatgtttagaaatgaaaggaactatacagaataatcgcaacctttcattttcccatttaaggttcccacagtttctatgggtaaggcatttgggcagtttatcaatgccatcagctcaggggctcacaaaaccaaaatcaaggtgttggccaggccttgctcctttctggagtttagaattatcttttgagctcacaygattggtgacaaattcaatcctttcaggtgtaggaatgaagtccctgttttcttgttggctgtcagttgacagctgctcacaaagtctaaaggccactcacagtgcctcgccacagggccctattatgatatggcagcttactacttcaaggccagtaagagcgtctctctcacaagcaatgtctcagtcactccttgaagagtttattaaatcaggtgcac

SEQ ID NO: 403621 - DNA, 636 bp, Homo sapiens
aagaaacatatacctagcttctcttgatagcagcagttgtttttattttaacsacaaaaaaaaaataaatcgaagtatttaagtaacattttccccttacttatatttgtacgcatctgggaattagtcaatttaagctgtcccatcaagatgaaaagggataataaactcgctgtgtgcttggataagcctctgagaaaagagcaaagggcccaagcttgaatgtagattccagtgttgtttctcatttccacattatggtttggggccataaattccaaccacattgcaaacaactgaagaataaatcaaagacactagaacttcagtcttgcagattatgtagtgaagaattttttaaggtatttaaaaaatatcatagtgggcacaggtttccaggatgccaaaaatcacacagaataaatgcataaacctgaaaataaaattcgcaacaaataaaaaatataatatgaatcaaactcccacaactataagtagaggagtatcatccttgtaattactctacaaagtaaggtaattattgcttgtatatcaataccaatataacagcaatttcaccaaccaataattttaaatcattttcaatataaccatcatataaattttacattcaat

SEQ ID NO: 403622 - DNA, 547 bp, Homo sapiens
acagtgacaacataaacttcattactgagaaagttttattagaatgcactactaaaataaaagaaaaattaaatttaaagaatgcactattaataacagcaataagactgatcctgcaagttttcttcttgaggattgaagaaatataaatgaatgctcatcctactgatggttgatatgtggccctagatttaaatttaaggggatttacaactgacctccagtctaggaattcatagtcactcatttattgagcctatcacaaagtagagttctttatttggtgttgaaggggccagggaaagaaagaaatggaaaagtggtgttycatgttgcttccttgttactaaacatgagaaactgcattatgtaaagtgatttctaaaatttctatagttccacatattatcagtatcaacatatcatactgtcatatggttccatgtattgataataccattcaaaatagttgacttgagaagttttaatctaaattagcgtaaaaagcaaacatggaaaaaacacatatggatgaaatattatggag

SEQ ID NO: 403623 - DNA, 529 bp, Homo sapiens
attcatgtttgtccccaagtaactagcacatttcaaggcacatgatggatattggataaagagttgatgaaacagtgacaacataaacttcattactgagaaagttttattagaatgcactactaaaataaaagaaaaattaaatttaaagaatgcactattaataacagcaataagactgatcctgcaagttttcttcttgaggattgaagaaatataaatgaatgctcatcctactgatggttgatatgtggccctagatttaaatttaaggggatttacaactgacctccagtctaggaattcatagtcactcatttattgagcctatcacaaagtagagttctttatttggtgttgaaggggccagggaaagaaagaaatggaaaagtggtgttccatgttgcttccttrttactaaacatgagaaactgcattatgtaaagtgatttctaaaatttctatagttccacatattatcagtatcaacatatcatactgtcatatggttccatgtattgataatacc

SEQ ID NO: 403624 - DNA, 641 bp, Homo sapiens
atctctttttactcccagccaattcttcttcccacagacttgcccgattttatttaaatgaaatcagcatttaaacatttgcttaggccagagatccggctctcatcctgattcttcctactcctttatcctttagatccaatctaataccaagacatattattgtgtgtataaatggatatcaactctaggcattcgaatcccttgctcctaagttcaaaccaccttcctctcttctctttggactactgtgataccctgtttactggctcttacgcttctcttatttccctccaaactaactgccaaacaacatccagaaggaaaaattttaaaatgtgtatctgattatattatttcttctcattcccttcctctatcgttaatattttttagtggcttcccactgtacttcagatgaaatacaagttttaccaggacatagaagatcctgcacragcagccttttgcccagcttttcatagttctctcttataattctccccttcatccactttgttacacccaatatgactcatttccgtaggcattctgagccctttcagaggctttcaacaaacaaaggctgttttgctagttaaagcactagtacagaaaagagtcttctattgtgacatgaa

SEQ ID NO: 403625 - DNA, 419 bp, Homo sapiens
tcaaaacaaatgtaaaccaaatcaacaacttactaaaagtatcatccaccaagattatgtgagatttatccatgggatgcaaagatggttcagcccacacacatcaataaatatgttaacagaataaagaacaaaaaccatatgattatttcattaaatgtagaaaaagcatttgacaaaattcaacaaactttcatcaccaaaacctcactaaattaggtatagaagacatgcatttcaacacaacagtgaagcccatatgtaagaagctgacagctaacatttatattcaatggtgaataattgaartccttcctctgagatctggaacaagacaataatactcactcttaccacctctattaaacaaagtactctaaacccttgccagagcaataagataagagaaaaaaaaaagt

SEQ ID NO: 403626 - DNA, 470 bp, Homo sapiens
agacattagcactgaaagaattctaactatatcatgtgaaaaactaagttgctgtttaaacttcttatgtaattatgaaacagactctgcttgtattttttaatttggaaatttacctatattttgaaaacacctacaccttgaaaacaggctaaactttatcattcacagaaatctaatcccctggcacttataaaataataatcttatatattgtatttcaatattcctcttaaaagaagaaaactgagcagaaaaatggtactttaaacacagaatactaaccaacgtaagcacagttggtggcccaggtttatttaagagaatcagcatctgtattatgtttctattccaggaaacccctacttatttgcaaatactgttctgtttctcagtcaraaaatccaagttcttcaatatccctggcttgccaaaccagtgtaatgcatgagcaacttgcatgaactaca

SEQ ID NO: 403627 - DNA, 470 bp, Homo sapiens
agacattagcactgaaagaattctaactatatcatgtgaaaaactaagttgctgtttaaacttcttatgtaattatgaaacagactctgcttgtattttttaatttggaaatttacctatattttgaaaacacctacaccttgaaaacaggctaaactttatcattcacagaaatctaatcccctggcacttataaaataataatcttatatattgtatttcaatattcctcttaaaagaagaaaactgagcagaaaaatggtactttaaacacagaatactaaccaacgtaagcacagttggtggcccaggtttatttaagagaatcagcatctgtattatgtttctattccaggaaacccctacttatttgcaaatactgttctgtttctcagtcaaaaaatccaagttcttcaatatccctggcttgccaaaccagtgtartgcatgagcaacttgcatgaactaca

SEQ ID NO: 403628 - DNA, 638 bp, Homo sapiens
ctactaaaaatacaaaaattagccaggcaaggtggcgtgtgcctgtaatggaacggagatagtgccactgtactccagcatgggcaacaagagagaaactccatctcaaaaaaaattttgatgttaaatataagaaataaaatctagataaagtttagggttttgtaactatgttgttaaattaagaagaaaaaagcttttgtttttgctttggttttttatttgttgttcttttttaattaggaagttattacttagggaatctattttacttgctattagacatatttttatctatagtcataaactttcttttgtagaaaattgtgtaatgggagcaaatgttttcagtctattttctgaggctatccttgaggctgccaagggatcctggaaactagtgtaaggctgctggtaatgcttccagaagtttcaggcactcagcatactttaaatgttttaaatagttaggcaggagcttctgtgaactaatgaccaaataattttgcagtttggtttatgggctgataaacgtagtgagtaagccctgaaaaaataccataaattagcttcaggtctractgataggaaaacagatctttgtatgaataaagataagaaattggccgggcacggtg

SEQ ID NO: 403629 - DNA, 618 bp, Homo sapiens
gttattattactagtagtaacacatattgttatcatcagaaacatcattctaagagcaagaaaaaacaatgaggattctccctacccacccttgcagaaacattgcatgctcagtgtataggtgttcaggggattggataacaaaagtaccacaaagcagaactattttagatgtagtttctaatgtggtatgagtcacacaaggttttacaatagtgaaaactcattgaactrtgcacttaagatcagtgcatttcactcaatgtaaattgtacctcccttttaaaggtaaataggtatcatatgattccctgatatcatcaacttttgattaaataaattgtagtcacaagttcaccagcataagacagcttctacttcatgcctttctgatctcatttcctaccatgttcacatcagtgacttaggtctcctggctgttccttaaatatacgaattactagcttgcctcagggcatgtgcgattgtgctttctctgcccagtcataggttcatggctccctgctcttgtttccttcagatcttccttccttcctgctcaaatgtcacatcaccacgagctttcctatcagcctatataaaacagcacacacacct

SEQ ID NO: 403630 - DNA, 618 bp, Homo sapiens
gttattattactagtagtaacacatattgttatcatcagaaacatcattctaagagcaagaaaaaacaatgaggattctccctacccacccttgcagaaacattgcatgctcagtgtataggtgttcaggggattggataacaaaagtaccacaaagcagaactattttagatgtagtttctaatgtggtatgagtcacacaaggttttacaatagtgaaaactcattgaactatgcacttaagatcagtgcatttcactcaatgtaaattgtacctcccttttaaaggtaaataggtatcatatgattccctgatatcatcaacttttgattaaataaattgtagtcacaagttcaccagcataagacagcttctacttcatgcctttctgatctcatttcctaccatgttcacatcagtgacttaggtctcctggctgttccttaaatataygaattactagcttgcctcagggcatgtgcgattgtgctttctctgcccagtcataggttcatggctccctgctcttgtttccttcagatcttccttccttcctgctcaaatgtcacatcaccacgagctttcctatcagcctatataaaacagcacacacacct

SEQ ID NO: 403631 - DNA, 447 bp, Homo sapiens
aattatgaatatgggaattaggatgttgtctgtcatgtgtacgggaaattggggtgtgagatgggggtgaaaattttgactgamtgtagggtattattacagtcctagatttgatttggatatgggtttgatgtgtctttttctctatgtggataactaaataagtgaataagatacactgaatggattttaaaagtgggaagccactgaatggacttaaaaatcaaagcaaacaggataagagttgtgtcacagaaagattgctgtggatacaatgtagagaatggattagagaagagctattctttccaggaggtctgggtaggagtctgtggcagtattccatgtattctgtgtaggaaatgatgtctgcttaaagcaaaatagtgcaaaatgaggtgtaagaggagtaggtaaaaccaagaggcatttaagatatgatattaa

SEQ ID NO: 403632 - DNA, 468 bp, Homo sapiens
ggggctctcctgccctgcatcagcttggcacccaacatggggcaaagacagaagatggcagtgggtgattaatgaggcagcagtcagcaatcagtgaagcagcaattggcaggattcatgggacactgatcagcagagccaatggtggcaaaaagtgattagcagactgaggatcgkagaggcagcaaaacagagttgtaacacttgaggtctgtcactaccaaagctctttccagagccactattttccctggcaggcagtggagctgatcagatgaacaagcagccatagtgtgctgcctcatgtgacacctgcctctctgaccagcagcccagtgggttactggccatgcaagcccctcccactgtggcagctgagcccatcggtgagacggctgtgaggctgtctgctttgtgtggggcccaactctctgacaggcagccctgtcagttacctgcctgtacagg

SEQ ID NO: 403633 - DNA, 552 bp, Homo sapiens
gtgtcccctaaaataattgagaaaaataggataaaatcaataacttttgaattcaatacattcaagcaatgatgtcattatatatgtggttcatcttcctgacacacgggagatgtttctcttagacctcagtgccagaacagtataatttcagagcaacaatactattttcttggaatataagtgggaagctcacaactattcatatttctctctttgtcaagaaaagttataaggtttaacacaattatgaaagccagaaaacaaatgtatttttgtagcacttttgtagaaactcctggctttatgttactgtctctcactttccaataatgctttttttaaataatrgaatttgttatgtgtttctgcaaattgcatgatatcctttgtgaatgaagtagatactaattaactatttctaaacagaccgctacaatacagtgtgaaaagttttaccataactgaaaatgtgttaataaagaagtggctacaggctgtgtctcatacactgtaattcttttcagtagccttgcatctctaattgatttt

SEQ ID NO: 403634 - DNA, 552 bp, Homo sapiens
ttctctttacctgattatctatggtgaatgaatagctgacccacagtttagcttgatactctcatggagctactatcctctcttaatctcacttccaaaatctctattattattcagagtgccttcaagtttaaccttccccacactttattccaaacaagtgagttcctttcrggagagctttggagctctgttcttatggactgcctactccatgggcaaaattcctgtgtctccctgctctgtagttggctcctggacagtggtctacttctctcagagtgatactttggctttacgggcagggtactcggtggagtgataacatctggtcttcctcttatagcttgaaactttcctcttatagcatgaaacttttgccctttgagtgagtagaggcaagggtgatcggggcccgcccattcgttttcttggcttgccatacctggagtagagctttcaccatagaagtggggggtcagacaaaggaataaagcctagacctctcagccattgttgcctggaagagattctgaaacagagatttgggaa

SEQ ID NO: 403635 - DNA, 632 bp, Homo sapiens
aagtttaaactggaaaaatgtaaacaatattatcatttgtgtaaaatacaaaatgatgtgagtrcataatatcattgtgaaagatatctatgcataacaagataaacactgggtgataactttagtgtggaatactcctttgaagaaatcaaaatatggggatatttatgtttattggaaataaggtgaaataactttactaatatgttattttctggaaataggtgaaagtctacatcattctatggttcccttattttaacctgtaatgtcagctcaatttctattttatgaaatgcagatatgaattaatcagcttttattttataatagtaagaaaatatatagattttaaacattgttctaatagaaattgctatttttaacaacttaaaatttatttcataaatgtaagcccaaaatatcagcacaaaagaaatgtcaaacttgatttacccattccattctttggaaaacctagattttctatcctacagaatgtaccttcagcacttttctcagtctgttttaaaataacctctgtgactgagcttctaccacagtctcaggaacctgttccataattcatttattgttcagagtcaggaaatcgcttcagatattcaactcaa

SEQ ID NO: 403636 - DNA, 632 bp, Homo sapiens
aagtttaaactggaaaaatgtaaacaatattatcatttgtgtaaaatacaaaatgatgtgagtacataatatcattgtgaaagatatctatgcataacaagataaacactgggtgataactttagtgtggaatactcctttgaagaaatcaaaatatggggatatttatgtttattgkaaataaggtgaaataactttactaatatgttattttctggaaataggtgaaagtctacatcattctatggttcccttattttaacctgtaatgtcagctcaatttctattttatgaaatgcagatatgaattaatcagcttttattttataatagtaagaaaatatatagattttaaacattgttctaatagaaattgctatttttaacaacttaaaatttatttcataaatgtaagcccaaaatatcagcacaaaagaaatgtcaaacttgatttacccattccattctttggaaaacctagattttctatcctacagaatgtaccttcagcacttttctcagtctgttttaaaataacctctgtgactgagcttctaccacagtctcaggaacctgttccataattcatttattgttcagagtcaggaaatcgcttcagatattcaactcaa

SEQ ID NO: 403637 - DNA, 632 bp, Homo sapiens
aagtttaaactggaaaaatgtaaacaatattatcatttgtgtaaaatacaaaatgatgtgagtacataatatcattgtgaaagatatctatgcataacaagataaacactgggtgataactttagtgtggaatactcctttgaagaaatcaaaatatggggatatttatgtttattggaaataaggtgaaataactttactaatatgttattttctggaaataggtgaaagtctacatcattctatggttcccttattttaacctgtaatgtcagctcaatttctattttatgaaatgcagatatgaattaatcagcttttattttataatagtaagaaaatatatagattttaaacattgttctaatagaaattgctatttttaacaacttaaaatttatttyataaatgtaagcccaaaatatcagcacaaaagaaatgtcaaacttgatttacccattccattctttggaaaacctagattttctatcctacagaatgtaccttcagcacttttctcagtctgttttaaaataacctctgtgactgagcttctaccacagtctcaggaacctgttccataattcatttattgttcagagtcaggaaatcgcttcagatattcaactcaa

SEQ ID NO: 403638 - DNA, 620 bp, Homo sapiens
tcaccagaagccaacatgatcaaagatcaaaagtggatatcattgagagacactcctccactctcataaactcctaatacttcttgctggggatgccaagaatgcaaggccccaaacagccaggccacttttcataactgtgtttgcagtaaggaatattgaaaaatgtttattataaaatagtagcttatctaaggttattggtctttttctgtaatgcaacccaccatgtaagtaggaatccactggggctatccacataccctcaataggacacaggaagcaagtggaacacacacaaacatatattgtacttttatagtcatagcatcttcatagaatggatatccgtatatgcaagcatgtgttaaaagaccaatatgtgacaaactgcattgacacgtgacatttgatggytcatgtacttcctgtgccatgagtaaaaaatgtcctttgctctaatacagaagtccattctgcccaaatccatgacataataacaagctaacttttagcttttatgtgaggtaaaatcaaattccagaaccttcacagacctgagatcatcacacacacaaaaaagcaggaaatatgtatgtgtgtctgtctgtgtaaatttt

SEQ ID NO: 403639 - DNA, 576 bp, Homo sapiens
ttttcctttagggttcaccacttgtggtgccatgttgcaaagacacagtgctatttatcatgtagctatcttacagatcttttgtctaatacctaacaaamcactcttttagtcctccaggaaaaagttctgggcactttaagccccatgccttgttcagaattatccttgctatatgctgtggtctaaactgtgattctccaaaattcatttcatgaagccccaaagcatagtagcttagaatgtaaccatatttggatataagactttaaagatgtgactgctttactatgagctcaacagggtggggccctaattcaatgcgactggtgttcttataagaggaaaagacactgtggagaaaagaaagaagaaaaggaagattaaaagccatctgaggatacaggaagaaggtggccttctgcaagccaatgagagaggcctgagaagaaaccaaacctgctgacacctggatcttgaccttctagcttccaaaactgtgacaaaatatatttctgttgtttaggccacttagtctgtgggtttttttttttatgtctgtcatagaaaacgtaa

SEQ ID NO: 403640 - DNA, 607 bp, Homo sapiens
gttcagggagcatagtagcttctacttctaggaaggcctcaggaaagttttaaccatggcagaaggcgaagggggagcaaacacttcacatggctagagcagcaggaagagagagattggagagttgctacacaattttaaaaaactagatctcatgctaactcactatcacaagaacagcactaggggatggtgttaaaacattggacctccatgatccagtcacctcccacggggtttaggtgggggcccacctccaacactgggtattacaattctgtatgagacttggtgggractctgaacaaaaccatatcaccagacattgccaaatgtactctgggggtaaaactacccccagttgagaatccctaaaaaactttgattaacaaataaaatactgtttgggaaaatatatctaaaatctgcttcttacatgagctcgatttattttgactgatagtcttgggattttgtaaggtagcttttctttaaaaatattattaaaggaggtcatctacagtgtaactcataatttctctcactgtgtcataaggccagaatatcttgatatgtctaattctctaaattagaatgtatagccatg

SEQ ID NO: 403641 - DNA, 568 bp, Homo sapiens
ctgattaattctggggttttaactaaagatcagcaaatcattccccatgttcatttgtcaaaaacatggacttataatgttcccctctcagaataactgaagtataaaggcataaaaaatgcatgtaaactacctaaatgggtctagcatcagtcacttgcaaatttttttaaattatttgtattagtcaaaatctaaaatgcaagttccattttaaaagacaaggaagcgattcagaagattcagaayttctctaaatgaacaagagtatttctgtaatctaaagcaaactcaacatgtctaaagtaatctttgatttgcaatctaaagcaaactcaacatgtctaaagtactctttgaacaaaaattaaattttggaaatgctcttctgtttccctaaatttcatgtaacctgatagtgttaatgagattctgtttattaaatattttgttcaataaatatctcaaaaatatgtataacattaaaagcagatcatattcattaaataaatgtaaatctcaacttgataatttagattcacttttccaaaaggtacaaacatgtcat

SEQ ID NO: 403642 - DNA, 362 bp, Homo sapiens
ccagtctgggtgacaagagcaaaactctgtctcaaaaaaaaaaaatacatacatacrtaaaaataaaataaaataaatacataaaacagaaaaaattgttctcatattcttaagtagagcaattgcaagacacgatcaataattacacagcctctaaaatcccagctgatctgcagagaaagtatctacaataaatgtgtgtttagaatagatagcacgcatccaatttatcaggggaaaaatatattaacataaatgatttaaaataatcagagcaagaatttaaaggctataacaaagatatgtacataattattaagagacatttttcaaggtaagtgtagaatgaataccttacactt

SEQ ID NO: 403643 - DNA, 596 bp, Homo sapiens
agcatacaaaacattctgcagggaaaaaaaactacaaacaaggcaatgaagagaaagaagtgaacctgtatcataaaaatgaaacaatcctatatgaaaaacttcccatcagcataatatagactcaaaagataaaatattaagagtaaatgtgtttgcaagaaaaaaagagctctgtgcaagaataatgttttgttatatgcagaaggtaaaagcaaaaaagaaaatattgtgagtataaaatacaggcaaaatgaataaattagatttccttaggcaaaaggtgataaaaggagaaagagaagtatcaagaaccaggtgtttatttgtagataaaataataggaaaatctatccattctgttaaaagtgtttaaacaccacctaaaacacagaacagatgcacttgaaagaaaaagaaaaatctgcataaaaggggcatttcacaattaagaagattgactcaccttacaaaagatgctcagtcctggcctttcacccactgtyagcccagattcaaactataagtttctttaaattttgtttctttaaaatctaagcaacaaagccattccaaagtggatttggaaggtagat

SEQ ID NO: 403644 - DNA, 567 bp, Homo sapiens
cagtgagctagggctgctaagaccagtggttctcaaggtagatagcccagaccagcagcatcagcatcacctgggaacttgtcagaaatgtagattcctgggtccaacccagacctgttgaatcaaacactcctggagtgtacccagccatctgtgttgtcacaagctctccaagagatcctgatgcttgcacaagtttagaggctgctgagctggacattggcagggtaggaaatatgtattcatcctcccagtcattccttcactccaccaactgctcatgctttcagcatacagtayccctactacaagccaagcactgtgccagatattgggaatccattaatagggcagaggtggtgaattttgcattcaaagagcttgcagtccccatatggaattttccatataatagaaccaaagatagtcatcaaagtaggaagggatttgagctgagccttccaataactgcctcagtttctctcttttttctgcctgtgtgcatccagtgtgagcagctcacatcactgcaaaggaatccgtgtgtgtactgtctcactcacccaa

SEQ ID NO: 403645 - DNA, 512 bp, Homo sapiens
ttccttatctcaaagtctgcttctggggaaattcaaactaagatagtatgtgaggaggagagcaatgtggtcaggtttgggtttctgaggaagggccactctttttgtccctgtggttggaaagagtctctgaaatgaacaattattagttatattttcatgtcttagagtggacaagagagagagaagacagccagttacgatattcccagatggctaggacacagaccattcttccagatctggaaatgctaacaatgtttcattaccacagccctgaccagcttgaagcaacyttcctcatacccaaatcaaatacctgtgtggagagactaaatctgtctaaaggcgacacaacccaccccgactcatgtgttcatgcatgcactcaataggaaaacagggccaggtgtggtggctcacgcctgtaatcctagcattttgggaggcctaggtgggcatatcacctgaggtcaggagttcgagaccagcctggccaacatggtgaaacc

SEQ ID NO: 403646 - DNA, 581 bp, Homo sapiens
gtctctgttcctaaggaggcccctggggacgtctgatgacccttctgctggggtcatgtacgtgtrcactggactttacagtttatagaaaacctcttcgtgttaataatcttagttatgctacaagctcaaaatgcataaggccagcaccctgcctggcctaaagaagacaccctagtggctggggatggtggctcacacctgtaatcccagaactttgggaggtcgaggtgggcggatcacatgaggtcaggagtttgagaccagcttggccaacatggcgaaatcccatctctactacaaatacaaaaattagccgggcacggtggtgggcacctgtaatcccaactacttggcaggctgaggcaggagaattacttaaacctgggagatggaggtagcagggagctgagatcacaccactgcactccagcctgggcaacagagtgagactctgtctaaaaaaagaagacactctagctcttgttggtttcattgtcattaattactgttaaccacatgcctactatgtgccagatcctaagtgcatgttatctttacatctttaaatgagcctgcaa

SEQ ID NO: 403647 - DNA, 581 bp, Homo sapiens
gtctctgttcctaaggaggcccctggggacgtctgatgacccttctgctggggtcatgtacgtgtacactggactttacagtttatagaaaacctcttcgtgttaataatcttagttatgctacaagctcaaaatgcataaggccagcaccctgcctggcctaaagaagacaccctagtggctggggatggtggctcacacctgtaatcccagaactttgggaggtcgaggtgggcggrtcacatgaggtcaggagtttgagaccagcttggccaacatggcgaaatcccatctctactacaaatacaaaaattagccgggcacggtggtgggcacctgtaatcccaactacttggcaggctgaggcaggagaattacttaaacctgggagatggaggtagcagggagctgagatcacaccactgcactccagcctgggcaacagagtgagactctgtctaaaaaaagaagacactctagctcttgttggtttcattgtcattaattactgttaaccacatgcctactatgtgccagatcctaagtgcatgttatctttacatctttaaatgagcctgcaa

SEQ ID NO: 403648 - DNA, 581 bp, Homo sapiens
gtctctgttcctaaggaggcccctggggacgtctgatgacccttctgctggggtcatgtacgtgtacactggactttacagtttatagaaaacctcttcgtgttaataatcttagttatgctacaagctcaaaatgcataaggccagcaccctgcctggcctaaagaagacaccctagtggctggggatggtggctcacacctgtaatcccagaactttgggaggtcgaggtgggcggatcacatgaggtcaggagtttgagaccagcttggccaacatggcgaaatcccatctctactacaaatacaaaaattagccgggcacggtggtgggcacctgtaatcccaactacttggcaggctgaggcaggagaattacttaaacctgggagatggaggtagcagggagctgagatcacaccactgcactccagcctgggcracagagtgagactctgtctaaaaaaagaagacactctagctcttgttggtttcattgtcattaattactgttaaccacatgcctactatgtgccagatcctaagtgcatgttatctttacatctttaaatgagcctgcaa

SEQ ID NO: 403649 - DNA, 569 bp, Homo sapiens
ctcaaggttcatccatgttgaagcacatatctgaatgccattcctttctgaggctgaataatattccattgtatgtataggccacattttgtttcccattcatccagtgatggacagttggattcttgccactttttggcaaagctattgaaacagaagcctaatgcgttagaaagagatgttarcattcatagtaataaggcaacgaggtgtcctgggaaaggctttaggattagacctgggttcaaatatgaaaacacccatctcctcatgttgatgtgaggtttagagcactgagggcagtgactggcagagcagatgctaggtgatgtactaggtaggccttattcatttcactctcctgcccaggactgccatgttgttcactgttcaagtacacctggtccaggtactcaacttgccaatctgaatccagtggcagcatctgtctggaggggccacctttgttccatctccacaaaggctcataggtgctagtgtcactctggcctcaatcaatacagacacacaggcttattatacctgtttggcttatgaggactggtagg

SEQ ID NO: 403650 - DNA, 569 bp, Homo sapiens
ctcaaggttcatccatgttgaagcacatatctgaatgccattcctttctgaggctgaataatattccattgtatgtataggccacattttgtttcccattcatccagtgatggacagttggattcttgccactttttggcaaagctattgaaacagaagcctaatgcgttagaaagagatgttagcattcatagtaataaggcaacgaggtgtcctgggaaaggctttaggattagacctgggttcaaatatgaaaacacccatctcctcatgttgatgtgaggtttagagcactgagggcrgtgactggcagagcagatgctaggtgatgtactaggtaggccttattcatttcactctcctgcccaggactgccatgttgttcactgttcaagtacacctggtccaggtactcaacttgccaatctgaatccagtggcagcatctgtctggaggggccacctttgttccatctccacaaaggctcataggtgctagtgtcactctggcctcaatcaatacagacacacaggcttattatacctgtttggcttatgaggactggtagg

SEQ ID NO: 403651 - DNA, 268 bp, Homo sapiens
gaattgctccagctaaagccttttaattccccttcggtgatgaatgggtgaggccctcaaatgaaatgtggaggctcccagtcccagcccgcggccctccccctcctcggcgtaattatttctgtgcagaacatgtcaagtgccctgcttcccrggaacttgtttcgcatgcaaacatttggtgattaagcgaggcttacttaattaagcactttgtaatgactcttaaaccaaagaacagtggattaggagtccagttcgtgctggt

SEQ ID NO: 403652 - DNA, 548 bp, Homo sapiens
gtttctgccatggacttggcctttggaaacagcccccatctttgttgctgtcttactgactcactggcttctcacccaccagtggctcacttcccacatctgtgtaatgggtagttggatctagatcttctctaagatgcttttgggtcttaggagcctagggtgtctcctctgcttctgggggccacaggaatggtggcgccactttgggggcctcagctgcaatattgcagaaggcttcagagcccagccctacacagctccaggacagagcaagggtgactctcagctcagaccttcataaattgtgggaccttcaccaggtagcttgtcctctctgacgkacaagtccttcacctctcaattgaaataacccttccatctgcttccagggctcctgtaagggaatcacacagactcatggacatagatgccctttgaaaaccatctacctggtggcagaagccatcatgtctcaaacttggacccacgaacacaccccaatgtattcacttgtctacttgctttggttttctcatttctaccat

SEQ ID NO: 403653 - DNA, 592 bp, Homo sapiens
aagtgaatatgattcctagagttgaatttttggatgcagctctaggatcttcagagctccctgttcaattttacctgcctagatttgacctattctccaatcacctgagatcctttgaagtcctgggtttgccacctgctgccacccagctacctaccagtcagacatctggtcatagattctctgtgttcccctttgaatcatcaaagaaaacgtttagaagtgtacggtcaaggcagagccacaagggactttctgacgaggaagctacatttctgcaaagacacaagcagtggtgataagtccagtgaaatggagttgatctacaaggcaaaggagtggcacggatttgatccaaaagtccccagagaggctcaaataatggccaaccttgatcatgaccatcccgtgtgccaggcactgtgctaagtgttgcttgtatttcctctcctttyatcctcacaatgacctgtgagaggacctctgctattatcccattttaagcataagaaactgaggttcacagagcccaaagtcacaccagaagtggtgaagagggatctaggcacggttttgtcatttgaagttttca

SEQ ID NO: 403654 - DNA, 636 bp, Homo sapiens
tccctccatgtcaggcttttagaaacttctaagtttgtttctggaggaacattggcayattttgagaaaacatgcttgcaataattaattgcagtaggaggagtcccataggtttggagggtaaaggcggagagatgtcactagagagatgctgacaacaggaattaaggagagctgttattcaggaggaaaaccaactgttgcgttgaagttttgtgctgtgaacttttccagcttcagacagagcctctggtcctctgtgtgtgtgtgtgtgtgtgtgtgtgtgtgtattcagcaccatgtttaagcatgtgtgtgtttgtgggtgtgcacgcatttgcgcacacacgtatttaccaaagttgctttccgcaaaaattaaagacaaaagttttgtttctttctaaactttggcaatttcagcatctgcctatttaggtaaattagacaaggattatctcttttatcttccctcttctttgtttttttttcctctccaaacccagaaattccatgagaaatatttttaagagtgttaactgacaaatgtacacatgccgtccgcagccagagagcaagcagcacagtcgctaacttgttagacaggagctagattacaatcataaataaatgatt

SEQ ID NO: 403655 - DNA, 636 bp, Homo sapiens
tccctccatgtcaggcttttagaaacttctaagtttgtttctggaggaacattggcacattttgagaaaacatgcttgcaataattaattgcagtaggaggagtcccataggtttggagggtaaaggcggagagatgtcactagagagatgctgacaacaggaattaaggagagctgttattcaggaggaaaaccaactgttgcgttgaagttttgtgctgtgaacttttccagcttcagacagagcctctggtcctctgtgtgtgtgtgtgtgtgtgtgtgtgtgtgtattcagcaccatgtttaagcatgtgtgtgtttgtgggtgtgcacgcatttgcgcacacacgtatttaccaaagttgctttccgcaaaaattaaagacaaaagttttgtttctttctaaactttggcaatttcagcatctgcctatttaggtaaattagacaaggattatctcttttatcttccctcttctttgtttttttttccyctccaaacccagaaattccatgagaaatatttttaagagtgttaactgacaaatgtacacatgccgtccgcagccagagagcaagcagcacagtcgctaacttgttagacaggagctagattacaatcataaataaatgatt

SEQ ID NO: 403656 - DNA, 583 bp, Homo sapiens
gcctgatggaaaactgaactgtcaaggaccttgcaytgattatgaaagctactcagaatggacacatactactgtttctgcctccaacttattggccagagctattcacccatcatgcaggtataggaaatgcaacccaatgtgttctggaaggaaagaaacccagaaatatttgatgatctgcactaatgattacatagtatgcaaggctaaaagctgggataaaagtaggaggaaaatactgagtctgggggaaaaacaaaacagcccgggatccttgaaagagcactgagtcctggtttgtcagatgctctgtgacagatccaagtcctgggtttttcacatgctctgtgatcctcaatatttccctcattctcctttggtctctcaggtttacactttgaattataatgcctgatctaaccttgctggttataatacatagacacctctgcatgtatgcaagaatgaaggaccatggcattgttgggacttttctagttattacccttctctatgcacaactgaggaaggactttgggtccctgagttagtgttgtggtctgggctgctacttgccata

SEQ ID NO: 403657 - DNA, 594 bp, Homo sapiens
ccaccttccaactgtgtgaccctggccaggtaacagggtctcattcctaaagtgaactcaaggagacttcattggcttgtcctgagggcctgcgtgaggagagtgttagtagagtgaagtcctaaaggaaggttggtttcttgtagaatcgtgagrtcaggggatgggatggccttgggacaatggtcaagacatctagcttctagtccctgttctgtcaatttgactcatctgaccaccctccatttcccccattataaaataaaggggttctattctctgttgtaggaaagtaacattgaatccacagaatgaatatgtatcagggggcaggtgttaatccaataacacccctgtggccagttgcagattccctcatggccaagactcatcctgtcttattgggcttctcagaatcaggtcacttctgccttctgcaaaggagtccttgcctccttcccgggcacctcccatcctgctgtgttcccatcaccggctgtgcctttgatcagctctgtggggccctctcctcctgacaacaggacactcctggagccactcttctcccctgcatgccctccctaggacacctca

SEQ ID NO: 403658 - DNA, 518 bp, Homo sapiens
ctagttcttacaccaccaagataactactctttcctgctttycaccttcatagactgctttctcttgtttttgaactttatgtaaatggacttacacagtatgttttcttttatgtgtggcatctttggttcagtattattttgtgaagttcatccatgtcgctgcatgtcatgtgttgcagcagtttgttcatttttacttctagataatattccactgtgggaatatgtcacagtttacacatccattctatcactggtggacatttgggtaatcatcagtttggggactcttacacatagtgctgtgatgaatattcttgggtgtgactttggtgaacatatgtagatgtttcctagaagtggaatccttaggctatagggtaggtgtatgttcagctttagtagatgctgaaaaatagatctccaaagtggttgtaccatttcacattctaccaactatgagagttccagttgctccgtatcttcatcaatgcttgatattatgttttattgtg

SEQ ID NO: 403659 - DNA, 518 bp, Homo sapiens
ctagttcttacaccaccaagataactactctttcctgcttttcaccttcatagactgctttctcttgtttttgaactttatgtaaatggacttacacagtatgttttcttttatgtgtggcwtctttggttcagtattattttgtgaagttcatccatgtcgctgcatgtcatgtgttgcagcagtttgttcatttttacttctagataatattccactgtgggaatatgtcacagtttacacatccattctatcactggtggacatttgggtaatcatcagtttggggactcttacacatagtgctgtgatgaatattcttgggtgtgactttggtgaacatatgtagatgtttcctagaagtggaatccttaggctatagggtaggtgtatgttcagctttagtagatgctgaaaaatagatctccaaagtggttgtaccatttcacattctaccaactatgagagttccagttgctccgtatcttcatcaatgcttgatattatgttttattgtg

SEQ ID NO: 403660 - DNA, 518 bp, Homo sapiens
ctagttcttacaccaccaagataactactctttcctgcttttcaccttcatagactgctttctcttgtttttgaactttatgtaaatggacttacacagtatgttttcttttatgtgtggcatctttggttcagtattattttgtraagttcatccatgtcgctgcatgtcatgtgttgcagcagtttgttcatttttacttctagataatattccactgtgggaatatgtcacagtttacacatccattctatcactggtggacatttgggtaatcatcagtttggggactcttacacatagtgctgtgatgaatattcttgggtgtgactttggtgaacatatgtagatgtttcctagaagtggaatccttaggctatagggtaggtgtatgttcagctttagtagatgctgaaaaatagatctccaaagtggttgtaccatttcacattctaccaactatgagagttccagttgctccgtatcttcatcaatgcttgatattatgttttattgtg

SEQ ID NO: 403661 - DNA, 518 bp, Homo sapiens
ctagttcttacaccaccaagataactactctttcctgcttttcaccttcatagactgctttctcttgtttttgaactttatgtaaatggacttacacagtatgttttcttttatgtgtggcatctttggttcagtattattttgtgaagttcatccatgtcgctgcatgtcatgtgttgcagcagtttgttcatttttacttctagataatattccactgtgggaatatktcacagtttacacatccattctatcactggtggacatttgggtaatcatcagtttggggactcttacacatagtgctgtgatgaatattcttgggtgtgactttggtgaacatatgtagatgtttcctagaagtggaatccttaggctatagggtaggtgtatgttcagctttagtagatgctgaaaaatagatctccaaagtggttgtaccatttcacattctaccaactatgagagttccagttgctccgtatcttcatcaatgcttgatattatgttttattgtg

SEQ ID NO: 403662 - DNA, 455 bp, Homo sapiens
ctttgccacttgcatgtattgcaaatagttttctcccactctgtggcttgcctttttactctgttgctgttaataaagagacacttttaatttttaatattaatacaattttcaaatctttaacagttcttattctgtgcaatacagaattttgatcattttttaaggaaatcagttcwaaatgagttttagctagacttccagaagaagaaattggttgggtattttgtttttgttcttatttttgtttttgatccacctacttacccctcagctccatgcacatggattcagtgggtggagagtgggatattattcactcactgctcacccatcatacatttattcgtttattgagacttacgtactagacactatgctaagtactagagtcacagagatgaatgtgacagacgctgttcatggcctcaagaaatataaaactcctatgaaaa

SEQ ID NO: 403663 - DNA, 659 bp, Homo sapiens
gctaagtactagagtcacagagatgaatgtgacagacgctgttcatggcctcaagaaatataaaactcctatgaaaaaataagagaaaattcttcatgaccttgagtttgggaaagatttcttaagtaagacacacacaaaaaaacccaaaaatgcatgagttayacaattttaaaaatcaatatattgaacttgatcaaatttaaataattttgctttatgaaagacactgttaagaagggctgatttaaaaaaaatattgtgataataaagtatgatgatgtccctggaagtttagagaatgataccacgattccagccaattttatagttattcctccatttattcatccactcaattagtatgttattgctccatttattcacttattcagtaagtatttattgagcacatactatatggcagagattgtgctaggccctggagaatcgctgtgtcttcaaggagctcacactcagaggagaatggacaagcagacatgttacaggacatgatgtgtcaagggctgctgtggaaatagatgcagaggttgtaggaacaatcaggaggacaccaggagggcttctgtgaggaggtgatgtttgaacttggccttgaaagatgagtagcagagagtgtagccaaaggtgtgcagaca

SEQ ID NO: 403664 - DNA, 341 bp, Homo sapiens
ggacttctttgtctataatttatactcttgaatcatataaatattttacagattcaaagatgaaatttaatcaaagatgttgaaaaagacaccaaaccctaaaattgaaggcaaatagaaacaaacaagcctaactacacatcacgttgataactctgctaggcaggcttctaaagtggcccccaytgatgctcacttccggatactccggcattttgtttaatccttttcccttgaacgttggctggacctggtgactcacttctaatgaatgaaatatggaaaaagtaatgagatgttactcctgacaattaggttccaaaggggtgtgacttctatct

SEQ ID NO: 403665 - DNA, 659 bp, Homo sapiens
gctaagtactagagtcacagagatgaatgtgacagacgctgttcatggcctcaagaaatataaaactcctatgaaaaaataagagaaaattcttcatgaccttgagtttgggaaagatttcttaagtaagacacacacaaaaaaacccaaaaatgcatgagttacacaattttaaaaatcaatatattgaacttgatcaaatttaaataattttgctttatgaaagacactgttaagaagggctgatttaaaaaaaatattgtgataataaagtatratgatgtccctggaagtttagagaatgataccacgattccagccaattttatagttattcctccatttattcatccactcaattagtatgttattgctccatttattcacttattcagtaagtatttattgagcacatactatatggcagagattgtgctaggccctggagaatcgctgtgtcttcaaggagctcacactcagaggagaatggacaagcagacatgttacaggacatgatgtgtcaagggctgctgtggaaatagatgcagaggttgtaggaacaatcaggaggacaccaggagggcttctgtgaggaggtgatgtttgaacttggccttgaaagatgagtagcagagagtgtagccaaaggtgtgcagaca

SEQ ID NO: 403666 - DNA, 659 bp, Homo sapiens
gctaagtactagagtcacagagatgaatgtgacagacgctgttcatggcctcaagaaatataaaactcctatgaaaaaataagagaaaattcttcatgaccttgagtttgggaaagatttcttaagtaagacacacacaaaaaaacccaaaaatgcatgagttacacaattttaaaaatcaatatattgaacttgatcaaatttaaataattttgctttatgaaagacactgttaagaagggctgatttaaaaaaaatattgtgataataaagtatgatgatgtccctggaagtttagagaatgataccacgattccagccaattttatagttattcctccatttattcatccactcaattagtatgttattgctccatttattcacttattcagtaagtatttattgagcacatactatatggcagagattgtgctaggccctggagaatcgctgtgtcttcaaggagctcacactcagaggagaatggacaagcagacatgttacaggacatgatgtgtcaagggctgctgtggaaatagatgcagaggttgtaggaacaatcaggaggacaccaggagggcttcygtgaggaggtgatgtttgaacttggccttgaaagatgagtagcagagagtgtagccaaaggtgtgcagaca

SEQ ID NO: 403667 - DNA, 438 bp, Homo sapiens
agttctgtcccaccaactattaccaccattttgcagatggaaaaactgaggctcagggaggttaaataacttacccaatgtcacatattgaggaaatgatggggctgyggaatcaaccctatgtccatctgaatccagacatgaactttctgggctaagcagcactgtggggtgcaggagttggcagactgtggctggcaccctgggagatgtgtggccctgagcagagccacagatgcagtggctacacagggtcctttcagttactctccccactgtagcctcagagttcccacaaccatgtttgcagagctgcagggccttctgggtacttgcaacagcctagcctcccaaatcttggacctcctcacctgtagggacatttgtctccctattaaatatagaatcatatccttccccagcctacaagaccctgca

SEQ ID NO: 403668 - DNA, 565 bp, Homo sapiens
tgcatgcaatattgcacctaatattcatggtattatccccgtgttggagaagggaaacagatgctcagaggggaaataaatttctgaggccacctagatgtgcccagttctccctttgcccatgtgatttmtaggggctgggacttttctgtgaggctggacctcaggcaggtgtggggctccccaggcttgggaagcaattaccatcgcatctcttccaccctcgttctcagtctcttcctggcgctcccccgcccccaccccaggccaacccacaagaggtgggagggacatcccactcctcagacagaaggtttcacgtggctcccaaacatggggtgtcagttcccgcagctcaggcgcagcagccaaacccaccctccttctgggggaggcgagatgtggagaggctgggggcccgagcgctcgggctcagcagccggacgggcagactgaggggctccttgccaagggaggtgtgatctcccccggctcagcgtcctggagtgcgaacttcaaacgcccgattctcaacatttggccatattttttttcttaccccaaa

SEQ ID NO: 403669 - DNA, 646 bp, Homo sapiens
gccaggtgcggtggctcacgcctgtaatcccagcattttgggaggctgacgtgagtggatcacctgaggccaggagttcgtgatcagcctgaccaacatggcgaaaccccgtttctactaaaaaaaaaatacagaaattagccaggcatcgtggtgagcacctgtaatcccagctactagggaggctgaggctggagaattgcttgaacctgggaggcggaggttgcagtgagccgagattgtgccactgcactctagcttgggcgacagagagagacgycataaaaaaaaaagaaaaaagaaaagaaaaaaagaaaggaaagaaagaaaggaaggaaggaaagaaggaaagaaagagatatcctgcttaactttgcttcctctccaggccaaagaaggtgggatggaagttcagtgaagctgcacagatgacccagcacttaagaaactgaattccagctctgccactctctaattgtgtggtttttggcaagtgacaaaaatatgatttgctttcttgtcactatgacatgacaatgccagcagccatctcctagcagggctgaaagggttaaataagatgatgcttgcacaatgctcagtgcagagcctggaataccattaagccctcaacacatggtaggca

SEQ ID NO: 403670 - DNA, 484 bp, Homo sapiens
tggcccctgccccatctcgttttcccagccaggtctcagagctcggttcacatgaggcgaaatatttggacatcagcaaagcattaagtaattggtggatttttttttccttttccatttgcatktgtttgtttcctgcagggttgcctgacactagccagccttgaatttggtcctgttctctgcacagctggactcagggagcccaacccagattgtgcatagaacaggtggcctgcctgggggccagtgagatggtgttgggtacatagacagcagcaggtgctgcagactccctgggatcttgaggggggaagtaagaaaatgggagcaggtcccccaaaacaccagcagactgcactcccatcatgacctaatgagatagtgcagttgaccaaaatagcaatgtcatccaagagaacacatcttcctactagcaacagccaacacgggaaattgaatgaacccagggggcgcagaccta

SEQ ID NO: 403671 - DNA, 484 bp, Homo sapiens
tggcccctgccccatctcgttttcccagccaggtctcagagctcggttcacatgaggcgaaatatttggacatcagcaaagcattaagtaattggtggatttttttttccttttccatttgcatgtgtttgtttcctgcagggttgcctgacactagccagccttgaatttggtcctgttctctgcacagctggactcagggagcccaacccagattgtgcatagaacaggtggcctgcctgggggccagtgagatggtgttgggtacatagacagcagcrggtgctgcagactccctgggatcttgaggggggaagtaagaaaatgggagcaggtcccccaaaacaccagcagactgcactcccatcatgacctaatgagatagtgcagttgaccaaaatagcaatgtcatccaagagaacacatcttcctactagcaacagccaacacgggaaattgaatgaacccagggggcgcagaccta

SEQ ID NO: 403672 - DNA, 484 bp, Homo sapiens
tggcccctgccccatctcgttttcccagccaggtctcagagctcggttcacatgaggcgaaatatttggacatcagcaaagcattaagtaattggtggatttttttttccttttccatttgcatgtgtttgtttcctgcagggttgcctgacactagccagccttgaatttggtcctgttctctgcacagctggactcagggagcccaacccagattgtgcatagaacaggtggcctgcctgggggccagtgagatggtgttgggtacatagacagcagcaggtgctgcagactccctgggatcttgakgggggaagtaagaaaatgggagcaggtcccccaaaacaccagcagactgcactcccatcatgacctaatgagatagtgcagttgaccaaaatagcaatgtcatccaagagaacacatcttcctactagcaacagccaacacgggaaattgaatgaacccagggggcgcagaccta

SEQ ID NO: 403673 - DNA, 492 bp, Homo sapiens
gctgattgcagtctctgtggcctcactcttgagaaatatgcttcaatcacttggcctttccctggagcagggatgacgacagaggagaggtggacagacaccatcttggttggcttttaggccaaccaagccaagggttgcttctcatggagtgctgtctagatatcgctgactcattgtgtgcctcggtttcccctctgggctcaagagctttgagcatgctttgtgtaacccagtccctgcttgtccctccaggttcattccacgtcactctcttcttcacgkgctggggtccaaccccactcaccatccctcggaccccagaaggcccacggtcctgccagccttgaggccttcccttctgcctggaacccttctctttgctcctaacctacctctgtcgtcttcctggcaccacttgaatatcacctcctcgggaagccttccctgatctcccaaactgagccagggcctcccttgttctagcattct

SEQ ID NO: 403674 - DNA, 317 bp, Homo sapiens
aataaaccaagtgcagggtccctttaactgtgggaccctgtgtgactgcacaggttgctyacctgtgaagctggctctgctgaggggtcccgactgatggaggcaccatgatttggggctttgctgtcatcagagcagagggcttgggagcccagcaaatcactcactgcctcttagagttctcctggaagggatactcatcacttcctcttgcttatgttcatactctccacttctgttccaaatggagggaggagagatggaatatttgtacacagacctcaatggccacccacctcctgcccccaccatggtct

SEQ ID NO: 403675 - DNA, 603 bp, Homo sapiens
aaactctaaatggacacagaggaagagaatgctatgcggtgacagaaacggggactggaacaacatgcctgagaggtaaggaacactgaggagtgttagcaaccctgggagccaggagagaggcctggaaaagattaactccttttttcttttttctttttgwgatggagtctcgctctgtcacgaggctggagtgcagtggtgcgatctcggctcaccgcaacctccagctcccgggttcaagcgattctcctgcctcagcctcccaagtagctgggactacaggaacacgccaccaagcccagctgaaaaggttaactcttagagccttcagagggagcatggccttgccgacacctgtttttgacttctggctttcagaactgtaagaaagtgaattcttatttctgaaagcctcacagtttgtcacaattggttacagcagccctagggcactaatacactgcctgtcaccctaagaatcaaattttaatgcctcccctcacttggcctataagtccctgcatggcttgagttctgcctacctctcaaccttattgcaaaccacagtctactatgcccactgtacttcaacgacactgg

SEQ ID NO: 403676 - DNA, 603 bp, Homo sapiens
aaactctaaatggacacagaggaagagaatgctatgcggtgacagaaacggggactggaacaacatgcctgagaggtaaggaacactgaggagtgttagcaaccctgggagccaggagagaggcctggaaaagattaactccttttttcttttttctttttgagatggagtctcgctctgtcacgaggctggagtgcagtggtgcgatctcggctcaccgcaacctccagctcccgggttcaagcgattctcctgcctcagcctcccaagtagctgggactacaggmacacgccaccaagcccagctgaaaaggttaactcttagagccttcagagggagcatggccttgccgacacctgtttttgacttctggctttcagaactgtaagaaagtgaattcttatttctgaaagcctcacagtttgtcacaattggttacagcagccctagggcactaatacactgcctgtcaccctaagaatcaaattttaatgcctcccctcacttggcctataagtccctgcatggcttgagttctgcctacctctcaaccttattgcaaaccacagtctactatgcccactgtacttcaacgacactgg

SEQ ID NO: 403677 - DNA, 603 bp, Homo sapiens
aaactctaaatggacacagaggaagagaatgctatgcggtgacagaaacggggactggaacaacatgcctgagaggtaaggaacactgaggagtgttagcaaccctgggagccaggagagaggcctggaaaagattaactccttttttcttttttctttttgagatggagtctcgctctgtcacgaggctggagtgcagtggtgcgatctcggctcaccgcaacctccagctcccgggttcaagcgattctcctgcctcagcctcccaagtagctgggactacaggaacacgccaccaagcccagctgaaaaggttaactcttagagccttcagagggagcatggccttgccgacacctgtttttgacttctggctttcagaactgtaagaaagtgaattcttatttytgaaagcctcacagtttgtcacaattggttacagcagccctagggcactaatacactgcctgtcaccctaagaatcaaattttaatgcctcccctcacttggcctataagtccctgcatggcttgagttctgcctacctctcaaccttattgcaaaccacagtctactatgcccactgtacttcaacgacactgg

SEQ ID NO: 403678 - DNA, 547 bp, Homo sapiens
tccttctgtctccacattgtycttgaactagcccttcactatctttgatcaaagatccctggtgatcttcctgacatttttcactattagtgatgattttcttgatctatgtatgtgttgtctgccttctctactggaacataagctccattgccagtgtggagaataaactataaggtgggccccatgatctccacttcccagtactcacactattttgtgacacttcccttgagtgtcttgcctctatccaatgctacaaaggggataggatgccacctctatgattatattgtataaaactgtaatgcctatcttgctaatatgcgaatacattatctcccttgctagcttagatggtgccagtggccatgttgtaagccaacctatggagagacccccagggtaaggaactggagacagcctctagccaatagccaatgaaaaacagaaggcttcattactcagtgttaatggaacggaattctgccaacaaacacatgaattgggaagtggctccttccccagtcaaccttgcagatgagac

SEQ ID NO: 403679 - DNA, 547 bp, Homo sapiens
tccttctgtctccacattgtccttgaactagcccttcactatctttgatcaaagatccctggtgatcttcctgacatttttcactattagtgatgattttcttgatctatgtatgtgttgtctgccttctctactggaacataagctccattgccagtgtggagaataaactataaggtgggccccatgatctccacttcccagtactcacactmttttgtgacacttcccttgagtgtcttgcctctatccaatgctacaaaggggataggatgccacctctatgattatattgtataaaactgtaatgcctatcttgctaatatgcgaatacattatctcccttgctagcttagatggtgccagtggccatgttgtaagccaacctatggagagacccccagggtaaggaactggagacagcctctagccaatagccaatgaaaaacagaaggcttcattactcagtgttaatggaacggaattctgccaacaaacacatgaattgggaagtggctccttccccagtcaaccttgcagatgagac

SEQ ID NO: 403680 - DNA, 459 bp, Homo sapiens
agaatcaagatgggctgcagcatttcgtaaattattattatcctttcacactgcctatatttgaaatacctacttctccctgccttcattgcaaacattttttcttctcatgtgatatttttcactcagcaaaattttctctagctggtttttctgtggcagaggctcatcaccaagacagattttagaaagaggaggagamcgctccaaggtggccaaataggaacagctctggtctgcagctcccagtctgatcgactcagaaaatgggtgatttctgcatttccaactgaggtactggttcatctcattgagactggttagacagtgggtgcagcccacggagggtgagccaaagcagggtggggtgtcaactcaccagggaagcacaaggggacaggggatttccctttcctagcaaagggaagctgtgactgactgtacctggaaaaacaggac

SEQ ID NO: 403681 - DNA, 459 bp, Homo sapiens
agaatcaagatgggctgcagcatttcgtaaattattattatcctttcacactgcctatatttgaaatacctacttctccctgccttcattgcaaacattttttcttctcatgtgatatttttcactcagcaaaattttctctagctggtttttctgtggcagaggctcatcaccaagacagattttagaaagaggaggagaacgctccaaggtggccaaataggaacagctctggtctgcagctcccagtctgatcractcagaaaatgggtgatttctgcatttccaactgaggtactggttcatctcattgagactggttagacagtgggtgcagcccacggagggtgagccaaagcagggtggggtgtcaactcaccagggaagcacaaggggacaggggatttccctttcctagcaaagggaagctgtgactgactgtacctggaaaaacaggac

SEQ ID NO: 403682 - DNA, 459 bp, Homo sapiens
agaatcaagatgggctgcagcatttcgtaaattattattatcctttcacactgcctatatttgaaatacctacttctccctgccttcattgcaaacattttttcttctcatgtgatatttttcactcagcaaaattttctctagctggtttttctgtggcagaggctcatcaccaagacagattttagaaagaggaggagaacgctccaaggtggccaaataggaacagctctggtctgcagctcccagtctgatcgactcagaaaatgggtgatttctgcatttccaactgaggtactggttcatctcattgagactggttagacagtgggtgcagcccacggagggtgagccaaagcagggtggggtgtcaactcaccaggraagcacaaggggacaggggatttccctttcctagcaaagggaagctgtgactgactgtacctggaaaaacaggac

SEQ ID NO: 403683 - DNA, 559 bp, Homo sapiens
ctgaaaacactatcgctgtgccaaaatcaaggggtgacagggccgccctgtctccagaggctctaggagagattccgatgcctgcctcttccagtttttgatggttgctagtattttttggtttgtggacacattactctcatcttcaaggccagcatcttygaatttctcattacttaattgaaagggtttggctgtgtccccaaccaaatctcattttgaactgtagttcccataatccccagatgtcatgggagggacctggtgggaggtaattagatcatggaggcagtttccgcatgctgttctcacgatagtgagtgagttctcagaagacctgatggttttataaggggcttcccccttggcttggcactcattcttcttctcctttctgccaccatgtgaagaagaacatatttgctttcctttccgccatgattgaaagttttctgaggcctcctcagccatgctgaactgtgagtcaattaaacttctttctttataaattgcccagtctccagtatctcttcattagcagcatgagaacagactaata

SEQ ID NO: 403684 - DNA, 613 bp, Homo sapiens
tacattcctttgtacttatagtttgagatgtgttctcattttattgttcttcctgttataattactttgtgcgttttttcaaattcctgtctttgaaagatttcagtcatcaatcaaaaagtatttgagacaaattttggaggtttggtttgatatgaaataaagaaatgtcttgatgtagagtagaggagttcaagtatccaataaaatgtctggaaatcaagagccattgagtgcttacccaagaattttaatttcaaaaatactatttgaaccttgtggacatgttcaagttggctcatragtctccatgtgaatcagatgatataaataaaataatgaggggcatggtcaggtgaagtggtgtaaacatcaatgtgccagagacatccatctctaacttccacaatacttttgcaaatgtaatagttgaaaataattattttacatttactgatgacttttatttctggtaatatagctgattaggtgatctgaatcaacattcccattggaaacaaataagaaatactgggtaaaagttttcaaaaaattattgaaagcaccaaataagtgggaacattaaaaggcttcacaggacaacttctaacaa

SEQ ID NO: 403685 - DNA, 583 bp, Homo sapiens
ctataaccaatcagtctgtttctttacatcacttcctttgtctgtctataaatactgcctgcccatgttctttggtggagctctctgaagctctcttggttctaagcagtgcttgaatcatgaattgttctttgctcaagtaaattcttaaatttaatttgtctaaagtttttattttaagaggctactcaaaggaattttaaaacgttatattttcaatgatttcctctccaacatctgtcatttttccttcttctggaactcctatattcctattttagttctccttgcaagataggccctatagcaagaaggtaattgaatcaagctgtgttaggctgtggagctcgcacctgatgcatgacaagctctttattgtgcccyagcaatcatactgtgcattgcatacctcaagactgatgacatacacttggcctaggtgagagttccccagcagttttccagacaagataccatcctggaatgatctaggcttatgtacacataaggccgacttaaaaggggacaggtatgatcttggacaatgaatgtgatttacttgggggctattaactgcaactct

SEQ ID NO: 403686 - DNA, 598 bp, Homo sapiens
tttacactcgtagcattgatttaacaaataacattatatatctagctccatgcagattgagtctggttgtccttataggactttaaacaaaacaggcgtggcagtcgtacctaattgtgaggttatttaaaggaaaaaagtcaattctgtgaattgctttgcaataaccgctacgtatagtaaagaactcaaaatgcttgtttaaaatatcttataaaatcaattgtctttattgttttgtgtttgtacaataaaattgtacttcaaataagccaaagtttgcttacaatgttcacactgtgtgcattctgcatgttattcttcttctttttggttgttttatgttatattttcatgatcactgaataaaaaagataaaaatgttttttaaaaaattatgtatttaaaatcgtacaagaarttaactaaaatgttatattatgatcttaatgcaacaataattaaattgaaagatatacctgtcaataaggttgtaatgcaaataatgtataatgcatatttaaatttccaacacaggcacgtttttatgttaacaataagtaaattttctttgcttcaatgcaacaaaaacctggtg

SEQ ID NO: 403687 - DNA, 502 bp, Homo sapiens
tggttgctgttaacattttttttttcattcattttgaccttggggaatctgatgattatttgtcttgaggctgatcttctcmagaagtatcttactggggttttctgatttcctgaatttgaatgttggccgtcttgttaggttggggaagttctcttggatgatatcttgaagtatgttttccaacttggttcctttctccctgtttttttcaggtaccccaatcagtcacaggttttgtctttttacataatcacatagttcttggaggttttgttcattccttttcattctttttttcctctaatcttgtctgcctgttttatttcagcaagatagtcttcaggctctgaaattctttcctctgcttggtctatttggttattgatacttttggttgcattgtgaggttctcctgttgtgtttttcagctccatcaggtcatttatattcctctctaagctggttattctggttaacagctccttctgaagcctacttc

SEQ ID NO: 403688 - DNA, 582 bp, Homo sapiens
gagaccataggcaactgtgaatttagaggacataagactgtttcattttgagttaaactgaagaaaggcaaaaagataaattttgagagacaggacagatattattcgtggaggtccttataagacgtattaaaagatgtgatttaatctggagtacaacacagagtgattgaaggttaccaatcatagaaatgtgattagagagattactctgaaagtgggatagaaattgattgaagaaaaggcagtggagaatgaccagttgggaatttttttaacctaagtaagagtttgtggaagtctgaaataaaataattagagagaaaaaagaagtctcaaatagagagaaatgttcattaaataaatgtattaaagaatgttttatgcagttagtrtagtgattcagttgatgtgaagtgaatttctttcacattgaaataaatttagtagagttcctgaaaatcatatttgggaatatgatcagagaaatatattaagtgtatgtacatatttgaaaaatatacaataaaatatgtcaaactgatgaattttggaagttttacttgatccaatacaattgag

SEQ ID NO: 403689 - DNA, 582 bp, Homo sapiens
gagaccataggcaactgtgaatttagaggacataagactgtttcattttgagttaaactgaagaaaggcaaaaagataaattttgagagacaggacagatattattcgtggaggtccttataagacgtattaaaagatgtgatttaatctggagtacaacacagagtgattgaaggttaccaatcatagaaatgtgattagagagattactctgaaagtgggatagaaattgattgaagaaaaggcagtggagaatgaccagttgggaatttttttaacctaagtaagagtttgtggaagtctgaaataaaataattagagagaaaaaagaagtctcaaatagagagaaatgttcattaaataaatgtattaaagaatgttttatgcagttagtatagtgattcagttgatgtgaagtgaayttctttcacattgaaataaatttagtagagttcctgaaaatcatatttgggaatatgatcagagaaatatattaagtgtatgtacatatttgaaaaatatacaataaaatatgtcaaactgatgaattttggaagttttacttgatccaatacaattgag

SEQ ID NO: 403690 - DNA, 570 bp, Homo sapiens
accaaacctatatgaataaaaatatcaatttgatcattatttgatatcactgaggaaaagaataagttatggctatttttactgcccatcaaatatgttggcatcaggtagatagcatttagaatatgatctgcctatgattgagcgaaatatttatgttttgacttatatttaagattttcaatgttaccatattttctttggctaccaaagatattaatgctatttctgttgagtttagaaaattgtaacaaaaaaattaaaatgctatttttcctgacctagcacatgagtttaggttgcaacataaatcaaagtaaagaaataatgattatttattccttaaatattttgctgagtgtctactccttgtcaacacccccatagttgctgtggctatagtaggtatgggaaaagtccctgctctcagtaaaaaagtgagaacataaactaaatmattatataaatatgatgatttcagaaaatgttatgtgtcttaaaggaaataaaattgtaattgcttgaaataattagatatgtaagtacatgaaagaaggtcaaggtggttga

SEQ ID NO: 403691 - DNA, 570 bp, Homo sapiens
accaaacctatatgaataaaaatatcaatttgatcattatttgatatcactgaggaaaagaataagttatggctatttttactgcccatcaaatatgttggcatcaggtagatagcatttagaatatgatctgcctatgattgagcgaaatatttatgttttgacttatatttaagattttcaatgttaccatattttctttggctaccaaagatattaatgctatttctgttgagtttagaaaattgtaacaaaaaaattaaaatgctatttttcctgacctagcacatgagtttaggttgcaacataaatcaaagtaaagaaataatgattatttattccttaaatattttgctgagtgtctactccttgtcaacacccccatagttgctgtggctatagtaggtatgggaaaagtccctgctctcagtaaaaaagtgagaacataaactaaataattatataaatatgatgatttcagaaaatgttatgtgtcttaaagraaataaaattgtaattgcttgaaataattagatatgtaagtacatgaaagaaggtcaaggtggttga

SEQ ID NO: 403692 - DNA, 537 bp, Homo sapiens
ttctcttttgtctgtagtcaaatctctttctatctacctttataaagatacttgtaatgccatttatggcccatctggataatccaggataatttcccatttcaagatccttaacttaattacatctacaaatctctttagttaaataaagtcacattcaccgttttcagggattaggatctggttactttggrggccactattcagcctaaaatatatagtaataccacaatattagcattaatttttcccttgggtatttgagagataacccttgttttattttataatacttttatatgatccatctcacaatgtatatttttggtgatgtggccctgggataagcaggaaatatagttgcattgggaaaatggttctccagcaaggtttctttccatgttgctattctcacttttatatcttcccaccagagatatgtacaatatggtgagcttgtttttctcagctaagcagatgagatggagagatggctgtcctaggaactgcagtatctgtcctggaatgagagacaaa

SEQ ID NO: 403693 - DNA, 537 bp, Homo sapiens
ttctcttttgtctgtagtcaaatctctttctatctacctttataaagatacttgtaatgccatttatggcccatctggataatccaggataatttcccatttcaagatccttaacttaattacatctacaaatctctttagttaaataaagtcacattcaccgttttcagggattaggatctggttactttggaggccactattcagcctaaaatatatagtaataccacaatattagcattaatttttcccttgggtatttgagagataacccttgttttattttataatacttttatatgatccatctcacamtgtatatttttggtgatgtggccctgggataagcaggaaatatagttgcattgggaaaatggttctccagcaaggtttctttccatgttgctattctcacttttatatcttcccaccagagatatgtacaatatggtgagcttgtttttctcagctaagcagatgagatggagagatggctgtcctaggaactgcagtatctgtcctggaatgagagacaaa

SEQ ID NO: 403694 - DNA, 640 bp, Homo sapiens
taagcagatgagatggagagatggctgtcctaggaactgcagtatctgtcctggaatgagagacaaagaggactctcttcagtcttctctcttgtccgaggaagacatattttctcctttttggctttagctgagcgaacggtctacagtaagacacaaagtatcagtatttatggtagagatgcctggagggaggatcctctgattattctacatggcaccaaactttctgatctttgaaaaatctaaagcactttgttcaggaggcatagytttaaccctggtggcctaaaccacaaattccaactacttaattacattctgcctagagtgtccttccaagtattccagaacacagtggtggttttcatttcctatcttaagctgctctgtagttgttctattgttattatttaaaattcctgagaacagacagatgctcgttttgaaacaggaatatacatttcctattgaatgagctaatactctaaaatctggttgccatattccatctctaaagttgaataataaaatgcattagaggaaacataataaaaggaaacagtgaaagaaaatattatacaagacaaggcatctgtcctggttaaaacccaaaccagttaatgcagagaataggcca

SEQ ID NO: 403695 - DNA, 559 bp, Homo sapiens
gctgctggctccagatattccccaatggaattctttaattagttagctctctctagcctattccccatggaggatgaaacaaacaaacaaaaaagatgcaaaaggctagcacctgcagccttcctgtgctaagactgaatagaacataggcactgagagagtcctctaagcaaatgagggtgaaataatgcagccaggaagcttaacagagtctgccaataggaagagtttccagtggcttaagtgtttggacagttaaattatgactgaggaaatattagaataaaatgtgtatttaattcccactgcagggttgacctgacacaccaaaaactgtcttgtgttgaggagagcagagtagaagtaattctatcaggtcagtttgggtaattttcattttctctttgaacaattatcttcagagaagtgacttgctctaccataattaaactgaacttaaattccctataatcccagcactttgagaggccaaggtaggcagatcacctgaggtcargagttcaagaccagcctggccaacatggcaaaaccccgtctc

SEQ ID NO: 403696 - DNA, 568 bp, Homo sapiens
aatattttccctaaaaaagtcatcaaatattctgaggtttttgaaagagtagtctaaagaaagaaaactattttacaaagagaactcacagagaatagaattgttaaagctcatctcccttttccattcaaaaggaaaactcagtgctctgaagytgggaaggttcaacctgatgacacaactttcctctctcaataatactgatattaagagctaactaaatttttaaaatatatcttttgttttcattttgagcaatttacagcaatcataactcaatcataattgtgcaattatggatattactctccataattcttattgatattttgtttaaaagactgcctttaatagatttgtcaataagattttaatagtatgagactatctatcaatgagttcaatatctgtgaccttaaaaaatcacaaagaagtttcagagcatctgatactcagttccctttctaaatgtaaagtgcttgtattgtgtgaaaggctgaaaaatctgcacatcacaaaaagaaatagcagtttgataactctgtgatgtgtcctaaaataaccaggt

SEQ ID NO: 403697 - DNA, 547 bp, Homo sapiens
ttggacctgaatgaatgtgggaagaactacaaatttaggtgcaaaattgaccattccaaattataaaagtcaatatttataaatcaatctgaaaacaattgcagcaacaatgtgtttaaacagagctatccttgtcacatagtcattctaggtaaaaaggggtctcttcttcattgaaatccaaaccacaagaattccaagttccaaattctttcttttttgtgtgtggctaatacagattgaagaagtccaaggaattctgaaaatgcttttcctgaatcagcttcttttttattttaaagaaatattttctgatgtagacacattgccaaaagatcttaataaagagttttaaaaactgattatccacagaaaawgcaatttttttgcctctagtttcaaacagaagatgcagatgaatgacacacaaataaagtattactaaattcaagggtgtgttctttggacatcttttgaaaaattgttctttacataagtttttatataggacttataaatgtgaaaatgttcacatcacaatgcacac

SEQ ID NO: 403698 - DNA, 553 bp, Homo sapiens
ttccacattatcagtgtccttctcagatgcctgaacctagaaaacacatacctcagacaaaaaagttttctggacaaattgcagcaatgatgtgtactttgttggctggaaaatcttctgattcaaccacgagggcatctctaattgtcacagcgggtagaagcagaataaatgaataagatcaagatgcttggattttttgctggatcacagaaaaatgaggacacagcagactggtgcctgagtgaccacatgtgtgctggggatggcttgggcactccctgccacactgcaagtgatgtcaccaagtaatcgtttacagctttgtcctcacttcaaacttggcatgggattcaaacacttgtttaaawttatagtagactgtcctatttaaatttatttttatattgacattttataatgtaatttgacatgcaaagtagctatatatattttaagtcaattgaacaaacaaaaaagggtacaacactctggcaaacaaataaacatctgtgagtgcatttttcccactggatggttatagaacacaatt

SEQ ID NO: 403699 - DNA, 574 bp, Homo sapiens
acacccaaaccacctttctctgttcttgatagcataagattctgacaagactacttactggcaaatatcacagttccttaagaatacttcatcttcttccacaagtggtatttttgtagttagattcamattaaagaattgtatatgttgatggtgtgcatttgtaggaactttctgtgaattttttttgtatttctatttacaaaattatctgcaattccataaatcataaagacagacaagagatatttatttgtccaataaaagttcaaattgcttaaagctctaaggtcatgtttttttttcccccaaagaatatgcttttcacatatatttattcattcaacaaatatttatcaagtgtcgggaagtattcaggttacatgaagtacattattgggaaaacaaaagcctcagcttttattgaggttatgtagtagcatggaaaggatgactatatacaataaacataataaataagcaagtcatacagtctgttagagggtgataggtgctgtggaaaaaacattaagcggagcatataagcggaatcaaaacagtgaatagctgggtg

SEQ ID NO: 403700 - DNA, 590 bp, Homo sapiens
ctgactctggcctgatatctaaattgcccaagtgtcctataatttgaattcttatgaggttgaaaaatccagctgtttttgcaccctaagctgaagcaattacaaaggatgactataaaactgaagaaataaaagtaggcagtaagcaatttatggggagagatgaaattaactgtgttgcctccccactcaaaaccattgtttcaggaagtcttaagtcagcagtcagtacactgagcagctggcagaatgagagaacagagtccattaagtaaaagacaagtgtcttcatggtttaaawctatttctagaaagatccttggctgtgagtatttaaacatgaaactgacttgaagcaattgaacaagaaatgtactgcattttggagacaattttagtgtccctctcaaaaacaaccccccaaacaaatcattcagaaaaaatataataataataataaaataaaaacaagcctggagcctgatgaggagtagctgggcttgaatttacagctgcagcagttaggcttcaagaaatgagcggcagtcatatgcccgggttacttaatgcatgcctcagatgtggacaag

SEQ ID NO: 403701 - DNA, 590 bp, Homo sapiens
ctgactctggcctgatatctaaattgcccaagtgtcctataatttgaattcttatgaggttgaaaaatccagctgtttttgcaccctaagctgaagcaattacaaaggatgactataaaactgaagaaataaaagtaggcagtaagcaatttatggggagagatgaaattaactgtgttgcctccccactcaaaaccattgtttcaggaagtcttaagtcagcagtcagtacactgagcagctggcagaatgagagaacagagtccattaagtaaaagacaagtgtcttcatggtttaaatctatttctagaaagatccttggctgtgagtatttaaacatgaaactgacttgaagcaattgaacaagaaatgtactgcattttggagacaattttagtgyccctctcaaaaacaaccccccaaacaaatcattcagaaaaaatataataataataataaaataaaaacaagcctggagcctgatgaggagtagctgggcttgaatttacagctgcagcagttaggcttcaagaaatgagcggcagtcatatgcccgggttacttaatgcatgcctcagatgtggacaag

SEQ ID NO: 403702 - DNA, 590 bp, Homo sapiens
ctgactctggcctgatatctaaattgcccaagtgtcctataatttgaattcttatgaggttgaaaaatccagctgtttttgcaccctaagctgaagcaattacaaaggatgactataaaactgaagaaataaaagtaggcagtaagcaatttatggggagagatgaaattaactgtgttgcctccccactcaaaaccattgtttcaggaagtcttaagtcagcagtcagtacactgagcagctggcagaatgagagaacagagtccattaagtaaaagacaagtgtcttcatggtttaaatctatttctagaaagatccttggctgtgagtatttaaacatgaaactgacttgaagcaattgaacaagaaatgtactgcattttggagacaattttagtgtccctctcaaaaacaaccccccaaacaaatcattcagaaaaaatataataataataataaaataaaaacaagcctggagcctgatgaggagtagctgggcttgaatttacagctgcagcagttaggcttcaagaaatgagcrgcagtcatatgcccgggttacttaatgcatgcctcagatgtggacaag

SEQ ID NO: 403703 - DNA, 552 bp, Homo sapiens
gttagaatgccttggccaataatagaaaacagaattcagaagtttaaaaattgggaaaaatatttatttcctttttcctttttttatttttaatgtttttggtctttaataagaggaagttggatgaaaggctgtgcctttgtgatatcagaaaagacctacatatctttaatcatctgttctgtaatttccctatgactaactcccttcctggttataagattaaaatcacactcttcatccacacatgcagacatggcaaagtcctggggaaggaagtggataattaactccttatttctctccctgtgtgtctctgtctctgtctctctctctctgaatgaaaaaatattttatactcaatatctctccagcakatttcccctggatttatgttggtcactccatcagcagaaacaatttactattaaacaataatcaattaggtaagcattctgctaatgaagattgaaaaataagcttaaggaaagctaaaaacgaataagtatgaaataagaaaatattaatttttgaaacaatagaattaataaa

SEQ ID NO: 403704 - DNA, 593 bp, Homo sapiens
cagtcgtacaaccacaaggagttgatttcttccagtactcatgtgagcttggaatagacccttagcttcagaaaggaatgtagcctggcactcaccttaattttctcatccttgtgagtttgagccaatgatacagtaaaagtgagcctgtacttaatgatccacagtgactttaagataatacgtgatgttttaaaacttgctaagtttgtggcaatatgttatgcatcagtataaaatgactrcaggtgcctcttcaacctgtttaatatgacaagacttgctataaacttctgaattttgagaacaaataaatacattaacttttgaaaggcaaagcttaaaagcattaaaggaaaataaaacctatgatatcttaaataatttgggttccaaaaaatgaccaacaaattgttatgagaaaaatacatgataaatcaactgaatgaatgaaaatgaatagcaatgttatatattcattttaatgaaatggaaaataaaggaaaatgcaaccatgtttatcttgggtttaaatcagtattcattcactgctctgttttaaagtactttatggttatggttgttttacaaac

SEQ ID NO: 403705 - DNA, 423 bp, Homo sapiens
gaatatctgtatacttgcaaattgtataaaataatataaaataatatgcatgtttcctttaatacttgttaacttgtttaaaacagatttgactcttttaaacagcgatgaatattggtgttctgattcagtaaggggaagctatgaagaatactttaacaattagatcttcaggactgttaaaatagaatctcttcattttctgaaaaaaaaaataagctatgtctttgctatattactctttcatgatactttttataaaattgattttgtatacagatgcccctttacttgatggggttaagtctctatctttaagccaaaaatgcacttaatacaccaaacctactgagcatcataacttagcctagcctagcttaaatgagctcaraaaacttacattaacctgtagttagacaaaat

SEQ ID NO: 403706 - DNA, 641 bp, Homo sapiens
gcatgaatatcccatttgaacccctacactaagagacttgaccaaattttaacacaacttccggtagcttaaggccactttgctggaacaacctagcccccatttcaagtttcagtctgtctgaaaatctcaaggctgtcaaaagaagttagtgtttgttttaggcaatacctgaccataggtccctgacctctctttcttagcatttgctgaaagggrcttacaatattgaattttccactgtccttttgagatgtatatgtatctcctacaactcaagagtgtctttctaaggatccgaaagccattcctttgaaatataatcattgggaaagacagggcctctgtctcacagtctctgggggaggatagaatcctaacttccataattgacaactagcagacagagcttccctaatcacatttgtactgaccaacactttgtaatttttcaattgagtcccctcttcttctccctccctacaccccattctccctttaaaattccatatcatctttcagcaaattggaatgaagcttagctcttttccttactgtcagtagttagagaatacaatattttcaacactttaactaacgtccagctttgtgtatctttgagagttttaaaagaggaaaca

SEQ ID NO: 403707 - DNA, 430 bp, Homo sapiens
tttaaaagaggaaacaatgatctggctcttgagggagattgtggaaaatggtctgtgaggaaactgaagcttagcattgagggaccttggttttcaggagcttactagcaatgctggagagtagttcagcaagtccttgagggtgatggggctgtctttgataagaatccaagaacatgttacttgattcatacacaagaggcatagaatcaggaactacaagagataggaagtctggtggaaggtgagttaattaccaagaagttatctcccaaattggaaaagacctgataggtttgaaaattgttgagatagtttagctgtagtttgcatactctgacaayagtttgaggccccagagggaagaaaaggctttaaactctaagtaactctgaaagcattaactttggaaatcctctggagtgaggca

SEQ ID NO: 403708 - DNA, 545 bp, Homo sapiens
ttatggtggagggcaaaagacacttcttacatggcggcagcaagagagaatgagtaagaagcaaaagcggaagtctctgataaacccatcagatctagtgagacttactcactatcacaagaatagcacgggaaagaccagccctcatgattcaactacctcctcttgagtccctcccacaacacgtggaaattctgggagatacaattgaagttgagatttgaatggggacacagccaaaccatatcaacacccaatattgtacttcttttaacagattcagtatggattagaggaaatgtaatgttaaacattgggtatgtaaaacatgaataatatttctttgctggttaaatattgccagtgagatttcattggattggtaccgaacatgtctaattttatagttgttataatgatttggataaggakgacatagtcacaactaagctcttcagtgaagcaaagtatgcagttttgtagctacatttcagaacgatttgataaggctgtataagtaggtacaataatatgatgaccagtta

SEQ ID NO: 403709 - DNA, 586 bp, Homo sapiens
cattagaaatcgtttggcatctgtagtgcttccacgcctgctgttattttccattgacaggtaagagtgaggttttgacactcttaatataacatagggtgttaatcttataatcaccctgtcagcactttctgtcagagtgttaatggccacctttcagccactcagcggctcttgccaaaaaaaataatatcggcatccagccaaccagaagttattcagctcctttttttctcttcatttttttaagagcaacgaataaattaaaacacacacagacacacacacaccaaaarccacccttagagatggaagtcaacctctatgccctgcttgcctacttctgtggtcaaccccctgcctggtaataaaattcaagcttggtctgagtccttgcaatacatttgaactattggaagtgtttcttcatttttatataaatatgccaaggaaaaggcctatcttgactgaaaatgtaaagcatcctttcaaccagattgaagctacagttactaatatacaattaagaaacaccaaagaactagggcattggaaagcaactaatattcatataggtatgtttatt

SEQ ID NO: 403710 - DNA, 520 bp, Homo sapiens
aacgaacgcttattttccaaggagttccatttgcaattacaaatgttcatcttcttcaagaatgtcattaaatgtcattttttgtcttttttaaagcaataaaagcgtgtagtctttattttccacttaataacaagcttaaaattgagaaaagtgtaaaatctcagcttacctccttaattccttggccattttctatcacttgaatttgacacattgaaagttaattaggacataaccggatcactcacagagagttgtattttggccactctcagtcatattttcaatcttaaagcaggccscttctagggcggcgagctgtatgcatgtgtgaatgccattaggagagcatcagtaagagactggactgaaagggcacactcaggatgtgttccactccaaaagcactctaaaaatttgaagtttgaaaattgattcaatatgtggaacacataaatatgtagtcttctaaaaatcacacacagatttatttttagtagttttttatcttttaaca

SEQ ID NO: 403711 - DNA, 512 bp, Homo sapiens
ttttccaaggagttccatttgcaattacaaatgttcatcttcttcaagaatgtcattaaatgtcattttttgtcttttttaaagcaataaaagcgtgtagtctttattttccacttaataacaagcttaaaattgagaaaagtgtaaaatctcagcttacctccttaattccttggccattttctatcacttgaatttgacacattgaaagttaattaggacataaccggatcactcacagagagttgtattttggccactctcagtcatattttcaatcttaaagcaggccgcttctagggmggcgagctgtatgcatgtgtgaatgccattaggagagcatcagtaagagactggactgaaagggcacactcaggatgtgttccactccaaaagcactctaaaaatttgaagtttgaaaattgattcaatatgtggaacacataaatatgtagtcttctaaaaatcacacacagatttatttttagtagttttttatcttttaacaaact

SEQ ID NO: 403712 - DNA, 512 bp, Homo sapiens
ttttccaaggagttccatttgcaattacaaatgttcatcttcttcaagaatgtcattaaatgtcattttttgtcttttttaaagcaataaaagcgtgtagtctttattttccacttaataacaagcttaaaattgagaaaagtgtaaaatctcagcttacctccttaattccttggccattttctatcacttgaatttgacacattgaaagttaattaggacataaccggatcactcacagagagttgtattttggccactctcagtcatattttcaatcttaaagcaggccgcttctagggcggcgagctgtatgcatgtgtgaatgccattaggagagcatcagtaagagactggactgaaagggcacactcaggatgtgytccactccaaaagcactctaaaaatttgaagtttgaaaattgattcaatatgtggaacacataaatatgtagtcttctaaaaatcacacacagatttatttttagtagttttttatcttttaacaaact

SEQ ID NO: 403713 - DNA, 576 bp, Homo sapiens
tgcctgtgcttttggtgtcatagccaaaaaaatcattgccaggtttaaagtcatgtagcttttccctgatgttttcttctaggagtattagttcttacatttaggtattgaatccattttgaattaatttttgtatatggtgtaaggcgaggttccaactttattattttgcatgtggatatccacttttccaaataccattgtttgaagagactagcttttccctgtggtatccttgttagagatcatttgaccttatacccagggggttatttctgggctctctattctactctattagtctatttgtcyctttatgtcagtaccacactattttgattactgtagctttgtaatatgttttgaaatcagagcatatgtcttccaactttgttcttttttgaaattgtttttgctattctgggtttatttaaattacacacgaaatttaggatgaatttttctatttctgcaaaaaaaaaaagccattgacattttggtagaaattgcattgaatctgtagatttcttttggtagaatgaacgtcttaacaatattaagtcttccaacccaaga

SEQ ID NO: 403714 - DNA, 576 bp, Homo sapiens
tgcctgtgcttttggtgtcatagccaaaaaaatcattgccaggtttaaagtcatgtagcttttccctgatgttttcttctaggagtattagttcttacatttaggtattgaatccattttgaattaatttttgtatatggtgtaaggcgaggttccaactttattattttgcatgtggatatccacttttccaaataccattgtttgaagagactagcttttccctgtggtatccttgttagagatcatttgaccttatacccagggggttatttctgggctctctattctactctattagtctatttgtccctttatgtcagtaycacactattttgattactgtagctttgtaatatgttttgaaatcagagcatatgtcttccaactttgttcttttttgaaattgtttttgctattctgggtttatttaaattacacacgaaatttaggatgaatttttctatttctgcaaaaaaaaaaagccattgacattttggtagaaattgcattgaatctgtagatttcttttggtagaatgaacgtcttaacaatattaagtcttccaacccaaga

SEQ ID NO: 403715 - DNA, 580 bp, Homo sapiens
tgtctcctacgatttgcataaggccattgtttctggaatttggggattttccagctagaatgtctcacgtatgctattctgcacagacaattgaagagaatgcaggagccaaattcccttgttatggctacttctrccctctaactggttctcctttgggagcttctcttctcttcctttctactctctgcccacctgggctacccactcctctgggctcaaggtccaatcaaccacacacaaagcttcaattctggttgtaaagctgtcagtcacaccagtttctcatattttctgtctttgattactcttagtgttatttcttctctaatttctcctgtggtttattaactgcaatgttgtcaacttcatcccagctttaggtgacctggaaactataacaggacaacaggtgatctgtcctgcttgtccaggacagtccaggattgcacctgttgtcccaggttactaattaatcgaacccccgtttactttcaaaaatgtccacgtttggaagacaaacgatacaatcacactatccagacccaacctctcgagttctactttcatctgttttata

SEQ ID NO: 403716 - DNA, 537 bp, Homo sapiens
tgggaactttttttgcccagcagatatctttgatgttacattttcttgcctctcttagctctgagtgtcaaaaaaatatattttcagttttgaggggactgtttctaacacacttccttcactccttatatagggtatagtgggcaatatccatccatcctttatgagtcaggtcaccttataaatatcaattattaaactgagtaatcacrtagtgatgtctcattgacctgagtgctaaatggctatagattgagatgctcttggtttgtcttttgtctttttcctttctgacacagagcatttttctaagaatcatctctaatatgaaaactagaaaacaaaattggcaagcttgggaggctctggaatatctgcagtgtatgtacaataatagaaaatagactctttgtaagggtctttgcatgaaattttgggcatggctactgaaacacctatgtagatatacaggggtgctttcattcattcatttttgcttcctcctgaatacatagctgaaattgctttaagaatata

SEQ ID NO: 403717 - DNA, 575 bp, Homo sapiens
gctatttatgttgatatttgacttaagatggcagtttgttcagcttagttactccatcaacagcaaaaaaattcatatgtaggagattataggaaagcaggaagatttactgttttggcaggaaaaaagggaaaacaccagccatgatcaagaagtcaacaatccttaacagagttgtaaaattcagttctggaagcaatggcggaattcataactagttattcaatctatgtccttgtaacgggacggtcacgtcaaaggagaaactggacttggatgggagaaaaggtttgaagygatttctcacaacgttaagtcaaatttgattccaaagcattccaaggggctatttcaagtccttttattgttttatacttgttcaataccatttcaggccaaatgagaatgcatcaagaaagtctttgtttacagagatgggagagatgcaacaaagtcctatcaagtctgtaaggagaagaaaaatccacaggttggaattctaggaaacaggctctacacagatggatgtgtcacctgcctctgtttacccatcttactttaacacagattagctg

SEQ ID NO: 403718 - DNA, 603 bp, Homo sapiens
agcacattcaatctggttcaagccaacttgacacaatcttgctaactgtttctgtcacatgctgtagcagataaaagacaaatgccactcttcctggtcttaaagaatttatatgtttttaaaaaagtatcctgggtacacagaattgaattaatcacaatccttggttcatgacactgtcacactatcgtcattgagccatagatgacctttgtttaattaatttgcttaataacacatggacacaactactgcctaacctaagaacaatagggataacctgcttcttacctttcggctacacccctacctccttatttagcctctcccactgtgctatgactttgacttttgtatttatagtcactcctctcctttttgttctagttttagtacacacaaacgcacatctaacaataaacctatattgcttgtttttgatgtttttgaatagactttagaggaagaataaaacctatttattcaacatatatttaatgggttccttctctgtgccaagcatagatgatatgaaatgactggaaaatacccyataaactatgttaggtgctagagaataaagacagtaaaaaccaaacacga

SEQ ID NO: 403719 - DNA, 633 bp, Homo sapiens
ctaggaaaacattcaagggaagagaaaaaatttttttttgcatttgtggcagacctggctttatcttaatgttctatgtttgtttttcgacgcagaaaagtcaaatagccataagagtcacaaaataattgaaagaaaaatggcttggtgcttctcatgtctagaatatttatagcagagggaggagctaggctgtgtatatccattattcaacaggccaggtaaagacagaagattggccaacggcagctcaaagacagagccctggggattctcttaggtcttatggaagctgcatcagagctattgctaaactatgtcaactgtaactttccattagcctgatgacctgtgatctaccaatgccacaacatgrctggaatgctcagacagttaccaaacaggaagataagccatgggtaattatttcaatagaaacttagagttgaagtgattgttcctgtaagagtctattaattagaattagattttgctgctaaactaaaaaactctcctaatagtggcctaatcataaaaagagtccagaggtaggcagcctgtggctggtgtgatgtctggtatggtgacaccaaagagtcatcagggacccaggctctgaactgtatcctctgc

SEQ ID NO: 403720 - DNA, 556 bp, Homo sapiens
ctttcaatcataagacatgtatctacctttgttttataaaatgtcttctctcatatgtttggatattttatttctgccacatttgttcagtttcctttggggaggcgttcasaaattacatgcatatttattcactatgtcttattttctctgtaactctttggcttttccacatattttgttcatttctttctaactcagcctgtcctccatgtttccctttctcagcaatatttattttaatttcagcatggctttagctttaaattatttttctcttctgcattttcgccagatctctctcagctcacatttatttctttgtattgccttatcatatcttctttgatccctatatctcttttctgagctctgatttcccaggcaccatgatcagttctttgactctggataaatgtttgtgtgtactgttgttctgcttgcagagtaattcttctgaggtctagcctccatctggctttgtttggcatgttcctttcttccagccagttatatccatgcatatttctcaggctggctcttttctgattattac

SEQ ID NO: 403721 - DNA, 544 bp, Homo sapiens
tcatatcatacaatcaataaggatggaggccaggatttgaagccaagtcagccagatggcatacctataccacatatacattgagattttccaacaaaaattaatagcagagttgtgggttttcagtctcttagctaagaagcaagtttcattggttgtattttgagttgtgagcatgacccaggattaatgagaatttgagaacaacttaaacctcccatggcctcagccaactcctgatttagctgctatgcaaatatggtattgttaacccactccccatcactccatatcttaaaaaaaaaggcaaataatactcagtataggagatactggataattgtaatcaagaatataagaaagaacataagaaaatttaaaaattactgataatctcaccacccagagctaatcattttgggaatggatccctccaggcttttttccatgcatgtgctttagcacttttggtaygttttgattctcaacttgttgggattaaagttttttaacttttaaaagaaatttctttttttactgtctt

SEQ ID NO: 403722 - DNA, 520 bp, Homo sapiens
gaaataatgcatagaatataaaaaaaatttcacatgcatagaagaactcataaaaaataaaggaaatcactagatgccaaaagaaaaaagaagaaatttaatatccaaatggtaagagtaactggaaagctcagatccgaatgcagagcttaggggccgggaccctgggatcctagcatgagctggggaaagaaggcacagctttattcattgccaaggcaaggaagctagaactagacccctccataaagtgtggagtctctaggagggccctgccagataaaggctgtggctcactggtccagcaaagtgaagagagggctcgccttccatgtgatgccttggatggaaaaaaaaamaacaacaaaaaaacagctcttataagaagttgaaagccctgttcaacttgttattatagattcagggtccaaatttacagaaactgtgcagaaaataaaaagtataaaaacctgccacctgaggaatggagcatagaaactggttcagcacccatgaatga

SEQ ID NO: 403723 - DNA, 551 bp, Homo sapiens
acaacaaaaaaacagctcttataagaagttgaaagccctgttcaacttgttattatagattcagggtccaaatttacagaaactgtgcagaaaataaaaagtataaaaacctgccacctgaggaatggagcatagaaactggttcagcacccatgaatgacagaggagccgctgcccaaagggaccgaggatgggtggaggggttctgtaatgtgatctgtctcacacacaagaatgatccctctgggggtagtgagagggagggagcaaggacagatggagagagctgccaggagaccaacacacagttccaagtaaatgcgggcgacagcccaatctaggcactgcaaaggaccagcaaggattcctgcttttaggtttygcccctgcttctttactcccatcttgaacatcagatatcttcactcccacttttgtctgtgtccctgggtgtaagagaaaagcattttctgccccaccccccaggcccatccatcttgtgtaagctgaggcccttctgccccatgccagggccacagctagtctgaatg

SEQ ID NO: 403724 - DNA, 604 bp, Homo sapiens
tctaattctcctttatatctaatttttattcagctacttagtggatgcccacggttaacctcattaatcttcgtatggtaatttattagggataaagggctcttaatttgaccactataattaccctagaggtgagtataatgacgtctgtcktacagggatgggaaactaaggtatagaaacgggaatgacctgcccgaatttacacatacagcatggtgaagcacttgaactcagatctcctggcacccaatcttgtggcctctctcgatgaacaagcgaacacaagaaggcgtaaatctgagtccctttgtctcaggcatctctgcagcaatagctttcaaggaacgcaggtcaaatggcaggtccttttcccggaggcccctcccaccggccccgggcgtgtgtgcgcgctgtctgcttaattcactcatggctctgtgccacagaatacataaacaagtggggaaagcctcagagaggaatcttggtgcccaaatggagcaatttgtcttctgaaattattgtttgaaattgtttatgtcagttgccgagtttctgttctgtacttcagggacctgtttgtgatggaaggaaaagttcc

SEQ ID NO: 403725 - DNA, 574 bp, Homo sapiens
tctggcttgagggatgcccatcctcagaacaaaaactaggactaggaagagagacaaaaaccatgcggatggcagaggagaaaagcatttcctattaaacccagtggaaaaccgtttcagaagagaataaaagggaggcatcaccggcttcccctcctttctttcatttgtcactgtcaccaacaactttactgtcagtacctgtctctgtcttcctctgtcgctttctctcgtgcgcgcgcgctctctctctctcccsctccttctctctgtctctcattctctctttcttatcaggcctgtcaagtctttcgggaatgaaaattactcacacatacacagatacacacacatacacatacacatacaagctgttgttaagtagaactggaaggaggcaaattaaatgctgtgggcctgacaactccttttatttatttgtttgagtttcctgggagaaaaggccagacaagcttccctaattcccaaactacatgaagctcctggcatgacactccccaaattgtaattatttgtttaacatctttccccctctctaggctgtaaactttcc

SEQ ID NO: 403726 - DNA, 377 bp, Homo sapiens
tgtaaatggatatagaactgtcttgcctgcctattttattactgaatggaaaaactctttgtaaagctaaggtgctaaataaaatgctgggctatctcttgtctgcaaaggcccagtggattccagcccaaacatacagactcaggggcccttgctctcacattggctttyactgtttttcttaaatctaaccggcaacaaagcatcccctccaccctcaccccatactgtcctctggcagccaaaaggaacagaggtagactgggatgggtagaggaagagggaaaatttaaacagcaagcccaggactatcaagttattcagtcatgatctgtttggagcaatctcagccagcaccccagacacaaacagaaagt

SEQ ID NO: 403727 - DNA, 581 bp, Homo sapiens
gttgcaggaatgcccaaaatctcaactcctattccttgcggttcttcaactgaagtcacccgcttaactaagactggaamccctctcaggtctgcagcagtgactgcctccttactactctagttttcagcttcctcttcatatttggatcccttggtctttccttttctaaattcctggaaactctgctatatatttaaaatgatgtttaaaatgggtaactatgtgagatcatggacatattaacttgttccactatagtaactgctttcctatacgtatgtatctaataacatcatttttaataccttaaatatacacaataaaatttatttttaaatataaataatcaaatattgttcatttcatttccttcagcattctaggtttttattttgttgttatttttgttatgtcagaagaggcctttcagggtaattgtgttaacttgccatgaatagaaatcttcatggctattccttctaacatctcggaagaatggattttaatttgcactgtggctcacatttttgcataagtaaattttttattagttgacatttgttaaataaataaggact

SEQ ID NO: 403728 - DNA, 581 bp, Homo sapiens
gttgcaggaatgcccaaaatctcaactcctattccttgcggttcttcaactgaagtcacccgcttaactaagactggaaaccctctcaggtctgcagcagtgastgcctccttactactctagttttcagcttcctcttcatatttggatcccttggtctttccttttctaaattcctggaaactctgctatatatttaaaatgatgtttaaaatgggtaactatgtgagatcatggacatattaacttgttccactatagtaactgctttcctatacgtatgtatctaataacatcatttttaataccttaaatatacacaataaaatttatttttaaatataaataatcaaatattgttcatttcatttccttcagcattctaggtttttattttgttgttatttttgttatgtcagaagaggcctttcagggtaattgtgttaacttgccatgaatagaaatcttcatggctattccttctaacatctcggaagaatggattttaatttgcactgtggctcacatttttgcataagtaaattttttattagttgacatttgttaaataaataaggact

SEQ ID NO: 403729 - DNA, 581 bp, Homo sapiens
gttgcaggaatgcccaaaatctcaactcctattccttgcggttcttcaactgaagtcacccgcttaactaagactggaaaccctctcaggtctgcagcagtgactgcctccttactactctagttttcagcttcctcttcatatttggatcccttggtcyttccttttctaaattcctggaaactctgctatatatttaaaatgatgtttaaaatgggtaactatgtgagatcatggacatattaacttgttccactatagtaactgctttcctatacgtatgtatctaataacatcatttttaataccttaaatatacacaataaaatttatttttaaatataaataatcaaatattgttcatttcatttccttcagcattctaggtttttattttgttgttatttttgttatgtcagaagaggcctttcagggtaattgtgttaacttgccatgaatagaaatcttcatggctattccttctaacatctcggaagaatggattttaatttgcactgtggctcacatttttgcataagtaaattttttattagttgacatttgttaaataaataaggact

SEQ ID NO: 403730 - DNA, 581 bp, Homo sapiens
gttgcaggaatgcccaaaatctcaactcctattccttgcggttcttcaactgaagtcacccgcttaactaagactggaaaccctctcaggtctgcagcagtgactgcctccttactactctagttttcagcttcctcttcatatttggatcccttggtctttcctttyctaaattcctggaaactctgctatatatttaaaatgatgtttaaaatgggtaactatgtgagatcatggacatattaacttgttccactatagtaactgctttcctatacgtatgtatctaataacatcatttttaataccttaaatatacacaataaaatttatttttaaatataaataatcaaatattgttcatttcatttccttcagcattctaggtttttattttgttgttatttttgttatgtcagaagaggcctttcagggtaattgtgttaacttgccatgaatagaaatcttcatggctattccttctaacatctcggaagaatggattttaatttgcactgtggctcacatttttgcataagtaaattttttattagttgacatttgttaaataaataaggact

SEQ ID NO: 403731 - DNA, 260 bp, Homo sapiens
atctccacctgcacaggcttcagcctccatctcccaaatgcttcttcagttttatagtggaagtctctggaacaatgttattcatyttacataactctcttcacagaaaaagtctcttcatctttctattctgtactgcaaggtgcacctgcacattttcttggctttgttttgggtgttttttaaaaaagaagccttggtatggcatttagtctaggttttccttcctagaaatatcacccttctcctccacagctgtt

SEQ ID NO: 403732 - DNA, 530 bp, Homo sapiens
tgcaagctctacaaggataggaactatatttgtattattcattttactatgcccggcaccaggcaaagtgcttagcatatattaatagtagagactcagtaataagttatgtaggccaggcacagtggctcatgcctatatcccagcactctgggaggccaaagcaggtagatcacaagctcaggagttcaagaccagcctgggcaacatggtgaaaccccctctgtataaaaaaatacaaaagttagccaggtgtgatgrcatgcacctgtagtcccagctacttgggaggctgaggtgggaggatcacttgatcccaggaggtcgaggctgcagtgagccatgatcacaccactgcaccctagcctggatgacacaatgagactctatctcaaaaaaaaaaaagtattatgtggatggatagatgaattaatggttggattgatgtcagtctttttcagagctgagaacagtgttctgttgcttctcaactgacaaatttccaggaccctctatgaagagtagatgaa

SEQ ID NO: 403733 - DNA, 588 bp, Homo sapiens
aggaaagggagcactgcacctgggtgctgacttttagagcgaggtgaccctgcccactggaaaaaagtggccccactgaatgtcctgatcaaccaagactagatcaacaattcctcctcctttacaggagggctaataagagctgaacaggaacaaagatggtggagtcccctcctctatggcgagcactcaatatgcatttgttaaaaaaatgaatgaaaagaggcagtgttgctagggaattgttactatgtgaaataccatttgcatgcagattttacattattagcaaccaagagcctctagcaagaaggctgatggaagggtcagtgtgttgcttttctgagtgagatctggatggagaggaaagccaytggcattctgcagaagcctgacagagaagcttggctttagctatgttaagtttcatactatggtatctggtagatgagttctggaggcactataggaacagaaatgaatttcaggtgaaagttcagaatattgaattttcttttctcttccccaatccagtcccctattcctcacaaatggacaaaaggaaatatgggcactagctcctgtgag

SEQ ID NO: 403734 - DNA, 596 bp, Homo sapiens
ctttgacttaataattgtttaagagtttgttatttaatttacatatttttgtgaatttcccagttttcattctgcgattgatttatagtttcagtctattatggtcaataaagatgtttggaatgatttcagtcttcttaaaattttcagacttgttttgtgacttaatacgtgacctattctggagaatcttcagtgtgcttttgaggatatgtattctactgctgyggggtggaatgttctgtatatgtttcttacatccatttggtctatgttgttcaagtcctctgtttccttattgatctctctctggatgttttatccagtatagaaagtgaggtattgaagtcttctactattattgtattgctatctatttctgcctttagctctgtcaatgtttgctttatatatttatgtgctcttatgttaggtacatatatgtttataattgtcatatcttcctggtagattgacccttttatcattatatagtgccttttcttgtcttgtgatggtttttgacttaaagtctattttgtttgatacaagtacagctacccctgctctgttttggttaccatttgcatggaata

SEQ ID NO: 403735 - DNA, 622 bp, Homo sapiens
atgttcagctctgaactggttacaagtcatgtttagcatgggaacaattaagctgaaactttcttctccttataggttaccaacattttcttgatttccgcagtagccttccctggattcagacctgtgggacaagtccttgtgtagttcatgatggtgtggcagtggtacagagagagtgggtcctgcagcttggccaggtactcttctgtgaagtcttctctggagtcaatcatccagtgataggcctgtataasaactgcaggccccagatatttgtctctgttccaccagtagctggggcaggtgttgctgcagcaggcacagagaggaggctgaggtgggagaatcacttgagctcgagaggtcaaggctgcaatgagcagtgattgagacactgcactccagcctggatgacagagtgagatcctgtctcaaaaaaagtagtttctgaataggattctctaagttccactgttccagtactgctcaaaatccaactgggaagtgatgtacatctttggctctatctaaatccaagcaaagtttatctataggcacctgatgtcgttttgttcagacttattagtcattaaatattagccagaccctggtagaaaac

SEQ ID NO: 403736 - DNA, 516 bp, Homo sapiens
taatttttgtattttgtgtagagacagggttttgccaggttgccgaatctagtctcgaactcctgggctcaagccatccatccacctgggccttacaaagtgctgggattataggtgtgagccgctgcgtccagccaggacttctgatttctttactgtttattagaggatggaccctattccctccaatcataactcactttttaaagcagtgattctcagcccttttggtttcaaatttttggtagcctatttaaggaggaggttaagatacccaaaatatcgccagtcaagtcctgaatcattacagtgcatacttccaccgtaaaattctgtcccagagtgtctgaaaagyatccataacaactcatcagctccatgtaactaactgcttcagtgaaaatgattattgtcttgacctcatttctttatacttaaaaggacaaatttctcatatgttccagaaagtatgccatctttatttagcactatgcagctcatctcttacttgcagca

SEQ ID NO: 403737 - DNA, 516 bp, Homo sapiens
taatttttgtattttgtgtagagacagggttttgccaggttgccgaatctagtctcgaactcctgggctcaagccatccatccacctgggccttacaaagtgctgggattataggtgtgagccgctgcgtccagccaggacttctgatttctttactgtttattagaggatggaccctattccctccaatcataactcactttttaaagcagtgattctcagcccttttggtttcaaatttttggtagcctatttaaggaggaggttaagatacccaaaatatcgccagtcaagtcctgaatcattacagtgcatacttccaccgtaaaattctgtcccagagtgtctgaaaagcatccataacaactcrtcagctccatgtaactaactgcttcagtgaaaatgattattgtcttgacctcatttctttatacttaaaaggacaaatttctcatatgttccagaaagtatgccatctttatttagcactatgcagctcatctcttacttgcagca

SEQ ID NO: 403738 - DNA, 516 bp, Homo sapiens
taatttttgtattttgtgtagagacagggttttgccaggttgccgaatctagtctcgaactcctgggctcaagccatccatccacctgggccttacaaagtgctgggattataggtgtgagccgctgcgtccagccaggacttctgatttctttactgtttattagaggatggaccctattccctccaatcataactcactttttaaagcagtgattctcagcccttttggtttcaaatttttggtagcctatttaaggaggaggttaagatacccaaaatatcgccagtcaagtcctgaatcattacagtgcatacttccaccgtaaaattctgtcccagagtgtctgaaaagcatccataacaactcatcagctccatgtaactaactgcttcagtgaaaatgattattgtcttgacctcattyctttatacttaaaaggacaaatttctcatatgttccagaaagtatgccatctttatttagcactatgcagctcatctcttacttgcagca

SEQ ID NO: 403739 - DNA, 475 bp, Homo sapiens
ctcatcagctccatgtaactaactgcttcagtgaaaatgattattgtcttgacctcatttctttatacttaaaaggacaaatttctcatatgttccagaaagtatgccatctttatttagcactatgcagctcatctcttacttgcagcaagttgtacccagtctacataatttctgtaacctactactccatccagcagttatttttgaccagcactgctgcaataatacatatacttgtttaagcagaagttaatcttacacattggttttgacaataccactgtttcacagatatttcctgttctgtctccttacatccatatggtaagattgtacatgctggtccccttgyggtggggttaggtgaccagttctagcacttgtcacccgtaagtgatgagtagaagtgacaatccacttctgggccagagtacttaaatgttgatggtaaacccaccacatttctctcttt

SEQ ID NO: 403740 - DNA, 588 bp, Homo sapiens
tgaggttctcacgtctgttagtgtgtggaattgaacatcaatatcagaatcattctgtgttacctacaactggttttatgttgttatgcctgtctcctgatgactgtgtatctttagccaaccttttcaccccaaagctcctgccccaacccctcctcctggaagtgcccatctctggtctcggcaggaggctgttcttcccagcctgtggggtggccaccttgcaggctgtaaccctctacaagaaataaagtcttctctccttttctaaatttcgatatttgcttaatccttagcttctattttttcaagcttttaaactgcttttaggtcatggcctcttctctgtagggtctggaggctgagagatgtccagcaggaaagaactgctaactaattccagtarcgctgctcttctgcctaacggaggtgtttaaatgttgattttggcaaaatctatgagcaggttgctccccctctcccgagatctctcacaatactttgtaaaacccaatttagcgcattgtctgggagggcagcttttactggttctgcagcgatcttccttactcataatctattgaaata

SEQ ID NO: 403741 - DNA, 588 bp, Homo sapiens
tgaggttctcacgtctgttagtgtgtggaattgaacatcaatatcagaatcattctgtgttacctacaactggttttatgttgttatgcctgtctcctgatgactgtgtatctttagccaaccttttcaccccaaagctcctgccccaacccctcctcctggaagtgcccatctctggtctcggcaggaggctgttcttcccagcctgtggggtggccaccttgcaggctgtaaccctctacaagaaataaagtcttctctccttttctaaatttcgatatttgcttaatccttagcttctattttttcaagcttttaaactgcttttaggtcatggcctcttctctgtagggtctggaggctgagagatgtccagcaggaaagaactgctaactaattccagtaacrctgctcttctgcctaacggaggtgtttaaatgttgattttggcaaaatctatgagcaggttgctccccctctcccgagatctctcacaatactttgtaaaacccaatttagcgcattgtctgggagggcagcttttactggttctgcagcgatcttccttactcataatctattgaaata

SEQ ID NO: 403742 - DNA, 588 bp, Homo sapiens
tgaggttctcacgtctgttagtgtgtggaattgaacatcaatatcagaatcattctgtgttacctacaactggttttatgttgttatgcctgtctcctgatgactgtgtatctttagccaaccttttcaccccaaagctcctgccccaacccctcctcctggaagtgcccatctctggtctcggcaggaggctgttcttcccagcctgtggggtggccaccttgcaggctgtaaccctctacaagaaataaagtcttctctccttttctaaatttcgatatttgcttaatccttagcttctattttttcaagcttttaaactgcttttaggtcatggcctcttctctgtagggtctggaggctgagagatgtccagcaggaaagaactgctaactaattccagtaacgctgctcttctgcctaacggaggtgtttaaatgttgattttggcaaaatctatgagcaggttgctccccctctcccgagatctctcacaatactttgtaaaacccaatttagcrcattgtctgggagggcagcttttactggttctgcagcgatcttccttactcataatctattgaaata

SEQ ID NO: 403743 - DNA, 502 bp, Homo sapiens
tagaatttaaagtcagtggataattaagtcgaataatttattcttatgtccatgtattttggttttaaagttttgattaatactcactcaacactaatttctaacaaattagaatattcccatattgactatttttaccagtgagcttgtaataaagatccaccagtaattttagtacaccataacctttcaaaagaagcccatagaataaactaatttttaaagagccacattttattcaatgtctatttatacatgttactagcaataaactcttttatctttaattttgagaagctttrcaaatacagaaaagtagaatgactaatagagccggtagccaggactcagatcggaaaaataggtctaatcggttgttacactgtgtttatgtcatacatttcacttatttttatcaaataaaaattagaatttataaaatgttgattaaaaggaaaacattctgactaaagtttagtcctgtgtttcttcctccaaatct

SEQ ID NO: 403744 - DNA, 502 bp, Homo sapiens
tagaatttaaagtcagtggataattaagtcgaataatttattcttatgtccatgtattttggttttaaagttttgattaatactcactcaacactaatttctaacaaattagaatattcccatattgactatttttaccagtgagcttgtaataaagatccaccagtaattttagtacaccataacctttcaaaagaagcccatagaataaactaatttttaaagagccacattttattcaatgtctatttatacatgttactagcaataaactcttttatctttaattttgagaagctttacaaatacagaaaagtagaatgactaatagagccggtagccaggactcagatcggaaaaataggtctaatcrgttgttacactgtgtttatgtcatacatttcacttatttttatcaaataaaaattagaatttataaaatgttgattaaaaggaaaacattctgactaaagtttagtcctgtgtttcttcctccaaatct

SEQ ID NO: 403745 - DNA, 588 bp, Homo sapiens
ggacgaccatctttctctatcgaggacttgggggaccatccttctccatccaggactcaggggacatcattctccatctagtaactagggggcatccttctccatcaaggactagggggcatccttttccatccaggactggrgggcatccttctccatcccagaattggagggcatctttctctatccagtattgggggtcatcctcctccatccaggacctaaggggtgtccttttctgcgcttccatggatggcagccttgcctgtgcagtcattcagaaagtcaggctgacacatgttgtcgtcttgaactctggcatctcatctctattctaggtgaatgccttcatgtttatagtgatttaccattaaatcactgtgctgtttttccctaaaatatatggggcgtgttttttgttctgacttctttcagtcctttggtccctatctccgggtttttgtaatttcttttgcaacctaatatgggtcccatttggtaagtattacatatactagaaagtgatgtacattcagcatttgttgtgatttaaaaccttttataaacacataacatctttgtctattt

SEQ ID NO: 403746 - DNA, 588 bp, Homo sapiens
ggacgaccatctttctctatcgaggacttgggggaccatccttctccatccaggactcaggggacatcattctccatctagtaactagggggcatccttctccatcaaggactagggggcatccttttccatccaggactggggggcatccttctccatcccagaattggagggcatctttctctatccagtattgggggtcatcctcctccatccaggacctaaggggtgtccttttctgcgcttccatggatggcagccttgcctgtgcagtcattcagaaagtcaggctgacacatgttgtcgtcttgaactctggcatctcatctctattctaggtgaatgccttcatgtttatagtgatttaccattaaatcactgtgctgtttttycctaaaatatatggggcgtgttttttgttctgacttctttcagtcctttggtccctatctccgggtttttgtaatttcttttgcaacctaatatgggtcccatttggtaagtattacatatactagaaagtgatgtacattcagcatttgttgtgatttaaaaccttttataaacacataacatctttgtctattt

SEQ ID NO: 403747 - DNA, 588 bp, Homo sapiens
ggacgaccatctttctctatcgaggacttgggggaccatccttctccatccaggactcaggggacatcattctccatctagtaactagggggcatccttctccatcaaggactagggggcatccttttccatccaggactggggggcatccttctccatcccagaattggagggcatctttctctatccagtattgggggtcatcctcctccatccaggacctaaggggtgtccttttctgcgcttccatggatggcagccttgcctgtgcagtcattcagaaagtcaggctgacacatgttgtcgtcttgaactctggcatctcatctctattctaggtgaatgccttcatgtttatagtgatttaccattaaatcactgtgctgtttttccctaaaatatatggggcgtgttttttgttctgacttctttyagtcctttggtccctatctccgggtttttgtaatttcttttgcaacctaatatgggtcccatttggtaagtattacatatactagaaagtgatgtacattcagcatttgttgtgatttaaaaccttttataaacacataacatctttgtctattt

SEQ ID NO: 403748 - DNA, 571 bp, Homo sapiens
cttcacggtggcctcatggatcgtcatacaaaggatgatctcagtgatgagcttgagcctacccaaaattaaattatatgggtttataagattcctcctcaggatcagtatcatcaggcctgtccctgctggtagcaaggccrtctttataatgtgctgtcatggtggtaaaggcatcactcacttgatggagatcccgaagaccagctctactcgagagagatttaagctaagttgcctgggagtccttggtgctttttcgaggttctactgaagacaatgccatcatccaagtatctctgaatgccaacgtagctcttgcctcaggagctctgagacccatgttatctatttttgaactggccaaggccccccacagcaaggaaagggatgctcttcccatccttgtcagccctcgtgtcttgtattccaccccacagcctcctagcaagcatctcagtgtctgcaggtgagcatggctgagttcagtcttgcttactgcaactgtagacatgaggtctgtggaagtaagaatcctctcatttgctgactggcattttgtttaagtccc

SEQ ID NO: 403749 - DNA, 402 bp, Homo sapiens
cagcctgcccagacaaccagacccctaaacatgtgacttgtaggcaggscctggctctctgtggtgcttttctgtctcctccaagcacctgtgactcccaggcttccagccctgccagcttcccccatctgagctcctgatgcagggtgaggactgtattgtggcagacagcatgccggtttacacagttctgggacgaaactgtaggtatacattattttatgtcccgagtaaatgaatcctatttatggatactttttttgacacagagggaagaaaggcattggtgagatccacgggccagagctcagcctgtgctcaggctctggcagcagctgtgcagctctggagctgttgcagagtggggaggtgctgtgtctttgctccctgtgttaaaggctt

SEQ ID NO: 403750 - DNA, 402 bp, Homo sapiens
cagcctgcccagacaaccagacccctaaacatgtgacttgtaggcagggcctggctctctgtggtgcttttctgtctcctccaagcacctgtgactcccaggcttccagccctgccagcttcccccatctgagctcctgatgcagggtgaggactgtattgtggcagacagcatgccggtttacacagttctgggacgaaactgtaggtatacattattttatgtcccgagtaaatgaatcctatttatggatactttttttgacacagagggaagaaaggcattggtgmgatccacgggccagagctcagcctgtgctcaggctctggcagcagctgtgcagctctggagctgttgcagagtggggaggtgctgtgtctttgctccctgtgttaaaggctt

SEQ ID NO: 403751 - DNA, 588 bp, Homo sapiens
gtttggtccacagtaaaccacatgtggagagcttaaaaaaattgccctcaaatctggcaagaaaatgacagtaataaattaaattattactgtgatacacatgtttctttcattacaattagatatattacacatatcmcaattttgcagaagtttatcatctatcagtatttatttatttttttttgcataagtttccaaggaatcctaatgatggggactgtctcttttaaaattaaattgtgtaaataactcccagagccatgctggtaagaaacaaaacaaaacaaaaagaactagaaacatgaacaaacattggatttctgctgtaaagaggatgcaaagcaggcctgcctgctgcacctccccagagctaatccttgagccaaaagagcttcctggtgaagcctcgcactctctgtaacagggcgtggggggaccaagacatgcgggctccagattagaccatctttacctagttatgggatttcagtcatgtcttttaaattctttgagctgcagttttcacatatgtaaagtgaaagtatttttaaaattttaatttgtgttatgaccttgtataaagtt

SEQ ID NO: 403752 - DNA, 588 bp, Homo sapiens
gtttggtccacagtaaaccacatgtggagagcttaaaaaaattgccctcaaatctggcaagaaaatgacagtaataaattaaattattactgtgatacacatgtttctttcattacaattagatatattacacatatcccaattttgcagaagtttmtcatctatcagtatttatttatttttttttgcataagtttccaaggaatcctaatgatggggactgtctcttttaaaattaaattgtgtaaataactcccagagccatgctggtaagaaacaaaacaaaacaaaaagaactagaaacatgaacaaacattggatttctgctgtaaagaggatgcaaagcaggcctgcctgctgcacctccccagagctaatccttgagccaaaagagcttcctggtgaagcctcgcactctctgtaacagggcgtggggggaccaagacatgcgggctccagattagaccatctttacctagttatgggatttcagtcatgtcttttaaattctttgagctgcagttttcacatatgtaaagtgaaagtatttttaaaattttaatttgtgttatgaccttgtataaagtt

SEQ ID NO: 403753 - DNA, 588 bp, Homo sapiens
gtttggtccacagtaaaccacatgtggagagcttaaaaaaattgccctcaaatctggcaagaaaatgacagtaataaattaaattattactgtgatacacatgtttctttcattacaattagatatattacacatatcccaattttgcagaagtttatcatctatcagtatttatttatttttttttgcataagtttccaaggaatcctaatgatggggactgtctcttttaaaattaaattgtgtaaataactcccagagccatgctggtaagaaacaaaacaaaacaaaaagaactagaaacatgaacaaacattgsatttctgctgtaaagaggatgcaaagcaggcctgcctgctgcacctccccagagctaatccttgagccaaaagagcttcctggtgaagcctcgcactctctgtaacagggcgtggggggaccaagacatgcgggctccagattagaccatctttacctagttatgggatttcagtcatgtcttttaaattctttgagctgcagttttcacatatgtaaagtgaaagtatttttaaaattttaatttgtgttatgaccttgtataaagtt

SEQ ID NO: 403754 - DNA, 565 bp, Homo sapiens
cccgctgtgggctccagcaagaaagagctgactctagggtgaaagggccctgcactcagagacccccaggctgtctgggaccagccctgcctgcctctgatgtaggttcagctgcagtggtaacctgcacarggcgcgcagcagcagctgtggcaaactccgaccctgccagtgccaccagcagtgcggacccttgggccagaagcctccacagcgcctaagtcagggtgttggtccccagctgcaggagggcaggaactggcactcagccccacctcagaggctgcatgatgcccagagccagggcccagctcttctagcgcaggttgtggaggggccaggggccacccagactggagggcagtgtcatgatcacagctcactgaagcctcaacctcccagtttcaagctatcgtctcacctcagcctcctgagtagctggtagctgggactgcaggcgggtgccatcatgtctggctattatattttatatacattttggagagacagtgtctcaccatgttgcccagcaggtcttgaacgcctggagttcaagcgatcctcc

SEQ ID NO: 403755 - DNA, 528 bp, Homo sapiens
agtaattttgttttattatattaaggtgaggtttataccacattcttctggttacagaagtaatacrtgctcattgtatacactgaaaaatgtaagcagtataaagaagaaaataaaaaaggatatgaaaatcactagtggtcccattgcctaccgtaacattatgtgctgcttcttaatctttacttcctctccctccgtgtgtgtctttgtgtgtgtgtgtctgtctgtgtggttttttgtttgtttttttggcacatagtacaatagctgacatttatatcttcccgaccagtgttgagcatggtgttaagcaattgacaaagtgtattgtatttaactcctacagaaaacctaaaaaggggaagggcagtataattaatagaattttccagatgaaaagactggggcctgagttgaggttacattttatatatggcattatattgtacttcagacatgtaacatagtaagtgtcctggagaatcttggtctgttagtctgtataataacataagcatcttttgt

SEQ ID NO: 403756 - DNA, 572 bp, Homo sapiens
gtgagaccccatctaaaaaaaatgtttatcaaaccattttcatctttgaaacatttcaggtctcttctttggctttttcgcattattaataatactgtgataaacatccttcagcagaaaccttcataggctagcttcctagaagtagaggtattaggtccaaggttttgaattgttttaaagctattgatttatctggataaaattgcttccagagatattgtcccattttgcwttccaatcagtggatctcaccttcagtattttgtgcaattaaaaaaaataatgtttctccttttaaagattatatttaaaatagcttttaaatatgaaaaatttgtatctacaaataagagatagtgacaaaaaataaataataaaataaacacaagagcagaaagtagattgaaacattaaaattcaaatcacaggcctctgttatggagaagacagctgcaatagcttttctgttcttttatctacattggtaggttcttcttttaattaatttttaccccaacttaagtgctggctggtttggcaatttgttgctgggatggaaagaagaaatg

SEQ ID NO: 403757 - DNA, 572 bp, Homo sapiens
gtgagaccccatctaaaaaaaatgtttatcaaaccattttcatctttgaaacatttcaggtctcttctttggctttttcgcattattaataatactgtgataaacatccttcagcagaaaccttcataggctagcttcctagaagtagaggtattaggtccaaggttttgaattgttttaaagctattgatttatctggataaaattgcttccagagatattgtcccattttgcattccaatcagtggatctcaccttcagtattttgtgcaattaaaaaaaataatgtttctccttttaaagattatatttaaaatagcttttaaatatgaaaaatttgtatctacaaataagagatagtgacaaaaaataaataataaaataaacacaagagcagaaagtagattgaaacattaaaattcaaatcacagrcctctgttatggagaagacagctgcaatagcttttctgttcttttatctacattggtaggttcttcttttaattaatttttaccccaacttaagtgctggctggtttggcaatttgttgctgggatggaaagaagaaatg

SEQ ID NO: 403758 - DNA, 514 bp, Homo sapiens
ctcctgtctatgtggctctctgtgctctgttggggtgtcagttctttacttcttagttaaagcagttatttcggcggtgcaatgcwtttttgttcaataagcatgactttttacacagctggtttatctccagtatggaaactctctgcttaatcatcttgatttctctgggcttgttcctactctgcagatttaagcatgacacttgtatctctctctccaggctctgatctaggatgacagcttctatgatgtgcccatctacagaaatatgcaaattgcaaatttaggaagattaaaagagggccctgcaaaaggcatctacaggccccatgtgctgttcacctttcttatttattggtgaagtgagtcctcatccatttattgggcagttgcaagcaaaggaattaactatgacaattcaccttgatgtacaacaatttagtctgtttggagtttccactgttggaaaaaacctagttatcctaattaagaacagttacagatagtatag

SEQ ID NO: 403759 - DNA, 514 bp, Homo sapiens
ctcctgtctatgtggctctctgtgctctgttggggtgtcagttctttacttcttagttaaagcagttatttcggcggtgcaatgcatttttgttcaataagcatgactttttacacagctggtttatctccagtatggaaactctctgcttaatcatcttgatttctctgggcttgttcctactctgcagatttaagcatgacacttgtatctctctctccaggctctgatctaggatgacagcttctatgatgtgcccatctacagaaatatgcaaattgcaamtttaggaagattaaaagagggccctgcaaaaggcatctacaggccccatgtgctgttcacctttcttatttattggtgaagtgagtcctcatccatttattgggcagttgcaagcaaaggaattaactatgacaattcaccttgatgtacaacaatttagtctgtttggagtttccactgttggaaaaaacctagttatcctaattaagaacagttacagatagtatag

SEQ ID NO: 403760 - DNA, 514 bp, Homo sapiens
ctcctgtctatgtggctctctgtgctctgttggggtgtcagttctttacttcttagttaaagcagttatttcggcggtgcaatgcatttttgttcaataagcatgactttttacacagctggtttatctccagtatggaaactctctgcttaatcatcttgatttctctgggcttgttcctactctgcagatttaagcatgacacttgtatctctctctccaggctctgatctaggatgacagcttctatgatgtgcccatctacagaaatatgcaaattgcaaatttaggaagattaaaagagggccctgcaaaaggcatctacaggccccatgtgctgttcacctttcttatttattggtgaagtgagtcctcatccatttattgggcagttgcaagcaaaggaattaactatgacaattcaccttgatgtacaacaatttagtctgtttggagtttccactgttgsaaaaaacctagttatcctaattaagaacagttacagatagtatag

SEQ ID NO: 403761 - DNA, 629 bp, Homo sapiens
taacccttttttttttttttttgggcaatttttcaaagcaacaggcactttattaaataagaaagttgatgtgctttcctaatgcctgctaataaagtaaagaaccaaggaacctctgtgatttcaatgaaatccctccagatgttataggctacttgttacagacaggtatggtaggaagtgtggtcaagctgtgataggcaaatagatcttgctgaagaggaagaatgattggctaagataatgtcccaggacagctggcatacctttagacacagctaaattgaatgctttctgargatgagtgtattagtctgtctcacatgctataaagacatacctgagaatgggtaattgaaaaagaaaagagattgaattggctcacagttctgtgggctgtacagacttatgcttatagggaagcctcaggaaacttacaatcatggcagaaggtgaaaaggaagcaagcacatattcacatggctgaaacgagtcaggggaggtgctttttaactttttaaacaagcagatcttaggataactttatcatcagacagcactagggggatgaggctaaaccattagaaaccacctccatgatgcaaacaccttctactaagcctctcctc

SEQ ID NO: 403762 - DNA, 629 bp, Homo sapiens
taacccttttttttttttttttgggcaatttttcaaagcaacaggcactttattaaataagaaagttgatgtgctttcctaatgcctgctaataaagtaaagaaccaaggaacctctgtgatttcaatgaaatccctccagatgttataggctacttgttacagacaggtatggtaggaagtgtggtcaagctgtgataggcaaatagatcttgctgaagaggaagaatgattggctaagataatgtcccaggacagctggcatacctttagacacagctaaattgaatgctttctgaggatgagtgtattagtctgtctcacatgctataaagacatacctgagaatgggtaattgaaaaagaaaagagattgaattggctcacagttctgtgggctgtacagacttatgcttatagggaagcctcargaaacttacaatcatggcagaaggtgaaaaggaagcaagcacatattcacatggctgaaacgagtcaggggaggtgctttttaactttttaaacaagcagatcttaggataactttatcatcagacagcactagggggatgaggctaaaccattagaaaccacctccatgatgcaaacaccttctactaagcctctcctc

SEQ ID NO: 403763 - DNA, 557 bp, Homo sapiens
ttcacaaaactgagactcaaacttttttgaagctcagcttgatttgctggaactacacagagacatgtttgatcacacaacagcaactgtacatcctcccaagtctggaatacggaattgatggaggacacttacttgcttaaaatgtatttgattattctgcatttatgataaaaatatcatccagggatcatattcaagagggtaaatttaggattacatgtttctagaacatataatatgtaatgccatccaaaaccaacaacaaacaacatagagcactgaaaccgaagagccacttaaaatttagaattaggaaatttcaatctataattgtcaaacaataagtgagttataatatttttctaattagaaaaatatcacctaaagtggaaagccagcatttagttggggactatgaratactacatccttggtctggctggccaccattttaaagaccaccacagatctcaaggcatgagacctctcaccaacaaaatctatccctgctattgcacctagtgccatctcaatatgtggcagacagcaaatgt

SEQ ID NO: 403764 - DNA, 542 bp, Homo sapiens
aggaaatttcaatctataattgtcaaacaataagtgagttataatatttttctaattagaaaaatatcacctaaagtggaaagccagcatttagttggggactatgagatactacatccttggtctggctggccaccattttaaagaccaccacagatctcaaggcatgagacctctcaccaacaaaatctatccctgctattgcacctagtgccatctcaatatgtggcagacagcaaatgttctaacttaatctgatagatgctcctttagcatataaaagagcttgctaagtccctattacctgtagcagtctatcaactaaatatttaagaagtcatttcataggcaaggtttatgaatgacttagaagtaaaattagtaatttctaaaycactgtagtgttttctatgtttttagagatattcctaacacagagttttccgaggagctgtgaaaacaagtacaaacgtacataagtaattttgtcagggatgtttctgtactaatttgggggagacttgtgggccataaataaatga

SEQ ID NO: 403765 - DNA, 463 bp, Homo sapiens
atgtcaaaaacagacatctgcaatttcatgttcattgcagcattattcataatacccatgaattagaaacaacctaagtgcttatcaactgaagactagataaaaatatgtggaaaaattggaacccttctacaccactggtgagactttaaaatgtaaagcagtctcgcagttcttcaaatggttaaacatagagttatcacgtgacccagcaattccactcctatgtgtttaccaaaaagaaaataaaacaaatgctacacaaacagtagtamacaaatgtttatagcaacacaaagtagaaaacaacagaaatgttcatcagctgaggagtggataaataaaatgtggtgtgtccataaaatagaatcttatttagcaagaaaaggtaaaaaactgttaatgcatgctccaaaatggatgaacattaaaaatatgttaggtgaaagatgtgagtaaaaag

SEQ ID NO: 403766 - DNA, 507 bp, Homo sapiens
tactttaaatgagtgaattacacaatgtataaattatatctcaataaagctgtggaaagttaaaagtatatgtaggatgcatacaaaaatactacttatctttataaatgaatgaaaatctgtcatttgcaaaaacatggatgaatttagaggacattatgctaagtaaaataagccagacacagaaagacaaatatctcatrgtatcacttatatgtgaaatccaaaactgtgcactcatagaagttaagaatagaatggtggtttatcagaggctgagcagagtggggggcaggggtggaaaaaggggaaatattgaatgggataatgcttcagttaggagaaagacattctggtgatatggtgcacagcaaagtgactgcagttactcataatgtagtgcatatcttaaaagtgctaaaatagtacattttaaatgtttcaccataatgtaatacatatctgaggtgaaggatacgttatttagcctaattagaccatttcaca

SEQ ID NO: 403767 - DNA, 507 bp, Homo sapiens
tactttaaatgagtgaattacacaatgtataaattatatctcaataaagctgtggaaagttaaaagtatatgtaggatgcatacaaaaatactacttatctttataaatgaatgaaaatctgtcatttgcaaaaacatggatgaatttagaggacattatgctaagtaaaataagccagacacagaaagacaaatatctcatggtatcacttatatgtgaaatccaaaactgtgcactcatagaagttaagaatagaatggtggtttatcagaggctgagcagrgtggggggcaggggtggaaaaaggggaaatattgaatgggataatgcttcagttaggagaaagacattctggtgatatggtgcacagcaaagtgactgcagttactcataatgtagtgcatatcttaaaagtgctaaaatagtacattttaaatgtttcaccataatgtaatacatatctgaggtgaaggatacgttatttagcctaattagaccatttcaca

SEQ ID NO: 403768 - DNA, 507 bp, Homo sapiens
tactttaaatgagtgaattacacaatgtataaattatatctcaataaagctgtggaaagttaaaagtatatgtaggatgcatacaaaaatactacttatctttataaatgaatgaaaatctgtcatttgcaaaaacatggatgaatttagaggacattatgctaagtaaaataagccagacacagaaagacaaatatctcatggtatcacttatatgtgaaatccaaaactgtgcactcatagaagttaagaatagaatggtggtttatcagaggctgagcagagtggggggcaggggtggaaaaaggggaaatattgaatgggataatgyttcagttaggagaaagacattctggtgatatggtgcacagcaaagtgactgcagttactcataatgtagtgcatatcttaaaagtgctaaaatagtacattttaaatgtttcaccataatgtaatacatatctgaggtgaaggatacgttatttagcctaattagaccatttcaca

SEQ ID NO: 403769 - DNA, 602 bp, Homo sapiens
tcaataaaatcaacattttaaaaagtgaggaacacagatgtgctagatcttcatctaaagacatttctgagaaaagtgtatctgttttccttcagaagaaatttacacttaatagatattatggtaactaawgtaaggcagataattttggccatcagcttttattgtgggataatctctttttgctgaccttgtaaaagctgtggcatattaacaagtaggaacatttttttttatcatgatcaggtaaagattctgcaagtttctattttgaatatttccccaggaatcacaaagtgtgaatgccttttatttcagaggtctagccctaaatggtttagtcaattacatcatgcattctgaaataagtactggtgcatttgggaaggtactatatataattgtgttttaaatttaactatcatataaatctacttttctagttaacagtttatattttatagaggccctccatatacataagagcttttctgatagtatatccattagatttcaaagataagtaaaggaacaattttgcttttatttattattattattattttttaaggctagtcaagtgaagcagtgggagtggagaa

SEQ ID NO: 403770 - DNA, 532 bp, Homo sapiens
tttcagtataagaaataatactatcctaagcaaaaataaataaataaataaaactggaggaattatattatctaacttcatattatactacagaattacagtaaccaaaagagtagggtactgrcataaaaagaggcccatagatcaatgaaacacaatagagaacccagtaacaaatctacatacctacagtgaactcatttttgacaaaggtgccaagaacatacactggtgggaaatggtgttgaaaaaactggatatccatatgcagaagaatgaaaacagactagtatctatcactgaatacaaaagtaaaatcaaagttgattaaagatgtaaagctaagacctcaaactataaaactagcacaaaaaaactttgggggaaatctccaggatattggtctgggcaaaaatatcttgagcaataccccacaagcacaggcaaccaaagcaaaaatggacaaatggatcacattaagttaaaagcttctgcacggaaaatgatacaagcaacaaagttaagagataat

SEQ ID NO: 403771 - DNA, 532 bp, Homo sapiens
tttcagtataagaaataatactatcctaagcaaaaataaataaataaataaaactggaggaattatattatctaacttcatattatactacagaattacagtaaccaaaagagtagggtactgacataaaaagaggcccatagatcaatgaaacacaatagagaacccagtaacaaatctacatacctacagtgaactcatttttgacaaaggtgccaagaacatacactggtgggaaatggtgttgaaaaaactggatatccatatgcagaagaatgaaaacagactagtatctatcactgaatacaaaagtaaaatcaaagttgattaaagatgtaaagctaagacctcaaactataaaactagyacaaaaaaactttgggggaaatctccaggatattggtctgggcaaaaatatcttgagcaataccccacaagcacaggcaaccaaagcaaaaatggacaaatggatcacattaagttaaaagcttctgcacggaaaatgatacaagcaacaaagttaagagataat

SEQ ID NO: 403772 - DNA, 460 bp, Homo sapiens
ctgcattgggcaaatttcctaggacctcccttctgcgtcttttaaaatatgaaaacaaaatcaatgtagcgcagcaagccagggaaagtctgctttgattgacttacggccatagtcacccagcagttccttcagatgtggcttcccaggtcagccactgagcccaccgctgtcctcctgcctgcagaagtggctctgtgagccgtttgaggagaaaatgggggactttgggcttcagcccgaggagaacacggtggagatggaggagcccctgggcgtccgcaggttaactgaaaacatgagaggacacaagcacgggaccaagtctgtcactaacctgtaaagtactctcaccaagccgacygggcactttgtctgagcgcctgcctttgccaccactgtgtgcaggaatgcctgggtcatgactgggccatcccagtgttcttatttctatacattc

SEQ ID NO: 403773 - DNA, 578 bp, Homo sapiens
tttgtatttatatatttacaccacagaagcaactgattttgtggaggatcactagcagtagcatcagaagacctggcaaaaatcttgcacgttgcatatatatatgtgtgtgtgtgtgtgtrtgtgtgtgtattctagatggagtcttgcactgtcacccacgctggagtgcaatggcacaaactcagttcactgcaacctctgcctcccaggttcacatgattctcctgcctcagcctcctgaagtgctgggattacaggtgtgagccactggtcctggctgcatatattttttgatctctccttttaagaatcgtgatcttaaatgagttgagtgttgtatgtagaagtgcaatgcttagatgccggtgtgtacattgtagaagggtacaacgcttagatttaacagttatgaataaatgtaattcttataactgactgtaaaaatattagaaaagcagtatattgataaaacattcctcagaaaaaggaacttaaagaactttgaggaattgcttctgtcctaatatatgcatagctaaggctcttatgatggtgtggtttgtaggttagatatc

SEQ ID NO: 403774 - DNA, 578 bp, Homo sapiens
tttgtatttatatatttacaccacagaagcaactgattttgtggaggatcactagcagtagcatcagaagacctggcaaaaatcttgcacgttgcatatatatatgtgtgtgtgtgtgtgtgtgtgtgtgtattctagatggagtcttgcactgtcacccacgctggagtgcaatggcacaaactcagttcactgcaacctctgcctcccaggttcacaygattctcctgcctcagcctcctgaagtgctgggattacaggtgtgagccactggtcctggctgcatatattttttgatctctccttttaagaatcgtgatcttaaatgagttgagtgttgtatgtagaagtgcaatgcttagatgccggtgtgtacattgtagaagggtacaacgcttagatttaacagttatgaataaatgtaattcttataactgactgtaaaaatattagaaaagcagtatattgataaaacattcctcagaaaaaggaacttaaagaactttgaggaattgcttctgtcctaatatatgcatagctaaggctcttatgatggtgtggtttgtaggttagatatc

SEQ ID NO: 403775 - DNA, 578 bp, Homo sapiens
tttgtatttatatatttacaccacagaagcaactgattttgtggaggatcactagcagtagcatcagaagacctggcaaaaatcttgcacgttgcatatatatatgtgtgtgtgtgtgtgtgtgtgtgtgtattctagatggagtcttgcactgtcacccacgctggagtgcaatggcacaaactcagttcactgcaacctctgcctcccaggttcacatgattctcctgcctcagcctcctgaagtgctgggattacaggtgtgagccactggtcctggctgcatatattttttgayctctccttttaagaatcgtgatcttaaatgagttgagtgttgtatgtagaagtgcaatgcttagatgccggtgtgtacattgtagaagggtacaacgcttagatttaacagttatgaataaatgtaattcttataactgactgtaaaaatattagaaaagcagtatattgataaaacattcctcagaaaaaggaacttaaagaactttgaggaattgcttctgtcctaatatatgcatagctaaggctcttatgatggtgtggtttgtaggttagatatc

SEQ ID NO: 403776 - DNA, 578 bp, Homo sapiens
tttgtatttatatatttacaccacagaagcaactgattttgtggaggatcactagcagtagcatcagaagacctggcaaaaatcttgcacgttgcatatatatatgtgtgtgtgtgtgtgtgtgtgtgtgtattctagatggagtcttgcactgtcacccacgctggagtgcaatggcacaaactcagttcactgcaacctctgcctcccaggttcacatgattctcctgcctcagcctcctgaagtgctgggattacaggtgtgagccactggtcctggctgcatatattttttgatctctccttttaagaatcgtgatcttaaatgagttgagtgttgtatgtagaagtgcaatgcttagatgccggtgtgtacattgtagaagggtacaaygcttagatttaacagttatgaataaatgtaattcttataactgactgtaaaaatattagaaaagcagtatattgataaaacattcctcagaaaaaggaacttaaagaactttgaggaattgcttctgtcctaatatatgcatagctaaggctcttatgatggtgtggtttgtaggttagatatc

SEQ ID NO: 403777 - DNA, 629 bp, Homo sapiens
agcccctggctatgggggagaacaagtcaggccgtcaagcgtgtagtctgtgtattatgtttcacatggtggctgttgctggccccacctcctcttaygtccttaacatgcctcaggtggttcatcccttttggcactcatggtgccacttgtgggctgatacaggagtgagtctactgtgaaggcactcagtatagtggaaaaaacaaatatcaacctcctgctgacttttttcagtgtaaaaactataagccctatgggagtttctgcagatggtaccataatggcctgagggaggagtatcacagtcacagagtattggttctctcactctgtaagccatggttttacccatcttcacaggccaaaggtgcttcataaccttgttcatgtattgaggttctgttggctcttgtaatggtaatttcacatgtggacagttgttcatattgatgtttctataggggtatgatagctggagaggtctgcaccactgtcttgctctgcctcgatcattatttttttctaacaagaatttgtctcctcctagtttttctttttctcttaaccgacctaggtatagccttttaatccttctccctcctctgcttctaatgtcattgcttctt

SEQ ID NO: 403778 - DNA, 588 bp, Homo sapiens
tttctattgaagatgattgctataaacagtgctttrcacaaatggctacatatctctttttactttaggtaacatgatttataagctactttcacatatatcttcttagatcatcacaaggatttgagatcatcatttaatcaggactgttgtgacttgcttgaggccacatgcctagtgtttgacatcatacttcaagagacagattgaaagttctgcagaaatagggactggtggctgttctctcccttactccctagcagttaatacattgcctggtacagagtaagctatccatatttgtggactaactgtttaaactcctgcatatttatttatacgtgtaaataagttatagcattataaaatcaacagttacgttttccgtagttagattgttccttcatcttatgtgcacagaaactatttttgtggaagaggtcatgaattttagatcaacctttcacatatccctttactgtctcttaagatactttcatggtgacaaaaaacatactcttgttctagatccctgaggaattaccacactgacttccacaatggttgaactagtttacagtcccacca

SEQ ID NO: 403779 - DNA, 588 bp, Homo sapiens
tttctattgaagatgattgctataaacagtgctttgcacaaatggctacatatctctttttactttaggtaacatgatttataagctactttcacatatatcttcttagatcatcacaaggatttgagatcatcatttaatcaggactgttgtgacttgcttgaggccacatgcctagtgtttgacatcatacttcaagagacagattgaaagttctgcagaaatagggactggtggctgttctctcccttactccctagcagtyaatacattgcctggtacagagtaagctatccatatttgtggactaactgtttaaactcctgcatatttatttatacgtgtaaataagttatagcattataaaatcaacagttacgttttccgtagttagattgttccttcatcttatgtgcacagaaactatttttgtggaagaggtcatgaattttagatcaacctttcacatatccctttactgtctcttaagatactttcatggtgacaaaaaacatactcttgttctagatccctgaggaattaccacactgacttccacaatggttgaactagtttacagtcccacca

SEQ ID NO: 403780 - DNA, 588 bp, Homo sapiens
tttctattgaagatgattgctataaacagtgctttgcacaaatggctacatatctctttttactttaggtaacatgatttataagctactttcacatatatcttcttagatcatcacaaggatttgagatcatcatttaatcaggactgttgtgacttgcttgaggccacatgcctagtgtttgacatcatacttcaagagacagattgaaagttctgcagaaatagggactggtggctgttctctcccttactccctagcagttaatacattgcctggtacagagtaagctatcmatatttgtggactaactgtttaaactcctgcatatttatttatacgtgtaaataagttatagcattataaaatcaacagttacgttttccgtagttagattgttccttcatcttatgtgcacagaaactatttttgtggaagaggtcatgaattttagatcaacctttcacatatccctttactgtctcttaagatactttcatggtgacaaaaaacatactcttgttctagatccctgaggaattaccacactgacttccacaatggttgaactagtttacagtcccacca

SEQ ID NO: 403781 - DNA, 486 bp, Homo sapiens
ttgttctaaattagctctgtttctcgcaataataatagtgtgcaggtttgttacatgggtatattgcatgaggtttggggtacaattgatcccatcacccaggtagtaagcatagcacccagcaygtagttttgtttaagttttttgagacaaggtaggtctctgtcccccaggctggattgcaatattgcaatcactggtcactgcagttttgacctcttgggctcagccgatcctcccagctcagcctccggggtagctgggactacagtggtgggccaccataccctgctattttttgtatttttttgtagagactgggtttcgccctgttacccaggctggtctcgaactcctggactcaagcaatccacccaccttggcctcccaaagtgctgggattataggcgtgagctactgtacccagctgccagtaggcagttttgagctttcgccccttcccatcctctcctctctgttagttcc

SEQ ID NO: 403782 - DNA, 486 bp, Homo sapiens
ttgttctaaattagctctgtttctcgcaataataatagtgtgcaggtttgttacatgggtatattgcatgaggtttggggtacaattgatcccatcacccaggtagtaagcatagcacccagcacgtagttttgtttaagttttttgagacaaggtaggtctctgtcccccaggctggattgcaatattgcaatcactggtcactgcagttttgacctcttgggctcagccgatcctcccagctcagcctccggggtagctgggactacagtggtgggccaccataccctgctattttttgtatttttttgtagagactgggtttcgccctgttacccaggctggtctygaactcctggactcaagcaatccacccaccttggcctcccaaagtgctgggattataggcgtgagctactgtacccagctgccagtaggcagttttgagctttcgccccttcccatcctctcctctctgttagttcc

SEQ ID NO: 403783 - DNA, 423 bp, Homo sapiens
attctaacacctgcatctaacaccagctttattgaataatttcatcacgtttcaaaatctgtgtctcctagaccagttgagctcacaamaaaaagcaattgtagagagttagaaaaatatatgaaattagtgaacaaaacagtgaaaccttccaaccaggaatgtttttggaactttctttgttagtaatagttccttatggttcctaaatattcaacctcccagcatgaatgtgtctcccatcaaaagagccacagaataaacacaacctcttttttcaacatccctcttcctatgctcacgtctcccatctttttcccttgtcttacagccaaattcctgaaattgttattgatattccttgccctccacttcccacccctattcacacctccatcacagggcaatctgacttacacctta

SEQ ID NO: 403784 - DNA, 603 bp, Homo sapiens
gtggtgtgcagggtggaccttgtcaggattctgattccaatagacagactgcaaaaagagaaatacttgtgataatcaagtatgtatgactgtggactatgtatgggatgataatcagaatcattgagyacatcttcaggagcgatcacagcaatgtgattatgggagaaagtgtccctacttttagtgatacatgttcaaatgtgtagagatggaacaacatgatgtcagggatttgacttgaaatattccaacaacacaacaacaaagaaaatacttcaatggtcacatctcttcctccatacccgcctagatctgctccaccttgtgttttatgacctcagagtctatcagtggcctccgcccctttgctcaagttggaaacctgagaatcattgctgattctcttacatgtcagcttccacttccaaccaagtgtgaagcttttgcaattttatctcctcaatattcctcatatcctctcctctccatccccaccgctactatcatacataattttaattcacaatttctcccgtaaccccctaactggtctcttagcctccagtaagtagtaattgaattcccttaattactagtggt

SEQ ID NO: 403785 - DNA, 603 bp, Homo sapiens
gtggtgtgcagggtggaccttgtcaggattctgattccaatagacagactgcaaaaagagaaatacttgtgataatcaagtatgtatgactgtggactatgtatgggatgataatcagaatcattgagtacatcttcaggagcgatcacagcaatgtgattatgggagaaagtgtccctacttttagtgatacatgttsaaatgtgtagagatggaacaacatgatgtcagggatttgacttgaaatattccaacaacacaacaacaaagaaaatacttcaatggtcacatctcttcctccatacccgcctagatctgctccaccttgtgttttatgacctcagagtctatcagtggcctccgcccctttgctcaagttggaaacctgagaatcattgctgattctcttacatgtcagcttccacttccaaccaagtgtgaagcttttgcaattttatctcctcaatattcctcatatcctctcctctccatccccaccgctactatcatacataattttaattcacaatttctcccgtaaccccctaactggtctcttagcctccagtaagtagtaattgaattcccttaattactagtggt

SEQ ID NO: 403786 - DNA, 603 bp, Homo sapiens
gtggtgtgcagggtggaccttgtcaggattctgattccaatagacagactgcaaaaagagaaatacttgtgataatcaagtatgtatgactgtggactatgtatgggatgataatcagaatcattgagtacatcttcaggagcgatcacagcaatgtgattatgggagaaagtgtccctacttttagtgatacatgttcaartgtgtagagatggaacaacatgatgtcagggatttgacttgaaatattccaacaacacaacaacaaagaaaatacttcaatggtcacatctcttcctccatacccgcctagatctgctccaccttgtgttttatgacctcagagtctatcagtggcctccgcccctttgctcaagttggaaacctgagaatcattgctgattctcttacatgtcagcttccacttccaaccaagtgtgaagcttttgcaattttatctcctcaatattcctcatatcctctcctctccatccccaccgctactatcatacataattttaattcacaatttctcccgtaaccccctaactggtctcttagcctccagtaagtagtaattgaattcccttaattactagtggt

SEQ ID NO: 403787 - DNA, 603 bp, Homo sapiens
gtggtgtgcagggtggaccttgtcaggattctgattccaatagacagactgcaaaaagagaaatacttgtgataatcaagtatgtatgactgtggactatgtatgggatgataatcagaatcattgagtacatcttcaggagcgatcacagcaatgtgattatgggagaaagtgtccctacttttagtgatacatgttcaaatgtgtagagatggaacaacatgatgtcagggatttgacttgaaatattccaacaacacaacaacaaagaaaatacttcaatggtcacatctcttcctccatacccgcctagatctgctccaccttgtgttttatgacctcagagtctatcagtggcctccgcccctttgctcaagttggaaacctgagaatcattgctgattctcttacaygtcagcttccacttccaaccaagtgtgaagcttttgcaattttatctcctcaatattcctcatatcctctcctctccatccccaccgctactatcatacataattttaattcacaatttctcccgtaaccccctaactggtctcttagcctccagtaagtagtaattgaattcccttaattactagtggt

SEQ ID NO: 403788 - DNA, 512 bp, Homo sapiens
cagctactttttctttcatgggtctttttgtcgartttgcatcctggttctgccattgctgatcttgcataggaatatttttgtaattcacattttttattaatatgctgcctgcttttcttttctacttctttgagttgtttcataaaatgcttgcagtatctttttaagctctaatagaatgatattaaatagagtgacaagcaaacaaatgaaatataaaaaggtagagtatcaagaagatacaaatccaatatgattgctaatgtgaaatctcagaattgatgggagcttcctggcaacatcaaggaaaagggctgaatataagcaattttgtaattcttctattcacagagaagcaaactttgtcctgaacagctttgcaatctctgtagtttgtagtattcttttcacacgtctttctcgtcattctttttaacaacagtgataatgagcagtaaccccggtcatcatacgtgcacagctcatgtgacgtagtgtatccttaatat

SEQ ID NO: 403789 - DNA, 512 bp, Homo sapiens
cagctactttttctttcatgggtctttttgtcgagtttgcatcctggttctgccattgctgatcttgcataggaatatttttgtaattcacattttttattaatatgctgcctgcttttcttttctacttctttgagttgtttcataaaatgcttgcagtatctttttaagctctaatagaatgatattaaatagagtgacaagcaaacaaatgaaatataaaaaggtagagtatcaagaaratacaaatccaatatgattgctaatgtgaaatctcagaattgatgggagcttcctggcaacatcaaggaaaagggctgaatataagcaattttgtaattcttctattcacagagaagcaaactttgtcctgaacagctttgcaatctctgtagtttgtagtattcttttcacacgtctttctcgtcattctttttaacaacagtgataatgagcagtaaccccggtcatcatacgtgcacagctcatgtgacgtagtgtatccttaatat

SEQ ID NO: 403790 - DNA, 512 bp, Homo sapiens
cagctactttttctttcatgggtctttttgtcgagtttgcatcctggttctgccattgctgatcttgcataggaatatttttgtaattcacattttttattaatatgctgcctgcttttcttttctacttctttgagttgtttcataaaatgcttgcagtatctttttaagctctaatagaatgatattaaatagagtgacaagcaaacaaatgaaatataaaaaggtagagtatcaagaagatacaaatccaatatgattgctaatgtgaaatytcagaattgatgggagcttcctggcaacatcaaggaaaagggctgaatataagcaattttgtaattcttctattcacagagaagcaaactttgtcctgaacagctttgcaatctctgtagtttgtagtattcttttcacacgtctttctcgtcattctttttaacaacagtgataatgagcagtaaccccggtcatcatacgtgcacagctcatgtgacgtagtgtatccttaatat

SEQ ID NO: 403791 - DNA, 512 bp, Homo sapiens
cagctactttttctttcatgggtctttttgtcgagtttgcatcctggttctgccattgctgatcttgcataggaatatttttgtaattcacattttttattaatatgctgcctgcttttcttttctacttctttgagttgtttcataaaatgcttgcagtatctttttaagctctaatagaatgatattaaatagagtgacaagcaaacaaatgaaatataaaaaggtagagtatcaagaagatacaaatccaatatgattgctaatgtgaaatctcagaattgatgggagcttcctggcaacatcaaggaaaakggctgaatataagcaattttgtaattcttctattcacagagaagcaaactttgtcctgaacagctttgcaatctctgtagtttgtagtattcttttcacacgtctttctcgtcattctttttaacaacagtgataatgagcagtaaccccggtcatcatacgtgcacagctcatgtgacgtagtgtatccttaatat

SEQ ID NO: 403792 - DNA, 505 bp, Homo sapiens
ggggtagattttatggccacattaatagactcccctggagtttgataatctcacttgtgagttttggacatgaactactattacatattgatgttcaaatgtcgtttgcagaccgaggcctaaattcttactgttctagtatcttgatatccactttgttttctgacatctgtttttccacaacccaaacaaacaaaacaacatccccaaaccatatacttttccagttgaggttcaactttctcttatgtgaatggtaatgccatgagaggcctgggttgaattacaggagatgattttttttaaatgttaaatgtttatgatttgtccrtggagaggtggtgggggaccatcccctttcaaattcagggctgttcagtaggacaggagacattgatggcatgcagaaagtcttccctttatagggcctatgacttgggcaggctagaagagcttacagaatgacactttttttttttttttttttgagacgttatctcgctct

SEQ ID NO: 403793 - DNA, 594 bp, Homo sapiens
ggttgccgtgtaaaatgtattttttctttttaaaaattattattttcattttttgtagagacagggttttgctacattgcccaggctggtcttgaactcctgggcttgagtagtcctgccttggtctcccaaagtgctgggattatagacaygagccactgcacctggcctagaaagttattttttcttttgggtcgtgataaaacttggtcgtagttgtttagggacatagtacttgtgcaatgccgatagaatgactgtctataaaatagtaaggcatgaaacaaatgaaaacaaagagaaaattgtgaagatgggttaccttaaagctattctgttagcggtgaaatacctcatagctttgttctaaattgttgaattaatgaacaaagcacataaacttatgctataataatcttcttaagtactcttttcccttaagatggagtgtggagtacttgttaaccacacaggtattgtcttgatctgataactatagatattcagaatgattctgttgtgacagatggtagcaagcttttctgatttcacttatctggggtctaaatctaatttctttagtagttaatacat

SEQ ID NO: 403794 - DNA, 594 bp, Homo sapiens
ggttgccgtgtaaaatgtattttttctttttaaaaattattattttcattttttgtagagacagggttttgctacattgcccaggctggtcttgaactcctgggcttgagtagtcctgccttggtctcccaaagtgctgggattatagacatgagccactgcacctggcctagaaagttattttttcttttgggtcgtgataaaacttggtcgtagttgtttagggacatagtacttgtgcaatgccgatagaatgactgtctataaaatartaaggcatgaaacaaatgaaaacaaagagaaaattgtgaagatgggttaccttaaagctattctgttagcggtgaaatacctcatagctttgttctaaattgttgaattaatgaacaaagcacataaacttatgctataataatcttcttaagtactcttttcccttaagatggagtgtggagtacttgttaaccacacaggtattgtcttgatctgataactatagatattcagaatgattctgttgtgacagatggtagcaagcttttctgatttcacttatctggggtctaaatctaatttctttagtagttaatacat

SEQ ID NO: 403795 - DNA, 594 bp, Homo sapiens
ggttgccgtgtaaaatgtattttttctttttaaaaattattattttcattttttgtagagacagggttttgctacattgcccaggctggtcttgaactcctgggcttgagtagtcctgccttggtctcccaaagtgctgggattatagacatgagccactgcacctggcctagaaagttattttttcttttgggtcgtgataaaacttggtcgtagttgtttagggacatagtacttgtgcaatgccgatagaatgactgtctataaaatagtaaggcatgaaacaaatgaaaacaaagagaaaattgtgaagatgggttaccttaaagctattctgttagcggtgaaatacctcatagctttgttctaaattgttgaattaatgaacaaagcacataaacttatgctataataatcttcttaagtactcttttcccttaagatggagtgtggagtacttgttaaccacacaggtattgtcttgatctgataactatagatattcagaatgattctgttrtgacagatggtagcaagcttttctgatttcacttatctggggtctaaatctaatttctttagtagttaatacat

SEQ ID NO: 403796 - DNA, 583 bp, Homo sapiens
ttccgggggagaatctgttcctgacttccggtgtctggtggctgccagcattccttgccttgtgaccacatcgcttcaatctctgcttctatggtcacactgattttttcctgttctttgatgaagtttccttctcaatccctcttataaagagacttgaaattgcatttagggcccacctggataatccccaggaaaatctccctgtctcaagattcttagtcacatctgcatagtcccttttgctatgtaaagtaacattcacaggttccagggcttagaatggggacatctttggaggcctttattcagcctactacagtcagataaagcacacagaaaagctggtgtgggttttatttgtatgttgtctctgagtgttttcaaggttaagatctttcaaggactaaagaatattggttaattcctaacatcctgrgctatacaattagtgtagaaagaatacgcccttttggggtggatgagtcaaaatactcacactttattaaaaccattttagtgaattttactgtttgttctgtggatgttacagaaaaaggcatattctctgtatagtgtaaag

SEQ ID NO: 403797 - DNA, 563 bp, Homo sapiens
ggtgtgggttttatttgtatgttgtctctgagtgttttcaaggttaagatctttcaaggactaaagaatattggttaattcctaacatcctgggctatacaattagtgtagaaagaatacgcccttttggggtggatgagtcaaaatactcacactttattaaaaccattwtagtgaattttactgtttgttctgtggatgttacagaaaaaggcatattctctgtatagtgtaaagcttagtcatgcctattaaagatattttgtcattccggaaattctgttttatctcctagatgtatgttacagttatgttaaagttttatgtaaagtttcctttccttcctaacagtttttattttatgtatttcctcagtgtatggattgtttgtgatgcttatgtttgcactgtgcattgtaacttttacaggtgtataataatcattttatccatttcatattttttgccatgatacatgatgctgtgtctgattctaatatttctacctgtctattcctctaacttttctatgttccttttgaccagggaaacttttgaatccc

SEQ ID NO: 403798 - DNA, 563 bp, Homo sapiens
ggtgtgggttttatttgtatgttgtctctgagtgttttcaaggttaagatctttcaaggactaaagaatattggttaattcctaacatcctgggctatacaattagtgtagaaagaatacgcccttttggggtggatgagtcaaaatactcacactttattaaaaccattttagtgaattttactgtttgttytgtggatgttacagaaaaaggcatattctctgtatagtgtaaagcttagtcatgcctattaaagatattttgtcattccggaaattctgttttatctcctagatgtatgttacagttatgttaaagttttatgtaaagtttcctttccttcctaacagtttttattttatgtatttcctcagtgtatggattgtttgtgatgcttatgtttgcactgtgcattgtaacttttacaggtgtataataatcattttatccatttcatattttttgccatgatacatgatgctgtgtctgattctaatatttctacctgtctattcctctaacttttctatgttccttttgaccagggaaacttttgaatccc

SEQ ID NO: 403799 - DNA, 563 bp, Homo sapiens
ggtgtgggttttatttgtatgttgtctctgagtgttttcaaggttaagatctttcaaggactaaagaatattggttaattcctaacatcctgggctatacaattagtgtagaaagaatacgcccttttggggtggatgagtcaaaatactcacactttattaaaaccattttagtgaattttactgtttgttctgtggatgttacagaaaaaggcatattctctgtatagtgtaaagcttagtcatgcctattaaagatattttgtcattccggaaattctgttttatctcctagatgtatgttacagttatgttaaagttttatgtaargtttcctttccttcctaacagtttttattttatgtatttcctcagtgtatggattgtttgtgatgcttatgtttgcactgtgcattgtaacttttacaggtgtataataatcattttatccatttcatattttttgccatgatacatgatgctgtgtctgattctaatatttctacctgtctattcctctaacttttctatgttccttttgaccagggaaacttttgaatccc

SEQ ID NO: 403800 - DNA, 584 bp, Homo sapiens
tttctttgtcaatttgtttatacatgtgcttcttataattagtaaatttagatttttaccttttgatataatctgattttatttgccttttattgttatcttttaagccatttatattcactatgccaagtcaggtatagtcttattttgccattttattttattctttgtgatttatacttattgttttcttcttccctatacattatatgtcattgtagctcctctttcttcctattagttattttttctacaaattttattctatattcccatttgtagaatgcacatttttgttctacagttatatatatattcacatatgcacattatatgtatataaaaatatacatatacacagagattagcatatatatgtaattttcaaccaattataagaatggargactattactggttctcctatataagagacttatcacacttttactttcctcttctctactcctgctcaacatgtattaattaattagttttttaggtcaaattcctggtattaaaaatattattttttattttgtttattttctttcccaagaaatatatttgatacaagaattatg

SEQ ID NO: 403801 - DNA, 541 bp, Homo sapiens
tgctacagacaatgagaagattgtcttactgcaatattttaggcatctgccttgacttcgaatgaacgttcctgtccataccctaaaggagaaaagagttgcactcatatwattaaataccctctagattttagcgaatatatggactactttttttaagcaaatctgtaagggcagttgtcattgtggagaactgtgggtttagttagtctcccttaataatacaaatggagaaaatttagttgagaacattgttgaatttttagtggtccagcgatatctctttgtggagagagcatttgctttattaaatctccattagataaactcacatttttataggagtgttaagagaaaatctctccaagtgtttaagcctgggaaaatgagagagaggaaatacagaacgaggtcatgtgaaccgtcaattgtgaataagaggaaaagtcagaaccaaagaaaagcccttagtgtgcagaagaggtagagattgaaaatgagctgtcaaaaagaaatgcgggggataagctagaataaaaca

SEQ ID NO: 403802 - DNA, 608 bp, Homo sapiens
attgcatcaaaatggagtcacactgaagttctcaggtagaattagccatacatcctttgcttctgggtttctgagatattggtgacaaaactgaaactaagaacagatctattgtcaactatgattgtcttgcctcctttttttctctgatcttgtttactgcctgagtttcccttcacattttaccaccacaactaagcagggaccttatttattaagggtacattcttgcatatttctgctttaacatagcattagttagttcagtatcgtatgagtgaatttgggggagaagtaaccagtgtctgtatctgctacagacaatgagaagattgtcttactgcaatattttaggcatctgccttgacttcgaatgaacgttcctgtccataccctaaaggagaaaagagttgcactcatattattaaataycctctagattttagcgaatatatggactactttttttaagcaaatctgtaagggcagttgtcattgtggagaactgtgggtttagttagtctcccttaataatacaaatggagaaaatttagttgagaacattgttgaatttttagtggtccagcgatatctctttgtggagagag

SEQ ID NO: 403803 - DNA, 573 bp, Homo sapiens
acaggcttcacatttggatctctaaatgatatcatgtctctatattttgtgaatatgtattaaacgtttaatttagaagcaataaatatttaaaacatactgaaatgttgggacactgtaaaagaaatgggctgtgtgtagtggtcacacctgtaatcccattgctttgggaagctgaagtgggaggactgattgagcccatgattttgagaccagcctaggcaacatattaagaccctgcctttacaaaaaaaaaaaaaaagttgggtatggtggygcatacccatagtcccagctacttgggaggctgagatgggaggattgctggagctcagggatttgaggctgcagtgagtcatgatcacaccactgcactgcagcctgagcaacagagcaagactctgcctcaaaaaataaataaatgaatgaaagaaatgaaagttgcttggattcttactaacttgtgattagtcttgggaggaaaattagaagactgttccaggaacaggcaattgaggttgtcagaaaagtgagatgttggcaagatgtcaaagagaataagaactgagagaa

SEQ ID NO: 403804 - DNA, 573 bp, Homo sapiens
acaggcttcacatttggatctctaaatgatatcatgtctctatattttgtgaatatgtattaaacgtttaatttagaagcaataaatatttaaaacatactgaaatgttgggacactgtaaaagaaatgggctgtgtgtagtggtcacacctgtaatcccattgctttgggaagctgaagtgggaggactgattgagcccatgattttgagaccagcctaggcaacatattaagaccctgcctttacaaaaaaaaaaaaaaagttgggtatggtggtgcatacccatagtcccagctacttgggaggctgagatgggaggattgctggagcycagggatttgaggctgcagtgagtcatgatcacaccactgcactgcagcctgagcaacagagcaagactctgcctcaaaaaataaataaatgaatgaaagaaatgaaagttgcttggattcttactaacttgtgattagtcttgggaggaaaattagaagactgttccaggaacaggcaattgaggttgtcagaaaagtgagatgttggcaagatgtcaaagagaataagaactgagagaa

SEQ ID NO: 403805 - DNA, 620 bp, Homo sapiens
agcactattttgtattcagattgaaaatactatatgttcagattttttaaaaaacagtattgcatgaatgttttaattaaaatattcctaaatgagcttgagcaaggaggacaggggagataagtaaaataaggctttgtggcataggagacatttggtggaaatctttcagctcaactaagatttgaaaaaaaaagagaatttttataaaaaatgtaaaggcaggatttacactgatgagcttgtggagaaaatacagagtctaacataattcaaaagagactaatcagtcaaagtggtttygaaggaatatcttgaagagagagaacataaaatgaagatcaggtatgtagttattttaataatctatccatgagataaaaagcattgggttttatttgtcaaaatgggacaatagttccaagaaccattatttgctcagcctaaagaggtttttacattttgaaccagcgacatattgtgctaagtaggataatatccaaatttgtgtctatatcaataattttgttctcaattaaaaacactttattcacacaactgatgattatctgcatttgatttagtgctgaactgtcaaagggggactaacaaaaacaaaa

SEQ ID NO: 403806 - DNA, 518 bp, Homo sapiens
aagatttaatattactttttccaacatctttttagcctcctcaagatttttacattcctgttgtattttttcatacataataactcctgttgaataccttgattgttttgagtcaaacagacatattttgaagatacagcttccagctctgctgtaagatcaycaaactacattaataaaataatataacttgaaaatgaagtaggctgagaataatctcatacaaaaccagtaacaaattttgaaatacatttacttgcaataaaatgttatctataatgtagattctttaaatgttaacccttaaattactcagaaattcaagaacaaagtaaaagccaccataagtcacatatattctttactatcatctttgccacagaacttttgcacttgatctttcttttacttttctgataatttgtgttttttcctccttaaatggctctatgttaactcttattagaaagtttcaaacccctttctctcatcatcgtgccccaaaatttgtcaaaaaa

SEQ ID NO: 403807 - DNA, 577 bp, Homo sapiens
gtatagccagcacgcccagctaattttagtatttttagtagagaaggggtttcaccatgttggtcaggatggtctcaatctcttgaccttgtgatccacctgcttctgccttccaaagtgyggggattacaggcatgaatcaacgtggctggccccaaacttttatcacatttttaaaagttttatacattgtgctttgatgttgtatcaaagaattgtttgccttatccaaaatcagaaagattttcttcattgtttacttttaggcacttcctagttttaggtttacatttagttacatgacctattttgaattaactctcatatatgctaagaaatatagataaaagttgatttttttgcatatggttatctgaggttctagcacaatttgttgacagcttttgcagcttgttggaaatactgtatatattaaagcaacagaatagaggatcctgcaatatatatcagcaaatgtataaacagacacatagatatagagatggatatacacaaaatatttttgtatctgtatatacagttctgaatttcatatcatatatattatagttttatt

SEQ ID NO: 403808 - DNA, 577 bp, Homo sapiens
gtatagccagcacgcccagctaattttagtatttttagtagagaaggggtttcaccatgttggtcaggatggtctcaatctcttgaccttgtgatccacctgcttctgccttccaaagtgtggggattacaggcatgaatcaacgtggctggccccaaacttttatcacattttwaaaagttttatacattgtgctttgatgttgtatcaaagaattgtttgccttatccaaaatcagaaagattttcttcattgtttacttttaggcacttcctagttttaggtttacatttagttacatgacctattttgaattaactctcatatatgctaagaaatatagataaaagttgatttttttgcatatggttatctgaggttctagcacaatttgttgacagcttttgcagcttgttggaaatactgtatatattaaagcaacagaatagaggatcctgcaatatatatcagcaaatgtataaacagacacatagatatagagatggatatacacaaaatatttttgtatctgtatatacagttctgaatttcatatcatatatattatagttttatt

SEQ ID NO: 403809 - DNA, 577 bp, Homo sapiens
gtatagccagcacgcccagctaattttagtatttttagtagagaaggggtttcaccatgttggtcaggatggtctcaatctcttgaccttgtgatccacctgcttctgccttccaaagtgtggggattacaggcatgaatcaacgtggctggccccaaacttttatcacatttttaaaagttttatacattgtgctttgatgttgtatcaaagaattgtttgccttatccaaaatcagaaagattttcttcattgtttacttttaggcacttcctagttttaggtttacatttagttacatgacctattttgaattaactctcatatatgctaagaaatatagayaaaagttgatttttttgcatatggttatctgaggttctagcacaatttgttgacagcttttgcagcttgttggaaatactgtatatattaaagcaacagaatagaggatcctgcaatatatatcagcaaatgtataaacagacacatagatatagagatggatatacacaaaatatttttgtatctgtatatacagttctgaatttcatatcatatatattatagttttatt

SEQ ID NO: 403810 - DNA, 559 bp, Homo sapiens
ctcagtattccacagttttcagtgtacaggtcatgcacatcttttgtcagatttattcctaagagtttaatatattttgatgctactttaaatggcattgcttttaaaattccaatttctggttatttgttgctagtataaaatgcaattggtttttgtatattgttcatgtatcctgcaaccttgctaaactcatttattagttctaatagctttttttgtattttatattgaattttctacatagatgttcattttgtctgtgtgcagttttgcttctttctttctatcctggacgtattctatctcagcttcttgkctggctaggatttccacaacaatgttaaatgtaagcgtggtgagagcaaacatcccatcttgttcctgataagacaaacaagaaagcattgagtgtttcgttactaacaatgatgttagctgtaggatttttcacagatgccttttatcaggatgaggaagctcccttctaaatgttccaaatgtaaatatatgacttcatcaaatgtatttactgcatctattgacatgatcatttatt

SEQ ID NO: 403811 - DNA, 559 bp, Homo sapiens
ctcagtattccacagttttcagtgtacaggtcatgcacatcttttgtcagatttattcctaagagtttaatatattttgatgctactttaaatggcattgcttttaaaattccaatttctggttatttgttgctagtataaaatgcaattggtttttgtatattgttcatgtatcctgcaaccttgctaaactcatttattagttctaatagctttttttgtattttatattgaattttctacatagatgttcattttgtctgtgtgcagttttgcttctttctttctatcctggacgtattctatctcagcttcttggctggctaggatttccacaacaatgttaaatgtaagcgtggtgagagcaaacatcccatcttgttcctgataagacaaacaagaaagcattgagtgtttcgttactaacaatgatgttagctgtaggatttttcacagatgccttttatcaggatgaggaagctcccttctaaatgttccaaatgtaaatatatgacttcatcaaatgtrtttactgcatctattgacatgatcatttatt

SEQ ID NO: 403812 - DNA, 444 bp, Homo sapiens
ttggaactgatttgctaacattttgtaaagaacttttatatctaaattcaaaaagaatatttgtttatagtttttttgtaatatcttagtctagctttggtatcaaggtgatactagccttataaaataagttggtaacyagttcctactcttcaattttctgaaagagtttaagtataattggtaatatttcttccttagaggtttgaacaaaaaacttcagagaagcaatctggggttagagtttcctttgtaggatgagcatttaattaaaattcaattacttcaataaatatagagttattcaattatctgattcttcttgagtgagctatagcaatttgtatctttcaaaaaaaattctcatttcatctcagttacaaaatttattaggtaatgctgtacacagtattcccttactccatttttaatttttacaaaatc

SEQ ID NO: 403813 - DNA, 444 bp, Homo sapiens
ttggaactgatttgctaacattttgtaaagaacttttatatctaaattcaaaaagaatatttgtttatagtttttttgtaatatcttagtctagctttggtatcaaggtgatactagccttataaaataagttggtaaccagttcctactcttcaattttctgaaagagtttaagtataattggtaatatttcttccttagaggtttgaacaaaaaacttcagagaagcaatctggggttagagtttcctttgtaggatgagcatttaattaaaattcaattacttcaataaatatagagttattcaattatctgattcttcttgagtgagctatagsaatttgtatctttcaaaaaaaattctcatttcatctcagttacaaaatttattaggtaatgctgtacacagtattcccttactccatttttaatttttacaaaatc

SEQ ID NO: 403814 - DNA, 511 bp, Homo sapiens
gcatttaattaaaattcaattacttcaataaatatagagttattcaattatctgattcttcttgagtgagctatagcaatttgtatctttcaaaaaaaattctcatttcatctcagttacaaaatttattaggtaatgctgtacacagtattcccttactccatttttaatttttacaaaatctgtgctgatatagtttctttcatacctgatattaggaatttgtctcttttttgttttgatgatcagcctgctrgaagtttataaatatttggtttcatagatttttctctattttttttttgttttattgatgttcactctgatctctagtatttccaaaattgttttttgtgtttaatttgctcttgtttttccaattattaaggcagaagctggggtagttaattaatctaaaatctattctcttttctactatagtgtttaatcccataattttacacataaatattgccttatcagcattccacacattttgaaatattgtttt

SEQ ID NO: 403815 - DNA, 548 bp, Homo sapiens
acttcaataaatatagagttattcaattatctgattcttcttgagtgagctatagcaatttgtatctttcaaaaaaaattctcatttcatctcagttacaaaatttattaggtaatgctgtacacagtattcccttactccatttttaatttttacaaaatctgtgctgatatagtttctttcatacctgatattaggaatttgtctcttttttgttttgatgatcagcctgctggaagtttataaatatttggtttcatagatttttctctattttttttttgktttattgatgttcactctgatctctagtatttccaaaattgttttttgtgtttaatttgctcttgtttttccaattattaaggcagaagctggggtagttaattaatctaaaatctattctcttttctactatagtgtttaatcccataattttacacataaatattgccttatcagcattccacacattttgaaatattgttttcactctcacttagctgaaaatgcattggtttctcttttgaaatcttctttagcccttg

SEQ ID NO: 403816 - DNA, 511 bp, Homo sapiens
gcatttaattaaaattcaattacttcaataaatatagagttattcaattatctgattcttcttgagtgagctatagcaatttgtatctttcaaaaaaaattctcatttcatctcagttacaaaatttattaggtaatgctgtacacagtattcccttactccatttttaatttttacaaaatctgtgctgatatagtttctttcatacctgatattaggaatttgtctcttttttgttttgatgatcagcctgctggaagtttataaatatttggtttcatagatttttctctattttttttttgttttattgatgttcactctgatctctagtatttccaaaattgttttttgtgtttaatttgctcttgtttttccaattattaaggcagaagctggggtagttaattaatctaaaatctattctcttttctactatagtgtttaatcccataattttacacayaaatattgccttatcagcattccacacattttgaaatattgtttt

SEQ ID NO: 403817 - DNA, 548 bp, Homo sapiens
tgaggcaggaggatggcttgagccttagagacagaggctgcagtgagccaagatcacgccactcactccactctgggtgatagagtgggaccctttctcaaaaaaaaaattttttttaaagcacaggctcaagaactcaacccacctaggcaagttatttaacmtaattttccatcgattgtatcatcagtaaaattgggataattttacctacctctaggaataatcctagactattacatgagttaacacatgtattataataaatcacagggtaatgcctggcatagttaactaagtctcaataccaacctaacataaatgaatgacaccaataatcaccagctgtgtagtctttgcataccacaattctgccctgtaaggtaagtggcctaaattcaatggcctaaataaagacctatctagtaatactactctatattcctattattttacctgaattgcacctacctaattcagtttgcaaaagaaaggttaagtattatacctcttatatataaaaaagtgaactataaataagttaaatg

SEQ ID NO: 403818 - DNA, 548 bp, Homo sapiens
tgaggcaggaggatggcttgagccttagagacagaggctgcagtgagccaagatcacgccactcactccactctgggtgatagagtgggaccctttctcaaaaaaaaaattttttttaaagcacaggctcaagaactcaacccacctaggcaagttatttaacctaattttccatcgattgtatcatcagtaaaattgggataattttacctacctctaggaataatcctagactattacatgagttaayacatgtattataataaatcacagggtaatgcctggcatagttaactaagtctcaataccaacctaacataaatgaatgacaccaataatcaccagctgtgtagtctttgcataccacaattctgccctgtaaggtaagtggcctaaattcaatggcctaaataaagacctatctagtaatactactctatattcctattattttacctgaattgcacctacctaattcagtttgcaaaagaaaggttaagtattatacctcttatatataaaaaagtgaactataaataagttaaatg

SEQ ID NO: 403819 - DNA, 464 bp, Homo sapiens
ctgctgcccgttgactcagtcctttcagaaattctctrgagcctgaaaaagtcaccctgccgaggatcaacttcttcaccccagaacaaggcagagcagaaggatggatctgagtgcaaacaggtccaggaccagcacaccatatggtaaagtgtttttatggtgttatataatagaatatatcattgaattcaactccttcattttacagagaggagctagggtccagagagatgaaactgtttacctaaatgcacacacacagcaagcttttaggtctgaacacacagcatgcttttattaggattgtattagttatgacactgcttaagccctattataaagttcttgggagctgagtcatttcatagtcatccctagtacctgatacagcatctggtgcttagaaaactctcattaaaacatttattgaattcatacagattgaaagagaaaacatagcc

SEQ ID NO: 403820 - DNA, 501 bp, Homo sapiens
ggaagggaagtcattagaatgtaagctgaacacccatttggtgcttttggccaaacaataatacacatgtttaaaagttcattacrgtgggaacccaacttaagtagaattaatgaaattgatacagaacttgaaattcactacctaaaattattcattaaaaatgcaacatgcattgaattaatgtagcagcacctgaaggaagtcaaagaaactccagtttgaattttgggagaaaagaaagtatcatttaatttgaaataaatgaaaagaacctaaaagagcaaatggctaaataagtagaagaggttttttgcaacctataattactgggggatttttttcaggaagcttcaggaaagaagctccgaccctcagattagtcattcatcacccaatcactggctgctaaattagaggccaggaaaaagagatcagacatgtgcaagaaggaagaagaagaaggaagaggagaaggaggaggagggtgggggagaggga

SEQ ID NO: 403821 - DNA, 511 bp, Homo sapiens
gaagctccgaccctcagattagtcattcrtcacccaatcactggctgctaaattagaggccaggaaaaagagatcagacatgtgcaagaaggaagaagaagaaggaagaggagaaggaggaggagggtgggggagagggaagaggaagggaaggaaggggaagcagctgtcacttttttgtttcagtgaaactatacagggcaaaatcccattagagctttctgagaagttatgtctgggacagatctgatggtaggcttgaaacttcgaacagagtccaagaaaaatcccccccttttttttttttcttggttttgtagaatttagaactatttttctaggtgtctgaaataaaataaaattttaagtagttgaaatgttaagtaaattgttttcaacaatttgcagatttatgtcagaatatatgttatgggattaagcagataaaataataatattaaacatcaaagtaagaatagtgtgagagatgaataatttaaggcaatttcag

SEQ ID NO: 403822 - DNA, 511 bp, Homo sapiens
gaagctccgaccctcagattagtcattcatcacccaatcactggctgctaaattagaggccaggaaaaagagatcagacatgtgcaagaaggaagaagaagaaggaagaggagaaggaggaggagggtgggggagagggaagaggaagggaaggaaggggaagcagctgtcacttttttgtttcagtgaaactatacagggcaaaatcccattagagctttctgagaagttatgtctgggacagatctgatggtaggcttgaaacttcgaacagagtccaagaaaaatcccccccttttttttttttyttggttttgtagaatttagaactatttttctaggtgtctgaaataaaataaaattttaagtagttgaaatgttaagtaaattgttttcaacaatttgcagatttatgtcagaatatatgttatgggattaagcagataaaataataatattaaacatcaaagtaagaatagtgtgagagatgaataatttaaggcaatttcag

SEQ ID NO: 403823 - DNA, 546 bp, Homo sapiens
gggaaggaaggggaagcagctgtcacttttttgtttcagtgaaactatacagggcaaaatcccattagagctttctgagaagttatgtctgggacagatctgatggtaggcttgaaacttcgaacagagtccaagaaaaatcccccccttttttttttttcttggttttgtagaatttagaactatttttctaggtgtctgaaataaaataaaattttaagtagttgaaatgttaagtaaattgttttcaacaatttgcagatttatgtcagaatatatgttatgggattaagcagataaaataataatattaaacatcaaagtaagaatagtgtgagagatgaataatttaaggcaatttcagttgcatgaggttttttttctttttcttatgaataaaaatataatatarttttattactctgtagagaggttagtaaactaggagaaactcaagaggggaaatgcaaaacataataaaatagaatacattcgattttaaaagaatgtctgtatttcatttgagtgctggccaaaagataatgg

SEQ ID NO: 403824 - DNA, 556 bp, Homo sapiens
attaggaagacacatcacttatgtagtatgtagtattcttgtcaacaatattttgtctaaatctaatcatgatgaaacaatcagaaaaatccaaattgagaataatctgtaaaaggaatggtctttgttttgttacatgtatacatatatgtaaatatatatccccaaagccgaccttgagaaggaaattcactgagccattccttacgagtgttcccaggagaaacaggaaagtgagaagtcaagtcggtccaagaagaataaagaggccaagcccagttgcatatcagcaatctcacagagagagctgcctcagtccctcragggtaagtagatgacctcagagttgtcccatcagttgctgcttcagagccacactttcagctcatccttgcacttcatgcaatctgtgagccccacaggcagagcaggtcctggctgcctgaggttattccctatgaaagaagcagatctaggttcccacagcagtctcggctgtaactaaacagaaggcttcattcatgattggattaaggatgggggaagggcaggtggc

SEQ ID NO: 403825 - DNA, 556 bp, Homo sapiens
attaggaagacacatcacttatgtagtatgtagtattcttgtcaacaatattttgtctaaatctaatcatgatgaaacaatcagaaaaatccaaattgagaataatctgtaaaaggaatggtctttgttttgttacatgtatacatatatgtaaatatatatccccaaagccgaccttgagaaggaaattcactgagccattccttacgagtgttcccaggagaaacaggaaagtgagaagtcaagtcggtccaagaagaataaagaggccaagcccagttgcatatcagcaatctcacagagagagctgcctcagtccctcgagggtaagtagatgacctcagagttgtcccatcagttgctgcttcagagccacactttcagctcatccttgcacttcatgcaatctgtgagccccacaggcagagcargtcctggctgcctgaggttattccctatgaaagaagcagatctaggttcccacagcagtctcggctgtaactaaacagaaggcttcattcatgattggattaaggatgggggaagggcaggtggc

SEQ ID NO: 403826 - DNA, 561 bp, Homo sapiens
ataactctccaattgttttctgtattaattgatataatcatatggctttatttatttactttattgatacgatggattacattcatggagtttttaatgttgcacagacttgagtagatgtagagtagatgtagagtagtacttgagtagatgtagagttccacttgaacagatagaataagtcatagtatataataattttatatattgtatttgatttgataatattttgttaagaatgttgcacctacgttaataagagacattggttttaagttttccttttttctaataaatgtatcttactttaatgttagaataatgctggcctcataggatgaatcatgatgtgttgcttctgtttctattttagggaagaggttatgattaattggtatgcgtttttcttaaatgtttgacagaattcactacaaaatttcattttgatttcrgtaatatttcctatgacttttattcttttacattgttaatgtgtattttcggacccaaaatgttgtctatcttgtgaatgttctatttgagcttgagtagaatgtgtat

SEQ ID NO: 403827 - DNA, 622 bp, Homo sapiens
ttggtatgcgtttttcttaaatgtttgacagaattcactacaaaatttcattttgatttcggtaatatttcctatgacttttattcttttacattgttaatgtgtattttcrgacccaaaatgttgtctatcttgtgaatgttctatttgagcttgagtagaatgtgtatgttgtttgtttgtggatggatgttgaacaatgtggtggttgtaaatatcagtttcattaagtggattaacagtgctacttaagttatctatattcttattgtctatttaatgtgtcaactactgagaaaagcatgctaaagtcctcaattataatattagttttccctctttctcctaacagttctatccatttttatcagtgttttccttttggattttgacaccatctttttaggtgcatatgcatttaggattgctatctcttcatggagaattgaccttttatcattatgcaatgctcctctttatccttgataagtttcattactctaaattctacgtggtctggaattgaaaacagaagctacttctgttttcttttagttggtgttggcaaggtctttcattaaccatatttcaattttaatttatctcagctttaatagttaaa

SEQ ID NO: 403828 - DNA, 622 bp, Homo sapiens
ttggtatgcgtttttcttaaatgtttgacagaattcactacaaaatttcattttgatttcggtaatatttcctatgacttttattcttttacattgttaatgtgtattttcggacccaaaatgttgtctatcttgtgaatgttctatttgagcttgagtagaatgtgtatgttgtttgtttgtggatggatgttgaacaatgtggtggttgtaaatatcagtttcattaagtggattaacagtgctacttaagttatctatattcttattgtctatttaatgtgtcaactactgagaaaagcatgctaaagtcctcaattataatattagttttccctctttctcctaacagttctatccatttttatcagtgttttccttttggattttgacaccatctttttaggtgcataygcatttaggattgctatctcttcatggagaattgaccttttatcattatgcaatgctcctctttatccttgataagtttcattactctaaattctacgtggtctggaattgaaaacagaagctacttctgttttcttttagttggtgttggcaaggtctttcattaaccatatttcaattttaatttatctcagctttaatagttaaa

SEQ ID NO: 403829 - DNA, 622 bp, Homo sapiens
ttggtatgcgtttttcttaaatgtttgacagaattcactacaaaatttcattttgatttcggtaatatttcctatgacttttattcttttacattgttaatgtgtattttcggacccaaaatgttgtctatcttgtgaatgttctatttgagcttgagtagaatgtgtatgttgtttgtttgtggatggatgttgaacaatgtggtggttgtaaatatcagtttcattaagtggattaacagtgctacttaagttatctatattcttattgtctatttaatgtgtcaactactgagaaaagcatgctaaagtcctcaattataatattagttttccctctttctcctaacagttctatccatttttatcagtgttttccttttggattttgacaccatctttttaggtgcatatgcatttaggattgctatctcttcatggagaattgaccttttatcattatgcaatgctcctctttatccttgataagtttcattactctaaattctacgtggtctggaattgaaaacagaagctacttctgttttcttttagttggtgttggcaaggtctttcattaaccatatttcamttttaatttatctcagctttaatagttaaa

SEQ ID NO: 403830 - DNA, 600 bp, Homo sapiens
tcccctttgcccatttcttcctagggtggtttccagagttctaggagcatttcagggcagactgaaggggagaaaccagaagccctgggcaatggagcttctaatgtgtacattcatgaacagaccagccctttccatgctgtgagtgggtgctggggtgcaatggcagtataatgtggtagaaacatggctacagccctatccttctagctcagctttattgctgatttaagcactagtttgtaactagtttccatgtacatttgtaggaaaccaactcctttgtgggggtacaacatgcaggagataataaaaagttagtctttatcttccctgtactccaatattaactatgatatctattgattgaattacttgtggtaaatagcttgacttctctctttttcagtttctttatctcaatgatactgacataaaaactttgaatatttacacataagaatgatttaatgaygcttaattgaaaatgtttatgtatgaagttatagaaatttttcagaaaataatgatgatgtctcttttcagtccattactagaatcatggtgaaatatactttaacattagaacagtttggatgt

SEQ ID NO: 403831 - DNA, 567 bp, Homo sapiens
atggatggcagcaggcaaagagaaggcttgtgcagggaaactcccccttagaaaaccatcagatctcatgagacttattcactatcatgagaaaagcatgggaaacacctgcccccatgattcaataacctcccaccaagaccctcccacaacatgtgggaattcaaaataagatttgggtggggacatagtcaaaacatatcataaataataggtataatctaaacaaagacgtttacactcatacccctgstgctaatgccttctagatgcttgcattgcttttttactgagtcatgtttgttcatctcctcctttaaaaccaacagtcattctccttgtagtccattatatttgccttttgtaacaaagctgccattggtcagaatcagagtcagggtcacttgcatacaaaaggagaatcattctaatggtataattactcatgtctatttttactcatcttatagtaatatggagccccttagtgacaggtaggggcaaacaagtccacattgctcacttttgtcctgtttcctttgacaaatcctgatttattgaatgcct

SEQ ID NO: 403832 - DNA, 599 bp, Homo sapiens
tccaatgttgtccccattactatgaagacttgtgaaatgaattttcagcctctcttctagatgctatatagtattctaagttaaaaggaggccgacatatatggcccatgtgtctgggtatctgattctcctgaatcaaggtctgatcaatcatgtctgtcttggtggtttaagcaaatactgttttctagggtcttcactggtacagttgtcttgaattaccatgtctgccattcctgaaatgagagagctagctttgtattttaatagacatatttgattttagaaggctggaagttactaatttaaccacacacagccaccaaataaaaggaacttagaatgctttaaatcttataataccttccattccagtattttatttttattaccttgttttttcactccataaattgaggtcaacaattctctatatttgcttatataattattaaaaagcacaagtaatttggttgccattctttctagcatcttactcctcacttctgggtttaattttttattcttagttgcatacttatcttttattaaattgaagaataacagaaaactgtaamgtacataagtataatattttt

SEQ ID NO: 403833 - DNA, 647 bp, Homo sapiens
acaactacaatcgaagttataccaatagagatcatgcaaactgaagaacagagagaaaaataatgaagaaaaatagagccccaggaaaatttgggataccattaagttcacccatatatgcataagggaaggaccagcaggagaagacagaaaggagargaaatatttttcaaagaaataatggctgaacacttccctattttattgaaaaaacaacaatctacccattcagaaaattcaacaaactacaagacacaaagagattcacaaatagacacatgatggtaaaaatattgaaagtcaaagaccaggagaaaatctgaaatgcaacaagaaaacaataacttgtttcttacaagtaaacctcaataagattaacagctgattcttcagtagaaacattgaaggtaagatagctgtgggataatatatttttattgctcatttaaaaataactattaaccaagaatcctatgtagttattttttgaaagtgaacgtaaaataatgacttttcaagatgaagaaaactgattatttttgttgctaataagcctgccttacaaaaaatactaacagatgttaaacaggctgaaagcaagagataataactcaaatccacatttgaaaaaaagcattggttaataa

SEQ ID NO: 403834 - DNA, 587 bp, Homo sapiens
gggctgaattatgtcccacaccatgccccacccaaaacaatcacattttgaagctctaaacctagcattatacaattactatatttggagctaagcctttacaaagatggttaagttaaaatgagcccttttggatggtgctaatttaagctgactggtgtccttataaaaagaggaaattgtaaacacagagaaacacaggggtgtgcatgatcaggggaaacaccacatgagtacatttcaagaaaatgaccaactccaacccaaggaaagagcccttagaagacattaaaattgctaagaccttaattttggactcatagcttccataactgtgagaaaataaatgtatatttctaargcgttttattttgtggttttttttagagtatccctaaaaaatgaagacaaggttttaaaacagaagtgttattaggaataaagagggatattatataaagctaaaatggtcagcaaatctggaagacataacaactgtaagcatgtaagcatctaatgagagattaccaaaacacatgaagcaaaaactgacaaaggggaaaagagacaattcaacaataatcatt

SEQ ID NO: 403835 - DNA, 587 bp, Homo sapiens
gggctgaattatgtcccacaccatgccccacccaaaacaatcacattttgaagctctaaacctagcattatacaattactatatttggagctaagcctttacaaagatggttaagttaaaatgagcccttttggatggtgctaatttaagctgactggtgtccttataaaaagaggaaattgtaaacacagagaaacacaggggtgtgcatgatcaggggaaacaccacatgagtacatttcaagaaaatgaccaactccaacccaaggaaagagcccttagaagacattaaaattgctaagaccttaattttggactcatagcttccataactgtgagaaaataaatgtatatttctaaagcgttttattttgtggttttttttagagtatccctaaaaaatgaagacaaggytttaaaacagaagtgttattaggaataaagagggatattatataaagctaaaatggtcagcaaatctggaagacataacaactgtaagcatgtaagcatctaatgagagattaccaaaacacatgaagcaaaaactgacaaaggggaaaagagacaattcaacaataatcatt

SEQ ID NO: 403836 - DNA, 513 bp, Homo sapiens
taacaactgtaagcatgtaagcatctaatgagagattaccaaaacacatgaagcaaaaactgacaaaggggaaaagagacaattcaacaataatcattggagactttaatacccaactttcaataatgaatggaaaaactagaaagtttaaaaatgaaacagaagacttgaacaatactataaaccaactagacctaacagacacctataaaacaccccaccccaaaacagggtatacattatttttaagtgcacattctccaagatagacyatgtgttagattacaaaatgaacttcaatgaatttaagaggatataaatagtcaaaagaatgtcttctgaccacagtggaattaaattggaaatgacatttctgtttatttgttttctcaaagtctgatgtgttggcaggaatgtaggggaatggcataaataaagctacacaatcaggaatattaaagtttccaaccacatggatcagtaacaaaaaaatcacttttgagagtttactct

SEQ ID NO: 403837 - DNA, 650 bp, Homo sapiens
tggggtgtaatggtgcgatcttggctcactggaacctctgctgttcaggttcaagcaattcccctttctcagcctcctgagtagctggractacaggtgcatgtcaccacatctggctagtttttgtatttttagtagagatggggtttcaccatattagtcaggctggtctcaaacccctgacttcaagtcatctgtccgcctggccctcccaaagtgctaggattacaggcatgagtcagcacccgtccaaatatatttttaaaatatttactaatgctagcatatgcttatttttgtcttagaaactccttttttattgtctcagtacttactcccaccttgatactctaaagaaaatttagatgagtccagctttgtaatgaatgtttaagaaaatgcttggaaagagctggagatacatcaaggtaggaaacagggatacaacccaaaatgtatgagagggagaaatgcagaggacttgaagcaagtgggcatgtggtgcagtgtagagagaagagacccagaaaagacaaatgtagattcctagtggccttggcaacttaaaaatgatggaacatttccttgtgtggaattcaaaacggaataacaacactagtccctaaaataaagaaagaacttaaaaaaaa

SEQ ID NO: 403838 - DNA, 594 bp, Homo sapiens
tggacagcccaagaacttgaactcaaaattgcctgattctaatgtccacttttctacactgttcaattctttcactatcaaagtaattgcaacatcataattttatggtaaaggcaaacttggaaatatgagatacatgtaatgctcttttcagaaaagamcaagtggaaaaagcagatgtggaagtttccaacctgaaaccagatggaagaaaagtcagagtaaaggaatgtgaagggtttcagaaaatgaagaaagaggacaaaatcaacacgagccccaaaccccaagaattttgaccaagaattctgtttgtttgtttgtttgtttgaggcagagtcttgctgtgtcgcccaggctggagtgcagtggcaccatctcggctcactgcaacatccgtcttccaggttcaagcgattctcgtgcctcagcctccctgagtagctaggattacaggcgcccgccaccacacctggctaatttgtatatttttagtagagatggggtttcgccatgttggccaggctggtcttgaactcctgacctcaggtaattcacccacctcagcctcccaaagtgctgggattacaggca

SEQ ID NO: 403839 - DNA, 559 bp, Homo sapiens
ctttacaacaaatggtaccagaacaactggatatcaacaggcaaaaagttgaagttgaatcatatcttacaacatgtataaaaatcaactcaaaacgggtcaaaaatctaaatctaatacttaaaattatacattattttttattgtggcaatatagacacgacataaaatttactatcctaaactttttttaaaaaaattttaagttctgggatacatgtgcagaaygcgcaggtttgttacataggtatgcatatgccatggtggtttgctgcatctatcaacccatcatatgggttttaagccccacatacattaggtgtttgtcctaatgctctccctccgcttgtcgcccaccctctgacaggtcccagtgtgtgatcatcccctccctgtgtccatatgttctctttttcaactcccacttataagtgagaacatgcagtgtttaattttctgttcctgtattagttggctgagaatgatggcttccagcttcatccatgtccctgcaaaggacatgaactcattcttttttatggctgcatagttttccatg

SEQ ID NO: 403840 - DNA, 585 bp, Homo sapiens
tgaaggtataacaaccatgaagcaagaatgaaaggtcatgagtttaaacattaaaaatccctaaccattgaactctttaaacattaacaattggttttttctcagattcgttttttcatgtatttttccagcatagtgtttacatttcaatttattctatgataaagattaatatgctctccaaaaaaggtataatctagccmagaaaacttcagtaggtagaatttcagaaagctagattgagctttatttttaaaaagcactaaattctgtggtatggcccttaaaggaaatagaataatgacaacaaacagagagatcaatatagctaggagcctttatgtagtagatgggaaattacatgttttgtatttagcatatatttattgattgccagctagatgttaggctagctgtgtactggaaatgcaaggtggagatggaaaaagaaaaccaataactctggtctctagtaatttaggtgaagagaaaacatttaaacaaataaaagtacgtgcacgtgatttggatgtaataggtgttattctggttacttgggctttcagtatgagaacaatttgacac

SEQ ID NO: 403841 - DNA, 594 bp, Homo sapiens
cattttatcatatcatttaactccgaattaggcaaaatgactaacaagttaatacttttgaaaacactttggtcattatttctcttcatcctccacattgtgtcagttgtcatgatatttacattattattacacaatgtatcaacaattttctttttggacagtttaattattttgaggaaatgcctcttttgtctgaaaaaaaaaattacagtttctttcctcttctgatctctgtttgagcatgtgtcttccatgttaaatcattcattgcagttcattgccatggcaaccataatcactggaggcctatgcaacagatcttcctgagtgagaacaatgcctgattccrctggggattccaagtttgaagactgtaaatcttgagctggtagaagctaccttttctgcaatactcaggaagcttaattgtaggatgatattaatgaaagagaagattacagctaatatgaataaataagtagaactgaacacgtaataagggtccttagattcagcaattcataaataaaggtccaccctgggacttccaagtcaattgagtcaagtccttattatcatgactatactttg

SEQ ID NO: 403842 - DNA, 589 bp, Homo sapiens
gtttttgtatcatctgcttaatttgagattccaaattaagaaaaatcctgttcctttcttgttcaaaattcatctcatgtactgagtctcatatctgatttcaatggatacttattgaatggtgcaactgttcatttgacaacagcaaataatttattttgaataagggccatctgagtgctaagcttctgagtaaaatagataacagcaatgaattctactccaaaagcataatcttcataaaaaacttgcaggcaatttcagttgtaagattctctatatccacagtttgagtttattgtattatggaacaattgatatttcaaatgaatgattttatttatgactctctgtatatattaaacatgccaggatattgtattctatgtgtatgaaacatatttcaattgtacaacataagtctgtrgggtttggagagtagggtaccttaattaacttcataataaaatactgaatctgttcctttcctttctgtgttgtgtaatcatggaaactttttggtttgaatagacacgaaatgtcaattacggcaaaaggatgtacattttaacgattttacccaaaacaa

SEQ ID NO: 403843 - DNA, 565 bp, Homo sapiens
ttagaaaataaaaggctctggcattagccttttaaatgcgccaattcttatattgacctcagatgagcaattcagcattatgttactaaatgaggggaggaactaaatttccaaaaccaacttttgtttcctcccatcaggaatattctccatttcaagaaagcatcacttccctgtgtgtgaaacactctctgctttcttgtggggtgtgcactcttcaatttgtttagactaagctgcagataaattaggacttaagggattcttttaaatattcagtaagaaataagaggaagagaattttaagtatttagtctggcagtgagaacttccctggaatattttaaagcattacatttaattggcttcctaagtataggtaccagttttgttttgttttgtttttttcttgcaaacatgttgtattgtatacacacacacaacatacacatatttttctctgtttattctttataataggaagttcaaaagataaaagtgggtaattcctgygagaagcaatttgggtcaaagatatgcattagaagagagataggcagaaaaa

SEQ ID NO: 403844 - DNA, 581 bp, Homo sapiens
gctagtaacagttcttgatatggaaaagaaatgactagagatagcagttaaatgactgagagggagctatgtttgtttggatatatactattttcaaaagatataaccaaggttgaaacatatattttcactgggtgaaattatcaaagttagtgatatttatagcatattattgtatccttgcttaaactattcttttctcatattggtgttatctacttaataattgggtgcactgtcctaggtttggacttttgtgtgtctcaaacttcttagcacatattaaatattcactattattaagaagagattcagcaagttaataccttgatctaactcatgtattttctcagtttttcttgaaattttcyttgtatttggtgatgcaccgcaagaaattgccttagtcttagtcacatgaggatttttatgtgaaatttagccatatggaacactaaaaagaaaattactctttctgcccttacagaatgagttcatatttagcttctgttctgtagacagaaattcagttttatgaagcagttaaaggagaaagtgcatggcgtgctttttgcagcact

SEQ ID NO: 403845 - DNA, 581 bp, Homo sapiens
gctagtaacagttcttgatatggaaaagaaatgactagagatagcagttaaatgactgagagggagctatgtttgtttggatatatactattttcaaaagatataaccaaggttgaaacatatattttcactgggtgaaattatcaaagttagtgatatttatagcatattattgtatccttgcttaaactattcttttctcatattggtgttatctacttaataattgggtgcactgtcctaggtttggacttttgtgtgtctcaaacttcttagcacatattaaatattcactattattaagaagagattcagcaagttaataccttgatctaactcatgtattttctcagtttttcttgaaattttccttgtatttggtgatgcaccrcaagaaattgccttagtcttagtcacatgaggatttttatgtgaaatttagccatatggaacactaaaaagaaaattactctttctgcccttacagaatgagttcatatttagcttctgttctgtagacagaaattcagttttatgaagcagttaaaggagaaagtgcatggcgtgctttttgcagcact

SEQ ID NO: 403846 - DNA, 655 bp, Homo sapiens
ttacaactccattatgatcagacccaagagcactgggcatcagaggtactaaccttcttcctagtgcatgctcctggaaagtttacatcattgagccagtcaaggcttacctgggatgtacactggccaacacctatagcccctttaaagaataaaagctctttgtcatatctttggctcagtaattgcaataaatatacttgattcttcactacttaaaatggaaaagctaccttttccaaaaaaggtcacataaatacaccagtctatgtatattctttcattttactttccatgtcaagctgaaataaacttatgtacctactatgttttattcactgtgttgtatgttgaaaaaattacataacattttacatttgatcrcttagtttctttgcattttacaaatataagtcattacctgtctttgttgttaacatgggttggttttcttccttattgtcacaccagatgggacttccagataattattaagggatgatagcttagtgtaaaagtaaacacttttatattctccctctaataacttgttttctctttctcacaggaagagaagtagataattaattgatgacagtcatacatctctttggacatatatccacctgagatgagatcactgcttaaaaaggta

SEQ ID NO: 403847 - DNA, 593 bp, Homo sapiens
caatgagaaaatacatttgatatcaagtcaatttaatttgctaagacttgttttgtaacttaacctgtgatccatcctggagaatgttccatgtgtacttgagaagaatgtgaattctgccaattatttttggatggaatgttctatacatgtgtgttaggttcatttgatctacagtgttgttcaagttttccattttcttattaatcgtctgtctggatgctctatccattattgaacatggattattgaaatttcctactcttattgtgttgttgtgtattcctctctttagttctgcygacatttccttcatttatttaaatccatgcaaaaataaatcactgtaatacactgcattaacataacaaaggataaaacaaatgatcaccttaatagatgcagaaaacacatttgactaaatttaacacaatttcatgataaaaacactcaacaaactagcagtagaagaaaattacctcaacatgaaaggaccatatatgaaaagcccagagttaacattttacttagtggtaaaaaactgaaagcctttcctcttaaatcatgagcaaaaaaataaggctcattcttac

SEQ ID NO: 403848 - DNA, 529 bp, Homo sapiens
aaccacaacaggaggtgagtgtctggtgaggcagcagtaccacctgagctctgcttcctgtcagttcaggtacagcattatattataataggaatgtgaaccctattgtgaagtgcacatgtgagggatctaggttgcaagggtttttggttgcaggctccttatgagaatctgatgcctgatgacctgaggtgaaacagcttcatcctgaaaccaccccacacccacctcatccatgaaaaaactgtcttccaggaaattggtccctcatgccaaaaaggttggggacccctgctttaaaagaaggaaatcttatcatatgccataagatggatgagctttgagagcattatgctaagtaaaaaaaaaaaaaaaaatctcagtcacacagcaggataaatactgcacttayatgaagtatataaaatagtcaaatacatagaagtagaaattataatgatgggtggttgccaggggtaggggaagagggaaaatgagttattgtttaatgagtgtaaagtattagtta

SEQ ID NO: 403849 - DNA, 614 bp, Homo sapiens
aaagacaactgggactcaaagaaatatttgtacactcatgttcatggcaacattatggatgtagacaaacgaaacactagwatatattttaaatatcaatatgcctatatttaatgaagaagaaatgtttaaagtcaatgacatatgctaccatattaaaaaaattaaaaatgtggagaaacagagaaaaactaaaattcacacatctccagtttgtgaaaaagaagactttttactaattttactgacattaaaaaaaaattaggaatgcctagaaaagtactacttaaaattgacgcaccatgaataataaaatgcataactttacactccttaaagaaataaatattggattattaaaagcatgcgcacatacaaacatctaatttacccacataaatgaaatgtgtttacttctaagttttatcaaatatttaacaataaaacaaaagtatcttacaccaactctttcagaaaaatagagaaaaagcaacttttcaaaactcactttataagattaacacaatctttatttagaaaacagaaaattagaatgacataacagatgatagcaaagtgagaagctccagaacttagtacctttaccaaaacag

SEQ ID NO: 403850 - DNA, 606 bp, Homo sapiens
ataactttacactccttaaagaaataaatattggattattaaaagcatgcgcacatacaaacatytaatttacccacataaatgaaatgtgtttacttctaagttttatcaaatatttaacaataaaacaaaagtatcttacaccaactctttcagaaaaatagagaaaaagcaacttttcaaaactcactttataagattaacacaatctttatttagaaaacagaaaattagaatgacataacagatgatagcaaagtgagaagctccagaacttagtacctttaccaaaacagttattgaactgacaagaagtatctagagaaactactttggaattctcgagtctatttggacacttgtagtctccagatgatagctttatgaagaaagagtcagggttcattacagtgaaattcactgttttctataatggcccccattctctacccttcagtcccatagtgaacaaccacgtggatgggggccaacaattccagtgtggcttgctggtgctagggtggatgataggtatattgtacttcaaaaattacggtgtatgttttgacaattgcttgtgattgctaagtgtctggcacagagact

SEQ ID NO: 403851 - DNA, 606 bp, Homo sapiens
ataactttacactccttaaagaaataaatattggattattaaaagcatgcgcacatacaaacatctaatttacccacataaatgaaatgtstttacttctaagttttatcaaatatttaacaataaaacaaaagtatcttacaccaactctttcagaaaaatagagaaaaagcaacttttcaaaactcactttataagattaacacaatctttatttagaaaacagaaaattagaatgacataacagatgatagcaaagtgagaagctccagaacttagtacctttaccaaaacagttattgaactgacaagaagtatctagagaaactactttggaattctcgagtctatttggacacttgtagtctccagatgatagctttatgaagaaagagtcagggttcattacagtgaaattcactgttttctataatggcccccattctctacccttcagtcccatagtgaacaaccacgtggatgggggccaacaattccagtgtggcttgctggtgctagggtggatgataggtatattgtacttcaaaaattacggtgtatgttttgacaattgcttgtgattgctaagtgtctggcacagagact

SEQ ID NO: 403852 - DNA, 547 bp, Homo sapiens
aattagaatgacataacagatgatagcaaagtgagaagctccagaacttagtacctttaccaaaacagttattgaactgacaagaagtatctagagaaactactttggaattctcgagtctatttggacacttgtagtctccagatgatagctttatgaagaaagagtcagggttcattacagtgaaattcactgttttctataatggcccccattctctacccttcagtcccatagtgaacaaccacgtggatgggggccaacaattccagtgtggcttgctggtgctagggtggatgataggtatattgtacttcaaaaattacggtgtatgttttgacaattgcttgtgattgctaagtgtctggcrcagagactggccactgtttcaagacttcaggctgaagcagctttaccagtaatatcagtctaagaaggtatgaaaagataaacacattttaaaaaaattttacattggatccaaataatataggaaatctctgttaaagcactgctcgccgtgaagtaatggaagagagtcatcatt

SEQ ID NO: 403853 - DNA, 534 bp, Homo sapiens
gaaaagcaaggcaggacaatggcccacccaggagtgacatggagccaaggaaacctccccgacccagggaagtgatgagtgaatgtacaactctaggaactcatgcttctcccacagatcttgcamcccttgggtcatgaacccactctaccagagccttcggtctgacacacagagctacatggagtcttggcagagcagccactcaggtacatgcaaagacccaggagccttagatactgggattttgtgggcttcccagaaaaagtagttgcaactgcaaagtagaaggttagacccctgtacataccccctaggaaagaggctgaagccaacggggtgagcagcaacagtgtgcaggctccaattccacagcacctgacagcataagacccactggcttggaatttcaaccagccactggtagcaacattaatctccctgagaggaagcttccaggacaagggccaggccgccatcattgctgtttggagaacttagctgtttcaaacttgaggctttggagagtccaag

SEQ ID NO: 403854 - DNA, 534 bp, Homo sapiens
gaaaagcaaggcaggacaatggcccacccaggagtgacatggagccaaggaaacctccccgacccagggaagtgatgagtgaatgtacaactctaggaactcatgcttctcccacagatcttgcaccccttgggtcatgaacccactctaccagagccttyggtctgacacacagagctacatggagtcttggcagagcagccactcaggtacatgcaaagacccaggagccttagatactgggattttgtgggcttcccagaaaaagtagttgcaactgcaaagtagaaggttagacccctgtacataccccctaggaaagaggctgaagccaacggggtgagcagcaacagtgtgcaggctccaattccacagcacctgacagcataagacccactggcttggaatttcaaccagccactggtagcaacattaatctccctgagaggaagcttccaggacaagggccaggccgccatcattgctgtttggagaacttagctgtttcaaacttgaggctttggagagtccaag

SEQ ID NO: 403855 - DNA, 534 bp, Homo sapiens
gaaaagcaaggcaggacaatggcccacccaggagtgacatggagccaaggaaacctccccgacccagggaagtgatgagtgaatgtacaactctaggaactcatgcttctcccacagatcttgcaccccttgggtcatgaacccactctaccagagccttcggtctgacacacagagctacatggagtcttggcagagcagccactcaggtacatgcaaagacccaggagccttagatactgggattttgtgggcttcccagaaaaagtagttgcaactgcaaagtagaaggttagacccctgtacataccccctaggaaagaggctgaagccaacrgggtgagcagcaacagtgtgcaggctccaattccacagcacctgacagcataagacccactggcttggaatttcaaccagccactggtagcaacattaatctccctgagaggaagcttccaggacaagggccaggccgccatcattgctgtttggagaacttagctgtttcaaacttgaggctttggagagtccaag

SEQ ID NO: 403856 - DNA, 547 bp, Homo sapiens
agaaggttagacccctgtacataccccctaggaaagaggctgaagccaacggggtgagcagcaacagtgtgcaggctccaattccacagcacctgacagcataagacccactggcttggaatttcaaccagccactggtagcaacattaatctccctgagaggaagcttccaggacaagggccaggccgccatcattgctgtttggagaacttagctgtttcaaacttgaggctttggagagtccaagccaaccaggagtggaaggaatgtcccagcatagcaaagctgctctgcaaaaaatgtgcccagattgctttttaaagcaggttctcaatccctttcttcttcattgggcrggacctcccaaatggggccttcggtcacccctgacagtgttctccaacaaacagtcttgaaacctccctgggacagagctcccaaagggaggagtggcctgtcatttttgctgtttgtgtgacttagccattccaaccttcaggccttggaggatccaagccaaccaggggaagaggaagtcctcttgca

SEQ ID NO: 403857 - DNA, 547 bp, Homo sapiens
agaaggttagacccctgtacataccccctaggaaagaggctgaagccaacggggtgagcagcaacagtgtgcaggctccaattccacagcacctgacagcataagacccactggcttggaatttcaaccagccactggtagcaacattaatctccctgagaggaagcttccaggacaagggccaggccgccatcattgctgtttggagaacttagctgtttcaaacttgaggctttggagagtccaagccaaccaggagtggaaggaatgtcccagcatagcaaagctgctctgcaaaaaatgtgcccagattgctttttaaagcaggttctcaatccctttcttcttcattgggcgggacctcccaaatggggccttcggtcacccctgacagtgttctccaacaaacagtcttgaaacctccctgggacagagytcccaaagggaggagtggcctgtcatttttgctgtttgtgtgacttagccattccaaccttcaggccttggaggatccaagccaaccaggggaagaggaagtcctcttgca

SEQ ID NO: 403858 - DNA, 547 bp, Homo sapiens
agaaggttagacccctgtacataccccctaggaaagaggctgaagccaacggggtgagcagcaacagtgtgcaggctccaattccacagcacctgacagcataagacccactggcttggaatttcaaccagccactggtagcaacattaatctccctgagaggaagcttccaggacaagggccaggccgccatcattgctgtttggagaacttagctgtttcaaacttgaggctttggagagtccaagccaaccaggagtggaaggaatgtcccagcatagcaaagctgctctgcaaaaaatgtgcccagattgctttttaaagcaggttctcaatccctttcttcttcattgggcgggacctcccaaatggggccttcggtcacccctgacagtgttctccaacaaacagtcttgaaacctccctgggacagagctcccaaagggaggagtggcctgycatttttgctgtttgtgtgacttagccattccaaccttcaggccttggaggatccaagccaaccaggggaagaggaagtcctcttgca

SEQ ID NO: 403859 - DNA, 451 bp, Homo sapiens
ctatataccttttatatgatgtgatgaaaacttcgctctgtgaactattcccagaaattgataacacaggttaatcatgagaacatcagacaaatcctaatccacacaatttctgataagtattccttaaaactgtcaaggccataaaaaacaaggtaaatttgagaactcgttacagccaagaggagccgaaggagacatgacaactaaatgtgacrtggtgtccagaattaggttgtgtaacagaaaaatctggaaaatgccctggagttgagttcatgataatctaagctgtcaataatcctagaaattggatgtggggtatggttcaaatctctatcccatctttgcaatttttctgtaattctaaactgttgtaaaataaaaggtgtatcttgaaagtcattgaaatttttatggaagtgctacatttagtttttgtcaaatttag

SEQ ID NO: 403860 - DNA, 551 bp, Homo sapiens
ctctgcacggtggtcttgcacatcagatggggctggtctgatctgagcactccttggtctactggctctcccagggccccagtctggcctagcctgcttgcagaacagacttaggtgccctagggacccacctcatagcttctgtactggtggaccatgcatgagtggtggagagctccaacacgggatcccataaagctgtgcatcagcccacatgttccctccccacactgcagcttccccagagtccacggcaactccccacatcactttgctggcatgtgtctgtccaatcaggttttgctttagttgtagcaccagtatgcaggagtgcagtaagcccccaccatccctactgaacaccytaaagatggatccttggcaggaagagcctaaaaacccctcctttgccagcacgctgcccttgcactaactctaggaagagaacaggagattctctcacaacctgagcaatcactcctgcttgtggggcacagatcagccacccagacctgtgctggccagaaccccaccccgatccaataccatct

SEQ ID NO: 403861 - DNA, 517 bp, Homo sapiens
cagctgaagccaccttataccacaatcaaaccctcaatgtcatcaaataggataaaagaaaagaaaaaccatgcaaagktcagcaacctcaaagattgaaggtagataactccacaaagataagaaagaatcagtgcaagaaccctgaaaactcaaaatgttagagtgccctctttcctccaaatgaccgcatcacctctccagtaaggatctggaatttgactgaggctaagatggctgaaatgatagaaatgcaattcccactagggatagaaattaaacccattgagctacagcagtatgttataacagaatacaaggaagctaaaaatcatgataaaacaatgcagaagctggcagacaaaatagccagtgtagaaaagaatgtaaccaaactgatagagctgaaaaacactcttcaaaaatgtcataatgcaaacacaagtattaatagcaaaagagaccaagaagagaaaagaatattagagcttaaagactgtctttctgaaataagaca

SEQ ID NO: 403862 - DNA, 517 bp, Homo sapiens
cagctgaagccaccttataccacaatcaaaccctcaatgtcatcaaataggataaaagaaaagaaaaaccatgcaaagttcagcaacctcaaagattgaaggtagataactccacaaagataagaaagaatcagtgcaagaaccctgaaaactcaaaatgttagagtgccctctttcctccaaatgaccgcatcacctctccagtaaggatctggaatttgactgaggctaagatggctgaaatgatagaaatgcaattcccactagggatagaaattaaacccattgagctacagcagtatgttataacagaatacaaggaagctaaaaatcatgataaaacaatgcagaagctggcagacaaaatagccagtgtagaaaagaatgtaaccaaactgatagagctgaaaaacactcttcaaraatgtcataatgcaaacacaagtattaatagcaaaagagaccaagaagagaaaagaatattagagcttaaagactgtctttctgaaataagaca

SEQ ID NO: 403863 - DNA, 588 bp, Homo sapiens
aacttaggcatagtttattgctcttgttattttgttgctttcatgaatcatttacctttcagagaggatttcaactgtytcatatcagctgttccaatacttagccttcagccacaacaatcagattctttactcagagaaaatgtcatatatgttgatttgtcaggatgaattaagaaatgccaaacaagggttgttaaaggcacaaacatgataaatattttaaaaatttgttttacttttattatctgaatatttttgtcagaaaatatacaatattataactatattaaaatttttctaatttacatttgtatttttaaagctggatgtaaatagaggaaaataacaaatgtaaacaaatgaacctaccactaaggaacaaaaagcaagattctactgacatatttccaaaaaacatattttgggggtaaaaatagaggaaagaattagtaaattacaaattattagtagtaaaaaaaattcaaatatgtaaaactgtgagtcaagttttgcaaatatttcttccaggccatgtctaccattttggaaataagttattctcacttaaaatgtagttatgatact

SEQ ID NO: 403864 - DNA, 588 bp, Homo sapiens
aacttaggcatagtttattgctcttgttattttgttgctttcatgaatcatttacctttcagagaggatttcaactgtttcatatcagctgttccaatacttagccttcagccacaacaatcagattctttactcagagaaaatgtcatatatgttgatttgtcaggatgaattaagaaatgccaaacaagggttgttaaaggcacaaacatgataaatattttaaaaatttgttttacttttattatctgaatatttttgtcagaaaatatacaatattataactatattaaaatttttctaatttacatttktatttttaaagctggatgtaaatagaggaaaataacaaatgtaaacaaatgaacctaccactaaggaacaaaaagcaagattctactgacatatttccaaaaaacatattttgggggtaaaaatagaggaaagaattagtaaattacaaattattagtagtaaaaaaaattcaaatatgtaaaactgtgagtcaagttttgcaaatatttcttccaggccatgtctaccattttggaaataagttattctcacttaaaatgtagttatgatact

SEQ ID NO: 403865 - DNA, 536 bp, Homo sapiens
tgaatcatatccaaaacacagcatatccacaccacaaccagcaggtggattgaagaaagagagaataaggaacctgtgggcctaagccattactggggtccagagtgttggtcaagcagatattccctggaaagttctaattggtgaacttagaacatgcagacataagttctgtaaagtaacacctgtgattgagagatggtcactgtggtatatctgtgcagcacaygtagggcatacaaatcagttggttctatagtttgtatatttgaccctccaaaactcatgttgaaatctgatctccaattttggagatggggcctaatggtaggtgtttgggtcatgaatggcttcatgtcgtgatagtgttaatgagtgaattcttgctctattattttccacaggagttggttgttaaaaagagcctggaatctccccgtctctctctggcttcctctctcactcatgtgatatctgcacttggaggctcctcttctctttctgccatgaatgaaagcagcttgagaccctcacca

SEQ ID NO: 403866 - DNA, 562 bp, Homo sapiens
gtgaggtttctgaaaacaagagacaaaacactcagtacagaaaagacaaccacctgtcatgcaatgaacaagaaaaattatcttatgaatatgaaaagacaattatatgacataaaataaaaatgaactagataattaaattttcaaatgattttaaatcaccatcctaaaaattaattcagcagaaaatttaaaaattatctgtaaacaaacagacaaataacatctcaacaagacatgaaagttataaagaaaatgcaatgaagctgtagaactaaaaattaaataacataaatttgctgaatgtgctcaatgatagaataaaatgrcagaagatagaatccgcgaacttgagggtgggctcatgtaatttattcaatctgaacaatagagggaaaatagacaaaagatgaccaaagacttgtgtataattataaagtatccgaaattcagattactggagtctcataagaagaggataaagtggaaatgacacattatttggagaaatatggctgaaagctccctaaagtttgggacaaacataaaaatacaaatttag

SEQ ID NO: 403867 - DNA, 526 bp, Homo sapiens
tatataaacacatggaaattaaacaatatgctcctgaataaccagagggtagataaagaaattaagaaggaaattaaaaaattttctgaaacaaatgaaaatggaaatacaacataccaaaccctataggatacagtaaaaccattactaagagaaattttatagctataaatgcctacataaaattaaaaaaatgttcaaataaagaacataatgatacatattaactaggaaagcaagagaaaaccaaaccccaaatttatagaagacaaaaattaagatcagagcataaataaataaaattaatttcatttgttaaytaaaataacaatacaaatacaaaaaattaatgaaacaaaaagtttatcttttggaaagataaatacaattgactattcacttttttcagacttatggaaaaaaaagagaatacccaaatacacaaaatcaaagatgaaagaagagacattacaactaatactgcagaaattcagaggatcattagtggctactatgagcaactata

SEQ ID NO: 403868 - DNA, 593 bp, Homo sapiens
ttaccctactcaaactactctgaaaactagaggagggaatacttccaaattcattctaagaggactatattaccctgatttcaaaaccagacaaagaaaactacaggataatataatggatatatatagacgcaaaaatcatcaacaaaataaaagcaaattaaattcaaaaacacattaaaaagatagttcattgtaaccaggtgggatttatccttgacatgcaaagactgttcaacayatgcaaatcaataaatatgatatatcctatcaacagaatgaaggacaaaaacacatgatcatttccattgatgctgaaaaagcatttgataaaattcaacatctcttcatggtaaaaactctaaaaacactggggatagaagaaacataacctaataaaagccatatatgacagaatcatagctagtaccatactgaatggggaaaaactgaaagcctttcctctaatattgggaaaatgacaaagatgcccactgtcaccactgttattcaacatagtgctgggaattccagctagagcaatcagagaacagaaagaaacaaagggcatccaaattggaaaggaagaagtc

SEQ ID NO: 403869 - DNA, 629 bp, Homo sapiens
caaattggaaaggaagaagtcaaactattcttgtttgcagatgatatgatcttatatttggaaaaaactacagactcctccaaaaagctattagaactgataagcacattcagtaaagttgtaagatgcaaaatcagcatacaaaatcagtagcatttctatatgccaacagcaatctgaaaaagaaatcaagaatgtaatcccacttacaatagctgcaaataaaatgaaatatctgggaattaaggtaaccaaagaagtgaacgatttctaaaagattataaaacattcgtgaaataaattgaaaaagacacacagacacacacacacacagacacacacacacacacacacacatacgatagccatgtttatgctatgaaaaaatactgttaaactgtccatactacacaaagcaatctgtagattcaatgcaatccctaagaacataccaatgacatgtttcacagaaatagaaaaaatttatacgaaaccaccaaagacccagaatagccaaagctctcctaagcaaaaataactaaactggaggaatcacattaccttacttcaaattatactaaagagctatattaatcaaaacagygtggtactgccataaaaaacagaca

SEQ ID NO: 403870 - DNA, 569 bp, Homo sapiens
cttaacatggaagaatctgaaaacattatatttagtgaaagaagccagacccaaaaaagtacatactgtttaaytgcatgaatttctagaacagacaaagtcatccatggtgattttaatcagaatagtagttgtttcgggagtggctgattgcctgtagaggggaaaaagggaatgttctgtggttatgaaaatgttccatacaattaacccttaaataacatgggtttgaactgcaagagtccacttaaagttttcttctgtctccgccacccttgagatagtcagaccaacccctcttcttccccctcctcctcagcctacattatgtgaagacggtgaggttgaagatctttatgatgagccatttctacttaatcaatagtaaatacattttctctttcttatgattttcttaatcacattttctttcctctagcttattataggaatccagtgtataattcatataacataaaaaacatttgttaatcaattgtttacattatcagtaatgcttctggtcaacagtaggctatttgtatttaaggttttggggagttaacagt

SEQ ID NO: 403871 - DNA, 596 bp, Homo sapiens
gcagtaaattatacgtaacataaaattaccattttagccattttaagtgtccaattcagtgccattaagtaccttcacaatattctgcaaatattaccattatgtatttctggaattttttctctctttttttttttggaaatggagttttgctcttgtcacccaggctggagtgcaatggcgtaatcccagctcactgcaacctccacctcccatgttcaagtgattctactgcctcagcctccagagtaactgggattacaggtgcccaccaccacgctcggctaatttttgtatttttagtagagacagggtttcaccatgttgttcaggctggtcttgaactcccgacctcaggtgatccgccttccttggcctcccaatgtgctgggattacaggcatgagccaccatgcccggccaatttccggaattttttatcatcccaaatagaaactctatctattaaacaataacttcccatttttcattcccatgtcccgtgtaaattgttataattwcatctctacatggttgcctattctaggtacctcatataaatggattcatacaatattctctcttttgtgtttggct

SEQ ID NO: 403872 - DNA, 566 bp, Homo sapiens
catatcttgttgaagaccatcaaggcggttcatctatgagtattcaaaaagcacaggcttactgggcttggggtccctggtaaagaagatacagcttagatcacaacactcaagttttttgaatacacaaaaagtcttcccaagagtgatgggtactaacaggcccagactgtgaagactacaataaatactctttaatgcytatacacagatgaacttctataagtattaagaccatccaagaaaacataaccttaccaaatgaactaaataaggaaccaggtaccaatcctggagaaacagaggtatgtgacttttcagatagagaattcaaaatagctgttttgaggaaactcaaagaaattcaaagtaaaacagagaaggaattcagaattctatcaaataaatgtaagaaaggcattgaaataatttaaaagaattaagcacaagttctagagctaaaaaatataattggcatactgaagaatgcatcggagtcatctaacagccaaaatgatcaagaggaagaaatagtgagcttgaagatgggctatttgaaaatgcat

SEQ ID NO: 403873 - DNA, 504 bp, Homo sapiens
gaaagctattggtggatctaccaatctgcaatctagagcatgatggccctctttttacagctccactaggcagttccccagtgtgaactctagtgggggcactgactccacatatcccttctgcactgctctaacagtggttctccttgaagtctccacccttgcagcataattctgccyggacatccaggaattttcatacatcctctgaaatctaggtggaggttcccaaaactcaattcttgacttctgtgcacccacaggcccaacaccatgtggaagctgccaaggcttggggcttgcagcctctgaaccaacggcctgagctctatgttggccccttttagccatggctgggatgcagggcaccaagtcctgagacttcacaaagcaacaaggcccttggcctggcctatgaagcaatttgttccttctaagcctccaggcctgtgatgggaggggctgccctgaagacctctgacatgccctgaataaactttcccc

SEQ ID NO: 403874 - DNA, 504 bp, Homo sapiens
gaaagctattggtggatctaccaatctgcaatctagagcatgatggccctctttttacagctccactaggcagttccccagtgtgaactctagtgggggcactgactccacatatcccttctgcactgctctaacagtggttctccttgaagtctccacccttgcagcataattctgcctggacatccaggaattttcatacatcctctgaaatctaggtggaggttcccaaaactcaattcttgacttcygtgcacccacaggcccaacaccatgtggaagctgccaaggcttggggcttgcagcctctgaaccaacggcctgagctctatgttggccccttttagccatggctgggatgcagggcaccaagtcctgagacttcacaaagcaacaaggcccttggcctggcctatgaagcaatttgttccttctaagcctccaggcctgtgatgggaggggctgccctgaagacctctgacatgccctgaataaactttcccc

SEQ ID NO: 403875 - DNA, 615 bp, Homo sapiens
atttggaaaacatcagactggagaatttaaaataattatgattaatatgctggagatttccacttttgaaagtggacaacacataagaacataaaggtactataagcagaaatatagaaactctaagaaagaataaaaaagaaatgttgrctgggtacagtggctcacacctgtaatcccagcactttgggaggctgaggtggacagatcacctgaggtcaggagtttgagaccagcctgaccaacatggagaaaccccgtctctactaaaaatacaaaattagccgggtgtggtgtcaggtgtctgtaatcccagctacttgggaggctgaggcaggagaattgcttgaacctgggaggcagaggctgcggtgatctgagatcgcaccattgcactccagcctgggcaacaggagggaaactccatctcaaaaaaaaaagaaagaaatgttaaaaatcaaaaacattttcataggaatgaggaagtacactggatgccaccaagaagagaaccaatgaacatgaagatatgccaatagaaaatttatagactgaaatgcaaagataacatttaacattaattaaaaattatgtaatgtccaagaagctttggaa

SEQ ID NO: 403876 - DNA, 580 bp, Homo sapiens
agaacaacccatctcccctagccaygtggaataaaacagtatataggagtcatgactgtgatgtcagccaggcaaacctgctatgtgtgtctttgctgttagatatattcagattgcctaacagatattcaaactggctcatccccagcactcaatccttgaaatccaaattgtttatatggcttttcccaaagtaacatagaagtgtatttcttggaattacaacaacaaaaatagtaggacacatagttaatatttaattaaggcttatcatgtgccagacatttttctcatggctttatatgaatgatataatttaattgccaactaagttcatgaatgggctaaaatttgaatgacatttcttcacttgacttaactaatttacaaaaaaatttaggtgatttttcccatgatgaaacagtttgcactaaatgattacaggttatgaactaagctaatatactctggagactgttatcacaatactttgctctattgccttacaaagcaaaactacataggtcattaaatgttccctatagaaaattattcagaaaaaaataaacactaacatgta

SEQ ID NO: 403877 - DNA, 634 bp, Homo sapiens
aggcacacacatacaaaccatttcatagttgcacctaggaacaataatatgtattcataacctagaaattgaatatagttctgatgctgagttatttaggcattctggtaaaagacaacaatgcacattatctaaggatcttgagtcaactccttaacatgtattgggttctacattagaggcaggtcattaaagcaactagagaccaagctctctggcaccagtatatcagggatcagaatctggctctgactatggtcacattactctactttggttgccgtatctgcatggagcattgaatatatgtcattgggttactgagagaataaaatacstgcaaaacattgaaacaatatcagattaactatgttagcatgtaaaatatgcagtgtgaattaaattttcaaatgctgaatgtttctggaagaaaatagaagtgctccaataatcctaggtaattcagtagtctttggtaagataattagtatgttattttcagtgagagaggaaagaatacacaatcacatatcccaagctagctaggtttatgtagttccatactggccttgagctaagatgattgcaggaagtaacaaaaaaatgtgtttgtgggcatgcgtgtttgtgttta

SEQ ID NO: 403878 - DNA, 615 bp, Homo sapiens
ttaaatgtgcttatggtctatttgccttcacaattcctcaattcaattctcattttgtgaaagtgattgctgttggtaacaaaaagagagagccttaggggaagaaaataatctttttcatgcctatttaattctaagccctatgtgtttttaagaagaataaaccaatacacacaaaacagctatataaattaatgacccctggtgattatggtctaaatacttataactaaatacatatatttttatacataaaaattcagaaataattacacccatagacccttagaaatgaattgctaaaatcccaacatagatataatttcctcttgactcttatcattcaaagtataaaatattttcatatttaagcaagtgtatatgcatactttttttaaagaaaacattccaaaagaagataaatctggtatggttagcacttttgtatttartgaggacatggagcacaaactgaaataaaaagctgagtgaaatatgagagaataaatttactcaatatagacaattaagttttctgttttctttcatgataaataatttaagtgaacttttcaatgaaaactgaattaatacagtggaaagaatgaaatggac

SEQ ID NO: 403879 - DNA, 506 bp, Homo sapiens
tatgccagtaatgagaatgttatccaatgcagattaaaaaataaatccacttctttaaraaatgcattaggaatatgacttagtataaataaacttgtcaaaacacatggaatgccaatagatatcataagttgaaaatcttactttacaatgataaaaattagagtagttcagaaattattggaaaagagatgtccagtatagtttattgtcttatatcatcaaataatactacactgccctgtagtagtcttcattttattgttagttgttgaaatataaaaaagttgatgatacaacatctttgaagctttctagctcatgtcagaccataaatctagaaaattccatactacaagttcaccttccacatctccaccactgcccaatgtgtataaagtctttcttgagaatccagttatatagtagcttattacaagtgtttgaagaggataatcttttgctagagatgtaaggcgacaaaatttacaattataatatacata

SEQ ID NO: 403880 - DNA, 594 bp, Homo sapiens
tttttcccttcaagattattgaatctattctgagttccttgtaattacatacatatttcaggatcactttgaccatttctaaaagaagtcaggcagaattctgatagagattgcattgactctgtagatgaatttggattctattgccatcttaacaatattaagttttcttctccataattatgaaccgtttcctatttatttagttcttcttaagttctgtagctttcagaatataatttttgcacttttgtgttaaatttattcctaaatattttattattcttaataacatggtaaatataattgttttattaattccattttctcgtttttcactgtaaatgtataggaacacaattggcctttgtatattaaccttgtatcctacatctttgctgaattcatttataagttcaaataaatttttsgtggatctgtagggtttcctatttgaaagactatgttatctgtaaaatagagatagtttcacttctttctatcaaatttgaattctttttatttcttttttttggtgtctaattgctcaggctgtccttcactcttgatccatccatggagaccttcagcaga

SEQ ID NO: 403881 - DNA, 544 bp, Homo sapiens
taaatttttggtggatctgtagggtttcctatttgaaagactatgttatctgtaaaatagagatagtttcacttctttctatcaaatttgaattctttttatttcttttttttggtgtctaattgctcaggctgtccttcactcttgatccatccatggagaccttcagcagaatttagtgacacctgaatatggtgtgtatttcattccaggtgagcaactccttcttgaggcactaccttcttaaaatacaagcatgaagatgatggatgytatttgttgtgtgccagcaggctgggtatgggcaccagctgcattccattatctgactataataaataccttagagtccaagcagttttgcagttccttgaaagctgaagaaagcttggcttgaaagcagccctttacactggaaaagcagaacttatatggtaattcattgtccatacaacttagagtgaggttctgaggtatttcctctcattactccaaactgtaaaattaataacattggatggtcatttgttatgtgagcttatta

SEQ ID NO: 403882 - DNA, 581 bp, Homo sapiens
attggataattgggtgattacactattggtatcaaaggatagaatagtaaggtgtttaaggataagtgttcttgaagttctattgtggtttaagggaactaatttgagattgctttgaaatggccaataaaattctgccattataattttaaattaaatttcggtatcatatgaaagctacaaggattaaggaggcaaatttatctaatagaagagctaggcttatatttcattccaaataagatgaaaatatgcttaatattccagargcttcaggttgtaacttcttttctctttccgtgttgtcaggctgtgtttgactccatccgccagtctcaataccgatactcaaaattctcctaggattgagcgttacatgcatcttccacattattaaaaccatttggaataataattccacaaagaaaagaagatcagaatgtatttaaggaacaaatcaatgatttttattttctaagataattttttatggatgaaaaatgtgctcagtgtattttaaataatggaagatgtcaagaagttgaaactggttgagtcaaggaggtcaaactcacagtttg

SEQ ID NO: 403883 - DNA, 597 bp, Homo sapiens
atgttcccttctgaacaccatgcagtgaaattaatacctactctttcaaaaaaggccaggcacggtggctcactcctgcaatcccagcactttgggaggctgaggcaggcagatcatcacctgaggtcaggagttgaagaccagcctgaccaatatggygaaaccctgtctctacttaaaaaacaaaaattagtcagatgtggtggtgcacacctgtaaccccagctactcgggaggctgaggcaggagaatggcatgaacttgggaggtggagcttgcagtgagctgagatcgcaccgctgcactccagcctgggcgacagcacaagactctgtctcaaaaaataaaaataaaacaacaacaacaacaacaaaaaagaggggggttataacatatttattaaatactataaattcaacaatgtaaacacctacatggtaaatattgattgttttgaagctaaaaaaaatacagaaacaaagaaaaatattaagttgactctagttcagttagcttgggaattgatttttgatgaaattcataagaacaaaaactgcacattgatttgtgtttgtactctacatttctactccaaag

SEQ ID NO: 403884 - DNA, 657 bp, Homo sapiens
ccttctgaacaccatgcagtgaaattaatacctactctttcaaaaaaggccaggcacggtggctcactcctgcaatcccagcactttgggaggctgaggcaggcagatcatcacctgaggtcaggagttgaagaccagcctgaccaatatggcgaaaccctgtctctacttaaaaaacaaaaattagtcagatgtggtggtgcacacctgtaaccccagctactcgggaggctgaggcaggagaatggcatgaacttgggaggtggagcttgcagtgagctgagatcgcaccgctgcactccagcctgggcgacagcacaagactctgtctcaaaaaataaaaataaaacaacaacaacaacaamaaaaaagaggggggttataacatatttattaaatactataaattcaacaatgtaaacacctacatggtaaatattgattgttttgaagctaaaaaaaatacagaaacaaagaaaaatattaagttgactctagttcagttagcttgggaattgatttttgatgaaattcataagaacaaaaactgcacattgatttgtgtttgtactctacatttctactccaaagacacctttcaatgcttattcacaaactgctgtcagcatctgtcttcaaagataaaataaagaaaag

SEQ ID NO: 403885 - DNA, 600 bp, Homo sapiens
atagctcagtgagcttagttttattacagatattatccaaatgctttttaatcatccaagatcatgatgagcaccagagaggcaatgttatttaacaaagacacttaacagtgaattaaacggagatggtactgataaataaagttgtttgagcttcctgctgcagactcactctgtttgcaattattttggggatgaaactgagatggcttgaatcctgagattcaggcctcctttgatgatgtattaaaatcacattgattgtaaccttttaatcacaatatgtgtgataattcccatagggcctgagattgagttcaatttggtgttaatatcacatgaaggaaatggtgataaacaatgctggggtaaaaatttctaagcaatttgcaaagaattttttatttcaagcttattttggaaataagaggtcaaactgaaargagtttaatcatcagtctattcatatattcacatacaaatatgtcaacagggccaccttgaacatagcactttctttgttgccagtgggcaatatttgtgtttgaaaaccatttgtctacatttcaatactaactgctaccaattaaaatataactg

SEQ ID NO: 403886 - DNA, 600 bp, Homo sapiens
atagctcagtgagcttagttttattacagatattatccaaatgctttttaatcatccaagatcatgatgagcaccagagaggcaatgttatttaacaaagacacttaacagtgaattaaacggagatggtactgataaataaagttgtttgagcttcctgctgcagactcactctgtttgcaattattttggggatgaaactgagatggcttgaatcctgagattcaggcctcctttgatgatgtattaaaatcacattgattgtaaccttttaatcacaatatgtgtgataattcccatagggcctgagattgagttcaatttggtgttaatatcacatgaaggaaatggtgataaacaatgctggggtaaaaatttctaagcaatttgcaaagaattttttatttcaagcttattttggaaataagaggtcaaactgaaaagagtttaatcatcagtctatycatatattcacatacaaatatgtcaacagggccaccttgaacatagcactttctttgttgccagtgggcaatatttgtgtttgaaaaccatttgtctacatttcaatactaactgctaccaattaaaatataactg

SEQ ID NO: 403887 - DNA, 601 bp, Homo sapiens
acagatgccacagatcaacagaaataacatattgttttattgggcctgctttcattctctcactcatttctcttaaagatctcaaccatcctatgtatggcatatagctatcatagatgacaataggtcagatcactaattgaaattccctcctccatacaaaattatttctaataatcatgtaatgatcaataatcataacatccttttgaatcattctttagttttgaaaacaactatttagaaagagtgtcaattttaaagttatttctgascctcaatattatatttcttctatgaactaccaaagcataccatatgcacttaaccagatgttatactcacagttcacttcttcaccgttttacattttaatcacacataaaatctcctagtgatcacacacaatgagggaagtgaagaaactcaagttctgtttcttcaccttaaattgtgctatcattttttattacaaatctctaaacacaagagcatattgtaccataagggttagagatgtgaactgcacctagaggaagctccaacaattctaaacaggaatttactcaaggcgaagtgtggagctgagtccatgtgcatt

SEQ ID NO: 403888 - DNA, 601 bp, Homo sapiens
acagatgccacagatcaacagaaataacatattgttttattgggcctgctttcattctctcactcatttctcttaaagatctcaaccatcctatgtatggcatatagctatcatagatgacaataggtcagatcactaattgaaattccctcctccatacaaaattatttctaataatcatgtaatgatcaataatcataacatccttttgaatcattctttagttttgaaaacaactatttagaaagagtgtcaattttaaagttatttctgagcctcaatattatatttcttctatgaactaccaaagcataccatatgcacttaaccagatgttatactcacagttcacttcttcaccgttttacattttaatcacacataaaatctcctagtgatcacacacaatgagggaagtgaagaaactcaagttctgtttcttcaccttaaattgtgctatcattttttattacaaatctctaaacacaagagcatattgtaccataagggttagagatgtgaactgcacctagaggaagctccaacaattctaaacaggaatttactcaaggcraagtgtggagctgagtccatgtgcatt

SEQ ID NO: 403889 - DNA, 591 bp, Homo sapiens
atttaatgttaaatgactggtaataaagtggagaattaagattcagcgagagggaggggaaatgaataaaatttccaaattcttttctctccctgttattcataccacatgctttatggaatcttttatcattctgacacttgccatttatatccccagtgtcctctcctgccagatttattytactcttagtgttgaagagaaataaagctgcttatgcaattctctagcttgccctgaaaaatgtagaaccccatgatgattttcttagtaatgaatcccttgaattcatcagagcaaagatgtgcatcaccactacacatcatcattaccttgaacacgggaagcttccctgttcagcccagatgtccccaagctgcaacaacctgatggcacaaatcatggtggaacaattgtggagactccaagcctgggcagaatctcccccagtgatttctgggagtctccagaggggcctcatctgtgctcagggacatgtctgctcacatcctacttctgctgctggtgacttctgagataatgctctctgtgtggcttagtattccttcaaccttcagctgcctgtggcct

SEQ ID NO: 403890 - DNA, 564 bp, Homo sapiens
gttcctaccatgtgtgtccttggacttttccactctttgcttgtcttcacagccagtctgtaagctcctcaaaggcatgggtgggatctcatatttttcttttcagttcagtgctgagcttggagtctggcaaatcacaggtttttatcaataaatgtccagctgggtacattcctccctctmctaaacacaactcctgccggtcaggcactgtgtcctagaacctttgccatgacgctgatggccatgctttcacttctagatcaccatttctgccacttatgtgctttgacaggtccctgaatccttttggaattcccagaagcacctggaaagtttactgctaaattgttaagaccggaagagcctttgtttcacttcacttttgaaaactgagattccataataagaatttattttgtgtttcttggtggctaattataaacctgtaagtaggattaaaaaaattcaggccacctccactacctgagaggttgctttgaatgaatagttcttgcagaaaagaaacagggacccagaatttctaattctgttggactaatt

SEQ ID NO: 403891 - DNA, 534 bp, Homo sapiens
tcctcaaaggcatgggtgggatctcatatttttcttttcagttcagtgctgagcttggagtctggcaaatcacaggtttttatcaataaatgtccagctgggtacattcctccctctactaaacacaactcctgccggtcaggcactgtgtcctagaacctttgccatgacgctgatggccatgctttcacttctagatcaccatttctgccacttatgtgctttgacaggtccctgaatccttttggaattcccagaagcacctggaaagtttactgctaaattgttaagaccggaagagcctttgtttcacttcacttttgaaaactgagattccataataagaatttattttgtgtttcttggtggctaattataaacctgtaagtaggattaaaaaaattcaggccacctccactacctgagaggttgctttgaatgaatagttcttgcagaaaagaaacagggacccagaatttctaattctgttggactaattactgacccttcaaggaawacatggcttgtttcatt

SEQ ID NO: 403892 - DNA, 580 bp, Homo sapiens
acatctgtgagccccgcggcaggctctggcttgaagaagttaggacagctgaaggtggtggaaggaggtgaagaagcttggagacagggaggccacctgcactatttgccagtggttgtgcgtttgcagctctttacaggatatataagcccttgtgaaggacagacgytgtcaccatggattccaataaggctttcttagcctgcctcaggagggaatgactgtccttgcattgataactgagcaggacccggggaagatcctgttgagctggagccaggccagtgtgttgccaaggccgtggggctagccttgggggctgggttgggcctgggagcaacgggaaggaagtgaagtcatttttcagctttgtgttatcagaccattgcctagaagacatatttctggtgggagccttgttacctggtaactcattcaacttctgaatgctggcctcttgccctcatcttgtctcccctcctgcaggatctcccagggccctggactctggctggcaggaggcagaagcctgggccgctaggaagaggggagtaggagcctcaggattgtcttctgctct

SEQ ID NO: 403893 - DNA, 529 bp, Homo sapiens
tgctggggtgtcactaacagtgtactaggatagatggacaactttatatgataaagacagttttagagctttacgagacttttgacctcttctgggagctgtcctgattcctcttcaaaccgaatgatagcaccttttgtgtgttaagtagcctaaacagtcatttgtttagttaccacctgctggtgtgtagccttaggagaagagtgtttactgttgagtggttgttctgctctgccccttggctaaggattcctgctttccattaaatggaatgactaccctctctttttgtctttgaactcaaatggaagtcatgttatctttacatctttaaagcttttccttccaaattgcctagttgatgcatggtcactaatccttgtagtagaattaaccctaattgaagatttagcaggtggattttggctctcataatgcaagatgtcttaagaattttgcagaagagagatgcaataaccatataacrtatctcctttttgtccataagtatggaacaaagactatg

SEQ ID NO: 403894 - DNA, 565 bp, Homo sapiens
gaacatgcctttgtcacgatgctgataacagttaccactagaagcgttctataatcaagttggtttggcaactgactcartaatgaaggttaaatagctttctttatagccggcatcttagtttttcaatatgctggtacgcattgagtatttctgagaggagaaggtagtataccatctttcccacatccctttggcagggacccctttcacgagatgttatcttacaacactagtgaggaacaccagtcaatgccttagatgtatgaagccatagcaggagagaatttggaacctggattgggacaggccaatggaaagctttggattcattttattccatcctagcagcatggatgaacctgtgctgggagtggctaaccagagcctgtgagttctgctgcaagggaagaagctggatttctgaagaaatgacaaaagcattcaggaaagaaagaggcagcacctcagcattatgctgccaaaggccccgggccagatggtacctgtgcccaccaagtaaaggcttctctgtcttttatctctctccttctgcgtgctgaac

SEQ ID NO: 403895 - DNA, 565 bp, Homo sapiens
gaacatgcctttgtcacgatgctgataacagttaccactagaagcgttctataatcaagttggtttggcaactgactcagtaatgaaggttaaatagctttctttatagccggcatcttagtttttcaatatgctggtacgcattgagtatttctgagaggagaaggtagtataccatctttcccacatcyctttggcagggacccctttcacgagatgttatcttacaacactagtgaggaacaccagtcaatgccttagatgtatgaagccatagcaggagagaatttggaacctggattgggacaggccaatggaaagctttggattcattttattccatcctagcagcatggatgaacctgtgctgggagtggctaaccagagcctgtgagttctgctgcaagggaagaagctggatttctgaagaaatgacaaaagcattcaggaaagaaagaggcagcacctcagcattatgctgccaaaggccccgggccagatggtacctgtgcccaccaagtaaaggcttctctgtcttttatctctctccttctgcgtgctgaac

SEQ ID NO: 403896 - DNA, 565 bp, Homo sapiens
gaacatgcctttgtcacgatgctgataacagttaccactagaagcgttctataatcaagttggtttggcaactgactcagtaatgaaggttaaatagctttctttatagccggcatcttagtttttcaatatgctggtacgcattgagtatttctgagaggagaaggtagtataccatctttcccacatccctttggcagggacccctttcacgagatgttatcttacaacactagtgaggaacaccagtcaatgccttagatgtatgaagccatagcaggagagaatttggaacctggattgggacaggccaatggaaagctttggattcattttattccatcctagcagcatggatgaacctgtgctgggagtggctaaccagagcctgtgagttctgctrcaagggaagaagctggatttctgaagaaatgacaaaagcattcaggaaagaaagaggcagcacctcagcattatgctgccaaaggccccgggccagatggtacctgtgcccaccaagtaaaggcttctctgtcttttatctctctccttctgcgtgctgaac

SEQ ID NO: 403897 - DNA, 623 bp, Homo sapiens
tgcagccactccccattcctgttcctaggcccagacaaccactcatctgctttgtgtctcaatagattgcaagaaattccttctaagttcttgatttgaagcccctttacatttttcaatggtcactataacttaccgttgagtctcctttacaacctagatgtatatttgaacaattagacattgtaaactaagtggcatygaaaactcctcccctcctcactaacaaattgatagcatctacctctgattacagtctaaaagttatcatttttaggtacaacctaaataccaagatttattttaaactcagtgtcgattcagttgggttttgttttgcaatgtgaaaaacaggaagaagttggagtggacagattacatgatggcaccctgagaggattcaaacaagtcaagtcacttgggcaaatcaaacaagagctcagacaaacatccttttcctcgatccccttctctcaaaccccagggacaagggttcctccggagaacaattacacaggacagcctgcagaagttctggatgttacttcctacctaggtcagataggagtcagagtttacaccttttactatttttattggcattcatttagaggtcattacct

SEQ ID NO: 403898 - DNA, 589 bp, Homo sapiens
ggccagcaaattttgaaatttgaaaagcaatacagttatttaattcaatgatactctattgattgtaaattcattttaatctttaaaccatccttctgattatatgaacaaatgcagcaaaatttaacaactatttctttctcttttttttttgttttttgttttttgtttgtttttgagacagggtctcgytctgtggtctaggctggaatgcagtggcataatcacagctcaccacagcctcaaactcctcggctcaagggatcctcctgccttagcctcccaagtagctgggactacaggtgcacaccacatgcccagctaatcttaaaagtttttttgtatagatggggtttcaccatgttgtccagcctaattttgaactcctgggctcaagcaattctcctgccttgacctcccaaagtgctgggattataggggtgagccatcacaccaggcaaaactctttctttctttattgttgagtttttggaaaagaagagagacatgaatgatacaaaagggacataatagaaaaggaaaatgatcaataattagagaaaactcttatcctttctttggctggttt

SEQ ID NO: 403899 - DNA, 573 bp, Homo sapiens
agatagttcagagttcaaatctagtcaagaaggaggagattagaaaacattttggattttccaatgaaaccctaagagccatgttaccagaataaactcatgatccaagactccaagccatgccccaaatctaagggtaaactcaaataagcctccataacaaattccaaaatcaagcctcaatagaatcaagaacatccaccaaatatttaaatatttgccakagtgaaatggagtactctttatgggaagataatagaatctagagtttgtacaatatgtcatacataatgttcagaattcaatacacacttactagttatgcaaagatgcaggaaaatgtgacctagaaccaagagaaaaacaggcaatagaaatagagtttccattactcagattctggaattagcaaagaaagaatttaaaaacagctagtatatttatgttaaaagattaaacattgggtacacatcgacattaagatgggaacaatagacattggagactacaagaagcgggagggaggaagggaagcaagcactggaaaattacctgttgggtactatgctcatt

SEQ ID NO: 403900 - DNA, 573 bp, Homo sapiens
agatagttcagagttcaaatctagtcaagaaggaggagattagaaaacattttggattttccaatgaaaccctaagagccatgttaccagaataaactcatgatccaagactccaagccatgccccaaatctaagggtaaactcaaataagcctccataacaaattccaaaatcaagcctcaatagaatcaagaacatccaccaaatatttaaatatttgccagagtgaaatggagtactctttatgggaagataatagaatctagagtttgtacaatatgtcrtacataatgttcagaattcaatacacacttactagttatgcaaagatgcaggaaaatgtgacctagaaccaagagaaaaacaggcaatagaaatagagtttccattactcagattctggaattagcaaagaaagaatttaaaaacagctagtatatttatgttaaaagattaaacattgggtacacatcgacattaagatgggaacaatagacattggagactacaagaagcgggagggaggaagggaagcaagcactggaaaattacctgttgggtactatgctcatt

SEQ ID NO: 403901 - DNA, 573 bp, Homo sapiens
attgcatgcaacattttaaaggcataccaatttaatttgaattgataccaatttaactttaattgcacacaagtggacttataaatatctccacctcctgtgactttatgctatttatgtccagagtacgtctttatacaacatgtactcaactaacatagatttataattatttttatgcatttatcttttaaattctccagaaaagaaaaaagtgaagttacaaaccaaaattataataaaacgtttcttttttaaccatgtgcctaagcttactgaagatctttatgtctttatatggctttgaattaccatctagaatgattttattttaatctaaaggatycctagtctttagcatgtcttgtagggcagatctagtgataatgaactccctccacttttccttatctgggaatgtcttaatttctccttcatttttgaaagacagttttgccagatatagaattcatgattgacagatttttttttttctttcagcactttaaatatatcacctcactgcattctggcctcaaaggtttttactaacaaatccaccaataattttac

SEQ ID NO: 403902 - DNA, 469 bp, Homo sapiens
ggggtccaggaaacagacatgaattctgatactgtggctgctgcttttgcagcaagtaagaaagtctttcatctctggtctaggattcttatgtttcctctaagcatccacaaaattgtgacaaactaatgtgctggcttttcagcagagtaaaatgaaatcccagacccttcacggtccttgatagccagcatagaatagttaagcagcaaatatttatgtgacaatcactttcttaaaaaaaawaaaacactttttgtacaaagcagtgacagtagctgaaattgctaaacaaaattctattctaaaaatttgccatcttaactagatagctaaaattttctaatgtgtgaaagaaggggctacacactcacacagacaatgagaaacttggtagtgggtggccactttgtttctaggtcatccactagaggtacatccccaaagaggtgtatccttggtcagaaaa

SEQ ID NO: 403903 - DNA, 469 bp, Homo sapiens
ggggtccaggaaacagacatgaattctgatactgtggctgctgcttttgcagcaagtaagaaagtctttcatctctggtctaggattcttatgtttcctctaagcatccacaaaattgtgacaaactaatgtgctggcttttcagcagagtaaaatgaaatcccagacccttcacggtccttgatagccagcatagaatagttaagcagcaaatatttatgtgacaatcactttcttaaaaaaaataaamcactttttgtacaaagcagtgacagtagctgaaattgctaaacaaaattctattctaaaaatttgccatcttaactagatagctaaaattttctaatgtgtgaaagaaggggctacacactcacacagacaatgagaaacttggtagtgggtggccactttgtttctaggtcatccactagaggtacatccccaaagaggtgtatccttggtcagaaaa

SEQ ID NO: 403904 - DNA, 470 bp, Homo sapiens
gctgaaggatactgagagaaggcaaagaacagagaggccgtgggcaagctggggccatgaatacccaaccgttyggaagggaggccaaaaagaaatacgaggtagggatgagatgttgaagaagcaacgtagaggagtggaatcacacgaacgagtgtggcaccctctctgtgtcctgcagactcgcactggcaagagcgcgaggtaacagcctgttctccagctgcccggaggctggatgaccttcacaggccccaaattctaacctctagagcctgccatctccttcctcccttatattcctgtttgggtggtgtttcccagactcctgtgggatctggacgcttgtttccaatatttgaaaattatttccacaaaatgaaatcctttcattagtatcatatcacttgccctgtccatactactcattactaggggtacctcgagtaagcctcgcgccttgttaccaa

SEQ ID NO: 403905 - DNA, 470 bp, Homo sapiens
gctgaaggatactgagagaaggcaaagaacagagaggccgtgggcaagctggggccatgaatacccaaccgtttggaagggaggccaaaaagaaatacgaggtagggatgagatgttgaagaagcaacgtagaggagtggaatcacacgaacgagtgtggcaccctctctgtgtcctgcaractcgcactggcaagagcgcgaggtaacagcctgttctccagctgcccggaggctggatgaccttcacaggccccaaattctaacctctagagcctgccatctccttcctcccttatattcctgtttgggtggtgtttcccagactcctgtgggatctggacgcttgtttccaatatttgaaaattatttccacaaaatgaaatcctttcattagtatcatatcacttgccctgtccatactactcattactaggggtacctcgagtaagcctcgcgccttgttaccaa

SEQ ID NO: 403906 - DNA, 641 bp, Homo sapiens
agagattttaaattaataaattcggttgaacaaaatcttgattcgcagtcctgccccattcctagcgctggcaggttcaggctcaggagtgagatgcgatcacttgtcgagaaactgagaagtcacgtgtgtttcatccatgagactgtgatgcgagtgagtttgctacccagccacagtgaaacttagccagcgtctgcatgttctattttactgatgggatagcactgtaggaggcaaaaggagattgtgaaatgacaccgagatcatagtgataatcttatcatcaacaaaaagagtcaaacgctatagaatgtttgaagagagttattctgagccaaatatgagtgaccatggccccaggaacagtctcccgaggtcctaaggacatgtgcctaaggtggtcaggctgcagctcggttctgtacattttagggacacatgagacatcgatcaatacacgtaaggttcacgttggttcagtccagaaaggcagaacaactcacattggcaggggcagaagamgtggatttgaagattttctgattggcagttggttgaaagagtccagttattatctaaagagctggaatcagtagaaaggagtgtctgggttaagacaaggggttgtggagaccaag

SEQ ID NO: 403907 - DNA, 540 bp, Homo sapiens
tccattttgagaaacccaggtttcagctgccactgcttgtgtttcttgctcaatccctcttgtgtccatctccaacaatcctctctcagagacatccttcaaatctttgctaaaatgtcaccttcacaaagaccttttcttactgtcttatttaaagtggcaggcctcctctcccccatcrtggcatcattttaccccctggcttttatcaccacctgacatgccatatattttcaccttgtttattgccagcacccgcctaccccactacaaaataagctccatgagggagctttgtctatttagtccactactgtatcctcaatgtctgcaaaagtgtctagcacataatcaacacttcataaacaggtgttgaataaataaatccatcaagcatttcacacagcattttccccaaagcaggcagttaggaaatatttatttgagctaacacagctatgttttcatcagttcaggaaagtggaaggtcaagggtcacttatagaaggtgccaccagagcctagggtagctcaccaact

SEQ ID NO: 403908 - DNA, 540 bp, Homo sapiens
tccattttgagaaacccaggtttcagctgccactgcttgtgtttcttgctcaatccctcttgtgtccatctccaacaatcctctctcagagacatccttcaaatctttgctaaaatgtcaccttcacaaagaccttttcttactgtcttatttaaagtggcaggcctcctctcccccatcgtggcatcattttaccccctggcttttatcaccacctgacatgccatatattttcaccttgtttattgccagcacccgcctaccccactacaaaataagctccatgagggagctttgtctatttagtycactactgtatcctcaatgtctgcaaaagtgtctagcacataatcaacacttcataaacaggtgttgaataaataaatccatcaagcatttcacacagcattttccccaaagcaggcagttaggaaatatttatttgagctaacacagctatgttttcatcagttcaggaaagtggaaggtcaagggtcacttatagaaggtgccaccagagcctagggtagctcaccaact

SEQ ID NO: 403909 - DNA, 650 bp, Homo sapiens
tatattttctattgattttctaatctctatgatatgtatttctgctctgatctttattttttccttctgtcttctaactttgggcttggtatgttttctatttttcttctttcttttatttccttgaagtataaagttatrttgttttttcagatctttttctcatggtaggtatttatcattaaagaattccttattagaattatttttgctgcatcccataagttttggtacgttgtgtttctatttttgactcaagatatttttccattattgtatttgattatatttctgcctttcttcagttctgttaatatttgctttatttaattaagcattccagtgttgggtgtgcatattttaataattgctatgtccatttgacatttgataaatttaccactgtttatgatataatgtccttctttgtcccttgtggcaatttttttttacttaaattctattttttttctgatgtaagtatagtcacgaaagatctcttttgattaccatctgcatgggatatccttttctatccttcacttttagtctatgtgggttctcaaagttaaagtgagtctcatataggcagcgtatacttagatcttgttttcccatttagccactccgtattttcatggaaaagttaa

SEQ ID NO: 403910 - DNA, 650 bp, Homo sapiens
tatattttctattgattttctaatctctatgatatgtatttctgctctgatctttattttttccttctgtcttctaactttgggcttggtatgttttctatttttcttctttcttttatttccttgaagtataaagttatattgttttttcagatctttttctcatggtaggtatttatcattaragaattccttattagaattatttttgctgcatcccataagttttggtacgttgtgtttctatttttgactcaagatatttttccattattgtatttgattatatttctgcctttcttcagttctgttaatatttgctttatttaattaagcattccagtgttgggtgtgcatattttaataattgctatgtccatttgacatttgataaatttaccactgtttatgatataatgtccttctttgtcccttgtggcaatttttttttacttaaattctattttttttctgatgtaagtatagtcacgaaagatctcttttgattaccatctgcatgggatatccttttctatccttcacttttagtctatgtgggttctcaaagttaaagtgagtctcatataggcagcgtatacttagatcttgttttcccatttagccactccgtattttcatggaaaagttaa

SEQ ID NO: 403911 - DNA, 569 bp, Homo sapiens
ttttgtttgtttttttctctttccttttcatcctttgtgttgatcaaacacctttagtttgggaaaattttttagaaacttccataattcccatgaattatagaaaaagattttgagaaaatgttcatagcatagttaattgaaaacagaaaaatttagaaaagtgcatttaatgtgtaaccagatttagaaaccaatggtttgtgtgtgtgtgtgtgtatcatatggctatggaaaaagtgatacatggaaaaacacacagaacatttgaaagaggataagaggatgaagaagaaggaagatgggaattaaaatacaccatttaggagaatgtttactttaaattttaccatttttataatgtagtaatgatataatatgctctaatattagtactcagaacccaaattattataaatattttcaaaatgtatttcaatcagtaaatgtatatccttgctattaaaktcacaaacctccacataaatccaagtgcatatgtgcacatactcaaacacacacattgtaattacagcaaatgttattttattaatatttttatttaaaga

SEQ ID NO: 403912 - DNA, 588 bp, Homo sapiens
atagtctcttcttacttgttaacttatataatctaaactttttttatgtgttgttttaatagcattcataatagagcattcatcttgcaatggtgtatcaatgggaatgaaaaaagagattttaaggcaatctcagcaatctcaggatatttattgttttttatccaataaggcaagtgatgctgtattttccaaatgcatcttaaatcctctatcactagttgtttccaacaatttatcctttaaaaccttatttaaatttaaattacctttagttgagtgaaaataattttggatctataatttcatgtttggatcttcttttgataaaataatatatttttaaatttrcaagtcgtctgtgatatcttttataagcttcaatatcatccattccatgtccatcacctacttcactgataattatacagaatctctgttcatccaaaaatctaactttggttttagttcttcagtcctttctaccattaatgataattttgatgcattcattctttgtgtaggtatattaaaataatttttaaaattcctaagacatcagacaaataagtgttccagaacaattca

SEQ ID NO: 403913 - DNA, 588 bp, Homo sapiens
atagtctcttcttacttgttaacttatataatctaaactttttttatgtgttgttttaatagcattcataatagagcattcatcttgcaatggtgtatcaatgggaatgaaaaaagagattttaaggcaatctcagcaatctcaggatatttattgttttttatccaataaggcaagtgatgctgtattttccaaatgcatcttaaatcctctatcactagttgtttccaacaatttatcctttaaaaccttatttaaatttaaattacctttagttgagtgaaaataattttggatctataatttcatgtttggatcttcttttgataaaataatatatttttaaatttgcaagtcgtctgtgatatcttttataagcttcaatatcatccattccatgtccatcacctacttcactgataattatacagaatctctgttcatccaaaaatctaactttggttttagttcttcagtcctttctaccattaatgataattttgatgcattcattctttgygtaggtatattaaaataatttttaaaattcctaagacatcagacaaataagtgttccagaacaattca

SEQ ID NO: 403914 - DNA, 624 bp, Homo sapiens
atgtggcaatttttactttatagtcaaaatatttgcttgcttagcattcttattctaatcactcttgaggcaagtcagataatcttaaaatacaaatagctcatttttcatattgaaacatttgtacgttttcatgagttatatcatacattcgtatagaggtatgaaacaactgcagacacatmagaaactgggtatcaaaggtgaatccaaagttttttatggccatcaaacatttcttagaataggaagaataaaagcagtattatcatgcactaaatgaaagcacagagtttaaagatttattactgaagatttacaattgaaaggcagatgtgcttatgcaaaaatcaaataaaatgattggataatccaaaaagcaaaacactactttggcaaagctgaaaaattaaacattgactcataaaaatcagatagtgagggaatagttttgtacctcttgcctctttcaaatgatgcaagaaaatctttcaggaatctaacagtaaattcgacatcattggtgaaaataatatttggaaattattatgtattttaatttgaatatgcccttcttttcctgtgaaagacataaaacagtaaatagctgctgatttatttaat

SEQ ID NO: 403915 - DNA, 455 bp, Homo sapiens
agtattatcatgcactaaatgaaagcacagagtttaaagatttattactgaagatttacaattgaaaggcagatgtgcttatgcaaaaatcaaataaaatgattggataatccaaaaagcaaaacactactttggcaaagctgaaaaattaaacattgactcataaaaatcagatagtgagggaatagttttgtacctcttgcctctttcaaatgatgcaagaaaatctttcaggaatctaacagtaaattcgacatcattggtgaaaataatatttggaaattattatgtattttaatttkaatatgcccttcttttcctgtgaaagacataaaacagtaaatagctgctgatttatttaattatagagtagctcagtaaaactatgtgaatattgctcttaagatgtttaaaaataaatatttttcttgctttaaaaaatttggagttaatta

SEQ ID NO: 403916 - DNA, 456 bp, Homo sapiens
agaccttgctgatgaaacagtttgyagtaaagaagctggccgaaacccaccaaaaccaagatggtgatgaaagtgacctctggtcatcctcactgctcattatactctaattataattcatttgcttaccaaaaggcactcccaccagtgccatgacagtttacaaatgccatggcaatatcaggaagttatcctatatagtctaaaaactggagagaccctcaattccggggtaaaagggtaaagattttacccctttcctgggaaagctcatcaataattcatccctcgtctagcatataatcaataaataactacaattataccaatccagcagcccataccactgctctgactatggagtagccattcttttatgcctttactttcttaataaacttgctttcactttgcactgtgaaatcgccctgagttctttcttgcacgagatccgag

SEQ ID NO: 403917 - DNA, 489 bp, Homo sapiens
agcaatagtctccggcatttgagccatgacctgcccattcctgtcctctccatactggaggtgataagagagccacttcaggtgagtgtggccaaaaacacagagatcccccacacctcagctcaagggttgtgctatctctccccaggacgaaaagccagcagcatttatcatctcccatagctctgcattggccaaggtaaattccagatgagtgaaaacaaagggtcaaggatctctaagcagctcccactctcagaacatargctctagcccaggaacagcaagctgagaataccgaggttacaatcatcttcaccccagctcacttattggatggaggctgcagaccaggagaggcaagccaaaaagaccaggaatgaccaaccctaactggcacactgctcaaaatataaggcaggggttcccagggactggcaccagtctatggtcttttaggaaccgggctgcacagcaggaagtgagcag

SEQ ID NO: 403918 - DNA, 541 bp, Homo sapiens
cagtagcaaaccaaaagctgttctcagaaggagactacagtttttctgcagagaatagcctgcctttgctccaagatcctaagtgctttgttgtgtgtcacctttaggggcctgatgtaagctccaaatagagaagttctctatctgtcattgacactttgagcatcaatggatttgctatgtcatatggtccaagtggcagagcagcttgcacagcagttggacctgttgcaaagcattcctttgttctgagcttcactcaaagttattgaccatcaataaatgtgtcagtgtaccacacacaaattccgaagatacctatcagggtattgttcatttttcttacwgattggatgggccatatacagtaactggtccttcacattgaaaaggatatatcagcatggcccataccactgaataactggaaattttggcaagctagcatactaattttttgtgagatttatttctcatcatctggcatgtaagtgtcctaccaatgtgctccttcatacctgacccaatcagaattacataa

SEQ ID NO: 403919 - DNA, 587 bp, Homo sapiens
caaaagatgaaacagaggaagagactgaaaaatggagttgtgaagagggaaaaatgagagaattgagaataaattgatagatgtatggatttaagtgaaaacaattgagttttcagatagtctgcatrtttacttatttattttggtttatcaggacgaaattccagtcaacaaatttgacatccatatttacggtatccatagttgtgactgtctctaaaattacaagtttctttatgccttaacttctattgtgaatatgaggagtccctagccttccactaatgtcagattaaaatgtacttatcaccctcccaaatggcaaaccaattgcttctgctcccagagtattttctgcttgatcatatgagcatgttttatacacagtaattataattatataattgtagcataagattccatgtgttcaaatctcagaagtagtgttgaaaatattcagcccagtatgcatatggtaaaaatctaaagaagctaaaatatgtttttgaaaaatatggaaaaagaatataacaatccattatttgctagacatatgcattataggaagcagctgttttttcacagaa

SEQ ID NO: 403920 - DNA, 575 bp, Homo sapiens
ctactcttcttctactgaaggcagtctcctatgagtaaatgatcagaaatcttccatgatgagtaagaactcaggctctttatctgcagagcctaaacttaagacagatgatctcttcccatttcctccctagttcctcagtgaggtgctcttgaagttctgtagtcttagcaacctgyatggagggagggatgtgccagttaaaaggaagtctaaattaatggttcatttggtttcttgtaagtaactatgaacaaggtcatgtcagcactccaggatctattttttcaccatataaggaaaacataaattgcatatttctacattcaatatttctctcacatcataaggctgagagtagttttggtgaagtgggcctggtcatattcttgcaagatcctacccttgattgtgagcatgggtgttggcccttgtattcaatcaacctctcactcttcatggcagcaatacatttccattgtgcattatgggactcttttggcttgtaagactattgaagtgactgactgttttacctcacagtcctcaattataaagttgtaaatatctggcct

SEQ ID NO: 403921 - DNA, 215 bp, Homo sapiens
tgctgtgtttgacatcgtattagtctgaaaacatagtaggctagtttacaataaaaaataaatcctgtagataatatatttgaaggcgagcaatcattttatatttgcaaaattytcatataagagcatttacgtagaatattttaagtatagaacacatacatatatccattttagctggtgcttactaaatgtttatttaattcatgataatt

SEQ ID NO: 403922 - DNA, 534 bp, Homo sapiens
ttgtacatagaaacatgttttgcaatatttaccttgcctttggcagagtttaaacaagatttgagaattgctcatttattttatcagcccttgactcaattcttaactctctaacttacgttgtttgttcaattaatgttgagaggtcagcaaaataaggaaataaaacactcagctaacatttggtaacttagccaatatgtgttaggcactcttttctttacatatattgtcttakttaattttaattcttacattcatctcacctcacatgtaaagcagatgttacatggactgatattcaggtgctttgcccaatgtgattgacagattttcttatgactggttcgtgtcttcatagccattaaatgtttaaagtattatctctgaagattactatttcatcttacagaaaagaatactagattttaggtgtcaccactgataaatgaacatctggtaaaagataaagtagagatacaaaatccaaggagcttaatctttatcacatggtatattgaatattattttaaa

SEQ ID NO: 403923 - DNA, 588 bp, Homo sapiens
gtgtctctgtgtgttgattttctcctctgtaatatgaagataatatttattcctaccttatagtactgatgtgaaggttaaaggacaaaatatttatacagtgtgtacaatagtgccttgcacatagaaaaacttgctgtgtccctgttaactattattactactagtgttttaggcagtaaggtttggggtcagattgtgttcaaagtcttgctttaataccctccaaccttgtcatcttggtcaactgattcaagttttaaagcctcagatttttcttctyctaaaataagggggacaggaagtgtttagtaaaagtgtaccaactagtgttaatgttaagctataacagacaattgaattggaataacgtcttgcttaagttgaaatcttgttcacttaaagttattgtattagtaaatttgacatttaaaccttagttcctttgacgtcagttgaaaatctttttcatttactctaattaaaaatagattaacctgcaattcacattaggtataaatgctcaagttaaacaaattaaaataaatagtaacttaaatgtaaaggaacttcctgtgaactagttca

SEQ ID NO: 403924 - DNA, 564 bp, Homo sapiens
ggtttttgttttcctagaagatccatggaagagaaatacatatgttgaaacttgatggatgagtaaaacttaaaaaggcaggggtgagaagggtgggaattccaggtcacataagcaacattgccaatgtcatggaatcaggaatgcattataaaggggaaatgcccatttttggagaattaattttcagtatttcttttgaatctcactatattccttacatatattactcttgttaatttatctaacatccccaaatagtattcgttgccaaaggctggtgataaataatgtttgtggtttataaatgtttacacaatcaaatgtcaacagattcctgaataaatatgcatatgaatratacatacacacatgttcatatattaacactgtcttattgaattttttgtaccctattttttgggtcatttcttttaataggtcttcagttgctgcctggtgttgttgccatggttgatggctattccatggtgagcaggtctatgccaacataaccccaaaggccaaaggagctaagaggctgaagaaagaggctgacaaatc

SEQ ID NO: 403925 - DNA, 568 bp, Homo sapiens
ttttaattcttaccaccagagaaaaagttgttatgatgagggtcctcaggaaagacaatacagtcagccgagaaatacaattttctttgtctactgttgtttcctttacacggaccattgaaatatatacttaaccaccagcaaaactcctattaaacrcaagtaaaaaaaaatcactacatgcaaaagagtgaacaccaggcaaagtgataatttatgaatttccaggatttttgttgtaatttacccgtgtaagtttacaataaatgattgatgtaactaaatttatggattgcaattaattactaggtttgtaccacagatgaagtaatatatatattgtctaatttaataatgatttgtctacagaattcaaccaactgctcattacagaatctgatgaacctacctttagactacctgttatcttaactacctgtgaagatactatatatgatgtaataggtttaacaaataatgaaggaccttttgtccttgcttgactcaagaagggatggagggtctccaagaaatataaatgtagtctgctataatgggtattagctag

SEQ ID NO: 403926 - DNA, 601 bp, Homo sapiens
aaacatagttaagtagaatgaagcagatgtttattctggtagattctattgcaatgttacattttaacttaatatttctattttgtgatttatttttagtatagcaaaatgtttggttaatattgtgggtattgatactgtgttaaaatttgtgacagtctatttaatttttcaatatgaagaagtattactgctwtgatgaaatatttactgttgtggtggaaataaataagaaaatagaattgactaaaagcaaaacaaaccaataaaaaaagaaaaaaagtctgttatttatcaacaaaacattaggaaatttacatgcttaaagtaaactttgattccctattccaaagtgccttatatattctactctctttgctttcacataaatttattctatgctataatgtaactggtatactattaagtcccatacatatgttacattgaaccatacatttttctattccaggaaagagaattttctcattttttccaccactaccatccaccacaatgaccactatttttctcttcacttaaaaagtatcatttatctaaagttaatggcatagtttcagacttctcatgtgtccaagca

SEQ ID NO: 403927 - DNA, 550 bp, Homo sapiens
tatgtttattgttcataataaaactattaaaaaaacataattgtatttataaagattatataacattttagatattcaggtaattattaattacctgaattaatttcaggtattaccgcttgcttttacaactaatcatttcaaagtcttatgccctgaagttaaaaatgttagtattagatgtatatttttaatgaaaccactttgggaaaaagttgtttgaaaataaggattcattttagtgcttagtttgcattctcagaattcagctgaaacttggatgtttggtaaaatcatattttacaaatatcttgatagctagttgaaagctattatgagataacactaagcaacataaatgtaatttccttatatgttcattaaattgctcaaaatagtaacattcttaaagaaatgaagtctttttatccttgtggttgtggatttttatatataaactgtatgtgtatatatgtatatgtatgtgcatatgtgtacatacatatacagtacatatatagatacacakgtttatatatgtaaacttcta

SEQ ID NO: 403928 - DNA, 583 bp, Homo sapiens
tttcaatttgttaaattagctaaagtggtttctgaggcttacaaccaaaatatatatatatatatatatatatatataattttatatatttttatatgtggatatatatttttatatatggcacatttaatgattaagttatgyaatatagtataaaacctcatgacagaagcatatagttgaaagtggcaggatattcttaattcatttatttttataaggaatactgacatgaaattttatttttacataagctctctgtttcactaattttcccccatatttctcatgtcaagaagacactccatgggttagtacaaaagaaaattaaatatcatgttatgtattattgtgtgtatgccgatacaatcacttctacatcgattctattaatacattaaagaaggaatccttctctgaaaatgccactcacataattatttatatttatataagacacaatttttttcaatggaatgcagactagaaggtgggttgcagaaaaactcacatttatatttgccaagttttatgcattatttaaatttaatatattacaatcaccagttgagaatcacagcta

SEQ ID NO: 403929 - DNA, 630 bp, Homo sapiens
cttatatctcaacaagtctatttcatgtttttgccaccaacatttccagtagatttcttctaacatgtcagaatgacagataagtttccatagtcagccttatagagagctcattattgtttcaaaccagtgcaattgcccttaagtttccctaaccagagggcctttggagggccatgtcatttccaaactcacgatgagtaaaggtggcatttctgggcttaaaataagggtataagtcaccaattaaagtcaagtactaatttttgcaagataatctcctgagttgatagaaaataaaaatattaaatattttaaatgcattgtatgggctgccaaattttttcatgtaagctatccgtaatttctttttgtattacttagctagtaakagtagaataatcgaactttttaaatttatttagttcactttcttaggaggaaactttgaataaagcagcatttctacaatatataatggcaataaatgatcatcagtttttattctagaaaatatttataaactatatacatacctatgtcatttactccctaaaacacatgtctagatcacagggtttaactatgttccctaaaattatttctttctgtcaaatatttgtttaaaaa

SEQ ID NO: 403930 - DNA, 630 bp, Homo sapiens
cttatatctcaacaagtctatttcatgtttttgccaccaacatttccagtagatttcttctaacatgtcagaatgacagataagtttccatagtcagccttatagagagctcattattgtttcaaaccagtgcaattgcccttaagtttccctaaccagagggcctttggagggccatgtcatttccaaactcacgatgagtaaaggtggcatttctgggcttaaaataagggtataagtcaccaattaaagtcaagtactaatttttgcaagataatctcctgagttgatagaaaataaaaatattaaatattttaaatgcattgtatgggctgccaaattttttcatgtaagctatccgtaatttctttttgtattacttagctagtaagagtagaataatcgaactttttaaatttatttagttcactttcttaggagraaactttgaataaagcagcatttctacaatatataatggcaataaatgatcatcagtttttattctagaaaatatttataaactatatacatacctatgtcatttactccctaaaacacatgtctagatcacagggtttaactatgttccctaaaattatttctttctgtcaaatatttgtttaaaaa

SEQ ID NO: 403931 - DNA, 595 bp, Homo sapiens
aggaactagaaaagcaagagaaaaaaaacccgaaattagtaaaaggaaagaaataataaaaatcagtgtagaattaaataaaactgaggctgaaaaatgcacaagatcaacaaaacaaaagttccttagacccaaataaataaaatcagaactgaaaaaggaaatgtcacaatgaataccacagacataaaaaggatcttaggagactactatgaacmactgtacaccaatagattcaaaaacctagaggaaatggatgaattcctggacaatctatcaagattgaactaagaaaaaaatagaaaaccttaacagactaataacaaataatgagactgaaccactatttactattaagactttttatttaagcaacaaaatacttaaattaaaagtcctccaaaaaataaaattcaacactggatggcttcactactaaatttttcaaacctttaaaaaagaattaataccaattctcctccagctattccaaaaacttgaagcagagggaattatttctaattcattctatgagaccagcataaccctgataccaaaaccagagaaggacccaatttttttaaaaaagaaagct

SEQ ID NO: 403932 - DNA, 647 bp, Homo sapiens
tacaccacatctaactcatccaaaaaaataattttggctaaaaggtctaatcactgctgaccatctaccccaccaagcaactgtagtccaagctaccattattattctcctggattattgcagtagccgcctcacttaatgacctgcttctgtcctgattcccttcagtctattctgaatgctaaagcctgtaaaatcctacttaaatgtaagtcaggtgatgtcacatctttgccaaagctctctaatggcttcctaatttacccagagaagtgaaaagtccttacaatggcttataaaatgcttcataatctggctgccactggccctctgaaaacatagagagccagaggcaggggcggccagattatgaatgatttaataagtcattaattttccactcaccattatactcaccatttatactccagtgagcactggcgtcttckaaaattctaggcatgttcctacctcatgcaggttttctctcgccatggaaccttcttcccacagatatccacatgacttcttccttcacttattttttctttcactttacttaaatatcaccttctctgtgagtctctgtgagtctgtaattgtaaaattacaacctataagaactattcatttctcatacctgcttt

SEQ ID NO: 403933 - DNA, 527 bp, Homo sapiens
aatatctgtctaattttaaaattatgttttctaagaatttcattagtctaaccaaataataaaaaaactgatggctaatggttttacatgtattaactcatttaattcttacatgaataatcataaaaagtaatttctaaaattattctcattttatagatgagaaacctaaacactaagcaattaagtaccatgccaaaatcccagcaacagctggaatgcaaatcccaaaagtctgactccaaacttgtactctcaactatttctcagaaatatgcatttttcttagcattgctttgagatgtcaagaaaggccatataagtgaatgtcaatatactaagtacttttttttcatgtgtggcaggtacagtttttcaaaatctayaacaatgcttccactctgaaagaatagactatttcttctccccttgcactgggtgggattttattactgcctcaatgcataggaaatggtgaaagtgatgctacatgaattccatgattagttcagaaaaggttacatggt

SEQ ID NO: 403934 - DNA, 485 bp, Homo sapiens
tatcctataagtaaataataaaacaaacaaattaaaaartaggtaaaagacagcaatgaacactttaataaagaaaatatataaatagtaaatgaatacaaaaaagcttctttatattagttattagtaaaatgcacattcaaaccacaatgagatttatcattttgtacttactagaatgtttaaaatgaaaaagattgattgtatcaggtgttggcaaagatatggtggaatttgaactcacctatagtactggtgccaggtaaaagggtgcaaccactttgaaaaagtttggctacttcttagagttaaatgttcatctgccctgtgataagtcattttactcaaggttattaactcagaggaataaaaacatgtgttcatataaatgctatgacacaaatgtttatagaagctttatttgaaatagtctaaaactgtaaataatacccattaatagatgaatgaataaacaaattgtggtg

SEQ ID NO: 403935 - DNA, 510 bp, Homo sapiens
ctcttacccaccgtcctggaagaatcaggtcacacacgggcttaaaggatgaatgcaaggtttttattgagtggtggaggtggctctcagtgcgctggatgaggaggcagaaggaggggatagaataggaaggtgatcttcccctggaaactggccagtctccaaacctctccctaactgcccccagctgaactcctcttggtattcagacattcctcttctttctytgctgtgtcgttctactatccatctgtttgactcctcatttcctcacctgctcatctgcttctggagcgtggggttcgggatttatatgggtacaggatatggggcatggcaggccaaaaggcaactttttgggtgtgacaacaggaatgcctgtcctcatttagggccatggtttttcaggcttgagggtggggcctttgctggggaactgcccttttctaccctgtatttccctgtctcctgtccgtatcatttgcatgctaggcatacaattaagaaaaa

SEQ ID NO: 403936 - DNA, 551 bp, Homo sapiens
cactataatttgatgtttgttcttgcttcaattttaacagaattcatgttgctttgatatgggttcttttcaaactgatgacatacccttcttagtgcctcaaactcaatcctgttcagacatgttatcacagttagtatcagtttattttggtgcaagatcatttataagttcatgcctagttttttcataatatgcattttccatgaactttttgaagaccccttgtatgactgattggtttgtaataattggaagacatagaartaaatacaaaaacatgaagcaaatcagaaaattagtactgtgcttatgtgaagcttaaaggtcagttttctatgtatggtgataatttttgtgttcacatttaagtatttgaaatacttagaatgtctgatgtatttaagggccaatcatattaggcctctgacaattttaactgtataagacaattatcttgagttttcaaactgtgcttgggtttacacataatatgaattattgtatctaaaaatatttacatttattaatttgtaagtggagtttaagtg

SEQ ID NO: 403937 - DNA, 526 bp, Homo sapiens
cgacagacttcaaatatcaagaaaaattatggccaatggtctaagggccttcttggactccagagagaaacaaaaaatgcagttaggagactgaatgaagacatttggagaagagataatacaaccatattattctgtgttctaagaatatattttatattcaaktcttctgcattatggagtcttattcttggacttcttacagctaacattccaaatagaaaaccctggatatcgttagctttcttgagtagttgagtttacatttcattgccttctcaattcattacacagagcaattttacttagccaaaaattatttttacagtgtttttgtaaaaagtctaactactagggaatatgcaatgactgcttatagctacagtcctggctcatgatttattttacaagtctttcctcacagttcttcgctaaatggacattctttgtgttttattacaagtttcttccattgcatcatgctctcggtgggatggtgtgcctatattttattttactcccgcca

SEQ ID NO: 403938 - DNA, 593 bp, Homo sapiens
tggccactcctccccctagggactcaggcccagggagatcagagttctgtccctgagcctctggctggagttgttggagttcctgcagggaggtcccaccctgtgaggagggatgggccagggtcaggcctgaagaggcactctggccacagtcggccacagccggtgtattgggctgtggggaatacctsttgggagcaggctgtccagcctccctggcttcagcaggggaaaagcacagcctgaagctatagagatggctgtcatccttcccagaccctgggagcttagtgtgttaggcagctagcagtcctagtgttggctgttgaccctcaccaaggagctcaaaaggcttaggcttagacagcaggcagctgcagctgtggtgcttgccaaccctccccctgggaactcagcaggcttaagcaggttctagctgaatggattctagttgagaatctgcacagctctgtggttaggaccctaggccccaggggtgtgggctcatgagtgggatcttccaatcatgggttgtacagttctgtggagaacacagtttcacagtcagggtaacatgctcacttactgcctct

SEQ ID NO: 403939 - DNA, 655 bp, Homo sapiens
agtggctatcctttttacaatagttataaaatatataataaaatacctagttataaatctaaccaaaatgataaaatacctctacaatgaaaataataaaacgctgatgacaaatattgaggaggacacaaagaaatgaaaagacatcccatgctcatggatcagaaaaattaatattgttaaaatggccacactacccaagacaatctatatattaaatgcaatccctatsataatataatgacattcttcaaagaagtaaaaaaaaaatcataaaatatttatgaacccacagaagatcccaaatagcaaaagcaacactgggtaagaaagaacaaagttggaggcatcacactgcctgagttcaaaatatgctacaaagcatcataactaacacagcatagtattggcataaagaaacagacacttagactaatggaactgaatagaaatttcagaaataaattcacatatttaagtcaactgatttttgacaaaggtgccaaaagcgtccactggggaaaggacagcctctttaataagtggtgatagctaaattgaatatccatatgccaaataagaaaaacagacacctatctcttcccatgtacaaatttcaactcaaaatgcattacatatctaaacctaagacttc

SEQ ID NO: 403940 - DNA, 599 bp, Homo sapiens
ttttgtggtttgttcgctaaaacatggaccaaaagatggaacacaggatgtgaacatgaaattccagacttgccttggtttactataaaggaatagttcaaaggtgttggaatgttagartgaatttgtcatctaagaactactcactcaacctgggaggatccagaagactcaacttttgccatgactgtgagaaataaatttgggtgggaagcccccgaatttttgaagagctccgtgaccagtgttttacagaggccagaccttttaatgaaaactgtggtcactaaattgggtaagctaaattcagttaggttgtaattgggagtaattagatcctagggtggcaaggaccaagtgatgggattcaaccaccaatagtgagttgggtgtgattactgtaattaatagcagaatcaaagcagaaatcagaatagtctgacacatgcagacctacagcattggctatttgatcatggtatttctataagtaaaataggaaaactacaaaattcttagttgatttgtataagcagaaaagttttaggtaaggtgaatgaaagtctaacctgaatcataaaaacacataaaaaattaca

SEQ ID NO: 403941 - DNA, 579 bp, Homo sapiens
ctggcttgggcccacagcacagaccctccatcctgggctgattgcactgagttattactgacctgtacctctcggggttggagcccccaggaggcaagcaaacaacacttgaccacaaccaatacaaaggtctcttcctctgctgtctccaagttggagaaggaccataatcactgagattgccccagagctgcagtggacagcccaggagtgccaagttatgatctatagccagcattcaaagggagaaaagcctacactttcaaagcattacggctgcaactgtgaggaaacatamaagagccacgcaactgagcaagagtcaaacaactgaccaataactctaagtgccacctactggatcacacaccaaagcttcaacaccaaaaaatacttcactaacataacccccactgaaaccagagacaagacattagcttcaaataaagaccttgcacaaagcctcaacttggtaaagacatccagaaaagaagtctatcagctgtactcgatctacactgcagttaaaggaacatgcacacacagaaagcagaaagaaccaatgcaagaaccctagta

SEQ ID NO: 403942 - DNA, 592 bp, Homo sapiens
tgtaatgacactcgtacactcaaaatgaaggggtggaggaaaatctaccaagaaaatggaaaacagaaaaaagcagaagttgcaatcctaatttcaggcaaaatagactttaagccaacaaagataaaaaaagacaaagaagaacattatatagtggtaaagggttcaattcaacaagaagacacaaatatcctaaatatatatgcacccaacactggagcacccagattcacaaagcaacttcttagagacgtacaatgagaagtaaactcccacacaataatagtgggagacktcaacactccactgacagtgtctgacagatcatcaaagaagaaaattaacaaaaatactcaagacctgaacttaacattggacaaaatagatctgataaacctctacagaactcctaccccaaaacaacagaatgtacagttttcttatcgccaaatggcacatactctaaaattaaccacataatcaaatataaaacaatcctcagacaattcaaagaactgaagtcatatgaaaaacactattggataatagcacaataaaaatagaactgaagactaagaaaatttctcaaaac

SEQ ID NO: 403943 - DNA, 592 bp, Homo sapiens
tgtaatgacactcgtacactcaaaatgaaggggtggaggaaaatctaccaagaaaatggaaaacagaaaaaagcagaagttgcaatcctaatttcaggcaaaatagactttaagccaacaaagataaaaaaagacaaagaagaacattatatagtggtaaagggttcaattcaacaagaagacacaaatatcctaaatatatatgcacccaacactggagcacccagattcacaaagcaacttcttagagacgtacaatgagaagtaaactcccacacaataatagtgggagacgtcaacactccactgacagtgtctgacagatcatcaaagaagaaaattaacaaaaatactcaagacctgaacttaacattggacaaaatagatctgataaacctctacagaactcctaccccaaaacaacagaatgtacakttttcttatcgccaaatggcacatactctaaaattaaccacataatcaaatataaaacaatcctcagacaattcaaagaactgaagtcatatgaaaaacactattggataatagcacaataaaaatagaactgaagactaagaaaatttctcaaaac

SEQ ID NO: 403944 - DNA, 662 bp, Homo sapiens
aattatatcctatcttgcccttccactacagatcacagtagaggtggtatgattgatagtgagatttaggaaaaaacaataaggaaatatattttgagagtttttattttagcaattttccaggtattagtaaaccagtaagttatccaccagaggctggaatagtcattacaatttcctttatcattgcactgacactgagagaaccattatgctgagcagcagtatatcaatttatcaacatggtattggaagataatgaacttccttaagtttccaacttgtaaggattaataatgtcccaaatatataccattttccttaaaaaattaaagtccacataggaacacatcatcttactattaattattaatattagtgtagtgcttacaaaatccatgtttaatttgggcaatgttaataaaacacaacrtaaataccttggaaacatttcaagaaaggtatacaaatgatttaatttaatttatgtgggaaattttatatcttaggaaatttataaatctgtgctaacttagataaaatgtatgctaataagaacttttaggcatattaaagtttgaaggaaatcatgtattgctttttaaattacgaatatagtcattacaaaattatttaaaactacagaaatatttacactaaat

SEQ ID NO: 403945 - DNA, 546 bp, Homo sapiens
ataccattttccttaaaaaattaaagtccacataggaacacatcatcttactattaattattaatattagtgtagtgcttacaaaatccatgtttaatttgggcaatgttaataaaacacaacataaataccttggaaacatttcaagaaaggtatacaaatgatttaatttaatttatgtgggaaattttatatcttaggaaatttataaatctgtgctaacttagataaaakgtatgctaataagaacttttaggcatattaaagtttgaaggaaatcatgtattgctttttaaattacgaatatagtcattacaaaattatttaaaactacagaaatatttacactaaataatgaaagtctcctttcattgttttagtgctctcttcagaggtaaccactacttacagtttgtatatacattttatatctttatatctacgtttttcacatatccatgttaaatgtatatgattcatattttacacgacatgataaacatctttatttccactgagaaacagttgaagcaaacaagtgaaagc

SEQ ID NO: 403946 - DNA, 546 bp, Homo sapiens
ataccattttccttaaaaaattaaagtccacataggaacacatcatcttactattaattattaatattagtgtagtgcttacaaaatccatgtttaatttgggcaatgttaataaaacacaacataaataccttggaaacatttcaagaaaggtatacaaatgatttaatttaatttatgtgggaaattttatatcttaggaaatttataaatctgtgctaacttagataaaatgtatgctaataagaacttttaggcatattaaagtttgaaggaaatcatgtattgctttttaaattacraatatagtcattacaaaattatttaaaactacagaaatatttacactaaataatgaaagtctcctttcattgttttagtgctctcttcagaggtaaccactacttacagtttgtatatacattttatatctttatatctacgtttttcacatatccatgttaaatgtatatgattcatattttacacgacatgataaacatctttatttccactgagaaacagttgaagcaaacaagtgaaagc

SEQ ID NO: 403947 - DNA, 623 bp, Homo sapiens
aggctgcagtgggctatgattgcaccacttcattccggcttgagtgacagagcaagaccatgttccctgaaaaaaaaaaatagtaacaaaaaaactgtaaagaatttataaataactaccaattgtcagtgactgagggaaaaaaagaatatggactaatagtcttgagctaggagactaagtggwtagaaaagacatgcatctgagggcagtttgagaagcatgtcaatgccatcctagccctttcgattattgacccatagagagagaggttccaatgcaggtgaggtgatacatagattaatatccacacaaatgctatatcttacacaatatcacactttgctaacgctgcacataatcaagaggtacccataggcagcaagatgtttggaccaccgtatgtgactctggatttttctttcctgtaagagtcttctactttctgactgagtgtacattgtgttgctaaagaggtatgcaggttaattcataccccagttaggatgaatttaggttatgaaaatccccatttcatacctcagagcttacataacattctctagagaaccatgcttcataaatcaatagatcatatatttgtttattgtaagcaattctca

SEQ ID NO: 403948 - DNA, 638 bp, Homo sapiens
ctgttgttttaattgaatagagagtatgatggcatttattcaaatgttcatcaactgcacataataattgtttggcaacatgctataataagtgacacaattactattacttactttggtactcattttaagaatatgaatcatactgaattgttttggtattcatgtggatgtaaaatattacaccacaggagtcctattgtaatttgccagagcactaattaacactactgcataaatatgaacagataagttacatacagaaatgaaacaaggaaagccataaatggctttataccatttaccatcttgatggctatttgttttcatgtatgagaaaayacctgcaaagtaaaagtggtggcccaataaatcaatccatacctgttgatactcaatgagttattggagaatcttaaacctagtgacaccagaattaatgataatttcaggaagtttaactcttcagaaggttcttgccccgtaaacatttagaggtctctgttttatatacctcaaggaaatagctatcttgcaatcttccatgtatagggaagagacatcctcatgacagaagtcactgtcctcaagtgactacaatcaattaggcaaacattgtcaagtcacataacttataa

SEQ ID NO: 403949 - DNA, 612 bp, Homo sapiens
tgacatgtgtattggtgagaaacaaaaggctgtgaactgagggtgatgattaactgttctactggataattgcttaaactactacttatattatgtggcattatctcttttgaacaaagtgattattggctttttgtgtagtgattatacagtgtaagtgcaatcttgctgtgttaattttgtcagagtgtatgtttaatatacttcctttacaacgaggcatgcaactttagatatttcttatttggttgagtccttcaagaaacaatcttctacagcttcatttgtctgtttgaaatgcacaacatcttctggccttcaaagagaaaggaagcaaagacatgatgatacagtattcaggaagaaaataagacatacttgcaacttttgtatgcatagccacagatggcaaatacattcaatattataattttgacaaaaaggttctaaatggctataagggaaaatagatatttwaaaaaattaaatatttaaaaaaattttttaaattcttctatggacagaatgtatatgccacatactttattcacttgtcaaatatgtaaagatattcaccagtagtttccatgatgaaactatattgttgtttct

SEQ ID NO: 403950 - DNA, 493 bp, Homo sapiens
tttgcctagatcaaggtctaaagagttttacctgggttttcttccagtatttttatagttttaagtctcacatttaactctttaatccatcttgagttgatttttgtttcttttgagaggtaggggtacatttttattcttctgcatatggcaatccaattttttcagctgcatttattgaaaagggtgttatttccccagtgtgtgatcttgtcaattgtgtcaaggatcagttggctgaacatatgtggctttctctctggattctttatttctgagttctatattctattccattgacccaggtgtctattttcayaccaacaccatgctgttttgtttgctataaacttgctgtgtaatttgaagtcaggtactgtgatgcctgcagattttcttttttgcttcagattgctctgttaatttaagctgttttttggttccatataaattttagattttttttcttattctgtggtatcttgatagcaat

SEQ ID NO: 403951 - DNA, 493 bp, Homo sapiens
tttgcctagatcaaggtctaaagagttttacctgggttttcttccagtatttttatagttttaagtctcacatttaactctttaatccatcttgagttgatttttgtttcttttgagaggtaggggtacatttttattcttctgcatatggcaatccaattttttcagctgcatttattgaaaagggtgttatttccccagtgtgtgatcttgtcaattgtgtcaaggatcagttggctgaacatatgtggctttctctctggattctttatttctgagttctatattctattccattgacccaggtgtctattttcataccaacaccatgctgttttgtttgctataaacttgctgtgtaatttgaagtcaggtactgtgatgcctgcagrttttcttttttgcttcagattgctctgttaatttaagctgttttttggttccatataaattttagattttttttcttattctgtggtatcttgatagcaat

SEQ ID NO: 403952 - DNA, 404 bp, Homo sapiens
aaagtccacattgccagtatttttgaggtcttattcataaaatcttttcccagatcagtgtcctaaagtattttcctcatgtcttattctaataattttgtagctyccattcttacatataggtctttaatcaattttgagttgatttttgtatacaggagagataggggtttagttttattcttctgcatgctgatatccacttttcccagcaccatttgttaaagagactgtcttttccccaatgagtgttcttgacacctttgtcaaaaatcagtgagctatagatgcatagattgatttctggatcctctgttctgttggtctgtgtgtttatttttatgtcagtaccatgctgtttgtattactgtagctttgtagtaaattttgaagtcagatggtgt

SEQ ID NO: 403953 - DNA, 591 bp, Homo sapiens
ttattcttctgcatgctgatatccacttttcccagcaccatttgttaaagagactgtcttttccccaatgagtgttcttgacacctttgtcaaaaatcagtgagctatagatgcatagattgatttctggatcctctgttctgttggtctgtgtgtttatttttatgtcagtaccatgctgtttgtattactgtagctttgtagtaaattttgaagtcagatggtgtgatgcctccagctttgtttattttcctcagtattgctttggctattcaaagtcttttgtggtttcattaaaaatttaagttttttcttctattactatgaagaatgtcatcaatatttcaatagagatygcccttaatctaaagattgcctgaatagaatggtcatttaactctattaattcttccaatcactgagcatggtctttccatttgtttgtattctcttcaatttcattatcatgttttgtagttttctttgtagagccatttcaactcctcagttaaattaattcctaggcattttatttattttttgtagctattttaaatggggttgccttttttatttcttttttggttagtc

SEQ ID NO: 403954 - DNA, 561 bp, Homo sapiens
aaaggtggcacatgttgctcttttgtctagcaacatgactagatgatttgatgaaatagcagaggatattgaggcacaattgttagaamgggttaatgagtcaccttggtgcacaatccaggctgacgagtctactgatgttgacaacaaagcaacaatgcttgtctttgtgtgatatactgtttcagaaggatgggcgtgagaatatattatgtgcactttcattgccaaacgacaccacagctgtagaatcattcaagtctttgaatgattacatatcaggaaaaattatttggtaattttgtgttggtatatgcatgaatggagtggctgccatgagtgaatggctttttggtttcaatacttgggtcaaagaggtcacttctgaatgtgagtctatgcactgtgtcatccatatggaatactggctacctgaaaatgccacatggactaaatgctgttttggaggatgtgattaaaattaccagacacattaaagtacatgcccttaactcacatctgtttgtacagctctgtgaagaactggacacaaagcacaca

SEQ ID NO: 403955 - DNA, 561 bp, Homo sapiens
aaaggtggcacatgttgctcttttgtctagcaacatgactagatgatttgatgaaatagcagaggatattgaggcacaattgttagaaagggttaatgagtcaccttggtgcacaatccaggctgaygagtctactgatgttgacaacaaagcaacaatgcttgtctttgtgtgatatactgtttcagaaggatgggcgtgagaatatattatgtgcactttcattgccaaacgacaccacagctgtagaatcattcaagtctttgaatgattacatatcaggaaaaattatttggtaattttgtgttggtatatgcatgaatggagtggctgccatgagtgaatggctttttggtttcaatacttgggtcaaagaggtcacttctgaatgtgagtctatgcactgtgtcatccatatggaatactggctacctgaaaatgccacatggactaaatgctgttttggaggatgtgattaaaattaccagacacattaaagtacatgcccttaactcacatctgtttgtacagctctgtgaagaactggacacaaagcacaca

SEQ ID NO: 403956 - DNA, 587 bp, Homo sapiens
ttgatatgaatactctggatcctttgatttgtgcatgtgaatttcataatctgactatcaatttctgtaaagaaaccagttggtattttgataaagctagcactgagtttgtagataagtttacagaatatttccaccttaacaatattaagtcctctgcttcttaaaatggatatctttctatttatttggagctgctaacatttcttatgatatattgaagttttcagataataagatttgcatttgttttgttaaatgtatcattgatttttgtgctattataaatggtattgttttctttttctttcttttttttttttttttttggagacagagtctccccctttgtcacccaggctggagtgatgtggcacaatctcagctcactgaaacctccacctyccaggttcaagtgattctcatgcctcgtgcctcccaagtagctgagactacaggcatgcaccatcatgcccaggcaatttttttttttttcgtattttcagtagagacagggtttcaccatgttgctcaggctggtcttgaactcctgagctcaggcaatccatgcaccttggccccaaaaa

SEQ ID NO: 403957 - DNA, 598 bp, Homo sapiens
aaaaatttcctgagctacttttccagagctgggattagataaagtgacccactactcttgatgtgatgccaatgctccatgagtagcattttagtgggatggtaatccctggtcttcttggctttcatctagtgtgaaacctctaccctatgagcaacttgggatacaaccaatcagtgtcacaatattctcaatctaccattgtgagggctagaacctctgctctagaagtgggtatttggtggagaaagggagtccaacctcctagcagctactcacctaaaatttagcctctgaaaaactgtagctgcaagagaacaaatgaaaaattctgggggcttgcccttcctagtgagataacacaacccttgactgaggcatggtaagaaaggtagcttcatcattttgtccaccccacttgttctgcagtttccataaatactcagcataagtataagctgaaaggctttgaacaggttgtgttktatccaatattccactgactcttattgttattactatcgatactaattagaacactaattgaactaattctgttattttttctcaacttagcttcctattatctccccaatac

SEQ ID NO: 403958 - DNA, 598 bp, Homo sapiens
ctatatattatacatacatatgtatctctctatatattatgttgtgtatgtatgtattatatgtggatatacatatatacattaaatatatatagtctatgagaaaaagattatacacctctttcatagtatttgacattttttgtgtctacagttaccatatgtcaaaggcacacatacaaatcaaactagtgctctgacatccttccaattaaagagaaacactrattagaaattcagtactctattatagaataggttgaaaatgaaaagtaattttaacctgaaaaattaatttggatcctctgtatattttaatgaatataagatgcaatatatttgagcaccttttttcttaatttttgtattagtctgggttctccagagaaatagaatcattagagagagagagacagagattataagaacttggctcacataatattcaaagttgggaagtccgttatctacaggctgtgccagcaggatactgctgggcaattttctcttgcttagggagctggtgttttgctccattcatgccttccactgattggaggaagctcacccacataatgaagggaactctgggaactct

SEQ ID NO: 403959 - DNA, 598 bp, Homo sapiens
ctatatattatacatacatatgtatctctctatatattatgttgtgtatgtatgtattatatgtggatatacatatatacattaaatatatatagtctatgagaaaaagattatacacctctttcatagtatttgacattttttgtgtctacagttaccatatgtcaaaggcacacatacaaatcaaactagtgctctgacatccttccaattaaagagaaacactgattagaaattcagtactctattatagaataggttgaaaatgaaaagtaattttaacctgaaaaattaatttggatcctctgtatattttaatgaatataagatgcaatatatttgagcaccttttttcttaattwttgtattagtctgggttctccagagaaatagaatcattagagagagagagacagagattataagaacttggctcacataatattcaaagttgggaagtccgttatctacaggctgtgccagcaggatactgctgggcaattttctcttgcttagggagctggtgttttgctccattcatgccttccactgattggaggaagctcacccacataatgaagggaactctgggaactct

SEQ ID NO: 403960 - DNA, 647 bp, Homo sapiens
tgtctctttggaaggtttccttatgagcagagagggctgaatgaagggtgcttaattcggcctagcaaaaaaccacacacaatttacctgaaaccacaaaattaacagagattcacagcatcagggaaaaaaaaaataggcagaaccgtaacaagatgaacaatctattccccagtgacaagtgggcagtaagataaggagacccctgtctgttttacttttctttcatatccctaacccctgagaataacccacctagaaaaaaatggaggagtggatggtcttagagaaagaacacgtcaccctctcctctaatccaagcaatggttgttcaaggtataacaactttgaattgagtttgaggccaaaactttaatgcaaaccagaattagcttcaattcatgtcataagattgcattagtcatttaagatttatgaaaattttgtaattgcagtcagtcccagaggaaaagtgagatccaatagagttgaaggtagagattgaagtcaaatggtgaaagaaaccaacaaaaaaacaaaaaacaaaaccaaaaactgtctactgtgttagagcacttgcaatttagttgccaagacagatattatacaaaacayttatatataacttagaagttacgctgaaaaga

SEQ ID NO: 403961 - DNA, 582 bp, Homo sapiens
aacaaaagaaaaaagaaaagcaagaacaaatttaaaaggccatatatttacattaataattctataggttccatggaaatgtaattaatataacaaagtttagaataagaattgattaaattttaaatattttacatgcatttgttatcacattttaacatgaaatatattactgtataattaaaaccagtataaaatgatattaaacttcattttttctkaagataattttatcataatgtacgttgtaatttgaagggggttatcttcagacagctatacctaaaggaaacctagattattttggaaatgaggtattaaaaagcagacaaaaaaaattctacaaaaagttaagtcacttattcccatatataagcatattaaacttggcattaatgcaacgagaataatttgttattctttttaaagaaaaatttaaatgttaaaaatatcaagagcggtaaaaccatcaatgttttaattttgcatcgatctctcttttggtatgtgtgtgcatctagagtacatattattattttaaaatttttaaagtgtttagtggtttacttgctgttttatgct

SEQ ID NO: 403962 - DNA, 582 bp, Homo sapiens
aacaaaagaaaaaagaaaagcaagaacaaatttaaaaggccatatatttacattaataattctataggttccatggaaatgtaattaatataacaaagtttagaataagaattgattaaattttaaatattttacatgcatttgttatcacattttaacatgaaatatattactgtataattaaaaccagtataaaatgatattaaacttcattttttctgaagataattttatcataatgtacgttgtaatttgaagggggttatcttcagacagctatacctaaaggaaacctagattattttggaaatgaggtattaaaaagcagacaaaaaaaattctacaaaaagttaagtcacttaytcccatatataagcatattaaacttggcattaatgcaacgagaataatttgttattctttttaaagaaaaatttaaatgttaaaaatatcaagagcggtaaaaccatcaatgttttaattttgcatcgatctctcttttggtatgtgtgtgcatctagagtacatattattattttaaaatttttaaagtgtttagtggtttacttgctgttttatgct

SEQ ID NO: 403963 - DNA, 585 bp, Homo sapiens
tttaattctgtctacatgcatgtgtttgtctggctagctctctatgtatatgcctatagytatatatatatatatatgtttatatattctggtgactgtatcgtcaaatgggtagcataaggcattcaggaaatagagacctgaaatatatgttgacataaaaaatatactttttcttttatgtaaaaggatataatactacaaatgacaacctttctaagaattcagtttttcaaatctgtggtgaaaataaaaatggagcataggcatctctatcataactaagggtaaaaacaatcagggaaaagcagtaaaggcagtgcagtttgcagtggtctttttagtagctgcatacaagcaattaatttgatctacagtctatgaagcattttataattaatttctcagcatttactacatacaagccatcactttaaagtgctatgtcattaacaaaatcccattttttttccataaagaagaggcatactgatctacatttttccatgctgccaaggcagaatggactcgagggatattatcttattcagaaagaacctttcaaggttgaataaaagaaatggt

SEQ ID NO: 403964 - DNA, 585 bp, Homo sapiens
tttaattctgtctacatgcatgtgtttgtctggctagctctctatgtatatgcctatagctatatatatatatatatgtttatatattctggtgactgtatcgtcaaatgggtagcataaggcattcaggaaatagagacctgaaatatatgttgacataaaaaatatactttttcttttatgtaaaaggatataatactacaaatgacaacctttctaagaattcagtttttcaaatctktggtgaaaataaaaatggagcataggcatctctatcataactaagggtaaaaacaatcagggaaaagcagtaaaggcagtgcagtttgcagtggtctttttagtagctgcatacaagcaattaatttgatctacagtctatgaagcattttataattaatttctcagcatttactacatacaagccatcactttaaagtgctatgtcattaacaaaatcccattttttttccataaagaagaggcatactgatctacatttttccatgctgccaaggcagaatggactcgagggatattatcttattcagaaagaacctttcaaggttgaataaaagaaatggt

SEQ ID NO: 403965 - DNA, 649 bp, Homo sapiens
ttgtaaaccttaaatagaattcaaacttccaaaatagttacatcagacagattcttccaataaaatatttgtctaggttgggggagagattactggtgctttctactctactwtattcccagaatcctcttttcctaacctgtcttttaaacattgctatttttctcttttccttatcaaaaaaatatgttcaaccattaatcttctgaattttttaataaataattttgcataatttatattactataaaatttgtacattctaaaatatgttcattgttattaatctgaatttttaataaataattttacaaaagttatactactatataatttatacattctgaaaatattgcacatatagtttctttcctttatatgttgcacaaaactggtacaaattcacaagtaattgattttttaatgagaagttaagtaaactaatggagtatttaatttaaaagtttaaaaatttgggagttacttattttgttctattgtgtacaggcattacacatgaataaaaatgaatgaaatttgtaaaaacaaacaacaacaaaatatgtgtgaacaaataagatattgtagactactgttttacagctgtagatttctttcccatgtattcattctagaatataaccattac

SEQ ID NO: 403966 - DNA, 649 bp, Homo sapiens
ttgtaaaccttaaatagaattcaaacttccaaaatagttacatcagacagattcttccaataaaatatttgtctaggttgggggagagattactggtgctttctactctactttattcccagaatcctcttttcctaacctgtcttttaaacattgctatttttctcttttccttatcraaaaaatatgttcaaccattaatcttctgaattttttaataaataattttgcataatttatattactataaaatttgtacattctaaaatatgttcattgttattaatctgaatttttaataaataattttacaaaagttatactactatataatttatacattctgaaaatattgcacatatagtttctttcctttatatgttgcacaaaactggtacaaattcacaagtaattgattttttaatgagaagttaagtaaactaatggagtatttaatttaaaagtttaaaaatttgggagttacttattttgttctattgtgtacaggcattacacatgaataaaaatgaatgaaatttgtaaaaacaaacaacaacaaaatatgtgtgaacaaataagatattgtagactactgttttacagctgtagatttctttcccatgtattcattctagaatataaccattac

SEQ ID NO: 403967 - DNA, 566 bp, Homo sapiens
aaagtctgggaatcatgtggatatatttctccatatggacaaaaatagcaaacayatttgtttcccatatgaaagcttatgaaaggacaatctctgtcaagaagaattttgaaaggtgtctgggattattgatcctgactaccagtgaggaaattggactgctacttcataatagaggtatgaaagagtatgtctggaatacaggagatctcctaggatacatctaagatttaccatttcctgtgaaaacaactacagcaacccaacccagacagagctaccaatggcccagacccttcatgaatgaagatttgggtcactctgccaggtaacaaaccacgaacagctgaggtgtttgctaaaggcagaggtaacaaagaatggttaaaaaaggtagttatgaatcccagctatgactaaatgactacatgaccagttatagcaataaagactataattgtcctgagtatattgtgcaaatacatttgttctttcttatatacttattatgtgacataagatctattgactttatattacagaatttaagtattgttagctttaca

SEQ ID NO: 403968 - DNA, 649 bp, Homo sapiens
gactttgttattgtctttatttggaattaactgtggttttaagatgtgcataggtgccaattttataagaggtagaattctaatggttaatattatatgtcaagtaatatgggtgatattggatcaggttaatatttaaatcaattaactttgagtaagcagatgtcctccattacttagatgggcctcattcaatcagagaacaataggaatagattcctcaagcaagagggcatcctctagcagattgcctttgtgtgtgtgtgtgtgtgtgtgtgtgtgtatgtgtacacacatcctgtgtgtttggttttgctgaagaaccctcactaatagcggaaccaagacctctaatcttgcagagttttgtagatgggaagcacaaagggctctagttggtcactgaaaatgatgataagtgagaccttttccgttttgatgacttattttccatatctatatattcttcctaatgggaacacagtgacatataaaggaacttaatttaattcgtatcctcatcttaaaagacaacaatctaatctcttatcacttctamcctaatgctttaacggcactttggcagaccatttcaacctgccattcaggacagcgggttctatatggtgtggtatggaatatgaccagt

SEQ ID NO: 403969 - DNA, 583 bp, Homo sapiens
gtaccacagtttctttctccattctctcactgaggaacatttgactgtttccaagtttagacaattatgaatatagctgctataaatatctgtacaaaggtttttgtgtgcatgtaagtttttaatttattggggtaatgaattaaagaggcacaattgggggatcatataggaatgtatatatatatacacacacacatttatatatacactyctatatgatagtggtgttcatgtatatgaaccaccaaagaaaccaccaaagtggttgtaccaccatagcagttgtaccattttgcatgtccaccagcaatgaatgagaatttatcttgctctacacccttgccatcatttaacgttgtcagtatttggattgtcatcattctagtaggtgagtatggtatctctttgttgatttaatttgtaatttcctaatgacatatgatattaaatattgtgtcatatgcctacttgccatttgtatatatatccttttttgagttgtctgttgaggtcttctattttataatcgggttgtccattttcttacttttgagttttaaaaattatttgtacattttgg

SEQ ID NO: 403970 - DNA, 557 bp, Homo sapiens
tttaacgttgtcagtatttggattgtcatcattctagtaggtgagtatggtatctctttgttgatttaatttgtaatttcctaatgacatatgatattaaatattgtgtcatatkcctacttgccatttgtatatatatccttttttgagttgtctgttgaggtcttctattttataatcgggttgtccattttcttacttttgagttttaaaaattatttgtacattttggttatcaatcccttttctgttatgtctctttcaaatattttcttccagtattctcattctcttgacaattttatccaccaagtagaagttttaattttaatgaagttcacctagttatttttttatttcatgttttgtgcctttttgttgtatcaaaattcatcactatacccaaggtcatcccggttttctcttacgttatcttatgggagttttatagtatagcattttacatttaggtctatgccctgttttgagttagttttggtaaatgatataaggtctagtttttttttttttttttttcaggagggggcccaatggtt

SEQ ID NO: 403971 - DNA, 557 bp, Homo sapiens
tttaacgttgtcagtatttggattgtcatcattctagtaggtgagtatggtatctctttgttgatttaatttgtaatttcctaatgacatatgatattaaatattgtgtcatatgcctacttgccatttgtatatatatccttttttgagttgtctgttgaggtcttctattttataatcgggttgtccattttcttacttttgagttttaaaaattatttgtacattttggttatcaatcccttttctgttatgtctctttcaaatattttcttccagtattctcattctcttgacaattttwtccaccaagtagaagttttaattttaatgaagttcacctagttatttttttatttcatgttttgtgcctttttgttgtatcaaaattcatcactatacccaaggtcatcccggttttctcttacgttatcttatgggagttttatagtatagcattttacatttaggtctatgccctgttttgagttagttttggtaaatgatataaggtctagtttttttttttttttttttcaggagggggcccaatggtt

SEQ ID NO: 403972 - DNA, 587 bp, Homo sapiens
ttatcaattttttgggattatttacatgatawgcccaataaaacattttttacacttaagtcatgagagtcatctatgtttttgtttaaaagttatggttttatctgtcaacctaaataacaaacagagaacactctctaaaagaaaatgatgtttgtttgtgaatagccactgtaatgggaatacatcatagtaagctattgttatattcagagagataaaagaagacagaagattttaaaggaaaaatgaggattacataattgttttgagataattatctttggatgcaaggatcaataacaagggtggtgctagtctaaagttggataaactgttgctgggcagaggttttcacaaaattattttttttgtatggaaagttgtcctagctttgtgcaaagttgtaagtttttcagtcttttgtgatagctcttgttattaggcattcacccatgagaactctacctttatgtccttccttggttctatttgtcagggtgcttaacacaagtgacttcattttgattctgataatttaacattttctccttctgatcacgatatttacccaaaagtatcactga

SEQ ID NO: 403973 - DNA, 485 bp, Homo sapiens
tgcagccataaaaacaatgagatcatgtcctatggagggacatggacagagctggagaccattatccttagcaaactaatgcaggaacaggaaaacacataatgcaatttctcacttataagtgggagctaaatgatgagaacacatggacacagagaggggaacaacagacactgggtactaatggtagagggtgggaggagggagaggatcaggaaaaataacttatsggtaatatgcttaatatctggatgacaaaataatcttcacagcaaaccctcaatgacacaagtttaactatataacaaagctacacatgtacccttgaacttaaaataatttttttaaagacaagacaaaaaaaaagtctttaggctaaacttaacagagactatttgttttattacagtgaaaatcttttcaggggaataaagtttttgaaatttgagttaggctcccacttggtcagtgctcaatgaatacta

SEQ ID NO: 403974 - DNA, 485 bp, Homo sapiens
tgcagccataaaaacaatgagatcatgtcctatggagggacatggacagagctggagaccattatccttagcaaactaatgcaggaacaggaaaacacataatgcaatttctcacttataagtgggagctaaatgatgagaacacatggacacagagaggggaacaacagacactgggtactaatggtagagggtgggaggagggagaggatcaggaaaaataacttatcggtawtatgcttaatatctggatgacaaaataatcttcacagcaaaccctcaatgacacaagtttaactatataacaaagctacacatgtacccttgaacttaaaataatttttttaaagacaagacaaaaaaaaagtctttaggctaaacttaacagagactatttgttttattacagtgaaaatcttttcaggggaataaagtttttgaaatttgagttaggctcccacttggtcagtgctcaatgaatacta

SEQ ID NO: 403975 - DNA, 485 bp, Homo sapiens
tgcagccataaaaacaatgagatcatgtcctatggagggacatggacagagctggagaccattatccttagcaaactaatgcaggaacaggaaaacacataatgcaatttctcacttataagtgggagctaaatgatgagaacacatggacacagagaggggaacaacagacactgggtactaatggtagagggtgggaggagggagaggatcaggaaaaataacttatcggtaatatgcttaatatctggatgacaaaataatcttcacagcaaaccctcaatgacacaagtttaactatataacaaagctacacatgtacycttgaacttaaaataatttttttaaagacaagacaaaaaaaaagtctttaggctaaacttaacagagactatttgttttattacagtgaaaatcttttcaggggaataaagtttttgaaatttgagttaggctcccacttggtcagtgctcaatgaatacta

SEQ ID NO: 403976 - DNA, 524 bp, Homo sapiens
tagtagtaagtagtcctttagaaatgtagtggtaaagtttgtggggtgagaaattgttctacagtcctgtgactagatatcaatctcttggtgagtgtgtatccctgaactgtgaacttcaccagtgattcacattttctgtcaccctctgagatcagaggatatgtctagatgggtcagtattaggatgttttccttccctcaggtacgttaggctctratgaaacctcagcagatcaagctctggtaaaatagtttctcctgaaagcagatcctgttaagaacagaattatctggtgtatatgaaaattgttcttttttttcctctccctgccagaaacataaggagatttttctccaatatccactgtgaggacctgatggagttcctaaaggtaaactttataaaattgtagatgtctaccctgtgactgagtccttggtatttttaactctcagatttgtttacactaagcctccagaaatttgtcaattatagctaggttttcttaccccagcaatac

SEQ ID NO: 403977 - DNA, 640 bp, Homo sapiens
ttgtttacattatagaacaacattgaacactattcctcagcatgattagtcagctatttggtggaaggttgattacattggaccrctttcatcatagaaggggaagcactattttttaatggaagagacatttactctggatacggtgttgtgttctctgctcttaatgattctgctgaaactttcatccgtgaagtaactggacacaatattcactatcgcagtactccatgcagtattgcttatgtccaaggaattcaattcacagtaaatgaatttaaaaataaggctatggtcatgaattcagtgcttttaccatattctccataatcctgaagcagctggctagatagaaaggtggaatagcttttagaaaaccaaattataatgccatatagattataataccttgtaggactggagcaatatcttttgggatgtgaaatatgctctaaatctgtgttcaatatattgtgttatttatctcatagacagcatatgtgagtcctgtaatgaagaagtaaatataaagtggcttctccatcatccctaataatctcatagaaaaacatttacttctgtgaccatgattttatgttttgcagatctagaggtcttagtccaaatggaagaactattt

SEQ ID NO: 403978 - DNA, 640 bp, Homo sapiens
ttgtttacattatagaacaacattgaacactattcctcagcatgattagtcagctatttggtggaaggttgattacattggaccgctttcatcatagaaggggaagcactattttttaatggaagagacatttactctggatacggtgttgtgttctctgctcttaatgattctgcygaaactttcatccgtgaagtaactggacacaatattcactatcgcagtactccatgcagtattgcttatgtccaaggaattcaattcacagtaaatgaatttaaaaataaggctatggtcatgaattcagtgcttttaccatattctccataatcctgaagcagctggctagatagaaaggtggaatagcttttagaaaaccaaattataatgccatatagattataataccttgtaggactggagcaatatcttttgggatgtgaaatatgctctaaatctgtgttcaatatattgtgttatttatctcatagacagcatatgtgagtcctgtaatgaagaagtaaatataaagtggcttctccatcatccctaataatctcatagaaaaacatttacttctgtgaccatgattttatgttttgcagatctagaggtcttagtccaaatggaagaactattt

SEQ ID NO: 403979 - DNA, 640 bp, Homo sapiens
ttgtttacattatagaacaacattgaacactattcctcagcatgattagtcagctatttggtggaaggttgattacattggaccgctttcatcatagaaggggaagcactattttttaatggaagagacatttactctggatacggtgttgtgttctctgctcttaatgattctgctgaaactttcatccgtgaagtaactggacacaatattcactatcgcagtactccatgcagtattgcttatgtccaaggaattcaattcacagtaaatgaatttaaaaataaggctatggtcatgaattcagtgcttttaccatattctccataatcctgaagcagctggctagatagaaaggtggaatagcttttagaaaaccaaattataatgccatatagattataataccttgtaggactggagcaatatcttttgggatgtgaaatatgctctaaatctgtgttcaatatattgtgttatttatctcatagayagcatatgtgagtcctgtaatgaagaagtaaatataaagtggcttctccatcatccctaataatctcatagaaaaacatttacttctgtgaccatgattttatgttttgcagatctagaggtcttagtccaaatggaagaactattt

SEQ ID NO: 403980 - DNA, 654 bp, Homo sapiens
ataaacacaatataagtataaactactctgccctcttggttactaactgtatgaaatatctttttctattcttatatttttcaatctactgttgacccttgaacaatgaagaagttaggggcaccaatgccctgtgcatttgaaaatctgcatattatcttttgatgtctcycaaactcagctattaatagcctaatgttgattagaaactttattgataacataaacaatttttaacaaatattttgtatgttatatgtaatataggctgtatcacaaaaataaagataggaaaaagtaaacgttatcaagaaaatcataggaaaagaatatatataattattattatttaagtggaagtgtatcatcataaaggtcttcattcttattgtcttcatgttgagtaggctgaggaggaggaggaggaagaggagggtttagtcttattgtctcagaggtggcagaggcagaataaaatctgtgtgtgaaaggacctactcagttcaaacccttgctgttgaagggtcaactgtgtttgtttctttggatctaaagtgagtctcttatggagagcatatacttaaattattggttgttgttgttggtggtgttttatctattcaatgtctgtcttttgatgagagagcttaatct

SEQ ID NO: 403981 - DNA, 619 bp, Homo sapiens
gtaaacaaacttgaaagacaggctagcccttaagtattgcaattattgggcaattcctcatgctgtgctgggcttggagccagtggatttggtggttccatgacccagtgaaataccagatggggcaaccaaagagtgcttgtgccaccccctccccaaacctcaggctgttcagcccacagctccaggggagactacttttctttgcttgagaaaaggagagggaagagtaaagaggactttgtcttataacttggataccagttcagtatccaagggctgttggcagagtcctgaggtccccattccaggctagctcctgaatgaaacttctagacacacctttggccagaaagtaaccygaggacttgaaggaaacaacccagtttgggcaggaaactaaagagtccttggggcctatcctaataaagacctcttggactctaaataatcatcagtgatacccagcagtactcactatgggccttgggtgagactcacaaatgtgttggtctcagaagtgacccagcacagttgcatgtggtggccaaagggaggtattccttctgcctgaggaaaggagagggaagagtaaatgagaatttgtcttgcagcttgg

SEQ ID NO: 403982 - DNA, 562 bp, Homo sapiens
tctggagttgaaaaaggaaattaacatactgaagtatgcatcagaattaacgtaccagcagaattgatcaagcaggtgaaagaattagtgagcttgaagacaggctatttaaaaatacacagtaagaggagacaaaagaaaaaaggagaaagaagaaagtacacctacaagatatagaaaatagtctaaaaatggaaaatctaagggttattggccttaaagagaaagtatagaaagatataaaggtagaaagtttactcagaggtataataacagaatttcccaaacctgagatagatagaaatattcaagtacaagaaggttatagaacactaagcagttttagctcacagaagactacctcaaggcatttaaagtcaaactcttaaaggtcaagggtaaagagagaatccttgagaaagcaacaagagaaaagcaaacaatttacaatggaggtccaatatgtctagcagcagacttgtcaytggaaacttcacaggccaggagagagtgaaataacatacttaaaatgccaaaggaaaaacttttatcctagaatact

SEQ ID NO: 403983 - DNA, 566 bp, Homo sapiens
agctgggtgtgatggcacatgcctgtaattacagctactagggggcactgaggcagtagaattgcttgaacccaggaggtggagttgtagtgagccaagatcacgtgactgcactccagcctgggcagcagagcaagactccatctcaaaaacaacaacaacaacaacaaaacacacaaaaaacgcttggcactgtaaaaacatccaaaaaggaaatctaatgactgtactcaatctacactgcagttaaaggaacacccacacacaaagatgagacagaagcagcaatgcaagaagtttggtacacaaatggctagagtgttgtatgtccttcaaatgacaacacaagttctccaacatgagttcttagctgaagtgaaacaaatataattcagaatatggattaaaatgaaggtcatcaagatacataagaacagcaaaacccaatgcaaggaaactaagaatcacartaaaatgatgcaggagctgaaggatgaaatgactggtatagaaaataacctaatgggtcttaaagagctaaaagacacaatacaagaattttacag

SEQ ID NO: 403984 - DNA, 656 bp, Homo sapiens
aatgtatccaaatgtggaattgttagattagacactcatgctaaaaagatagtgtgtgtgtgtatatatatatatatcatatatatgtatttcaaatacatatgtgtgtgtatgtgttatctgaaaggcctatcttttaaaacatttttctctttacagtattttaaaagtctcttaaattttaagaattagtagcccccactgaacatctcttgaagtatcataaaagccctattatttgatgttattcaagcagtggttggttttacaaagtcagttgaggcagcaaatcataaaaataatacctgaataygttaaacaggttgttttaatttaaaacatataaatatgtgttgaattgtcaacctttgatatgagaccaatcttttaatatagttctgcttattctcatttctaaactgttgcttttgcataaatagccaatgatataatcactatgagtattagtatcactttctttgatactgtgtcaaagatactttctttgacgtagtgatactcatagtgatactatgagtatcagtaccaatttctttaaagtcgaacaaaaatttaaacacttataaaaattctaaatacaaaacaattttcatattttaaaaatgttcaagtcttttgtggatgttttggcccat

SEQ ID NO: 403985 - DNA, 644 bp, Homo sapiens
tcatgggggctgcataaccagatgtatctctatctggatttttagtgcctagacaaggctagaagtagagtcctatatgcaaaagcagtgaggaactgagctccttctcacacagagtatatgtcttgcaactatttaggttataattcaccctttttattttagagtcctgttggggcgatagtaagatgcagagagaagaaaagagctatattcttaaatktaaatgtctatttttactgggtctgtgtttctggatgttaaaattcacaaatgtttcttctgtggtacaggatttctactgccctttagtaagatagaaaggcaagtgaggatggagtggaaacagtgcccttctgtgagctaggaaaaggttctggtagggattttttcttggagagtgggctttacttttggaggatgttctggttgcattttacagagaattgtctttgctccaggctagggccaccaaggatatatttttggatcttcactatatgaacctagtacagctaatgtaaacaaacctcacaaatatgtggggatatccattagactgaagcctctatgagctcacactctcatgctgcctcacacccagtcttcaccaatttatcaaaagtaccatttaagtgttctta

SEQ ID NO: 403986 - DNA, 631 bp, Homo sapiens
caaagaaataagtataattagtatgctaagaaaggagagaaaattgattcatataaaatgctcaatataaaccacaaaaggcagaaaatatgtggaagccaaaaatagaaacaaataacaagggcaacaaatagaaaactaagaaatttgatagatattttaatataactataccaataatcaccttacatgaaaatagtctgaattcatgaattaaaatacagatattgtcagagtggattaaaaaacaaaactcacctttatgttgtctacaagaaacttactttaaatttaaagatacatatacatttaaagtaaagaatggagaaagacatactatgttaacactaatcaaaataaagcaaaataagctatattaatttcmgacagatcagatttcaaagcaaggaaagttatcagtgataaaaagtggtattgcatgttgataaagggatcaatactttaaggagatgcaacaatccttaatgtgtatgtgcttaacaacagagtgtcaaactacttgaggaaaatactgataaaacaataaggagaaatagacaactccactattacagttggatacatcaactcccctctatcagaaatggagatatccagtagacaggagaca

SEQ ID NO: 403987 - DNA, 480 bp, Homo sapiens
gccctacatttaaatcaaactatgcatgacttacaaaacaacatttactatttttacatagtaagagtttgttctgacctaacagaaagtttagaattgaaccatatttcaatgcaaatcatgtaacaaactaaaatttaagtcctagaaatctgtgcatgtgaattttaaaatgtaaattagaattaaattaaattaaacttgaatttctctatcatataaggcacatttcacgctctcagtagccacagttagtgattaccacactggagggtgcagatgtagaaatttccatcattgtcaaaagtttyactagagaaaattgctatagacagatacttgaaataatattggaccaacaaccagaaagttttattccatttgcatatcctcatcaaatttccacatttaagaaaagaaggaggatgttctgcatataatttttagctacactgagaatttgtgaagtttgattttctg

SEQ ID NO: 403988 - DNA, 575 bp, Homo sapiens
gaaataatattggaccaacaaccagaaagttttattccatttgcatatcctcatcaaatttccacatttaagaaaagaaggaggatgttctgcatataatttttagctacactgagaatttgtgaagtttgattttctgtgagaaatatatgatgatatcaaccttatattttattcttgagtataaaatagcatatacaaattacaaaatattttaaatagtaaaaatggcatatttgtatataatttctttttaacatttaattctgttttgcgaagttaattttaagacactccacatatttccatattttgatgctgtttcattttcgtctatcattttaatgttagatcagaagaacatttacttattagtcattgccacagatcagacaactaaaaaattaaagatagtaacrtactaagtcccacatttttatgattaatatttctttttaaaaaatcaaatgtcaatgaaatgctccactgaacattttaacctattttatatccttagaaacatttaattaattgagttgttcacctgacatttttacagattgctttgattgtaa

SEQ ID NO: 403989 - DNA, 477 bp, Homo sapiens
aagggatgttaaattttactgaatgctatttcagcatcaaytgaaatgatcatatggtttttgtccttcagtattcatatgaggtatcacattggttgatttgtgtatgttaaaccatttttgtatccctgagataaatcccacttggtcatgataaatgatctttttaatgtgttgttaaattagttttgctagtataggctgaggatttttgcatcaatgttcagagatattggcctgcagttgttttttttgttgtgtctttgtctggacttggtaccagggtaatactggctgtgtagaatgagtttggaagtgtttcctcctcctctattcttttggaatagtttaagtataaatagtattagttcttcttcaaatgtttgctaaaattcagcagtgaagccacagatcctggggttttctttgaagggagacattttattatggcattgatctggctacttgttattggtc

SEQ ID NO: 403990 - DNA, 477 bp, Homo sapiens
aagggatgttaaattttactgaatgctatttcagcatcaattgaaatgatcatatggtttttgtccttcagtattcatatgaggtatcacattggttgatttgtgtatgttaaaccatttttgtatccctgagataaatcccacttggtcatgataaatgatctttttaatgtgttgttaaattagttttgctagtataggstgaggatttttgcatcaatgttcagagatattggcctgcagttgttttttttgttgtgtctttgtctggacttggtaccagggtaatactggctgtgtagaatgagtttggaagtgtttcctcctcctctattcttttggaatagtttaagtataaatagtattagttcttcttcaaatgtttgctaaaattcagcagtgaagccacagatcctggggttttctttgaagggagacattttattatggcattgatctggctacttgttattggtc

SEQ ID NO: 403991 - DNA, 599 bp, Homo sapiens
attccaatcaattgtaggtttggtctttttacatagtctcatctttcttggaggttttgttcattcattcctgtctgcgttccttatttcagcaagacagttttcaaactccaaaatcctttcttttgcttgatccattcagctattgatatttgtatatgcttcatgaagttctcgtgcggtgtttttgagctccatcatgtcatttattttcctctctaaactgattatctagttagcagctcctgtaacattttatcgaggtttttagcttctttgcattgggttagaacatgctcctttagctcagtggaatttgttattacccaccttctgaaggctacttctgtcaattcttccacctcatcctccatccagttctgcacytttgctggagaggtactcctatcatttggaggagaagaggtactttggtcttttgggttttcagcattttttcattgatttttttttttctcatctttacgagtttgtctagttttgatctttgaggctgctgacccttggatcaggttcatgtggggactctttgttgatgctgctgttgtttctttgtttgtttttctttcaatggtcag

SEQ ID NO: 403992 - DNA, 516 bp, Homo sapiens
tgtgactgatgggcaagaaataccactcctgggtaatacattttagggtaaagctatgataccaaactcaccccatcatttctgagaacggtctggcttaagtggatcatcacagaaagtatcagcattctgggaactcaggcatggttttcccaggtaagctctgctctccacagatatttattctgctcagataccagtccgcttacaaagagttaccactgtctactgtatgcctgtccctggtgtgtgtgtgtctgtgtgtgtgtgtgaggagggtgggaggtggagacagacagagacagagagtgagarctggtgctgaagttccacgggcaaaagggctcttacgcagagaaaacaaagagaaggaatagctgcaggtcaactccaaaatcactgggggcttagaaatccgcagactcagcagtacctggaacactgccttttcaacagactcaatccttccttcccttgggcgtgaaacacaaagggtatttctggtattgtataaag

SEQ ID NO: 403993 - DNA, 612 bp, Homo sapiens
tagactcaaactgaaatatcggctcttcctgggtcttgagcccgtcagcacttggactggagctgcaccatcagctctcctgggcttctggctcaccaagtgaagatcttgggacttctcagcctccataatcacatgagccaatccctgatctcatataataatatcatgaaactaacatattatattatgaaatagatttcataatcacacaagcctatacctttcttctgttcctctggaaaacctaacacagggggaaaaaaaaaaaaagctaggaatcaraaaaaaaaagttcttgggagatagtagctgtttccatggagattactaaaaagagcagagggagagagaaaaccaggatttaaaagatgatcttctatattttatgggaacccctctttatacactaatctttgtttgggagatcttttctcatgagactaaatacatatttcaatctcttccattgtattgctgatacagtccaattgtcatttcttttaaacaattatctaatatgtttactataaataaattgacgccacatcaggcccaggtttactcacaatgtaaaattatctgagtagctgctatctgctaagcaccaag

SEQ ID NO: 403994 - DNA, 617 bp, Homo sapiens
ccaggcttccctggggtgaacttatgtcaagtattttcctgtttatgtgcctcaatttacccatctgtgtaacgaaagcacatcttttcttcctggaaagagcatgagctttggggtgagaccaggacaagaagaccagcgcttccccttactggctctgtggccttggggtacagaacctctgagggccccatttgctgcagtcttccccactgaaatgtaagccctgtgcacatccttgaccgtgtckgcatggagcaaagcagtggccagcgtgtggcaggctgcatagacataaagagtgaataaaagaaggaaaagggatgcagtgagaacactgacagccacttcccagctttgttgtaaagcccatataaagctccgtcaataccttcttgatgacgttcaggctccatctgatccactgaattccaatgactcagggcaagagtggtgtgaaaaggggacaaggcatagcaggctcactctgtccttcctcctggcatctgtgagcgaatgcctgataaatatttgtctatggatgtgtttagttattgatcgaaattttacagcaattgtgtgtataacaacaatgattaaaggtaaggacattgaag

SEQ ID NO: 403995 - DNA, 339 bp, Homo sapiens
attccaatacctcattagattttgcttgggaaaaaattatttcacaaacatgttttcttttsaaatgcaatttttctttaaaacgtgaatcttcagagtatatggtctttgaaagattaaatgataataatttgatctaactatatatcagcatttactttatgaaaagggaaaacattactgttctcaaacgattgtgtattacagaattgcactataggagatgggaaaggctcaggaagagacctctcatgtacagaggaatattgtgagaatagagaagggatctacctcagtctgttttctgctgctataacagaataccacagactgtataat

SEQ ID NO: 403996 - DNA, 618 bp, Homo sapiens
tacagaattgcactataggagatgggaaaggctcaggaagagacctctcatgtacagaggaatattgtgagaatagagaagggatctacctcagtctgttttctgctgctataacagaataccacagactgtataatttacaaagaacagaaggttatttggctcatggttstggaggctgggaagtccaagagcagagcatctggtgttcccctgtccatggtagaaggactgaaggcacaaaagaacactgaagacagagaggaaactggaccaaactccctttcataacaaacccagtctggagataactaacccactccctccataacaccattactctattcatcttttaaaggttccacatttcaacactgctaataacaatgaaatttcaatgagttttggcagaaatcagagcaggataccagagcacacatgacctagcaagttcttgagatagccatactcaaacccagattaccctgtgagaatgtgctgccttttctctagggtccaaaagaagcagcagaaattactctcgaaagcatgtatctgcattcagtgatgtccttctccccaggggatttactgcatgcagccattctaacaacgtaa

SEQ ID NO: 403997 - DNA, 618 bp, Homo sapiens
tacagaattgcactataggagatgggaaaggctcaggaagagacctctcatgtacagaggaatattgtgagaatagagaagggatctacctcagtctgttttctgctgctataacagaataccacagactgtataatttacaaagaacagaaggttatttggctcatggttgtggaggctgggaagtccaagagcagagcatctggtgttcccctgtccatggtagaaggactgaaggcacaaaagaacactsaagacagagaggaaactggaccaaactccctttcataacaaacccagtctggagataactaacccactccctccataacaccattactctattcatcttttaaaggttccacatttcaacactgctaataacaatgaaatttcaatgagttttggcagaaatcagagcaggataccagagcacacatgacctagcaagttcttgagatagccatactcaaacccagattaccctgtgagaatgtgctgccttttctctagggtccaaaagaagcagcagaaattactctcgaaagcatgtatctgcattcagtgatgtccttctccccaggggatttactgcatgcagccattctaacaacgtaa

SEQ ID NO: 403998 - DNA, 618 bp, Homo sapiens
tacagaattgcactataggagatgggaaaggctcaggaagagacctctcatgtacagaggaatattgtgagaatagagaagggatctacctcagtctgttttctgctgctataacagaataccacagactgtataatttacaaagaacagaaggttatttggctcatggttgtggaggctgggaagtccaagagcagagcatctggtgttcccctgtccatggtagaaggactgaaggcacaaaagaacactgaagacagagaggaaactggaccaaactccctttcataacaaacccagtctggagataactaacccactccctccataacaccattactctattcatcttttaaaggttccacatttcaacactgctaataacaatgaaatttcaatgagttttggcagaaatcagagcaggataccagagcacacatgacctagcaagttcttgagatagccatactcaaacccagattaccctgtsagaatgtgctgccttttctctagggtccaaaagaagcagcagaaattactctcgaaagcatgtatctgcattcagtgatgtccttctccccaggggatttactgcatgcagccattctaacaacgtaa

SEQ ID NO: 403999 - DNA, 496 bp, Homo sapiens
ccttaaatgtccaatctagcttttccaggaagccctccccgaacagccatgccaccgccctccctaacagaagcccccaaccttgccttgtgcatgtcaaaatagccctgaataggttatgctctgaaagcatctttattttcaggttaggctgtgagctccataaattgaaggacagccatggagtctagcaagaaacatggcagagaataggtatggaatcacatctgtgggacaaacaggagaaggaatgaaagactaaacaaatgcaagagaaaatgcacatatgaatgactgaataaayccattactctcctttctgatcaaagttttctggggcacttggaatcagctcctacttaggacattaagactgatagaattatacccgtcttattttgaatgcatctttgagctccttttgtcctctgcatatgtccactgaggagaggagggaggtgtgtacaattcatcgtgcctgacagaatcccacaga

SEQ ID NO: 404000 - DNA, 589 bp, Homo sapiens
gaacagccatgccaccgccctccctaacagaagcccccaaccttgccttgtgcatgtcaaaatagccctgaataggttatgctctgaaagcatctttattttcaggttaggctgtgagctccataaattgaaggacagccatggagtctagcaagaaacatggcagagaataggtatggaatcacatctgtgggacaaacaggagaaggaatgaaagactaaacaaatgcaagagaaaatgcacatatgaatgactgaataaacccattactctcctttctgatcaaagttttctggggcacttggaatcagctcctacttaggacattaagactgatagaattatacccgtcttattttgaatgcatctttgagctccttttgtcctctgcatatgtccactgaggagaggagggaggtgtgtacaattcatcgtgcctgacagaatcccacagagaagccagtgtcrggggaaggatgcagtaacgggtggtgtctcaactgcagatgagtcctctatttatccttcctgatgccacaacataaacaggagaggaggtgaacgcaagatgcaaggctcccacacatg

SEQ ID NO: 404001 - DNA, 449 bp, Homo sapiens
ccatgggaaaggtgccctcccagctgtgcaagccacaacctctgtggctgtctgctgcatcctagaatcaatggtagcaattgttgttattccaaagtgctgacattgccttgggcatgggggatgggggagctgaactagaacttgggttttgctgagatgttaatgctgatggcrtgactcactgtggccctggccaggtccatcaactgctcccaatttaatcagatctcagctcagggggggccttttcctggcatcatctaatggaaaatctctcttagatcttaatgactttcagccatggtaactggagtgcatgagcccatgcattcatctcctattgctgctgtagcatgctaccatgatcttagtggcttaacacaaatttattctctaacagttctggaagtcagaagttcaaaatgggtcagagggtctgggttcct

SEQ ID NO: 404002 - DNA, 557 bp, Homo sapiens
ctgcactgcttactagccatgtgcctctaagcaaattatgtcccttacctgtgcctcagcgtcctcatctgcaaaatgtaggtattgtgtctgccttctagtaataaatgtgataatgagtggaatggataatgaacagaaactgcttagcatggtgtatcacccaaagaaagggcttaaactattggtacagcaaagaaacaatagttaatccttacaggatgcttcctatgggccggccttattcacagtgcttttgcatatattaaatcagatcatccttatctcaaattgaggaggaaagttctatggttctattcattttacagctgatggagcagagtacaaggatgkgtgaagtaactcccttaggctgcctgggatttaaactgatgcattctggacccagggtccatggccaatctctattttaaagtgactcacagactttcagagggggcctgcttcttatctctccagttccctttgccatagcttggaagaggaaacaggaaaacccaagctctctgagtataggagctttggctgcacaatgc

SEQ ID NO: 404003 - DNA, 564 bp, Homo sapiens
ggtcactgaaacatggctgtgttccagtcatccacttcacgtgtacctgatccaattttttggccgggagaattggcctttgaagagaaccttggccaagtccatggcttaaacacttaggctgcttttcaaaaggcattttcaaaattactttttttttttaattttaaaagcagtggacttaaaaggagtttttgtgcaattaccttcatttttacctgccttattctcctctcctgcatcccgtctggactaactcagtgacccccacctggtcctgggagtcagtgcatgagttgcasgcatagctcgaccatctatattaccttggggaaagccacacactctccccaagagtcagatttctctttcgtgaaataaagagagggtaagtttggcaaaagcatagcaaagatccttctactttatgaggattacataatttaatctgacctcacctgatggagtcagtactattattatcttcactatgcaggtactgaggcccatcaagtttaagtaacttggaaaatatcacagaaataacatgtaaggtgctgagat

SEQ ID NO: 404004 - DNA, 606 bp, Homo sapiens
tttgttctcccaaaaaacattagagtggttccaagttctggttttagtttatcctaattcaatatgagactttagtggtgagcatggataaacgagatgcttcccaaaaacatactgatctagaaaaaagggaagagtatcctaggcttgctgaataggtgatgatttttatcctcatttttcaagctttttwacaactcaacaagggtctattggatgtgttattttgaaatattttgttaacggtgattattttgtgtaagactgtcaatatctcaaggcccaatatccatttagaataaggtgcattgtaagtatttatgcttacaagtctatatatcaaatagtttttaaaatataactaaatcactctctacttattgttagatagattagcttatcatctttaatttttactgtgtgtatcaataggcttttgtaagaagtaggataaatgtggttggttctggcatttcctggtatttagtatgcttccattattaatattatcttcaattcatgattcatcatggtattagacatttttctatttgtcttttcctaactcttcataaccaacgatatgaggcttagtgaagttaaaac

SEQ ID NO: 404005 - DNA, 606 bp, Homo sapiens
tttgttctcccaaaaaacattagagtggttccaagttctggttttagtttatcctaattcaatatgagactttagtggtgagcatggataaacgagatgcttcccaaaaacatactgatctagaaaaaagggaagagtatcctaggcttgctgaataggtgatgatttttatcctcatttttcaagctttttaacaactcaacaagggtctattggatgtgttattttgaaatattttgttaacggtgattattttgtgtaagactgtcaatatctcaaggcccaatatccatttagaataaggtgcattgtaagyatttatgcttacaagtctatatatcaaatagtttttaaaatataactaaatcactctctacttattgttagatagattagcttatcatctttaatttttactgtgtgtatcaataggcttttgtaagaagtaggataaatgtggttggttctggcatttcctggtatttagtatgcttccattattaatattatcttcaattcatgattcatcatggtattagacatttttctatttgtcttttcctaactcttcataaccaacgatatgaggcttagtgaagttaaaac

SEQ ID NO: 404006 - DNA, 550 bp, Homo sapiens
actcatcagacaattcttggccctcttccccctagcatctctcttgaaaattctatgctatacaagttccagctcagtataacctcctctcccaaccatttctgcatattgacatttagctattgtgttcaccccagatttttggaatcygtagcttttccatattcctaaggcacatctgtacatgctttatttggtcatctactcattcccaaggacactagttggcatatggtattgctttcagctctagaaacactaagatgaaaagatagagcccctgccattgaggtgtttaccagctaatgagagaggctgacatatacatagaaaatgaccatcagttcaaatatttcagtaaatcttgaagttatttttacagggtatgtgtatcccaattagataacaataataagtaatcgtaccatgtgtcataccatttatacattatccaatttatcctcgaaacgtccccaagactctctataacttctgtggcatgaagaaaccaaggcctcaagctaagttttttgcccaagtacacacagct

SEQ ID NO: 404007 - DNA, 574 bp, Homo sapiens
ttcattctcttttatgattgcatcgtattccatggtgtatattgaccacattttctttattcagtccactgttaatggatatgtatgtaaattacatgtctttttgctattatgaaaagtgctgcagtgaacatatgagtatatgtgtctttacagtagaacaatttatattcaattggatatacacccaataatacaattgctggrttgaatgatagctttttgtttttgtttttgtttttgtttttttcagaaatctgtaacccaaactgctttctacagtggctgaactaacttatattaccatcagcagtgtataaacattcctttttctgttattttttgactttttaattgtagccattctgactggtgtgagatgatattgtagttttgatttgaatttctctagtgattagtgatgttgagcattttttcatatgctagttggctgcaggtatgtcttattttgagaagtgtctgttcatgtcctttggctttttaaaaatggggttatttgtcttttgcttgttggttaaagtttattatgggttctagatattagacccttatt

SEQ ID NO: 404008 - DNA, 574 bp, Homo sapiens
ttcattctcttttatgattgcatcgtattccatggtgtatattgaccacattttctttattcagtccactgttaatggatatgtatgtaaattacatgtctttttgctattatgaaaagtgctgcagtgaacatatgagtatatgtgtctttacagtagaacaatttatattcaattggatatacacccaataatacaattgctgggytgaatgatagctttttgtttttgtttttgtttttgtttttttcagaaatctgtaacccaaactgctttctacagtggctgaactaacttatattaccatcagcagtgtataaacattcctttttctgttattttttgactttttaattgtagccattctgactggtgtgagatgatattgtagttttgatttgaatttctctagtgattagtgatgttgagcattttttcatatgctagttggctgcaggtatgtcttattttgagaagtgtctgttcatgtcctttggctttttaaaaatggggttatttgtcttttgcttgttggttaaagtttattatgggttctagatattagacccttatt

SEQ ID NO: 404009 - DNA, 530 bp, Homo sapiens
tttgcccattcagaattatgttggcttgtaggtttgccttagacatctcttgttattttgaggtatgctcctttaattcctagtttgtttagggcttttaatataaagggatgttgaatttcgttgaaagccttttctgtgcctattgagatgatcatgtgttttttgtttttagttctgtttatgtgatgaatctcatttattggtttgtgtatgttgaaacaacttgtcatcctaggaaaaaaagcctactgatcttggtgggttagctttttgatgtgctggtggatttgatttggtaggagttttacatctacattcatcaaggatagtggactgttttctttttctgttgtgtctctgcccagttttggtgttattaatagaatgatgctggcctcatagagtgagttagagaggagtccctactccttgatgttttgaaaatatttcagtagttttggtrtcacctgtactgtctatatctggtaaattttgactgtgaatctctctgatccagggctttttat

SEQ ID NO: 404010 - DNA, 604 bp, Homo sapiens
cctgcccttggtgaattataaagggggagcaatttgtcttcagcacaaagttgctatgtgtgtttgctctgagactttttccccctctgtgtaatagagtaggtgcactgcccttgctgggtgcactgggggattcagtggcaccacagtgtgcaagctggggctcakcatggggtctggcagctaatgggcatccagtacatcttcggcccattcctttcaggctcctacagtctcgtgttgcttcctcggccactagcaccttgtggctcacctataaaagactcagtgaccaggcaacaacctcctgagaatactgtagacaggaaacccttagcctggctctattactgagaactgctagtaatcagctcagtgaccttggaaaaatcgtgtggattctctcagtttctcatccatataagggacagtattcataagagaagcactaagttcccttctaattttgacatttaatgtgtcatcagacatgcgttccattccatgcaaacatttgttgccttagatgaaaaaagtacaagttcaataagaaactcagctcaaatatgttactcttattcaatatcagtgctgtctcccctaa

SEQ ID NO: 404011 - DNA, 604 bp, Homo sapiens
cctgcccttggtgaattataaagggggagcaatttgtcttcagcacaaagttgctatgtgtgtttgctctgagactttttccccctctgtgtaatagagtaggtgcactgcccttgctgggtgcactgggggattcagtggcaccacagtgtgcaagctggggctcagcatggggtctggcagctaatgggcatccagtacatcttcggcccattcctttcaggctcctacagtctcgtgttgcttcctcggccactagcaccttgtggctcacctataaaagactcagtgaccaggcaacaacctcctgagaatactgtagacaggaaacccttagcctggctctaktactgagaactgctagtaatcagctcagtgaccttggaaaaatcgtgtggattctctcagtttctcatccatataagggacagtattcataagagaagcactaagttcccttctaattttgacatttaatgtgtcatcagacatgcgttccattccatgcaaacatttgttgccttagatgaaaaaagtacaagttcaataagaaactcagctcaaatatgttactcttattcaatatcagtgctgtctcccctaa

SEQ ID NO: 404012 - DNA, 604 bp, Homo sapiens
cctgcccttggtgaattataaagggggagcaatttgtcttcagcacaaagttgctatgtgtgtttgctctgagactttttccccctctgtgtaatagagtaggtgcactgcccttgctgggtgcactgggggattcagtggcaccacagtgtgcaagctggggctcagcatggggtctggcagctaatgggcatccagtacatcttcggcccattcctttcaggctcctacagtctcgtgttgcttcctcggccactagcaccttgtggctcacctataaaagactcagtgaccaggcaacaacctcctgagaatactgtagacaggaaacccttagcctggctctatyactgagaactgctagtaatcagctcagtgaccttggaaaaatcgtgtggattctctcagtttctcatccatataagggacagtattcataagagaagcactaagttcccttctaattttgacatttaatgtgtcatcagacatgcgttccattccatgcaaacatttgttgccttagatgaaaaaagtacaagttcaataagaaactcagctcaaatatgttactcttattcaatatcagtgctgtctcccctaa

SEQ ID NO: 404013 - DNA, 504 bp, Homo sapiens
aaaaaagtacaagttcaataagaaactcagctcaaatatgttactcttattcaatatcagtgctgtctcccctaattgaatgtaattaaacacatctcctattgttttaaggtattcttaaataaacattttaaacttaatttcaaaattaaaaatttttaatgaaatgaatcagacagataaaatagttacatatatatgtaactatatatatatatatatatatatatatatgagagagagagagatagataaacagagatggcacatacatcttcattataacaatattaaaacttagtacacccaatctagtctcaggacgagatcatagtctgtacctatgcagtgtcctctgtgccctttcctgatcccattcccatctctctcccccttcaggtgacatttctgacatttctcaattttgtgttattaagttccatgttttacrtttttccatatgtatatatcacataaaatggttgtttagttattttagtcaaa

SEQ ID NO: 404014 - DNA, 568 bp, Homo sapiens
ccatgttgcgtaggctggtctccaactcctgtactcaagcagtccgcctgcctcggcctcccaaagtactgagattaaaggcatgagtcaccttgaccagcctagttatttatttatttatttgtttatttgtttatttatttatttatttttgagatggagtctcactctgtcaccaggccggagtgcagtagcatcatctyggctcactgcaacctcccactccctggttcaagcaattctcctgcctcagcctcccaagtagctgggattacaggcacgcaccaccacgcccagctaatttttgtatttttagtagagacagggtttcaccatgttggccaggatggccttgatctcctgacctcgtgatccacccgcctcagcctcccaaagtgctgggattacaggagtaagccactggatccggccctggcctggctattttaaaggtattttttatccatcagtaggtagaaatgcaactgactatagcattggcttttactgtctactcagtttgtttaggctgctatacaaaaatgtcataaactgggtggcttataaa

SEQ ID NO: 404015 - DNA, 568 bp, Homo sapiens
ccatgttgcgtaggctggtctccaactcctgtactcaagcagtccgcctgcctcggcctcccaaagtactgagattaaaggcatgagtcaccttgaccagcctagttatttatttatttatttgtttatttgtttatttatttatttatttttgagatggagtctcactctgtcaccaggccggagtgcagtagcatcatcttggctcactgcaacctcccactccctggttcaagcaattctcctgcctcagcctcccaagtagctgggattacaggcacgyaccaccacgcccagctaatttttgtatttttagtagagacagggtttcaccatgttggccaggatggccttgatctcctgacctcgtgatccacccgcctcagcctcccaaagtgctgggattacaggagtaagccactggatccggccctggcctggctattttaaaggtattttttatccatcagtaggtagaaatgcaactgactatagcattggcttttactgtctactcagtttgtttaggctgctatacaaaaatgtcataaactgggtggcttataaa

SEQ ID NO: 404016 - DNA, 580 bp, Homo sapiens
tgaattgtctcttgaatgtatgctcttggttgaaagtaaccccagaaatatgccttcttctggggtggcttaagggttcctgagacatttatttgcaagagcatagccaaaagctggggcgatgaccttaatatggccaggaagctacctctcacctggaactttaagtcttaactgagatgagtcaacacaaaagaaaacattatagttcctgcagcccagtggtgggaacctggtgagcttgtcaagttctcactgatgagactggcaagaacaccctgatagctcttagttcttagccttgttcatcacactatcttccctatgatcctcgcacctgcactccagttctccagtgggtccattcttgcacaggtaagccaggattagtgttggcatcccaggaaccatgactgcttcagttrtctattgaattactttagaagtacctggagtgatggaaagtgcttggccaaagtttacaaagccctgtagccaataactggttccaaatttcaggtctgccttttctgctcacatttcaacattggacagtcaaactttctaagcacgaatttct

SEQ ID NO: 404017 - DNA, 583 bp, Homo sapiens
taattatgatatctactttcactaagtgaaagtgagaatgaaatttgaaaacttaacactgcaacaacttgccagcataataaatacttgtaatgggtcagtgagtgagtaaacgtgtcctgtaaatgctattacattaaggttaggccactacattgtttagaaaaccatgtagcagcacttattaagaktagatctaaacacattacataacatagctatgtcaatcgagccctagaatgtacaatatattgtatattgctgttgaaatcgatgtaacatcattccctgatcattttccatattttaatttatattgcctgtacttcattgatacatcttttattcctgccataacaaacttcctactcatcccaaatatgccccatggatttctccacctggtctcaagccagatggttccatcttctcagaattctcatccaccaacctgtgcaaagcgtacctatttcttcaaagtcctctcactctttttaactcccatgatactttgcctacttctccaatagcaataacagcaccacgatcataataggcttccattagttgggtgtcaaacttt

SEQ ID NO: 404018 - DNA, 577 bp, Homo sapiens
gcccctgccatcttgggacttgtattccagtgacagacagactgaactaccaaacaagtaaataatttctcataatatgcctcttaattaaatgaatcaggttaaagaaagagagaatacattagtggacatggtttcacctgaaagaacgagataatgctgattcaaatggcttaaaccaggggtccacaaaccagcccataggcctagtctgacaactgcttttgtaaataaagttttattggaacacaaccacacccatttatttacatatactttatggctgctttcatgtgacaattgcatcttcaagtacttccaacagatcacatggcctgcaaagcttaaaatatttcctatctagcctttaacagaaaactttttccaatccctgttttaaacaatagagaaatgtattatcccccataaatgaagattttgaggaagacaatatcatgtcctgaatcactgctgtcacgtgggactcaggatcctcgcatctttccattctgtggccttcargctacagcttcatgcaaggctgggtccctttaggtttgcaagatggaatacagat

SEQ ID NO: 404019 - DNA, 618 bp, Homo sapiens
agccttcccccattatcaatgtcctgtaccagagtgttattgctacagtagattagtgatatggtttggctttgtgtccccacccaaatctcatcttgaattgtaatccccaggtgttgagggaggaacctgtgggagttgactggatcatggggacagtttcccccatactgttcttgtgacagtaagtgcattctcttgagatctgatggttttataagtgtttggcaagctcctccttcacttgcttctctctcctgccaccatataagatgttcctgttttgccttccaccatgattgtaagtttcctgagacctttccagccatgtggaacggtgagtcaattaaatctcctttgtttataaatcacccaatcttgggtagtatccttatagcagtgtgagaatgggctaatacaatgagcctaaattgacacattgttatcatagcatacattactgttcactcttggtgttgggcattccataagtttggacaaatgaatgatgatttaacaccattatagtaccatacagagtactttcactgycctaaaattcctctgtgctctgcctattcatcccttcattctccctaacccccacccccaacatgc

SEQ ID NO: 404020 - DNA, 589 bp, Homo sapiens
tgtgagaatgggctaatacaatgagcctaaattgacacattgttatcatagcatacattactgttcactcttggtgttgggcattccataagtttggacaaatgaatgatgatttaacaccattatagtaccatacagagtactttcactgtcctaaaattcctctgtgctctgcctattcatcccttcattctccctaacccccacccccaacatgcacttttaagccacagttgaccagctaggaactggcaggttcagaaattacttctgggtactcagactccaaatctgttctcttcgctgtgttctagtccaaaaaagttgataatcatgatgcaagtttagtgagagaagtaaatgaaaaaacaaagcactctgaaagagctcaatagatggctggcttcctttcttagcatgcaacacagacccaccctgaggtgaacatctgcatgctgaaaacctcagtttctcggtgcctttgaactgaatccactagactaatgcccctaccttatccttattcctttatcagtcgctggataaatctgccatttgcctaaagagragggagtctttagggttcgga

SEQ ID NO: 404021 - DNA, 447 bp, Homo sapiens
tggcatcagggtggatcatgggctatttctctcctttgcacacaactccacaaacacacagccttgagataggacctactggggtctttacattccatttaatgcaagcctttgggtgagtcctgactcatcagtagcagcagcctcactggggttgtaatcccctgacttattaaagacaagccatcctcgcacacagggacgaggaggtgcagggatgttctcctgacaaccatcacgtagtcctttctgatttgtcagtggcattgcattaaaatygatccatttcccaaactccattgctgtccttgtcttatcaaattatagacacagctagagcccatcagtccttccccctgggagtgggaactcctcagcacagcagggctttctgatacaatgtggtttgcttggaattcattactaaggggacttggtgaattggag

SEQ ID NO: 404022 - DNA, 570 bp, Homo sapiens
ttgcttggaattcattactaaggggacttggtgaattggagatctattactttttacattctgctttctgtggagtgcctgggataacatcctggctactctccagratgtttttgattgtttttgtgctcctctctttctttctgtttttatttgctttgttttattttgctttgtgtttggtggtagaggtcaggttgagacaacacagtagaaaaaatagtaactctagatctgcgaggtctaacctaagtcttagctacatcctatcacttgacatttttaaacccattgaaagaggatgttaaacagcattcacttcaaaggatgttgtatgtgcctgacacatagtagtacgtgctcattaaatgtttcatgttgaacaaataaaatagtaaacacagaaatatagacacacaaccaaacatatacattgtgcctataaaaagatattcaactgccaaggtttttcatatatatatatatatatatatatatatatatatatatatggtgtccatattcttcacgttaaatttttttatttccaaattgaagatgctaggctaa

SEQ ID NO: 404023 - DNA, 570 bp, Homo sapiens
ttgcttggaattcattactaaggggacttggtgaattggagatctattactttttacattctgctttctgtggagtgcctgggataacatcctggctactctccagaatgtttttgattgtttttgtgctcctctctttctttctgtttttatttgctttgttttattttgctttgtgtttggtggtagaggtcaggttgagacaacacagtagaaaaaatagtaactctagatctgcgaggtctaacctaagtcttagctacatcctatcacttgacatttttaaacccattgaaagaggwtgttaaacagcattcacttcaaaggatgttgtatgtgcctgacacatagtagtacgtgctcattaaatgtttcatgttgaacaaataaaatagtaaacacagaaatatagacacacaaccaaacatatacattgtgcctataaaaagatattcaactgccaaggtttttcatatatatatatatatatatatatatatatatatatatatggtgtccatattcttcacgttaaatttttttatttccaaattgaagatgctaggctaa

SEQ ID NO: 404024 - DNA, 570 bp, Homo sapiens
ttgcttggaattcattactaaggggacttggtgaattggagatctattactttttacattctgctttctgtggagtgcctgggataacatcctggctactctccagaatgtttttgattgtttttgtgctcctctctttctttctgtttttatttgctttgttttattttgctttgtgtttggtggtagaggtcaggttgagacaacacagtagaaaaaatagtaactctagatctgcgaggtctaacctaagtcttagctacatcctatcacttgacatttttaaacccattgaaagaggatgttaaacagcattcacttcaaaggatgttgtatgtgcctgacacatagtagtacgtgctcattaaatgtttcatgttgaacaaataaaatagtaaacacagaaatatagacacacaaccaaacatatacattgtgcctataaaaagatattcaactgccaaggtttttcatatatatatrtatatatatatatatatatatatatatatggtgtccatattcttcacgttaaatttttttatttccaaattgaagatgctaggctaa

SEQ ID NO: 404025 - DNA, 546 bp, Homo sapiens
gacaagctgtattctagttctatttcatataccttggacagattatgtaatagtttaagaccctcagtttccaacatttgtaatattaaaggaggagataatacaatggtccttcacatcstttgcctgctgcataaggacttacagaacttgacatacaaaatattcaactaacaccaatctgcatcactcggtgtgtgtgtgatttcccaacacttctctctttttcccccttatttcctccttccttccaaatttctctctcttttgctctgtaattatttatttgctgtctcctcacacagcatattctctgtcatcaagactgcactctttgagtcttcagactacccccttctcacagctgctgagggtaaaatatccttgcttcctaggtccactcatatgatcgaatttgaatcaaggtctcaagctaatctaaggaaaaaaaaaaagcagagaagctatatggcagaaagcagagaattggaagggaagtcacaaaagaagagaacatacttgcaggcattgtttcaggtagtgagt

SEQ ID NO: 404026 - DNA, 569 bp, Homo sapiens
acagacattgtgacaaaataaacgtttttgtttcaagctgctaaccttggggggtaatttgttacacagcagagaagactaataaagtgttcacatcagattcttccaacacacttcttcaggtcctctgggactcacctggctccgaatccagttatctttgaggtgaccagtcttgcttgggctccagtcaccttcatgcaggtggaatctggtccgactttgcttctgtcttatattgtacctgtctcctcccacctgccttgcacccaygcatgtctattttgcagataagttaacttgctatggtgcaaatctttgaccagagggcaatggaacaatggataatacatgatttcccctttcctttttcctggaaatggcatcctgagatacatttcttactgcttttcaggaactgttgtatggtaactgtgaaagtatgcaacaatacctacagagacagccacctggcaacacttgcatcagcaatctctccttccatgatttgcttcctgactctctctcctgctccctgggatcacatctcccaaaactgcatgtgcaga

SEQ ID NO: 404027 - DNA, 569 bp, Homo sapiens
acagacattgtgacaaaataaacgtttttgtttcaagctgctaaccttggggggtaatttgttacacagcagagaagactaataaagtgttcacatcagattcttccaacacacttcttcaggtcctctgggactcacctggctccgaatccagttatctttgaggtgaccagtcttgcttgggctccagtcaccttcatgcaggtggaatctggtccgactttgcttctgtcttatattgtacctgtctcctcccacctgccttgcacccacgcatgtctattttgcagataagttaacttgctatggtgcaaatctttgaccagagggcaatggaacaatggataatacatgatttcccctttcctttttcctggaaatgrcatcctgagatacatttcttactgcttttcaggaactgttgtatggtaactgtgaaagtatgcaacaatacctacagagacagccacctggcaacacttgcatcagcaatctctccttccatgatttgcttcctgactctctctcctgctccctgggatcacatctcccaaaactgcatgtgcaga

SEQ ID NO: 404028 - DNA, 630 bp, Homo sapiens
atttttaatgataccactttaaagtttgtctcatccagcaacttaggaagccttctctaaaaacctccctttggacgaagtgttccttctctgagatctcagaagaamctagaacatctgactgccttattcatttttcataaaaaacattataaactttgctggaacaacaaccatagtatattcatctaacaccttcagtgcttaatactcttcattgaatgaatgaataaatccaataaagcaagaagaatgactaaaaccaattttcccttgaatgtcgtgctgacaatttcaacataaatctgaaagctactcaattctgtgttgaaagttagggtgactggaataaaaactcacactctttcaaccagttccatattcagcctgcacccagtttgctgttatcagtgcagttcagcaaggcagacaatctggccctcctcctctagcacttcagagcttatgagatgacatggtaaaacgtgcagaataaacctgggggggtgggtgacaagcatttttcacctcccctcttgccttggctaggcctacacccttcacttcccaatatcccacctctaacatcaaccttattttcaagagtgagagcatgaagtgtccaaagtt

SEQ ID NO: 404029 - DNA, 568 bp, Homo sapiens
atgactaaaaccaattttcccttgaatgtcgtgctgacaatttcaacataaatctgaaagctactcaattctgtgttgaaagttagggtgactggaataaaaactcacactctttcaaccagttccatattcagcctgcacccagtttgctgttatcagtgcagttcagcaaggcagacaatctggccctcctcctctagcacttcagagcttatgagatgacatggtaaaacgtgcagaataaacctgggggggtgggtgacaagcatttttcacctcccctcttgccttggctaggcctacacccttcacttcccaatatcccacctctaacatcaaccttattttcaagagtgagagcatgaagtgtccaaagttctacaaccttggaaatgtctacagatcaatgacttttgagaccaaagaatgtgtgtgataatttaataaatacaatatgcttaagttcccctgttcacacacaaatayatatatatatatatatatatgcacaaaaaatatataagaagctcattagcacttgagacagttcattctgtttctacctaaa

SEQ ID NO: 404030 - DNA, 579 bp, Homo sapiens
attttaagttttcaaacagacttttgaatttaatgagtaagattttaatttaataacaaagaatttgaaacttcaaaactccaggaatttggccatgaatagtagcttcaagagattattaactgattaatttttttccccactcytcaacctaaaaactggatagagtttgattggactaagagaatctgagacagagtcaaaggggaagtgaagatggctgtagcacttaccagtcccccactaagaggctccatgcatgctctcaccccaccttcaaacctggctgagtgtcctaattctaaagaaaaaaacatgaaatgacatggaggaatctctgtgcagagatgatctgtgtcctcatccctcattcgaatttgggcacacagcaggtccctgagttctccaagcaccaaatggtttcctatcaaaggaccttaaagggtccagaatccagaagtagcaactcgggataagcagtgagaagttaatgactgaggatcctatgggaagatgtaaaactcaaaggatgctggtgaggaagataatgatcacaagctaaatactcaatccccatgc

SEQ ID NO: 404031 - DNA, 579 bp, Homo sapiens
attttaagttttcaaacagacttttgaatttaatgagtaagattttaatttaataacaaagaatttgaaacttcaaaactccaggaatttggccatgaatagtagcttcaagagattattaactgattaatttttttccccactcttcaacctaaaaactggatagagtttgattggactaagagaatctgagacagagtcaaaggggaagtgaagatggctgtagcacttaccagtcccccactaagaggctccatgcatgctctcaccccaccttcaaacctggctgagtgtcctaattctaaagaaaaaaacatgaaatgacatggaggaatctctgtgcagagatgatctgtgtcctcatccctcattcgaatttgggcacacagcaggtccctgagttctccaagcaccaaatggtttcctatcaaaggaccttaaagggtccagaatccagaagtagcaactckggataagcagtgagaagttaatgactgaggatcctatgggaagatgtaaaactcaaaggatgctggtgaggaagataatgatcacaagctaaatactcaatccccatgc

SEQ ID NO: 404032 - DNA, 544 bp, Homo sapiens
agaataaaaatgaggttcaactacaaaaaacagctccatttttgcaaatctaagttggtgggctatgttaccatgagtaaagggactcacacagcatctggcccagagcaggtgtcctgttattaacagctcccttcccacaatgttgaactgactctgacctcacaacactctcatagctcccagtttagctctcgtggtgacaawgacaaatgatttaatcatagagtctttgcccagtatggaactttccaggccagctctctcaatttagagtttggaacctgagacccagggatggggagagacactgccagacacagcgaagtagcatcagagataggagggaagctcaggtctcctgaatttatgttacaactctttccatttcccatgaagcttcccaaggaaaaaagccgaggatgactttgcaggagatcatcaataatttaattggtggaagacagaagggcaagagggagttaattagtgtgaagagctaatcaagacaatatggccccaaggggaatcctaatactctcca

SEQ ID NO: 404033 - DNA, 544 bp, Homo sapiens
agaataaaaatgaggttcaactacaaaaaacagctccatttttgcaaatctaagttggtgggctatgttaccatgagtaaagggactcacacagcatctggcccagagcaggtgtcctgttattaacagctcccttcccacaatgttgaactgactctgacctcacaacactctcatagctcccagtttagctctcgtggtgacaaagacaaatgatttaatcatagagtctttgcccagtatggaactttccaggccagctctctcaatttagagtttggaacctgagacccagggatggggagagacacygccagacacagcgaagtagcatcagagataggagggaagctcaggtctcctgaatttatgttacaactctttccatttcccatgaagcttcccaaggaaaaaagccgaggatgactttgcaggagatcatcaataatttaattggtggaagacagaagggcaagagggagttaattagtgtgaagagctaatcaagacaatatggccccaaggggaatcctaatactctcca

SEQ ID NO: 404034 - DNA, 544 bp, Homo sapiens
agaataaaaatgaggttcaactacaaaaaacagctccatttttgcaaatctaagttggtgggctatgttaccatgagtaaagggactcacacagcatctggcccagagcaggtgtcctgttattaacagctcccttcccacaatgttgaactgactctgacctcacaacactctcatagctcccagtttagctctcgtggtgacaaagacaaatgatttaatcatagagtctttgcccagtatggaactttccaggccagctctctcaatttagagtttggaacctgagacccagggatggggagagacactgccagacacagcraagtagcatcagagataggagggaagctcaggtctcctgaatttatgttacaactctttccatttcccatgaagcttcccaaggaaaaaagccgaggatgactttgcaggagatcatcaataatttaattggtggaagacagaagggcaagagggagttaattagtgtgaagagctaatcaagacaatatggccccaaggggaatcctaatactctcca

SEQ ID NO: 404035 - DNA, 544 bp, Homo sapiens
agaataaaaatgaggttcaactacaaaaaacagctccatttttgcaaatctaagttggtgggctatgttaccatgagtaaagggactcacacagcatctggcccagagcaggtgtcctgttattaacagctcccttcccacaatgttgaactgactctgacctcacaacactctcatagctcccagtttagctctcgtggtgacaaagacaaatgatttaatcatagagtctttgcccagtatggaactttccaggccagctctctcaatttagagtttggaacctgagacccagggatggggagagacactgccagacacagcgaagtagcatcagagatrggagggaagctcaggtctcctgaatttatgttacaactctttccatttcccatgaagcttcccaaggaaaaaagccgaggatgactttgcaggagatcatcaataatttaattggtggaagacagaagggcaagagggagttaattagtgtgaagagctaatcaagacaatatggccccaaggggaatcctaatactctcca

SEQ ID NO: 404036 - DNA, 596 bp, Homo sapiens
gaagagcttctcccaccaagataccaaatcatcaagaagattagcacactccaaacagatctccagaaagaaggcacagagagtgaatggagggagggtgcagatgcaaggctaaaaggggaggaaggtagaagccctgcatggagttgccaagcaccaggactcagtcctggcccagagtggatcctggggaagaggtgtgtgaaagaggcatggagtggcccagtctcatcatggacctccagaatcctagcttcaggagattccacaaccccgatggacatttaagctggcaggaaactgcccagagagatggcagagacagaactccagcctgcatgtagcttagagaatatggcttgggaacaactatagtggagcacagtcattggtgctcatcctcctaggctcacaatacccctctagytggctttagccttgattgactgacagacctgaacagagcagggctatctttcccatgggagggggccagtctgatctgactgtcctcatctgctggcttatcccagagtccctgcctgactgcacctagttgcaacacagcctcagctgcccagcccaggcacctgcca

SEQ ID NO: 404037 - DNA, 584 bp, Homo sapiens
accacagtcaaaagcatcaaagaatcccacccaaaatacagtaattttaaacattaaaggaacatcaacccattcacatgagaaaaaataagcataagaactctggtgacactaaaagccagtcttcttacctccaaaggagtgccctaacttcccagcaatggttcttaaccatgctaaaatggctaaaatggcagacgtcaaattcagaatctggatgataatgattatcatcaagtttcaggagaaagttgaaacccaatccaaggaatctaaaaaatccaataaaatttatataagagctgaaagatgaaatggctattttaagaaagaacaaaagtaatctcctagagctgaaaaactcactataagaatttcataatataatcagaagtattaacagcagaatatacaaagatgatgaaagaatctcagagcttgaatactggttcttcaaaccaactcagacaaaagtaaagtgaaaagaatttttaaaagtgaatgaaaccttgggaaaatgagggattatgtaaaragaccaaacctatgactcattggcatcgcagaaagagagggagcaagca

SEQ ID NO: 404038 - DNA, 585 bp, Homo sapiens
aaggactgtgcacttaagaaacaacttagaaattcacaaaatgtttgggattcaaagggagaggcttagcaatcctctaattgggcatttatttacaaaattataaacctaggcaagcttttatataaaatattaactgggattatatcaaaagaagcttccatgctcaaccaagtttgggacatgttaggtcaaatgtctagattgcaggacttctcagagcctttgagatgatgattccctctgtaatactctaagcaggactagtgcagaatgtctccctagctcccttaattatggaattattattttgtaggttatyacctggactgattgtctatgttatactctttgagaaaagctgatctaagctgatctaccatcactgcaaccttaaaatcattaaaactttctgagacttggttgctttctgtgctatttctgtcctaccaatgaagaccaaggtggtgtaactgtggaaaccctgagcaggcacacaggaggcacagggcactcacgtcgcctttctttcccagtcagtgacagccacgtgcttaaaagaaacccatctgtttaccagcccag

SEQ ID NO: 404039 - DNA, 593 bp, Homo sapiens
tgtttttgtcaggtttgtcaaagatcagatagttgtaagtgtacccccattatttctggattctctaacttgttccatttgtctatgtgtctgtttttgtacaagtaccatgctgttttagctactatagccttgtagtgcagtttaaagtcaggtggtgtgatgtctycagctgtgttctttttgtttaggattgctttggctatttgggctcttttttgaatattagaactcttacatccatattttatgtctccagttttctactcacatatctttgtactgtgttactactgtgttttgggataatttttttatctcaattttcaagctaagttatttgatatttatgtttttccgttctatttaatctatatattgaattatttaaatcgagttatattttaaacttctaattatttctaaaataattttacctttttcaataccataactgttctattttatggatacaatattctcacatctctctccctctctctgtgtgtgtttgtgtgcatttatgtgttttctgctgtttccttgatgtagcagatattcattagtatcattttctgcatcttccttggtga

SEQ ID NO: 404040 - DNA, 515 bp, Homo sapiens
gcattagctcctggccagtgtgtaacaaggaaactttgattaaagacagacaaaaatgccaatctatgatgtggagtagtgagcatttgttataactgctgtccacaaaaatttgaaggcagataatatattaatatacttgtgatttgggttaagatgtagtaaaacagaatgtcaccagagtaccatggttgttgttagatgcatttgacaagaaactataaagaagagatgagctcrgaaaagaattgaccaaggataaagaaaagaaatggaaaatttggaaatgttgagacttccagggttgaaaacatgcaactaattttcttatctaacagtagaagataaaatttagacatcctctgagcaacaggggccaactaaaactcaatgttcaaaaagaatcaattgaggggtgtggctactacatcattagttaaaatctctaaaaggatgacactccctccaaaataaatcctttcatctggacagatggctcagggaaaggcgatgat

SEQ ID NO: 404041 - DNA, 573 bp, Homo sapiens
aatatttctagtgtaaagataaaagagaaaactattaaaaaataaccatagttatattaatttcttaaaggacacacaacacaaaaaatataagttataagcctgggcaatatagtgagaactcgtctctaaaaaaaaaaataaataaataaaaattaaaataataataaatcagccaggcatggtggtgcatgcctgtagtcccagcttcttgggagcctgaggagggaggagcccttgagcctgggaagttggtcaaggctgcagtaagccaagattgcaccactgtactccagcctgggtgacagagcaaaacactgycttaaaaagaaacaagtaaattataacatcaaacacataaaatgaaggaggagtaaaagtgtagagaatgaatagcaagaaaacaaataatccaattttataaatgggcaagggacctgaatagacactcctcaaaagcagacatacaaatggtcaacaggtatgtggggaaaaaaaaaatgctcaacatcactaatcattaaggaaatgcaaattaaaaccacaatgagatatcatttcacacccattaga

SEQ ID NO: 404042 - DNA, 558 bp, Homo sapiens
aatgcatccatcttggttcctgggtaaataacttttgcaaatgtctatggttttctggtataactgaatttgggtttaactatatggtgaaaggatccaaacacttgtgttttgatacacacacatacacccaaaaacatttttttaagatatttggcaaggcattttgtttttaacatttgtgaaatgcagcctaacaatgttcttactgtagtcctgcccaaaagtgatcacttttctgtacttttccctatgacaaatttattttccctatatgcttttgttggctagcagctttggcatgacctgactgacaatgagccagaagatctgagcygggggaaaatgcatggctctcaagtcttggcacagtggtggataagagcagagcaaatgccacgcattcaagcagggccctgtgtgctggctcatcagctcagcaaaggacaacacagagagcagatgaagatgatataccctacaacctcagaaatagaaactcaattttttaaaattggtttttcagtgttaactaaacaattgccaaagcctcgttta

SEQ ID NO: 404043 - DNA, 637 bp, Homo sapiens
aataccacaaaactctaaatgaatgagccaaaactcttacattaccaacatcaaactatcccaaaggctgaaaatgttttaataatatgcatcttatagctagaaatatggtaaaaaataaagaatgaagaatttcaaagcaaaataaacaaaccttcacgtcacttgaagtagacaacagttagaaaggggaaaaggtgctggaaatgaagttagaagtaatcattttaaagagtgggaatgacaagcaagtttttgtggtgagaagagtttgttttcatgagaccacattgaacaaaatgacacagtggaaccattttgtgtggtcctgttcatatttccattggatagacactgtactgattctaccatatgctttgcagccaaatatgacaaaatgtaaccttaagcaaaaatatatayaaaatattgtttgttatttaaattttaaaacaagtattatattcagaacaagaaccacacagcagttaagtattataaaacatactctatgtatgagcatagcttcagtctaaacattttttaaatgttctttgatgagaagatttaatttaaaatatcttttaatttattaacctgctgtatttcacaaatgcaataaattctactttgataa

SEQ ID NO: 404044 - DNA, 468 bp, Homo sapiens
taatacattctaatgactggtagatcaagttctctcagcttgttctttcttaatagtgtctcaactattcttggcctttaaatcagcatacatgttgcccacacatgtacacacacaacctgacagaatttttattgggattatttgaccctatactatagatcaatctgaggaaaartgatacttttacaatattgagtcttttaattcatagaatattccatgtgtttgaatctttaatctttcaataatgttttattgttttctagagagatattttatgtgacttttgtagatttattcctaggaatttgataattttgatgctattataaatagtgcttttacaaatttgttttggtaagtggaaataaaatttatttttgtgtcttgactttgtattggcaatctttaacttattgtttaattagaataatttaaatttttacatctgtaaataaaggctat

SEQ ID NO: 404045 - DNA, 541 bp, Homo sapiens
tgtatttttagtagtgatggagtttcaccatgatggccaggatggtctcgatcttctgacctcatgatctgcccgcctcagcctcccaaagtgctgggattacaggcatgagccaccgtgcccagcaataaaaagttttaaaagttaattggttaatggttatgttaacatattgttctttgtgttaacagtatgctatgcatttctaatagagctggctatctatctcagaatatttctagaaaaatatttttctcaaataattttaagtagatcactgacaatggggatctctgaattagcagtgctgtcccagggtgaccacctcagatgcatatataaaatgtcctgaaatatcactgaatgttttctgaggcaggcagtgggatgatacaagtggagtctaaggaagatctacatggcaatgatatcacagaaaggaagcacacagcaaagtaagaagtggtgatctaaatgastgtggatgaggattggaactctggtcggcagttaggatggaaggaaaatattagagaaattc

SEQ ID NO: 404046 - DNA, 349 bp, Homo sapiens
ttctttatgcaatcatctgttgatggacacttatgctgatgctatggctctattactgtgaaaagcactgtgataaacaagagtagatatatttttggtataatggtttctttccattttggtatatacctagtagtgggattgctgggtcaaatggtagttctattttcagttctttgagaaatcttcatactgtttttcataaaggttatacaaatttaccttcttatcaacaatgtataagcatttccttttctccacatcctagccaacatctgtcattttttgactttttaataatagccattctgactggtgtatgatggwggttttaatttgcatttatctg

SEQ ID NO: 404047 - DNA, 562 bp, Homo sapiens
gaacaatttgaaaaaacagaaataaacatttcaccaatgcgaaacaaaatcaagtggtgcattattttatttacttggatagactgtcttgagatgcagtccacatatctcctgcttaaaaaacataatttgatcctgaaaacaaatgcartaagtacaaatctttcaaacagaaacttgttttattaattgtaactgaaaaactactgatgtatttcagctcaacccaagttaccattattttctctgcattgttcactttaccaaattctaaacatattgaagctcccagtctgcactcaaactgcacctaataaataaacctactacagaccactacttttagggcaaaataaagatgattatatgtgtaaatagtgaaagtatatgacataacgaacagatctagaagaggctacctctttatttgatttgattggcatttgtatatgaagaaaaatatttcaagcttacttaaacacaaaacaaaatttacatttgtcttataatggcattctcagactagaaactgcaatatcaagtacatttgtgagtacattac

SEQ ID NO: 404048 - DNA, 562 bp, Homo sapiens
gaacaatttgaaaaaacagaaataaacatttcaccaatgcgaaacaaaatcaagtggtgcattattttatttacttggatagactgtcttgagatgcagtccacatatctcctgcttaaaaaacataatttgatcctgaaaacaaatgcagtaagtacaaatctttcaaacagaaacttgttttattaattgtaactgaaaaactactgatgtatttcagctcaasccaagttaccattattttctctgcattgttcactttaccaaattctaaacatattgaagctcccagtctgcactcaaactgcacctaataaataaacctactacagaccactacttttagggcaaaataaagatgattatatgtgtaaatagtgaaagtatatgacataacgaacagatctagaagaggctacctctttatttgatttgattggcatttgtatatgaagaaaaatatttcaagcttacttaaacacaaaacaaaatttacatttgtcttataatggcattctcagactagaaactgcaatatcaagtacatttgtgagtacattac

SEQ ID NO: 404049 - DNA, 562 bp, Homo sapiens
gaacaatttgaaaaaacagaaataaacatttcaccaatgcgaaacaaaatcaagtggtgcattattttatttacttggatagactgtcttgagatgcagtccacatatctcctgcttaaaaaacataatttgatcctgaaaacaaatgcagtaagtacaaatctttcaaacagaaacttgttttattaattgtaactgaaaaactactgatgtatttcagctcaacccaagttaccattattttctctgcattgttcactttaccaaattctaaacatattgaagctcccagtctgcaytcaaactgcacctaataaataaacctactacagaccactacttttagggcaaaataaagatgattatatgtgtaaatagtgaaagtatatgacataacgaacagatctagaagaggctacctctttatttgatttgattggcatttgtatatgaagaaaaatatttcaagcttacttaaacacaaaacaaaatttacatttgtcttataatggcattctcagactagaaactgcaatatcaagtacatttgtgagtacattac

SEQ ID NO: 404050 - DNA, 559 bp, Homo sapiens
ataatgttacccttaaacttcacaccattatgaggtaggtactataattataatcatttttacgatgaaaataagatacaaattgttaaagtaaattgactaaggtcaaatattaaccatagttttaatttagtctttttatttcaggtattttttacttaaccattcaggagcctgaagttactaagtgacctgctgaaatccaaaaagtgacttcagtaacatatgagacaacataagtaacatgtaactgtattatatataatatagtatataaaataaatgtttttatataataartactatatattacttatataaagtacaattttaaatgatttttaacttcatggtttatttttgcctttaaaaatattgaatctggctgttaatgagataaatgcctggataatccatgactaggatcagtaagacaagttaagctcataaattttgctagctcagtgtaacatgtgaaaaccagcatagaaaccagtgagtaaatatatattgtaaaagttcattcagtaaaacttgttattaaattatgtaatgggaa

SEQ ID NO: 404051 - DNA, 575 bp, Homo sapiens
aataaaaaaaatcacaacttcagatcaaccctcttaacaaatatttaactatacaatgtgttattgttaactataggcactatgctgtatggtagatstgcagaacttatccaggttgcataactgaaactttatacttcaacatttttcaaaagtagatacacaaatggcccacaattacatcacaaaatgcttaacttcaccaatcaccagaaaagtgaaaatcgaaaccacaattgagatatcaccttgcacttgctaggatggttattattaaaataaacaaaaacaaaagataacaagtgttggtgaggatgtggaaaaattgtaacacttgcacactgttggtggaatgtataatggtgtagccgctatgaaaaacagtacagaagttccacaaaaaattaaaaatagacctgtatgacccagcaatcccattgccaggtagatatattagtctgttttcatgctgctgatgaagacatacccaagacggggcagtttacaaaagaaagagatttaattggacttacagttccatgtggctggggaagtctcacaatcatggtggaagt

SEQ ID NO: 404052 - DNA, 566 bp, Homo sapiens
gatcaaccctcttaacaaatatttaactatacaatgtgttattgttaactataggcactatgctgtatggtagatgtgcagaacttatccaggttgcataactgaaactttatacttcaacatttttcaaaagtagatacacaaatggcccacaattacatcacaaaatgcttaacttcaccaatcaccagaaaagtgaaaatcgaaaccacaattgagatatcaccttgcacttgctaggatggttattattaaaataaacaaaaacaaaagataacaagtgttggtgaggatgtggaaaaattgtaacacttgcacactgttggtggaatgtataatggtgtagcygctatgaaaaacagtacagaagttccacaaaaaattaaaaatagacctgtatgacccagcaatcccattgccaggtagatatattagtctgttttcatgctgctgatgaagacatacccaagacggggcagtttacaaaagaaagagatttaattggacttacagttccatgtggctggggaagtctcacaatcatggtggaagtcaaggaggagcaa

SEQ ID NO: 404053 - DNA, 610 bp, Homo sapiens
ttacagaattgtgtattttcatatttggtatcacaaggtgactatgtgcgaagcactttctattggaaaacagtatattagaattctttctgtttcattattaatttgatttgtaatgatagataaattgctttgcctttaagagctttgatttccccagtttttagggtttacttatttttaattattattcactttaaatagctttgtgtgaattttgtagcagagaattctgtgtcctgaggtaaccatggttaaaggatatccttcaagattttcaagrttttttcacttatgtacacctcttactttttaatgatcttgtactacaaatttcactgttgaatattctttgtagctgagtacaagctaggttacctaaatacattttaatcatgaattgcctgattcctaccttactcctctgcatgttttagattggcattcgtcagaaccccaatataattctttctaggacaaagcaaaacttccatatatgtgtgtgtgtgtgtgtgtgtgtgtgtgtgtgtgtgtgtctgtatacataatacaaagtcatatatatttttcatagaaaacacaaatgaacaatctcaacgattattatatt

SEQ ID NO: 404054 - DNA, 610 bp, Homo sapiens
ttacagaattgtgtattttcatatttggtatcacaaggtgactatgtgcgaagcactttctattggaaaacagtatattagaattctttctgtttcattattaatttgatttgtaatgatagataaattgctttgcctttaagagctttgatttccccagtttttagggtttacttatttttaattattattcactttaaatagctttgtgtgaattttgtagcagagaattctgtgtcctgaggtaaccatggttaaaggatatccttcaagattttcaagattttttcacttatgtacacctcttactttttaatgatcttgtactacaaatttcactgttgartattctttgtagctgagtacaagctaggttacctaaatacattttaatcatgaattgcctgattcctaccttactcctctgcatgttttagattggcattcgtcagaaccccaatataattctttctaggacaaagcaaaacttccatatatgtgtgtgtgtgtgtgtgtgtgtgtgtgtgtgtgtgtgtctgtatacataatacaaagtcatatatatttttcatagaaaacacaaatgaacaatctcaacgattattatatt

SEQ ID NO: 404055 - DNA, 602 bp, Homo sapiens
tagagtagaaaagaactttgataatatttatcttgaccatacttcttattttaatatttggcaattgaaatctaaattgtcatctttgggagaaaagagtaaaagatcatcaaccaagtaaaataatcatataatatttaactcatactgctatcttattttatttcttaaacttctttcttggctattaccagatttaaaagtattttcaagccaagttttccaattttaggctgcattttctcttctaattttaggttgcatttctccayatagacttaggaagaaataaaatatgcatacatatgtgttgtctgctttaattttaagagagtaattattcattacctaaaaataaagcattttaccttaagttttttctgtctttagtttcataaccatttcaaagtacttgtgtattaaattcaatatctctatgaatttccagggctccacttgtagctgggtgtcatacacataaccgacattcagatatgtgttgttaaaatgtagtcgatgctgagcattaaattttaacctacttattattattggtatgcaaaactgtaaagcacattaataaaggctggaaagcaacaaag

SEQ ID NO: 404056 - DNA, 525 bp, Homo sapiens
gtcatctttgggagaaaagagtaaaagatcatcaaccaagtaaaataatcatataatatttaactcatactgctatcttattttatttcttaaacttctttcttggctattaccagatttaaaagtattttcaagccaagttttccaattttaggctgcattttctcttctaattttaggttgcatttctccacatagacttaggaagaaataaaatatgcatacatatgtgttgtctgctttaattttaagagagtaattattcattacctaaaaataaagcattttaccttaagttttttctrtctttagtttcataaccatttcaaagtacttgtgtattaaattcaatatctctatgaatttccagggctccacttgtagctgggtgtcatacacataaccgacattcagatatgtgttgttaaaatgtagtcgatgctgagcattaaattttaacctacttattattattggtatgcaaaactgtaaagcacattaataaaggctggaaagcaacaaagg

SEQ ID NO: 404057 - DNA, 602 bp, Homo sapiens
tagagtagaaaagaactttgataatatttatcttgaccatacttcttattttaatatttggcaattgaaatctaaattgtcatctttgggagaaaagagtaaaagatcatcaaccaagtaaaataatcatataatatttaactcatactgctatcttattttatttcttaaacttctttcttggctattaccagatttaaaagtattttcaagccaagttttccaattttaggctgcattttctcttctaattttaggttgcatttctccacatagacttaggaagaaataaaatatgcatacatatgtgttgtctgctttaattttaagagagtaattattcattacctaaaaataaagcattttaccttaagttttttctgtctttagtttcataaccatttcaaagtacttgtgtattaaattcaatatctctatgaatttccagggctccacttgtagctgggtgtcatacacataaccgacattcagatatgtgttgttaaaatgtagtcgatgctgagcattaaattttaacctacttattattattggtatgcaaaaytgtaaagcacattaataaaggctggaaagcaacaaag

SEQ ID NO: 404058 - DNA, 586 bp, Homo sapiens
tgtaccctagaacttaaagtaaaattaaaaaaaaaaaaaaacctatttaaatgaactttttaaaggaacttttagcaagtctttttaaacaaacatcagactactcaactttttaataaatagcatcaaatgacagttactttcttagacttgctataaaaatcttaccttgcaagtcttaccaccctgagtccaccaattctaaatttttatattatgatccttaccaagtagattcaagtccccacatgaaaaagctgccttaaacatgacccctaagaaaagtttcataaatattccaactttgctcttgtcattctgaaatgctacaaaggckctgtcaaaaagatgaccctatttactgctataagtgatatactcaggtttccttatcaataatttattttgttggttcttttggggagctagcatttgacatattctaacatagataatttgaaagaaaccaaagcaatacaaaaaatatatacaatttaaatatgttctttaatgaaacactgatgcagttttatgaatatatagcaggaaaagtttaatacttgttgaataaaatatcccaaaatgt

SEQ ID NO: 404059 - DNA, 574 bp, Homo sapiens
gatttggacatagggtcaataaagaagtaattatagctaaatgaggtcataagggctagcactcttataaaaagaggaaagacaccaaagcattttcactttgtcacatgaggacacaacaagaaggcagcccatctgcaaaccatgaagagaaccctcaatagaaacaaaccctgctgaagtctatcttggacttatagcatccagaattgtgagaagtaaatatctcttgttgaaatcaatattttgttatagtagcttgacagactaatgtaacattgtacacttttcaagttattaataatatttataaaaaattcttttcatgccagataattcttagtctcaccctgccataactttagtaaatatatttgttgtttttgttttcagatcataagaatatttttgaaaaacatgattttccatatctttttctccaatcacatatttccctttaatggtttaggatgagtcaaagttctcattttttaaagatgtgttattatatatacttttatayatatataatatgtattttttatacatatatatatatatattagaattttac

SEQ ID NO: 404060 - DNA, 497 bp, Homo sapiens
tttttttttttcagagtaaatcactccattcctcatttggctcctatatgcctggttcgcccatctttgctacccagaaggcagccagttttactctgggtttattatgtttgttttgtgtttttttgtttgtttgtttgtttttgcacattagtccacggtgactttatgcaaatacaagaaaatgtgactatatattcttatttgctccccacacrggctagcatatgatatgcactcttctgagccctccctttttaatttaattttatttttaaatttattttttactgcaataagtttctgaagaacatgtggtgtttggttatgtgaataaattctttagcattggttttaagattttggtgtgcccatcacccgagcagtgtatgctgtgtccaatgtatagtcttttatccctcaccccaccagccctttcccctgagtccccaaagtctattgtatttattcttatgcctttgtgtcctcatagctta

SEQ ID NO: 404061 - DNA, 497 bp, Homo sapiens
tttttttttttcagagtaaatcactccattcctcatttggctcctatatgcctggttcgcccatctttgctacccagaaggcagccagttttactctgggtttattatgtttgttttgtgtttttttgtttgtttgtttgtttttgcacattagtccacggtgactttatgcaaatacaagaaaatgtgactatatattcttatttgctccccacacaggctagcatatgatatgcactcttctgagccctccctttttaatttaattttatttttaaatttattttttactgcaataagtttctgaaraacatgtggtgtttggttatgtgaataaattctttagcattggttttaagattttggtgtgcccatcacccgagcagtgtatgctgtgtccaatgtatagtcttttatccctcaccccaccagccctttcccctgagtccccaaagtctattgtatttattcttatgcctttgtgtcctcatagctta

SEQ ID NO: 404062 - DNA, 592 bp, Homo sapiens
aatggtgcaagaaaatgaggaattgagtacgaggcttatatttctagtgaggacaactgggtagatggtaatgtcatcatttaagtgagaggataaggaaggtgctttaaaaaagaatagacaacaggctattcagggaaaaacatggatgctaggccagcatattttacagtaacaaatatagtggtttcggatatagtttaaagctaaagtttactattaaaaataaaaaagtaatatataggtataatgaaattctttttcaagaggatgcttattagtaagattctcataatttcaaaagtctccagatgttatttttaaaacaaatatttgataaatgccttcaattgccacacatatttctatgaattggtagtagcgggtagatagcagtggcattgttcatgctagaaaatggggataaaaaactaataaagtttgggtgggataatggaaaacaaaaaatacaaattgtgtatttgagataattgttaacttttggyttttaatttatgttaatatttatgttatttttcttttccatgtgcttagtgattcaagatagcagaactccatatacactcactaa

SEQ ID NO: 404063 - DNA, 555 bp, Homo sapiens
tcaaggataaagaaaggatcctaaaaccagcaagagaaaagaaacaaataacattcaatggagytccaatatgtctggtaacaaacttcagtggaaaccttacaggccagaagagagtgccatgacatacttaaagtactgaaataaaataacttttatcccataatgatatatccagcaaaaatattcttcaaacttgaaggagaactagaggctttcccagacaaaaagaagctaagaggtttcatcaataccagaactgccctataaaaaatgctaaagggtatagttcagtcagaaagaaaaagaccttaatgaattataaaattgatgaaactgaaaaattcctattttattcattgagctattccaagtaactagaatgaatatcagtaaacagtaaacaataatatttatagaatgaattaatcaactggatatcatttagttattttattgttggtctgaagttactaaatttgccacattatctacctccagagggcaccatctatgctgtagtttatatgaagagcattccctggagttgtgcag

SEQ ID NO: 404064 - DNA, 555 bp, Homo sapiens
tcaaggataaagaaaggatcctaaaaccagcaagagaaaagaaacaaataacattcaatggagttccaatatgtctggtaacaaacttcagtggaaaccttacaggccagaagagagtgccatgacatacttaaagtactgaaataaaataacttttatccyataatgatatatccagcaaaaatattcttcaaacttgaaggagaactagaggctttcccagacaaaaagaagctaagaggtttcatcaataccagaactgccctataaaaaatgctaaagggtatagttcagtcagaaagaaaaagaccttaatgaattataaaattgatgaaactgaaaaattcctattttattcattgagctattccaagtaactagaatgaatatcagtaaacagtaaacaataatatttatagaatgaattaatcaactggatatcatttagttattttattgttggtctgaagttactaaatttgccacattatctacctccagagggcaccatctatgctgtagtttatatgaagagcattccctggagttgtgcag

SEQ ID NO: 404065 - DNA, 555 bp, Homo sapiens
tcaaggataaagaaaggatcctaaaaccagcaagagaaaagaaacaaataacattcaatggagttccaatatgtctggtaacaaacttcagtggaaaccttacaggccagaagagagtgccatgacatacttaaagtactgaaataaaataacttttatcccataatratatatccagcaaaaatattcttcaaacttgaaggagaactagaggctttcccagacaaaaagaagctaagaggtttcatcaataccagaactgccctataaaaaatgctaaagggtatagttcagtcagaaagaaaaagaccttaatgaattataaaattgatgaaactgaaaaattcctattttattcattgagctattccaagtaactagaatgaatatcagtaaacagtaaacaataatatttatagaatgaattaatcaactggatatcatttagttattttattgttggtctgaagttactaaatttgccacattatctacctccagagggcaccatctatgctgtagtttatatgaagagcattccctggagttgtgcag

SEQ ID NO: 404066 - DNA, 555 bp, Homo sapiens
tcaaggataaagaaaggatcctaaaaccagcaagagaaaagaaacaaataacattcaatggagttccaatatgtctggtaacaaacttcagtggaaaccttacaggccagaagagagtgccatgacatacttaaagtactgaaataaaataacttttatcccataatgatatatccagcaaaaatattcttcaaacttgaaggagaactagaggctttcccagacaaaaagaagctaagaggtttcatcaataccagaactgccctataaaaaatgctaaagggtatagttcagtcagaaagaaaaagaccttaatgaattataaaattgatgaaactgaaaaattcctattttattcattgagctattccaagtaactagaatgaatatcagtawacagtaaacaataatatttatagaatgaattaatcaactggatatcatttagttattttattgttggtctgaagttactaaatttgccacattatctacctccagagggcaccatctatgctgtagtttatatgaagagcattccctggagttgtgcag

SEQ ID NO: 404067 - DNA, 559 bp, Homo sapiens
ttattaaattattatgtagtaaataaatgaaagaaaattagaatttaaaaactccattaaaaacagaagaggtttgcaattcctgtgtgaggcttagctgttttaagtgtgtgactaactgccataagcagagtgaaacacgtgagaaaagttacttgtctaatttaagtcaaataatagtgacratcaatacagcacaaaataaaaatttatggtttggttgaaagagtgaaaatcaagaacactcacctataaatttaatgttcttttatcctcattcactgaaagtatatttaatcaactctagcagtattgggagaaggatgaaagaaaaaagaagatacaatttataaaatgcctattgctcagcagagatggagatcaaaagagatttcatgagctaaagccataagaaacagtataaaaaatagatatctattatatggtgggtctttgatatactctagtgttagccaaagaaagctccaggtaagactgctactttgatttcctctctcaacagtaataataaacacagtgaagccttacgtatgtgata

SEQ ID NO: 404068 - DNA, 453 bp, Homo sapiens
ctagactctgatcctgctataattcccagtgctctgtggttactctgagaacacatcccacctcattcctaagaaagaagtcctgtgagaagtggtgttcctaactgtcttcactaggcaaaaccttctttaagcagcaactgaatcttccttacctatgtttctttgtatcccagaacaccaggcaacatttgtaacatctataacagcctgagatcagaattgcttctttgtagccctgacacaagtcactttgcctgtgagacacatagcaactgtatgaacaatcattacacattattcattggggcctaccttttggcaggggctaggtgcagcatcagtactggagaaaaatctcaaaaacggacaaaattctctggtgttgcaaggttatgttccagagcatggaagtgagtttgtaastaaagcaatacacataataagaagtac

SEQ ID NO: 404069 - DNA, 553 bp, Homo sapiens
gttttaatttataaaaatgttactgcatttgtaaacagtatgtgattgtgccaaccaactaattatttatagcatagggaatactttattgtattaagttagtaaatacttgacaagttttgatttcttttagaaaattaaagcacagaaattaaaaacaaatatattaaggaagcttaatttttcttaaagttaagatcataaaaatggggaaaacagaagaaacgacaataaatatagaattaccagttgattttaggtgctaacaacaatgtatgttttgttctatggatctgcagctgcagctcacagatttttctattgcagacaacatattataagtagaatctctatgatgattttcagcaaacagaagtgggaaacagatagatgtattggattcctctcatccatgtattcattagattaagaccaaatatcaggaacagaaagatttagtgcagattccrtcgttgctagctcacctactcttgaattaccatattttcaaccaatatcttaaactctgagattcattatttcaaacagtcct

SEQ ID NO: 404070 - DNA, 517 bp, Homo sapiens
gtaatcccactactgggaacttttctaaaggaaaaaaacagtgtatcaaaaaaaaattactgtatcttcattttattgcagcactatttgcaatagtaaagatatggaatcaacccaagtgttcatcaatagatgaacgaataaagaaaatgtggtatatatatacaatggaattatattcagccataaaaaatgaaatcttgtcctttgaatcaacaatcatagaattggaggtcattatgttgagtaagataagccaggcacagaaagacaaatactatatgttctcactcgtaagtgggagataaaaaagtgtygatctcattaaggtagagggtagaatgatagagtctgagaagagtgtgtggggtaggcatgaagagaaatcggtcaagggcacaaacatacagttaaatagaaggaataagttatactaggttgtggtaaaagtttttgcggtttttacaattaaaagtaatggcaaaaaccgcaattacttttgcaccaaccaaatatt

SEQ ID NO: 404071 - DNA, 517 bp, Homo sapiens
gtaatcccactactgggaacttttctaaaggaaaaaaacagtgtatcaaaaaaaaattactgtatcttcattttattgcagcactatttgcaatagtaaagatatggaatcaacccaagtgttcatcaatagatgaacgaataaagaaaatgtggtatatatatacaatggaattatattcagccataaaaaatgaaatcttgtcctttgaatcaacaatcatagaattggaggtcattatgttgagtaagataagccaggcacagaaagacaaatactatatgttctcactcgtaagtgggagataaaaaagtgtcgatctcattaaggtagagggtagaatgatagagtctgagaagagtgtgtgggrtaggcatgaagagaaatcggtcaagggcacaaacatacagttaaatagaaggaataagttatactaggttgtggtaaaagtttttgcggtttttacaattaaaagtaatggcaaaaaccgcaattacttttgcaccaaccaaatatt

SEQ ID NO: 404072 - DNA, 591 bp, Homo sapiens
aataaataataggaacaactgaaataaaaatactctcccatgtacatgcatttacttacatatagttatgtctcccaaattacatttcagaatgtttcaatataatttctattgactcatttcctattggaataaaaccactagcctctcccatgatgaataagcaaagacagatagggcacttgtcttgtgatgggagatgctggagtgatgatcaggctgtcctgattttctctgaggaggccttccttgactatgcagttatttgttctttttgcattattgttcatattttgatcttcttttgattatttgataatagatattaattcatttgaacaaattaagatgtcatcatatctaatgaatatctttgattgaaaactgcacataaataaaagccatacaaaaaagttaatcattmatagcctaccttggagtgtaacagatgttttaattaaaattgactgtgagatatattatcccgtggtgtaatttaataaatagtcattattacaataaattacaatacacatatttacttgacctttattgctttttttgcttattgcgatagagactgaatttgtt

SEQ ID NO: 404073 - DNA, 511 bp, Homo sapiens
gttgctggccttaaagaggaggtagagaaagtggtaggcacaaaaaatttatataaagggataataacagagaacttcccaaacgtagggaaaaatgtcaatatccaagttaaaaaaaaaagttatagaacaccaagcagatttaacacaaagaagactctcaggcatttaataatcaaactcccaaagattaaggataaagaaaggatcctgaaaacagcaaaagaaaagaaakaaatagcacacaatggagccccaatatgtctggtatcaggcttttcagtggaaacctcacaggccaggagagagtggtatgacatatttaaagtgccaaaggaaaaaactgccctagtatagtatatctcacaagaacagccttcaaacatgaagaagaaatactttaccagcaaaggctgagggattttcatcaacaccagacctgtcctatgagaaatgttaaagggactatttcaatcagaaagaaaagtacattaatgagcaataagtaatt

SEQ ID NO: 404074 - DNA, 511 bp, Homo sapiens
gttgctggccttaaagaggaggtagagaaagtggtaggcacaaaaaatttatataaagggataataacagagaacttcccaaacgtagggaaaaatgtcaatatccaagttaaaaaaaaaagttatagaacaccaagcagatttaacacaaagaagactctcaggcatttaataatcaaactcccaaagattaaggataaagaaaggatcctgaaaacagcaaaagaaaagaaagaaatagcacacaatggagcyccaatatgtctggtatcaggcttttcagtggaaacctcacaggccaggagagagtggtatgacatatttaaagtgccaaaggaaaaaactgccctagtatagtatatctcacaagaacagccttcaaacatgaagaagaaatactttaccagcaaaggctgagggattttcatcaacaccagacctgtcctatgagaaatgttaaagggactatttcaatcagaaagaaaagtacattaatgagcaataagtaatt

SEQ ID NO: 404075 - DNA, 511 bp, Homo sapiens
gttgctggccttaaagaggaggtagagaaagtggtaggcacaaaaaatttatataaagggataataacagagaacttcccaaacgtagggaaaaatgtcaatatccaagttaaaaaaaaaagttatagaacaccaagcagatttaacacaaagaagactctcaggcatttaataatcaaactcccaaagattaaggataaagaaaggatcctgaaaacagcaaaagaaaagaaagaaatagcacacaatggagccccaatatgtctggtatcaggcttttcagtggaaacctcacaggccaggagagagtggtatgacatatttaaagtgccaaaggaaaaaactgccctagtatagtatatctcacaagaacagccttcaaacatgaagaagaaatactttaccagcaaaggctgagggattttcatcaacaccagacctgtcctaygagaaatgttaaagggactatttcaatcagaaagaaaagtacattaatgagcaataagtaatt

SEQ ID NO: 404076 - DNA, 611 bp, Homo sapiens
attgtttaatattcaagtatttatattgttttcagaattcctctaattatcaattcctagggttttttttttccattttgatcagagaagatgcttgttattatttccagtttttttaatgttttaagacttgttttgtgacctaatattatttatccttaagaataatccatatgctgaagaaaagtatgtgtrttctgccaccactggatgaaaagttctgtaaatacctattagatccgtttggtctataatgcacattaagtctgatgtttctttgttgattttctttctagaagatttgtccaatactgaaaatatggcgctgaagtctccagctgttattgtattggggcctatctctcttttcagctctaacacaatatttgctttatattatctgggtgctccaatactgggtgtatgtatatttaaaattgttatatcctcttgtaaaaattactttttatcattatatagtgaccttatttgtttctccttgtattttttttcttgaaatctatcttgtctgataagagtatagctactcctcctcctttttggtttccactggcatggcatatctatttccatcccattattttcaatct

SEQ ID NO: 404077 - DNA, 611 bp, Homo sapiens
attgtttaatattcaagtatttatattgttttcagaattcctctaattatcaattcctagggttttttttttccattttgatcagagaagatgcttgttattatttccagtttttttaatgttttaagacttgttttgtgacctaatattatttatccttaagaataatccatatgctgaagaaaagtatgtgtgttctgccaccactggatgaaaagttctgtaaatacctattagatccgtttggtctataatgcacattaagtctgatgtttctttgttgattttctttctagaagatttgtccaatactgaaaatatggcgctgaagtctccagctgttattgtattggggcctatctctcttttcagctctaacacaatatttgctttatattatctgggtgctccaataytgggtgtatgtatatttaaaattgttatatcctcttgtaaaaattactttttatcattatatagtgaccttatttgtttctccttgtattttttttcttgaaatctatcttgtctgataagagtatagctactcctcctcctttttggtttccactggcatggcatatctatttccatcccattattttcaatct

SEQ ID NO: 404078 - DNA, 611 bp, Homo sapiens
attgtttaatattcaagtatttatattgttttcagaattcctctaattatcaattcctagggttttttttttccattttgatcagagaagatgcttgttattatttccagtttttttaatgttttaagacttgttttgtgacctaatattatttatccttaagaataatccatatgctgaagaaaagtatgtgtgttctgccaccactggatgaaaagttctgtaaatacctattagatccgtttggtctataatgcacattaagtctgatgtttctttgttgattttctttctagaagatttgtccaatactgaaaatatggcgctgaagtctccagctgttattgtattggggcctatctctcttttcagctctaacacaatatttgctttatattatctgggtgctccaatactgggtgtatgtatatttaaaattgttatatcctcttgtaaaaattactttttatcattatatagtgaccttatttgtttctccttgtattttttttcttgawatctatcttgtctgataagagtatagctactcctcctcctttttggtttccactggcatggcatatctatttccatcccattattttcaatct

SEQ ID NO: 404079 - DNA, 579 bp, Homo sapiens
caattcctattaaaaaaccaatgatattcttcactgaaatataataaaacaattctaaaattcatacagaaccacaaaagcccaggaatagcaaagctatcctaagaaaaaagaaaaagaaaaagaaaaaaaaaaaaacgggaggaatcacgttatctgacttcacattatactacagagctagaacaaccaaaacagcagagtactggcataaaaacagacacacagaccaatggaacaaaatatagaacccagaaacaaagccacacacctctrgagaactctttttcaacaaaggtgcgaagaacacacactggggaaaagacggtctcttcaataaatggtgctgagaaaactggatagtcatatgcagaagaatgaaactagaactctatctcttaccatatacaaaaatcaaagcaaaatgattaaagacttacatctaagacttcgaactattgaactactacacaaaaagtttggggaaaatctccaggacattggtctgggcaaaaattcattgagcaaaaccacacaagaacaggcaaccaaagcaaatacgggcaaatgggatcacac

SEQ ID NO: 404080 - DNA, 579 bp, Homo sapiens
caattcctattaaaaaaccaatgatattcttcactgaaatataataaaacaattctaaaattcatacagaaccacaaaagcccaggaatagcaaagctatcctaagaaaaaagaaaaagaaaaagaaaaaaaaaaaaacgggaggaatcacgttatctgacttcacattatactacagagctagaacaaccaaaacagcagagtactggcataaaaacagacacacagaccaatggaacaaaatatagaacccagaaacaaagccacacacctctggagaactctttttcaacaaaggtgcgaagaacacacactggggaaaagacggtctcttcaataaatggtgctgagaaaactggatagtcatatgcagaagaatgaaactagaactcyatctcttaccatatacaaaaatcaaagcaaaatgattaaagacttacatctaagacttcgaactattgaactactacacaaaaagtttggggaaaatctccaggacattggtctgggcaaaaattcattgagcaaaaccacacaagaacaggcaaccaaagcaaatacgggcaaatgggatcacac

SEQ ID NO: 404081 - DNA, 579 bp, Homo sapiens
caattcctattaaaaaaccaatgatattcttcactgaaatataataaaacaattctaaaattcatacagaaccacaaaagcccaggaatagcaaagctatcctaagaaaaaagaaaaagaaaaagaaaaaaaaaaaaacgggaggaatcacgttatctgacttcacattatactacagagctagaacaaccaaaacagcagagtactggcataaaaacagacacacagaccaatggaacaaaatatagaacccagaaacaaagccacacacctctggagaactctttttcaacaaaggtgcgaagaacacacactggggaaaagacggtctcttcaataaatggtgctgagaaaactggatagtcatatgcagaagaatgaaactagaactctatctcttaccatatacaaaaatcaaakcaaaatgattaaagacttacatctaagacttcgaactattgaactactacacaaaaagtttggggaaaatctccaggacattggtctgggcaaaaattcattgagcaaaaccacacaagaacaggcaaccaaagcaaatacgggcaaatgggatcacac

SEQ ID NO: 404082 - DNA, 493 bp, Homo sapiens
tttgaagtgcacaatgactttttatgatataattgaattagagagtcagaaggaatatctttctcctgttattttattgttatcttggaaaaagtatcagaatattygtgcaattattattatgatatgtaggatacacacttaaatcagcatcaaacatataatttttaaaaattttgtagttaattctgagaagaaagcataaagacaatgtatacactgctactctgatgtttctgagccaaccagcttgtccggcattgagtgaggttttagttgattgtatgctagatttttcattacatttgctactgtatttgtaactgaaatagaaaagcaactttaatttaagttcaaaaattaactacaggtaccaatagccatttcattagtaaaattaagagagaacgagaaagagagtatgtgtgtgtgtgtttggaaggtataattacagtgtcgagtgtctactttcagtttcattcttgagattaaa

SEQ ID NO: 404083 - DNA, 586 bp, Homo sapiens
atcatctaaaatatcatctggaaatgcaattttagaattttattttgtgtgtratgtgttaaaaataatactcttaattcacttgctttgtggaatgttgaaaagattttttttaacttgtaaacatggtgtcagattgtaagtgtttttccataattttaaaagaaatcttgattctatttcttttaattacatctctggtttataaaaataattttaatatttttttcttggtcgttgttcaaaggatggtattttgctagtataattgtatattagatgatctttaatatctattcatcaaaaaacccataatactcattaactaaaagataagtaatcaagaaatcccttaacatgcattattatgttaaaactgctaatatatttttacaaaaaaatattctgatgaacttttaatgggaaatatatttacattgtacttactagtgaaaaacagttaaaaagttaagaatgcttgagaaagctatatgaggacaaatggtttaaaattgttgctatagcaattgatgagattaataaaatagcaatgaatttagttcaatgctaaaataaacaccagaca

SEQ ID NO: 404084 - DNA, 586 bp, Homo sapiens
atcatctaaaatatcatctggaaatgcaattttagaattttattttgtgtgtaatgtgttaaaaataatactcttaattcacttgctttgtggaatgttgaaaagattttttttaacttgtaaacatggtgtcagattgtaagtgtttttccataattttaaaagaaatcttgattctatttcttttaattacatctctggtttataaaaataattttaatatttttttcttggtcgttgttcaaaggatggtattttgctagtataattgtatattagatgatctttaatatctattcatcaaaaaacccataatactcattaactaaaagataagtaatcaagaaatcccttaacatgcattattatgttaaaactgctaatatatttttacaaaaaaatattctgatgarcttttaatgggaaatatatttacattgtacttactagtgaaaaacagttaaaaagttaagaatgcttgagaaagctatatgaggacaaatggtttaaaattgttgctatagcaattgatgagattaataaaatagcaatgaatttagttcaatgctaaaataaacaccagaca

SEQ ID NO: 404085 - DNA, 454 bp, Homo sapiens
ggggctttgaacgttgattaggcttatgaatgggattagtgcccttattaagaagaccccaggsatctctcttgtgctgtttctgtcatgtgaggatacaaggagaagatggctgtctataacctgaaatagggctttcagtaggaactgaccatgctggcacactgatcttggatttccagccacctgaactgtgagaaataaatgtctgttttttaacccaccaagtcgatggtaattttctatagcagcttgtattagtctgttctcacactgctgattaagatatacctgagactgggtaatttataaatgaaagaggtttaatgggctcacagttccacatggctggggaggcctcacaatcatggaggaaggcaaagaagaagcaaagacgagagcttgtgaaggggaaatcccatttataaaaccatcagatctcctgagacttatt

SEQ ID NO: 404086 - DNA, 557 bp, Homo sapiens
tcacatatatcatatatgttttgcttattcttttttattctttcttcttttttttttggtttgactaattattttgaaaaacttgtcttcaaattttgaaattattttatctgattgatttagttcattgttgaagctcttaatttcatttgttgaattcttcggttccaggacttttgtttggttttttataatatctagcttttttgtaaatttctcattcatatcctaaattrtttgctggtttctttgtattgtttatttgtgttctcttgtatgtcaccaagcttctctagtatcattatattgaatttttcacacattttataaatttatttttcattggcatctattgctggagaattattctatttctttaaaggtgttatatttccttactttgtcatgtttcttgtgtccttacattgatagctgtgcatttgatgtaattatcacttcttccaatttttttggaatggctttcatagagaaagtctttttcctgaagttataactatggtgttggttgggtagcacgtgttggctttgatcctgga

SEQ ID NO: 404087 - DNA, 487 bp, Homo sapiens
catcctcagaaccttgggaggagtccatagacgctagcagtagaggatagggaagggaggtttcaggcctccacgcarcatgcttgtgcactgggatggtgataccagcctgggcaagccaattttcagtattctaatggtgcacgtgggcaaggatttagtggaaaaggtgtaacttatctgaaggcccctgggtagcatgattgggtggaggtagcagtggtagcagtgggtgggaagagcctgtcctcagggaatgtgaaagtatactgctgccctgctgcctgcaaggatggcgttgctgttagtggcagtagccccaggcaaggggctctcaggctttgtgcatgttttggcccccagtgtggagtcagcagcggcagtggtggtggcaggccaagagagcttgtcctcagggtacatgcaattgcacagcagttctgtttctggtgtgggtggcattactctcagtggcaatggccaggtg

SEQ ID NO: 404088 - DNA, 487 bp, Homo sapiens
catcctcagaaccttgggaggagtccatagacgctagcagtagaggatagggaagggaggtttcaggcctccacgcagcatgcttgtgcactgggatggtgataccagcctgggcaagccaattttcagtattctaatggtgcacgtgggcaaggatttagtggaaaaggtgtaacttatctgaaggcccctgggtagcatgattgggtggaggtagcagtggtagcagtgggtgggaagagcctgtcctcagggaatgtgaaagtatactgctgccctgctgcctgcraggatggcgttgctgttagtggcagtagccccaggcaaggggctctcaggctttgtgcatgttttggcccccagtgtggagtcagcagcggcagtggtggtggcaggccaagagagcttgtcctcagggtacatgcaattgcacagcagttctgtttctggtgtgggtggcattactctcagtggcaatggccaggtg

SEQ ID NO: 404089 - DNA, 614 bp, Homo sapiens
attaggaatatttattctttgctttaacatgaatatacttgtatattcactaacagatgatttttctttcccactttcattctcctagtagctaacataagatgtgatcatcatagtcaaccgtatatcccagtagttaatttataggatataagaagggtagcrattgctagaaaagaaataaatcttaccaaagtatatacgtatttttgtgtcttttttataatgagggttagtgaattttcagttgtatgagtcatggttgcctcgtgttgtgtggaagcagatgactgctattttctgaatttggaaatgaatatatttcaatagatattatgaatgccaaaatgtgctattgtgttaagctgggtattatgttattcaaaattgatttcctatatggcattgggataatgttggctgatagagaaacttgttatttccactgcagggattggatgcacttagttcctcaggattccctgcagacccaaactgctccctctgcttcagggtttcagaggatttgttagtcatgcttactctgtactgtcaacccatccttccaaaccttcgcttcaccagcttctcaacaaacaatataagctgtaact

SEQ ID NO: 404090 - DNA, 579 bp, Homo sapiens
tatatacactgtgggatgattgaatctagctaattaacatcttaattacctcacatcgttatcatttttgtgttgagaacactttacatacgctctcttggcatttttaagaatacaatatgttattaaccatagtcactatattgtacwctagatctcttcaacttattcctcctgtctaattgaaattgtgtattctttgatcaacatcttcccaaccttctcaccccaattgcccgaggccctggtataccattctactctgcttctatgataccaacattttgagattcagcatgtgatcaagattataaagtagttttctttcaatgcctggctgatttaacttagcataatgtccttcgggtttatctatgttgtttcaaatagtaattttttttctttttatggctgaataggattccattggatttatatatcacattttctttatccatttactcattgatggacatttaggttgatcccatgtcttggctattgtgaataatgttgaagtaaacatgggaattggcatatctcttcaacatactaatttttaaaatatatacacagtag

SEQ ID NO: 404091 - DNA, 642 bp, Homo sapiens
ttgtttccactaacctctctcttccaaatttacatgtaggaaaggataatcactggaactctagaggagctgctgcctaaacgtgggtagaaaagtggactacatgaacaaatagaggactgtagcctccagatagcttcaggaaatgacaggtggcaagtgtggttagctgccagccygtggctattaacttcttcaattctgcctctgtattgaaaatgaggtcatacatctcaagatggcttcagaccatgactaagcaagactgtactaacaaaatcttgtcatttacacttgacgtaggacccttctagtgagccatctttgctctagagctcttgatttagatggcagagactttgtgagatatgcatcatggtctcttggctccccctgaacttttctgccacattctttttctttcacagatgctactccccaattaacctttactgttcacttaatctcagcatctgctttctagaagttctaattgatgcttatggattagcaagttttctatgacagtatctcaaatggggcatgtcatgaaggagaagggatttctttcacagaataaaaaataatccaattctcaaacaaagtaaactatcaaaccgtaataagagctctatcattctt

SEQ ID NO: 404092 - DNA, 649 bp, Homo sapiens
agagatgctcaaattaaaatatgggtattaatcagactgtgttaaaggtttttatatgaacagaatgtcctagatatttatcaacattcagctacatctaggaaaaacaaaatgtatgcttttctagtttttggtttagtggtgttaaattttctgctttataaaaaataattgagagcataattgttcctcatatatttctctgtcataaagcaagaaaatttttatctgcttataaaaagtttatcacaattatgtttargaggaatttaatctgatatagtaccagataaatgtagatatgttaatatgatttgtaaatatgacttttgctctaacaaaaagaacaaaaagggaatcaattcagggataatttaagaaatgaaatgattaaaatataaaaaatggttggaaaattgaactataatcatactggagcttaaaaagaaagcaattttcacaagtcaatgaaaactttctttgtcactttcaaattaagtcaaaatttctgttttcatgtgttatgcaacctcaaaagcattctttcttacttatgagccataagtaatagtagactgctgcacactccattatatctgctactttaatgggctgatttattatttcatttggttttaattttaataac

SEQ ID NO: 404093 - DNA, 649 bp, Homo sapiens
agagatgctcaaattaaaatatgggtattaatcagactgtgttaaaggtttttatatgaacagaatgtcctagatatttatcaacattcagctacatctaggaaaaacaaaatgtatgcttttctagtttttggtttagtggtgttaaattttctgctttataaaaaataattgagagcataattgttcctcatatatttctctgtcataaagcaagaaaatttttatctgcttataaaaagtttatcacaattatgtttaagaggaatttaatctgatatagtaccagataaatgtagatatgttaatatgatttgtaaatatgacttttgctctaamaaaaagaacaaaaagggaatcaattcagggataatttaagaaatgaaatgattaaaatataaaaaatggttggaaaattgaactataatcatactggagcttaaaaagaaagcaattttcacaagtcaatgaaaactttctttgtcactttcaaattaagtcaaaatttctgttttcatgtgttatgcaacctcaaaagcattctttcttacttatgagccataagtaatagtagactgctgcacactccattatatctgctactttaatgggctgatttattatttcatttggttttaattttaataac

SEQ ID NO: 404094 - DNA, 649 bp, Homo sapiens
agagatgctcaaattaaaatatgggtattaatcagactgtgttaaaggtttttatatgaacagaatgtcctagatatttatcaacattcagctacatctaggaaaaacaaaatgtatgcttttctagtttttggtttagtggtgttaaattttctgctttataaaaaataattgagagcataattgttcctcatatatttctctgtcataaagcaagaaaatttttatctgcttataaaaagtttatcacaattatgtttaagaggaatttaatctgatatagtaccagataaatgtagatatgttaatatgatttgtaaatatgacttttgctctaacaaaaagaacaaaaagggaatcaattcaggrataatttaagaaatgaaatgattaaaatataaaaaatggttggaaaattgaactataatcatactggagcttaaaaagaaagcaattttcacaagtcaatgaaaactttctttgtcactttcaaattaagtcaaaatttctgttttcatgtgttatgcaacctcaaaagcattctttcttacttatgagccataagtaatagtagactgctgcacactccattatatctgctactttaatgggctgatttattatttcatttggttttaattttaataac

SEQ ID NO: 404095 - DNA, 649 bp, Homo sapiens
agagatgctcaaattaaaatatgggtattaatcagactgtgttaaaggtttttatatgaacagaatgtcctagatatttatcaacattcagctacatctaggaaaaacaaaatgtatgcttttctagtttttggtttagtggtgttaaattttctgctttataaaaaataattgagagcataattgttcctcatatatttctctgtcataaagcaagaaaatttttatctgcttataaaaagtttatcacaattatgtttaagaggaatttaatctgatatagtaccagataaatgtagatatgttaatatgatttgtaaatatgacttttgctctaacaaaaagaacaaaaagggaatcaattcagggataatttaagaaatgaaatgattaaaatataaaaaatggttggaaaattgaactataatcatactggagcttaaaaagaaagcaattttcacaagtcaatgaaaactttctttgtcactttcaaattaagtcaaaatttctgttttcatgtgttatgcaacctcaaaagcattctttcttacttatgagccataagtaatagtagactgctgcacacwccattatatctgctactttaatgggctgatttattatttcatttggttttaattttaataac

SEQ ID NO: 404096 - DNA, 630 bp, Homo sapiens
tattgtttattcagttaaattttacccaaatgaaaaattcttatgaatatgccattctacattttccccaaggggtaagttttccaaacctaagaggctcccttgacagcaaaatgtagtaatgagccgacatgatgaactttcaattattttagcttctggagaattgggagtgaccccagtgtattgtttacagaacacacccaaacaaggcacatccaactacccagcaaactctaaattctgcagtaaaatgaaaaaaaacttaagttgccatatagcacagatcagatgtgcctctgcactgctagattattcatataaaagttaaaaatatmgccagctcctggctgttgcatctgcaaccagtcctgcatatggccatgtggaagcttctgggcagaggctttggtttcaacccttttccatctagactactaccattctcaccaacactgttgctttattcctggggatctatgtgtgaagccctcactcgtgccttggcccttgctttaatgtagtggccttgaaaatccagcaactttaaaagaaacaggccatatgttatttatacagaaaagtaatttgcacaagttgctatttggtatttctagttccttccagccc

SEQ ID NO: 404097 - DNA, 467 bp, Homo sapiens
catgcatgctgctatttcctgttgcctgcttcttctgacacctggctcttttttttccacactggattcttgtcacaataaggctgttctgtgtcatgacccagactttcctgagcaaactcttcaccagcaatcatgggctgtgtctacccagtgctgtcagctcaagaccgtgtcgctaggaccaaagggaacttcttagagatcacatgtcagaacagtgaccctgatacaatggtgagtgagtccacttcttcacttctgctgtgttcaggcacsgagcagatattttaccttaatggcctccatatgggaagaatatgaccaaacgctttgttggaagaactatctccaaccctgggggaccagagtgagaaggtgagtttgacttaaataacatttcagcccagtggctccctccctaatctctgccaggctgctagttatgagacctacgtgagaaactt

SEQ ID NO: 404098 - DNA, 634 bp, Homo sapiens
atctctgaagattctgattgcttggatctgtatatttaacaaacttccaggtgactgatttgtggcctcatttgggtccctggcttatcacaggaatcaggacctgctctatttgtatctgccagcattaaaactctagttccaggaaggaagaaccttcctgtctgcacaacatggcctcgtcagatgtcctcaaacaaatctktgggacagcacaaaggggcagggcaggactcctgggcttggcagcgtcttggctgcacctaccaccagctggaacctctcaaacactttcacccccaaatggatttgagcctagctaacttgccgtgctgatctctggtcctcacctgtggcattcagtctgtggcactcagagggataaattgttgacaactgggattctgtatttatatgctaattttctgccatataaggagccaggttcgtgcagattccttcaatatgaatatttctctttggataacatttactccctagagacttacaatcttttgcctgtgcacatctcaaaaacccacagtggcagaaatacacccatggaaagaatatttttacaatattaataaattacctcttcttctatcacagttcaatatgagcactattgtca

SEQ ID NO: 404099 - DNA, 634 bp, Homo sapiens
atctctgaagattctgattgcttggatctgtatatttaacaaacttccaggtgactgatttgtggcctcatttgggtccctggcttatcacaggaatcaggacctgctctatttgtatctgccagcattaaaactctagttccaggaaggaagaaccttcctgtctgcacaacatggcctcgtcagatgtcctcaaacaaatctttgggacagcacaaaggggcagggcaggactcctgggcttggcagcrtcttggctgcacctaccaccagctggaacctctcaaacactttcacccccaaatggatttgagcctagctaacttgccgtgctgatctctggtcctcacctgtggcattcagtctgtggcactcagagggataaattgttgacaactgggattctgtatttatatgctaattttctgccatataaggagccaggttcgtgcagattccttcaatatgaatatttctctttggataacatttactccctagagacttacaatcttttgcctgtgcacatctcaaaaacccacagtggcagaaatacacccatggaaagaatatttttacaatattaataaattacctcttcttctatcacagttcaatatgagcactattgtca

SEQ ID NO: 404100 - DNA, 634 bp, Homo sapiens
atctctgaagattctgattgcttggatctgtatatttaacaaacttccaggtgactgatttgtggcctcatttgggtccctggcttatcacaggaatcaggacctgctctatttgtatctgccagcattaaaactctagttccaggaaggaagaaccttcctgtctgcacaacatggcctcgtcagatgtcctcaaacaaatctttgggacagcacaaaggggcagggcaggactcctgggcttggcagcgtcttggctgcacctaccaccagctggaacctctcaaacactttcacccccaaatggatttgagcctagctaacttgccrtgctgatctctggtcctcacctgtggcattcagtctgtggcactcagagggataaattgttgacaactgggattctgtatttatatgctaattttctgccatataaggagccaggttcgtgcagattccttcaatatgaatatttctctttggataacatttactccctagagacttacaatcttttgcctgtgcacatctcaaaaacccacagtggcagaaatacacccatggaaagaatatttttacaatattaataaattacctcttcttctatcacagttcaatatgagcactattgtca

SEQ ID NO: 404101 - DNA, 517 bp, Homo sapiens
ctacctcatatcatatacaaagataactcaaaatggatcaaagaccttaatgtgagaactaaaagtataaaactaaactcttagaagaaaatattgatccaaattttcatgaccctggactgggcaataatttctctgatatgatattaaaacacaacaaacaaaggaaaaaatagacaaatttttayggtggaaaacatgttagcagttcctcaaaatgttaaagtgttaacatataacccaggaagttcactcctatgtatataccataaaaagagttggacagattaaatttaacagagttcaactgagcaaagaacaattcactactcaggcaggcccccaaaccagaacaagttcaaagccactttgggactgccacttgcctggaaaacatttatggatagagaaaggaaaatgatgtatagaaaacagaagggaggtacagaagcagctggaatggttacagctcagtttgctttatttgacaacacgctgaacagttagccacctgtga

SEQ ID NO: 404102 - DNA, 586 bp, Homo sapiens
tttccttttttgtgacagggtctcactctgttgcccagactggagtgcaatggcaggatcttggctcaccacaacctccaccttccaggctcaagtgattctcctgcctcagcctcccgagtagctggggttacagacacatggcagtactgcccacctaatttttgtatttttagtagagacaggtttmaccataatgaccaggttggtcttgaatgcctgacctcaaatgatccaactgcctcagcctctcaaagtgctgggattacaggcatgagtcaccatgcccagacatgaactaacttattggtatactgcttgattgggcttgctaatactatattgaggatttttgcatctatattcatcagagattttggcttgaagttttctttttccgttgtgtcacctccaggttttgctatcagggtaatactggctttgtagaatgagttaggatctcctcaattttgtggaattagttcttctttgtatgtctggtagaattggtattggttctttgtatgtctggtagaatttggctgtgaatccatctggtctgaggcattttatgattggtaggttt

SEQ ID NO: 404103 - DNA, 581 bp, Homo sapiens
ttcttcttggtgtgatgggtaagagctggtgccctgaaaaattcaggcagaggtaaagatatttacccaggtgtcagcccctgcaggtaggagggactatgcgccccrgtattcccaccctggtttccaagctgcctgttctgtggtataaaagagtacaggcacttgcatcacagtccaggcaccacccaacattgccaagagaatcctcagagtagcctcatgaggtaggcatcatctcccaagtaacagatggaggacaacaggctgaagacaccagccccttggaaagattgaacgacagatagtgagaggactcccttcaagtgtagggtctgtctacaccccaggaaccaaatgcattccattacacaaggctgcctggctggaaagagagtgcctccaagtaatagtttgttattgattcgaagaagggtggtagttctgttactctaagtaggatcatgacactaatatggaaacagagcaaagaccacatcttgggacttctatgtccatcattctttcttgaaaattgtgagtttgctcatgaaatgcagaatgtagatagttccccaaaa

SEQ ID NO: 404104 - DNA, 604 bp, Homo sapiens
tattgtattccattctcttaaatttcttaaaatgtactttagggcccagaatatgagcatgagaagaatacgtattctgatgctgttggatggattttttgtgaatgttcttagatcaggttgattgatactgctttttaggtcaaccattttcatactaatttttttgaccatttatctattactaaaagtgggagattgaagtctctaactgtaatagtaattttgcctactttatcttgtagttctgtaagtttgggcttgcatatttgatataccttgcaagagagtacatccagttgttaggtatgtcctcattaaattgtgttttgtcttcttggagaagagactacattatcataawgtaatgctgctctttatgcctaaattccctcattctgaagtctattttgtctgaaattaaaatagctactccagctattttgattagtcttagcatggtatatatttaccatccctttattttacactacctgaatcattatatttaatatgggtttttgtagacaacatatagttaatgtttttaaatctattctaaatgattattggtagaaatggattaatatatgtcatatttata

SEQ ID NO: 404105 - DNA, 636 bp, Homo sapiens
tattttcatctatatatatgttgtaaatacccagtacattgttactgtgattactttagcagttatattttagattagtaaaaaataataagaaaaaaataaagattttatttttatttctcctccaatgctatacattttaatatgcagatctgagtttcttacctatattactttccttctccttaaagaacttctttgaacatttcttgtaaggtagatttactggcaataaattccatcaatttttgtctggaaaaagtccttattttcccttcatatttaagtgattttgcttctcaatatagaattttaggctgggaagttattttttcagtaacttaaatgttttccttcactttgttctcactttcatagtttctgacaagaagtccatgataatttttatttttgtctcytacagataagttgttattttcctccccttgcttctttaaataatttgtctgtgtctttgtttttctgcactttgaatcccttggtgtagcttttctatagaatttatcctgcttggtatttatccgatcttcccgtatatgtagtttgatgtctgtcattagtatttggaaacttattgacccttctttcttcaaatatttcttctgcttcattgtc

SEQ ID NO: 404106 - DNA, 636 bp, Homo sapiens
tattttcatctatatatatgttgtaaatacccagtacattgttactgtgattactttagcagttatattttagattagtaaaaaataataagaaaaaaataaagattttatttttatttctcctccaatgctatacattttaatatgcagatctgagtttcttacctatattactttccttctccttaaagaacttctttgaacatttcttgtaaggtagatttactggcaataaattccatcaatttttgtctggaaaaagtccttattttcccttcatatttaagtgattttgcttctcaatatagaattttaggctgggaagttattttttcagtaacttaaatgttttccttcactttgttctcactttcatagtttctgacaagaagtccatgataatttttatttttgtctcttacagataagttgttattttcctccycttgcttctttaaataatttgtctgtgtctttgtttttctgcactttgaatcccttggtgtagcttttctatagaatttatcctgcttggtatttatccgatcttcccgtatatgtagtttgatgtctgtcattagtatttggaaacttattgacccttctttcttcaaatatttcttctgcttcattgtc

SEQ ID NO: 404107 - DNA, 280 bp, Homo sapiens
actactatccacggtactatgtaatataaatgtgtctacttagcaccctgtgttcgagaaatataaatggctattattattgccattatcatcagtattattgctactaatctaaagaaataatagattgtccttcagaaaacaacaacaaaacaaggcagagccrgcatgtgtttctattgcctagtatttcacaaaagtctctctttctgggatgaaagagaggaaagtaaaagttgggagaccttcccaggacagaaacacagtggctttagtacca

SEQ ID NO: 404108 - DNA, 659 bp, Homo sapiens
ttccaatttgtatatgagattgtccggttcctacttattgccttgtaggatttttttattttctgtgtaataattctcaattttataagtatactgagaaagatagcccattgtggtttgcttttttgctctctcaatagtgttttaatagccagaagtgctgaatcttaatgtctaatgtatcaaccttttcctttgtggctagggacatgaacatcctgctaaagcattttgactgcttacatattctcccacagttctttctagaagctttatgcatgtgtctttcacattaagctatatgacccatcaagaatcggtttttgttctgggtataagataggtcaacatctgttgcatcctacatggatatcaaattggcctacttgaaaagatcacaatttttacactgcatcgcattgtcacctctgcctttgctgaggtgattgtgcatgaaagcatctattattgggctcttagtgtgtgttggtctgttctgatctattttttccttctttcaccaatattatactgttttaattactgtaagttattaaaagtcttagtatattgcagtgtaagtcttccaactttgyttttcttgaagactatctttgctattcttgcaattttttgtgttttcatataaattttgaatc

SEQ ID NO: 404109 - DNA, 620 bp, Homo sapiens
gagcccacattttgacttgtcctggtttccagattgaagcaccttacatgtattgattgatacctgcctgtaacttctgtccccttaaaatgtgtaagatcaagctgtagcccaaataccttgggaacatgttccctgracctcttgagactgtgcctcaggccttggtcactcatctttggctcagaataaactgctttaaatattttacagagttttactcttttcattgacacaagaaacttgtcacagccaaaaagaaaatcttccacaacattagtagataatgccaagttttattttagtaaatgggatttttaaaagacaatttacaattccattcacaggatataaaaactcccattgctctatgtgtcaccaacaccagatactagcagacttttaatttatataaatcttatgggtgtaaaatggaatctcactgtggctttactgtgcatttctctgattattaagatggttgggcattttttcacgtttattggccgttcagttttcaaattctgtgaaattcctcttcaaatctttagctcatttttcttttgggttgctggtttttattattgatgtgtaaaagttctttagcttttgatattcat

SEQ ID NO: 404110 - DNA, 576 bp, Homo sapiens
accaacaccagatactagcagacttttaatttatataaatcttatgggtgtaaaatggaatctcactgtggctttactgtgcatttctctgattattaagatggttgggcattttttcacgtttattggccgttcagttttcraattctgtgaaattcctcttcaaatctttagctcatttttcttttgggttgctggtttttattattgatgtgtaaaagttctttagcttttgatattcattattttttgtgatacagatatactcttccagtttgtctttttacttcatgatttttttaaggacaaaggtttgattttatactatataagttttctctgccacatgtacatattagctcttcaatttttgaaaattgcatgtcatttagtccatttcattgccccaaatgttacataagtaactcttgtctagaaaggcagtggcactagaatgtgatggagaaggagcaacaccatttgctgataacccactactgcatgctgagcactgtcctccactgtctgcaatcactgtctcatttagtcttcataacttaatgacacagccattct

SEQ ID NO: 404111 - DNA, 576 bp, Homo sapiens
accaacaccagatactagcagacttttaatttatataaatcttatgggtgtaaaatggaatctcactgtggctttactgtgcatttctctgattattaagatggttgggcattttttcacgtttattggccgttcagttttcaaattctgtgaaattcctcttcaaatctttagctcatttttcttttgggttgctggtttttattattgatgtgtaaaagttctttagcttttgatattcattattttttgtgatacagatatactcttccagtttgtctttttacttcatgatttttttaaggacaaaggtttgattttatactatrtaagttttctctgccacatgtacatattagctcttcaatttttgaaaattgcatgtcatttagtccatttcattgccccaaatgttacataagtaactcttgtctagaaaggcagtggcactagaatgtgatggagaaggagcaacaccatttgctgataacccactactgcatgctgagcactgtcctccactgtctgcaatcactgtctcatttagtcttcataacttaatgacacagccattct

SEQ ID NO: 404112 - DNA, 603 bp, Homo sapiens
aagaattttcctggtgtcccatgcttaggaagaggaaatcccagatttgtgtccacttccaagcacttccagagcctgcaggcttccacttggcatctgtctcayaattaggggccaggtctgcagttgtgatttataataccactgttcctgcttttgtgaatgcctggagtggaaagtggaagagagggacaaccttaggattagttttcttgccttggtaacagcttaggtgagtggctgactgctttcttcctcattccacagcagtccatcaaagatggtagtgatgaggtatgctgcagccaagattcgcccagcctttctccttcagggcaaagtgaggagggtatttctatttctagactttgcttttacagagtggaatgaaataaaagttctttatagatgcaaatttaatttttctcctgatttgtgcagataagtagcattgacaatagttgataaatgattagagccaatatttatcacattgttaaatgacaaggcactgcaatagcttaatagcaaccctataaaggaaatcctattatcatagatattttacaaataatcataataatagataatacacatgagatc

SEQ ID NO: 404113 - DNA, 603 bp, Homo sapiens
aagaattttcctggtgtcccatgcttaggaagaggaaatcccagatttgtgtccacttccaagcacttccagagcctgcaggcttccacttggcatctgtctcacaattaggggccaggtctgcagttgtgatttataataccacwgttcctgcttttgtgaatgcctggagtggaaagtggaagagagggacaaccttaggattagttttcttgccttggtaacagcttaggtgagtggctgactgctttcttcctcattccacagcagtccatcaaagatggtagtgatgaggtatgctgcagccaagattcgcccagcctttctccttcagggcaaagtgaggagggtatttctatttctagactttgcttttacagagtggaatgaaataaaagttctttatagatgcaaatttaatttttctcctgatttgtgcagataagtagcattgacaatagttgataaatgattagagccaatatttatcacattgttaaatgacaaggcactgcaatagcttaatagcaaccctataaaggaaatcctattatcatagatattttacaaataatcataataatagataatacacatgagatc

SEQ ID NO: 404114 - DNA, 581 bp, Homo sapiens
tgttcacagggctatactttgtttgccttgataggtaaaatacagtgaaggctgtgaacgaaaattttgggtaaagcagtttccagggcggttttatttttaaaggccaaaccaccccagggctaaacagtactacagaagaacattacatactacacaggcctcatcttgcttagaataacagcataacagcctgtgtacataaaactccatccaactttcccattcaacagcaaactccagattccactgaatctggggccaaacartattacaaaagaataacagtttattgaattctaatttcccgtgaccatatcaacacacaaacattcacgagaacacactccaactgctgcagcaacaaacaagccccaagtgtccaaactgaaacagcttgggggcttccttccactctccgtagctgggcttaatcaacctgcaaacaaaaattcccttggaatttcccaagttgagaggtgctaatcctgatgtctggtacccacaaaagacattgatttgaccagacatacacacaacacacaacaaacaagcccccaagattatccaaactgaaacac

SEQ ID NO: 404115 - DNA, 581 bp, Homo sapiens
tgttcacagggctatactttgtttgccttgataggtaaaatacagtgaaggctgtgaacgaaaattttgggtaaagcagtttccagggcggttttatttttaaaggccaaaccaccccagggctaaacagtactacagaagaacattacatactacacaggcctcatcttgcttagaataacagcataacagcctgtgtacataaaactccatccaactttcccattcaacagcaaactccagattccactgaatctggggccaaacagtattacaaaagaataacagttwattgaattctaatttcccgtgaccatatcaacacacaaacattcacgagaacacactccaactgctgcagcaacaaacaagccccaagtgtccaaactgaaacagcttgggggcttccttccactctccgtagctgggcttaatcaacctgcaaacaaaaattcccttggaatttcccaagttgagaggtgctaatcctgatgtctggtacccacaaaagacattgatttgaccagacatacacacaacacacaacaaacaagcccccaagattatccaaactgaaacac

SEQ ID NO: 404116 - DNA, 616 bp, Homo sapiens
ctcttaatacaatattgggtttagaaaccaagctagctggctgctaaggctgctcaggctatgcactgttgctctggtgttattgcttctagctcttttcaaaagacagcgatgagaagactacattattttgatgagtaggcgcgcgtgtgtgtgtgtgtgtgtttgcacacacattcacatacgaaaactgaagacagagtgataaaataggttgttaaggggcctggatgggaaataaacacattaattaacacagtgcaactgaaataaatataaatagatttgagaacatgtgaaagtattttataaactttcatgtgtcaagatggaagactggtggcattgttagcctgcatctcccacttacaaagacaaaatagtgtgtagagatccatacagtaaactcttgtccaagaaacaacacagaaacataacagaaaagctgaatgaaaccacagaccytttgatgaaagtgtcgggcagcatcctaaactgtgaacaagacggaaaactcccgacaggagacattgaaccagctcacacacccagcacatcactcctacaaacagcatctgagaaagctgctgcacaaacattctctatatctaaggaa

SEQ ID NO: 404117 - DNA, 598 bp, Homo sapiens
aactactcagtgcagtggaaagttttaacagacttgtccaagtagaggaaacaacttcatagcttgaatacaaggctttgaattaacccaatcagacaaaaatgaagaaaaaggaattaaaataaatgaacaaagtcaccaagaaatatgcggttatataaaatggccagacctaagatttataggtgtttcttcttctgtaggaggagaaaaattaaaactttggaaagtctacttggaggaataattgaggaaaacatccctggtcttgttcgagatttaaatatcaaaatrcaagaagcaaaaagaactccttggagacttattgcaaaaaagacatcaccaagtcatataattatcatgctatctaaagtcaatgtaaaggaaagaattctaagagcagtgagacaaaagcaagaggtagctcctaaaggaaaacctatcagactaacaacaggcttctcagcagaaaacttacaagacagaagggattgggttcctatctttattctccttaaacagaaaaactttcagccaagaattttgtacctaccaaaactaagtttcctaaaaagtgaataaacaaagtatttatcag

SEQ ID NO: 404118 - DNA, 630 bp, Homo sapiens
aaaacctatcagactaacaacaggcttctcagcagaaaacttacaagacagaagggattgggttcctatctttattctccttaaacagaaaaactttcagccaagaattttgtacctaccaaaactaagtttcctaaaaagtgaataaacaaagtatttatcaggcaagstcctgcagagggaatttgtcaatactatcccagccctacaagacatcttaaaaggagttataaatctttaaacaagaggttgatgtgtatcagaatagaaactcctgaaagcacaaaattcacaggacttataaaaatggtaacacaatgaagaaaataaactcactaagcaacaatcaacatgaagactggaatagtacctcatgcatcaatattaacattgaaactggtctaaatgctccacttaaaagacatagattggcataatggatgaaacatcagaaacaaaatatatgctgtattcaggaggcatatctaacatgtaaggattcttatagactcaaggtaaaggggtggaaaaatattttacacaaatggaaaccacaagtgagtaggagtagctatttttatataaaataaaacagctatttttatataaaataaaatatatatatatatt

SEQ ID NO: 404119 - DNA, 630 bp, Homo sapiens
aaaacctatcagactaacaacaggcttctcagcagaaaacttacaagacagaagggattgggttcctatctttattctccttaaacagaaaaactttcagccaagaattttgtacctaccaaaactaagtttcctaaaaagtgaataaacaaagtatttatcaggcaagctcctgcagagggaatttgtcaatactatcccagccctacaagacatcttaaaaggagttataaatctttaaacaagaggttgatgtgtatcagaatagaaactcctgaaagcacaaaattcacaggacttataaaaatggtaacacaatgaagaaaataaactcactaagcaacaatcaacatgaagactggaatagtacctcatgcrtcaatattaacattgaaactggtctaaatgctccacttaaaagacatagattggcataatggatgaaacatcagaaacaaaatatatgctgtattcaggaggcatatctaacatgtaaggattcttatagactcaaggtaaaggggtggaaaaatattttacacaaatggaaaccacaagtgagtaggagtagctatttttatataaaataaaacagctatttttatataaaataaaatatatatatatatt

SEQ ID NO: 404120 - DNA, 558 bp, Homo sapiens
ctggtgttcctgaggaaggagagaaatctaaaaggatggaaaacaaatttgagggaataattgaggaaaacttccccagccttgctagagatctagacatccaaatacaagaagctcagagaacacctgggacattcatcgcaaaaggatcatygcctaggcacatagtcatcaggttatctaaagtcaatgtaaaagaaagaaccttaagagctgtgaggcaaaagcatcaggtaacctatgaaggaaaacctatcagattaacagcagatttctcagcagaaaccctacaagctagaaaagactggtgtcctatttttagcctccttaaacaaaacaattatcaaccaataattttgtattcagtgaaactaagcttcaaaatgaggaaagatacagtgtttttcagacaaatgctgagagaattttccactaccaagccagcactacaagaactgctaaaaggagctctaaatcttgaaacaaatccttgaaattacaccaaaatagaatcttcttaaaacataaatctcacaacacctataaaatgacaacaca

SEQ ID NO: 404121 - DNA, 504 bp, Homo sapiens
atgtttgatttttaaaattacacacataagtgagatcatgcagtatttttctctctggtctggtctatttcacttagcataatgtcatcccggttcatccatatgtggcaaatggcagaatctgctttttttttwaaaaaaaaaaataaggctgaataatattctattgcatatctatacaacattttctttatccatttgtccatcagcaaacacttaggttgttttctatcttggctattgagagtaatgctggagtgcagatatatttatgaggtggtggtttcatcttttttgggtatatagccagaaatgggattgctgggtcatatggtagttctgtttttaattttgtgaggaacctccatactctttcccataacggttgtaccaatctgcattctcatcaacggtgtactaaggttcccttttctctatacccttaccacactagttatctcttatctttttgataatagccattctattggctatgaggtgtta

SEQ ID NO: 404122 - DNA, 587 bp, Homo sapiens
acagcatgtccagaatttttctttatgcctcatgattttgtgygtgcgtgagtgggatttgtgggtgaacattttcctgataaaataggagagaacctgatggctctgcacccacagtgaaatgcagccttgcgcttgaacttcctctttgtcttcttagaagacatggggatcaacaacagcaactgtgcttcactgtggtttggtgacttttttttattattattattcctagttccatccctagctacttcaatacaattcaagtcaacaaaaacattttgagcaactactatgtagaaaggctaagacaatgaataagataagatttctctcctcataggcataaaatgcagcaagggaggcagaaggaccattgaccacagcctgtggtatggctgggacatgagaatgctgagcaaaagagaggcagttcacctgggcgctgagcaggcttcctggaggaggtggcctagaaaatgcacttatggaggataatatgactttaagtcagaggtagggaaagatatgaaatatttttctccgcattacagacaagtaatggaaaatgtgtacagacatggaag

SEQ ID NO: 404123 - DNA, 587 bp, Homo sapiens
acagcatgtccagaatttttctttatgcctcatgattttgtgtgtgcrtgagtgggatttgtgggtgaacattttcctgataaaataggagagaacctgatggctctgcacccacagtgaaatgcagccttgcgcttgaacttcctctttgtcttcttagaagacatggggatcaacaacagcaactgtgcttcactgtggtttggtgacttttttttattattattattcctagttccatccctagctacttcaatacaattcaagtcaacaaaaacattttgagcaactactatgtagaaaggctaagacaatgaataagataagatttctctcctcataggcataaaatgcagcaagggaggcagaaggaccattgaccacagcctgtggtatggctgggacatgagaatgctgagcaaaagagaggcagttcacctgggcgctgagcaggcttcctggaggaggtggcctagaaaatgcacttatggaggataatatgactttaagtcagaggtagggaaagatatgaaatatttttctccgcattacagacaagtaatggaaaatgtgtacagacatggaag

SEQ ID NO: 404124 - DNA, 587 bp, Homo sapiens
acagcatgtccagaatttttctttatgcctcatgattttgtgtgtgcgtgagtgggatttgtgggtgaamattttcctgataaaataggagagaacctgatggctctgcacccacagtgaaatgcagccttgcgcttgaacttcctctttgtcttcttagaagacatggggatcaacaacagcaactgtgcttcactgtggtttggtgacttttttttattattattattcctagttccatccctagctacttcaatacaattcaagtcaacaaaaacattttgagcaactactatgtagaaaggctaagacaatgaataagataagatttctctcctcataggcataaaatgcagcaagggaggcagaaggaccattgaccacagcctgtggtatggctgggacatgagaatgctgagcaaaagagaggcagttcacctgggcgctgagcaggcttcctggaggaggtggcctagaaaatgcacttatggaggataatatgactttaagtcagaggtagggaaagatatgaaatatttttctccgcattacagacaagtaatggaaaatgtgtacagacatggaag

SEQ ID NO: 404125 - DNA, 587 bp, Homo sapiens
acagcatgtccagaatttttctttatgcctcatgattttgtgtgtgcgtgagtgggatttgtgggtgaacattttcctgataaaataggagagaacctgatggctctgcacccacagtgaaatgcagccttgcgcttgaacttcctctttgtcttcttagaagacatggggatcaacaacagcaactgtgcttcactgtggtttggtgacttttttttattattattattcctagttccatccctagctacttcaatacaattcaagtcaacaaaaacattttgagcaactactatgtagaaaggctaagacaatgaataagataagatttctctcctcataggcataaaatgcagcaagggaggcrgaaggaccattgaccacagcctgtggtatggctgggacatgagaatgctgagcaaaagagaggcagttcacctgggcgctgagcaggcttcctggaggaggtggcctagaaaatgcacttatggaggataatatgactttaagtcagaggtagggaaagatatgaaatatttttctccgcattacagacaagtaatggaaaatgtgtacagacatggaag

SEQ ID NO: 404126 - DNA, 590 bp, Homo sapiens
atttggacaatgaaacaccagacccctcacccactaagactgggtaactggccacttgcttcctgttraccaactcctcttccttacccctccctaatttctattttcccacatgtggttacatttcttccctgctatataagcccctaattttagtcagtcaggaagatggatatgagactgatctcctgtatttttggttgtagcacataatcaaagccttcttccttggcaatactgaaaaaaaaaaaagattagctttctgtgtggtgagcagcagcatctgactgaacccctgtcgttttggtagcaatagtagaaagtcaaactccaggcttctgtctactgtggctgatacaatgtagttttgaacatatgctcacatcttcctaggcacaagcaggtatacatttcccagcctcactgtagctatgctgggcttatgtcattggactgaactgataagtcacttctaggcttaattactgaaactatctcttgtgatcctcagttctttctgttcttactgcagtgatcttggagggtgtgtttcaaagggaaaaatagtttcaagacagaatagggtaccc

SEQ ID NO: 404127 - DNA, 590 bp, Homo sapiens
atttggacaatgaaacaccagacccctcacccactaagactgggtaactggccacttgcttcctgttaaccaactcctcttccttacccctccctaatttctattttcccacatgtggttacatttcttccctgctatataagcccctaattttagtcagtcaggaagatggatatgagactgatytcctgtatttttggttgtagcacataatcaaagccttcttccttggcaatactgaaaaaaaaaaaagattagctttctgtgtggtgagcagcagcatctgactgaacccctgtcgttttggtagcaatagtagaaagtcaaactccaggcttctgtctactgtggctgatacaatgtagttttgaacatatgctcacatcttcctaggcacaagcaggtatacatttcccagcctcactgtagctatgctgggcttatgtcattggactgaactgataagtcacttctaggcttaattactgaaactatctcttgtgatcctcagttctttctgttcttactgcagtgatcttggagggtgtgtttcaaagggaaaaatagtttcaagacagaatagggtaccc

SEQ ID NO: 404128 - DNA, 590 bp, Homo sapiens
atttggacaatgaaacaccagacccctcacccactaagactgggtaactggccacttgcttcctgttaaccaactcctcttccttacccctccctaatttctattttcccacatgtggttacatttcttccctgctatataagcccctaattttagtcagtcaggaagatggatatgagactgatctcctgtatttttggttgtagcacataatcaaagccttcttccttggcaatactgaaaaaaaaaaaagattagctttctgtgtggtgagcagcagcatctgactgaacccctgtcgttttggtagcaatagtagaaagtcaaactccaggcttctgtctactgtggctgatacaatgtagttttgaacatatgctcacatcttcctaggcacaagcaggtatrcatttcccagcctcactgtagctatgctgggcttatgtcattggactgaactgataagtcacttctaggcttaattactgaaactatctcttgtgatcctcagttctttctgttcttactgcagtgatcttggagggtgtgtttcaaagggaaaaatagtttcaagacagaatagggtaccc

SEQ ID NO: 404129 - DNA, 645 bp, Homo sapiens
cagttctttctgttcttactgcagtgatcttggagggtgtgtttcaaagggaaaaatagtttcaagacagaatagggtaccctacataagaccgacttgaatmacaaaccttgttaagccagtgacacttggaaattggtttgtcactgtagcgttacatgttatatcctgattaataaccatctcattttccttttagtgcagcaattaggagacactatcaaacaccacctgccaaaatgaggaaatgcacccaacttcccgtgtggacacttgcaggatgggtgaattgggaaaagaggaactggtacagacaagatggtggggctccattgcaactggacagagaggtataggaaggctggagagtgctgaagacaaaagatcatgggaaccagaggtcttagaacatttagccaaccttccctttttatcgctgtagtaaattgaatatttttgtgtgataagcgtaggcagttttaggcatggcacataggatcagggtgctgtgagaaagtttctttctttctttcctggggactttttagatcacagtgtccagtatttgccagacaactcagagactcctcactactcaccatgtgtcaaatgtaagtccaagaattgagctaacccaaagtggag

SEQ ID NO: 404130 - DNA, 646 bp, Homo sapiens
ctcacatcttcctaggcacaagcaggtatacatttcccagcctcactgtagctatgctgggcttatgtcattggactgaactgataagtcacttctaggcttaattactgaaactatctcttgtgatcctcagttctttctgttcttactgcagtgatcttggagggtgtgtttcaaagggaaaaatagtttcaagacagaatagggtaccctacataagaccgacttgaataacaaaccttgttaagccastgacacttggaaattggtttgtcactgtagcgttacatgttatatcctgattaataaccatctcattttccttttagtgcagcaattaggagacactatcaaacaccacctgccaaaatgaggaaatgcacccaacttcccgtgtggacacttgcaggatgggtgaattgggaaaagaggaactggtacagacaagatggtggggctccattgcaactggacagagaggtataggaaggctggagagtgctgaagacaaaagatcatgggaaccagaggtcttagaacatttagccaaccttccctttttatcgctgtagtaaattgaatatttttgtgtgataagcgtaggcagttttaggcatggcacataggatcagggtgctgtgagaaa

SEQ ID NO: 404131 - DNA, 638 bp, Homo sapiens
ccaatgaaaggataaagaaaatgtggtacttatacacaatggagtactagtcagccataaaaaataatgagatcttgtcatttgcaacaacatggatggaactggaggtcattatggtaagtgaaataagtcaggaacagaaagacaaacatcacatgctctcacttatttgtgggatctaaaaatcaaaacaattgaactcatggaaatacagaatagaaggatggttaccagaggctgggaaggcttgtggggggaagagggaaggtgaagattaatggttacaaaaactattagaaagaatgaagaagacctagtatttgatagcataacagagggactatagtgaataataatttgttcgtttaaaaatgwctaaactaatatagttgtactatttataacacaaaggataaatgcttgaggaaagggatacccaattttccataatgtaattattatgcattgtatgcctgtaccaaaatatctcatgtaccccacaaatacatatacttactttgtacccacaaaaaataaaaataaaaaaagttaaagaaaaaaaagtaagaactagtctggacgttttttaatacaatcccaagaggacaggcaaagaaagcaaaaatagacaagtggaa

SEQ ID NO: 404132 - DNA, 638 bp, Homo sapiens
ccaatgaaaggataaagaaaatgtggtacttatacacaatggagtactagtcagccataaaaaataatgagatcttgtcatttgcaacaacatggatggaactggaggtcattatggtaagtgaaataagtcaggaacagaaagacaaacatcacatgctctcacttatttgtgggatctaaaaatcaaaacaattgaactcatggaaatacagaatagaaggatggttaccagaggctgggaaggcttgtggggggaagagggaaggtgaagattaatggttacaaaaactattagaaagaatgaagaagacctagtatttgatagcataacagagggactatagtgaataataatttgttcgtttaaaaatgtctaaactaatatagttgtactatttataacacaaaggataaatgcttgaggaaagggatacccaattttccataatgtaattattatgcattgtatgcctgtaccaaaatatctcatgtaccccacaaatacatatacytactttgtacccacaaaaaataaaaataaaaaaagttaaagaaaaaaaagtaagaactagtctggacgttttttaatacaatcccaagaggacaggcaaagaaagcaaaaatagacaagtggaa

SEQ ID NO: 404133 - DNA, 487 bp, Homo sapiens
ttgctaattatgccgtcagcacaggaccatggaatattgrgtctgaaaggaaattcagggtgatcactgaacttagagaagtaaagtgacttcttcaaggtcataggaattctagtgtccaagaaggggccagaatccagggtttttgactcccaagcctgaggccttttcacaacacactaaggcaatgtttatgatgccctattaagtaattcccaactggcaacactgaggatgcagagatactgcagattctttattaataaaatctgagccaaacctggagcgctgaggaagaaaaatttctcaacaagcatatgaggaacttctggttgatacatgatgtgatgttatgactgagattccatctgacttaactccagttggaggaagttaggaaattgttttctatttaatgagtagggtaagatatacttgttctaagaggatttcaactaaagctccttctcacattccttatagatta

SEQ ID NO: 404134 - DNA, 466 bp, Homo sapiens
aaataaaaaggcaaatgtcaaactgggaggcaaawgtcaacttgtgaatattcatcattctataatgaatatagtgaaatatctcataatgaataatatctcatgagaatatctcatagtgaaaaaatgaatatctcatatccaaaatatataaataactctttcaatgcatcaacaagataactcaatatttacccagtaaaagatgtgagtgcatatttcaaaaaagatatcatccaaatggacaacattggctgggtgcagtggcttacacctggaatcccagcactttgggagaccgaggcaggaggatcacttgatcccaggagtttgagaccagcatgggcaacatagggagaccccatctctacaaaaaacacaaaaagtagccaggtgtacaggcatgcacctgtagtctcagctacttgtgaggctgagctggaagaatcacatgcgtccagggagg

SEQ ID NO: 404135 - DNA, 466 bp, Homo sapiens
aaataaaaaggcaaatgtcaaactgggaggcaaaagtcaacttgtgaatattcatcattctataatgaatatagtgaaatatctcataatgaataatatctcatgagaatatctcatagtgaaaaaatgaatatctcatatccaaaatatataaataactctttcaatgcatcaacaagataactcaatatttacccagtaaaagatgtgagtgcatatttcaaaaaagatatcatccaaatggrcaacattggctgggtgcagtggcttacacctggaatcccagcactttgggagaccgaggcaggaggatcacttgatcccaggagtttgagaccagcatgggcaacatagggagaccccatctctacaaaaaacacaaaaagtagccaggtgtacaggcatgcacctgtagtctcagctacttgtgaggctgagctggaagaatcacatgcgtccagggagg

SEQ ID NO: 404136 - DNA, 540 bp, Homo sapiens
tctgcctaaaaaacaacttttagatttcctttaggaacagtctgatgattaattctaacagttttgattagatttaaaatgtctttatttcaccttcattatcaaaaggtattttcactttgtatagaattttatattggtagtgattttccatcagctttttgaagctgttggtcttctggtttttattatttctgttaaaaaattagctgtcagtgttactggtcttttggytttcattatttctgttaaaaaatcagctgtccatgttattgccgctcttttgaatgtaattgtcttttttgcttttggcaactgttacaattttctcttgatctttgcttaaatatgatgtttagctgtgattttctttttaagtattcttctttggattcataatgctttgtaaatctatggtttgagactttacatcatttttagaaaaatatctaggcaaatattgcttctatcctgttctatttctctcctctttgaactctaattacacataaataagaccatgtaccgaatcatatgtat

SEQ ID NO: 404137 - DNA, 398 bp, Homo sapiens
tattttaatgacttctgtctcaatgatacccttcagcacytcaaaaaccacaaggaattggcctggaatcagagtccaaaaaaaaaaacaaaaaacaacagtccaggcagggagatgataaactgaacagaacaatgccaggactgagaatcttggccaagttgtggtattagaatggtattgtatttaaaagccacagctaaaaataggcacataaacaagggaacataatcttgggactcaaggactaaagaaaaaaaaggaaagaacatccaaggtttcaggtatcaatctacccagagacagggccagcattaagcagaagccaaataacagggatctacacaaatccaaacaagcatgctactgacattagcagcctagcaccagggggcaga

SEQ ID NO: 404138 - DNA, 625 bp, Homo sapiens
tcactgcagccttgacctcctgggctcaaacaatcctccatcttcaaccctcccagtagctgggactatagatgcacactaccacacccagctaatttttattttattttatttttatgtatttatttattttctgtagagacagggtctcactatcttgaccaggcaaggttagtcttgaactcctgggctcaagcaatcctcccgccttggcctcataaaatgctggaattatagcatgagccattatgcctggccaaggacctaagtttaaatcttagctccactagtcacctgtgtgactgcaggctagtcagttaatctctagaagtatcttcatctgtaartgaagataccatctatcttacaaagatttatttgtttgagttctgttttgtttgcttgtggatttaaaaagatagcacatttaaaagcacttgaaagttcttggctcatgacaggcacttaaatatttttcccttattatcttaagcttttgggaaatactatgttagaacttctcaggtctaagagaaaaccactgagtaagacccttgggttcagaagcaaccactgaaactaactcagcaatgatccacaagaagagttttctgaggcggaggtg

SEQ ID NO: 404139 - DNA, 625 bp, Homo sapiens
tcactgcagccttgacctcctgggctcaaacaatcctccatcttcaaccctcccagtagctgggactatagatgcacactaccacacccagctaatttttattttattttatttttatgtatttatttattttctgtagagacagggtctcactatcttgaccaggcaaggttagtcttgaactcctgggctcaagcaatcctcccgccttggcctcataaaatgctggaattatagcatgagccattatgcctggccaaggacctaagtttaaatcttagctccactagtcacctgtgtgactgcaggctagtcagttaatctctagaagtatcttcatctgtaaatgaagayaccatctatcttacaaagatttatttgtttgagttctgttttgtttgcttgtggatttaaaaagatagcacatttaaaagcacttgaaagttcttggctcatgacaggcacttaaatatttttcccttattatcttaagcttttgggaaatactatgttagaacttctcaggtctaagagaaaaccactgagtaagacccttgggttcagaagcaaccactgaaactaactcagcaatgatccacaagaagagttttctgaggcggaggtg

SEQ ID NO: 404140 - DNA, 523 bp, Homo sapiens
caatttcaaaactacagtaatcaaaagaatgtgttaactgacattaaggagagacatatagatcagtgaaacacaacagaaagggcagaaataaacccatatatatatggtcaactgatttctgacaagggtgccaaggccatcttcaacagtgctgggagaactgaatatacacaggcaaaagaatgaggttggatccttacctcacatcatttacaaaaattatttcaaaacggatcaatgacytaaatataagagataaaaatataaaattcttaaaaggaaacttaagggtaagtatttacgaccttggatttggcaattgtttgtcagatgacatcaaaaacacaagcaataaaagaaaaagtagataaactggacttcatcaaaaaaatttctttgcatcaaaagagactatcaagagagtaaaaatacaacccaccaatggaatatttaaaaatcatatatttgataagggtctagtatctagaatatgtaaagaattcctaaaacgcaacaacaa

SEQ ID NO: 404141 - DNA, 570 bp, Homo sapiens
aaacagtatgaaagtttcaaaaaaattaaaaatagaactaccagttgacccagcaatcctacttctggatatatgaggaaatgaaatcactatcttgaagtgatttctgcacccttatgttcattgcagcattattcacagtagctaggacatgaaaacatgtatatatagtagtcccttggtatccgtaagggattggttccaggaccacctatggatacccaaatccatggatgctcaagtctctcatataaaacagcataatatttgcatataacctatccacatctacctatatatcaatagtttaaatcatctctaaattatttataaaacttgtaatacctaacacaatgcaaatgctgtgtaaatggctgttatactrtattgtttagggaatgacaagaaaaatagtgtacacattaagtacacatataattttttcatatattttaaatccctactcagttgaataaatgaaagtgaagcatatggatatgggtggccaacagtacacacacaagaacacacacatgcacactcacacacatactggaatattattcagcc

SEQ ID NO: 404142 - DNA, 620 bp, Homo sapiens
ctggtgttaaagacaaagaatgtaatgctaagagagaccatgacccaagtctgtgacccaggatcatagggtgactgcaggagttagctgggttccaaactaaaatattgctgagtttttgtgtttgtccattttgtgttgctgtaaaagaatacctggggctgggtaatttatcaaggaaaaaggttcatttagctcatggttttgcagattacacaaaaagcatggcgccagcatctctgtctggtgaggcctacggaagcttttactcattgtggaaggcaaggggagccagcgtgtcacatgaggagaaagacagcaagagagtaggggatgatctcagactctttttaacaactagatctcttgtgaactcattaccacgcagagggcaccaacccattcaggagggatcckcccccatgacccaaaccctcctgccaggggccacctccaactttggggatcacatttcaacatgagatttggtgggggcaaatagccaaaccatattagttctcatcattttcatagtatattattaggccctcttgatttcaagttccaatgtgtggtcagcatttcaattgatatttacatatatttagatattaattagc

SEQ ID NO: 404143 - DNA, 686 bp, Homo sapiens
aatgataatggaaacacaatataccaaaacctatgggatacaggaaaataaatattaagatgaaagtttatagttaaaagtgcctacttaagataaaacaacttcaaataaacaacctaacaatgcaccttaaagagctagagcagcaagaaccaatcaaatccaaagttactagaagaaaagaaataataaagaccagagcagaaataaatgaattgaaatgaagaaaagaatacaaaagatcaatgaagcaaaaagttgcctctttgagaagataaaattaacacaaatttattcaaagtaactaataaaaaagagagaagactyaaatcaataaaatcagagatgaaaaatgaaatattacaactgataccatggaaattcaaaggatcattgaagagaaaagacattctcttcaataaatggtactgggaaaactggatatccatatgcagaagaatgaaactagacctctatctctcaccatatacaaaaatcaaatcaaaataaagtcctaaatctaagaactcaaactatgaaactactacaagagaacattgggaaactctccaggacatcagtctgggcaaacatttcttgagtaataacccacaagcacaggcaaccaaagccaaaatggacacatgggatcacatcaagttaaaattattctgcacagcaaaaga

SEQ ID NO: 404144 - DNA, 598 bp, Homo sapiens
tgacctgaagtcacttagggaagccaagtgggattttgttttgccatatatagtatcgttaggcagattcatatcaacatgactgaaggctcactaaggacagtcaccacaattttgctccatttttacctctgactcctagtccagtgatcasaacccaataagaaatcaagaattactcgatacatctttctttttggggggagtaggtccatttttaataaaattgtatttatatgaaatgatatgacactcttttattgggttgagaattatccagtagggaagaaagttaggatctagaagtctaatagttggaacaagagccaccaggagtcgatgatgtatgttataacttggtagttggtacaagggattttcttgtattattctatctaattatttgtatttttgacatatgccattgaaataaataaaactgatgttatgtaatgggattcattctataatgatattcttcagtaactctcccacacatcattttggatttatttttctctaagtgtcaaaacaaaagtttaattaattcaacaattaaagataggtggatttgctgtcattttgtgagtgaagaatt

SEQ ID NO: 404145 - DNA, 627 bp, Homo sapiens
ccatttctgagcctgtataatactttggtcaacttgggatgttagaaattatcctccatcacgtttcacctaggaaaaacatccgattccaaaaatgtcactgaaattggcagagtaaagacctctgaaaaaatttatcctttataaaagcaatgagaacaccaacaaaaagtatcataattagcattttcagaatgttggaataaaccaaaagcttgcagcaatctggagagtatttattcaggaaaaataacagaatctcaataatagtacattttatggtgttttaatatgccctattcccaatatttccacattatataattttaaaggtgcagttttgaacaaaaaattataagacatkcaaagaaacataaaagtctcagccatacacaggaaaaaaggcagccaatagtgactatccctgaaacccagatgttggtctcattagacagagactccaaataagctattataaatatattcaaataagtaaaggaaaccatgtctgtaaaaaccaaaggaaagtataggaatgatttattaccaaataatcattatcaataaagatatggaaattatattttaaaataacaaatataaattctgaagttgaaaattacagta

SEQ ID NO: 404146 - DNA, 606 bp, Homo sapiens
ctaggaaggaaaggatcttggccgagatcacagagtaagttagagacagagccagcctgcttccccctcatatggtgtagcggaatctctttattgggaatgtgataaaatgtactgtttgtactctttctgttatgctggtcccataatgaaagatactgcttggcccatatcactgcagcccagagcaaaaggactataggtggagagtattaatctaactacactttcattcatttatcacacattactaaacaccacctttatgtcagttactgaagatactgagataaaagacatgggtcccacctgcaaggtattcaattttaatgwtgaagacaatctccaggagggctgaatattttccatgcagttaaatgaaatatttctcccatctgccaactgcattttatatttatacttgtgaatgcattgactctccttatatatagattatgagacattttctcagaaaaaaaataccaaatatctcagaccccttatttattcatgtcctcaagaaatattatttgagcacctaataggagttaccaagaggcaaaaataaataaataatagtcctctctctcaagaaaccataataac

SEQ ID NO: 404147 - DNA, 606 bp, Homo sapiens
ctaggaaggaaaggatcttggccgagatcacagagtaagttagagacagagccagcctgcttccccctcatatggtgtagcggaatctctttattgggaatgtgataaaatgtactgtttgtactctttctgttatgctggtcccataatgaaagatactgcttggcccatatcactgcagcccagagcaaaaggactataggtggagagtattaatctaactacactttcattcatttatcacacattactaaacaccacctttatgtcagttactgaagatactgagataaaagacatgggtcccacctgcaaggtattcaattttaatgatgaagacaatctccaggagggctgaatattttccatgcagttaaatgaaatatttctcccatctgccaactgcattttatatttatacttgtgaatgcattgactctcctyatatatagattatgagacattttctcagaaaaaaaataccaaatatctcagaccccttatttattcatgtcctcaagaaatattatttgagcacctaataggagttaccaagaggcaaaaataaataaataatagtcctctctctcaagaaaccataataac

SEQ ID NO: 404148 - DNA, 548 bp, Homo sapiens
tttctgaacttaggtctatatttttggcaaactcttattccaactctgcctgtactcttatatcaaatagaaagcaggcagtctttttctccttctagagttgtccaaggacagaaaaaaaccgcagcagaaatatgccacgtacacagaaaaaagaaaggcggatctgataagctggaaaggagaagcctggaaaaagatgtggattatgtaataggcccagaagatgggctgatgagaaaaagcttctttcaatgtttctggaaaaaaatgcaaatattcagcaagacacggtcattatcctrgtgaatgggcacattcagtgattccttctatctttggtgcagagattgaggcatcttgggatgcaactgagggagcaaagctgactgcaccctctgccctcctgtgtgtgcagtcaacctggcacatcccctcttgctaccagacccgtttccctttccagggggaagtcaactcggttgctaaaaaacaagttctgatgagtgtttaaggaggagcaggataatgggagtggctccgctgca

SEQ ID NO: 404149 - DNA, 548 bp, Homo sapiens
tttctgaacttaggtctatatttttggcaaactcttattccaactctgcctgtactcttatatcaaatagaaagcaggcagtctttttctccttctagagttgtccaaggacagaaaaaaaccgcagcagaaatatgccacgtacacagaaaaaagaaaggcggatctgataagctggaaaggagaagcctggaaaaagatgtggattatgtaataggcccagaagatgggctgatgagaaaaagcttctttcaatgtttctggaaaaaaatgcaaatattcagcaagacacggtcattatcctagtgaatgggcacattcagtgattccttctatctttggtgcagagattgaggcatcttgggatgcaactgagggagcaaagctgactgcascctctgccctcctgtgtgtgcagtcaacctggcacatcccctcttgctaccagacccgtttccctttccagggggaagtcaactcggttgctaaaaaacaagttctgatgagtgtttaaggaggagcaggataatgggagtggctccgctgca

SEQ ID NO: 404150 - DNA, 580 bp, Homo sapiens
gtgccaagctctgtgtagtcactgcagaacaaaattaagtaagatacaatcccagccttcaagaatttatgcctaatggagaagacagataaatgcaattttaagtcaagtgaaatgaaaaggtggtatggatgcacagaattatttcagaatgaaataaatccctgcactaagacttcagattttctcttattccttctttaaatgcatcccctttccattatgcctttactttatcatcatcaccctactatataatgccagcatataattgagtccagaatatggaagtgaaaggaaatttttgagtttatttccttattggatatattttattatctatgaattactgttcagtgtagctaaataacacgtttcccttctcccccaacctgcactcacagttgatcactgaacttcaataaaaaacgtttcaggasgtccgcttttttggttaaatattacactgtgatacttctatcttttaatactttcccaaaacaggatttctatctgatactctccccacacctcctctatttttccaactcatttcgcgactaatcattcaatgtgtgtc

SEQ ID NO: 404151 - DNA, 580 bp, Homo sapiens
gtgccaagctctgtgtagtcactgcagaacaaaattaagtaagatacaatcccagccttcaagaatttatgcctaatggagaagacagataaatgcaattttaagtcaagtgaaatgaaaaggtggtatggatgcacagaattatttcagaatgaaataaatccctgcactaagacttcagattttctcttattccttctttaaatgcatcccctttccattatgcctttactttatcatcatcaccctactatataatgccagcatataattgagtccagaatatggaagtgaaaggaaatttttgagtttatttccttattggatatattttattatctatgaattactgttcagtgtagctaaataacacgtttcccttctcccccaacctgcactcacagttgatcactgaacttcaataaaaaacgtttcaggacgtccgcttttttggttaaatattacactgtgatacttctatcttttaatactttcccaaaacaggatttctatctgatactctccccacacctcctctatttttccaacycatttcgcgactaatcattcaatgtgtgtc

SEQ ID NO: 404152 - DNA, 597 bp, Homo sapiens
accctcactctttttttaaatacctctaatcttgagaatgcagccttccagacaaacttgaaaaccatgtaaaacaacttaaaaatgsatgcctaaaataaaaacccttgtggcattataattattatatatatatgtatatatatatatgatgttttcctattgtcttttaatttttaactgtattttctgttcttcaataagatttacagttacatataagcactttgtctttctttcattttttaatcctaaatattaccttggttgctactgaacatagaacattttttctaattttaatttctgaatattttttgataagctaaaagaaaaggctactttttttgtaatttatctgatagctagtctccttatccagtttttactaatttttgttgttacttgaatctttggattttcaatatatataatcagcaaaagatgtcagtttaatctcttttctgatgtttattttttctgatgtttattctgcttatttcattttttattatagtgtttttcagggatagatagaagtctttttcttttctatgatgaggaaggatataaatatacaaagataaatctgtatct

SEQ ID NO: 404153 - DNA, 597 bp, Homo sapiens
accctcactctttttttaaatacctctaatcttgagaatgcagccttccagacaaacttgaaaaccatgtaaaacaacttaaaaatggatgcctaaaataaaaacccttgtgkcattataattattatatatatatgtatatatatatatgatgttttcctattgtcttttaatttttaactgtattttctgttcttcaataagatttacagttacatataagcactttgtctttctttcattttttaatcctaaatattaccttggttgctactgaacatagaacattttttctaattttaatttctgaatattttttgataagctaaaagaaaaggctactttttttgtaatttatctgatagctagtctccttatccagtttttactaatttttgttgttacttgaatctttggattttcaatatatataatcagcaaaagatgtcagtttaatctcttttctgatgtttattttttctgatgtttattctgcttatttcattttttattatagtgtttttcagggatagatagaagtctttttcttttctatgatgaggaaggatataaatatacaaagataaatctgtatct

SEQ ID NO: 404154 - DNA, 631 bp, Homo sapiens
ctagactctaatctccatgaaggcagggattatggttgttttagttcacttagtgctaggcaaatgatgtccaataaatatttgttgaaagaacaaatgaattggtgaaacagagatagtacctcatacaaaagctacatagtgaatataaaaacaaggtgaagtgagtaaaaagagcatcgatccaatttggattttagagaccacaaattttctgattttaggcaagttcctacatttctgtatcaatttcttcacctcaaatagggataatatctatttcattggattgttgtgaaaatgagtgaggtagtatgcatgtaaagcgcttggcagagtccttggcaaagagatgatatgtgctaatgattgtttacaaacatggcatccttaaaaaaaaagccatctcttcctctttctcctttgctggattaactgaggagacttttggaacacctgaatgttctaaggtgtaataatctgtgaaaagtraaaagaccttgaatgactaaactcaggcagatgtaagctccttttgcccctgaaatatctttctcctttggccagaaattctcaccttcctattccatctcttagagaccatttggtgtcctttgattcatgcaatgca

SEQ ID NO: 404155 - DNA, 650 bp, Homo sapiens
acgaagtgttttcatgttcattattgtcattgaaccttcagagagatcattctgctatcatgggaggatgttggaagtgggttggggtagagagattgggggtagagagatgggttggaaggctgctgtgatagcccaggcgagatgcaatgaagacctgaaccagagtagtggaaaggtgagctgaaagtgaaaggaatggatgaaaacaaacggcacagaaataaaaacaaagggaagttctgacaccygcgttttggtctccttgacattgcttccatttcctctagggacatgtcctggataagggtgaaactggatgctccttggcagtttcagatgtcaccacccctaactttccattggataaaagaaggcccaaaatagcctctggtcccataggctagtgattactgggactcagattcctgtcctgaaaacacggggaagaagccaggcatttgcccacttaccctctcaccagctgacccagggcattagcaccctggtgctcgctgacgcagagcatctgccaaattcgattagccccgtggcctggctaagctgggcatgtcctgcactgcttctaaaacaagccctccaggaaggggctgcgagactcggagatgttttttcctactgtcaagcag

SEQ ID NO: 404156 - DNA, 534 bp, Homo sapiens
tgtttttccatatacacaacacaagtcaatgtttgttatgactttcctgatccttatttataagacaatacaagaggaaaccatgtgtgtatgtttagaaatagaaatgatacattgcacagatatagttcaccacgttatgggatgggttgtcagtgttcaaatggggaggctgaagagtaagaacagatgctttttttccttaatggcccyttctctgatttaaaatccttccatttatttccctaagatttagtgataactttaaacactttaactaaattacccagcggcttggcagccatcacggaggcaaatccttttagaaatcctagcaatctgttagattgtgggtactatgatataaaatctgtgtgctccacgtacaaaaattaaatcagtgctatggatacaaatacatactgcaaatggcaccacttccaaaccgaggatatgtgacctgtctccaaatattgaatttctttttttacttttttccccagtacttgactttctaaatttgggccaatttat

SEQ ID NO: 404157 - DNA, 625 bp, Homo sapiens
gtggtaaattccacagggaacggtaagattttgagaaacagaaaaagtatgatgaaaaaaggggcagaagtaaggattagcttaatgatgaagagcagtgtaagctggatgaagagacaaattgtaaattgcaaaatgaaataaaagtattagaatatctgacatgttggtaaggcatgtgaaatttttaaatgggtataatcttggatcacttcaggtgyctggacgttcatggtgtctcaattgtgagctcataggtaatggagaatgagaacccacagggaaagactctgaaattgatttgtccttccttgaacaataaaattcaacagactttgtgatgatgatgatgatgatgatgatgatgataatgatgacaatgatatgatgatgacaatggtggctaatactcattgagtacttattatagagcagacactgtaccaagtggtttacatatattaagtcattaaatcttttcaacaacgctatgaagcaagtgctatttagtgtcccattctgcagatgaagcaaactgagctgcagatgggttaagcaccctcaccaagatcaatgcagagtggctcagccaggagacaggaaagtaagttggtatttaattgct

SEQ ID NO: 404158 - DNA, 625 bp, Homo sapiens
gtggtaaattccacagggaacggtaagattttgagaaacagaaaaagtatgatgaaaaaaggggcagaagtaaggattagcttaatgatgaagagcagtgtaagctggatgaagagacaaattgtaaattgcaaaatgaaataaaagtattagaatatctgacatgttggtaaggcatgtgaaatttttaaatgggtataatcttggatcacttcaggtgcctggacgttcatggtgtctcaattgtgagctcataggtaatggagaatgagaacccacagggaaagactctgaaattgatttgtccttccttgaacaataaaattcaacagactttgtgatgatgatgatgatgatgatgatgatgataatgatgacaatgatatgatgatgacaatggtggctaatactcattgagtacttattatagagcagacactgtaccaagtggtttacatatattaagtcattaaatcttttcaacaacgctatgaagcaagtgctatttagtgtcccattctgcagatgaagcaaactgagctgcagatgggttaagcaccctcaccaagatcaaygcagagtggctcagccaggagacaggaaagtaagttggtatttaattgct

SEQ ID NO: 404159 - DNA, 459 bp, Homo sapiens
tgagaccaccatggccaacatggtraaaccctgtctctactaaaaatacaaaaattagctgggcatggtggcacacacctgcagtcctagctactcgggaggctgaggcaggagaattgcttgaacccgggaggcggaggttgcagggagccgagatcacgccactgcactccagcctggtgacaaagtgagactccatctcaaaaaaaaaaaagtgtgtagcacttctgcctttgctctgtcctgctctgccatggtaagacattcctgcttcccccggatcccttggggcactgcctagtagatctgtgagaagtgggtcaccatcctccagaccccagaattgtagaaccactgacgaatttcactgtgtttttggaaaacctgcaggcactcaacaccagcccacgagagcagctgcaggggctgtaccctgcagagccacagggctagagctgc

SEQ ID NO: 404160 - DNA, 459 bp, Homo sapiens
tgagaccaccatggccaacatggtgaaaccctgtctctactaaaaatacaaaaattagctgggcrtggtggcacacacctgcagtcctagctactcgggaggctgaggcaggagaattgcttgaacccgggaggcggaggttgcagggagccgagatcacgccactgcactccagcctggtgacaaagtgagactccatctcaaaaaaaaaaaagtgtgtagcacttctgcctttgctctgtcctgctctgccatggtaagacattcctgcttcccccggatcccttggggcactgcctagtagatctgtgagaagtgggtcaccatcctccagaccccagaattgtagaaccactgacgaatttcactgtgtttttggaaaacctgcaggcactcaacaccagcccacgagagcagctgcaggggctgtaccctgcagagccacagggctagagctgc

SEQ ID NO: 404161 - DNA, 489 bp, Homo sapiens
cctctactttttttttatttctcccttaagcattaattacttcattttaacaagcaaagctgctctctcaaatgctgcctcaacatttcacattcttgaaaactgtctctgtaccaggttgatttatagaggaagattttgaaaaattaaaaatttggggatggttttttggcaggaaaaaaacataaaaaggtacttagcccacaaaatggcagcattctgatatgcttctstcttttggatgtggtaagcattgccccatatttggtaatttcagtgggacggcatagaaattttgcttactgctaaggggaaaataaagacattttacttgctctgtggagggtttgatttcccagatactttttttcccctccttttattctttttcttttttgggtataattctctgtgcaccgaagacattctgttctggtgagctctgcacttcttattcatggcaattacattcacatctttgatcttgga

SEQ ID NO: 404162 - DNA, 557 bp, Homo sapiens
gagatgaacctgactaacgtgtctgtccaggacagtgtctcagcttaaacaatgtttccagcatagaataccttctcttctcaacattagctcatttataaccctttgtgaagcttattaaatagactttattatccccattatacaattaaggaaattgagactgaggaaagtgatctgtgaaggtttcatacctatgaaggtggcagcagaccttgaatttgagacttctggctccatgatcaagaaaaaaaaaaatcagtcaagacatgaaggcatacaaatccagggcatgttgagagaagagccaagagtgacatgccactgaatcctagggtgcaaaacagaaagagaaagtggcttggggtcagatggttaggcctccaaacgccyttttaggcaatttgaacttaggagaagtggagggctgagggtagatcacagaatagatgattagacattttctttggaaggaagggtgatttggcagtggataggctgcttggagaaggaaagatcatccaggaggtggctgcagttcttcaagtccgacttct

SEQ ID NO: 404163 - DNA, 607 bp, Homo sapiens
  misc_feature (1)...(607): n = A,T,C or G
ttggggggcttctgtgatcaaatatggtgtgaaaaacagaattcaataatgttaagctggtttctatgcaggacatatctgtaagtgatagcagatgctggtgtcaggtattgtacatgatgaattaacctaaacagcaaccctataaagaagatactattcttcttcttcttctncgttttgcagatgaggacactgaggtatggagaggttagtaacatgtcccagatgtaagtgcaactaaggcctaacaacaagagccaagtgatatggtttggctgtgtctccacctgaatttcatcttgaattgcagctcccataatgcccacgtgttgggggaaggacccggtgggaggtaattgaatcatagggcagttaccgccatgctgttcttgtgatagtgagttctcacgagatctgatggttttataagggtttccccygcttttgctaattcttctccttcctgctgccgtttgaagaagcacatgtttgcttccctttctgccctgattgtatgttttctgaggtctggccatgctgaactgtaagtcaattaaacctctttcctttataaattacccagtcttgggtatgtctttattag

SEQ ID NO: 404164 - DNA, 505 bp, Homo sapiens
cccttatcttgcctgggtgcattggcttacacctgtaatcccagcactttgggaggctgagataggtggatcacttgaggtcaggagttcgagaccagcctggtcaacatagtgaaaccccctctctgctgaaaaatacaaaaaaaaattagccagatgtggtggcacccacatggaatcccagctactcaggaggctgagacaggasaatcacttgaacccaaggcagaggttgcagtgagctgagatcgtgccactacaccactccagcttgggtgacagagcaagactgcatctcaggaaaaaaaaaaggaaaatgaaagaaagaaataaactttggcagaaagtctgagatttaatcctaattcctcaattatctcactttagccaatatccagagtttcatttgggtttttgccttgaaagtttctgtttgttaattattttcatccatactactaccattattacattcatgcgcttgggtaaaaaatgtagtttaact

SEQ ID NO: 404165 - DNA, 583 bp, Homo sapiens
agattagtgtgaattcagatgtcctgtaagtgtaatataaacaaaggtcctcaaatacttaatataaaaaawgtaaaatatctccttgataacttcattaatcttaagtctatgttaaaatgggaatattttggatatatggggtaaaataaaatatattattaaagttaatttctcctggttctttttactttttaaatatgggtgctaaaatgtttaagcttacaaatgtggcttacgtatatgttacacattatattcttacagacagcactgtcctagatcattaattcctcttgccaatctctcctatgatcagtactcccatcttaatccacatagacattttcaatagctgtcatcctctgcagagcctccacagctcattctttccagattgccttgcaatttgcttatttcagccatcatttcataaagactcttagaggttacgaaattcaattttcctatcaacacaggaattccctcgtacaacggtgctaatagatggttaaccggagctgggggccactacttaacagaacagcagatacagaaaaactcaaattctaagacagttttt

SEQ ID NO: 404166 - DNA, 618 bp, Homo sapiens
cattgtaacaagtgaatctacgtaaaggtgttctctcccttttttctttttagtctgcttgctgtccaacttttccattccattatcattgcaaactctttggtggatamttttccaactttctctatatctgtgcaaacacagactatagtgggagaaaaggcattttgaaaacaaagtctaggcattcaatgtgctcacaactgaggggtgtcattacttctctggcccttttagtggacagagctaggacctatcagttataaatcatggattcatactatgccttcacatcctgcattatagggctcttaacttcttgattttacattttatctcctcccacagttaggatgccaatttctaacattaatatatttactcatttgttgtgcaaaacatgcaaaattattttatagtgactgcgctacaccaataccactataaaaaacaaatcttctaactaaagttcaaggtttctttacagtaccttttgaccatggactctaacccattaatgatatacagttagattactgtgtacaaaaagtattcaaattaattactttatttgtttaattatgttatcaatttgatatacagttaggttcatttgtt

SEQ ID NO: 404167 - DNA, 635 bp, Homo sapiens
aaattataaagacattaagatatatgtgggacctaataaaaaaaagttcagtatccattaatagaatttctcaaagaagagagtagagagaataaaaaaagtaattttcaaacataagaataaaatatttccagaattgaccaaakaaatgaattctcagattacgaaagcatgacaatttacttgacaaataaatagtaacccatacccagacttcacagcaaaattccaaaataacaaaggtaacgttaatctttaaagtaatctcaaagaagataacttgccttcaaatgaacaagctcatcgaagccaagttcaaatgaaaatggctttaaagaaaaagttgtatcattttaaaaagcattatcgaaaaatatagaggagcaaaacacaatgctaaaaaaaattatcataagaagatttccaacttatagatactaacaacacagatggaaaagctatggcaaaaactaggaaaactacaaggagaaattgatagatccacacttacagtgggagattttaacatacttcttttagtaattgatcaacctaacccatacattggtatcatttaataacataattaataagcctgttaatagacatttataaatactgcacctaacagagaa

SEQ ID NO: 404168 - DNA, 560 bp, Homo sapiens
atgctccgtttactaaaatgacactttatctggttattgtgatttttccccatctcctctttcttttgttattattggaacttccatttacaccatgcaaggtgaatttttttaaagaagtgwtccatcctgcagagtgtattaatttcagcataaatgtatgtaaagtcaacatgtcagctattttgatttgcattaaactctattcttactttgtattttatgccgcaaaagctgaggatgggggcgggggtgttgagtgaaaaggatagaccagcacagtattcatatcttagcttgatagagcagtttacaataaataaatatataataatctcactataataaagtttcactaaagtgcaatcataaatcttaggtcaagggaatcaaaaacataattcagaaaggcttttggggactttgagagtggaaggcacttagatatcagtcagaactgagttccaatctcagttacctcacttactagttgcatagcctcctacaactcaaaataaatttttataaataaattcagtcctgaagcaagatcgtaaagg

SEQ ID NO: 404169 - DNA, 596 bp, Homo sapiens
taaataattttacatatttaaaacttcatatacttattaatatatagatatagatattcacaaggcacttctgcaactgcagsctttcaccacagcttcagcttggcctgagccagattcaggcagcctgctgcacctccactttgtccttgagaagcagcgatgactggaaaaacagtgtgaaaaatcagaccattttatagacttatgcatccctctttttagtttttttatatacaactccataacaatatcctattgcactaaaaattaaatcattttcttatttaaaaagaaatatttttactagtgcaaagaagaataagttatgatattctagcacttataataacaaatgccaaaccttggtgtatgcatgtgattatacttggtgaaaaaaacaggactgtagacgtgtactgatagcataggatttatggtcatttccaggaggacaaatggatcagagagtgggaatgggaacaatcaatgcagttgtgaatacacagacttggtggggataaacttaaagccttcagctggtggaactaggtgaggctcaagttaaagcccagctttgttaagtctgctctgta

SEQ ID NO: 404170 - DNA, 596 bp, Homo sapiens
taaataattttacatatttaaaacttcatatacttattaatatatagatatagatattcacaaggcacttctgcaactgcagcctttcaccmcagcttcagcttggcctgagccagattcaggcagcctgctgcacctccactttgtccttgagaagcagcgatgactggaaaaacagtgtgaaaaatcagaccattttatagacttatgcatccctctttttagtttttttatatacaactccataacaatatcctattgcactaaaaattaaatcattttcttatttaaaaagaaatatttttactagtgcaaagaagaataagttatgatattctagcacttataataacaaatgccaaaccttggtgtatgcatgtgattatacttggtgaaaaaaacaggactgtagacgtgtactgatagcataggatttatggtcatttccaggaggacaaatggatcagagagtgggaatgggaacaatcaatgcagttgtgaatacacagacttggtggggataaacttaaagccttcagctggtggaactaggtgaggctcaagttaaagcccagctttgttaagtctgctctgta

SEQ ID NO: 404171 - DNA, 571 bp, Homo sapiens
cagccactgtcacatgatgctagcctttctgtggtcactttgcccacagcttctcaagaaattctccagcaaaactgacccatgtcatttgcaatggttgcttaataaaaaattccattcagtccaaggaagtaacagaatactttgcctaacatactaataatgactcacaatacataggtcatgtcttttttaagtgtgtgtgtgtgtttcaatgaaatgagaagactttcattgaaatwgtgatttttttttttttttttttgagtcagagtctcgctttgtcacccaggctggagtatagtggggtgatcttggctcactgcaacctctgcctcccaggttcaagcaattctcttgcctcagcctcctgagtagtgggattacaggcacacgccaccacgcctgactaattttcgtatttttagtagagacgaggtttcacagtgttgctcaggcttgtctcgaactcctgacctcatgatctgcctgcctaggcctcccaaagtgctgggattacaggtgtgagccaccacacccagcctgaaagaaacatcctgtatgctgaaaa

SEQ ID NO: 404172 - DNA, 601 bp, Homo sapiens
gaggtgtatgttaggccattcttgcattgctataaagaaatacctggttgagggcagcagctcatggttgtagtcccagcactttgggaggctgtggcaggtggatcacytgagctcaggagttcaagaccagtctgggcaacaaagtgagaccctgtctctagaaaaaatacaaaacttagctggccatggtggtgtgctcctgtagtccccagctactcaggagtctgaggtaggaggacgacttgagcctgggaggcagatgtttcagtgagccaagactgtgccactatactccagcctgggcgacagagccaaaccctgtctcaaaaaaaaaaaaaaaaaaaaaaaaaaaagaaaagaaaaaaaaacgaaaatacctgagactgggtaatttataaagaaaataggtttactcggctcacagtagaaggggaagcagaagcaggcacatcacttggtgaaagcaggaacaaggcaggggagaaggcggcgtgtcatacacttttaaataaccagatctcgtgagacctcactatcacaaacacagaaacaagttatgagggattcaccccatgacaaaaacacctcccaccatgct

SEQ ID NO: 404173 - DNA, 573 bp, Homo sapiens
atcaaggctctgttctcatgacttaatcatacaaaggccccacctcttaatgccatcatcttagggtttaggattcaaacgtacaattttttgggggggatgggtataaacattcagatcattttccatgagaatgtcagaaatagtgtgaggttggcatgagagagacttgggttggaggtgtatgttaggccattcttgcattgctataaagaaatacctggttgagggcagcagctcatggttgtagtcccagcactttgggaggctgtggcaggtggatcacttgagctcaggagttcaagaccagtytgggcaacaaagtgagaccctgtctctagaaaaaatacaaaacttagctggccatggtggtgtgctcctgtagtccccagctactcaggagtctgaggtaggaggacgacttgagcctgggaggcagatgtttcagtgagccaagactgtgccactatactccagcctgggcgacagagccaaaccctgtctcaaaaaaaaaaaaaaaaaaaaaaaaaaaagaaaagaaaaaaaaacgaaaatacctgagactgggtaatt

SEQ ID NO: 404174 - DNA, 573 bp, Homo sapiens
atcaaggctctgttctcatgacttaatcatacaaaggccccacctcttaatgccatcatcttagggtttaggattcaaacgtacaattttttgggggggatgggtataaacattcagatcattttccatgagaatgtcagaaatagtgtgaggttggcatgagagagacttgggttggaggtgtatgttaggccattcttgcattgctataaagaaatacctggttgagggcagcagctcatggttgtagtcccagcactttgggaggctgtggcaggtggatcacttgagctcaggagttcaagaccagtctgggcaacaaagtgagaccctgtctctagaaaaaatacaaaacttagctggccatggtggtgtgctcctgtagtccccagctactcaggagtytgaggtaggaggacgacttgagcctgggaggcagatgtttcagtgagccaagactgtgccactatactccagcctgggcgacagagccaaaccctgtctcaaaaaaaaaaaaaaaaaaaaaaaaaaaagaaaagaaaaaaaaacgaaaatacctgagactgggtaatt

SEQ ID NO: 404175 - DNA, 601 bp, Homo sapiens
gaggtgtatgttaggccattcttgcattgctataaagaaatacctggttgagggcagcagctcatggttgtagtcccagcactttgggaggctgtggcaggtggatcacttgagctcaggagttcaagaccagtctgggcaacaaagtgagaccctgtctctagaaaaaatacaaaacttagctggccatggtggtgtgctcctgtagtccccagctactcaggagtctgaggtaggaggacgacttgagcctgggaggcagatgtttcagtgagccaagactgtgccactatactccagcctgggcgacagagccaaaccctgtctcaaaaaaaaaaaaaaaaaaaaaaaraaaagaaaagaaaaaaaaacgaaaatacctgagactgggtaatttataaagaaaataggtttactcggctcacagtagaaggggaagcagaagcaggcacatcacttggtgaaagcaggaacaaggcaggggagaaggcggcgtgtcatacacttttaaataaccagatctcgtgagacctcactatcacaaacacagaaacaagttatgagggattcaccccatgacaaaaacacctcccaccatgct

SEQ ID NO: 404176 - DNA, 617 bp, Homo sapiens
ccttccagttttatccatgtggttgcaaattacattattttattctctttctgtggccacatagtattatattgtgtgtatatttttgtgtatattgtatgcattttttaatctctttatgcactgatggaaacttaggttgattttatatctttactattgttaatagtgtttcagtaaacatggggggggtgcaggtatcccttcgatttactgatctctttttctttggataaatacccagtagtgggattgctgaatcatatgctagttctattttcagttattcgagagatattcatattgatttccatagtggctggagtaattcaaaatcgcaccacagtgtataacrgctcccttttctctgtatctttattagtatctattattttttgtctttttagttatagctattctaactgaggtgagatgatgtctcattgagattttgatctgccttcccctgatgattactgatgttgaaaatatttacatatacctgttggccaactatatgtcttttttttgagaaatgtctgttcatgtcctttgctcacatttaaacgtaattttcttccagttaagtttattatatattctgaatattagcccct

SEQ ID NO: 404177 - DNA, 580 bp, Homo sapiens
tcctgcaaaaaaaactataggactgatcataatttttaaagttgtttatattgttgcatcattcagccactgtaacaactctatccccattttatgtgttcagagctgaggctcagaaagaataaatgacttacgttaaggattacaacaaacaagttccaaagcagaatctgccttttaactccaaactcctccaccacatttatcatcttccttcttctgtaccaaggagggctgcagagatgcctaagaagactaaaaactaccagatctacatccaatttatgctctgaggttgtgtgctttggttatgactgaccctggggttatgcatttagttaggaaggacagaatgcttagcatttttattatacatggcattcatctccaacagtaacacactctttacattatgcgatgcatttccttctggcttctcattttagtgaatcacttgatttacraaaggtcaatgtccttgtcagcaatagggtgcattctagcattgtgacgtgacaaaagctgcaccctgttagcagtcactgtcagcaatgaggctgtgatcctacctttctagccc

SEQ ID NO: 404178 - DNA, 479 bp, Homo sapiens
cttctgattctagttttatctatttctacctcttaatttatttgttttacttctttctggtactgttaygattggttggtgacagttgtgtctctatattccatatttaaaaacttgtttgttacatttgccattatgtcatacttttctgatgttttcaaaataagttattgaataccacctttctattcatcaattctgataattattcatcctgtaacatattttgtgtattatatattcaataaatctacttgtttctttttgattattgcttattattgattaatatcatcagtatatcctaccttatctcttttaagatatttatcatgtttgttttaaaatggtaatctctgtataacatttattcagaaccatggagtatacactattatgtatgttgccattccattgtaaagactgtgctgagatgatttatttttctctttaagatcatttaccttagccattcgtag

SEQ ID NO: 404179 - DNA, 590 bp, Homo sapiens
tatctttttgatatgttgttggattcggttagctagtactttgttaaggattttagcatctatgttcatcaaggatatcagtctgtagttttcttttttggttatgccctttcctggttttggtattagggtgatgccggcttcatagaattaattagggaggrttcctttttatcttgcggaatagtgtcaaaggattggtaccaatttttctttgaatgtctggtagaattctgctgtgaatccatttggtcctggaatttctttgttggtaattttcaaattaccatttcagtcttgctgcttgttatgggtctgtttagggtatttaattcttcctgatttaagctagaagggttatatttttccaggaatgtatccatcttttctaggttttctggtttatgtgtgtaaaggtgttcatagtagccttgcatgatcttttgtatttcagtggtgtcagttgtaatatctcctgtttctcttcttagtgaggttatctggattgtctctcttttcttggttagtctcgttaatggtctatcaattccttccctacacgccctgttagcagaagacaaaactgaaat

SEQ ID NO: 404180 - DNA, 590 bp, Homo sapiens
tatctttttgatatgttgttggattcggttagctagtactttgttaaggattttagcatctatgttcatcaaggatatcagtctgtagttttcttttttggttatgccctttcctggttttggtattagggtgatgccggcttcatagaattaattagggaggattcctttttatcttgcggaatagtgtcaaaggattggtaccaatttttctttgaatgtctggtagaattctgctgtgaatccatttggtcctggaatttctttgttggtaattttcaaattaccatttcagtcttgctgcttgttatgggtctgtttagggtatttaattcttcctgatttaagctaraagggttatatttttccaggaatgtatccatcttttctaggttttctggtttatgtgtgtaaaggtgttcatagtagccttgcatgatcttttgtatttcagtggtgtcagttgtaatatctcctgtttctcttcttagtgaggttatctggattgtctctcttttcttggttagtctcgttaatggtctatcaattccttccctacacgccctgttagcagaagacaaaactgaaat

SEQ ID NO: 404181 - DNA, 639 bp, Homo sapiens
gtttggtctttcaacttaatcccagacttcttggaggcttggttcatattttcttattcttttttctttgtctctgttggattgggttaattcaaggaccttgtttttgagctctgaatttctttcttctacttgttcaagtctattactgagactttctagagcattttgcatttttataagtgtgtccagtgtttcctgaatttttgattatttttttctttatgctatctatttccttaaatatttctcccttcacttcttgtatcattttcctcgcattgggcttcacctttctctggtgcctccctgactagcttaatgactaacctcctgaattcttyttcaggcaaatcagggatttcttcttggtttggatccattgctggtgaactagtgtgattttttttgggaggtgttaaagagcgttgttttgtcatattaccagggttggttttctggttccttctcatttgggtaggctctgtcagagggaagatcttgggctgcaagctgttgttcagattcttttgtcccacagggtgttctcttgatgtagtactctcccctttttcctatggatgtggcttcctgttagccaaactgcagtgatggttgtccctcttctgggtctagcaa

SEQ ID NO: 404182 - DNA, 639 bp, Homo sapiens
gtttggtctttcaacttaatcccagacttcttggaggcttggttcatattttcttattcttttttctttgtctctgttggattgggttaattcaaggaccttgtttttgagctctgaatttctttcttctacttgttcaagtctattactgagactttctagagcattttgcatttttataagtgtgtccagtgtttcctgaatttttgattatttttttctttatgctatctatttccttaaatatttctcccttcacttcttgtatcattttcctcgcattgggcttcacctttctctggtgcctccctgactagcttaatgactaacctcctgaattctttttcaggcaaatcagggatttcttcttgrtttggatccattgctggtgaactagtgtgattttttttgggaggtgttaaagagcgttgttttgtcatattaccagggttggttttctggttccttctcatttgggtaggctctgtcagagggaagatcttgggctgcaagctgttgttcagattcttttgtcccacagggtgttctcttgatgtagtactctcccctttttcctatggatgtggcttcctgttagccaaactgcagtgatggttgtccctcttctgggtctagcaa

SEQ ID NO: 404183 - DNA, 613 bp, Homo sapiens
ttaggttcatgctgttccctgccttttctgcaaagaagagtgctagtgctaatttgtttaccttgagcgggctatgcttggtgctgggcagtracggtggaagtagccatcacaaaggacatcaggattgagtgtcctttcctgaagttcaagctctattcaaagcatttctacatatgtacatcctgctgtgagtcattcataattcataatacattttctaacattttctagttgcttattgctatttgatgcctaagtttgcactaagttagataatgaatatggttcctcagagctaaacaattctgttaccattacataagttaacccactagcttttatatacactgttgacactagggtgaactgtctgtttactggagaggtgggatatctatgtatactgagaaaatatacccttaagcgtcaataagtatgtattcagctctaactgctcagtcctattcaagacattgtagaggagagccaaagactaaggcacatgaggctgttagaaactgtatatgcattaaatgtgtttgtcaatgtgtgtatgcatgcaaaaggaagttgaagtcatagatttcatcccccattacctagacaataa

SEQ ID NO: 404184 - DNA, 613 bp, Homo sapiens
ttaggttcatgctgttccctgccttttctgcaaagaagagtgctagtgctaatttgtttaccttgagcgggctatgcttggtgctgggcagtgacggtggaagtagccatcacaaaggacatcaggattgagtgtcctttcctgaagttcaagctctattcaaagcatttctacatatgtacatcctgctgtgagtcattcataattcataatacattttctaacattttctagttgcttattgctatttgatgcctaagtttgcactaagttagrtaatgaatatggttcctcagagctaaacaattctgttaccattacataagttaacccactagcttttatatacactgttgacactagggtgaactgtctgtttactggagaggtgggatatctatgtatactgagaaaatatacccttaagcgtcaataagtatgtattcagctctaactgctcagtcctattcaagacattgtagaggagagccaaagactaaggcacatgaggctgttagaaactgtatatgcattaaatgtgtttgtcaatgtgtgtatgcatgcaaaaggaagttgaagtcatagatttcatcccccattacctagacaataa

SEQ ID NO: 404185 - DNA, 592 bp, Homo sapiens
tccatcattttacaccatgcattcttatgagcatacattgggatattgtttctagatatctaattgatatggtttggctctgtgttcccacccaaatctcatctcaaattgtaaaccccatatgttgagggaggtaactggtggcaggtgattggatcatgggagcggttgccgccatatgattctctccagatagtgagtgagttctctcacaagatctgatggtttaaaagtagcagtttccccgcagtctctctctcctgccaccatgagaagatgtgccttgcttcccctttactatctgccatgactgtaacttccctgaggcctccccagcaatgcagaactgtgcataaattaaacctattgcccttgtaaattacccagtctcaagtattctttatagtaatgtgaaaatggaytaatacagaaaattggtactgggagtgggcactgccataaagataacctgaaaatgtggaagtgactttggaactgggtaacaagcagagatgggaacagtttggagggctcagaagaagataaaaagatctgaaaaagtttggaactttctggaaactggttaaatggt

SEQ ID NO: 404186 - DNA, 572 bp, Homo sapiens
aaaagaaacagtttgtttttactactgtatacactggagcagccaactgagagagggagtggggtaaaactgttaggacattgaatcctaaatgatctgtcaatgaaagatctctgtggtaggctacctagcccctaagtagactgcacctttgcacttccaatagattaagtattggacagatgttccaaggaatcaaagacaaggaccagatctggattctcagaaaatattatcccccctctcaatggccttacygacacctcaggtaggtcattgatggcaatgttagtattttaacactctcatggaatataccctgtctatacactggttaagcacctgagtacactaggatagaatgtaaagaaaataaatgagctatatataaactggggctctaaggaaaaattagaatatgtacatgactataaaggtgatgtctttgtttaccatatattgtaagttacattatattataagataatttttaaacaataatctcccctgtccttatgcttaaaagttacaaactaaatcactggtcttcttgatacttcagcataaggccc

SEQ ID NO: 404187 - DNA, 255 bp, Homo sapiens
aagtctcttttcagatgtctaagaacttgttttatgaacctgattgatcctgtgttgagtgtgtatatttttagaayagttaagtcttcttgttgaattaaaccctttaccactatataatgaccatttttgtccttttttatcattgttggtttaaatcctgttttgtctgaaattagaatagcaatccctgcactatttttgttttccatttgataggtagattttctccatcactttactttgagcctgtgg

SEQ ID NO: 404188 - DNA, 255 bp, Homo sapiens
aagtctcttttcagatgtctaagaacttgttttatgaacctgattgatcctgtgttgagtgtgtatatttttagaatagttaagtcttcttgttgaattaaaccctttaccactatataatgaccatttttgtccttttttatcattgttggtttaaatcctgttttgtctgaaattagaatagcaatccctgcactatttytgttttccatttgataggtagattttctccatcactttactttgagcctgtgg

SEQ ID NO: 404189 - DNA, 620 bp, Homo sapiens
ccagagttcttgtgctggttctttcttatctctgtgagctgatggtcctttaactgtggtttaatttgagcatagtcagttgaacttcatttctggatattttcagagagcagaggctttgcgctaggcctttatttggagctgaattcttgtccttggtttcatggaatgggtatattagcaaaggtttttggtttcctggggtgggtatattagcaaaggtttttggtattgaagtttgggctgcaatctactggatgacatttaggtgtaagggccagtaggtgggctcctgctcagccatgtggcttctstatattttctcatgtttgtagccatgctttctctcccagtgccctgagggcatgggattctcttccacttgaattctggctccggatcttggcttgacattcccggcctgcatactgcagtggtgaggtgagctgaggctttatctttcctcctcagcttggaggcaggaggggcagtgaccttggcagtggcaatagcagaggaccctttatgtgtctcctgtggctcctccccagagaaaagcatagctgataacaattggagcaatcagccgagtgtgggatcactgcattgtgggcgcaagc

SEQ ID NO: 404190 - DNA, 419 bp, Homo sapiens
gagctaagatgacaacataattagttagaaaacaatcaacagagtaaaatcaaatcagaaaaaaaaaaggaatctaagggcacatttcaatgaaacagtgcattaagaaaaataataaagttaatacccgatactgatatttggaaaacactaatattgtacacttctgatatgataattcaagaaaaaaaggatgcatattttaaaaatatatattgaaaaggacaaaattgctaatgacaaaaacagattaaaatacatttaatagattaataaattagtaaaaaaaagtagatgaaatacatttccaaaataaatgacattagaaaaaatggaaacattaacctgataatagacatttagaaatataaaatartaggtaaaatccatcctcctcaaagctgcaggtccaagtgttt

SEQ ID NO: 404191 - DNA, 513 bp, Homo sapiens
gggtccctggtctcatttgttttttcatccacacagtattacctctgggcttctggaaaatactaaaaacacccagtcattcttgcatcacatatactaagcatcagagaatatagagccagggtccccagtccctgggccacaagtccatactagtctgtatccttttaggaaccaggtctgcacagcaggaggtgaatggcaagggagcaaagcttcatctacatttacagccacttcccattgctcacattactgcctcagcactaccacctgtcaaatcagtggtggcattagattctcagagaagtccagactctattgtgaactgtacatgcgagggatctaggttgcacaatccttacgagaatctaatgcctgatgatctctcgctgtctcccatcacccccagatgggwctgtctagttgcaggaaaacaagctcagggctcatgcttattctacattatggtgagttgtataagtatttcattacatactacaatgtaataat

SEQ ID NO: 404192 - DNA, 556 bp, Homo sapiens
tcgtgccactgcactccagcctgggcgacaaagccagactccatttaaaaaaaaaaaaagaaaaaaaaaagattcgaacctatgagttgtgcctccagaactcaagatctttactctttgccacatccttctgcaagcccaatcaaggacttgggtgttttcaaggtttgccctttccacacagctgcctctctcctccagtccatcccaaatgaggacttcctgtggccaatttgctactgggaggaggcagagactgcctcttgccgcctcctagggaagtttctagaacctgactttgatagtaggaagtaaagaagaggaaccaagggwacaacaagaccttactttgttttcaaatccctgttgtggggtcactgccagctgtcctgtgggatctgtgttattactgctcaacttgcaagttcttttcccctccctggcctcaatgtcatccaaacaagagggttacagtgggtattctagaagtccccacctgactttaacataatttcagcaacctactactgggactacgcagagaggttttgtaaaa

SEQ ID NO: 404193 - DNA, 556 bp, Homo sapiens
tcgtgccactgcactccagcctgggcgacaaagccagactccatttaaaaaaaaaaaaagaaaaaaaaaagattcgaacctatgagttgtgcctccagaactcaagatctttactctttgccacatccttctgcaagcccaatcaaggacttgggtgttttcaaggtttgccctttccacacagctgcctctctcctccagtccatcccaaatgaggacttcctgtggccaatttgctactgggaggaggcagagactgcctcttgccgcctcctagggaagtttctagaacctgactttgatagtaggaagtaaagaagaggaaccaagggaacaacaagaccttactttgttttcaaatccctgttgtggggtcactgccagctgtcctgtgggatctgtgttattactgctcaacttgcaagttcttttcccctccctggcctcaatgtcatccaaacaagagggttacagtgggtwttctagaagtccccacctgactttaacataatttcagcaacctactactgggactacgcagagaggttttgtaaaa

SEQ ID NO: 404194 - DNA, 617 bp, Homo sapiens
acaaataataaccagaacacactgatgaattttcacaaaggaggcaaaccagagaaatcactgactaggtcaagaagtaggacattgccaacaccacagaagtctcacttgtacccctaccagtcacatacccaaaataactatcacctttgactcctgaccccattgattagctttgtctgttcttgaacttcatgtaaatggagtcatcagggtaccctcttggttttctggcttctttcactgaacatgatgtttattacattcatccatgttactgtctgttgcattaggtcctttaatttcattgctcagtacatcttatccattccactgttgatggaaatttggattgtttccagtctttggttactataactagagagtcatgaacatttttgtagaatttctgggtcataagatacacaaatgctcagctgtagtagatcctgccagttttccaatgtggttatactaatttacactcacaycagccagaggatggcagctgtagttgttgtatattctctctggcacttagtattattagtctgtcattttggacaaccctggtggctctgtagaggttatctccttatgacttgaatttgcacttc

SEQ ID NO: 404195 - DNA, 617 bp, Homo sapiens
acaaataataaccagaacacactgatgaattttcacaaaggaggcaaaccagagaaatcactgactaggtcaagaagtaggacattgccaacaccacagaagtctcacttgtacccctaccagtcacatacccaaaataactatcacctttgactcctgaccccattgattagctttgtctgttcttgaacttcatgtaaatggagtcatcagggtaccctcttggttttctggcttctttcactgaacatgatgtttattacattcatccatgttactgtctgttgcattaggtcctttaatttcattgctcagtacatcttatccattccactgttgatggaaatttggattgtttccagtctttggttactataactagagagtcatgaacatttttgtagaatttctgggtcataagatacacaaatgctcagctgtagtagatcctgccagttttccaatgtggttatactaatttacactcacaccagccagaggatggcagctgtagttgytgtatattctctctggcacttagtattattagtctgtcattttggacaaccctggtggctctgtagaggttatctccttatgacttgaatttgcacttc

SEQ ID NO: 404196 - DNA, 620 bp, Homo sapiens
gtgcttgttcaaatcttttgcccatgttttctattgggttattaatgactcatggaaattctttaaatattctagatacaaaccctgtattgggtttatratttgcaaatatcttctcttactcaagggcttgcttcttcactctcttaatggtgtcttttgataaacagaagttcttaggttttaaaattttatgtattttatttttattatttttggagtgcagttgtgcaaacagggctcactgcagcctcaaactcctggactcaagcaattcttgcacctcagcctcttgagtagctgggaccacaagggtatgccaccacacctggctaattttttaaatattttgtagggatcttcccttcctggcctccccaagcgcttggaatacaggtgtgagccatcgcacccgggcagaagttcttagttttaatgaagtccaattcatcaatcagtcttttcctttgtgcttagtatattttgtattacatttgaaaagattttactccaaggtcataaattattctcttatgttatcttttagaagttttattattttgcctttcacttttagatctacattctatctgattgatttgtgtgtgtggtgtgaggta

SEQ ID NO: 404197 - DNA, 620 bp, Homo sapiens
gtgcttgttcaaatcttttgcccatgttttctattgggttattaatgactcatggaaattctttaaatattctagatacaaaccctgtattgggtttatgatttgcaaatatcttctcttactcaagggcttgcttcttcactctcttaatggtgtcttttgataaacagaagttcttaggttttaaaattttatgtattttatttttattatttttggagtgcagttgtgcaaacagggctcactgcagcctcaaactcctggactyaagcaattcttgcacctcagcctcttgagtagctgggaccacaagggtatgccaccacacctggctaattttttaaatattttgtagggatcttcccttcctggcctccccaagcgcttggaatacaggtgtgagccatcgcacccgggcagaagttcttagttttaatgaagtccaattcatcaatcagtcttttcctttgtgcttagtatattttgtattacatttgaaaagattttactccaaggtcataaattattctcttatgttatcttttagaagttttattattttgcctttcacttttagatctacattctatctgattgatttgtgtgtgtggtgtgaggta

SEQ ID NO: 404198 - DNA, 514 bp, Homo sapiens
tttctcttctttagcctgttgctatgataaattttattaatttcttttcaaatattgaatcagctttgtctacctggcataaatttcacttggtcwtggtgctttagtctttttatacattgttggattttgattaattacatttgattggtggtttttacatccaaagttcatgagagatattgatctgtagctttctttttgcatactttctttagctggtttgggtatcagagtaatgacggcttcataaagagaattgggaacttcctaattttctcttctctcctattttctggaagatacacatagaattggcattaatttttatttgaatgtttggtaaaattcttggatgaaaccctctggacctggagatttctttttggggagtatttttattataaatccaattcttagaaatatctacacagctattcagattatctgtttcaccttggctaagttttagtactttgtggtttttgaggaattagcccatttcttcaaactt

SEQ ID NO: 404199 - DNA, 514 bp, Homo sapiens
tttctcttctttagcctgttgctatgataaattttattaatttcttttcaaatattgaatcagctttgtctacctggcataaatttcacttggtcatggtgctttagtctttttatacattgttggattttgattaattacatttgattggtggtttttacatccaaagttcatgagagatattgatctgtagctttctttttgcatactttctttagctggtttgggtatcagagtaatgacggcttcataaagagaattgggaacttcctaattttctcttctctcctattttctggaagatacacatagaattggcattaatttttatttgaatgtttggtaaaattcttggatgaaaccctcyggacctggagatttctttttggggagtatttttattataaatccaattcttagaaatatctacacagctattcagattatctgtttcaccttggctaagttttagtactttgtggtttttgaggaattagcccatttcttcaaactt

SEQ ID NO: 404200 - DNA, 610 bp, Homo sapiens
ttattaatcttattaattcttttaaagagacaactttctgtttcattttttctttttccagttttcaagttcattagtttctgctcttttttatttcctcctttctgctttctttgagtttattttgctcaacttttctaatttcttgaagtagaaacttagattagtaatttgagatcattcctcttttctaatgtaagcatttastcctatcaattttattctcagcactgctttagctaatcttacaaattttaacatgtcatattttcatgttcattcttttcttgtctttttaaaatttcctttgagattaccactttgacgcatggattatttaaatgttttttgtttagtttccaagggtttggagatttgcctattgactttctgccttgatttctactttgattttattatggccaggtaacatagtctgtataatttcaattctcttgaactttttaatgtttgttttatgatctaggatatgctctatcttggtaaatgtctcatgggacctttaaaaaaatgtgtattctgctgttgttggacagattgtgctatgaatgccaattagatcctgtcagttgatggtgtggttgagttt

SEQ ID NO: 404201 - DNA, 594 bp, Homo sapiens
aaggcccagtgactcatgggaaactactgtattaaaaacttgcagctaatgttttaaattaaccagaaaaaacacaaaagtcagaacactgcaccaacagatagagccctgtgcctttataaaagaaaaaaaatattgccttctatacactctccctcaccataaagataatcctctggttttctcctaagtaaccagagagtggataccccacaccgcaaaaaaataaaattctatttgttgaatatcttttgtcttaaagataacagctcaggaaaaatagactgcacttaacatgatttatgtcattccttttttgtgcccttatacgatatgaagaaaggcttctgtgttgatgttgtcatggtgtgacagcagaagaaaaacacagctagggagagttttctctacatacctatgaaccamacaacagactttcacatatctgaagcaaaaactaagacagctgaaagaagaaatccacaattgtgggttggggcatcaatcccccactgtctccccacactcaagactactaggactactagggagaaaatcagctagaatatagcagcggacaccagctgggtgtcc

SEQ ID NO: 404202 - DNA, 586 bp, Homo sapiens
aaaacttaccatgttgctgttactcaagtcctgaggtttcttgcaagtacaccttttcttctagctttcagagccctttatcattgtctgctgaatagtttccaaggtacttagttgtatttagaggagcagagcagggaaaaatgagtttaaccatcttgttccagaactggaagtcggcagagcctgttttaaaaataatgtttaaaacaaattttatttcstgggtgattttccagaaagcagaaaaagtactatcgatggcacttcctataataaaaactacaccctatgctttcttggaaggaatcaattgcattattcaacagtcgtcttcctctgaacctgctctgcatttagtcaacaggatattgaattccttttaaaaatctaaacagattatcacttctttcctgaaccaaaagttgattagtaatgtaaatacttgtctgtaacacagaaaactgtgttttctttgagctcttcctattccgtatcccttgtcttgaatgaggagtttttcctttggcaccaaaaggttacaactacatttatctacaaataaactaccatagaagaactggaa

SEQ ID NO: 404203 - DNA, 586 bp, Homo sapiens
aaaacttaccatgttgctgttactcaagtcctgaggtttcttgcaagtacaccttttcttctagctttcagagccctttatcattgtctgctgaatagtttccaaggtacttagttgtatttagaggagcagagcagggaaaaatgagtttaaccatcttgttccagaactggaagtcggcagagcctgttttaaaaataatgtttaaaacaaattttatttcgtgggtgattttccagaaagcagaaaaagtactatcgatggcacttcctataataaaaactacaccctatgctttcttggaaggaatcaattgcattattcaacagtcgtcttcctctgaacctgctctgcatttagtcaacaggatattgaattccttttaaaaatctaaacagrttatcacttctttcctgaaccaaaagttgattagtaatgtaaatacttgtctgtaacacagaaaactgtgttttctttgagctcttcctattccgtatcccttgtcttgaatgaggagtttttcctttggcaccaaaaggttacaactacatttatctacaaataaactaccatagaagaactggaa

SEQ ID NO: 404204 - DNA, 479 bp, Homo sapiens
ctacaagtgtaatagtattaagaggtgggcctttaggagatgattaagtcatgagggtggaggcctcctagatgggattagtgcccttataaaacagctgcagcagagcttgcttgccccttccaccttgtgaggacacagcaaggggcaccatctatgaagtacagagtgggccctcaccagacgccaaatctgcctgygccttgatcttggacttccagcctccaaaactgagaaataaatgtctattacctacaaattacccagtctaaggtgttttgttacagtgtctctagtaaactaaggcaagccccagctggaaacatccatctctgctaaaagtgccacaggacctggaatgagtaacagactcttttcacatcttatctgcaagaagctgggttctgtgtttgtctcagcctggccctgctctcaaggttagcattgcacaactggaggaggttttggtgacttctgtt

SEQ ID NO: 404205 - DNA, 609 bp, Homo sapiens
atccaatcttaagaacatatagaaaatattttttaataaaagagtatcagcgacatctggcataatatcacatagtttaacatatgtgtaattataatttcagaagaggaatagagagaaaatgtaattgaaaatgtcttatatttgatgaaaagcactaacttataaacccaaggatctcaaaacactccgaagaagatgaacacacacacacacagggcacacacacactcacacacacatgcacaacacagtcaaactgttgaaaarttaagagaaagagaaaaatcttgagcagccagaggcacattacctgtgtggggccaatgatataaatcatatcggtttttttatcagaagcaatgaggtcagagatgacaaaattttgtggtaacgaaataataaatgctgaaattctatgtccagtaaaatatatcattcaaaaaatgaaggtaatatagacattttcagttaagtgaagctgagagaattcatcaccaggatatatgaaagaaagttcttcaggttgaagagaaatgacatcagatggaaacttgggtattgagaatggaaagcagataccaagatgttaacaaccatggataggta

SEQ ID NO: 404206 - DNA, 581 bp, Homo sapiens
ctgagagaattcatcaccaggatatatgaaagaaagttcttcaggttgaagagaaatgacatcagatggaaacttgggtattgagaatggaaagcagataccaagatgttaacaaccatggataggtaaaatatgtstgtaaccataaaagactactctctttgtctttctctaatttctttaaaaaataattgcccattgcttatccctgttgtctatgtcatgttatgcaaagtgtattctctaactaagtgggtattagaaatcaacaaccatataatatcttaaaaattttcatgcaaaaattaagtaacacacttttaggtttatcaatatagacttaaaaataaaagcctaaaactataaaacttgtggaagaaagcataaacgatctctgctaccttgggttaggcaaagatttcttaggatacaaaaaacactactcatacattaattatacatttattttagtaataaatttattttcatgaaattcttctctttgaaagaaagaaaatgaaaaagagataagccaaagactaggagaaaatattcacaatatatttatttggcaaaggact

SEQ ID NO: 404207 - DNA, 560 bp, Homo sapiens
ccctgtgccgccagcctaccaccsccacaccgtgttaaatttcaaccacaatctgctgccttggctcttcttggtatctctagcccaacgacagcaggctacttcccaagaacaccgagagtttagaaagttttttgtttttttgttttaacatctttgagtgatctgtaaatttactaacctatcaattctgatgatggagtctcttttctttgttgttgctgttgtctaaattagagctatataattccaaaatgcttgaacatgatatggcaccaacattcacttcactaccccaagcttttaccctcaagtaaaagatgaattcaggaacatgagtttttttgtttagtttctggtcagtgggcatcctggtggggtaaaacatagtaacaagaaaaggaagaacatgtagatggtcattgcttttcaggtgcattgcagaggcttctctctgaagggtgactacagttctatacggccatgtcagtccaccggcattcattcattcatttattcattcattcattcaacacatatacattgcttggcaaagtgct

SEQ ID NO: 404208 - DNA, 593 bp, Homo sapiens
tatcacaatatttcttgtacaatgggttgtgcagcggggggaagggagatgctttacaggcatagtgtggggtgaggtacatttcgtaacagctcttgtttactgagatggctttctactgacaaagaaaaaagtcccgaaaagaagggggcctgttaattgtttgcttccttttgcttttttggttacaacagtaaaaactgtccttcaaatttagtcccagaagacatcagagtttgacaatgacaagtggggaatagawgttcctgggctatcagcttcgcggctccctcctctacatgtgggctcggggacacagagctggtccctgcccagtctcggaggccagagaatcaagttctgggtgtgtgagactgatgggacaggcttcctctgaccgagttgggcaacttggggcttttaactgccttgggaatgagggtgggtgccttaaatgaggaactaagacaggccctcatttcccagcagggatgccgctcagcctgcagagttccccgttcccaaggcttgtgaagcaggagacaaaagaggggccttcctcaggacactgttgtggggtggggtgctcactc

SEQ ID NO: 404209 - DNA, 593 bp, Homo sapiens
tatcacaatatttcttgtacaatgggttgtgcagcggggggaagggagatgctttacaggcatagtgtggggtgaggtacatttcgtaacagctcttgtttactgagatggctttctactgacaaagaaaaaagtcccgaaaagaagggggcctgttaattgtttgcttccttttgcttttttggttacaacagtaaaaactgtccttcaaatttagtcccagaagacatcagagtttgacaatgacaagtggggaatagaagttcctgggctatcagcttcgcggctccctcctctacatgtgggctcggggacacagagctggtccctgcccagtctcggaggccagagaatcaagttctgggtgtgtgagactgatgggacaggcttcctctgaccgagttgggcaacttggggcttttaactgccttgggaatgagggtgggtgccttaaatgaggaactaagacaggccctcatttcccagcagggatgccgctcagcctgcagagttccccgttcccaaggcttgtgaagcaggrgacaaaagaggggccttcctcaggacactgttgtggggtggggtgctcactc

SEQ ID NO: 404210 - DNA, 584 bp, Homo sapiens
cacagtgtgccagagttgaggagtctaatgaagtttagaagggacactgggatgagggtgctgagctgcggtgcctgtgsgctgtgacagacacctcctgcaccaggaggcaaggatcctgatggtcagatgctcagtccccaacaagagggggttcaaagccagtgcagccccttcctcccaccgctgggggcagcaaaggacccacagtggagattgcaaactatagcaggggctgtgctttgtgtttgttttcaatatttgagccatcatacaaaaatctagtgatttctcattctctatacaaaaaccagaagatctgggccacaaggtctgcattttccccagtatcagtctgctatggccccatattagctgcctagggcccctcactcctgctcctgctagactctgtggatatttgagtcatgaccttgcctcaaggcttattcacgtattatttatttattgttaatataggaagggtcttgctctgttgcccaggctggagtgcagtggcacaatcataactcactgcagccttgaactcctgggctcaagtgatgctcctgttaaggcatatt

SEQ ID NO: 404211 - DNA, 584 bp, Homo sapiens
cacagtgtgccagagttgaggagtctaatgaagtttagaagggacactgggatgagggtgctgagctgcggtgcctgtgcsctgtgacagacacctcctgcaccaggaggcaaggatcctgatggtcagatgctcagtccccaacaagagggggttcaaagccagtgcagccccttcctcccaccgctgggggcagcaaaggacccacagtggagattgcaaactatagcaggggctgtgctttgtgtttgttttcaatatttgagccatcatacaaaaatctagtgatttctcattctctatacaaaaaccagaagatctgggccacaaggtctgcattttccccagtatcagtctgctatggccccatattagctgcctagggcccctcactcctgctcctgctagactctgtggatatttgagtcatgaccttgcctcaaggcttattcacgtattatttatttattgttaatataggaagggtcttgctctgttgcccaggctggagtgcagtggcacaatcataactcactgcagccttgaactcctgggctcaagtgatgctcctgttaaggcatatt

SEQ ID NO: 404212 - DNA, 543 bp, Homo sapiens
atgtccctctgtctctcttcctcctgctctggtcatgtgaagatgcctgctctggctttgcattctgccatgagtaaaagtttcctgaggactccccagccatgcttcctgtacagcctgtaaaactgtgagccaattaaacctatgttctttataaattacccagtctcaggcatttccttatagcaatgtgagaataaactaatacagaaaatwggtaccaagagtggggtattaccataatgatactgaaaatgtggaagcagctttagaactgggtaatgggcagaggttggaggagtttggaggactcagaagaagaagggaagatgaaggaaaatttggaactttctagagacttgttaaattgttatgaccaaaatgctggtagtgatatgaagagtaaagtctaggctgatgaagtctcagttggaaatgagggacttattggaaactggagcaaggtcacttttgttacgcattagcaagaggttggctgcattgtgcccctgctttagggatctgtggaactttgaacttgag

SEQ ID NO: 404213 - DNA, 549 bp, Homo sapiens
tttgcttttaatgaaggacaagggattaagacacacagagactggccagacaaatgggaaaccgaccagaccagcccatgaccaaaatatcacaggcagaccacccgcaaatgcagaggcctcagagtccacagtgggcrgttggaaccaggccccagggaatctttcagctgcattccggctgtgatcggcgggcaacaggtagaggtgctggagggggatgagtcgtgattttcagtgtctgtcatattcgatcaagtgtgtcatagagcttcctgtttcatctcccagttattctgaaacaaaaacatgcatgaaaaacacaggtcactgccaaccacactgacagtcgctctagtacatggaaactgaaaagggaaagacatatcatgaatgccacaataagccagagaatcaaatttatcagcatctattcaaatattggcaagcaacaaacattgctggcggcaatggtggtgcgggacatggggtgtccacataaacagaattcagaagagactgaaaaggcagatgttcccaaaagcctgc

SEQ ID NO: 404214 - DNA, 569 bp, Homo sapiens
gctccccagccaagctttccttcaaacatctccccagccctctcaggttggtgctattgggatcatctctctcacttaggaaggaccggagctcaagggagttcaacaaatagcagggaaatagaggcacacagccttccatgcagcaaactgatggtgaggctctgctgcctgccaggatactcagcagctccttcaaacatctgaccccctgaggtcttccaggctctctcacttttggttacagagagtgtcctgagcagcacaaagtcagacatagccgggtccacgcacatttgtgtctttccacagggtcagacttttactgatgctatttcaatcacaaaagccacaagttacatggagttcccaaggaagtgattctccttagtacgtcctgttcaactggtagtcagagctgtgagcactcaggctcaagccactctgcaagtcagtcaatattgcaaaccatacacagcagtgtccttaacttaatcaatayataaatgctatattaaacattccacatggaacagtaacatttaacatcgagagaaaggggataacag

SEQ ID NO: 404215 - DNA, 561 bp, Homo sapiens
ttatcaccaaggggcctctgcagagacaggtcctcaaattaagagccaggcaaacctgtagagagagaggctctgggggtagactgggaggagtggargatggtcaactgtccccacgcacttcacgaggattctccacctcccatgtcccctggcatggggagtgcaagataacaacaaaaaaaagagaaggcagtgagcaggacccactcttcctgcagcttctgcacactcttcctacagccccagctgggccacctgcaccagtctgtctgcatctggggttggggtaggtgggttctggctggtttatggagagcctgctcctccatgaggtccatatctgttatttttccgcggcatcagcataagaggtttctggttttatgtatgtattttctggctctggctcctggtctgcatttgtatgcacaagaaggcataagagagatagagcactggatttccagagacatgtgtctggcagcattcgggaaaataacattatagcctaggaatcccatcacacatatgtgcacacatgcccacatgcaggatcat

SEQ ID NO: 404216 - DNA, 561 bp, Homo sapiens
ttatcaccaaggggcctctgcagagacaggtcctcaaattaagagccaggcaaacctgtagagagagaggctctgggggtagactgggaggagtggaagatggtcaactgtccccacgcacttcacgaggattctccacctcccatgtcccctggcatggggagtgcaagataacaamaaaaaaaagagaaggcagtgagcaggacccactcttcctgcagcttctgcacactcttcctacagccccagctgggccacctgcaccagtctgtctgcatctggggttggggtaggtgggttctggctggtttatggagagcctgctcctccatgaggtccatatctgttatttttccgcggcatcagcataagaggtttctggttttatgtatgtattttctggctctggctcctggtctgcatttgtatgcacaagaaggcataagagagatagagcactggatttccagagacatgtgtctggcagcattcgggaaaataacattatagcctaggaatcccatcacacatatgtgcacacatgcccacatgcaggatcat

SEQ ID NO: 404217 - DNA, 561 bp, Homo sapiens
ttatcaccaaggggcctctgcagagacaggtcctcaaattaagagccaggcaaacctgtagagagagaggctctgggggtagactgggaggagtggaagatggtcaactgtccccacgcacttcacgaggattctccacctcccatgtcccctggcatggggagtgcaagataacaacaaaaaaaagagaaggcagtgagcaggacccactcttcctgcagcttctkcacactcttcctacagccccagctgggccacctgcaccagtctgtctgcatctggggttggggtaggtgggttctggctggtttatggagagcctgctcctccatgaggtccatatctgttatttttccgcggcatcagcataagaggtttctggttttatgtatgtattttctggctctggctcctggtctgcatttgtatgcacaagaaggcataagagagatagagcactggatttccagagacatgtgtctggcagcattcgggaaaataacattatagcctaggaatcccatcacacatatgtgcacacatgcccacatgcaggatcat

SEQ ID NO: 404218 - DNA, 561 bp, Homo sapiens
ttatcaccaaggggcctctgcagagacaggtcctcaaattaagagccaggcaaacctgtagagagagaggctctgggggtagactgggaggagtggaagatggtcaactgtccccacgcacttcacgaggattctccacctcccatgtcccctggcatggggagtgcaagataacaacaaaaaaaagagaaggcagtgagcaggacccactcttcctgcagcttctgcacactcttcctacagccccagctgggccacctgcaccagtctgtctgcatctggggttggggtaggtgggttctggctggtttatggagagcctgctcctccatgaggtccatatctgttattttyccgcggcatcagcataagaggtttctggttttatgtatgtattttctggctctggctcctggtctgcatttgtatgcacaagaaggcataagagagatagagcactggatttccagagacatgtgtctggcagcattcgggaaaataacattatagcctaggaatcccatcacacatatgtgcacacatgcccacatgcaggatcat

SEQ ID NO: 404219 - DNA, 579 bp, Homo sapiens
gctgtgtcacatgatcacacagaaacctagagacggggagagtggctttccaggccacttttcttctggtaaattctgtgatgtcagcctaattagcaggagtggaatcaggaccttggttgaagtaattggcagcccttctttaaaaagaacaaaggtattttagcaccttctcttcctrtttatgggggcctgtgcaggaccaacagggctctggtgcggagtcttcctcacccttcttcctaactggccaagctccaagcagtgcctctaaatgtgattctttgtagagccatgtctggagaaaaactcgaatttatctcctgaagttttcaaaatatcagaaactggtgagagagggggcgggaataatttcagggctatcccaattcttttcaattagtattgtacatttcaacttctttcatttccaactgcttctccctgcaaaataaaggtatcatgtctttaaagctctccgtccatgacaacattttgttcttatactagaaaatgccattcccttcccaaggcacatctcttttagttgggtttaatttgagatgcctcttgcctgct

SEQ ID NO: 404220 - DNA, 579 bp, Homo sapiens
gctgtgtcacatgatcacacagaaacctagagacggggagagtggctttccaggccacttttcttctggtaaattctgtgatgtcagcctaattagcaggagtggaatcaggaccttggttgaagtaattggcagcccttctttaaaaagaacaaaggtattttagcaccttctcttcctatttatgggggcctgtgcaggaccaacagggctctggtgcggagtcttcctcacccttcttcctaactggccaagctccaagcagtgcctctaaatgtgattctttgtagagccatgtctggagaaaaactcgaatttatctcctgaagttttcaaaatatcagaaactggtgagagagggggcgggaataatttcagggctatcccrattcttttcaattagtattgtacatttcaacttctttcatttccaactgcttctccctgcaaaataaaggtatcatgtctttaaagctctccgtccatgacaacattttgttcttatactagaaaatgccattcccttcccaaggcacatctcttttagttgggtttaatttgagatgcctcttgcctgct

SEQ ID NO: 404221 - DNA, 579 bp, Homo sapiens
gctgtgtcacatgatcacacagaaacctagagacggggagagtggctttccaggccacttttcttctggtaaattctgtgatgtcagcctaattagcaggagtggaatcaggaccttggttgaagtaattggcagcccttctttaaaaagaacaaaggtattttagcaccttctcttcctatttatgggggcctgtgcaggaccaacagggctctggtgcggagtcttcctcacccttcttcctaactggccaagctccaagcagtgcctctaaatgtgattctttgtagagccatgtctggagaaaaactcgaatttatctcctgaagttttcaaaatatcagaaactggtgagagagggggcgggaataatttcagggctatcccawttcttttcaattagtattgtacatttcaacttctttcatttccaactgcttctccctgcaaaataaaggtatcatgtctttaaagctctccgtccatgacaacattttgttcttatactagaaaatgccattcccttcccaaggcacatctcttttagttgggtttaatttgagatgcctcttgcctgct

SEQ ID NO: 404222 - DNA, 579 bp, Homo sapiens
gctgtgtcacatgatcacacagaaacctagagacggggagagtggctttccaggccacttttcttctggtaaattctgtgatgtcagcctaattagcaggagtggaatcaggaccttggttgaagtaattggcagcccttctttaaaaagaacaaaggtattttagcaccttctcttcctatttatgggggcctgtgcaggaccaacagggctctggtgcggagtcttcctcacccttcttcctaactggccaagctccaagcagtgcctctaaatgtgattctttgtagagccatgtctggagaaaaactcgaatttatctcctgaagttttcaaaatatcagaaactggtgagagagggggcgggaataatttcagggctatcccaattcttttyaattagtattgtacatttcaacttctttcatttccaactgcttctccctgcaaaataaaggtatcatgtctttaaagctctccgtccatgacaacattttgttcttatactagaaaatgccattcccttcccaaggcacatctcttttagttgggtttaatttgagatgcctcttgcctgct

SEQ ID NO: 404223 - DNA, 588 bp, Homo sapiens
caagtcatcccatcaatggtattccactatggcagtccaaactgactaggtgactcaccttcttggcccagtgggcatttgatccagaataactcattactgtctgaggaaattcccactgtctcttttcccagaagtttttgtttctggtggcttcttgggggattccaggcacagtagggcaagcaatgggtatagagtgaccctacacctttgacttggcctcctgtggacttagatggatgggtgtgtttcctaggagccctctttcctgtcctcaacccttttcccatgagaaatgcctcttcttgcctcagaaacaaacgaaggggtcagtgtctgccaatgtctgctcagcccagagtgaatgtctgwgagattcagtgtgaatgtgctggttgcctgctacagatcaggcttggcaggtggtggtaggtggttaaggttccagtttcagcatcaagtgtgagttgttactgctcagagtctcagttttctcatctgtaaaatgggaagattcctagctctcaaatttataaggctccactggccgtgtgtaaaatgtggcatttaggggatactgttggc

SEQ ID NO: 404224 - DNA, 597 bp, Homo sapiens
acctttgacttggcctcctgtggacttagatggatgggtgtgtttcctaggagccctctttcctgtcctcaacccttttcccatgagaaatgcctcttcttgcctcagaaacaaacgaaggggtcagtgtctgccaatgtctgctcagcccagagtgaatgtctgtgagattcagtgtgaatgtgctggttgcctgctacagatcaggcttggcaggtggtggtaggtggttaaggttccagtttcagcatcaagtrtgagttgttactgctcagagtctcagttttctcatctgtaaaatgggaagattcctagctctcaaatttataaggctccactggccgtgtgtaaaatgtggcatttaggggatactgttggctgttaactatatccgccaggacaggctggttatgctctggtaaaaaataaacccaaactcaatgtctgcgcccagcacacatttatctcttgtgcatgctatatggccatcttgactcagcagggttctattctctgtcacctttacttaggagtgttggttggaagaatcccccaaagtagtgccatcagtctctgtggcaggggaaaggggacatg

SEQ ID NO: 404225 - DNA, 597 bp, Homo sapiens
acctttgacttggcctcctgtggacttagatggatgggtgtgtttcctaggagccctctttcctgtcctcaacccttttcccatgagaaatgcctcttcttgcctcagaaacaaacgaaggggtcagtgtctgccaatgtctgctcagcccagagtgaatgtctgtgagattcagtgtgaatgtgctggttgcctgctacagatcaggcttggcaggtggtggtaggtggttaaggttccagtttcagcatcaagtgtgagttgttactgctcagagtctcagttttctcatctgtaaaatgggaagattcctagctctcaaatttataaggctccactggccgtgtgtaaaatgtggcawttaggggatactgttggctgttaactatatccgccaggacaggctggttatgctctggtaaaaaataaacccaaactcaatgtctgcgcccagcacacatttatctcttgtgcatgctatatggccatcttgactcagcagggttctattctctgtcacctttacttaggagtgttggttggaagaatcccccaaagtagtgccatcagtctctgtggcaggggaaaggggacatg

SEQ ID NO: 404226 - DNA, 597 bp, Homo sapiens
acctttgacttggcctcctgtggacttagatggatgggtgtgtttcctaggagccctctttcctgtcctcaacccttttcccatgagaaatgcctcttcttgcctcagaaacaaacgaaggggtcagtgtctgccaatgtctgctcagcccagagtgaatgtctgtgagattcagtgtgaatgtgctggttgcctgctacagatcaggcttggcaggtggtggtaggtggttaaggttccagtttcagcatcaagtgtgagttgttactgctcagagtctcagttttctcatctgtaaaatgggaagattcctagctctcaaatttataaggctccactggccgtgtgtaaaatgtggcatttagggratactgttggctgttaactatatccgccaggacaggctggttatgctctggtaaaaaataaacccaaactcaatgtctgcgcccagcacacatttatctcttgtgcatgctatatggccatcttgactcagcagggttctattctctgtcacctttacttaggagtgttggttggaagaatcccccaaagtagtgccatcagtctctgtggcaggggaaaggggacatg

SEQ ID NO: 404227 - DNA, 597 bp, Homo sapiens
acctttgacttggcctcctgtggacttagatggatgggtgtgtttcctaggagccctctttcctgtcctcaacccttttcccatgagaaatgcctcttcttgcctcagaaacaaacgaaggggtcagtgtctgccaatgtctgctcagcccagagtgaatgtctgtgagattcagtgtgaatgtgctggttgcctgctacagatcaggcttggcaggtggtggtaggtggttaaggttccagtttcagcatcaagtgtgagttgttactgctcagagtctcagttttctcatctgtaaaatgggaagattcctagctctcaaatttataaggctccactggccgtgtgtaaaatgtggcatttaggggatactgttggctgttaactatatccrccaggacaggctggttatgctctggtaaaaaataaacccaaactcaatgtctgcgcccagcacacatttatctcttgtgcatgctatatggccatcttgactcagcagggttctattctctgtcacctttacttaggagtgttggttggaagaatcccccaaagtagtgccatcagtctctgtggcaggggaaaggggacatg

SEQ ID NO: 404228 - DNA, 575 bp, Homo sapiens
gtccaagactactctgggatttttgagtcagaagagagccagagcctattcagtatgctgtttgactctgatcccagcagccaccaccatgttaacaggatgagcagggcttycttcaactcagggttcctgtgaaattaaaaagaattctcatcttgactcaggattgttgaacactattgatatttcttccaaggtctcacaagagtttgcctcctctcattgccatgtgaagacctctgtgggggaacaatgcatgggttcttggggtattataggggactacagagaagtgtcacctccacccaacagcctgattcagtctactcctcaggaggaacacaaagtggtctctctagtgccatgaaaccccaaaaagtgtcaaccagtattaaaggcctgcctgatatacaaccctcgaatgcaacacagtgtccttctgaggccactctaaaggccaggaaaggtttgctaagaagtctgtgctgttaaaaacagaagaaaaagacccttatcccattgctctgtgtctggtggctatagggatagtatttcataaaaaaagaaaggcaaaa

SEQ ID NO: 404229 - DNA, 512 bp, Homo sapiens
gcaacgtcagtagcatgcacatcaggttagcttctctgaggtcacaaagttgcctggaagtggggaatccatgagggccaggcctccacaggaggaggacttccctctccagtcaccggcctccctgatgtggttccctcctctcagcccacatgctcctgccgaggtaacatgtccccccactccakgttagaaaaccataaagcccccaagagacgtttctaccaatcatctaaatattgagtttcaccttataaaatttataaaacgtaaagaacacttggaacagcccagttttaatgcctccaacttttgttttccaaagaacaattggtagacttggccccgaggggagcagagcccggctctcagacaacgagcctcaccagcaattctgtatcttcgaggcggcagaggtttttgtgatcttgtgtcatttctaaacacgacggtgtagatgggatcctcttcattttgcaaatgagaaaatggaaaaacccgagggacaaagg

SEQ ID NO: 404230 - DNA, 512 bp, Homo sapiens
gcaacgtcagtagcatgcacatcaggttagcttctctgaggtcacaaagttgcctggaagtggggaatccatgagggccaggcctccacaggaggaggacttccctctccagtcaccggcctccctgatgtggttccctcctctcagcccacatgctcctgccgaggtaacatgtccccccactccaggttagaaaaccataaagcccccaagagacgtttctaccaatcatctaaatattgagtttcaccttataaaatttataaaacgtaaagaacacttggaacagcccagttttaatgcctccarcttttgttttccaaagaacaattggtagacttggccccgaggggagcagagcccggctctcagacaacgagcctcaccagcaattctgtatcttcgaggcggcagaggtttttgtgatcttgtgtcatttctaaacacgacggtgtagatgggatcctcttcattttgcaaatgagaaaatggaaaaacccgagggacaaagg

SEQ ID NO: 404231 - DNA, 510 bp, Homo sapiens
tgtccaaccttttggtttcactgggccacattggaagaagaagtgtcttgagccacacgtaaaatacactaacactaatgttagctgmtgaagaacaacaaaaataatagcaaaaagtctcataatgctttaagaaaatttatgaatttatgttggcccacattcaaagctgtcctgggccacgtgcatcctgcgggcttgggttggacagtcttgagctaaagcaagtgtgttctgagctggagagaaggccagccccacggttcatcgttcatggtatcatcaaccaatgatactaggaacagttggtgggtgcaggccctgggcagggcaataataagaaaaagcttagaaaagaaaaggaggaggaggaggggagttgcgggtcatggagggccttgaaagcgagactgagggtttggaccttaccttttcggcatactaccgagcagaaacccctgtcactgtaatttctgatgattctgtcttccatctttgggaataacaacg

SEQ ID NO: 404232 - DNA, 613 bp, Homo sapiens
tttgcactagttgttgggttttttaaagtttctcctgaagcttgtgttttcagatgactatcttctgagcagtcaagcaaatggacaaacacattaaggcaaaaacaaacatttacatagkcagggaagtcgtttctcccaagtcccctagttcacaggaccatatccatttaggaattaaaacaagctgacttttttttttctgaggagagtggattctttccagaattcccatatctagaaagcaggagagaaacaaactttaatgacagggtcctttcttccctttccacaaacgacccaattgtcatgagtaatgcactttttctgtttgcagcctcatcatgatccagcaaatgaaccccaacaattagcctcttcatttccatcagaccatgtccttgaactccagaaagctgctatgggagccaaccatatatatatattttttttaattaatctagctgggctctggccagtcattaaaactaggagattaatcattccttccttcttcttttaaacccatacaacccatgtagaccgaaaattacagaaagttcaagctgataggcttcttagggatcatctagtacagtgtttttgaattgaa

SEQ ID NO: 404233 - DNA, 577 bp, Homo sapiens
ttttctgtttgcagcctcatcatgatccagcaaatgaaccccaacaattagcctcttcatttccatcagaccatgtccttgaactccagaaagctgctatgggagccaaccatatatatatwttttttttaattaatctagctgggctctggccagtcattaaaactaggagattaatcattccttccttcttcttttaaacccatacaacccatgtagaccgaaaattacagaaagttcaagctgataggcttcttagggatcatctagtacagtgtttttgaattgaaccattaaggggtcagaaagtcaatataatgagttataaccagcattttttaaaaaaagacaacacagagaatttcatgtagtacaagtgagtatggcttcatgaaacatgtttcaattatgtatatggttctgagagtggcaacataaaattgtgggcacttcttactatgggtcctggtccaaaaagtttgaaaatcctacctccctggtcttccagatgggaaaagtcaagccccaagagaggcagtgacttacccaaggttctgttgcaaatcagtccttctcc

SEQ ID NO: 404234 - DNA, 545 bp, Homo sapiens
atcacaccatgtagtcatagggtcttgaaaatcaccttatcctctctgcttgttttacagaggagttaagagaaagtcagagaagttaagggacttgcccaagggcacctagctcatcagtgggctgctcctccttatcttgagtcccgatttccttttagacactccacccaccaggctgtttctctagttcactgctttgagcaccaggtcacaagtgagcacacataccaacagctctcctcctgaaaccatcgagggaggcgagtgatagcaaactttgtttagtgcaaagaatggaaaaggctgcttgaagcacagaaaaagggaagtcagagcaggytgtggcgcagatgtctgggcattgctgtggggacagagtagttcacaagacacaaggcttgtcagcctctcttctgaacctctgcgcccaaggattctcaaggagcattcagattagattttaactatggatgctgtggttgccggtaatagaacagctaataaaaagcaaagctggggtgtcatcaccctatcagcagatc

SEQ ID NO: 404235 - DNA, 503 bp, Homo sapiens
atgaggaagctgaaggattagggaggagaagatgaaaggcaagccagggaaaacaggcaaaggaagtagttattaaaataaaaggtgaaattcatgggaagtaaatccaatgttttgtccatactcaactggattaggaacatgtaatgaaagcaaatagatttaatggggtggggatgattaacgttgtcttgcaatacattaggaaatgactttgttcaggaggagtggagggctatgagaggaaattaaacttaattcttatctccttatgatgttttagttgcttaacttcttacaacacacttgtaaaaccagaaagagagagaggcctgaggtttaatatgttgtttgcaaagtaactggagatatgaatgtcttgagtgtgtgcttcagtcttatcaaggatccagtgtttttttttctaacaayttgttgtaataagtagatgtccttagtggtattggggactctggttaaaaattacctttcaaagaaatgaa

SEQ ID NO: 404236 - DNA, 570 bp, Homo sapiens
ggctggcacatgccagtaggataatggaagaaaagaagggacttgagtcctgggttggctttagggaatcaagttgtctacctgctctagactgcctatctgcctcctgatattaagtataagagagaaatttaggtcttgttttagactctgcaattttggtcttcttgtagccacttattctatacttaaactaatatagaagtgaaatgctttgtgtttcttccctttccttgctgggcaggcacagatgtttcccctaacctccagggagggtgtgaggcttctgttcttcctgcttctcagaaggtgggaactgatttttactttacttgagctctcggtcagatgggtcatcgtgtttatgttgagggaataagaggagaagagggtttgaggaggaggtagagggaaggaagtgccttggtagaaagaaggatttattcagtgccagtaagaatgtgggcaaggggagtgcagagagggagaaggagggaagcacaggrtggcctcaagagctggaaccaagcctgggaagttactaaggagagggtgggtctgctgtatggg

SEQ ID NO: 404237 - DNA, 547 bp, Homo sapiens
agtatataataagcacacaaaagractcttgctagtactgatgtgagtgtgttattacataatgtgtgacgccagtcttgtattgcttcatgtccccaagccttatctccctatcaaggttataagttccttgaggtcaaggactgtgcttctccttatctcagggagttggagatacaggaactaggttagcttttatcatagaagtcataagatgtcttttcaaatgaggttggttgttgtagctatgattataacagcaatagactattgggcgactctcctcttgtatacactatctcatttcatgtctccaatgtccatatgaactaggtattctaactacccgcagttgtggatgctgctagtgctccacacctcatctcctcagcctgggtgatcagtttttcccctcatgaagggttcccacctcaagtgcttgctgagtctcccagctctcctttagggttttctcctaagctgtggaagtctgttcagccaggaaatgcaagagagcaaatggttcctctactgatgagtgacaaga

SEQ ID NO: 404238 - DNA, 547 bp, Homo sapiens
agtatataataagcacacaaaagaactcttgctagtactgatgtgagtgtgttattacataatgtgtgacgccagtcttgtattgcttcatgtccccaagccttatctccctatcaaggttataagttccttgaggtcaaggactgtgcttctccttatctcagggagttggagatacaggaactaggttagcttttatcatagaagtcataagatgtcttttcaaatgaggttggttgttgtagctatgattataacagcaatagactattgggcgactctcctcttgtatacactatctcatttcatgtctccaatgtccatatgaactaggtattctaactacccgcagttgtggatgctgctagtgctccacacctcatctcctcagcctgggtgatcagtttttcccctcatgaagggttcccacctcaagtgcttgctgagtctcccagctctcctttagggttttctcctaagctgtggaagtctgttcagcsaggaaatgcaagagagcaaatggttcctctactgatgagtgacaaga

SEQ ID NO: 404239 - DNA, 590 bp, Homo sapiens
agggttctttcttggagtacttatagcctaggaaggagcatggggattgtagacttctttcctcccttccctacaccttttaaaacaactcaatcagttcacgcctgtaatcccagcactttgggagsccaaggcgggtggatcatttgaaggtcaggagttcaagatcagcctgaccaacatggtgaaaccccatctctactaaaaaaaaaaaaaaaaaaaaaaatagctgggcatggtggtgcatgcctgtaatcccagctacttgggaagctgaggcatgataattgcttgaacccaggaggcagaggttgcagtgagctgagatggtgccactgccctccagcctgggcaacagagcgagactctgtctcaaaaaacaaacaaacaacaacaaacccaagccaattatcttttcactattcattatagtaagtttggaaaatagggagaaatcaaaagaaaaaaatattttacaattgccccaaagcttattacttaactactgctgacaacattttatctttttaaaaaaatacgcagactattgaacctctttcattttacacatcgtaaacattttctaacaa

SEQ ID NO: 404240 - DNA, 575 bp, Homo sapiens
aatatttgaatcattctgataacattaacaataatttttaaagtttcctcctccttgcattacctctgtttcctccaagtttattgtctctatttatttgctttagtagtctctgttctttatagcagaggatttcctcaaacattggtaagccttggttatttaaaaccaataacctgggaactgagtattggaagagggctatggttttcacatctcaatgcatagatggtcactaacccttgcattcattctctacttctgtgaaacaaaccaccccataacytagaaacttaaaacaacgactgtttatttgataacaattgtgtagggtggcaagtcagactgggttcagttggatggttattctgctgttctcatttagagttcttcatgtgactacaggcatctggttacttgccagatggtacaagatggcctcacccacatgtctgtggttggtgctggctgttggctgggcctctttctctatgtagtctctcatccccaaggaaactcacctggtttcctcacatgatagtcccacagttccaacagggtgaggatgaaatctt

SEQ ID NO: 404241 - DNA, 624 bp, Homo sapiens
gtgaacattttcataggtttattgactttgtatgattttgtawaggtttcaagtgttttactcatttttccattgttttttttttcctcaatggtctaggaaagtacttgccacattaaggaaattcactatttctctcttttgtatgttacaaatattttcctactctgccctttaattttgtggtgcttaataaagtggaccacatataaacaaagtttcagtacattaaaattttcctttgtgatttttacctcttgatgtatgatcactttttttataattttatagatttcttttgagtcatgctcatatgtaagtagcttcaagctaatttagaaaattaaactatatacagttaatcatctgccaggaacaaatgtcacagaattctggcttctgttttccctaactaaaatttactggcagaatgtcaacaaaactaaaatgagagaagaaacacatgccccttagcaagtgacatccagtattgctattcaaatgaactggggtaattccactagcctgaatgaatttgaagtcagtagtttataccttttaactttaattcctcacattgccacacttctgaatatcttgggcaaaggactttcctgttcatca

SEQ ID NO: 404242 - DNA, 533 bp, Homo sapiens
tttttttttttttttgtcttgaagcacttgactcagaaacataaaaatagtcaagattgrtttaactgaaatcacacttctgtgtgatctgtatgcatcctttcttttgttccagaaatgtgaggatccaaggttttaaacctaagccagtctggccagcttgactcatccaggacatctttcagtagtttcacagtggccatcagctctgtcagacaccggacatggcttgaaagggccatgtcagcaagtgatcattattgtgtctgaaaagagctgtgcttgatggctgaaatattacaactaccaaaaagctacaagtggaaactccatagaatcagctcatttgtagtcacagaatactctattcctacccactttcacacacgctactccctatatctccatatcaagaaaaaagtcctgtcttctttaagtcaattaccatgctttaatccagaatttggaattattcagggaaaccaaatcaagtatctattaccttctagagccatcatcatatccatgaacaa

SEQ ID NO: 404243 - DNA, 533 bp, Homo sapiens
tttttttttttttttgtcttgaagcacttgactcagaaacataaaaatagtcaagattggtttaactgaaatcacacttctgtgtgatctgtatgcatcctttcttttgttccagaaatgtgaggatccaaggttttaaacctaagccagtctggccagcttgactcatccaggacatctttcagtagtttcacagtggccatcagctctgtcagacaccggacatggcttgaaagggccatgtcagcaagtgatcattattgtgtctgaaaagagctgtgcttgatggctgaaatattacaactaccaaaaagctacaagtggaaactccatagaatcagctcatttgtagtcacagaatactctattcctacccactttcacacacrctactccctatatctccatatcaagaaaaaagtcctgtcttctttaagtcaattaccatgctttaatccagaatttggaattattcagggaaaccaaatcaagtatctattaccttctagagccatcatcatatccatgaacaa

SEQ ID NO: 404244 - DNA, 542 bp, Homo sapiens
taatttttgtgtaaattatatacttttagaacagcttaaagctcagcagcttttccccccaaactgattggaccgtaagcctttgacagctaaagatacagtctgaacattgtaaactatacctggatgcagaaattatattaaaaaataaaactgactaggataaattaatgagccctcagtcagaggtccatttccctgtggactactcagtgccagaagaggctaaacycttaactttggccagcccctgggcacaacatcaagtaaaaaggaattcgaaagttctatatgactttggccaggccagcattattagaaaaacatggtaggtcctgtcctaataaaagatgagaaaagtcctaaggatgagcaaaataaaatgccatgtagataaggatccatatctgtagataaggaatcgattcaaagttcatattattttttcctcgaagtgggaaaatattacctacattcaattagcacttttgcccttttgctatggaaaatgcgttttgtgagtagtcccttatcatttttat

SEQ ID NO: 404245 - DNA, 514 bp, Homo sapiens
aaattaatgagccctcagtcagaggtccatttccctgtggactactcagtgccagaagaggctaaacccttaactttggccagcccctgggcacaacatcaagtaaaaaggaattcraaagttctatatgactttggccaggccagcattattagaaaaacatggtaggtcctgtcctaataaaagatgagaaaagtcctaaggatgagcaaaataaaatgccatgtagataaggatccatatctgtagataaggaatcgattcaaagttcatattattttttcctcgaagtgggaaaatattacctacattcaattagcacttttgcccttttgctatggaaaatgcgttttgtgagtagtcccttatcatttttatttcctcagacagcaaattaattcttatacttctctacagaggacaggacaaacttgtagttaatattgaagattaggaaatgaccttagccacaattatcatacatcaataacactttcccaaaacccaagaaaga

SEQ ID NO: 404246 - DNA, 514 bp, Homo sapiens
aaattaatgagccctcagtcagaggtccatttccctgtggactactcagtgccagaagaggctaaacccttaactttggccagcccctgggcacaacatcaagtaaaaaggaattcgaaagttctatatgactttggccaggccagcattattagaaaaacatggtaggtcctgtcctaataaaagatgagaaaagtcctaaggatgagcaaaataaaatgccatgtagataaggatccatatctgtagataaggaatcrattcaaagttcatattattttttcctcgaagtgggaaaatattacctacattcaattagcacttttgcccttttgctatggaaaatgcgttttgtgagtagtcccttatcatttttatttcctcagacagcaaattaattcttatacttctctacagaggacaggacaaacttgtagttaatattgaagattaggaaatgaccttagccacaattatcatacatcaataacactttcccaaaacccaagaaaga

SEQ ID NO: 404247 - DNA, 655 bp, Homo sapiens
ccatttccctgtggactactcagtgccagaagaggctaaacccttaactttggccagcccctgggcacaacatcaagtaaaaaggaattcgaaagttctatatgactttggccaggccagcattattagaaaaacatggtaggtcctgtcctaataaaagatgagaaaagtcctaaggatgagcaaaataaaatgccatgtagataaggatccatatctgtagataaggaatcgattcaaagttcatattattttttcctcgaagtgggaaaatattacctacattcaattagcacttttgcccttttgctatggaaaatgcgttttgtgagtagtcccttatcatttttatttcctcagacagcaaattaattcttatacttctctacagaggacaggacaaacttgtagttaatattgaagattaggaaatgaccttagccacaattatcatacatcaataacactttcccaaaacccaagaaagaacctctcacctactttagtatgtttrctcagtggatttaaagtaacctttcaaatcaccaactgcaaagacaacattccacctcaaaatgtattcaaagtgggctcttgaattgcgcttttatggaattaacctaccatcttcttatgaaaaagtcacctgacatcc

SEQ ID NO: 404248 - DNA, 585 bp, Homo sapiens
tgcagccagggaacactaaagcacactgaactatctttggtaatgactcagaaaatgtaaaattctgattgacatttgggtgccatgaactcatatccagctataaataaaagtacccagactttgtaaatcagcatcagctatttgagcagctaccatcagtgctgatcagtgttaatcataacattaacagaggagaattaactagagataggtagtcacacgggaatctctcatggttgttgacagtgacatatattaaaacaaatatctgtcctgaggactgaagctttaattaaattctcaaaacttacttagtcatatattcaaactcccctacagtacttgggatgcactttcccctgaacagaagcccctttacctcctyccttgggaggtggagctggatgactagagtggaaatgtccagaataaatcctaagtgcttgtattctccagcactccagctaaatgaggactgtttggttgtataataaccacacttggacgtacctgatatcttaatacaggatattttatcatgccttaatctgccatctctgagtctaataaaaggtaaatgat

SEQ ID NO: 404249 - DNA, 561 bp, Homo sapiens
tgcagtgtctccttacctctttagcctttcttctcatattatttccccctaacagtactgatttattaattttgcattctgcctaagacaacagaaaaatagacacagaaacaaggaggaacataatgtaaattccttsagagctagaacaatgaatgtcttgctccctgatgtatctccagggcctagaacggaccagaagagtagtgagtaccaggaaggcctgagcacagaagacccacccagatccaaactcagattctggatagttttccaattgtcggaagacactgggcataaagcaagactcagatcccaaaggataacagagggactccaaaagctgggaacatgaagaaaaccagttgctcaattgtgagatacggtaagggtaagtgaggggatgatggcatgtagccttttctctacaaatcagggagaagattaaggtggcagctactaatggacagttcccttggatgaaaattatcaacttattaaaattttccaaatggccttctggttaacacttcagcctagtgatttaggaagagagagagc

SEQ ID NO: 404250 - DNA, 688 bp, Homo sapiens
aactagcttggggaataaggacccatggaagggacaaatgattgattgttatggcagtgcttgggaatcagcaagctgctctacttagaatgagaccaaggaatttttgaagctgtggacatgaacacacggtgtggcatggtaggtacctcacaatgcacccatattgctcagggactcagttgtcaccactttctaayagttaggttaggtttagacccaccttcagcccatcactgaacctttcccagcctcagcatcctcactgatcaaaagtgagatgttactgattcatcaatcaaatacttaccaggcatctcccatatgcaaggctctaaagtcacattccctattctctagagctctcattctagaaggggtctcagaaactggtggcattaaatattttcttgaggtccttgaagtctttcccagttctgaaaattctatacaaaaacttggggctttctatttaaaaaaatgaacatgaaccttatagtataaccactctctaaaatactcgcagtaaatgtatactctcctaaaggtgaaagtgtactagaaatgccccttgtttattaacttaaaataatctgtacacataaggcaataaaatgcttgacagcatatataataaagccttctgtcaatagtcaaattagttttggctgccaaaattcttgctcct

SEQ ID NO: 404251 - DNA, 688 bp, Homo sapiens
aactagcttggggaataaggacccatggaagggacaaatgattgattgttatggcagtgcttgggaatcagcaagctgctctacttagaatgagaccaaggaatttttgaagctgtggacatgaacacacggtgtggcatggtaggtacctcacaatgcacccatattgctcagggactcagttgtcaccactttctaacagttaggttaggtttagacccaccttcagcccatcaytgaacctttcccagcctcagcatcctcactgatcaaaagtgagatgttactgattcatcaatcaaatacttaccaggcatctcccatatgcaaggctctaaagtcacattccctattctctagagctctcattctagaaggggtctcagaaactggtggcattaaatattttcttgaggtccttgaagtctttcccagttctgaaaattctatacaaaaacttggggctttctatttaaaaaaatgaacatgaaccttatagtataaccactctctaaaatactcgcagtaaatgtatactctcctaaaggtgaaagtgtactagaaatgccccttgtttattaacttaaaataatctgtacacataaggcaataaaatgcttgacagcatatataataaagccttctgtcaatagtcaaattagttttggctgccaaaattcttgctcct

SEQ ID NO: 404252 - DNA, 688 bp, Homo sapiens
aactagcttggggaataaggacccatggaagggacaaatgattgattgttatggcagtgcttgggaatcagcaagctgctctacttagaatgagaccaaggaatttttgaagctgtggacatgaacacacggtgtggcatggtaggtacctcacaatgcacccatattgctcagggactcagttgtcaccactttctaacagttaggttaggtttagacccaccttcagcccatcactgaacctttcccagcctcagcatcctcactgatcaaaagtgagatgttactgattcatcaatcaaatacttaccaggcatctcccatatgcaaggctctaaagtcacattccctattctctagagctctcattctagaaggggtctcagaaactggtggcattaaatattttcttgaggtccttgaagtctttcccagttctgaaaattctatacaaaaacttggggctttctatttaaaaaaatgaacatgaaccttatagtwtaaccactctctaaaatactcgcagtaaatgtatactctcctaaaggtgaaagtgtactagaaatgccccttgtttattaacttaaaataatctgtacacataaggcaataaaatgcttgacagcatatataataaagccttctgtcaatagtcaaattagttttggctgccaaaattcttgctcct

SEQ ID NO: 404253 - DNA, 602 bp, Homo sapiens
tatcactttatataaattaatctaatttagaaataatttagtactatgatttatgcagaacttgttctctagctaagagaaaattttacattactagtatcagaaacatggtgcctacagttgctagacattaaatgtctacactgatttatataatttaggagaaatggtaagggataaggaagcaaaaatataatcagagaccaaaataagagacctatgagaatattatttcccagatgggttcttagaagctcaagcaagagkatatatgtattaaaaatggtctcaacaggctgcaagttgacatactgagactaagtatttgtctttaaaaaataaccatcctcctgtcactgactgatataattcccaaggatcggaacactattatttttctggcagatacacagggcaactgctttaaagggttagcttccacaactaaaggtcattcacctatggttttgcagagcagcaactctaaaacctttctcctaagaaatgaaaaatgtctaaacatcctttggattcacagagtcaacactactacctagtaaattaccatacagtgaaatccttactggatctaaatgctacat

SEQ ID NO: 404254 - DNA, 567 bp, Homo sapiens
agattgtgttaatttaaaacccttgtctttgagctctgaagttttttcttctacttgttctagtctattgttgaaactttctggtgtattttgtatttctctaagtgtctttcatttccagaagttgtgwttgtttttactttattatatatatttgtctggcaaatttttcattcatatcctttattattttcttaatttctttgtttttcacctttctctggtatcttcttgagtagcttaataatagacctaccttatgaattctttttttctggcaattcacagatttgttcttggtttggatccattgctgggaactagtgtgatcttttgagggtactatagaatctttttttgtcatagtaccagaattacttttttggttctttctcctttgggtagactatttcattggaaagatctgcgattcaagggctgctgtccagattcttttttcccatggggcgattgcttgatgtggtgttctcctgcttcctccagggatggggcttcctgagagttgaactgcagtgattcttattgctcttctgggtctagccaccc

SEQ ID NO: 404255 - DNA, 595 bp, Homo sapiens
tttttaagcccattgtacaaagaaaatgacatgccaattcatagccctcatgtttcctccttgggartctgagtatcaggatactgctgggggtcttggtcatcagctgtgctccttacacacaagtttccaacctctcaatgctttgtatgatgaaaaacagttctcttctccctcacacccatcctttttccatgtgctccttggagaataggacaaattcctcactccagaggactaatacccaagcccggtggtctcctaaagcaatgctgctcatacttaatcatctgaggaccttgttaaaatgcagattctggctcagaagttccctggtggggctgagagtctgcatttttaacaagctcccagggaccactccagtggacaccaactcttagccctcacccctagttcctcagccccctccccacactcagcctaagggcaactcacactgtgtctctagaagttctctagtagcctttgaagaaagggtgttacagctcttttaaaacacaaacccaccccctcagcagctttaaaagaaacaagtttgtgtaatgcattgctgtgtcacaatagtggaaaaacc

SEQ ID NO: 404256 - DNA, 595 bp, Homo sapiens
tttttaagcccattgtacaaagaaaatgacatgccaattcatagccctcatgtttcctccttgggaatctgagtatsaggatactgctgggggtcttggtcatcagctgtgctccttacacacaagtttccaacctctcaatgctttgtatgatgaaaaacagttctcttctccctcacacccatcctttttccatgtgctccttggagaataggacaaattcctcactccagaggactaatacccaagcccggtggtctcctaaagcaatgctgctcatacttaatcatctgaggaccttgttaaaatgcagattctggctcagaagttccctggtggggctgagagtctgcatttttaacaagctcccagggaccactccagtggacaccaactcttagccctcacccctagttcctcagccccctccccacactcagcctaagggcaactcacactgtgtctctagaagttctctagtagcctttgaagaaagggtgttacagctcttttaaaacacaaacccaccccctcagcagctttaaaagaaacaagtttgtgtaatgcattgctgtgtcacaatagtggaaaaacc

SEQ ID NO: 404257 - DNA, 595 bp, Homo sapiens
tttttaagcccattgtacaaagaaaatgacatgccaattcatagccctcatgtttcctccttgggaatctgagtatcaggatactgctgggggtcttggtcatcagctgtgctccttacacacaagtttccaacctctcaatgctttgtatgatgaaaaacagttctcttctccctcacacccatcctttttccatgtgctccttggagaataggacaaattcctcactccagaggactaatacccaagcccrgtggtctcctaaagcaatgctgctcatacttaatcatctgaggaccttgttaaaatgcagattctggctcagaagttccctggtggggctgagagtctgcatttttaacaagctcccagggaccactccagtggacaccaactcttagccctcacccctagttcctcagccccctccccacactcagcctaagggcaactcacactgtgtctctagaagttctctagtagcctttgaagaaagggtgttacagctcttttaaaacacaaacccaccccctcagcagctttaaaagaaacaagtttgtgtaatgcattgctgtgtcacaatagtggaaaaacc

SEQ ID NO: 404258 - DNA, 427 bp, Homo sapiens
aactctctgggtcttcagtgccttataaagtctcctctgtgttattaaaaacttattagataaatttgtatgtttttctcttgttaatcggtcttttgttwtaagtgcctctgccatgccctagcgatgggtgtggaaaagacacttcccctcacctatggaattttacagtcaagtatatgtgcggatacttgcccactaggaatctcacattgctccttggaaatggctagatctgtgcagctaataaaccaggcaatgcactaggaagttacatccacatctcatttaattctcactctactcttgcaagggcaatattactatcaaaaccattttataagtcacaaagtcaaggatgaaaagttaatgtgatcaagttgcaaggtaagcaaggttgtgtatccagtcctgctcactcctattc

SEQ ID NO: 404259 - DNA, 652 bp, Homo sapiens
ttatcttgcaagatggcaggtgaaaactttaaaaggctggatactaagaagagactggaagccaagaaagctgatactagtggcaaagtgaaaaagggtaagtcaaggtgaaaaaggctaagtcaaggcgaaaaagtccaagaagaggaaactccagtgcagccgaaatcctgtcctgatcagaggaactggcagatattccctgtctactgtgtattccagaaaggccagatacaagaggaggtactcgccactaaattcaagattgaaaaggaaaaggaaaaggttcatgcaactgttacaaaaccggytggtggtgacaaggatggtggtacccaggtggttaaactctgcaaaatgcatagatattatcctaccgaagatgtgcctcgaaagctgttgagccacagcaaaaagccctcagtcagcacagaggaaactgcgaggcaacatcactcttgggaccgttctgatcatcctccctgggcaccacacaggcaagagggtggctttcctgaagcagctgggcagtggcttgttacttgtgactggatctctagttctcaatcaagttcctctgtgaggagcacaccagaaatttgtcatcaccacctccacaaaaattgatatcagcaatgtgagaatcccaaaa

SEQ ID NO: 404260 - DNA, 491 bp, Homo sapiens
atgcgtagtcctgcctgtgacatatttaacccattgcaccatgaagtgtaccaagacatggatcagcccctctgcaactactacattgcttcctctcacaatacatacctgactggagaccagctcctttctcagtccaaagtggatatgtatgcacgggtgctgcaagagggctgtcgctgtgtggaaggtacgtgcactttttctgagctccggtgtgtatgggtgaccctgtcctttaatcagtctgtcgagtctagtataaagaatggagacctaaaacacactctcacactaattagtactacttttctgctcattgtaaagtcaatcttaactcataattctctctggctccttattgttcaattgggagaaagagatctgtgttagcagttgtgaagcataccgttagttgctgagaaattatgatgaaaattaaagtcttcctagaaagatatytttaattatacaattgcaaaaatagttca

SEQ ID NO: 404261 - DNA, 557 bp, Homo sapiens
tatacagtcttttctaaggcacacttggattctcattggtcttcttttccttcttcatctcagcaaggatggtttatgagtattttttttctgggtttcctawggcaaaattctgagtaaaggcaagaagagagtttacagtcagagaactgatgcatttcacagcacaaagattaaaaatcaaactcaacagagagtgcaaaaatagtgaaaccgctcttatctcccctattaaataaaatatagaaattcattcagcaatattttattgagcacctactatatgcaacgcattgcactgtgtgctgcagatagaagtcagaacagtctctgctctcctggaccttgggttggagagacagaaatgaaagtagtaatcacacaattaattgttttattacagtaatgataacacaatgaagcagcaaaatgaagcagcaatgcacagtgaccggagatcataaaacaggacctgacctggtctgagtagtcagaaaaggcttctcctttgagaggacttttactctgggattgaaaggatgtgttcgaagttggct

SEQ ID NO: 404262 - DNA, 557 bp, Homo sapiens
tatacagtcttttctaaggcacacttggattctcattggtcttcttttccttcttcatctcagcaaggatggtttatgagtattttttttctgggtttcctaaggcaaaattctgagtaaaggcaagaagagagtttacagtcagagaactgatgcatttcacagcacaaagattaaaaatcaaactcaacagagagtgcaaaaatagtgaaaccgctcttatctcccctattaaataaaatatagaaattcattcagcaatattttattgagcacctactatatgcaacgcattgcactgtgtgctgcagatagaagtcagaacagtctctgctctcctggaccttgggttggagagacagaaatgaaastagtaatcacacaattaattgttttattacagtaatgataacacaatgaagcagcaaaatgaagcagcaatgcacagtgaccggagatcataaaacaggacctgacctggtctgagtagtcagaaaaggcttctcctttgagaggacttttactctgggattgaaaggatgtgttcgaagttggct

SEQ ID NO: 404263 - DNA, 537 bp, Homo sapiens
gctaaatacagagaaaatatggagaaaaagaagatttaaatcagctggtggtattagtaacttgttggagggacaatacttaaacrgccttgtagaataagcaagaattaatcagatagactaacggggaagggtgttccaggcagagagaacagcatacgtaagagtggggagttgagaaagagccaggctcaatagggaagctgaaagacagtcattgaaggcagaatcctaaatctctgtggaataatggtggaagatgatagtggaagacaagggagatgccagaccttaagggatatgaagacatgcctgtgtattgagagagcttctgacaggctttaagacaagaattgaatcaccatgctcatatttcagaaagaaaattatagcaccagtgttgaggatgaaccaaaggggaaataaaaatgaacaggaggcaatggagtcaaaagataacttgggaagtagaattgccaagaattggttgagtctagaatgactcccagtttctggctgaggccagtgctgccccta

SEQ ID NO: 404264 - DNA, 537 bp, Homo sapiens
gctaaatacagagaaaatatggagaaaaagaagatttaaatcagctggtggtattagtaacttgttggagggacaatacttaaacagccttgtagaataagcaasaattaatcagatagactaacggggaagggtgttccaggcagagagaacagcatacgtaagagtggggagttgagaaagagccaggctcaatagggaagctgaaagacagtcattgaaggcagaatcctaaatctctgtggaataatggtggaagatgatagtggaagacaagggagatgccagaccttaagggatatgaagacatgcctgtgtattgagagagcttctgacaggctttaagacaagaattgaatcaccatgctcatatttcagaaagaaaattatagcaccagtgttgaggatgaaccaaaggggaaataaaaatgaacaggaggcaatggagtcaaaagataacttgggaagtagaattgccaagaattggttgagtctagaatgactcccagtttctggctgaggccagtgctgccccta

SEQ ID NO: 404265 - DNA, 537 bp, Homo sapiens
gctaaatacagagaaaatatggagaaaaagaagatttaaatcagctggtggtattagtaacttgttggagggacaatacttaaacagccttgtagaataagcaagaattaatcagatagactaacggggaagggtgttccaggcagagagaacagcatacgtaagagtggggagttgagaaagagccaggctcaatagggaagctgaaagacagtcattgaaggcagaatcctaaatctctgtggaataatggtggaagatgatagtggaagacaagggagatgccagaccttaagggatatgaagacatgcctgtgtattgagagagcttctgacaggctttaagacaagaattgaawcaccatgctcatatttcagaaagaaaattatagcaccagtgttgaggatgaaccaaaggggaaataaaaatgaacaggaggcaatggagtcaaaagataacttgggaagtagaattgccaagaattggttgagtctagaatgactcccagtttctggctgaggccagtgctgccccta

SEQ ID NO: 404266 - DNA, 261 bp, Homo sapiens
ttgttcacaatgttttgctgagaaggagggagaaaactagtctagcaaagagggcagtgtagagtccaaggaagaggatgtggttttgtagctacgttacatcaggcaatgctccatgcrggaggctaccgcttagctcacaggtgctgctttacttactcattcttcacaaaggcatgcttgttgatggtctccacaacatctctgaagagaatttttgaagtgagagtgtaaccatgatgtactactggctctccatct

SEQ ID NO: 404267 - DNA, 612 bp, Homo sapiens
ataacttaatcatttgaagacttgttttccccatctagaaaaggagagtaatagcacttacatcataaatttgagtgacagttaaatatatgtaaagtagcttgtaacactgcatggcatatagtaactatgattgttattgatactattaatattgctctctacccacacaatctcattagctctcagctggagaaagacagtaggtttttcaccatscccctctgactaagaatttgctttctcttgtttttatattttgcccccaggctaattcctcaaaacactactttcacctcattgctcctttgctcaaaagcctacttggtgcatagcacagcatccaacacagagaagtaagtagtctgtaaatatatgctaaatggattaataaatatcttacctcatacaatagctcttgcgtgcttacctccaacgcccctgtctcttgtgctagagcctggttaatcattcactaaccctgtttcttcttttatcgagggaacacagctggactctatttcctagccttcctttgcaggaggatgtggccagtgaaatgtgggcagaaagtatgtgcaccacttccaggtatggttgacagaaacctgc

SEQ ID NO: 404268 - DNA, 612 bp, Homo sapiens
ataacttaatcatttgaagacttgttttccccatctagaaaaggagagtaatagcacttacatcataaatttgagtgacagttaaatatatgtaaagtagcttgtaacactgcatggcatatagtaactatgattgttattgatactattaatattgctctctacccacacaatctcattagctctcagctggagaaagacagtaggtttttcaccatccccctctgactaagaatttgctttctcttgtttttatattttgcccccaggctaattcctcaaaacactactttcacctcattgctcctttgctcaaaagcctacttggtgcatagcacagcatccaacacagagaagtaagtagtctgtaaatatatgctaaatggattaataaatatcttacctcatacaatagctcttgcgtgcttacctccaacgcccctgtctcttgtgctagagcctggytaatcattcactaaccctgtttcttcttttatcgagggaacacagctggactctatttcctagccttcctttgcaggaggatgtggccagtgaaatgtgggcagaaagtatgtgcaccacttccaggtatggttgacagaaacctgc

SEQ ID NO: 404269 - DNA, 607 bp, Homo sapiens
agctctacagatttcagatttgccaacacccacaagcatgagagtcaattccttaaaaatcagacaacgaatctcaatctcttgctttctctacatatcttattggttctgtttctctgcagaaccccgactaatacagctatctatattaatccactaaacactggctrttcaaatatccctatgggaaaaaaatagaaaaaataaaagaagaaaaaacattcacagttgataccacaggaatgctaaaaacaatgtttaaggataaaatgctgttaagaaaaccaaaggttctgagatactatcagagagtgtctactattccttggggcctgcaaatgaggtcatatgtatcaacaacatcttctcacaagagaagcgtcatccatatttttccatgtacttgacagtctttaatttgtctctggaaataattatggaaaaaacttaacaggtgtttcaaataatatataattttaacaatttttaccctgttttgtggtcccttcttggggaagaaagagcataacaggattcttcataaaggaactaatagcttttccaaaagaatgcaaaggcgacaaagcaataccttgcccgacttgct

SEQ ID NO: 404270 - DNA, 603 bp, Homo sapiens
  misc_feature (1)...(603): n = A,T,C or G
actatgttcaaaaatatcaagcagaaaaggagttaattgcatggactgaaccaatacaacattaaaataatctttctatgactttttgcttgaaacttgnctgatcctttggtttttcagtcaagaaaacttgttttttcttttgagctatttacagcttttaacaatgaagtatactcctgtgagcaaaatttggagaatgtttctttctcyctacctggtttctccagaatttggaaactatttgtgagtattcttaaattatggcaatatagtcatttgcataagtacaataagaatctgttttataggagcacagttggagacgctggttactttaccaaggctttgactgaaatggcattcttttaaatagaaacagactgctttaaggaatcagaggtgatttatagagccaataaaatcccttgaaaaaactggtcctcacataccttctctacccagtccctgtacaggagtcctaacctgtggtaagtaaagaatgccactttctaacaagcccaggagccccaagttaactttggacctccataggagaggaattcatccaattcatacaggtatttgcaggcacaaataaat

SEQ ID NO: 404271 - DNA, 603 bp, Homo sapiens
  misc_feature (1)...(603): n = A,T,C or G
actatgttcaaaaatatcaagcagaaaaggagttaattgcatggactgaaccaatacaacattaaaataatctttctatgactttttgcttgaaacttgnctgatcctttggtttttcagtcaagaaaacttgttttttcttttgagctatttacagcttttaacaatgaagtatactcctgtgagcaaaatttggagaatgtttctttctctctacctggtttctccagaatttggaaactatttgtgagtattcttaaattatggcaatatagtcatttgcataagtacaataagaatctgttttataggagcacagttggagacgctggttacyttaccaaggctttgactgaaatggcattcttttaaatagaaacagactgctttaaggaatcagaggtgatttatagagccaataaaatcccttgaaaaaactggtcctcacataccttctctacccagtccctgtacaggagtcctaacctgtggtaagtaaagaatgccactttctaacaagcccaggagccccaagttaactttggacctccataggagaggaattcatccaattcatacaggtatttgcaggcacaaataaat

SEQ ID NO: 404272 - DNA, 567 bp, Homo sapiens
gtgttctggtaaatctagtgcgcgttcccacacctagcacacagacctcaaaggagcagacagacctgggtccagaccacccctggtttcacaagcttcagaggccttgaatggtatttaacttccctgaccatcgttgctcttggatggaatggagataataataccttccttatgaagaaaataggcaaaatcaaattatcacttaagattcccttcagcttttacaatataacctttagtgtgggaaaatcaggcatgtaacaagtagaccaatatctgaacaccgatgcattgagattccatccaatttgggcaccaaatcaatcatcaacttggccttggatgaccctgagaactcagattaaggttgaagagaattaatatgtgtaccaggcttgccaatgtaacaaacacccttatgcattttgacttatttaatccaaacaacaactccttaaaagaggttttgttattakcctcagtagaagaaacctgcttctcaaggaatttactagcccgtgaacacaaacgtggtcattctagtggaaaatcctgcaatctttg

SEQ ID NO: 404273 - DNA, 538 bp, Homo sapiens
tcccagcagctgctctggaggaaggaaaaagcagacattctgaatgtatcatacatacaatgcaatattgaattggaggttgctaatgagcgagaactcttttattgtgtagtctwcttccagtgaggtctagctcttaattttcagtgggcgtagcaggaagtactagtgtaaaaaataaaacatatatattactaatactgttgctatataaaacaatatttggccaagatggttaagatatgattcagtccttgttcatcaagttgctaaatattattcagtgagtggagtcaccatatggcataactgaattttcttgggagactgggtaaaatattgtgttggatatagaatttggaattgtgcatgtctctggtggatagagtctagatcaagctgcagactgctaatcccattaatccctcaggcaaagactctaatgcacgtggcaaatggaaatggcttagccctgcatgtagcactccacgagggcgagtttcttctcagaaactgaggaagggtgggcagaaccaca

SEQ ID NO: 404274 - DNA, 612 bp, Homo sapiens
tcatatgcaaaaatgaaaataatatctatgcatagagttgctagttagattaaaataaggaaattcatataaaatattgatcctagtgtctrgcacaaggaaagtatgtaacagggataattagatatttaatgtcccagcattattctagtaacttttcacaatcacatcagacttgggtagagaagagaagtgtttatcttgacttttccattcagttgttttcaggagtaaaacttggaaaatgtagctcattttatttatttgtctatatatatataaggagaattataacattggtctgtcctactcacaggtgacttaaaaaatccaaggaagtgatagatgtagaaatgttttctccaatgaaaaggatcacaactgtatgaaaacagtaattacaatgctcacaactgttgagattgtacctagaaggtcaagtcttgagggttgcatgaaggaattgctactggattttgatctttaaatggccctctttagttgcaatatatttgggattatagaatataaaacacctttggaatatgtatgttttataactaggaaatatgtcttaggatccaaagacagacataacttatgcattgccac

SEQ ID NO: 404275 - DNA, 548 bp, Homo sapiens
ttcaaatattagattagaaacctctaaatctccttccccctgtgcctgtgtttctaagatttaaaaccttkgttatctgagaaatttcaagagcataaaaaccctccaattaattctcatcttggagacctcatataaaacataaaacatgcttcattgtcctggatcgtctctgttttggttaatctaatacttcatttaagttatgtacttattttcatctctttttcctaaggatttgagaatttaaaaattagaaagaaactgaaaaaacagagtaaggcagaaaactaaaatgagatgacggtaaagtcagtaatatagacataggaagactcaacatagttagaaaaggtgggttacctctctagctgtgggcttctcaatgatcagtgtttctaatagaagaagagtggctctgtggaagcttcctcattgcataggcatggaggcaatttaccacagaggaatgactggagctaggcagtgagcctgggcttgatgctacccagtgggcagataaccgccttggagtcagagccatctcc

SEQ ID NO: 404276 - DNA, 548 bp, Homo sapiens
ttcaaatattagattagaaacctctaaatctccttccccctgtgcctgtgtttctaagatttaaaaccttggttatctgagaaatttcaagagcataaaaaccctccaattaattctcatcttggagacctcatataaaacataaaacatgcttcattgtcctggatcgtctctgttttggttaatctaatacttcatttaagttatgtacttattttcatctctttttcctaaggatttgagaatttaaaaattagaaagaaactgaaaaaacagagtaaggcagaaaactaaaatgagatgacrgtaaagtcagtaatatagacataggaagactcaacatagttagaaaaggtgggttacctctctagctgtgggcttctcaatgatcagtgtttctaatagaagaagagtggctctgtggaagcttcctcattgcataggcatggaggcaatttaccacagaggaatgactggagctaggcagtgagcctgggcttgatgctacccagtgggcagataaccgccttggagtcagagccatctcc

SEQ ID NO: 404277 - DNA, 530 bp, Homo sapiens
acagatggcaagctacacaactccagagtcagaatgtgccaggtagctacagatgaaaggttaaatatctccacaggttgctactctatgttcaccttatcttatgtaaagtgctgatttactgagcctgagacaaatacatgattgatgattctcctagctgctccttttcacttgtaatgtggattcagtaatgttaccataccctccctctttcccctccagccctcttttcccctttaaatattggagccttcaaaaccatccttagagaaaggaacagacctgtctcctggtcatgtcatttaccttggcaaaataaacttctgaattgattgagacctgtctcagatactctttggtggacagggccatgctgggtatttttaagragctgaaacagagtgaacagtagacaggactggtgatgcatctactcttgatgcatccagtagcctctctagggcccaaggcaagaggtcctgttcagggctgcctccaagccagttctccttctgtgtgggcctcac

SEQ ID NO: 404278 - DNA, 469 bp, Homo sapiens
ctgctgcgttcatagcatgctaggcagacgattttacatgttctctaattgtttcatattgatttcttggaggaaagagccatacctgacacttgattaattagtgattttcatccatttattaagccttttgtgattacgtgctttgttccaagctctgccctggataccatggcttttgataaacgagagattatcctggcaattactatatgagtcacagtgcagctggggagaggaaaagcgagtccacaatgaccrtgccgtgcaataaggtctctagctcagagcagtatgagaacgaagagtgatcatcccaaataccagggtgagaaggagagggtcaggacctcaggcctgcagaagaggctcagaggaagtgacaatcaaatgagcctaagtaaaggagggaaagttgatcaggtatggcgttccatgaaggggagccggtatgcttagtgacaggtac

SEQ ID NO: 404279 - DNA, 459 bp, Homo sapiens
attttcttcccccttaagctggatattctcttgtactgtgtttggcacaaagtatgcgcccagccaaagtttgtaaattgacaggcctgcataggagcagatatactaaatctatgttaattgtgtatatttctggtctcacgagcattgcgaaatgaagagcaatttctctttgttttctgtgtgaccttgaacaaatcacttaatgtctttaaatttaattgcttccagtgcacaataatgcagtaccacccatcacacttaagattataggtaaaattaaatgaaagaatgaagcaaaagtgcctcatagagagtatacaaactgaagcatcaccaygatgatcaaggttgcaaagggaccacagaatcaggggactttagaatcagaaaaaccatgaagtcttctcttttagtaatattgaaatatttttttaaagggtagcattccttttcata

SEQ ID NO: 404280 - DNA, 627 bp, Homo sapiens
cattttgcaagctgcaaagtgatgtcaaatgttcggggttatttatgtaggaaaaacctgcttagactagatgacaaattgatgcctagaaaatgaagccctccttgacagctaagattcaaaatggccctggattttgtattcagtttaatgtttggttgagtgggatgtttgaagtttctgttggactttatataataaaccaatgactgttggcaaggtagccacagaaacaagccccaactagatgtatatttcaggatctagatatatctgacaaatgtttctaaaggtggtccttgggaatcttgctggaagagccattcaaaaaaacacgttacagctcctacgtcttctgctgaagrcaatgaagtccagaaaaatttaatgattttttagggataaaataggaagttggtggtaaggccaagacttgacccatatctgttacaggcagctggcaactcctggatcttcttgctctcaattcagttgtttgtttgattcttccactttcccttatggcatagctttttaaaaaggttttttaccctggactggcactgggaatgagctatccaaatactttgctctctcaaataaatatctgtctatgtttatatctat

SEQ ID NO: 404281 - DNA, 627 bp, Homo sapiens
cattttgcaagctgcaaagtgatgtcaaatgttcggggttatttatgtaggaaaaacctgcttagactagatgacaaattgatgcctagaaaatgaagccctccttgacagctaagattcaaaatggccctggattttgtattcagtttaatgtttggttgagtgggatgtttgaagtttctgttggactttatataataaaccaatgactgttggcaaggtagccacagaaacaagccccaactagatgtatatttcaggatctagatatatctgacaaatgtttctaaaggtggtccttgggaatcttgctggaagagccattcaaaaaaacacgttacagctcctacgtcttctgctgaaggcaatgaagtccagaaaaatttaatgattttttagggataaaataggaagttggtggtaaggccaagacttgacccatatctgttacaggcagctggcaactcctggatcttcttgctctcaattcagttgtttgtttgattcttccactttcccttatggcatagctttttaaaaaggttttttaccctggactggcactgggaatgarctatccaaatactttgctctctcaaataaatatctgtctatgtttatatctat

SEQ ID NO: 404282 - DNA, 551 bp, Homo sapiens
gtgccattgtgagtagcatgatgaaaccttgtgctgccttgctctctcctgcccagcacttgattcatccctctgtccaatgtatccacactgcgtatgctcccggcctgtgagtcactcagtagccatcccagctctcagaatcactgtcctggtattgcagtacttgtgtscaggaaaccttgtttcgcttaataatggcctcagagtgcaacaatagtgaaactggcatattgtgatcaaggttctattttattattgttgttaatctcttactgtgcctaatttatgagctaaactttatcataggtatgtatgtacagaaaaaagtgtagtatgtatagggttcagtaccatttgcagtttcaggcatccagtgggggtcttagaacatattccatagaacatattccccacggaaatggagggactactgtattacccttccacttatgccataaaggtcagattaaaaggaaaactgtcttccccaaaactacacatcattttgagaataaggaattgcaacatatctagttctatataaaatc

SEQ ID NO: 404283 - DNA, 568 bp, Homo sapiens
gatgtcttaaaaacaacagcagcagcaaaaatcaaatcacaggagatcagtggggycttttgaaggcttctaaaggagtctgtataggaaactcggtgctattgctgtgtgcaagccaatcctacctgggatgcaagcgttccttggaaaacaaccttctgagtctaagtagaagctggtgcctgaatctttaaattactttgtctttgtagttaaagaaggatttgtttttctttagaagcaaggcaacatcacaaatcctagctgaccacaacattcccaaagcctgaaaggcactctccggcaggtgagccagttgatcctggggtcccaggctcagtcacctagttaacactcatggccaaacattaaccacccaggctgcgctgtgctgtgtgctgggtctctgccttcaaagagctgcttccagctgggtggagagaagacagggccacagttacaggacagtaaggtcagtgctctgaaggcatagagaatggatccactgctcaacctggaacagaagcatgggcagggaagactttttagggcacattaaagccccagg

SEQ ID NO: 404284 - DNA, 644 bp, Homo sapiens
tgatttatttcccattttttatcttgcctcttttgagagtcactgaatgaaagaaacctkaattaccatcaagctcattgtattagtttgctagggctgccaatagcaaagtactacacactggtaacaacagatatttattgtctcacaattctggaagccataagaacaagatcaaggtgttggaagggtgggctgatttggatagttgtgaggaagaatctgtttgatacatttctcctagtgtccagggaatctttgacattcttatgatacagaagctagaaagaaattatttaggcagacaataagggcaacagagtcctcagtggaattccccttttaataaaaaagcatctcccaaatcatttcttttctaacaaagagcagactgaaaaatcgagctgcagacatagataagcaagttggaagcttgcatgggtgaatgccagcagctgtgccaacagaaaagggctacttggggaccaggtatgttcaacatggaggctccatcttcccttttccttgtcaccatgtgtacagtaaagaaacaggcaacatggtactggccaggtagagaacccatctgcataattaaagattaggccagctttttgcaccctatgcaaatggcacacctggtc

SEQ ID NO: 404285 - DNA, 617 bp, Homo sapiens
gtctctgctacggtatattctgtactcaccccaggccagctggattccagcaacatttttcaataaactttctaacagtcaacttaagttccaaacttaagcagtgcaaattctgctggctttgagtcagatattattggtaatatcactgaatgcttcagtgaccttggacaagtcaattgatctaactgggtctatgttcttatctataaaatgaagatacttatctgccttgcctaactcatttgactgctatgtaagatgaaatttgaaaatgtgttttgtaagctaaaataatctcatccaaatgaaagagaggcagaaccatcaaccatcaatgaaagaatatatatttttgtttgctttttacttacttttgttttgtttttaatgcagtgcaatttgaaattcagtgggttttcttctctttaaataaaattatcattggaattagcatacttagaaaacttggtaaagatcttgaaaaygggaaattttatgtaagttgtaacctttcattcgtcacttcatgctaaccatgtactgaagccctattatatgtcaaatgtattctgctgagtactggagaaagatgaataagacacagttctgcttct

SEQ ID NO: 404286 - DNA, 567 bp, Homo sapiens
atatttttgtttgctttttacttacttttgttttgtttttaatgcagtgcaatttgaaattcagtgggttttcttctctttaaataaaattatcattggaattagcatacttagaaaacttggtaaagatcttgaaaatgggaaattttatgtaagttgtaacctttcattcgtcacttcatgctaaccatgtactgaagccctattatatgtcaaaygtattctgctgagtactggagaaagatgaataagacacagttctgcttctgagtgagctcacaatcagatgagagggagacagagaagtaaccctacaatcacagtccagtgcactgagtcctgtgaagggaatgtgaacacggtgcctgcgggagtgatcaggagagctgccaaacctagcccaggttcagggagccgaagtcactgaaatacacataggagttaataaagctaaagaggtaggggaggccgggcacggtggctcaggcctgtaatcccagcgtgttgggaggccgaggcagatggatcatgaggtcaggagttcaagaccagcctggccaggatggt

SEQ ID NO: 404287 - DNA, 601 bp, Homo sapiens
ggtggattgttgagggggataaaaataatatgtcaggtggctgggaccccaagtttaagtttgctgttcactagccttatgactataatgtgtgcacttggcccttttgaattgcagttttctcttcaatgtagtagggataataatacctacctcattttttttagattaaatgtcaaaattgttcataatatgttaaatttgctagcttagtatcactgactttaacrttaactaggtaaggaagaaactacccaaatactggactctagccaagaaatacacactatctttatcttggttttaatgagatgctctcgtaatcattctatttgcatagccttaagaattaacaatgcaattcaatggtaactgactctactgtggcaatgtaacagcatcatcgattagtacaatggaaaagtaagattattcttttaaaatttagtcttgatgaccacttggcatgcctttccatgcatgccttctccctgagctgagataagcaaaaaatgccaaacaatagggagtattggtgagacatactggctttggcaaggcagaaaaaaaaaaaaagcactagtaattcaatttagactaa

SEQ ID NO: 404288 - DNA, 601 bp, Homo sapiens
ggtggattgttgagggggataaaaataatatgtcaggtggctgggaccccaagtttaagtttgctgttcactagccttatgactataatgtgtgcacttggcccttttgaattgcagttttctcttcaatgtagtagggataataatacctacctcattttttttagattaaatgtcaaaattgttcataatatgttaaatttgctagcttagtatcactgactttaacgttaactaggtaaggaagaaactacccaaatactggactctagccaagaaatacacactatctttatcttggttttaatgagatgcwctcgtaatcattctatttgcatagccttaagaattaacaatgcaattcaatggtaactgactctactgtggcaatgtaacagcatcatcgattagtacaatggaaaagtaagattattcttttaaaatttagtcttgatgaccacttggcatgcctttccatgcatgccttctccctgagctgagataagcaaaaaatgccaaacaatagggagtattggtgagacatactggctttggcaaggcagaaaaaaaaaaaaagcactagtaattcaatttagactaa

SEQ ID NO: 404289 - DNA, 375 bp, Homo sapiens
ggcatgctctgatttctgttttagaaagattactctggagatgtcttcaattagttatgtactggaatcagtgagaggcagggtttcccaaacctggctgaaccatcagaattattcagggaacttgtactcaattcagattcctagacccctcctactctgagctgagtccagggatgtggcttttgaacacgctctccaggtgattctcatgaagccatggcaactgtagtgggatttatgaagcctcccaaaaagagatgccagagtccttagccccctaacctatgaatgtttacctggtttgaaaaaaggtttggctgatgtatttagagatcrtgagagaagcagcttctcctgggttttccaggtaag

SEQ ID NO: 404290 - DNA, 480 bp, Homo sapiens
cacaataaacatgtagataaattcttcaagattttagagagaaattcatcaattccttgcgggataccattgctttcctttggagtaagtaggcaggtttctttttcttggatctcataccaataatttcatgtcaagaatattagtttactctggtcattactattatttttcaatttcctgtgcttaagtgtatagattcatttcactcagtcctacacagtgtcttctgcttgctgaatttgaagcgatcctgtccctacaatttcttgggtagtctacaatccctgccacagcckacccacaggagtgctattgcccaacagtgttattgtgccagtgactggctatgttccagcgctttgttgttacccttactattcagtgaagccagagcttagaggactaatactactcaagaaatatcacgtacttaagcctgtggtaaatgtatgtttctcaatggcaaaagtagtcaaa

SEQ ID NO: 404291 - DNA, 480 bp, Homo sapiens
cacaataaacatgtagataaattcttcaagattttagagagaaattcatcaattccttgcgggataccattgctttcctttggagtaagtaggcaggtttctttttcttggatctcataccaataatttcatgtcaagaatattagtttactctggtcattactattatttttcaatttcctgtgcttaagtgtatagattcatttcactcagtcctacacagtgtcttctgcttgctgaatttgaagcgatcctgtccctacaatttcttgggtagtctacaatccctgccacagccgacccacaggagtgctattgcccaacagtrttattgtgccagtgactggctatgttccagcgctttgttgttacccttactattcagtgaagccagagcttagaggactaatactactcaagaaatatcacgtacttaagcctgtggtaaatgtatgtttctcaatggcaaaagtagtcaaa

SEQ ID NO: 404292 - DNA, 556 bp, Homo sapiens
tttaaatttattgatatatgctttgkggttcagtaggtgatctgctctatttgtctaccaagatgctcatcaaaaaattctttatctttttattattatttttttatttttagcatttacacttgacttttataatccatatctccagtgaaatttcctgtctgtggcatggtaggataatggctctctaaagatgtctatgtctcttggagctgcttcttcctctctctgccctgtcaaggatgaaattagccttaggtctcttgtttcctagggaggattggtatctttttacatgtggttcattacactgctctgtgatctcagctaggctgaaataataaagctgtgatttttgtcagttatccaacttcttctcattcttctgatgaagataatgctctcatggaaatttttacatcctaataagatgaagaaagattacatttaagatttaattcatgcatttgattgtattttctattgacatccagaactaattagaaccttagccgaccataatactcacaagactcttagaatgattttacttttt

SEQ ID NO: 404293 - DNA, 518 bp, Homo sapiens
acatttgatattataaaatcataatgctattaaacattcaaattatataacacaatcttggatgaagcaactaaaccatattaaatttgctgaatttaatgtgcatgacagccagatggctggcttctcctggtgaaagcctgacttcaacatgttcacatcaatgaaaatgtgatcaagcagatgatcgtaaattaattctcacaaaacttagaatatatgktatgtttgtcctcattttataaattggaaactgaagatataaaatggacttcttcatgatcacagagaaattaaatggtaaacccagtgtttgaacatagatctttcttttccccaaagtcctatatttcctactgtattgtgcattccttaaggatagacccatattcttactgcctatcatgagccatgcattcatctctaatcctaaagctggcaccacaaggtagagattattttaaaatgaacacatacacacacacacacagttcttttcaacctattccaactctgag

SEQ ID NO: 404294 - DNA, 594 bp, Homo sapiens
ctttcatcatcagtacattttgtgttctgtccaagaaatatttgcctactcyaagattgtgaaaattttctcctatgcttttttttaagaagttttatcatttttagcttttgtatttagatctctcaaccatttttagttaactttaagtatgatgtaagctgggaaatttagagtattttttccaccaacacatccagttgtttttacatcatttgttgataagattattctttcattctcttacttaggcacaattgtcaaaatcaattggccatatgtgtgtgggtttatttctggcctctctagtccgttctattgatttgtctatctttatgccatgaatatacttgattattaaagcttcatattaagtcttgatatctggtagtacaggtcttacaactttattctttttcaaatgtatttgcctctgctaggttcctcatttgcatttcacttttagtatcccttcatcaagttgtacaagaaagcctgctgcgattgcattgaatctatagatatctttgggaagaactgacatctttacagcattaaattttctaattcatagacatggtatatctctccaag

SEQ ID NO: 404295 - DNA, 594 bp, Homo sapiens
ctttcatcatcagtacattttgtgttctgtccaagaaatatttgcctactccaagattgtgaaaattttctcctatgcttttttttaagaagttttatcatttttagcttttgtatttagatctctcaaccatttttagttaactttaagtatgatgtaagctgggaaatttagagtattttttccaccaacacatccagttgtttttacatcatttgttgataagattattctttcattctcttacttaggcacaattgtcaaaatcaattggccatatrtgtgtgggtttatttctggcctctctagtccgttctattgatttgtctatctttatgccatgaatatacttgattattaaagcttcatattaagtcttgatatctggtagtacaggtcttacaactttattctttttcaaatgtatttgcctctgctaggttcctcatttgcatttcacttttagtatcccttcatcaagttgtacaagaaagcctgctgcgattgcattgaatctatagatatctttgggaagaactgacatctttacagcattaaattttctaattcatagacatggtatatctctccaag

SEQ ID NO: 404296 - DNA, 597 bp, Homo sapiens
tgggttaggtgtctttcattcttaacttcattccataaatatttcaatagttaacatttattttcacccatagtcccaagtacrttaacatatgtagcattctcaaactcatgagatactttccttcccacttttcagataagtaaactgaagcaccaggaagtgtggtgactggtgcagggactaccagtaggaagtggtggaactggagcttgaactcaggtttctctctcaagcatgcacacttcctatagagggtgctaccttgctggtgcaattaataagaattataaagattaaaagagaggaggtgaaattttcattatttatagatgaaagccatacaaattaacaagctactaaaacaaatgggagagctcagaaaagttgccagaccaaagatttttaaaaatcaataacatttttcaatagtaaataaagcattagctaacataacacaacagtaaaacaaaccagcaacacaaccttccccagtaggagcacgcttgctgcaattaaatatggtttatttgaggattgtctggatggctcaacatcagaaaatctatcaaaataatcttaaggatataggaaaag

SEQ ID NO: 404297 - DNA, 509 bp, Homo sapiens
tgcagttatggaaaaaaagtgcattgttataatgctttcaagtatgtgttacttaacttggggcagactcttggggcgaaggtgcataagagctgaattagagctttttattaaaatataaaaatatatttttaaaatattttggttacctcttgttgggtgtttgctggagaagctrgcttgctatcttcctaggaacattggcccatattgataaaattgaagaaatatactggcatagggtgtaaaagagagaggagcataactggctttaaagcacattcttaggagctcttatttattctccttttagaagctcaggaagcaaacaggtatagacaaacagctatagcaatttctcagggaccttccatttgggaatcagatgggtctaaatgcccatcctatgtcatttatggtacttgtgaatttcattctcatgctcctgcaggattcatcaattgtggttgttattgatggaagcttgtttcctggtaggagtggggaaa

SEQ ID NO: 404298 - DNA, 550 bp, Homo sapiens
ggattggggtcctatttttagcttccttagaaaaaaagattatcagccaagaattttgtatccagggaaactaagcttcataaataaaggaaagatagagtatttttcagaaaacaaatgctgagagaattcaccactaccaagccagcamtataagaatgctatttataaaaggagccctaaattttgaaataaatttttgaaatacaccaaaatagaacctccttcaagcatgaatctcacaggacctgtgtaacaataatacaatggaaaaaacacaggatattcaggcaacaaatagtatgatgaatagaatagtacctcacatctcaatactaacattgaatgtaaatggcctaaatgctccacttaaaagacgctgaatggcagaatggataagaattcactgaccaagtttctgcagacttacctaacacataaagactcacataaacttaagataaaggggtggaaaaaaatattccatgcaaatggacaccaaaagagagcaggagtagctattcttatgtaagaaagaagaaactttaaa

SEQ ID NO: 404299 - DNA, 563 bp, Homo sapiens
gtctataactcatagaaagaaaaagctaacacttatttaggtattaagcaagatacaaaggtgtatccaatagaaatacctttttgtccacaagaacatatcaaatctaatattcctgttacatatgatctaaatcactcattgattggtttatttaaagcaaaccttccttatcactctcattttataattattccctttgtctatattatctcagtgcttcaaattttttataaaactttaccgtaatcttcatcatttcatccaaagcctcttaaattccctacatcccttttagttgtggtatccttgaatccacatttttcaaaaaaaaaaaatattgacttgggattgagcaatgccatgggtgatataattcttaattaggccttacgaagctacttttgtaaacaatgaaaatttcattcctggcctcttatagcagtgaggctttacaatgtcacaatggattttcactaccctgctcaactacatcctgctggtataagtaaaagaagactaagtgcttagccagaakactccaccatagagtgtggttgcca

SEQ ID NO: 404300 - DNA, 582 bp, Homo sapiens
atcacctgatgtcgggagtttgagatcagcctgaccaacatggtgaaaccccgtctttacaaaaaaatacaaaatcagccgggtgtgatagtgcatgcctgtaatcccagctactcgggaggctgaggccagacaattgcttgaacccgggagamagaggttgtggtgagccgagatcatgcctttgcactacagcctgggcaacaaaagtgaaactccatctcaaaaaaaaaaaaaaagaagtattttatagctctgcttgctgcctgaatccattttctgctgctataagagaacaccacaaacttaatttacaagggacacaagctcatttggctcacagttctggaggctgggaagtacaagtgcatggcactgacatctgctaagggtcatcctgtggcagaagggtagaagtgaaagcaagcacatgagacagagaggaaactgagccaaaatcaccctttaataaggagcccactcatgcaataacaaactcactccctccataactgcattaatccattcatgagggccctgtctaatgaaagtgcctaaagagatacctaattacctgttaaa

SEQ ID NO: 404301 - DNA, 606 bp, Homo sapiens
gattgcagggtacaggaggaaaaagagaatgagaatgactctgagtcttttcctctgaacacctgagaagatggagctgacatcaactgaaaaaagcaagccttggacacagctgatgccttgaggagaggggacaggtcaggagtttcagttctggacatgctgagtttgaaaggctcattagatatgcacaaggaaatatcaaatatgccattggatacataaatctcgagttcaggaatgtgtctgaactggaaatagatatgcaactcatcagagtgctcatgagggagtgatgtaggtagagaaaaggaccaaaacytgagcatgggatacttcagtattaattaggtcaaggattataaaagaaggaccaggaaagaaaaatcaaaaggaatgactactgaataaggggaaaatgaagagtatcatattctagaagtcagtcaagggaagtatatccagcaaaagggaatgatggacacatcaaatgcactgacaggccaagcaagacacagtttcagcactgaccagtgggcttggcaacccggaggtcatgtcagatgactctgacaatagcacttttaggggttagatggaggcaga

SEQ ID NO: 404302 - DNA, 541 bp, Homo sapiens
gtcaaggattataaaagaaggaccaggaaagaaaaatcaaaaggaatgactactgaataaggggaaaatgaagagtatcatattctagaagtcagtcaagggaagtatatccagcaaaagggaatgatggacacatcaaatgcactgacaggccaagcaagacacagtttcagcactgaccagtgggcttggcaacccggaggtcatgtcagatgactctgacaatagcacttttaggggttagatggaggcagaagcctgcctgggatggctgacaagaaagtagcaagaaaaggtttttaaratgctagtgcaggcaatgtttttaagaatcctgctccaaaagggaggaaggaaagggggttgttgcaggtggtaagtggtggaaataacaacatgtttgcatgctgatgggactgacttattagagagggggaattaaggattttggagggggtgggaagtgccagagtaatgttttctaataagcaagtgaagatgaggatgttagctcacctccaagagggggcgagggctgagt

SEQ ID NO: 404303 - DNA, 633 bp, Homo sapiens
gcagtgggcacttgtgcatatgtctcccaagccaccttctctcctttgaccacttagatctggatcttccttctagccttaagcagcgtcctaagagtggtgtcttctcttcctctctgtcatccccatgctgccctggttcccattagtccttaccttccccaggccctaaaagtagctctttcccagggctggagttgccccggccttgggaacaccccagcttggggactagtgaggccccaaggggtgcaggtactaggtgggacttgatgtgtctctccaacaggagcagagggacactggaaaatcactggccccactggaggtgcctgagctaggaagatgaaagaggatgacacaggggactgtctttttttctcacacagctggcagcwctggcctggggtcggagagacaaatgtgttgggcgtgtgccttgtcaaatgaattgtctttctttctctctcatcaaatatttacagagcatccctatcaccaggtgctgaagccacgatggtgagcaaaacatgctcttcatcctcatagagctttatggaggtaagagttattgggagtttggtcttggtgagatttattgggagggaccatattttggatttggattttcaa

SEQ ID NO: 404304 - DNA, 416 bp, Homo sapiens
ttattctagttagcagctcctctaaccttttatcaaggttcttagcttctttgcattgggttagaacatgctcctttaccgcagtgaagtttgttattatccaccttctgaagcctacttctgtcaatgcgtctatctcattctctgttcagttctgcgcccttgctggagaggtgttgtgatcatttggaggagaggaggcactctggccttttgagttttcagcattttttcattgattctttctcattttcatgagtttgtctastttcaatctttgaagctgctgacccttggatgaggtttttgtggggacatttttgttgatgctgttgttgttgtcttctgttcgtttttctttcaatagtcagcttcctcttctgtagggctcctgctgcggtttgctggggggtcac

SEQ ID NO: 404305 - DNA, 571 bp, Homo sapiens
ggaaggttttctttcttatttttgtaacaggttcttttttgttgttctattattattttttttttttttgagtggtgagtagacgttaaattttattaaagacttcttggtaaatttgctttctcttttcttcttctgattgtcctcagtaggtgtttataaattttatttgtcaaggctttgtcaaaggaccaatttgggctttgctaatcctttgtatggaatttttgacttcattttctcctttccttaccttttaatttactgctaattttataatttcttaagataaccatttatacaattattctatttctataaaaaatgtcttctgatcatggctttaatcacatcccacaaacattagtatgcaatattttcattatcatttagtaaaaaacactttctaattttcattttgagtcttgtttaaaaartgatttatttagaagtctattgcttaatattctaaacacatgaagattctctagttgtttttttaaaattatattttagctttattccattctacttagataatatgctttataattccagtactttcaaatga

SEQ ID NO: 404306 - DNA, 499 bp, Homo sapiens
gtcatgcaccaccatgcctggctaatttttaaaattttttgtagagatgggtttctctttatgttgccaagcctggcctcaaagtcttgggctcaagcaatccaccctgttcggcttcccaaagtgatgagattgcagscatgagtcaccacatccagcctcaaatgcttttttgtactttaatgagatcatatatttttattaatatggtgaatgatactggttattttttacattttaaattcactttgcattcatcatataaaccccacttggtcatggtgcattacccttcttataaattgctggacttaatttgcttataccgtgttaaggatttttgaatgtatgattaggagacatattggtctgtagttttattttttaataatatccttggttttagtatcagagtaatggtgaccacatactatgaggtataagtattcactcttcctttattcagtatttttttttaaatgtttgacagaacttaagc

SEQ ID NO: 404307 - DNA, 499 bp, Homo sapiens
gtcatgcaccaccatgcctggctaatttttaaaattttttgtagagatgggtttctctttatgttgccaagcctggcctcaaagtcttgggctcaagcaatccaccctgttcggcttcccaaagtgatgagattgcaggcatgagtcaccacatccagcctcaaatgcttttttgtactttaatgagatcatatatttttattaatatggtgaatgatactggttattttttacrttttaaattcactttgcattcatcatataaaccccacttggtcatggtgcattacccttcttataaattgctggacttaatttgcttataccgtgttaaggatttttgaatgtatgattaggagacatattggtctgtagttttattttttaataatatccttggttttagtatcagagtaatggtgaccacatactatgaggtataagtattcactcttcctttattcagtatttttttttaaatgtttgacagaacttaagc

SEQ ID NO: 404308 - DNA, 566 bp, Homo sapiens
gagtgttgaaggcataaaaaccaaagagtaaattttagttcatttaaaatggtccttaatccatcagattcaaactgctttcaaaatgctcatgctctcaagtttcaactacttatttttcaaattgtacaatgatgtatgaaaattttcatraagttttcaggtagcaggattttcatagaatgtaaccattacagatttaatctttgggctgtatctatttgtaaatgaccctgaaggttatcatgacaggtagtaatatgtcattttgctaaagcacaaatgtgaattttatggaactataaagctgttgcttgcagttaattaaattagtaagtttagtcagctgatcatgtggtatgtgcagctgaatgtagctttgctgttgttatttatcatctcattttatactcataggcaataatatggccatttaccaacaaagtaattttttcctagagtaatattcacatactggggagtcgggaaagccttaggacatgtcccttatgaatattaagatatataacatattaaataatgttatttagtcttatttttcaacc

SEQ ID NO: 404309 - DNA, 679 bp, Homo sapiens
aattagtgtaatccctacaacaagcttgtccaacccttggcccacaggccgcatatggcccaggacagttttgaatgcagctcaacacaaattcataaactttcttaaaacattacattatgaggatttttttttttctagctcatcagctgttgtcagtgttagtgtattgtatgtgtggcccaagacaattcttcttccagtgtggcccacggaagtcaaaagattggacacccctgctatacaaaaaattctctaattatttctattttgcagatggagaaaccaagctaaagaaagtttcagtaatatgaataagatcacatatatagcagtggagccaggattcaaacccaggccacttagctccggagactgtgctttcaatcactacactgtgtgagtctactcttagtccctattaatctcaatttctcgtggaaagtgacatgaaaaaaaatgattaagcaaaagagaaatatactatcttagattaaaggagaccaagactttgttatcaaggcaaagtcattcatttattattgctttataaatgaagttctttattttataccatagaatcagagaatcaactagctgtcacattcacatrtcaaactatttctaaaagagttgtatatggttcttagagaaatttaaaatgttgaagagccaaaca

SEQ ID NO: 404310 - DNA, 581 bp, Homo sapiens
aatagtaatacctgactcaaacaattgtcaggatgtttaaaagccatcatataattaaaacgtctagcatggtgtgtagcttataggttttcaagtaatggtagctactattagtattgttatttttgttaagttgcttttagcaaggattttttgtcaagaacacatgyatttgcatacattagaatatcttttaagagtactttgtctttgggtataatttatttgaactcttcagagtatatttgaaacataattatttctttatcagatgaagaatctgaggcacaaagaggtcaactggcttgcccaagggtacttggcaggtaagaattaggataatgctaagtcttctctttcttggccaataggtgtacactgtcccatatgtacttccatgtatgcctatggaagaaaatgtctaccaaattgatttttttacacatgtattttaggtctcaaaaacatcttctaccatattggaacagaaaaaaatgaagacaatgagcatatcctcttacacatgacttctattgaaatgtttccaaatcttaaatgctataatatttgctttgttcctt

SEQ ID NO: 404311 - DNA, 478 bp, Homo sapiens
tttttttttttctcttaacctctcttcagagacctcctgctactccatgtgatgatttgttctttaaacctatggcagagttgtcctcttgggtcttcctttcctcttcatcttgtatcttcttgaaaatctcatgatggattcactattttctctatttcatgattcctctttttaaatttagcgtctaacttccagtarctttctaataaaagatgcacggagggaaaattttctgagtatttgaaacttaaattacttttatttttactttcagcatttttttagaatacattgttgttaactacagtcactctgccacacaatagacctcttaaatttactctttctatctaactgaaattttgtatccttttacctttgtctccccagctacccacaactctgcccccagtaaccaccattcctgcttccttaagtttaactttttagatttcacatatatgtgacattatgc

SEQ ID NO: 404312 - DNA, 622 bp, Homo sapiens
ataaaatcctgtcattcacagtagtatggatagaactggtggacattatgttgagtgaaataagctgggaaacagaaaagttaaacaccacatattctcagtaagatgtggaagctaaaaaacagttgatctcatagaagtgaaaactagaacagaggatattggagtctgggaagggtaaggtgaaaggagagataggaagagatttgttaaaggacacaaaattgcagctaatcaggaagaataaggtctagagttctataccactacaggatgacaatggttgacaataagatattatatagtttcaagtgttccctacacaaaaaatgataaacgtttgagatgattgatatgctagttaccctgatctgatcactatgtattgtatgtatgaaaacatcactacatacttcataaatgtgtataattattatgtcagcttacaaaataattctacttttaaaaagaactttaatgaagcatgctttatggcttagttcaagtcaattttcctaaaagttccatatgtacataaaaagctttcaattattccaatattccatatatgttcaytaggtcaagattctgattcatgctaaaatactgtctatcgttactt

SEQ ID NO: 404313 - DNA, 517 bp, Homo sapiens
aaagtctctggatgttctcttttgattattttaaatccttcataatgtaggaagttgtttttttctgctgagatttatgttgaggaaggaactgttgataggatttccaaacggagcagaaaatatgaaatagttgtcaaggagagtaggagatgaaattgactcaggctctgtggtatgtttgcctggcattgttaagttcccatttaaggttgattgtcttgaatttaaagtgagagtagtcatgtatgggcttgcatttttctccagtcatgttcaacttcatgtattcagggtcagagtgggtagaggattggctataaccagtggtatgactttgccaggcaaatttaaaacagaaaaagagagtaaaggaaatagagaatatatgcaaagcatgattttcagctttattatrtaatctaaattgggtgaggaacagagtaaggacatcaagggagaattagggatgataaaagagcggtaggattaatgacttggaagttccagagggacc

SEQ ID NO: 404314 - DNA, 639 bp, Homo sapiens
gtccaaaacctggaaggggaactccatcagattttaaagctcatgaataatcctctttggctccatgccctgtcctccaggcctagcagagtgttggcccaaccccatccactgtgggtggcagtgtcacctttgagggcctaacttccaatacagtcatatgtgggagactaggggtgaaggcttcaacctacaaatttggggaaaacataattcagcctataattcagagatatgtcaaacaaatgtaacatgtccgtgtttggatcatgattcaaaaaaacagttaaaaawttataaaacaatttgggatttgaactttggttggatatcatatgatattaagggtattttaaatacttatgctttaaaataaaaagtcgacaaaggacagtaatagatgtttctcaaaagaagacatacaaatggccaagaaatacacgaaaaaattcttaacatcactatcagagaaatgaaaattaaaaccacagtaagatatcatcttactccagttaaaatggcaattattaaaatgacaaaaaaaaatatgctggcaagaatgtggagaaaatggaagtcttatgcagtgttagtaggaacataaattagtgtagccattatgggaaacattatggagtt

SEQ ID NO: 404315 - DNA, 551 bp, Homo sapiens
ggctaaacctgatctgaacatgttctgcaacatgtgttgtgtgtatggcctccctcttctgccatttatttggtgttatttgagaaccatttatgtgataaacaraagatatgcaagtgatatcaccagatcctgcataagagttgaggcataggcgtctcctgaagtgtttaacaggtgctcagggcaccttgggggaaaaggtaatggaaaaaagaggataaaaatcagaagataattaagcactgtcagatgtcctctgacattatttatgaagagcaccacagaatcactggagtgggagaggactgttcatcaactgaacattagtcactagaggctctgaaaagtttagcagaagacatgtcttaaacaaatgaaagaggttttctaaacagatgcaggaacacaggcctaagctagggcattgattcagttagcacacgctttctaggactgcgctcaccatgctacctgggatatgtgttatgttacctattatttaactatgagccaattaggaagatatacttggaaaaaatgcagcagga

SEQ ID NO: 404316 - DNA, 551 bp, Homo sapiens
ggctaaacctgatctgaacatgttctgcaacatgtgttgtgtgtatggcctccctcttctgccatttatttggtgttatttgagaaccatttatgtgataaacaaaagatatgcaagtgatatcaccagatcctgcataagagttgaggcataggcgtctcctgaagtgtttaacaggtgctcagggcaccttgggggaaaaggtaatggaaaaaagaggataaaaatcagaagataawtaagcactgtcagatgtcctctgacattatttatgaagagcaccacagaatcactggagtgggagaggactgttcatcaactgaacattagtcactagaggctctgaaaagtttagcagaagacatgtcttaaacaaatgaaagaggttttctaaacagatgcaggaacacaggcctaagctagggcattgattcagttagcacacgctttctaggactgcgctcaccatgctacctgggatatgtgttatgttacctattatttaactatgagccaattaggaagatatacttggaaaaaatgcagcagga

SEQ ID NO: 404317 - DNA, 618 bp, Homo sapiens
caaacaaatgtaatgattgcttttccaatgtgcacacatactttatcttcctcctatatccattttattatcacaattataatcacaatgacagcatgaggatatactcctaatcttcctttattctatatcaaaatatattgctaagccaatttcttcctttctttctgccctagaagaagcaaaccctatccttttcaggctaattcttgccatactactttttgactcatggagtatygttccatcagttacttccttcatcccggggagaagagactacctgtgggctttgatcttccaatgttttgattaatttttaaaactatttcattgtaagctaagaaaagaggaaaagatacaattctgaggtgacaataaaagtatcagaggtaacattctactgattacgagaatgcagaaaaaatgttttgagacatgatgcatgacttaagatgttttagtaaatatatttaacctacaatgttactctttttagatctaaccttgttgtataataccagaaatttctgaccggattataactttgcctagttccataatttcaatcctacccctaccctacacccttggtaccacaaggtggaatgaatgtta

SEQ ID NO: 404318 - DNA, 327 bp, Homo sapiens
gctggggttacaggcgtgagccaccgtgcctggcctagttgtatttttaatgtaatcgaaagtataaacatcagtcaaaaatcatgttgacatgactaaatggcaaatattttttattcacataataaaatgtccacataaaagcttcataacaatgagaagcatagagcatgytctctatcagagagcatggtccctattacacatctctattagatgtgtaaactaggcatatgcaacacttaacatatagtcactttaatacatcaatacaaatatctgaacgtagttttgcagagtgcatttcccaataatattctaaatagc

SEQ ID NO: 404319 - DNA, 531 bp, Homo sapiens
catttcattttaaaaggatcatttcttctacttttaatacatccctttttttctgtaataacattttaaaccatcaactggcagtgagttatagtttaattttaacatgtgaggtaaatgcttacttcttttcccttcaatcaccagttttcaagttaaggagttgaataattattgcctgcaatgatagcaagtgagtgtcttttccttctttctgccttccctctcaccgtcctttctttccttccctatttgccctcttgcattttctttataagcatgatgatattttcaggaatttttatttattcaatgcaatgcaacaaattacagttactaattctggtgcccaagtcatcccaaatgtggccagtgggagcasctttaaactggctcttctatccatttgatagattcctagcagtttttgaatacttccttgctttctgacacccactggcccatgttttcactttgtactttccatgtctgagacatagaatcagccatttctccaaggagaactggtcc

SEQ ID NO: 404320 - DNA, 571 bp, Homo sapiens
atgctactggcattttgggcaggacacttacaagttgtatgactagtttgtgtccttcaggaatttataatcttggctctgactattaagcgctctgcagtgtcattgtgacaaaggaaaacactttcatttattttcaaatgcctcctgtgaccagggaacccagtggcatgagaatattgttccaggactagacaggttggggaaggctttattaaatttaataggatctgtctctctcttgctatgcttaccgaacagattsactctggatatctcatcctgggatattcaatgcttaactacaaaactttttgtaatcatctaggaatgcagccttctagttacaaagtgtgggaatctcaaagcttgtaaaatattgtagtactttttaaatcattagaataaaaatatgttgtaggaatttttttaccctagttaaataattgcttacctttcctccaccacaatataaattgtagaggctatggctgaatgtgtttgatatttagaatacccaagatcatcgccaggtctaattttcaccttgaagccctgcttaaaatacata

SEQ ID NO: 404321 - DNA, 486 bp, Homo sapiens
atataaccttattcatactaaaaatgttaagatatttttgaaaagtataaagtgctgaaggaatataaattaataagttttacctgaggtcraaatgccaatatttgttttataataatttatgggtgaaattaaacaaaaaaaaatggacatttactccctttgtgggtacctaatggcatctatcatgagtaggagaaacactgcctctcagagtaagtcttggagaaatatcttattattatctgtgagtgacatataaaaggtgatcttgataaggggataagagctgttttcctgagacaagtggaagaaagaaagtcagagaggacttatcagagtaattgtgtattttgccccaaatttctgacatgatattagaggcagaaagtcacaaaattgcaatggccagcagccaaattgcatcctctacctagtagctagctgcaagatggtgaggagcttctatgtatgccacctcaccac

SEQ ID NO: 404322 - DNA, 584 bp, Homo sapiens
ggtaaatccactaagatgaggaaaaaacagcaaaaacgctgagaattccaaaaaccagaatgcctcttcttctccaaatgattgcaactcctctccagcaagggcacaaaactgaatagagaatgagattgttgaattcacaggagtaggcttcagaaggtgggtaataacaaactcctctgagctaaaggagcatgttctaacccaatggaaggaagctaagaacccagataaaaggttgcaggaactcctaactagaataaccagtttagagaggaacrtaaatgacctgatggagctgaaagacacagcacaagaactttgtgaagcacatgcaagtatcaatagctgaattgatcaagtagaagaaaggatatctgagattgaagatcagcttactgaaataaggcatgaagacaagattagagaaaaagaatgaaaaggaacaaacaaagcctccaagaaatatgggactatgtgaaaagactgaacctacgtttgattggtgtacctgaaagtgatgtggagaagggaaccaagttgaaaaacacacttcaggatattatccagaacttccccaacct

SEQ ID NO: 404323 - DNA, 662 bp, Homo sapiens
aacctacctttggacctcaaactttttgctggaaagttctttacccaatattattttcttgaccattctttttgctggaaagttcttgacccaatattattttctccttacttcctttaagtcttgattacattaccttttctatcagactatcctgataaaaaaggctatcaggctgtaatctaaagttccaacttgtatacccaaacacacccaatttccatatcaagctttatttttcctatttgcattgcacttaccaccatttaacattcttattgtctacctctccctccctaaggtcagagattattttattcactaacatattgaatacacttacaaaagatcttgtacatattaaatgctcaataagtatctgacaaaggaaaaactgactattgtttttgttatagtaaaatattagtttttactaagtcagaatttgtaataattcttacrgaatttatttgatatttatatattctattaaaaattgtgattcatttgtaactacataacatttcaaaaagttggaattggaaaaaagactaatctctttaagagaactgttttaagcaatttttattgaatgcatatgtagacaataagtaaaatgtttatttctagatgaaaacccctacctaagattttgagttact

SEQ ID NO: 404324 - DNA, 495 bp, Homo sapiens
cccaaaattggatttagtgctttagaaatagatatagacagatgcattttctagcacaatggttttccagataatttctgaggaagctttcagacctaggactccattatctaagtatttttagaccttggggatattcaggagagcagcagcaatgtaagggctaaaaacaagaaasgcatgggatgtattctttggttatggttagactgccagcactctggctatgggctgaatggcttaccaaagagacttatcagtaatacagcaaaaaggtagatgggttttaccaatgagagtttttcttctgaaacctcagaaataaacgactatacagacatctatatctatctatatacatacaatttttcctacatatagtttcaggaatgccttaaatttgtgtttttaataaagataaaactacaaagaaatagcatttttttcatcacctccttcttagttgcttccaaaattaatgattataggttattc

SEQ ID NO: 404325 - DNA, 546 bp, Homo sapiens
ataaaattgtgggaataactaatggttactaattattcctctgtttacatggcaraatttgccctctattattcatggatttttcagtatatgctatatctaaccagacactttcaatttttaaaatgatgctattctagtatttgcatttatttctctctctctaatatatatatatatatacatatatatatatatatatctcctactgtgtgtatatatggcctactatgtgctagatgctgtgctaagttctagacataaagatcgaataagatgacacaatcctcattttcacaggtgattcttactttcatgtgattctgctggaggcaaatataaaacagataattttataaataaacagttgtttaattacaatgctaacagactgtcaagggaaagcacaaggtttatgaaatgtcggggagactaattctaatactaacgttacacaaggaagtgggagccagatcatgcaaaggcttgtaagcctttagtggattttattttgaaatcaataattagttatcaggtaaagatact

SEQ ID NO: 404326 - DNA, 585 bp, Homo sapiens
  misc_feature (1)...(585): n = A,T,C or G
attggttcatattttctttcctagaatatcctccattttgttgtgaaagaaagtgtgactcttgaaaagtctgctaacgatgtaatatctayaagtcatttgctatttttgtttcttttgcctagatggccaaatattttttttgttttcgttaaaatccagtagttttatttgaatatgacttggtattagtttttctaagttgtatacggactcaagtatatggacttctctttcaatatatagattcaaatttattttatttaaggaaagttttttttgaattataggttttgtattggttctgttctctttggtttttctcttcaagactccttnnnnnnnnnnnnnnnnnnnnnnnnnnnnnnnnnnnnnnnnnnnnnnnnnnnnnnnnnnnnnnnnnnnnnnnnnnnnnnnnnnnnnnnnnnnnnnnnnnnntcaccatgtatttctcataagtgattttctcatcatctcagtgttcactgacttttttattccctctggtttaatcttcattttatgtgttttttttttttgagtactgtcattttatctctgaggttttctgatactgatttatat

SEQ ID NO: 404327 - DNA, 588 bp, Homo sapiens
gagacatgcattcatgaatgcatgtctatatgatgccatgaataccagcatctctttatgcaagtttctctcattaatactaaaacaatactcaagttagttacattccattgagctggccttgaattgcacacaggcatagaaaatgttgcttagcagatgtgatttcaggagcctggggaaaagcactttttcagaaaaacaacactgcaattaaaaagatgcaaccacctgttctttgatatttgtaatgttttaaaagtacacatggatatagattcaatgattagatagctctgaaagtaataaactgatttaatttatactaaataycaatggcagatattggattgcttttggaaagcaatggtgagaaaggacacaccactaggcacctctgaggaaaatggaaccatacaggagaaaaggactgtagaaaagggcttggggaggcaatataaattacaacatttgacacataattatacaaaattttgtatatttccaaattttaaactatgttgacattttgtcatattcatttcagatcatttttattttttaatggtgaaaattaatgttgaagtc

SEQ ID NO: 404328 - DNA, 583 bp, Homo sapiens
ttataatatatatttacaaatatattacaatatttcagaccatgattgactaagtaactgaaactgcaaaagtgaaactgcaggtaatgagggaacaactgtcctaggtttcagtctttcttcatggaggtataaccactttccagtttttcttgatttgtatgaagaaacagttttaaaaaaactaatgtgtttgtttcatgaaatacaattatgatttcaatggaaacataatgcttagcaatgtatgttaggaagatgttttgatagtgaggtccacttaaccatggtaatgtcaaattagagaaattgaaatttcatttctgaaagggatgatagtaaaaakagaatgcctttttaaactctttaagtttatttgagtaggttctgacctagaaaagaataaagttttttttcaaataattttcctagatgtgtaagagtcagatctaatcaacagatttttaattttaattcaaggagtatttattaagtgtctaccacctgcaagggtgtgtaccagatgatagagacagtggtaaataccacagtatagtccaggaactcttgcagattataggtt

SEQ ID NO: 404329 - DNA, 583 bp, Homo sapiens
ttataatatatatttacaaatatattacaatatttcagaccatgattgactaagtaactgaaactgcaaaagtgaaactgcaggtaatgagggaacaactgtcctaggtttcagtctttcttcatggaggtataaccactttccagtttttcttgatttgtatgaagaaacagttttaaaaaaactaatgtgtttgtttcatgaaatacaattatgatttcaatggaaacataatgcttagcaatgtatgttaggaagatgttttgatagtgaggtccacttaaccatggtaatgtcaaattagagaaattgaaatttcatttctgaaagggatgatagtaaaaatagaatgcctttttaaactctttaagtttatttgagtaggttcwgacctagaaaagaataaagttttttttcaaataattttcctagatgtgtaagagtcagatctaatcaacagatttttaattttaattcaaggagtatttattaagtgtctaccacctgcaagggtgtgtaccagatgatagagacagtggtaaataccacagtatagtccaggaactcttgcagattataggtt

SEQ ID NO: 404330 - DNA, 516 bp, Homo sapiens
ctgaagagccttgtgggcatgtgtctggacacacacacgtgtccatgctctgaccacaccctcaccaacacctccctcctaggtacccacataggtggcaccctccacctttagtaggacatgagacacgcatgggccttggaagccatttcaggccatttgggtggggaattctaggtctctgaacccagtgcgagacctggaaagggagcctccttgaccctgtgaatttctctccccatgagtaagggccagaagaagatctcccaaagtgtggctggcaagacacgggcctctttacaaatgtctaagactcgtattgggctcagctgaaaacagcatttatataagcatggcartgtacataataaatattaatacaaaaatgttaacatgaaattatgaagaggatgatggggatgggaaacatgcagtgaagagcttggtataaggggtaaggattaaagagaaataaagcctgatcttttatagtaggaagtctaaagataatgccta

SEQ ID NO: 404331 - DNA, 569 bp, Homo sapiens
aattgtccatttttatgcttaggttcaacaaactatggacagctatgtagaaatattattggataaaaagggtatgacctgatgctaatggactgagtggggaaaccaggcaaggcctgtcaggaggatgggactgagagacaggagggcaggagaaagtcaaagaaaaacttttacttctgaggtcttcatttttgggtattgttttttgacccccaacaccaggaagggaatarcaaccctatcatcagagacaagatggcaccaagaaagagtctatataacaaacctcatgaactagctcttctctactattagatttccaaatattggccttcctacaacttgccacccctaggagttcaaggtcccttttctttgtcttgtcacttctctgtaaatttatcttcatttgtctatatggtattaaggcctccaagcctagccattgcttttggggtttctcttctttctatgaagtctctcctcctcactctgccatgtgaaaattttaacaccaaatagaggcatacggccttttcttctgttcatctgtctgttgtcagttt

SEQ ID NO: 404332 - DNA, 614 bp, Homo sapiens
gtaccatatgatactatttttaataaaaacttctatttctggttttrtcttttagaaaaaaaggaatagttgagtgaaaaaaaatagctaattttattaactgcatgtgtcttcggctaaagtctagttgtttgaatcccagagctaaaaatctcacaaaagtcaaaactactaccaataaaaatagtgtaaatagaaatatcaccataccctaaaggcagcgggcattaaggctggaattgtaagtaactctatgtgagtatgaattcatttcccttttccccctaggttgttaagtattggtattacaaataagtaacggctcacaattttatgtatttttaaaaattatgagttttcaatataaaggtattaaaaacatgccaaccttgattagttgcaaaataaacaagtcactaatgaaaaaaaatctacttagttatcttccttcacaaacccttaggaacttctcagacagcgctcccacttatggtagaatcttaaggtatatatatctatatcgatatatatctatacggacatatgtttagatatctaatgtatatatctagatatccatatagatatatgtttagatatcgaatgtatatatc

SEQ ID NO: 404333 - DNA, 614 bp, Homo sapiens
gtaccatatgatactatttttaataaaaacttctatttctggttttatcttttagaaaaaaaggaatagttgagtgaaaaaaaatagctaattttattaactgcatgtgtcttcggctaaartctagttgtttgaatcccagagctaaaaatctcacaaaagtcaaaactactaccaataaaaatagtgtaaatagaaatatcaccataccctaaaggcagcgggcattaaggctggaattgtaagtaactctatgtgagtatgaattcatttcccttttccccctaggttgttaagtattggtattacaaataagtaacggctcacaattttatgtatttttaaaaattatgagttttcaatataaaggtattaaaaacatgccaaccttgattagttgcaaaataaacaagtcactaatgaaaaaaaatctacttagttatcttccttcacaaacccttaggaacttctcagacagcgctcccacttatggtagaatcttaaggtatatatatctatatcgatatatatctatacggacatatgtttagatatctaatgtatatatctagatatccatatagatatatgtttagatatcgaatgtatatatc

SEQ ID NO: 404334 - DNA, 614 bp, Homo sapiens
gtaccatatgatactatttttaataaaaacttctatttctggttttatcttttagaaaaaaaggaatagttgagtgaaaaaaaatagctaattttattaactgcatgtgtcttcggctaaagtctagttgtttgaatcccagagctaaaaatctcacaaaagtcaaaactactaccaataaaaatagtgtaaatagaaatatcaccataccctaaaggcagcgggcattaaggctggaattgtaagtaactctatgtgagtatgaattcatttcccttttccccctaggttgttaagtattggtattacaaataagtaacggctcacaattttatgtatttttaaaaattatgagttttcaatataaaggtattaaaaacatgccaaccttgattagttgcaaaataaacaagtcaytaatgaaaaaaaatctacttagttatcttccttcacaaacccttaggaacttctcagacagcgctcccacttatggtagaatcttaaggtatatatatctatatcgatatatatctatacggacatatgtttagatatctaatgtatatatctagatatccatatagatatatgtttagatatcgaatgtatatatc

SEQ ID NO: 404335 - DNA, 614 bp, Homo sapiens
gtaccatatgatactatttttaataaaaacttctatttctggttttatcttttagaaaaaaaggaatagttgagtgaaaaaaaatagctaattttattaactgcatgtgtcttcggctaaagtctagttgtttgaatcccagagctaaaaatctcacaaaagtcaaaactactaccaataaaaatagtgtaaatagaaatatcaccataccctaaaggcagcgggcattaaggctggaattgtaagtaactctatgtgagtatgaattcatttcccttttccccctaggttgttaagtattggtattacaaataagtaacggctcacaattttatgtatttttaaaaattatgagttttcaatataaaggtattaaaaacatgccaaccttgattagttgcaaaataaacaagtcactaatgaaaaaaaatctacttagttatcttccttcrcaaacccttaggaacttctcagacagcgctcccacttatggtagaatcttaaggtatatatatctatatcgatatatatctatacggacatatgtttagatatctaatgtatatatctagatatccatatagatatatgtttagatatcgaatgtatatatc

SEQ ID NO: 404336 - DNA, 536 bp, Homo sapiens
tcggctcactgcagcctctacctctcaggttcaagcgattttcctgccccagcctcctgagtagctgggattacaggtgcccaccaccatgcccagctaatttttytttttttgtatttttagtagagatggggttttgccatattggccaggctggtcttgaactcttggcctcaggtgatccacctggctcagcctcccaaagcattgggattacaggcgtgagtcactgtgcccagcttccatttcttttgatgacattttgataacccccataaaaatttgctcatttcatctaagttgaatagtttgttggcataaagttgttcataatagtcccttaaaatacttttaatttatttagggtcttagggatggccctttttttcttttggtaattttgtcttttgtctcttctttttttttttttcaatctagttaaggtttaccaattttgttgaacttttcaaagagccaacttttggtttgattaatttcctctattgtttttctgttttctatttcattgttttcca

SEQ ID NO: 404337 - DNA, 536 bp, Homo sapiens
tcggctcactgcagcctctacctctcaggttcaagcgattttcctgccccagcctcctgagtagctgggattacaggtgcccaccaccatgcccagctaatttttttttttttgtatttttagtagagatggggttttgccatattggccaggctggtcttgaactcttggcctcaggtgatccacctggctcagcctcccaaagcattgggattacaggcgtgagtcactgtgcccagcttccatttcttttgatracattttgataacccccataaaaatttgctcatttcatctaagttgaatagtttgttggcataaagttgttcataatagtcccttaaaatacttttaatttatttagggtcttagggatggccctttttttcttttggtaattttgtcttttgtctcttctttttttttttttcaatctagttaaggtttaccaattttgttgaacttttcaaagagccaacttttggtttgattaatttcctctattgtttttctgttttctatttcattgttttcca

SEQ ID NO: 404338 - DNA, 520 bp, Homo sapiens
tcttgctgctgaggtctgtacagtagagaagcggtggacgtagctatcctacctctgctggaatccttttgcgatggaacacaagccagtttcctgcctctcctgcatccttcaaagtggctgcagtctctgaggagtattcaggccctcagtggaggctgaggaaatgatgaggcccatagtccagcagaccctcagatgcctaagagagaggttaagaaaaattagtgaacaccagaaaacagaaccgagtctgccctgtggtctggcagttgcaaatgtggcaaattcaagccttccctctgctccaactctggaattccgtgaaaagatgttcttcttgtacaagagggacacaagatggcttttygttgtgtcccacttgagcaaaaggaatctgtgacatctctgataatgttttttcactttagcctgtctctctgattgtgatactttcttaaaaaagtgtgggaaagcatcaatccatataaagttatgtgttgtttatgaatccaaacac

SEQ ID NO: 404339 - DNA, 548 bp, Homo sapiens
ctttgggtaacaatgatgtgtcattgtaggttcatcaattgtaacagatgtaccactctggtgagggatgttgataatgggggaagctatgcatgtgtttaggcaggaggtatatgggaaatctccataccttcctctcagttttactgtaaacctaaaactgctctaaaaaaaaattttttttcaaagtaaaaaataataacggccaacattttgtcaaatttgataaaawctataaaccaacacatctaatatctcagcaaaccccaagcagaggaaacataaagaaaacaacatccagtcaaaactatttataaagggaaccaaatcagtctaaaccactgataaagaggccagatgcagtggctcatacctgtaattccagcactttgggaggccgaggtgggtggatcacctgaggtcaggagttcaagaccagcctgaccaacatggtgaaactccatctctactaataacacaaaattagccaggcatagtggtgcacacctgtaatcccagctactcgggaggctgaggcaggagaatcg

SEQ ID NO: 404340 - DNA, 584 bp, Homo sapiens
tgcttgctttgctttttcactgaaaaagtctagaaacagcaacaaacccattagctatgaacaccccccagcactaagactgttataccaaaatatcatttgctccttaaaataattctttttaaaataaccgtttttttaatgagcctagaatataaaacggtataccagaaaacaagaaaactaaaaggtactgctagcaccatgtcaacaggataatggattcaacttaaagtggctgtcattggccaaagatgagttacatagaacatcaagatactaataattagcataatgtaatagattggaaaacctaaaatacgtgaaaaatcatgagtttaggttttcattgattatttttgtgtactatccagggttctccaaaaaataaaacctatagaaggtatagagaaaaatatttattataaggaattggctsatgcaatttatagaggctgacaagtcccaagatctgtaggagaagtcatcaaacatgagacccaggagagccaatactttagttccagtccaagtccaaaagcctgagaaacagtttcagttcaagttcaaagatagggaaaagc

SEQ ID NO: 404341 - DNA, 641 bp, Homo sapiens
gccacctcgcctggcctcttctcattactttcatgctgaaatgttttataacatatactacaacaagyaggaatatcaaatatcctgctttaggatctccatctcaaaagaagaaaaaaatacctcccaaccctgtgtgacggttaatatagagtgtcaacttgattggattgaaggatgcaaagtattgttcctgggtgtttctgagagggtgttgccaaaggagattaacatttgaggcagcggactgggagaggcagacccaccctcaatgtgagtgggcaccatctaatcagctccagcgctgctaggataaagcagtcagaggaacgtggaaggaacgtgagtcttctggcctccatctctcccgtgctggatgcttcccgccctcaaacatcggactccaaattcttgagcttttggactcttggacttacaccagtggtttgccaggggctctcagtccttcatccacagactgaaagctgcactgtcggctaccctgcttttgacgttttgggaggcagactggtttccttgctcgtcagcttgcaaatggcctattgtgggacttcctcttgtgatcgtgtgagtcaatactccttaataagttcccttcatgtacacatctatcctattag

SEQ ID NO: 404342 - DNA, 492 bp, Homo sapiens
attttcacccttaagtacaaaaatttttaaaaactcatattaaagtcctgaataatattctcaaaaatatatataaaatgtttttttaacaacagaaaagttgagctaattaatgtaaaaaatgcaaggcacataatggagttatgttgcactaagttgagtaataatgtcctatagaaaagagcaaatcgcaatttaacaactaatctgagaggggaaggaaatggaagagagatttaggaacaaattttccatttgtgtttacccgaaagtaatgttcccttcacataataatgaattattgggagttaactattggctaacataaayttgggctttatctgtgaatcataattactcataatcaattactaggtataattgggaattggctgcattacaggatagcataacatgactctcttcaaaataccacatctatccctatgctgaatacgtaatcatgatctcttcaagcacacaatagcatat

SEQ ID NO: 404343 - DNA, 576 bp, Homo sapiens
caacatgccccacacaactggacctctggaagtttcactcaggtagaaggctcctgatttgtagtcagatttatttyccaccctgtgacatctcaatgtcatctcaatgacatcagtaagtctagagctacgtcttgctcattaggtctaatcagcatcatgtcctcaatgtaatggacctgtgtgacatcttataaaaagtgttcaagatccctgtgacttaaatgatgacttcaggctggagggttgatagacctctgaggaaagacagtgcagatgtattgctggtcttgccagctgaaagcaaactgcttctggtgggctgtattgacaggtatggagaaaaaggcatttgccaggttaatagctgcattccagatactagggagtgtgttaattttctcaagtaatgaacatatgcatttgcattttgatcctacaatcctgcttcgaggtatctattaagatttgtaggcaaaaaacataaaattactgatgcagaaggtaatttactgctgtaccaattgaaacagaaaaatcctctacccagtgttcatgagtagaagactggtgaat

SEQ ID NO: 404344 - DNA, 576 bp, Homo sapiens
caacatgccccacacaactggacctctggaagtttcactcaggtagaaggctcctgatttgtagtcagatttattttccaccctgtgacatctcaatgtcatctcaatgacatcagtaagtctagagctacgtcttgctcattaggtctaatcagcatcatgtcctcaatgtaatggacctgtgtgacatcttataraaagtgttcaagatccctgtgacttaaatgatgacttcaggctggagggttgatagacctctgaggaaagacagtgcagatgtattgctggtcttgccagctgaaagcaaactgcttctggtgggctgtattgacaggtatggagaaaaaggcatttgccaggttaatagctgcattccagatactagggagtgtgttaattttctcaagtaatgaacatatgcatttgcattttgatcctacaatcctgcttcgaggtatctattaagatttgtaggcaaaaaacataaaattactgatgcagaaggtaatttactgctgtaccaattgaaacagaaaaatcctctacccagtgttcatgagtagaagactggtgaat

SEQ ID NO: 404345 - DNA, 592 bp, Homo sapiens
ttacgcatcgattgactcttcctttcatgaaagatttctctgtagcatgtgatgctatttgatggcattttatccccagcggaacttcttttgaaattggggtcaatcctctcaaccctgctgctgctttatcaagtaagttgatgtaatattctaaattcttttttgtcatttcaacaacattcacagcatcttcaccagtagattccatctcaagaaaccaatttcttggctcatkcatgagaagcaacttgtatttgttaaagtttgatgatgaaattgcaggaattcagtcgtatcttcaagctccacttctaattctagttctcttgctatttccaccacatctgcagtgacttcctctactgaagtattgaacccctcaagcctcccacgagggttggaattgctattttaacctcctctcatgaatcacatagttgtcctttatagcattgagaatgatgagtcctttccagaaggttttcaatggactttgcccagatctatcagaggactcgctctctatggcagctacagccttacaaaatgtatttcttaaataataagacttaaaagtcaaaatattttt

SEQ ID NO: 404346 - DNA, 557 bp, Homo sapiens
gatgctgatcatgccggagctaccagctggaaggtaactaatcatgctctgagtgctgggcagctagtcctttctcaaggggtgacctgagaggggcatcactgtgtctgccacacaagccactgagaaagccagtatatggtttatgtgaccaaatatatcccctttagtcttgaaatactgaaatacractgaaaaaattctgacagggggagaagtggagtttctgctctgaggtagcagatgagaacatgcctgtgagtctgagatgcagaagcctgcagaggctgttggtcagcactggtcagtgaggccagaccatcaaaaagggaagggggtttagtgatccccctggatgaggagctggagaaagaagctcatgtttttcctgtctcaaccagctatgcttacctttgccttgagtgatttcaatattcatgtggatgagctttccaaaccgtaacctcacatctttgacctcatcttctaccctggtggctcacacctcgaatccactttcacaacttacccaatagctcacgctctgaacttcatga

SEQ ID NO: 404347 - DNA, 548 bp, Homo sapiens
actgacagacttgctcaacgcagggttgccacaaaccttcaatttttttttaaaagtactgcaaaatacaataaagtgaagggcaataaaatgagggctgcctttatgtaattcaagatattccaatttcatatacacrtgcataccatgcacttacacatacacatacattcttcaggaggaagtcaagaccaaggtcatcttctgcagccctccacatgtttgcctgcaatattttaatgacataaagtcttaactttgttgccaggtgtgaggaagtcatgataaatttttacctttattcacccttattctgttttgacctcaactggtgtattgcaattcaattatggcactaaccacctggagttagcagagaccccaaagttacagggcagagtccacaacaagactgccttcacttcatatcagctggctccagttctgggtgatttccacaatcccgctaactcactagagtggctcacgaaactttagaaggcattatatttatgatcacaattttattataaaggatataacttggg

SEQ ID NO: 404348 - DNA, 548 bp, Homo sapiens
actgacagacttgctcaacgcagggttgccacaaaccttcaatttttttttaaaagtactgcaaaatacaataaagtgaagggcaataaaatgagggctgcctttatgtaattcaagatattccaatttcatatacacatgcataccatgcacttacacatacacatacattcttcaggaggaagtcaagaccaaggtcatcttctgcagccctccacakgtttgcctgcaatattttaatgacataaagtcttaactttgttgccaggtgtgaggaagtcatgataaatttttacctttattcacccttattctgttttgacctcaactggtgtattgcaattcaattatggcactaaccacctggagttagcagagaccccaaagttacagggcagagtccacaacaagactgccttcacttcatatcagctggctccagttctgggtgatttccacaatcccgctaactcactagagtggctcacgaaactttagaaggcattatatttatgatcacaattttattataaaggatataacttggg

SEQ ID NO: 404349 - DNA, 548 bp, Homo sapiens
actgacagacttgctcaacgcagggttgccacaaaccttcaatttttttttaaaagtactgcaaaatacaataaagtgaagggcaataaaatgagggctgcctttatgtaattcaagatattccaatttcatatacacatgcataccatgcacttacacatacacatacattcttcaggaggaagtcaagaccaaggtcatcttctgcagccctccacatgtttgcctgcaatattttaatgacataaagtcttaactttgttgccaggtgtgaggaagtcatgataaatttttacctttattcacccttattctgttttgacctcaactggtgtattgcaattcaattatggcactaaccacctggagttagcagagaccccaaagttacagggcagagtccacaacaagactgccttcacttcatatcagctggctccagttctgggtgatttccacaatccygctaactcactagagtggctcacgaaactttagaaggcattatatttatgatcacaattttattataaaggatataacttggg

SEQ ID NO: 404350 - DNA, 577 bp, Homo sapiens
acaaaacagcaaataaatgccagcaagcagatgtccatgtatctcagtctgtttaaaagacaaaatccactccactcaaggatacacatttcatttgagtaccttcagattcaagggagataaatgtagcgggggagaaggggttcttacgtcttatgagtgaaaagttttgatgaatttcattagtaatttacactagattaatatgccatcaaataaatgtaagtggcaggccacaggcttaagaaagcaagtctttgatgagcttgtccactcaagagtaagggggagagtcccatctttctactgcctgataatctcatgttcatgacagcttgaggacaagacctctgtctgtctgaatctagtttctgcaaaaagccagtttatttttttttcaaattcctaccttaatgttttactactacctgtaaattctaggggatatgggcaatggaagttttggtgaattttaaggctttgcagattgtcttaataattcaacatatgatgaaygtacctcaattgtcataatgaacaaggtcatcccatatctgggaataaaatctttttagcc

SEQ ID NO: 404351 - DNA, 606 bp, Homo sapiens
gctagcttcatttttctgcatataaatatccagttttcccagcataatttattgaagagattttcctttccccagtgaatgttcttggcccttctgtctaaaatcagttggttgtacatatgtaggtttatttcttggttttctgttctgttctactggcttctgtgactgcttttatgacagtattatgatgttttgattactatagctgtgtagtatattttgaagtcagctagcgtgatacttccagctttattcttttgtccaggatttctttggctattcaaggtctttttgtggtttcatattaatttgtaaattttttttctatttctgtgaggaatgacctgtgactgctttaaccaatagagttcagagaaagtgacacttcaggacttctgagactgtcataagaagctttgcagcttccacccgggtgtcttgaaatgctcattctggatgaagccagtcaccatgtaagaagtctaattgccctaagaccaccatatacaaggaagcccaatctagccaygtggagaagccacatgaagagagagattactaacttgctccaattatcccatacattccagcctgtatgccaga

SEQ ID NO: 404352 - DNA, 582 bp, Homo sapiens
tgactcattccagcattaactcaaaagtcccaaagtccaaagtctcatctggaaatgaatggagatagcattgtaaaatcaaaacaagttgtttacttccaagagtcaatggaagtgcaggcatcaggtatacattcctgttccaagaggaggaaattggccaaaagaaaagggctacaggccccacgcaatttcaaaacccagaatggcattcatcaaatctcaagtwtccaaagtaatcacttttgactcctggtcccacctccagggcacactggtgcaaggagtgagctcccaagaccttgggcatctccactcccctgtggttttacaggggtcagccccagtggctgctttcatgggttcaagttgaatgactgtggcttttccagtcacaggatgcaaactgccagtggatctgtcattctgggcctgaagcatggtggtccccatctcacagaactactaggtagtgccccagtgaggaatttgtgtggagtctccaacccagaatttctcctctgcactaccctagtagaggttctatgtgagggctgtgtccctgtggcaggcttctgcctg

SEQ ID NO: 404353 - DNA, 521 bp, Homo sapiens
ccatcacattggggattaggatttcaacatatgaattttggggagtcataaacattcagtccctaacatgctctatatgtttattttctttcttctcttattctcttttatcttgtaataggtgtattgatataatagtatttaagtattaattttatatcatattattgaagtaatgggatattatggagaagagtaaatatcactcaaatacctcatcttctcttctgggaaaggagttggtgtgttttcagttgtatgcaaggtagttattttcattaggtgaaattatgacattgttatcgtctttatttggagtttatggtttaaggagatgtgtataggttccaagttgacaaagggtggacttgtgataattaattttgtgtttyaacttgactgggccatggagtgcccagacatttgcccatttttctgggtttgtctgtgaggatgtttctgaatgacattaacatttgaatctgcagacttgagtggatggcactcaataatatggatgg

SEQ ID NO: 404354 - DNA, 615 bp, Homo sapiens
gtgcagagagtctttttctttacagaaatcatcaattcttttcttgaaaattgatttttaatttacactttattctaaaaagtggcccctcttctcttttaacataacttatttaaaaacatttatatttactcagaacttttccaattttgcagtttcacgatcagcctccaaaaagttgtgctagtgtgtgttcagaattcattaaaatctatccagcatttccacttaagtgcttcaatatgtatgaaaaaatgtcatttgaattctctttgatgatcaagttgaacatccttgtctttgtcatcctaaagctgttcttttcagagagccaaatcccatcagattgctccaggtctgtatttgagaaggaaagttagaaccacttygtctaactgcaacagattctcttctgaatatttaccccaacctattgatgaagtgctcctgtgttctcagtgaactggttttgtttggagctcttgtaataatggtgcatggttcttggaatgatctcaaaatattcccctctttctctttcacactgaagagcaggttcatccccataggatgttaacaagtgtgtttagcttataacccttctagaatcatcgc

SEQ ID NO: 404355 - DNA, 567 bp, Homo sapiens
gtttttatgagcctaacaattccacatcagtatattttagtccaagaaatactttttgaaaatctctggtataatttacctttacatgttcctaaaaccattatataagtcttggtcctttgggcacaaacccaaaacatgaaacgttaaaaccttatcctccttgaagagcagcaaatgccatayatgaattgtcttttcaatgttgctccctaaaaacccttcaggttccataaagtcattttgggatcagatggacaaatttttccctatccctctacagtggtccagggtgtgaggcctgagattctctctttcttcctgggaagtctttgtccagttctttttggtgaccatgcacagcaagggtaaaaaatcaagggagtaaccaagagtaaccaggaatagctgctagaatcacaaaacagcaaataaatgccagcaagcagatgtccatgtatctcagtctgtttaaaagacaaaatccactccactcaaggatacacatttcatttgagtaccttcagattcaagggagataaatgtagcgggggagaaggggttctt

SEQ ID NO: 404356 - DNA, 567 bp, Homo sapiens
gtttttatgagcctaacaattccacatcagtatattttagtccaagaaatactttttgaaaatctctggtataatttacctttacatgttcctaaaaccattatataagtcttggtcctttgggcacaaacccaaaacatgaaacgttaaaaccttatcctccttgaagagcagcaaatgccatatatgaattgtcttttcaatgttgctccctaaaaacccttcaggttccataaagtcattttgggatcagatggacaaatttttccctatccctctacagtggtccagggtgtgaggcctgagattctctctttcttcctgggaagtctttgtccagttctttttggtgaccatgcacagmaagggtaaaaaatcaagggagtaaccaagagtaaccaggaatagctgctagaatcacaaaacagcaaataaatgccagcaagcagatgtccatgtatctcagtctgtttaaaagacaaaatccactccactcaaggatacacatttcatttgagtaccttcagattcaagggagataaatgtagcgggggagaaggggttctt

SEQ ID NO: 404357 - DNA, 637 bp, Homo sapiens
atttcctcattttcttaaaaattcatcctcagaggccaggcacagaggttcacgcctgtaattccagcattttgagaggtcgaggcaggcggatcatctaagatcaggagttctagacaagcctgaccaacgtggtgaaaccctgtctctagtaaaaatacaaaaattagccaggcatggtgacaggcacctgtaatcccagctactctggagactgaggcaggagaattgcttgaaccctggagacggaggttgcagtgagccgagatcgcaccattgcactccagcctgggcaacaagagcaaaactccattgcaaaaaaataaaaataaaataataatagtaataataatcctcagcacacattataaaaacttaccctacaatattgaacatctaggaatattatggtataacttgtggccttaaattgtaaattctagggaactagttataawcagtatttagattttatagctgaatcagactttagaaataaactgtcctaatttctccattttataaataaggaaactaaagttttgtgtgagttaatgactgccccaaatcatagttagttagggagatgacttaaacttgacagtaaactttttcattttgggtctaagcattttac

SEQ ID NO: 404358 - DNA, 594 bp, Homo sapiens
gattttatagctgaatcagactttagaaataaactgtcctaatttctccattttataaataaggaaactaaagttttgtgtgagttaatgactgccccaaatcatagttagttagggagatgacttaaacttgacagtaaactttttcattttgggtctaagcattttactgtcaaatcatgtatcctctttgactaatccttttagaagataattgaccagaaaatgtatgtgatgccattttcagacrtttagagctatgttactgattgttggcaggtactacaaattactgtgcagatagttgaatatcattacagtatatcaccaattcaaacattttgtggcaatataaactcaatgtctcatctagaaaataacaatctgttaagaaatataaagcctaaatcattcattagaatcatgctgggaagaggtatggagcatagaaaagaaatagtttgtgggggaagaaatgtttaaattttaaaactagaatcaatatttaaatatataatatattattatatattttattttataatatttaatatataatattatttttcttaacaacaacaatggtaaacaaaa

SEQ ID NO: 404359 - DNA, 514 bp, Homo sapiens
atttttagatagatggatagactgacaaaacatagatgataggtagatagataggtaggtatatagatagatagacatacagacataacatatatgcctatttgacataatattgaggaatattgtttgagttggagttcaggcatacacaactaaaagagtatttacttcaagggttatgaatgaataaccataacaactagattgtctttcttatattagcactgtgtaagtaagggatgttgagggaaactgtaaataaatggggatcctacttctaaagaatcctcctctttgttaggaacataaaagaacatgtataaaacaaaagataatataacttagaatataccaaagagctgttgtatgaggaaatgtaaacttctcaggttgaaaaagacttagtgagactgacatctcaataagcattttggcagtgtaagttttaagacctgcataatagtccattatattaagtgttgtrccatgatttggtaaatcatttcctcattcc

SEQ ID NO: 404360 - DNA, 471 bp, Homo sapiens
aattcttttttttctaatcttgaaaaaaaaatcactctctaccccaaggtaatttgtatgttacttttatttgctttttttctccataactgtaagttrctaaggtcccttttggtcaccaagaagaagcaaatgctgtcctttcactataaatctccttggaacagattagggaacaaaaaaggtaataatccttgcactcttagaagtgatatgctagtgagaaaagaaacaaacaagaaagactaagaataatttatacggtagaatagtaaaataaattttggggtgcctgaagattatacaattttggaaaacctctttaagaaaaataattcaaactggtggctcttcctcttctgtttcttatcctcttacctgcctttcctaaacaattttgtctaaatcattaggtggagctgagcaaggtaaaagattatgcacaagaagagtagagtaggaagaaaggta

SEQ ID NO: 404361 - DNA, 622 bp, Homo sapiens
tggctttccttgcctcactcagaaaaaaatactattcaacacattatatatttttaatttgtctcatagtttttatttatatctaaacttttctatttggtcaaataaagaatgagggaatacatgaaataaccctaattccaaggtgacccaggaacaaacagattcatacacagagacatttgaattaaaaaattaccatacaactctgggtcaacacatgcatgtgtgtggtcactcactacccctcacccagggaaaacatcactgatcaatatagaacatgcttcatttagagctctccccttccccccacacccaccctcacctaaaggccttgtggtttttcagttttttctcaacatgtcactctgggtaattactactcatttccaaaataaggaaaatcaaatgtggatccccatgaagcttattgatcgcaagggcacttgggccagatgaaatctaagaggttcttcatgtcttccraaagaatcatcagtgtttcctgttctgtagaaacttctctcttctaatttcctttgaataaaatgctttccaactgaattagttatctaggggttgccataacaaagcaggatagagtggatgccttaaccaa

SEQ ID NO: 404362 - DNA, 486 bp, Homo sapiens
gggggactgttgggaaggcatgattggttttgaaatgtgaggatgtgagatttggggcggggggtgggcaggggctgaatgatatggcctggctgtgttcccacccaaatctcatcttgaatttccacatgttgtgggaggtacctggtgggaggtaattgaatcatgagggcaggtctttcccatgctgttctcatgatagtgaataagtctcatgagatctgatggctttataaggtggagtttccctgcaaaacctctcttttttcctgctaccatctatgtaagatgttccttgctccttcttgcctcctgccatgattgtgaggtctccccaatcatgtggaactgtaagtccatgtataaatttccttataaattggttatgtctttatcagcagcatgaaaatgaaytaatacaagcacaatcagcaaaaccaacgtaacattacaattgactccacagaaatacaaaaattcccaggc

SEQ ID NO: 404363 - DNA, 580 bp, Homo sapiens
tttgttccataactcctcttgcctcaattcccttcaatatatttctaacacagtctatcagactcttagcatggaaaacaaaacttggtgtttagggggtacggggtggaaactgggggactacactgcttgactgtattttactagctattcgcaaaggccaagatgacaaagagtcctactttttattacccaaatttcctcaaaattgatgycagtggaaagtactggaaatcaaactataatttgactcttctacatttatcaaaatatattaatacatcaactaaataaatttgcatataaaaacctgattctttgaaagcagttttaagatttgagaatgcttaactataaaatattttctcattgtatgcagaaggaatacaaattgatgggtttcgatgagcacacacacacaaaaattagtccctttatattcaatccactggtgtttcataaattttatactggataaattgagtcagaataagattaaatacctcatgaaagctcataaatggaatcggagcctcaagaataaaactgtgaaatgtgaattcctaactttctgttctaa

SEQ ID NO: 404364 - DNA, 580 bp, Homo sapiens
tttgttccataactcctcttgcctcaattcccttcaatatatttctaacacagtctatcagactcttagcatggaaaacaaaacttggtgtttagggggtacggggtggaaactgggggactacactgcttgactgtattttactagctattcgcaaaggccaagatgacaaagagtcctactttttattacccaaatttcctcaaaattgatgtcartggaaagtactggaaatcaaactataatttgactcttctacatttatcaaaatatattaatacatcaactaaataaatttgcatataaaaacctgattctttgaaagcagttttaagatttgagaatgcttaactataaaatattttctcattgtatgcagaaggaatacaaattgatgggtttcgatgagcacacacacacaaaaattagtccctttatattcaatccactggtgtttcataaattttatactggataaattgagtcagaataagattaaatacctcatgaaagctcataaatggaatcggagcctcaagaataaaactgtgaaatgtgaattcctaactttctgttctaa

SEQ ID NO: 404365 - DNA, 580 bp, Homo sapiens
tttgttccataactcctcttgcctcaattcccttcaatatatttctaacacagtctatcagactcttagcatggaaaacaaaacttggtgtttagggggtacggggtggaaactgggggactacactgcttgactgtattttactagctattcgcaaaggccaagatgacaaagagtcctactttttattacccaaatttcctcaaaattgatgtcagtggaaagtactggaaatcaaactataatttgactcttctacatttatcaaaatatattaatacatcaactaaataaatttgcatataaaaacctgattctttgaaagcagttttaagatttgagaatgyttaactataaaatattttctcattgtatgcagaaggaatacaaattgatgggtttcgatgagcacacacacacaaaaattagtccctttatattcaatccactggtgtttcataaattttatactggataaattgagtcagaataagattaaatacctcatgaaagctcataaatggaatcggagcctcaagaataaaactgtgaaatgtgaattcctaactttctgttctaa

SEQ ID NO: 404366 - DNA, 580 bp, Homo sapiens
tttgttccataactcctcttgcctcaattcccttcaatatatttctaacacagtctatcagactcttagcatggaaaacaaaacttggtgtttagggggtacggggtggaaactgggggactacactgcttgactgtattttactagctattcgcaaaggccaagatgacaaagagtcctactttttattacccaaatttcctcaaaattgatgtcagtggaaagtactggaaatcaaactataatttgactcttctacatttatcaaaatatattaatacatcaactaaataaatttgcatataaaaacctgattctttgaaagcagttttaagatttgagaatgcttaactataaaatattttctcattgtatrcagaaggaatacaaattgatgggtttcgatgagcacacacacacaaaaattagtccctttatattcaatccactggtgtttcataaattttatactggataaattgagtcagaataagattaaatacctcatgaaagctcataaatggaatcggagcctcaagaataaaactgtgaaatgtgaattcctaactttctgttctaa

SEQ ID NO: 404367 - DNA, 616 bp, Homo sapiens
tgggatatttaagtctccagttattattgtattgaggtctatctctctctttagctctaataatatttgcttaatatacctggtgctccagtgttgggtgcctatatatcttcaattattatatcctctggctgaatcagcccctatatcattacacaatgaccttctttgtctcttaatagcttttatcttgaaatctactttttctgatatacgtgtagctactccgggtctcttttggttttcattggcatggaatatctttttccatctctttattgtcaggctatgtgtgtctttgtaggtgaagtgtgtttcttgtaggtgaaagatcactgggtcttgttttgttatccattcagcaaggctatgttttttgattggagagtttagtccatttacttttgatgttattgttgttattgataattttgattgataagtaaggmtatactcctgccattttgtcatttgttttctggttgttttgcagtcttctcttccttctttttctcctttctgtcttccttttagtgaaggtgattttctctggtggtatgttttagcttcctgcttttcgttttctgtatgtctgttgtatgtttattgatttgag

SEQ ID NO: 404368 - DNA, 613 bp, Homo sapiens
aaatatattttcagttagacattttgttacttgtggaaaccaccatggtttgtatcctgttggtttggatttacaacataaaagcatttagtctaattagaataatatatcaatgaacaatttctaagcaactttctccttcaaaaacattgttaggtcttcattatttccttccttctccctttctttcttcccttccccttccccttctttcttgaaatggagtctcattctgtcacccaggctggagtgcagtgatgtgatctcagctcagtgcaaccactgcctcctgggttcaagcaattcgcctgcctcagcctcctaagtagctggattactggcgcccgccaccacacccgtccaattatttatatatttttagtagagacgggrtttcaccatgttttgaactcttgacctcaggtgatccgcctgcctagacctcacaaaagcctagggttacaggcatgagccaccacacccggccgatttttaatattttcttaaaaatacaaaggaagggtcagccgcggtggctgacgcctgtaattccagcatttggggaggctgaggtgggcggatcacctgagattaggagttcgagatcagcctg

SEQ ID NO: 404369 - DNA, 355 bp, Homo sapiens
cagttcagggaaagaggaaaaagtggaatttacagtaaagtgcatccatgtttaggttatcacattcccacgcgcccaatacccacccataaaacaagaatttcattccatgacacaaaggagctcctattaccttgaatggtagtccagaagtattggtaccagggggactggaactaaygaagaaatgttggttgtccttgagtattcagtactgggataaatgaaacaaagccatctgctgccctaccactctggtctgctgccctaccactctgctgcagtgctgctggcccctcagccccttacccttgctccttcttgccactgggcccatgttctctccacatgcagc

SEQ ID NO: 404370 - DNA, 548 bp, Homo sapiens
acttttcttctcacatcgagattttcaaagacaaaaatcaatcacaytgttttgctgcacatttatcaacacaaatatggacttagtaaaccatttaacatacaacaaaacatttacctccagaactaaaatcaaactgaaaatacatgatgactaccatcttccaacccttcattaagcacctttaatttaaagctcaaaagatgctgaatatataacttaaataacttggtatatcttttataacttttcatatattaaaatggtagtacagaatggtttcataatatcatgtcactccttggccgtacagagtttatacactggttaagagaaaacaatttgtaaaggctttttacttataaaccactcatttgttgtgacatagaatcagactatgaaatatgaattcattctttttgttcaacttaggagagggggagaatctccctatttcttcttcttcttcttttttttttttttttaagccaagcacaataccctaggaatttaaaaaaatatttcatttaacaaaaacttacagagca

SEQ ID NO: 404371 - DNA, 548 bp, Homo sapiens
acttttcttctcacatcgagattttcaaagacaaaaatcaatcacattgttttgctgcacatttatcaacacaaatatggacttagtaaaccatttaacrtacaacaaaacatttacctccagaactaaaatcaaactgaaaatacatgatgactaccatcttccaacccttcattaagcacctttaatttaaagctcaaaagatgctgaatatataacttaaataacttggtatatcttttataacttttcatatattaaaatggtagtacagaatggtttcataatatcatgtcactccttggccgtacagagtttatacactggttaagagaaaacaatttgtaaaggctttttacttataaaccactcatttgttgtgacatagaatcagactatgaaatatgaattcattctttttgttcaacttaggagagggggagaatctccctatttcttcttcttcttcttttttttttttttttaagccaagcacaataccctaggaatttaaaaaaatatttcatttaacaaaaacttacagagca

SEQ ID NO: 404372 - DNA, 541 bp, Homo sapiens
tatctcagcactttgggaggccacggccagaggattgcttgaacccaggagttggagaccagcctgggcaacatggagaaaccctgtctctacaaaaaaccagcccagtgtggtggtgtgtgcctgtagtcccagctacttaggaggctgaggtggcagatcccttgagcccaggagacaggaggttgcagtgagccaagatcatgtcactgcactccagcttgagcaacagagtgagaccccgccacaaacaaaaattaaaaaaagaggtacagttatttagttgaagtcacacacctagtaactggtggagtccaaacttgaactcggcagtccactatgctgagctgcctcttcccatgcacagcctcatgtaacgacagagacctcctatcagaggctctgaggctaggtaggatgtatgatktaagttcactaaaccctccacagatttgattttcaagtcagttaagactggaccctaggtaacagcaacagagatcacaactttccttcctaatcattgttaaataatgatccc

SEQ ID NO: 404373 - DNA, 549 bp, Homo sapiens
aagttttcctaagtggaaaggtagtagataaatgactgctaatgtttctgacaaaacaaatacccatacagtgcagaagatttttttatgaaaagaagaatcaatcagtatcctttaaaagtagtaagcctaggaatactattttttttttttttttttttttttttgagacggagtctccctctgttgcccaggctggagtgcagtggcgtgatctcggctcactgcaacctcggccttccgggtcaagcaactcttctgcctcagcctcccgagtagctgggactacaggcgcgcgccacaatgcccggstaatttttgtatttttagtagacacggggtttcaccatattggtctcgaacgcctgaccttatgatccgcccgcctcggcctcccaaagtgctgggattacaggcttgagccactgcgcccggccagaatactattcttaactgccaatcttacatacagaaaatgtgaattacaatatactatgcatgcaattttaaggcaatttaacgattaagtgaaagtgttattaactgaat

SEQ ID NO: 404374 - DNA, 613 bp, Homo sapiens
gactagttaccaaacttcagtgcctaccaaagacctattttctgactcttcttgagagtcttccttaggaccggaacgtaccctgtaagyggagaacccagtttgctacaacttggcagaggttcctcggagtgtcaacatcagttggggatttatggaacctagaccccactgctaacgtccgctgtcgcgaatggtgtcccttctgaggcactgactgaaggcagtgtagggagggtcccaataggctgaatagccgattttgcatttatagtgctaaggaaaaagatgaaagccctcagcaacctactcaagatctgttatcctttgaagacagtggaaattttcaaagttctgtgcaagacacaaatgttttacatagatatataatcctagtttatatgtataggatacacacatactcatacatatatgggattagttatgtaatctaggattgctttcagaggacatttacgataattgcagaaaacccttccgtgggaaaggatactgggagtggagtcgtcctcttgctttcaaaagacttaatgttcagttagcatataaaggacaggttttcttgttctatcccagtaagccaagcaaattc

SEQ ID NO: 404375 - DNA, 590 bp, Homo sapiens
tgtctgatgagagtaataactcagactggtacaagtgtcttccttaaagggtgacacagctttcctctccaaaacatccatgatcaactagggccaatatgccaatccaaccactcactgcagtttatagagtataacctgtcctgtaaaagctgtccaaaagaaatgccacgcacattggcaaatgttctactagtcatattttaaaaagtaaacacagataaaattaattttaacaatttattttatttaacccaatatttctaaaacattgtcatttcaacatgtaatcaacaaaaattattgagacattttacttccttttttaatattgtcttamatctagtattttatacttacagcatgtcccaattcagatgccaaattttcatcggaaacacttgatctgtatttagatttcacaaaatttactgttgcaaaaagcagattcacattcctaagttgttttgaacaaactaaagtttttcacgccaggtgtggtggctcatatctgtaatcctagcactttgggaggccaaggcgggcagatgatttgagatcaggagttcaagaccagcctggccaacatg

SEQ ID NO: 404376 - DNA, 600 bp, Homo sapiens
ctgtctcaaaaataaataaagtttttcaataactaaatacagtatcagtttcttaatataaatttaatgacaatgaaataaaatagaaaattttgtcatgttagccacatcccaagtgtttcatggccacatgtggctactaagttaggcagtgtaggtctgaagggctagaaacgtgccttctaattgtgtctaaatttccagtgctagagacaatcagagcagtctggagctagaaaaattcttgcagttcagtaacccaactcccttgttttagaagggaagaaacctacagtgagagaagttgagggacttgcaaaagatcacacacctaaattcggtggtacatatctgaacaataatttaggtctcctgactcttaatcctaagatattatttaagcctcttcacatcagacatacttcagaataaagtaatttttaaatttatctgaatcatcactcygatgatacaggcaagagaaagcaaacctgtatcccaactgcattctcataacctgataagagcacaccctacaatatttaaggcaccctccttccactctgtcttagggtccatgtggtttcatctgtcagctct

SEQ ID NO: 404377 - DNA, 582 bp, Homo sapiens
tgatgatttagtcttctctgagtatctgaccaaactgggccttaaggtaacaaactcaaagtattatattttcttataataatcataacagctaacattactttaataattcattaattttactatgtgacaggtactgtgctaacacttttcatccatggtcagatttaatgctcacactaaacatatgatagttattaatattatccatatttsacagatgagaaaactgaggcacaaagataggtgccttgcccaaagatcacaccaccagtaaataagggagctcaatatcagagcttaatatggatcaaccctcctgctgaggaaataaaaaaaaactttgtccaatattcatctcaacaaatactcatttaccaaagtggaagtgtaacaagcctaagagaggatcctaggattcagctcttagaaccctgtgtgaggtagatttagggcataggctttcagggtatgggtcaggagacaaaaattggagaagtacagatcctattagtccgttctcacgctgctataaagaactgcccaagactgggtaatttataaggaaaaaaggtttaattg

SEQ ID NO: 404378 - DNA, 561 bp, Homo sapiens
aagtggttatgcactgttttaatggacagctgagatttgcaaacttgcactcctgtccatgggaagcataaggaaataatatgaactattgacagatgtaggtacttttgtggttgaatataaaataacagaggtagaaagcaaaccctctttgctatccagggtggcctgcattaaattcctgcctctgtccttcgctgactgttgtatagactgaattttgtctcttcacatatattcatgtgttgaagcccccagggtgatgatatttggaggtggggtcttggtaattatatcaygaaggtagaaccctcatgaatgggatcagtgcccttgtaagaagagacaggaaagagatgagctctctcttcaccatatgaggatacaaggaggtgtctgtttgacagtcaggagctgaatcggccagcacttgaatcttgaacattcagcctacacaactgtgagaaataaatttatattgtttaagccactcagttaacggtattttgtaagaacaatctgaactaagacagctatgttaccttggctgactcatttaac

SEQ ID NO: 404379 - DNA, 517 bp, Homo sapiens
aacattaccattttaatgtaagtattcaaacatggttttaaataaacaacaaagaagtatatagagcaaaaagtgaacactgcttttctaaaattttaaatttttkaattttttgagtacatagtagatgcatatatttatggggtacatgagatattttggtagaggcatgcaatgattaataatcacaccatggaaagtttggtgtccatcccctcaagcatttttcctttgtgttacaaacaatccagttatactcctttagttattttaaaatgtacaattaaagtattattgactgtagtcctccggttgtgctatcaaatactaggtctcattcattctgtctaactatatattttcttgtacccattaacccaattctgctattaatggactctgatgcattcttcagcacgtcaattgtgtttttcaactctagaatttctgctttatttgttttaattatttcgatctctttgttaaatttatcttatggaattctgaattccttctc

SEQ ID NO: 404380 - DNA, 476 bp, Homo sapiens
cagtgtctggtagtatttttcctgttttcttaacaattcatcctattgaccagatgggtaatgctatctgcagagatttcatgggaaagttattgtactgtgtaaaacctttcaatctcaaaacatcaaagatggtattctatgcctcgaattctgtttcaaatcgaatacgaagaaactaaggaaaattggtctggtggctcaatggcaaggtgaattccagagcttgtgcccttgcaactactacttattcagtgctatctcacaccrcatgcatctgcatcctgattacagctgcaattttaaaatgtaaaataatgttgaaagcattgactaggaagctaaagagatcagatcatgtttactatgtgctattatgctatattttaaacattttatttaaaacattacattgctcaattatgcagaataacacattggttctctagcagtggttatacgtactttgtgcctaa

SEQ ID NO: 404381 - DNA, 635 bp, Homo sapiens
tttctttttgacttagtatctgagcccacaaagtgagttagtaagtaccagtttttgcattactttaagttctaagtatgcaggtttcctggtaccattggttgctgctattaaagctcacatattgtatggctgaaagttacaagtgtgcgaattatgactgcatgagccttagaaaataaaatgaataaagggcaacacattagcatgacagtgttaggtgtgtgtttatatgtacagggytctgcatagcagttgttttattgaagttgatatgtagtttgctcacatttttattatttagcaattttgtacaaaaatagcaactaatttgtaaacactgccagaatattttctagctgttttgtaattttttaaaagtgttattttgttttgttttatttttgttgtggttcttgttttcacttttgtttatgtatagatctgtaaataaaattgcagtatttaaagcttaagctttcaggaaaaagaaagtaagaattcactgtgtgcatgacaacttatctgtatgagaaggagggatttgaaggaagattccttgcagagaaagttgggtggcaattgtcagcatgtgggaatttattttcctacagggtacatgatttggtagaaag

SEQ ID NO: 404382 - DNA, 599 bp, Homo sapiens
tcatggtgtatatataccacatcttctttatccactcattggttgataggtacttatgttggttccatattattgcaactgtgaattgtactgctataaacatgggtgtgcatgtgtcttttttatataatgactytttttcctttgggtagatacccagtagtgggattgctagatggaatggtagttctgttaccagggatgctgccttgggatggatcctttaaccgagatcaacagagctggagctctggaccagcaatctcagttcttgtgatagtgagcaaagaaatgcaaactaacagcaaagtgcaagctcaaagcaaagttcattaaggcacagtaatacactctcaaagggagagtgggccaacttctacgaagtgaaatcagccactctttgcagagctcaggatgcttttatgggaggagttgaggcctgggctgtgtttgagtgacaggatgatgtcatttgattggcagtttatagttacatagctgaagttaaactgagcatgtttttaccgatctttcgttaagaaaagcccactcagaggggcaaaaccacaagtaaattttactataatgactgtataata

SEQ ID NO: 404383 - DNA, 621 bp, Homo sapiens
aagtcaagtgtccaaagaattgcctctcaaccttatgtctgtggactttgagaatgtgctgtacttcatcacgttccatgtttttcaggtggcttaaaggtcatgggcacagagttcattctggactttttatttgcccaataaaatgctttttgactttgctaagtaatcacatagatatgtagtgttttcatgattgcttggggcaactagaaaactttctctttatttactttggtaatctttcttaaaacatgctaaaaaaaaaaaaaaaagtccttttttccaatcaaagattgagtgtgagccctatccaactgttcctaccctaccraatactttatttgaccttgtaactagcttaataagttctcttttccataacctcaacactaaagtgcttctgataattaaagagaaaaaaatatattttctatctctaggggaggattatggtgtaggaaaagagactgttttctggaattagagttggtataaatcctgactttgtctctactggttggtgaaagtgaagaagttactttgcatctgtaaacgaccattttcttttctctaaattggaattgcaaccttttagaattgttgtgagcattaattcag

SEQ ID NO: 404384 - DNA, 522 bp, Homo sapiens
ctttatttgaccttgtaactagcttaataagttctcttttccataacctcaacactaaagtgcttctgataattaaagagaaaaaaatatattttctatctctaggggaggattatggtgtaggaaaagagactgttttctggaattagarttggtataaatcctgactttgtctctactggttggtgaaagtgaagaagttactttgcatctgtaaacgaccattttcttttctctaaattggaattgcaaccttttagaattgttgtgagcattaattcagagaattatgaaaagcagctagcttagttcctagcacaaagcagatattccaacttccctgtgccttcctctttccttctatctgaaatgctttatattttaaaatggttttataaatcatatgttcatagattatgtgttctgaagtatttgtcaagtgctggtgataagtgcagaatgtgacctgggtcacatttataaggcagacttgcaaaagtacacgtggtcagagctgtatgg

SEQ ID NO: 404385 - DNA, 572 bp, Homo sapiens
catataaaaatcacctcaaagcggattaaagatttaaatgtaacacccaaaactgtgaaactgctagaagaaaatatagggcaaatgctttatgacattgatctggacaaggattttttggataagacctcaaaaacacaggcaacaaaaataaaaattgacaaatgggattacatcaaactaaaaagcttctgcacaaaggaggcagtgaataaagagcccacataatgggataaaaaatttgcaaactgtacatctgtgacaggtcattcttgtatcgctataaagagatacctgagactggataatttatttaaaaaagaggtttaattggcttatgatgctgcaagctgtacagtaagcataatgcttgcatctgcttctggggaggcctcaggaagcttacagacatgatggaaagtgaagaggsaacaggtgtctcacgtggcaggagcaggagcaggagagactggagtggggagttaccacacacttttaaatgaccagatctcatgagaacttgtttgctatggcaagggcagaaccaaaccatgaggaatccacccccatga

SEQ ID NO: 404386 - DNA, 625 bp, Homo sapiens
gtgttctattgcacattagggtgactatagttaacaataatgcattatatatctcaaaatagctagaagggaggattttgagtatttttactacaaagaaatgagaaatgtttgaggtgatggatttactaattatgttgatttgatcaatacacaatgtatacatgtgtcaaagcatcacattgtattccataaatatgtataattatgtgaattaaaaataaaatttaaaaatgtatatcttgctgttttttattctaaatattattttgtatatattttcaatygactgttctttcatccatacagaaaaacgaaacacaactaggtagccttaaagaaaacaaaaaattatatgaacctaaattttaaaacactgctgcaattagtctaatatctttctatagattagaggttaaacagttaaaacaaccttgtgaataaaaagacaagaaacattgtaagattggcgtttgtacaaagataaatgatatagttactttaagatattttaaatactattatttttacccccttgtttaggaaagtaagtctaaaccaacaaccttgaagcccataattctgaatgaaattgtagatgctcacaaagaaaagatcaaggaag

SEQ ID NO: 404387 - DNA, 609 bp, Homo sapiens
aattaccagaaaagctgagcgagatgttgataacttcctcgcagaaaatcatagttatgaaaaaataatagatgaaatttgcaaataccagaaactaatagaggaaatacagtacacatccataaaggtaaatgactccagttttgtgcaactgttatctctatctggtatcttttccccagttttattaggatgtatttttagaacacagataattagaacattatcatcaacaggaaaaatatttattgagcttctgatgtgtccctagcattgtggtaagccctgagtataagaatctaggcaaaacacarttcttgtgctcatgtagctgagactctactaccgcaactctgacacgtattttatataatttgccccatccctataattccaagaacctatttgatttttgccttagtgtttataaatcctgtggatttatatggaaaatatggtaattacaccaaaatatggttctgtttagtagaatactagtaacttaaaattttcttttttgtccccctttacattttctaaattttctaccatgaacatgtattttttttgtacagagcaactataacgtttgaaacctacattatttat

SEQ ID NO: 404388 - DNA, 609 bp, Homo sapiens
aattaccagaaaagctgagcgagatgttgataacttcctcgcagaaaatcatagttatgaaaaaataatagatgaaatttgcaaataccagaaactaatagaggaaatacagtacacatccataaaggtaaatgactccagttttgtgcaactgttatctctatctggtatcttttccccagttttattaggatgtatttttagaacacagataattagaacattatcatcaacaggaaaaatatttattgagcttctgatgtgtccctagcattgtggtaagccctgagtataagaatctaggcaaaacacagttcttgtgctcatgtagctgagactctactaccgcaactctgacacgtattttatataatttgccccatccctataattccaagaacctatttgatttttgccttagtgtttataaatcctgtggatttatatggaaaatatggtaattacaccaaaatatggttctgtttagtagaatactagtaacttaaaattttcttttytgtccccctttacattttctaaattttctaccatgaacatgtattttttttgtacagagcaactataacgtttgaaacctacattatttat

SEQ ID NO: 404389 - DNA, 575 bp, Homo sapiens
tgtatggtttctctttctttggttgatgtggtgtatcacatatattgatttatgaatgttgaaccatccttgcattcctagaatatatcccccttgattgtggattgtggtatattatctttttgatgtattattggatttggttttggtattttggtgaggatttttrtgtctatgttcctcaggaatattgacctgtagttttctccttttgttgtatctgtatctggttttggtatcaaggtaatgcttaccttgtagaatgagttaggaaaaattcctttctcttcaagtttttggaatagtttgagaaaaattggtgttagtactttaaaattttcatagaattcagcagtaaagttatccagtgttgggcttttctttttggggagactttttattactgtttcaatctcattactcattatttgtctgtgcaaataattttgttactgattcaatctcattactcattatttgtctatttcttccctggttcaatattggtaggttatatgtgtctagggatgtgtctattttttctgggtttttgaatttattgttgtgtagttgtt

SEQ ID NO: 404390 - DNA, 538 bp, Homo sapiens
gatctgtccaatgctgaaagtggggaattaaagtccctttctattgtattggggtctatgtctctccttaactttaataatattttctttatatatctgaatgctccagtattgagtgggtatatatttataattagatctacttggtgamttgatcccttttcattatataatgacctcctttatctctttttatgtttttttacttaaagtctattttgtctgatagaagtatagttactacttcatctgtaaaggcacacatggactaaaagtgaagatataccatgcaaattctaaacctgtttttggttcccatttgcatggaatatcttcatttttagtctgtaggtgtacctttacaggtgaagtgagtttcttgtcagcagcatatagttgggttttgtttttttaatcaactcaactagtctgtatcttttaattaggggaatttcaactgtttatatatattaaaggttgttattaataggtgagggcttactcctgtcattttaatgattgttttctggttgtttta

SEQ ID NO: 404391 - DNA, 538 bp, Homo sapiens
gatctgtccaatgctgaaagtggggaattaaagtccctttctattgtattggggtctatgtctctccttaactttaataatattttctttatatatctgaatgctccagtattgagtgggtatatatttataattagatctacttggtgaattgatcccttttcattatataatgacctcctttatctctttttatgtttttttacttaaagtctattttgtctgatagaagtatagttactacttcatctgtaaaggcacacatggactaaaagtgaagatataccatgcaaattctaaaccygtttttggttcccatttgcatggaatatcttcatttttagtctgtaggtgtacctttacaggtgaagtgagtttcttgtcagcagcatatagttgggttttgtttttttaatcaactcaactagtctgtatcttttaattaggggaatttcaactgtttatatatattaaaggttgttattaataggtgagggcttactcctgtcattttaatgattgttttctggttgtttta

SEQ ID NO: 404392 - DNA, 550 bp, Homo sapiens
aaactcatgctctatgcagatagcacacctggtcccaactaaagcttcaggccctaggaggataagatgcccccttcctcagtrgcccatgtataaaaaccctgacatttttactggaaacccactggggacccctctctgacagctgttctttccttttacctgttaaactcctgctccagtttctgtgtgggtttgtctgcaacctcaatttccttggccatgagaccaagaaccttggtgtttaccccagacaatgaggctgcttcattttgggggctcgcccaggatttgaaggtgaattaatcagaagggtaagggagcagactctctactttcacttctgaggcttctcatcctcagtttttattctctcaaagaactatcaaaaaaacaaggtatctgtctgctgattaatgagccacaagggctagctgccggtcttaaaagactcaaatgtgaggcttgctggggaggacttagtccatccccagtgccctcatggtgctgggaatgttggctctgtccaaactagttttctgtcacacac

SEQ ID NO: 404393 - DNA, 558 bp, Homo sapiens
gctcatgccaccatcttgaaccaaaagcttctactgattttgtaaagagaaaaaaaaatmaatatagttcttttcatttttgagaaataaagtacatcatattttctctgtacccaggccacatgtctcctctattgatcgttttatttctgaacggaataagcacagctgtttggaagcacatatggaagggcaaattcttcctttcatagttaattagctgtatgaccaaggggaggttatttaaacctctctgacattcagtttcttcatctgtgaaatgggaataattatgtcattgtcttctttaacaataggtgtgaggattataaataatatatgtgaaactattgagggcctgagtaggtaatcaataaaaagctgccattattattgctctcggtgaggagcaatagtaattgctggccctagaatgatagaatcatggagttttagagctgaaaggatcttcactctgactggaagaacttctacagccattcctacaacccccaaccttctacctcctcacccacccttgccctgatgcatctttct

SEQ ID NO: 404394 - DNA, 558 bp, Homo sapiens
gctcatgccaccatcttgaaccaaaagcttctactgattttgtaaagagaaaaaaaaatcaatatagttcttttcatttttgagaaataaagtacatcatattttctctgtacccaggccacatgtctcctctattgatcgttttatttctgaacggaataagcacagctgtttggaagcacatatggaagggcaaattcttcctttcatagttaattagctgtatgaccaaggggaggttatttaaacctctctgacattcastttcttcatctgtgaaatgggaataattatgtcattgtcttctttaacaataggtgtgaggattataaataatatatgtgaaactattgagggcctgagtaggtaatcaataaaaagctgccattattattgctctcggtgaggagcaatagtaattgctggccctagaatgatagaatcatggagttttagagctgaaaggatcttcactctgactggaagaacttctacagccattcctacaacccccaaccttctacctcctcacccacccttgccctgatgcatctttct

SEQ ID NO: 404395 - DNA, 544 bp, Homo sapiens
cttggcctaggaaatggtgtgaatgatagcagacgcccatgagaggctcttctgggcttgtaagcagttctgaagccaaagcatagggtgcatctggggaaggggacagaatctgaagggctttatatgcctttttagagygcttaaaggtaaaggagagtctctgaaagattgtagggaagggggtaatacatatgatttgcatattagagcttcttgaaatatgggcagaagaattagaattaaatgtgaattaaagaccatagaagacagaagcgaggtagctgacttctctgattttataacaagactgttttatgctcttatgcaacttaaaagagaacaaggcaatactgttgttccttggtatccacaggagattggttccaggacactcccctccctgacagataccaaaatctgcagatgcttaagtctctgatataaaatggcatagtatttgcatataacctatgtacatcctcccgtatactttaaatcatctccagatttcttatactacctcatacaatgtacatgctat

SEQ ID NO: 404396 - DNA, 533 bp, Homo sapiens
tcactcccccatttctcctcctttcctaaggcctccctaattccctgagacagaacagtattgaaattaggccaagtaacctacagtggcctcttgagttgcacatttctcactttaaatcaaaagctagaaataattaagcttagtgaggaagacatgttgaaagccaagataggccacagctaggcctctagtaccagttagccaggttgtgaatgcaaaggaaattaaaagtgctattccaktgaacacatgaccaacaagaaagtgaaacagccttattgctgatatggaggaagtggtctggaagaagatcaaaccagccatgacatttccttaagccagagcctaatccagagcaaagccctaactctcttcagttccgtaaaggctgagaaaggtaaggaagctgcagaagaaatgtttgaaggtagcagaggttgcttcatgaggtttaagaaaagaagcaatctccataacggagcaagggttgaaaaattaactattgggttctgtgttaagcagttcttatg

SEQ ID NO: 404397 - DNA, 409 bp, Homo sapiens
atttatgttctgttgttggatggagtattctttatgtgtgtgttaggtctaattagtttatagtgtttaaattctattttttaattgattgtctagatattccactcattattgaaaatgaggtattgaaatttgtaattattattgtagaactgtttctcccttcaattctgtcaatgtttgcttcatatgttttggagctccattgtttggtgcatatatgcttatatttgtaattgttatattttattgatgacttggcccttttattaatatataaygtcctattttctctcataactattttttacttaaatctatttgctacgatatttgtatagccattccagctcttttggttgctctttgtgtggaattttttccatcatttcacttttaacttttgtct

SEQ ID NO: 404398 - DNA, 687 bp, Homo sapiens
gccattttgctatttgttttctatatttccttaattgtattccttaattcctccaatattgcctccttttgtgcttgaacaattttgaatrcccccttttttcttttccatatagttattttctttgtggttattattaggattagagttaaatcctaaatttataccaatctagtttaaattgatacaaacatagcttcaacagcatacattaattctactcctatccagcttcatcccccactttacattgttgctgccattaattacatatttatatgtgtgtgaccattagcatagatggatttataataattgttttatgcatttgtcctttgaatcacataggaaacaaaaattggagttccaatccaacaatacaataatactagcttttatatttacttacgtatttacttttactagagatctttatttctttgtgtaacattgaattgccatctagatttcttttgtttcaccttgtgttccctttaacattttttgtagctaaagtataccagtgatgaattccgttagcttttgtttgtctggtaatatcttgagttcttcatttttgaagaatagttttgccagatataaaattgctacttgacagttttttctttcagtaatgtaaaacatatcccactgcttctggtctccatagcttctggtgataagttg

SEQ ID NO: 404399 - DNA, 514 bp, Homo sapiens
taaataatgatggggcttttttggattctaagctaacacagtgtcatcgtaggaaatttagaaaccacagccaagcacaaagaagggccaacaccattggtagctctcctgtccaaaggtgagccactgttaaatgttgcctctggccttccggtcttttgtgtkcctgtatgatgcacgcattcttgtgttacagaatttgggtcaaataggcatgtcatggtgtagccggcttcccctctaacttatcatgtattgcgagtgttttttcatgtcagtaatatttttagacaacagaaaagactgcatcatattcctgctcatgtctaaaccatgactaaccagtatcttaagttaaccccaattttttccacagtaaacagtgctgtaaataatatctttaagtctttatataaagattatatatagaatatacacatataaaatatgtaaagattattgattatattaaaccagtgcaaaattcttactgatctttagaacaaattcctgg

SEQ ID NO: 404400 - DNA, 614 bp, Homo sapiens
tcttggctgggggatgggggggtccctgccctaggtagctttcaagtgggtgccgtaccacactgctcttccttcttctccatgggtcaccccagccacatagtcagttctgagagagaacctagatggcttggttgctggtacaggattcacacactattatggttctttttttattgtagtctccaatcactgctgcttctagttggcagtcttggccctgctcttcagaaacttgattctgtgtattgaaattcatttatttcataattttaaaacttaaatttttcattgtacatattttgatgttttcttttcacctttgtttttttctaaattgtctgtaattgggactagccctgttaataacaactatttacttagaaggttatttttatttaacttctaaatattttttactgggatttttgtaagttttatttggaattttattatttattgctaattagttttattgtagacacagaatacaayataaatcaaatttttgaaatttaatgacgcttaatttgttctttggtttatgaaacaagtttacaaaatttcaaacaaaatcaaaaaatgtatttttagcaaggtaaaatggagcatat

SEQ ID NO: 404401 - DNA, 446 bp, Homo sapiens
atttgtattctaaacctaaaagactccctgtactcacttcaattttaggaatctcttttgcttgccattagtgctgtcagatttctgtctgtggtaagaatagaatgagatcagcatctaactttacttctgtgaaactcatatccttggcaattatatttgcagttatgagaagagtagagataacacacaagtgaagctaaatgtcaatctataagttcaaacatcagacaaactacatcagtccattttctattctgtaatctgtcaaccaagagatctaggtcctaatctcatttctatcactaaccaccagtaccatccggtrtgatttgatggtatgactttacttccctgaaatgcaatgtcctcatttgtcttataggagtttgattattagatttcaaatctctaaaatgtagtatcttatagttactagttttctt

SEQ ID NO: 404402 - DNA, 521 bp, Homo sapiens
aaaaaactactcatatcatctgacccaataatatttttgataagcccagtagatttttaaaacattaaattagttatatatatatatatatatatatatatgcctataaatgtatcagctttactattgtacagtatatttttattaaaataactctatcatttggccagtctgtcactgaatatttttagccacctactagggtatttagtgatgaataagacagacagaatctaaggaggtggcatttcaactgcaacttactaataggaagaaagaggtgcatgaaaatgggaaataggttggttcaattatgaataatggcaagtgcaaaggtcccaaaatgggaaccagttagatgtattcaaaagtcagaataataatttaagtaagataaatgataagtcaattaagaaaaaaggtaaagtctgaaaagtacatggggsgtttacagctagtaagcttcaatatttttcttagtataatcaaaaacttttgcaaaagttttaagctgggacaaa

SEQ ID NO: 404403 - DNA, 521 bp, Homo sapiens
aaaaaactactcatatcatctgacccaataatatttttgataagcccagtagatttttaaaacattaaattagttatatatatatatatatatatatatatgcctataaatgtatcagctttactattgtacagtatatttttattaaaataactctatcatttggccagtctgtcactgaatatttttagccacctactagggtatttagtgatgaataagacagacagaatctaaggaggtggcatttcaactgcaacttactaataggaagaaagaggtgcatgaaaatgggaaataggttggttcaattatgaataatggcaagtgcaaaggtcccaaaatgggaaccagttagatgtattcaaaagtcagaataataatttaagtaagataaatgataagtcaattaagaaaaaaggtaaagtctgaaaagtacatggggcstttacagctagtaagcttcaatatttttcttagtataatcaaaaacttttgcaaaagttttaagctgggacaaa

SEQ ID NO: 404404 - DNA, 538 bp, Homo sapiens
acaataacttcttatttgtattttctaatatttaaaatttccattattactactttccttaaggtcttcttatttcttgatattaatattaaatgaaccactgaatggaaataagaagtaacacacatagatacaaggtgagacttcaaccagagtgatttatacaatctacagtaggagagttatattgagaaaaagtatataacaatgttacatttcatagaaagttagcagaaaagtaaacattaggaaaatctcactcaatttaagactttggacacttgtcttactctaaattggccacaaacttcactccatagtgagaataatcttttaaaaaatagaaattacattrcattacacttcaaatcctccaatcatgttctacctcttgtatgacactatctgaactccttagctttatatatcgaaggatttctttcatctgtttatctcttcaacctcatccatcaacactttccatttcatctttttcttccattctaacagaattatatacaactctaattgtgatgtg

SEQ ID NO: 404405 - DNA, 535 bp, Homo sapiens
ttgttcttcataactacgtcaatatggtgatttactttgattgatttaaaaatgttaagcaaaccttgtattttgggggtaaattccatttggtcttccagtgttacattttttatatattggtaaatttaattagctaatatttcattaaggattcctgaagatatatttcctcaaggtctcttrtagtttcttctcttataaaatctttgaatgcatttgtatcagggcaataatgatttcataaaataaatttggaagtgttcctttttccttaatttcagaattgatgccatttctttattaaatatttgattgaatttaataatgcaaccacctgtgactagaggttttaaaccataaattacatttttaaacaagtgtagtgctatccaagttatctaattatcagtgagtgaactatggtagtttatgtcttctaaggaatttgttcatttcctctaagatatcagaattttggggcataagtgttatggtttggctatgtcctcacccaaatctcatcttgaattgt

SEQ ID NO: 404406 - DNA, 535 bp, Homo sapiens
ttgttcttcataactacgtcaatatggtgatttactttgattgatttaaaaatgttaagcaaaccttgtattttgggggtaaattccatttggtcttccagtgttacattttttatatattggtaaatttaattagctaatatttcattaaggattcctgaagatatatttcctcaaggtctcttgtagtttcttctcttataaaatctttgaatgcatttgtatcagggcaataatgatttcataaaataaatttggaagtgttcctttttccttaatttcagaattgatgccatttctttattaaatatttgattgaatttaataatgcaaccacctgtgactagaggttttaaaccataaattacatttttaaacaagtgtagtgctatccaagttatctaattatcagtgagtgaactatggtagtttatgtcttctaaggaatttgttcatttcctytaagatatcagaattttggggcataagtgttatggtttggctatgtcctcacccaaatctcatcttgaattgt

SEQ ID NO: 404407 - DNA, 387 bp, Homo sapiens
ctgccacaaatgccttaacactttattattgcaattgatcatatttatgaagacctcataaagttgcaaacagttataatacaaaaaggcagttagaataatgcaaagtggtctatcatagcctcttgttgacaactttattattgctatggaccaatattgtacagaggaacccagtagccataagttatcttgaagtgaagcagcacagcaggctggagtattactgtattaaaaaaaatttattttttatgagacacagtaattatatcaaacagttaccaaaacatgtgggaactacaggatctattaagataccacaacagagacatctcctttatgtacattgrgaatggcactaagcattaccacctgggtagagagaca

SEQ ID NO: 404408 - DNA, 582 bp, Homo sapiens
ttggccacttgcccaatagagagccatggctgccaccactatagccttgctgctttacaccactggttctcaaggcctccttctagagagaatggagctctgatacagcattcatgctacacggggacacattggctcaagagcttatgctcatgacatttggataggaggatctggcttcttccatcactcacagactcaaatgaaacttttcactgagttataaagtctagattttccaggagctgcatgagggaaatcaataactcaacttgaaagcacagtggcactaatatgccatgaggcaaaatttgaccaatgagagacaagaaatgaaaggaggctagcagataaatttatttcccttatgttgccagacaaactgatccaatgattgaaagacagtgcatgacgtttttaaagatgtttcacctgctccagcaaactgccaggttttcttgagaggccayggctaactcaataatgaatcatattatgtttgctttgcctattgccttgcatcacttccctttccctctcacttatattcccatggtgtattagtctatttcacgctgctaa

SEQ ID NO: 404409 - DNA, 452 bp, Homo sapiens
agtcagtttggggtatctttttaattagcttaatacagttagaattatctcagattggaawgcttttgtaagaaagtgtatttctttcaaattaactttcttacaattaattttgtagaaagatactgaaaatgtttatagaaaataaaaacctaatacacattttcagtgctctagtcctttaccttattacaattgcttattttcccttttattactaaaattctattgaagatctgataataaccacaacaaaacacaaatatttacaacactacaatataaaactgatgctcaacatcatttgaaaaattggaatgatgttctaattaagccaccagatttaaaaagagaatgaaaaggaactcatttgtgtttcatttaagaagctgccaccaaatcttctcttgagactatcatcatcctgaaatgatattgtaaatcaccctttc

SEQ ID NO: 404410 - DNA, 554 bp, Homo sapiens
agatgaagtcagaggggtacaaagcgttagtggttgccatggaaagtgttgaagtttataaaaccataagttattaaatacagcaatttttatagtactatgaaattaggtggggctaaccatgaaaattctttgtacagcacaaattttactgatgtctcttggtaaggttcttaaagcactgttaaacttagaatgagatgtggttttatttttccttgagcagagacacatgttccaaatttgctgtccttttctgtattagcaagtagctgtcattcatattctactcagaacatacacttttcttaaatttcaacttggaaataatttcagactcacataatattgaaaatatggtrcagaaagttcatgtacaccctttacttcactttccctaagctaatatgttatacagccatagtatatttaagacaacgaaatcaacattaatacaataatattattaactaagctatagactttatttgaatttcaccatttttctcctaatatatttttatattttgtcctatgttccagcatccaatcca

SEQ ID NO: 404411 - DNA, 531 bp, Homo sapiens
tttgatggaattctaataaattctctgccaacttctgttgttttcatcaaacagaacaaaactcctcctaacaattatatgaagatgtaaatgctaggtarcaaaacttggctggctggctctgattgagtgacatgaaccagatttattctcctgcctgaaagaactaaattatagacaagatagacataataatgtttttcaagatgtaagacaatcaggctacaaaggttagtgttctctgagttattaaaaataaatgatgtggctggccgcagtagctcacacctgtaatcacagcactttgggaggccgagatgggtggatcacgaggtcgggagatggagaccatcctggctaacacggtgaaaccccatttctactaaaaatacaaaaaaattagccaggcgtggtggtgggcacctgtagtcccagctactcgggaggctgaggcaggagaatggcgagaacccaggaggcggagcttgcagtgagctgagatcgtgccactgcactccagcctgggtgaca

SEQ ID NO: 404412 - DNA, 399 bp, Homo sapiens
ggtagtgagagttctacaactctgccgtgcggcgccattagagttgggcaggcacrggaagagaaacagtatccagcagcaaagcaatgaggttcaggaccttttctgactgagaagggaaactgtttttagagaaatgcactctctctgtggttctgggattatccaaagcagggagaaagcagagactgagtgagattggactactctcccaatccagttatttatggtttgtgacagatttcatttgatttaaacaaatccaagttgatttagacaattcaagtattgtggataatttcatgcctattacactagaaggctggaattttgactggatgttttcctctatttatgaaacttttgtatagtttaaaaatttgctagtgctccaattta

SEQ ID NO: 404413 - DNA, 569 bp, Homo sapiens
caaaaaagttctataaaatagtcaagattttatagttctatactaagacataaaaacaataaattttaaaaattatttaatgcaatagtggaataaattttaattataaaatcaatgttaaaatataaaatgattattaactcttaagtgaaagtatacagaatggtattatactagaattgtttccattaaaaaggggctttttcactgttctggcttctaatgcctgaagttagagttagccacaggccttccacatgagtcctcagaagatatcatggaagtagagaatgacatgaatatttgttgtatttagtataaaatataaattagcagcactgtgaagaagaagatcaagattatgggttctacaaagggccctacctcaaggcagccacgttggagaaggaggatacatgaagaatggaaagaaacggtagtgagagttctacaactctgccgtgcggcgccattagagttgggcaggcacaggaagagawacagtatccagcagcaaagcaatgaggttcaggaccttttctgactgagaagggaaactgtttttagag

SEQ ID NO: 404414 - DNA, 598 bp, Homo sapiens
aaactacagtgtttagtgtattttcacgttttataaactcacattctaaattacattaaacttaaaagtactgaaaattaaatttctgattgaaataaaattctgaataaattttagggaaagaactaatataaaccatccaaattcttctaagatcatcagtggaataatctttttttctcacatgctctttgcactagaatcagttctgaacaaatatttttgtaacaaagaagtgagtaaatttaaaacatggatgattgttatataacatactttttaatctgcttttttcgttgattacaaatttaaatgtccaattgygtgagattaatttcattaaaaatgtatatagagtacctaccatgtggcaattactggactagttgctagaataaaattagccaacatgaagtaatgtataaaatgattttttccagaaggctatcattaaacataaaagtacttttttcttctaccattgtatcagatctgatttaaaatatgctgttttaagatgaattataaactgtcagaattcatggttatgaaaagggatttccagatatatctaatgacttggaatttgtgtttaatc

SEQ ID NO: 404415 - DNA, 602 bp, Homo sapiens
cctttatactggtcaagcaaaaccataggccaacaattagattagatcaaaaggactacatattcaatggctgcaaatatcctcagcaaggtttccttcatratctcagggttttaacagcaccattgggcttctgatggcccgatatgagaaggttcaccaggtttcagggtctgggcttgatttccttgttaacagccatttgccttcgaaaacatgtctacactgctaatggtttggaaactaaatgcatcttcagcctgtggtgtctttcatattgcaacaacatgcaatcaggcctactagagcagcaaacattgaggaaaactcacatagatattattgatagcagacctgagttcctcatttccctttcatgcaagcacagctcctgagatctagcagggctgatgtcatcactgaggaaatttcttgaccctcgtgctgtacaacttttatgatgcatgattaggaaaaagcagtctctctctcctgataggatctctctctcctgataggatctgggactgggaacacaagcaatatgacgtcacaaaacctaggattctgcttcatcctgccagctcagcagctgtggttag

SEQ ID NO: 404416 - DNA, 394 bp, Homo sapiens
acaagcaacattgtttggatggcctgatctaagtgcagactgaaaatgagctgactttccatggccatttccatggatcgccttctttgctttgcttctcttcctatgtcagcttctctgaagaagacatagagtgcagatgttcattattcactcatttatttgtttccattcaaaaaacatttrttaaagtcccctttactattttatgtcactgtcacaacataggagtacacaaaggatgataatctttatgttattggattgaaaattattactcaagcaataatgtaataagaaatataattatcaaattacactgcattttattcaatatgcttctcccagagtctcacacacttacctaactctgttaggtcagacttgagtccta

SEQ ID NO: 404417 - DNA, 565 bp, Homo sapiens
ttttaaagtgttcccactgttattaaaatttttttaaaaacttactctatgagattgaaaggcaattaggataatcccacagcaattgggcattagatacaaagtatatgcacaataataaatgttgattatttttgatatttacacaagaacattttctggaataattatatcctctacttactgaccacttattggttcattaaatcctaataatagctgaaggaagagatacagtttccattttacaaatgaagacaatcaagctgagataaacaattccaactgttcaggccacatatttgataggtgtcagagctaatttcatatgtgggctttttgacttccrtctgggccttttaatggccatgctatttgccatccaagtctcacagtgaaagaattagaaactcatattttgtgtataaactagcatggggtcagattatgcaccccagataaaatgcaggatatctaattaagtttgaatttcagataaacaacaaacaacattttggtagtatgtttagtagcatgttgcataggacatatttacaccaaaatt

SEQ ID NO: 404418 - DNA, 631 bp, Homo sapiens
gactatagttaatgtattgtatatttctaaattgctgaaagagtggattttaaaagttctcacaacaataatgataaatatgtgaagtgatgtgtatgttgattagcttgattaatcattccacaatgtatatatgaatacattgtggagtgattaaatgataaaacatcacatggtaccccataaatatatacagttattatctgtaattaaaaatgacmtaaactttaaaataatacaataataaacaaaaaaggatatatagatggcacacaagcacatagaaatacactcaacatccttagccattaaggaattgcacattaaaaccacactatacactatacacctatcaaagtggctaaaataaaaaccagtgacaataccaaatattagcaaggttgctgagaaactggatcacttacacattacttgtgagaatgtagaatgggatagccactctgggaacccacttagcagtttcttataaaactaaatattcaactaccatacaacccaacaattacattcttgaacatttattccaaagaaatcaacatttgtgttccacaaaactgaaacacaagtgttcatagaagctctagtcactcaacaagtgactggttaaaca

SEQ ID NO: 404419 - DNA, 537 bp, Homo sapiens
gggtttttatttagcacacatttataataaacacatgatgaaatttggatttttctttagggaggatcaaaatgtaactgawcatcacaaaataatgtacttcttcagaaaaaagaatttactctaactaaaaatattcctatcacattttggctaagtatacagtgggaaaacatgacactaacctttttctactaaaggaatttgtatctaaattattttttataggaaatggatatgtttatcacagaatctgaacacaccatacagataaaagaattggttcttaatgttttgatcattgccagaacaagcacatttccggatttatttatttttttcccaaaaggttgagtaagacataacaaacactccctgccacaggcatggcttggcggtaggtcggatacctgggttatataaatctttacgctgagcgtttatgacatttcaacttagaagttcattcagtttgatgattgaggcagcaggcaattatgacattaaagagttcacagaccttaacccaagacccaa

SEQ ID NO: 404420 - DNA, 537 bp, Homo sapiens
gggtttttatttagcacacatttataataaacacatgatgaaatttggatttttctttagggaggatcaaaatgtaactgaamatcacaaaataatgtacttcttcagaaaaaagaatttactctaactaaaaatattcctatcacattttggctaagtatacagtgggaaaacatgacactaacctttttctactaaaggaatttgtatctaaattattttttataggaaatggatatgtttatcacagaatctgaacacaccatacagataaaagaattggttcttaatgttttgatcattgccagaacaagcacatttccggatttatttatttttttcccaaaaggttgagtaagacataacaaacactccctgccacaggcatggcttggcggtaggtcggatacctgggttatataaatctttacgctgagcgtttatgacatttcaacttagaagttcattcagtttgatgattgaggcagcaggcaattatgacattaaagagttcacagaccttaacccaagacccaa

SEQ ID NO: 404421 - DNA, 596 bp, Homo sapiens
tgaaatcagtatgtctaagagatatctgcactctcgtgtttattgtagtgctattcacaatagccaagatgtggaatcaacctgtgtccatcaacaaatgactagataaagaaaatgttatgtatacacaatggaatactattcagccttaaaaagagaaggagcccaggcgctgtggctcacgcctgtaatcccagcactttgggaggccgaggcgggcggatcacgaggtcaggagatcaagacaatcctggccaacatggtgaaaccccatccctcctaaaaatacaaaaaattagctgggcgtggtggtgggcgcctgtagtcccagctaatcgggaggctgaggcaggagaatggcgtgaacccaggaggcggagctygcagtgagccgagatcgcgccactgcactccagcctgggcgacagagcaagactccgtcttaaaaaaaaaagaaaaaagaaaaaaaaaagagaaggaaatcctgtcatttgtgacaacataaattaatctggaggacattgcgctaagtgaaataagccaggcacagaaagacaaatgctgcatgatctcacttctatgtggaatctaaaaaa

SEQ ID NO: 404422 - DNA, 564 bp, Homo sapiens
atgtaagggtgcatttggcactattttctttatttaggctacaaactctatccaaattgtgaaggactttccacattagtaattaatagggccccattatgctaactatcatccaacttaggacatcttagaggaaagataagagatgaataatttgaagtaattttcttgtaatcatgccaatcacttgagcaaagtagttattaaaggaaacagtattatgatgaattataggacatctaacactgtataccttttcttatcagctgcttagagcttctgattcttaaaaaaaaaaggcaaacaagtagaagtctrttccgaataacactcttcttactgtaaataatagtttgtttagcaaaccatgaattttaatgaggctcgaaagacagactttaccttatttctgttcatctccttgaaaagagctgaagtttgtcagctttaccttcccttagaaggtagatgtaacaagcgtgagtcacctttgatgacaagggattcttccagttcagatttgctgaagtgattagacattatttatctaattaaatgttcaaa

SEQ ID NO: 404423 - DNA, 563 bp, Homo sapiens
gtatttttttttctttctatttcttttttcttttactttttatttcctctttaaagaaaatgattggcagcactcaacctcaaggaactgatctatcaaaaccaagctgggataagtatttctttgagaaataatatatatttaccaacaggctctattctgcccccttgtttcacagcaccttgaatatcacttccttttcctgcccaaagcaggaggtaaccctgtattaaaagcatagtagcctgtgtgtgtgtacaatacacacatacagcacacatgtctctatttagagaytccatgatatgtgttctatatacactttacagtcccttttcttaatgtcaaaaatataatttccagcgtctaaagagtgttttcaaagacttttgccctattttttaaaatagtgtctaaatatgattaagtgtcttcccagagaaaagtcaaagaggctcctagtgttaatttccctattgcttaagacttaagcttttaatttattttatcaaggttgagggagtatagtaattgttgggacaacgcccttccaaaagaaatcg

SEQ ID NO: 404424 - DNA, 563 bp, Homo sapiens
gtatttttttttctttctatttcttttttcttttactttttatttcctctttaaagaaaatgattggcagcactcaacctcaaggaactgatctatcaaaaccaagctgggataagtatttctttgagaaataatatatatttaccaacaggctctattctgcccccttgtttcacagcaccttgaatatcacttccttttcctgcccaaagcaggaggtaaccctgtattaaaagcatagtagcctgtgtgtgtgtacaatacacacatacagcacacatgtctctatttagagattccatgatatgygttctatatacactttacagtcccttttcttaatgtcaaaaatataatttccagcgtctaaagagtgttttcaaagacttttgccctattttttaaaatagtgtctaaatatgattaagtgtcttcccagagaaaagtcaaagaggctcctagtgttaatttccctattgcttaagacttaagcttttaatttattttatcaaggttgagggagtatagtaattgttgggacaacgcccttccaaaagaaatcg

SEQ ID NO: 404425 - DNA, 513 bp, Homo sapiens
tcggggcataaaggcatgaaggcaataaggagacttttctcctcagaggccgcccatggctccccatgggtgtctcacacaggggagaccaactcaactggcaccccagaaactctctttccacagtttacytaaaccaaattgcatggggaagaaaggtgcaaaatgtatatattcctaatgaacaaacttcctaatcacatcttctaaaattcacacagtactcaccaagttgaccttttatatttgattagagtatctcagctcgttttgagatttttattttgcactcttcagggatttttttttattatcattttgcttacttctgagtattttatttttaaaataaaatgatgcatataaaaacctttttctagtatattcaatagttcaagctgttaaatggatatactgttgctattgtatctgtattcacctcttaaacagctcagaagtttacctgcatgtcgtaagtatgctcttattaacaccaagctattattttatata

SEQ ID NO: 404426 - DNA, 533 bp, Homo sapiens
attctgacctcagtcttctcatagtgccttctcaaatgcaacaaatcacaatcaactcaaaacgccagtattgtactgttttgaaacttttttgtccgagccacattttatagtatatcaactgtcttctgaactatctcaaacaaaatactacaaaatgttttgccactctataaaaacagttttccagtttcaaaaaaaaaaaaaaaaaaaagtctctcttcctcctgatgcccagcaaaatctttgtcacatacattagacatctttgttagagcagaccacaaggtttgaaagctattttctaaagtgggcatttttgttgctgtaataacccgcatagctcagtaaattgyctcaaaagtttctcttacactatatgtaagctgtggtcaggctgtggctgctgagacactgttggactctacttggctctgttgcatgtcttcccattctaggacgcagtgtgaaggtgctgtctgggacatgctgtttttatggcaggggcaaaagcaagaggccaaggtgtatta

SEQ ID NO: 404427 - DNA, 607 bp, Homo sapiens
ttggaacactttaagtgcattccaatgatgttacctctcaaaacaccatagctatcagcataaatacttaccagtttggggcttcctttatagtcataccttatgtttaagaaaaaataatatgacacaaaagaattacacatttttttactaaactaacytctaattaatgtaaagctgcttccgaaaattgaggtaattctgcaagtttcactctgtattactatccaaaatcaatgtgcctttttctagaccttccctcagccagaggggagcccactgacctaaagggtgagctccaggccaggcagcattcaacacaagctaacttaaaggagcttgggtcataacactggctggtaatctggcagtactctctgtggcttaaggtggtggtgggtactgggtgaggctcctctgcctttggaaaggtgaggcaagagtgggaaggactgtgttggggtttgagtgtcacctcaactgcaatacaacagaataccaaatagacttataaggtttttgactgttgtctctgactcccagacagtacctctgggcccatccagggcctggggaacattgctgccctgaagggaaggacacaggt

SEQ ID NO: 404428 - DNA, 543 bp, Homo sapiens
cattccaatgatgttacctctcaaaacaccatagctatcagcataaatacttaccagtttggggcttcctttatagtcataccttatgtttaagaaaaaataatatgacacaaaagaattacacatttttttactaaactaacctctaattaatgtaaagctgcttccgaaaattgaggtaattctgcaagtttcactctgtattactatccaaaatcaatgtgcctttttctagaccttccctcagccagaggggagcccactgacctaaagggtgagctccaggccaggcagcattcaacacaagctaacttaaaggagcttgggtcataacactggctggtaatctggcagtactctctgtggcttaaggtggtggtgggtactgggtgaggctcctctgcctttggaaaggtgaggsaagagtgggaaggactgtgttggggtttgagtgtcacctcaactgcaatacaacagaataccaaatagacttataaggtttttgactgttgtctctgactcccagacagtacctctgggccc

SEQ ID NO: 404429 - DNA, 614 bp, Homo sapiens
ttaaatccctgggcactgagtctctgttgagcttccccagtaggcaatatgttacaggtgttgttataacttgtcattagaagactttagtttatctttgttacttactgggagaagtcacttggaaacttgtgcctggttttcyttggacttcattccatgtacctgttccgctttgctgatttttccttgtatctttttgttataataaatcatatctgtaagtaaaactatatgctgagtcctatatattatcctagcaattcattgaatctgggggttgttttgggggctcccataccagtagctgtaatatttccttagttttaaaacatacattttaaaactttattgtccggacatagtatcttagacattcccttcacatagaagtggagaacagatttgtaaaaattctctcatctttcatttttatttaaaatttttttacttaagcaaatcaaatttgaagatgcaactcaatgctttctaccaaatatgtgcaactctcccagaacaaaatattgaatatttctaacaccatagatggttttctcatgtatcattctatcaagactctcccaaaggtaaacactattctgatttctaacacc

SEQ ID NO: 404430 - DNA, 601 bp, Homo sapiens
tgaaattaacagcaacaataactgtgtagttactttggcatattagcaatatttgaggttaatgcyagtatttacttgtttcctatggtattcctgtaaatatgaaatattgaatattattaattttcataaattaaaatgtgaaaggctagatctaaagaaaataccacaaactgtcttttattgctactttctttctttatttttggtaacttggtaaggcagtctgaaatctttaattcctaaaggtacttacatttgggagctgacagaaggcttcgtcaatataggctaaatcatcatttccttttgataggattggtgtattccacttggatctatgttattgtacaaaagagttattgaagctccctcaggatcatagatttattaaattactattaattgttatacttgtgaaaacactgtactgacatgaataagtgacaggctaaataaaaaattttaaaaggtggaaaagaaattaaatgctttctacggaagagataaatatttactcttctattcaaataaacacaatcagaaatgacaaggaggatattaccactgactccacagaaatataaacaccatcagagaa

SEQ ID NO: 404431 - DNA, 719 bp, Homo sapiens
agatcctagaagaagtagttactcccaaaagattagaaatgatggaaactggcaaaagatattttcaccatttagttcaaagcctatgttagcagattgtatccaggggcagagagagcctccttgggactcagracaatttgagaggcatcaaaagtccaagggcatttccctcactagccttcacgttaatctcatctactcatttcttccaataaaatatgtcgtcttagatatctaacacttaagaatcataatggatttaaattataacaaacataagacatcatgtagtacaattaatcccctcaaaaacactgaaaagttgttgagatgaagttaaccttgaactttctcaagataaaatttttaaagtgaggttttccatttacgtatatgcaaaccacaattttttataaaaaaatttgttgagctaaaatctgcttttctaaattccattcactgataataataacttataattattggccattttattatgtgctaggcactgcgtctagcactttgcctgtattattcattttaatacttccaatcactttatgaagtgctggaaactgaaggatgagagttaaatcacttgttcaaatttcacataactgtggaatgtgatggccaagatttgaacccaagtttttctgacatcagagctcgaacattagttatgtgccatatatctacctgatctgcatacaatc

SEQ ID NO: 404432 - DNA, 719 bp, Homo sapiens
agatcctagaagaagtagttactcccaaaagattagaaatgatggaaactggcaaaagatattttcaccatttagttcaaagcctatgttagcagattgtatccaggggcagagagagcctccttgggactcagaacaatttgagaggcatcaaaagtccaagggcatttccctcactagccttcacgttaatctcatctactcatttcttccaataaaatatgtcgtcttagatatctaacacttaagaatcataatggatttaaattataacaaacataagacatcatgtagtacaattaatcccctcaaaaacactgaaaagttgttgagatgaagttaaccttgaactttctcaagataaaatttttaaagtgaggytttccatttacgtatatgcaaaccacaattttttataaaaaaatttgttgagctaaaatctgcttttctaaattccattcactgataataataacttataattattggccattttattatgtgctaggcactgcgtctagcactttgcctgtattattcattttaatacttccaatcactttatgaagtgctggaaactgaaggatgagagttaaatcacttgttcaaatttcacataactgtggaatgtgatggccaagatttgaacccaagtttttctgacatcagagctcgaacattagttatgtgccatatatctacctgatctgcatacaatc

SEQ ID NO: 404433 - DNA, 719 bp, Homo sapiens
agatcctagaagaagtagttactcccaaaagattagaaatgatggaaactggcaaaagatattttcaccatttagttcaaagcctatgttagcagattgtatccaggggcagagagagcctccttgggactcagaacaatttgagaggcatcaaaagtccaagggcatttccctcactagccttcacgttaatctcatctactcatttcttccaataaaatatgtcgtcttagatatctaacacttaagaatcataatggatttaaattataacaaacataagacatcatgtagtacaattaatcccctcaaaaacactgaaaagttgttgagatgaagttaaccttgaactttctcaagataaaatttttaaagtgaggttttccatttasgtatatgcaaaccacaattttttataaaaaaatttgttgagctaaaatctgcttttctaaattccattcactgataataataacttataattattggccattttattatgtgctaggcactgcgtctagcactttgcctgtattattcattttaatacttccaatcactttatgaagtgctggaaactgaaggatgagagttaaatcacttgttcaaatttcacataactgtggaatgtgatggccaagatttgaacccaagtttttctgacatcagagctcgaacattagttatgtgccatatatctacctgatctgcatacaatc

SEQ ID NO: 404434 - DNA, 719 bp, Homo sapiens
agatcctagaagaagtagttactcccaaaagattagaaatgatggaaactggcaaaagatattttcaccatttagttcaaagcctatgttagcagattgtatccaggggcagagagagcctccttgggactcagaacaatttgagaggcatcaaaagtccaagggcatttccctcactagccttcacgttaatctcatctactcatttcttccaataaaatatgtcgtcttagatatctaacacttaagaatcataatggatttaaattataacaaacataagacatcatgtagtacaattaatcccctcaaaaacactgaaaagttgttgagatgaagttaaccttgaactttctcaagataaaatttttaaagtgaggttttccatttacgtatatgcaaaccacaattttttataaaaaaatttgttragctaaaatctgcttttctaaattccattcactgataataataacttataattattggccattttattatgtgctaggcactgcgtctagcactttgcctgtattattcattttaatacttccaatcactttatgaagtgctggaaactgaaggatgagagttaaatcacttgttcaaatttcacataactgtggaatgtgatggccaagatttgaacccaagtttttctgacatcagagctcgaacattagttatgtgccatatatctacctgatctgcatacaatc

SEQ ID NO: 404435 - DNA, 595 bp, Homo sapiens
tagtttggctagatatgaaattattggttggaatttcttttctttaagaatgctgaatatagacctccaatctcttctggattgtagaggttctcatgaaagaccttctgttagccttgtgtggttccctttataggtgaccagccacttttctctagctgcctttactttcatgttgaccttggagaatctgatgagtatgtgtcttagggatggttgtcttatatagtatcttgcaggggttctctgaattttctgactttgaatgtttacctgtctagtgaggctggggaaatgttcagggatgatatcctcaaatatattttccaagttgtttgatctctctccctctttcagggttgccaatgagttgtaggtttggcctttacataatctcatatcacttggaggttttattcattcttttttattcttttttctttatttttttstgactgaagtgagttgaagaagtgatttctgagcactgagattctttcctgcctggtatattctgctattaatactaattgtattataaaattcttgtagtgagttttctttcttaaaatggctattttgattttcatctctt

SEQ ID NO: 404436 - DNA, 568 bp, Homo sapiens
aggtttgacattgctgccctttggatagggctttttgattttatattctttgatgcatctgagggttcgatggtggtataatttgggtttagttgactagcttcatttctggacaatttcagggggccaaggctcagctcakcactctgttctctgaccctttaaggttaagcacctgctgtgctggaggggctgagattttcctggtctgctggcaacaccactccaatggggagtcctagcaaaagcacttcttggggcaatggcactgggtccactcatgcatgcatgcacacaccaggagcagcaggacggtggcacagtgggattggtgcttgcatgctgttggttgcaggaagacagtgtggtatcagggtctgtaattgtgtgtgcacaccagtggtggcaaggggtaggcaatgggcaatcatgtgctggcaaagcaatctggggaggctgcaggtgggtgagtgctggtgagggcccacctgcagaagctctctgatggataggcaggttctgctgataaaggagttatagaagtggccactgagaagcaccctggttg

SEQ ID NO: 404437 - DNA, 578 bp, Homo sapiens
agctccgataatggacagagtgcctcctcaagtaggtccctgacccctgtgtagcctggctgggagacasctcccagtaggggctgacagacatttcatacaggtggttgcctctctgggacgaagattccagaggaagggtcagacagcaatattagctgttctgcagcctccgctggtgatacccaggcaaacagggtatggagtgaacctccagcaaactccaacagacctgcagctgaggagcctgtctgtgagaaggaaaactaacaaacagaaaggaatagcatcaacatcaacaaaaaggacatctacaccaaaaccctatccatacctcaccaacatcaaagaccaaaggtagataaaaccgcaaagatggagagaaaccagagcagaaaggctgaaaattctaaaaaccagaatgcctcttctcctccaaaggaacacagctcctcaccagcaaaaggatgaaactggatggagaatgagtttgacaagttgacagaagtaggcttcagaaggtctgtaataacaaacttctctgagctaaaggagcatgatctaacccattgcatgga

SEQ ID NO: 404438 - DNA, 578 bp, Homo sapiens
agctccgataatggacagagtgcctcctcaagtaggtccctgacccctgtgtagcctggctgggagacacctcccagtaggggctgacagacatttcatacaggtggttgcctctctgggacgaagattccagaggaagggtcagacagcaatattagctgttctgcagcctccgctggtgatacccaggcaaacagggtatggagtgaacctccagcaaactccaacagacctgcagctgaggagcctgtctgtkagaaggaaaactaacaaacagaaaggaatagcatcaacatcaacaaaaaggacatctacaccaaaaccctatccatacctcaccaacatcaaagaccaaaggtagataaaaccgcaaagatggagagaaaccagagcagaaaggctgaaaattctaaaaaccagaatgcctcttctcctccaaaggaacacagctcctcaccagcaaaaggatgaaactggatggagaatgagtttgacaagttgacagaagtaggcttcagaaggtctgtaataacaaacttctctgagctaaaggagcatgatctaacccattgcatgga

SEQ ID NO: 404439 - DNA, 581 bp, Homo sapiens
caggcttctctggcaatcaggaagtcaaacctaacagcattagtcttgaggcttatcaacatagtgtagtttctataggatgaagcatcctatcacacagattttctaagcaccaacttgtctgattgaaatgagtcttctataatgaaaatccactacagtgaatgacttgtttactttgtccagtttctataatcaaattgcctctctgtaggacatttatataatacatttacttgatatgattttttttcttcagtgagctgtgggtttactatttactgtgaatgaagcaaacatgcttagaaagtacttacaaagccagaatttctgtttactaggtatggaaaaccaaaagtcaatgtctttaagattgctctcaatttctgtgcacagctagttttccaccattttgtctaaaacctcaatctattcctcagagttagacaattacrtaggaactttccaggcaatccactcctgtagcagccttttcaaggtgctccccaactcttttgtgaatgcaacatacagaatccacaaagggagacttgtgagaggaaggaagaagaaaagaaaat

SEQ ID NO: 404440 - DNA, 400 bp, Homo sapiens
cattatgtccatatggaaagaaaagagaaagtacttccttccttaaaacatacttcccagaagatgcacaagtacttctcatgttccattggctgaaacttagtaatgagatgatacctgacagcaagagaagctggaaaatatctttattgtaagcagctatatatccttgtaaatatatggaatacrgtggaatagtagaggactacaacacaacactatttttcagatgaatagtcaatatatactgttgttaaaagtacagaagaaatattaacctcacagcaattgcaatcaagttgtgttgaattgagacccatcttgtatcttcttccaaatcactatcatttctactttggtttgctgaacagttaggaaaacttgctgatctttacacctt

SEQ ID NO: 404441 - DNA, 390 bp, Homo sapiens
tggctaattccctcatctttttcatgtctctctcaaatcaccccttcccagtagggtattatatggtctcctagttaaaattaaccacctgcccccctacccaccaaactaaatcttgatttctggctttatttttctctagagcccttttcaccaactaccactattgacatgacctgtttgctttaatttctgtctttcacaaacaccgtgaaagcagggatttggagaatttttgctcactacaaacttagtgcctaaaatagtacttagaakatagtagatggataataagtatttattaaataaattaaaaacatgttatatctaagactggaaacataaagcatgatccatgtgaactcttcttatctgctattttgtttgcta

SEQ ID NO: 404442 - DNA, 474 bp, Homo sapiens
acaatggacaaaatttgcacttaccccatacaaagtgattgttctccctcataagtggctgctaaaaacatggatctcaggaagatacacagcagaatggtgcttaccaaagaccaagaaaggaaacagggagggaaggatgaagagagattgattaatgggtacaattatacagttagatagaagaaataagacctgttttcattagatcagtagggtaactatagctaacattaacctagtatayattttgagatagctagaagagaaaaattcaaatgttgctaccataaagagataaataattaatttaagataatggatatcccaattagcctggaaaaaaattttgaagctttacactctgccagatgcacagcatgcagtcaattactatttgctagaatattattatagttgctattgattcaagcctcactgcttttgctgcctttaagttttaagaacgaatac

SEQ ID NO: 404443 - DNA, 576 bp, Homo sapiens
agggtatcaatattttggacaatgcaagttcaacattagattttcttgatgatgtagaaatggtaaaaccccatgaaaagagcccaaggcttagctgtcaagaaagttgccatgtggctcaaagagtcttgttttaacttctaggcttatattgaaaactctggctataggaaaattcaaaagaagttcttatgttttctgtgtgtatgtcattatctgctgtgtctttgttaggagagcttctcctttcccacaaataccttccgtgtttgttttcagtattccgtttcattagtcaaatggttgactgctgaatggttgattcaccatcaatgcattacttacaatgtaaagwtggctagtcaagatattgttaaccaggaaaagctcttaaatgaagctgtggcatttccaaagatttttccttttcttccaccatagtctcctcctgccaagtaatattctgacaacttctggggctatcaccctctggccacaacattttggttgataccaagggtcgtaagtgatttcaaccatacagtatcccatctctttgaaaggggtgtgaatgta

SEQ ID NO: 404444 - DNA, 492 bp, Homo sapiens
tttgcataacaaagcgggcaagctttcaaatgataaagagtaagtgaaatactagtaggaatttttggtatgtgaagacattatacctattaaaggacttacttttagatatgtttcagatcatattataagtttgttggctgtaaatttactcactttgtaacatctaccttagtctcactttctagttttcaactactcttcccctcccaagcaatagcaaacaaggaaataaacatttctcaaatattctagtgataatagtgagattttttctyatatgaaataattaagctatagaaggtatatcagtttctatatgtcccggcttctatcaaatgccagatttcagtttccttctgaacataagtgtataaatactctattctcatattttcaagttatcaataattctgaatgagtttcataacctgccctgtcatcatgtgaaccattcttcttgatagttaggataagagttttcaaacccat

SEQ ID NO: 404445 - DNA, 580 bp, Homo sapiens
gagctgtgtgaggccagcaattggattttgaggtgaggccagtgtgaaatcctgatgcctcctattctttgcaagctgatagttcactaagaatgatgcccccagagccatggtgcgatggaatgacagacacagagagagtgagctacttcagacacatattttacatttatggataaactaaagaaaaagattgtaaaatttccaagtagcatttgaattttaattagctctcaacagcttatggcagtattccctaacacgggtatttcagactctttgagactcaaatgaatgaaaagaaggaggtaagggctaagtatgaagtagtattactctgttttctttttctttatactctagattcagactaattattagaatgacataacacacaagaattggaacccaaaggktatagacctatgatttagcttttgccatttccattttgccttgcttcatttggctggtgggagctcttggaagcttgaataggtacattgagtactttgtgtttttaacacttcataattgttcatttttctctaccttaattataacattgcaaattgtttaa

SEQ ID NO: 404446 - DNA, 621 bp, Homo sapiens
tagaatgacataacacacaagaattggaacccaaaggttatagacctatgatttagcttttgccatttccattttgccttgcttcatttggctggtgggagctcttggaagcttgaataggtacattgagtactttgtgtttttaacacttcataattgttcatttttctctaccttaattataacattgcaaattgtttaagcttaacagttccagtgtttcaccattaaaaaaattggtctctggctatgatatattcatttaatttagaatagtgagaaatatggttggcagagcctaaaggtacatattggaagatggttttcttgaatgtggggagcatttttgaaagcatgcagtaaaataggtgagaaaaaggtagactttattaaaatcaaaaacatgatacccatatacatgcctattgtgtattttatttaattatatatttaataactgactttgagaactctttgacatagaacaggtctctagctttttttcttacatgtggagaaaatwtttctcctcctaggagaaaaagcaatgatgattatggtaatgataaatgtgttctgtctcagtcggactatcaattctaaatgaaaaagacaacaaac

SEQ ID NO: 404447 - DNA, 556 bp, Homo sapiens
atcactttgggaggatggggagtttgagatctaagtggcagtacaatagttgtctggatgacagtttttatttgattgatgtttgattttaatgttccataggcattaaaagacatagcctggctaggcgtagtggctcacgcctgtaatcccaacattttgggaggccaaggaaggtggatcacttgaggtcaggagttcaagactggcctasgcaacatggcgaaaccccgtaactacttaaaataaaaaaagttagctgggtgtggtggcgtacacctgtagtctcagctactcaggaggctgaggcaggagaatcacttgaacttgggaggtggaggctacagtaagccaagattatgccactgcaccagcctgggtaacaggcaagactccaacacacaaaaaaaagacatggtctccttatggcagaacatggaaccatgagagtcaccagtagaaaagaactgacttcaacaaaatcataatgtaagagacatcagtgaggaggaaggaaaccctggaatcaggatgtttgtagcttcagtgatattcc

SEQ ID NO: 404448 - DNA, 556 bp, Homo sapiens
atcactttgggaggatggggagtttgagatctaagtggcagtacaatagttgtctggatgacagtttttatttgattgatgtttgattttaatgttccataggcattaaaagacatagcctggctaggcgtagtggctcacgcctgtaatcccaacattttgggaggccaaggaaggtggatcacttgaggtcaggagttcaagactggcctacscaacatggcgaaaccccgtaactacttaaaataaaaaaagttagctgggtgtggtggcgtacacctgtagtctcagctactcaggaggctgaggcaggagaatcacttgaacttgggaggtggaggctacagtaagccaagattatgccactgcaccagcctgggtaacaggcaagactccaacacacaaaaaaaagacatggtctccttatggcagaacatggaaccatgagagtcaccagtagaaaagaactgacttcaacaaaatcataatgtaagagacatcagtgaggaggaaggaaaccctggaatcaggatgtttgtagcttcagtgatattcc

SEQ ID NO: 404449 - DNA, 565 bp, Homo sapiens
tgttccctccaaaattcatgttgaaacttaatccccaaggtaacagtattaagagacatggtctttggaaggtgattatctcctaaaagggcagagcctccatgagcaggattagtatccctatgaaagggctccaggttgaagggcatactctcttgcccttccattcctttcacaatgtgaatacctcacattcttcccctctagaggatacagcaataagacaccatcttggaagcaaagagccattctcaccagacaatgccagcaccttgatcttggacttcccagcctccagaattgttaaggaatacatttgtyccttataaattacctagtctaaggtattttgttagagcaatacaagtagactaagaaatatagattctgcctgtgtcgatgggagatacccagggaaaaagcacatctcaaagaagtggctcaaataccatcctcagctgaaacaaagaaagaagggaataaggaaggccagggaaagcaccataaaggtaagtgaagtttgttatgcagatttaagtcagtgccttctccattgataagaatt

SEQ ID NO: 404450 - DNA, 490 bp, Homo sapiens
tgaacttaattgctcagccacaaaagattctcagggtcctttggagaccagctctgcccagaactggtctggaggggctgcagggtggctggctccaaggacttccccacccttctcgggtagggctttctttgggggtcgcagtctccaaggctcttgtgtaccttcttggtgaagtccactgcagcagtccccgarccctgcaaggaaatgaggcacaggttaattcaacaggaaccacatcatgaccttgcagttgtcttgcagtgatcctgccctccctgccttgcttctaagatagtcagaagtctggtgcaaaagaggaggtggagagcatggcaaatggtgggatcactgccgtgatcttctctagcaagctcctgctcaagaaggcaagcttgtcgtcttgactgagttaccatctgtgtccaagtacgttaagtttgcttgctcctcctaacagcgccaacttcgaaatgggcacattgca

SEQ ID NO: 404451 - DNA, 581 bp, Homo sapiens
agactgggtaattgataaagagatttaattggctcatgttccacaagctgtataggaagcatgatgctgggcagatatctgctcatcttctgggaaggcctcaggaaacttacaatcatggcaaaaggggaaggggaaacagacatgtcttacatagcaggagcaggagcaagagaagttgggaaggtgctacacgcttaaattaccagatctcgtaagaactcacgcactatccctggaagagcaccaaggagatggtgctaaaccattcatgagaaaccrcccccatgatccaattacctcccaccaggccccacctctaacatttgggattatgatttgttattaaatttgggcagggacacagatccaaaccatatcaatgtatcttgtaagatgggtctgatcagaagaaattctctcagtttttgtttattttagaatctctttattttacctgcatttaaaaaaattaataaacgttattttctaggcagttttaggttcacagaaaaattgaatggaaattagagatagttctcatatacccctgtgtccccaaatgcacaacttccctcact

SEQ ID NO: 404452 - DNA, 608 bp, Homo sapiens
tgtgatttaaattaaggcaagcaatcattaagtggagagcagggagggcatttcaagcaggaaaacagaaagtgcaaaagtgtggaagttagaaatactgargaggatctgagttagagaagtgattcccagagtgtggtgctttcacaagcatcatcagcatcacctaggaccttgtttttaatgcagattcttaagtcccactccagagctaatgaatcagaatctttatgagtggaatgtagcactctgggttttagtgacctctgtagatgtttcagaagcaggttaacattggagaaccactgaagtagagtgttttttttttatgagctctaatagttgggcttctaatatgcccaacttctaagtgattttctaggttcttttttaagaaatgagaaagaaagagcacataagtactttctcttagtgaatgctttaggaccttattagagataatcagtcatgagaagctggtcatgatgcagcaggtaggtgttccacttttgctggaaataagtcacctctgattttagttggaattttattcgttccaattgttttaatgaaccaccctacagttattctgcatatggcctaattag

SEQ ID NO: 404453 - DNA, 608 bp, Homo sapiens
tgtgatttaaattaaggcaagcaatcattaagtggagagcagggagggcatttcaagcaggaaaacagaaagtgcaaaagtgtggaagttagaaatactgaagaggatctgagttagagaagtgattcccagagtgtggtgctttcacaagcatcatcagcatcacctaggaccttgttyttaatgcagattcttaagtcccactccagagctaatgaatcagaatctttatgagtggaatgtagcactctgggttttagtgacctctgtagatgtttcagaagcaggttaacattggagaaccactgaagtagagtgttttttttttatgagctctaatagttgggcttctaatatgcccaacttctaagtgattttctaggttcttttttaagaaatgagaaagaaagagcacataagtactttctcttagtgaatgctttaggaccttattagagataatcagtcatgagaagctggtcatgatgcagcaggtaggtgttccacttttgctggaaataagtcacctctgattttagttggaattttattcgttccaattgttttaatgaaccaccctacagttattctgcatatggcctaattag

SEQ ID NO: 404454 - DNA, 608 bp, Homo sapiens
tgtgatttaaattaaggcaagcaatcattaagtggagagcagggagggcatttcaagcaggaaaacagaaagtgcaaaagtgtggaagttagaaatactgaagaggatctgagttagagaagtgattcccagagtgtggtgctttcacaagcatcatcagcatcacctaggaccttgtttttaatgcagattcttaagtcccactccagagctaatgaatcagaatctttatgagtggaatgtagcactctgggttttagtgacctctgtagatgtttcagaagcaggttaacattggagaaccactgaagtagagtgttttttttttatgagctctaatagttgggcttctaatatgcccaacttctaagtgattttctaggttcttttttaagaaatgagaaagaaagagcacataagtactttctcttagtgaatgctttaggaccttattagagataatcagtcatgagaagctggtcatgatgcagcaggtaggtgttccacttttgctggraataagtcacctctgattttagttggaattttattcgttccaattgttttaatgaaccaccctacagttattctgcatatggcctaattag

SEQ ID NO: 404455 - DNA, 537 bp, Homo sapiens
ttcaatgaccccaactcactgccagctatgacagccaggttctgcctctttgctccagtagagtcctgtttatattacatttttgtaaatatgttattaccttttatgtatctttctatatgtttrtactcacctccctattttttcctgtttgactttatgttccctgagggtaagtctttacgttttattagcaaagaacctctccataaatccttataggattggtttgcattactttgcattattgaatgattccaatcaccaaaaacttctttaggctaagcttaagtgtgatcacatgtaactttctaaccgtcagtctttattctgttatttgggggaaacacaggataagactaatatctcttacttattgaagttctcaaaatagttgaaagcagttaacatatacttcctaattttcctgtttccagagaaaactatgctcagtgcctttacctcatatcttatcatttcaagtcaggctattatcttttaaggtttaggcactgttatttgaatataacataacat

SEQ ID NO: 404456 - DNA, 537 bp, Homo sapiens
ttcaatgaccccaactcactgccagctatgacagccaggttctgcctctttgctccagtagagtcctgtttatattacatttttgtaaatatgttattaccttttatgtatctttctatatgtttatactcacctccctattttttcctrtttgactttatgttccctgagggtaagtctttacgttttattagcaaagaacctctccataaatccttataggattggtttgcattactttgcattattgaatgattccaatcaccaaaaacttctttaggctaagcttaagtgtgatcacatgtaactttctaaccgtcagtctttattctgttatttgggggaaacacaggataagactaatatctcttacttattgaagttctcaaaatagttgaaagcagttaacatatacttcctaattttcctgtttccagagaaaactatgctcagtgcctttacctcatatcttatcatttcaagtcaggctattatcttttaaggtttaggcactgttatttgaatataacataacat

SEQ ID NO: 404457 - DNA, 537 bp, Homo sapiens
ttcaatgaccccaactcactgccagctatgacagccaggttctgcctctttgctccagtagagtcctgtttatattacatttttgtaaatatgttattaccttttatgtatctttctatatgtttatactcacctccctattttttcctgtttgactttatgttccctgagggtaagtctttacgttttattagcaaagaacctctccataaatccttataggattggtttgcattactttgcattattgaatgattccaatcaycaaaaacttctttaggctaagcttaagtgtgatcacatgtaactttctaaccgtcagtctttattctgttatttgggggaaacacaggataagactaatatctcttacttattgaagttctcaaaatagttgaaagcagttaacatatacttcctaattttcctgtttccagagaaaactatgctcagtgcctttacctcatatcttatcatttcaagtcaggctattatcttttaaggtttaggcactgttatttgaatataacataacat

SEQ ID NO: 404458 - DNA, 537 bp, Homo sapiens
ttcaatgaccccaactcactgccagctatgacagccaggttctgcctctttgctccagtagagtcctgtttatattacatttttgtaaatatgttattaccttttatgtatctttctatatgtttatactcacctccctattttttcctgtttgactttatgttccctgagggtaagtctttacgttttattagcaaagaacctctccataaatccttataggattggtttgcattactttgcattattgaatgattccaatcaccaaaaacttctttaggctaagcttaagtgtgatcacatgtaactttctaaccrtcagtctttattctgttatttgggggaaacacaggataagactaatatctcttacttattgaagttctcaaaatagttgaaagcagttaacatatacttcctaattttcctgtttccagagaaaactatgctcagtgcctttacctcatatcttatcatttcaagtcaggctattatcttttaaggtttaggcactgttatttgaatataacataacat

SEQ ID NO: 404459 - DNA, 601 bp, Homo sapiens
ggtcaaaccaggctccttcagtaaatatttgggccagctgggaacaygatgataaacaatcctgctattaaggagctacaagactaagaggcacagacagatcatcatcatatagcactgcaggtgcaaggaggaggtgtgcaaaggcatccaggtgagatggcaaccaggtcctataagacacaggtgcaaacacattcctgtgccccccagccattcccttccacaagtcatccgtccttggtcttcaatgcttctcccctaggttgagtggctcaggtcaccaccagcagcagggctttggactttgtagaagctaggtctcctgcaaagctagttctagtctgctgtctgccagggaaggtaccacaaacacttgcaaggagggaacttagcccttctcagctaactgacacttttaaattcacttccctccaccgcccccctgcccccatcaaaagagtacattggagagctactccagtaggccagctatcaagagccctgcttccgtcttagatactctacttaacagaatgcattttgcagtcactgtttctcctccacctgactctaagcaggcttcagggctctctcggct

SEQ ID NO: 404460 - DNA, 640 bp, Homo sapiens
acttggttttggcagccttagcaaactaacacatctgtcttccaagggtttccatgtccaacattttctccaactctgctcctattatttcttatttcacagccgtgtcacacacttgtccaagtctcttgagtaaggctgtaaacccttggattagggttttagcacttctgtgcactgagggagaggtggagcatccaatttgccttacacacatgggacggtagggggcgacagaatcagaggcaggagtttagaaatggcagtaaatcctggagattttgctgggctacagtaatgaggataggcgaagagcaggaagctgctgcagaggtcacagcaaatccctttttctttcaagacctgatgggatgctgtcaatcccaagtaatcagagtcaactgtgttttcctctatgaagcatggaactctggtctgctttttatgtggtgtatctggttaacatagcaaaacttatatgtgattattaygtgtcaggtactatttaaagtgctttaataaatttctatattgtaaataatattttaatttcatactttatttttattatatcttatataaattaacacacacacatacagcctaagccaggtttgtccctataaagtatttattctat

SEQ ID NO: 404461 - DNA, 601 bp, Homo sapiens
tgaatggttatagaagatccaaattctattttgttgggggsgggtaggggtggggtgaaatagctcttattaggttctttgcagacaaactgccagagaaattactgatatactgtcaaggtcaattagtcattatgtgtgggaagcaatattaaacaaaaatgaataagaaggaagagaaaaggcaacaggacttttaactcaagtaaatattggaacagaaacctttttctgactaaaaaggttgttaatataataaaaaggcatgaaaggtgtaagaatctaatgcaaattaccagagagaaaacataatattttcccagaagacattggtcttttgttaaaatataacaatgggaaaaatagaagcagtagtttaagtaagtggaagggaagaatcaagaagttactattttatttttatttgataagatgtttatttcctgaactttctttgcattgcttttattctcataacttatcataaatatgctttcctccaatttgctaagttttatgctgcagagtattaaattcctcaacttctgttgttcattattctgatcctaatcacacctttatctatatgcacttatttatt

SEQ ID NO: 404462 - DNA, 481 bp, Homo sapiens
ggcattccatgcatccatgcctttgaacacactatctcctctgcttgaatgacctttgctgcttatgtagaaggaaaaaacagttacattcatacctaaggttccagagcttccaagaccttgtcaaagaaaatagactcctagcttttctmtactgaatgcaatctccgttatcaggccataagctccttaggagctagcgctagatctgagtgaacactgccagtagtgtgatgaatttggcttttataggctcaaaagaaatattgttaaatgtacaacattttttgagccatttgttaaatttttggcagcttgaagtcatctatggtgggagctgacaaacactacattaaaaaaagatcaaaaaatttgttggataaattacattagagtaatttttaaagtcacatattcaagttgtagtgatttaaattaaataaagttagtgcagattataagaattgatgagtattgaatt

SEQ ID NO: 404463 - DNA, 591 bp, Homo sapiens
tttttacaaggtaaattaaattgtgtatgatattttttattctttaaatgtcgtacacaaatgcatcatcgcactttagccttaattggccaaccctgggtattatcctgactaacaatggaagaaattaaagaatcatgagtcttcaaagtcagcttttgaagcsagcctcaacctacttaattacagttgtgcgtgtgtgtgcatgtacgttgcatattttttaatggaatcttcatactagtcgtgagaatggatagtcttctatttttcttttaattttgcgtataaggagagatggagattatgatagaataaacaagttgctgaatgaaggacacacagttaagaagtgacttagtcttacctccagtgaaacctgtggaatatatatatatatatggaatatatatacacatatatgtatactgaactttgcaacaatttacttgatttacatttggctcttttacaaaaagtcagagtgagaaagagaaaattccatagaattagaatattctaattctgatttatacaaactatcatgggtttatagcatctgaaggcacccatttgagtaggggggtgtta

SEQ ID NO: 404464 - DNA, 591 bp, Homo sapiens
tttttacaaggtaaattaaattgtgtatgatattttttattctttaaatgtcgtacacaaatgcatcatcgcactttagccttaattggccaaccctgggtattatcctgactaacaatggaagaaattaaagaatcatgagtcttcaaagtcagcttttgaagcgagcctcaacctacttaattacagttgtgcgtgtgtgtgcatgtacgttgcatattttttaatggaatcttcatactagtcrtgagaatggatagtcttctatttttcttttaattttgcgtataaggagagatggagattatgatagaataaacaagttgctgaatgaaggacacacagttaagaagtgacttagtcttacctccagtgaaacctgtggaatatatatatatatatggaatatatatacacatatatgtatactgaactttgcaacaatttacttgatttacatttggctcttttacaaaaagtcagagtgagaaagagaaaattccatagaattagaatattctaattctgatttatacaaactatcatgggtttatagcatctgaaggcacccatttgagtaggggggtgtta

SEQ ID NO: 404465 - DNA, 591 bp, Homo sapiens
tttttacaaggtaaattaaattgtgtatgatattttttattctttaaatgtcgtacacaaatgcatcatcgcactttagccttaattggccaaccctgggtattatcctgactaacaatggaagaaattaaagaatcatgagtcttcaaagtcagcttttgaagcgagcctcaacctacttaattacagttgtgcgtgtgtgtgcatgtacgttgcatattttttaatggaatcttcatactagtcgtgagaatggatagtcttctatttttcttttaattttgcgtataaggagagatggagattatgatagaataaacaagttgctgaatgaaggacacacagttaagaagtgacttagtcttacctccagtgaaacctgtggaatatatatatatatatggaatatatatacacatatatgtatactgaactttgcaacaatttacttgatttacatttggctcttttacaaaaagtcagagtgagaaagagaaaattccatagaattagaatattctaattctratttatacaaactatcatgggtttatagcatctgaaggcacccatttgagtaggggggtgtta

SEQ ID NO: 404466 - DNA, 538 bp, Homo sapiens
aaaagaataaaatacttaggaataaattaatccaaagaagtgaagatgtctcaccataaatggaaacattatttaaagaaattaaagatctaagtaaatagaaaagcaacttatactaacagatcaagatatttattattgttaaaaatgtaatacccactccccccacccaaatttgtctactcaacacaatcctacaaaatctcaggtagtttttagcagaaattggcaagataatactaaagtgtgtattaaaatgcaatgataaaatataaagaaattattagaattaataagagttttgacatggttgctggcaaaagtcagcaaacacaatttatatctaattccagcaataaacagtaaataaaattttaccatgtaaatatcatatgtgaaaagactgaaataaaaaatatctagaaatagaaacccttggctttgatggctctataaaatctgccagttgatcctgttcttagggtctcatccytaagctcctgcctctaaaacctcatccctaagaacctgctgccaa

SEQ ID NO: 404467 - DNA, 592 bp, Homo sapiens
tgttaagaactcttcgcacattatattttaaaactcttacatcaatatttggaggttgaaattatcgtctctattattcaaattagaaatgtgatgcttaagaatgttaaaataatttgcttgtggtgacacaaatagcaagtggaagaacttggattgcaactaggaagtcaattctatattccatgtgctaaatcgtaatattctacagtcttcactgagtagcatgaatatatttcctgaacatatttttatacctcctccattatttttaaataaagaatttaggtgactagaatcatctagggtattagtaatgaacaatctcagtttatgaacaacgaaaaaagaacaatgacagcaaacttaagttcaaaggccatgttacactgagtgtgtgtaataaatctctcatattttaataaagataaaaattttctaataraaaataagtttcttcccatgctctttaagtgttaaacagttagaaagcataagcatgaagggtgatatagtttgtatgtttgtccctgcccaagtctcatgttgaattgtaatccccggtactgaaggggggacctggtgggaggtg

SEQ ID NO: 404468 - DNA, 587 bp, Homo sapiens
atgatgctctcagtgcagacacatttgatgaaatggtggccttcgataattgcttctgttctctgttttcatgtttatttcttttgaaaaactccaaagtcttgtgatttaatacagggtgcttggtttccatgtggcgaacgttttaaagagttcacagctttgttggatagctagtccccacatattatacaaagtgggcttggagaatgtgaatcaactattgtaatgaacgtgtaatttatgtaggacccttggtattttcctttaaatgcagctttctttttgttggcagtcttagrgtcttctgctctctcattatttggtctttctccctttgcaaggaagatctccagtgatgtttgttctatacccattttggctagggttagcttgtgggcttaccaaaagcgtgctggagatgagtgcacagtggaaaaaagagatgtacatgaaagtggtaagtaaaataatgggtgggccatgtgcaaactaaaataaatgtcagattctgacataaagcctgccatgagatgtagctatacaattgaagtacctgaactcacttggcactataaagcctgcca

SEQ ID NO: 404469 - DNA, 587 bp, Homo sapiens
atgatgctctcagtgcagacacatttgatgaaatggtggccttcgataattgcttctgttctctgttttcatgtttatttcttttgaaaaactccaaagtcttgtgatttaatacagggtgcttggtttccatgtggcgaacgttttaaagagttcacagctttgttggatagctagtccccacatattatacaaagtgggcttggagaatgtgaatcaactattgtaatgaacgtgtaatttatgtaggacccttggtattttcctttaaatgcagctttctttttgttggcagtcttagagtcttctgctctctcattatttggtctttctccctttgcaaggaagatctccagtgatgtttgttctatacccattttggctagggttagcttgtgggcttaccaaaagcrtgctggagatgagtgcacagtggaaaaaagagatgtacatgaaagtggtaagtaaaataatgggtgggccatgtgcaaactaaaataaatgtcagattctgacataaagcctgccatgagatgtagctatacaattgaagtacctgaactcacttggcactataaagcctgcca

SEQ ID NO: 404470 - DNA, 594 bp, Homo sapiens
tcagctttgttcaccaaatgtgaactagatgataggaacaacttaggctgtatgtgaagaacgcacacacacatttaatgttgtcatacagagaaggaagttgtgttcatatgtaggctacaaatagttaatctctttttaaaccttctgaaattttgaagtcttaaaaagtggaacaataattcgaactgccacaggggttgtttagaaaataycataaaatataaaataaaattggagtataagaatatgtcttaagtggatttgctattaaggtgtatttgttatctttattgtttatttctgtgtcttaagaataaagtccatgggaatttaaaaaagcacattttaatttggataatatatattagatgaaagagatttctaaaatgtatgcctgccttatgtcaaatgagcttggtattctcaataaagttctacaattgagatatgtattattacaatttgctctaatatgtcgtttctttgtattcccttccaacgtctctctctcttttccttcccttccctttttctccccaccattccctcttttgaacccaaatccaaatcaaagctacctggaagggaaga

SEQ ID NO: 404471 - DNA, 594 bp, Homo sapiens
tcagctttgttcaccaaatgtgaactagatgataggaacaacttaggctgtatgtgaagaacgcacacacacatttaatgttgtcatacagagaaggaagttgtgttcatatgtaggctacaaatagttaatctctttttaaaccttctgaaattttgaagtcttaaaaagtggaacaataattcgaactgccacaggggttgtttagaaaatatcataaaatataaaataaaattggagtataagaatatgtcttaagtggatttgctattaaggtgtatttgttatctttattgtttatttctgtgtcttaagaataaagtccrtgggaatttaaaaaagcacattttaatttggataatatatattagatgaaagagatttctaaaatgtatgcctgccttatgtcaaatgagcttggtattctcaataaagttctacaattgagatatgtattattacaatttgctctaatatgtcgtttctttgtattcccttccaacgtctctctctcttttccttcccttccctttttctccccaccattccctcttttgaacccaaatccaaatcaaagctacctggaagggaaga

SEQ ID NO: 404472 - DNA, 657 bp, Homo sapiens
ttgcttgagtgctggaccttagttatccctaagtttcttgtgaggcgtgtgatgtattgacaagaacttaaagatttggtcatcagggtttctaggtctaaayatgagttctaccgtttactccctgggtgatcttgggcaaggtgctgaactactgtaagcctcaattctactttttaaatgacagtcagcattaccagataacgttggagcattaacaagaatatctgtgtcaaaaagtaaggaagtagtcaataaataagtaaataggtgaggataatagtatggcaaaggggcaccagaatttctcaacaaccaatgtttgaacaactagagcagcaaaataaataacacagttctagattataatctgaagtataaatatacatgaggccatactgatgtaaagaaatgacttcataaataaatacataaaataaaagtgtcaagtcatgcttacaaggaagattccaaacaacagcgtaggtagattctgtcccctccagtacccaggagatgcgatataattcctgtgttcctttcttaacattgactggggcatgcacttagtgactcgttgtcaaagaatatagtaagaaagggggagaaagggtatttttatcgtggagaaactaggtaaatactaccttaaccaaa

SEQ ID NO: 404473 - DNA, 657 bp, Homo sapiens
ttgcttgagtgctggaccttagttatccctaagtttcttgtgaggcgtgtgatgtattgacaagaacttaaagatttggtcatcagggtttctaggtctaaacatgagttctaccgtttactccctgggtgatcttgggcaaggtgctgaactactgtaagcctcaattctactttttaaatgacagtcagcattaccagataacgttggagcattaacaagaatatctgtgtcaaaaagtaaggaagtagtcaataaataagtaaataggtgaggataatagtatggcaaaggggcaccagaatttctcaacaaccaawgtttgaacaactagagcagcaaaataaataacacagttctagattataatctgaagtataaatatacatgaggccatactgatgtaaagaaatgacttcataaataaatacataaaataaaagtgtcaagtcatgcttacaaggaagattccaaacaacagcgtaggtagattctgtcccctccagtacccaggagatgcgatataattcctgtgttcctttcttaacattgactggggcatgcacttagtgactcgttgtcaaagaatatagtaagaaagggggagaaagggtatttttatcgtggagaaactaggtaaatactaccttaaccaaa

SEQ ID NO: 404474 - DNA, 611 bp, Homo sapiens
actggaagaaaatatttgtaaagtatgtatctgataagggattgtatgcaaaatatacaaagaaatcctacaattcaacaataaggaaacaatcaatttttttaaatgggcaaaagatctgaacagacatctcaccaatgaaagtacacagagggcaggtaagcatatgaagactctcaacatcattttattggaaaattgcaaattaaaacatttgtagcttcggccgggcatggtggctcaatcctgtaatcccagcactttgggaggccgaggcgggtggatcacctsaggtaaggagttagagaccagcctggccaacatggcaaaaccctatctctactaaaaatacaaaaaattagctgggcatggcggcggacacctgtaatcccagctacttgggaggcttaggtgggagaatcgcttgaacccaggaggcagagattacagtgagccgagatcccaccattgcactccagcctgggcaacacgagggaaactctgtctcaaaaagcaaaaacaaaaacaaacaccatttgtagcctcacagtggagaaacctcataaacattaacttagccaggtaaacaagatcataatcaatagtaatgt

SEQ ID NO: 404475 - DNA, 611 bp, Homo sapiens
actggaagaaaatatttgtaaagtatgtatctgataagggattgtatgcaaaatatacaaagaaatcctacaattcaacaataaggaaacaatcaatttttttaaatgggcaaaagatctgaacagacatctcaccaatgaaagtacacagagggcaggtaagcatatgaagactctcaacatcattttattggaaaattgcaaattaaaacatttgtagcttcggccgggcatggtggctcaatcctgtaatcccagcactttgggaggccgaggcgggtggatcacctgaggtaaggagttagagaccagcctggccaacatggcaaaaccctatctytactaaaaatacaaaaaattagctgggcatggcggcggacacctgtaatcccagctacttgggaggcttaggtgggagaatcgcttgaacccaggaggcagagattacagtgagccgagatcccaccattgcactccagcctgggcaacacgagggaaactctgtctcaaaaagcaaaaacaaaaacaaacaccatttgtagcctcacagtggagaaacctcataaacattaacttagccaggtaaacaagatcataatcaatagtaatgt

SEQ ID NO: 404476 - DNA, 392 bp, Homo sapiens
aacttctcagatgtgatgcttgaatttgttgcccattttttttatttttcctcccaagtgcctttataccatttaagggactcttctgcaaagaagacggaatttaaggtaactycttcacttggtgttattgatggtggcatatgatacttggtccagataacgggcctgaatttccaaaggtattcaccactgcgagctattcttaaaatctaagaatgaattgacaataatagagtttcacctactaggaagacagatcatttgggggctagagtgcttatgttccagtccttaaaagtcacatcgctggaatgactcctgatgtttgtcagaagctggatcagatcacaaaagcccttccttggagcaaggagcctccgccaggactg

SEQ ID NO: 404477 - DNA, 600 bp, Homo sapiens
ggcttgtgatgtgggggcagcctcaaagatttctgaaaagcctttttgacctttttttctattgtttgactattagcacctgactccctttagtcacgttcatctcttagcaagtggttttactgcagtacccttggatttctctccttaaaatattcttctctaccgcatagccaggctgaaaattttctaaatatttactctctgcttcctttttaattataaattccatctttaggtcatttcctygctaccaaatcaggttgtaagcaattgaaagcagccatgtcacttcttgaaggctttgcaccttagaaatttattctctcagataccttagaacagcattcttaaatttgtcctttcattaatcccaagggcataaatgcaatgcaggaaagttctttgctaaggctaataaggatgacctttgctttactttccagtaagttcctcatttccatctgaggtgccatcagcataacttttactgtctatatttctatcagaattttcatcacaaccattgtcttagttcatttgtgtttctataaaggaatacctgaggctgggtaataaattttttaaagtttatttagc

SEQ ID NO: 404478 - DNA, 590 bp, Homo sapiens
cttctctggtctcttgcagtgtgtgcttatctaccttgtttatgtattctgccaacttctttaagtctgtattttaatccctagcagttgggtaaacattcataacgtgtgtgtaacaattatttctgaactgctctcctttcaaaagcattgataatcgaaggttaatgcacaatcgaattttttccttcctggatcaagcctataacygtaacactgtgaaactctcagaaattgctctattacaccaagaagcttacactgctctttgacacacaacactttggatggtctgactatcttgttatgttccgattgctacagtaatcagttagaggccagacacatgttttattataagagcaaacagagtgtatctgctctagggatcagagagagagaaagataccagatttgacagcagcagacttctaaaaacagactgacctgaaatataaatttctggagctagagtagttagtgttgtgacaatcagtttacatctaaataacagaatctacaccagagaccactcagcaaaaaaaaaaaaaaaatggtgttttaataagattcttgcgggtttgcatttc

SEQ ID NO: 404479 - DNA, 575 bp, Homo sapiens
gttattgttcttctagagagaatgtgcattttgccagcctgatcagattttatcctcatgatgtttagaggtacatrttgcttctccggttttatacatgaaataattgaagcttgaaaaagtaactttaggctcaggtagttatagaaaccatcagaatttgaacccaggtcttatgtgatcctgaagctactgcccttggttaacattttgcagacatctccattttcctcagtgacaaccaaggaaatcatatgtattagaaaaatctcagggaaattttagatatatttagaagcatgaggaaaaaaatgggaattaaaaaaaaaaaaatcacatctttacgaaaggtacagaagaatgggccgggcacggtggctcacgcctgtaatcccagcactttgggaggccgaggagggcagatcacgaggtcaggagatcgagaccatcctgactaacacggtaaaaccccgtctctactaaaaatacaaaaaattagccgggtgtggtggagggcgcctgtagtcccagctactcgggaggctgaggcaggagaatggcgtgaacccaggagg

SEQ ID NO: 404480 - DNA, 553 bp, Homo sapiens
gtcgctgttcagtagatgacatctgctggaatgaatatggtctagatgctgctccatctcctttacagattgtatgcttgtctagaggatgtatgccacattttatccatgaaccttttctaccacacgcaccattctttatccccatgccccatyattacgccaatgccattccctaataaatgaatgtgaggggttttaattattttgtgccaaatttcttcaagcaactatatgttgaactcttattatcaaatgatgagtttgagtctccaaaattactacttgttttcattaattgacttagtgatacgttacctaactctgttgcatagttttggtccactaagtggctgcaggaaggaaggaaatgaagtgctgggcatttcgttaggcgattacaagaacacaacttttaataccaaagtatttatcatttatgattttcctagttctcttgcagtgagctaagcaacttgttttgtgatttatttattggaacttactaagcttttttttttttttagatagacgtttcaaggaaaaaggaagt

SEQ ID NO: 404481 - DNA, 573 bp, Homo sapiens
agtgctacatgctgtaattatgagtctatgttatccccggaaatatcatgaaaaataaaaataaaattgattgagttgaaaatggtccaacagttacaaagaaatatttgacattgtaatcatgcatcagttagtttttggctctttaattttgaaagcagatgtttgattgcttgtttaaagcctgcgtaaaaaaccccaggcaamccttgcaaaagctcaaaatattcttaagcagggatatcaattgcataatttcctagaccttgcagattggttcaaattaacccacagcatatttgaaagcctttttcttttgtgagcatctaaccaattccccattgctctcctcctgggtatctattcgttatcaaaaccggaagcacagtgtggcatccaaattggagttcagtgtcagcagaggttacatttgtacatttcccagaaaaggaacaattattgtcataggagaggattaatgtacggccattttgggtctttattataatcttttctttaagaatgaggaattggaatgttaatgtattcaataatctatgaattatacaggta

SEQ ID NO: 404482 - DNA, 491 bp, Homo sapiens
gtctggctcagttactgcttctatggccacaggttcagctacccgaaagggtatagtggtattaatagacccattagcagccaatgggacaacagacatgcatacctcagttccaagagtgaaaggtgggcaaagaaatattactgatgacagcagagaccagccttttatcaagaagatgcacttcaccataaggctaacagaaagtgccakcacatacagagacattgtagtgaagaaagaggatggattcacccagatagtgctatcaactagatcgacagaaaaaaatgcactgaatacagaagtaattaaagaaatagttaatgctctgaatagcgctgctgcagatgacagcaagctcgtgctgttcagtgcagctggaagtgtcttttgctgcggtcttgattttgggtactttgtgaagcacttaaggaataacagaaacacagcaagccttgaaatggtggacaccatcaagaactttgtga

SEQ ID NO: 404483 - DNA, 491 bp, Homo sapiens
gtctggctcagttactgcttctatggccacaggttcagctacccgaaagggtatagtggtattaatagacccattagcagccaatgggacaacagacatgcatacctcagttccaagagtgaaaggtgggcaaagaaatattactgatgacagcagagaccagccttttatcaagaagatgcacttcaccataaggctaacagaaagtgccagcacatacagagacattgtagtgaagaaagaggatggattcacccagatagtgctatcaactagatcgacagaaaaaaatgcactgaatacagaagtaattaaagaaatrgttaatgctctgaatagcgctgctgcagatgacagcaagctcgtgctgttcagtgcagctggaagtgtcttttgctgcggtcttgattttgggtactttgtgaagcacttaaggaataacagaaacacagcaagccttgaaatggtggacaccatcaagaactttgtga

SEQ ID NO: 404484 - DNA, 581 bp, Homo sapiens
ttctgtgttctctagcctgctgttcatgtatattatagaactcaaacagttgttcttcagtttaccacaacttctcatgggttgcactctcaatatcaccgtaaagagcccgccagtactttagtttagttataggcttagaaccaaacagagatgttgggggtggcctctgagaagaatcaacattatcatacctggcaactgactcaggggaggctatcactgtggcctcagccagcacmtggtttatctctataggtagaggtggaaagactgaaggcagcatgtacctctctcttctgggatgcagaacaataatttgagatcagctgactatcagggctgaatgacctgtaacacaactatggataaaactcgcccccttgcttatcgtagtgtggaacacaaaaataagaggacagctgtggcccttcagggtgcacagacttaggggctctcgatgccatgactgtgacaccctcttaggggctttgcattttctggcatctccaagcttctgggccccactacgtttcacagtatcagctgtggatgctgcctgcagtatgcctggcccagct

SEQ ID NO: 404485 - DNA, 455 bp, Homo sapiens
gaggtggaaagactgaaggcagcatgtacctctctcttctgggatgcagaacaataatttgagatcagctgactatcagggctgaatgacctgtaacacaactatggataaaactcgcccccttgcttatcgtagtgtggaacacaaaaataagaggacagctgtggcccttcagggtgcacagacttaggggctctcgatgccatgactgtgacaccctcttaggggctttgcattttctggcatctccaagcttctgggccccactacgtttcacagtatcagctgtggatgctgcctgcagtatgcctggcccagctgctgcttctcagtgagacggaacttctgytggcacctaaaatttcttgttttgccacagctggcatgcctggatgagtttagtggttggagcccacacttgctcatacaacactcaccactccaccatgcttgcc

SEQ ID NO: 404486 - DNA, 588 bp, Homo sapiens
gcaaaatcctgaaacaccatctttataaaaagttttttaaaatgagaagatgtggtggcttaacactggtaatcttgtcacttaatgaggccaagatgggtggatcactttaggcytaggatttgaggccagcctgagtaacactgcaagattctgactctaagaaaaaattaaaataaatatataaattaaataattagctgagcctactggccttttcttctagatgtagctaattgggaggctgaggaagcaggacgacataagtccaggagttggaagctgcagttagtgacgatggcaccactgtattcattccagctggagcactagaaaattgtctcttaaaaaaagtaaaatggctttagtcttaagttagtacaaattatacaagtatagagtacattataataacttgacttcacaactctttctgccttgtttttattaaaagatgttaataaaatgttgctgaactaaaaagtgtttgatatacattttcagagacctacgtatacttgcattttatttacttcttgacttgactgtgaaactgaagtttcagagctttattagtcaatatgacat

SEQ ID NO: 404487 - DNA, 439 bp, Homo sapiens
gtgtgccgtttgctaagaccgttggaaaaccacagtactagggtgagagtgacctgattttccagatgccactttctttgactaggaaaaggaattccctgaccccttttgcttcccgggtgaggtgatacctcaccttgcttcaggtcacaattgatgcactgcacccactgtcctgccccacttcccaacactcccaagtgagatgaacctggtacctcagttggaaatggagaagtcacccawcttcttccttcaggttttgagctgatcactatccctaggacacaatcaaaaaacattctttgaataaatattaaaactataagccttcttttaataagtcagcttgtttgatggtgatgtcataatctaattccataaaaaaaattcctgacatatatacacaatacacatgtgtgtatgtgcttcagtggtc

SEQ ID NO: 404488 - DNA, 469 bp, Homo sapiens
catcttcttccttcaggttttgagctgatcactatccctaggacacaatcaaaaaacattctttgaataaatattaaaactataagccttcttttaataagtcagcttgtttgatggtgatgtcataatctaattccataaaaaaaattcctgacatatatacmcaatacacatgtgtgtatgtgcttcagtggtccatatgcatctatgtaaaaaaaaaaaaaaaaaaaaaaaacctttaaagtacctattttcctatttacttacttccaaggctctagaacatatatcagaggaattatttaacaaactgttactaattagtaaatacccttcatttctttaaaaacaaaggtgtattatgtcttcttagaaaatgacaatttagactttcagaaatatttagtaaatagttgttctgcaatcattgtaaaatgcacccatcaaaatcaggtttaaatttaactaa

SEQ ID NO: 404489 - DNA, 614 bp, Homo sapiens
ggtgatgtcataatctaattccataaaaaaaattcctgacatatatacacaatacacatgtgtgtatgtgcttcagtggtccatatgcatctatgtaaaaaaaaaaaaaaaaaaaaaaaacctttaaagtacctattttcctatttacttacttccaaggctctagaacatatatcagaggaattatttaacaaactgttactaattagtaaatacccttcatttctttaaaaacaaaggtgtattatgtcttcttaraaaatgacaatttagactttcagaaatatttagtaaatagttgttctgcaatcattgtaaaatgcacccatcaaaatcaggtttaaatttaactaatctataaagcctaactccctcagtgaaaaagctgttacaggtaataatagtgatagtaacagtaataataataaaacagtgccagcactttgaaaaatcaggtcagtcacagacttcaataaatattcctctttcactacaaattttacctcaacaagtttgtttctacaaataatgccagcttctgtacacaacttaatgtctgtcaattcctcagtttcacactctgcattgttccaagaatgtgtctaaacagcaga

SEQ ID NO: 404490 - DNA, 614 bp, Homo sapiens
ggtgatgtcataatctaattccataaaaaaaattcctgacatatatacacaatacacatgtgtgtatgtgcttcagtggtccatatgcatctatgtaaaaaaaaaaaaaaaaaaaaaaaacctttaaagtacctattttcctatttacttacttccaaggctctagaacatatatcagaggaattatttaacaaactgttactaattagtaaatacccttcatttctttaaaaacaaaggtgtattatgtcttcttagaaaatgacaatttaractttcagaaatatttagtaaatagttgttctgcaatcattgtaaaatgcacccatcaaaatcaggtttaaatttaactaatctataaagcctaactccctcagtgaaaaagctgttacaggtaataatagtgatagtaacagtaataataataaaacagtgccagcactttgaaaaatcaggtcagtcacagacttcaataaatattcctctttcactacaaattttacctcaacaagtttgtttctacaaataatgccagcttctgtacacaacttaatgtctgtcaattcctcagtttcacactctgcattgttccaagaatgtgtctaaacagcaga

SEQ ID NO: 404491 - DNA, 614 bp, Homo sapiens
ggtgatgtcataatctaattccataaaaaaaattcctgacatatatacacaatacacatgtgtgtatgtgcttcagtggtccatatgcatctatgtaaaaaaaaaaaaaaaaaaaaaaaacctttaaagtacctattttcctatttacttacttccaaggctctagaacatatatcagaggaattatttaacaaactgttactaattagtaaatacccttcatttctttaaaaacaaaggtgtattatgtcttcttagaaaatgacaatttagactttcaraaatatttagtaaatagttgttctgcaatcattgtaaaatgcacccatcaaaatcaggtttaaatttaactaatctataaagcctaactccctcagtgaaaaagctgttacaggtaataatagtgatagtaacagtaataataataaaacagtgccagcactttgaaaaatcaggtcagtcacagacttcaataaatattcctctttcactacaaattttacctcaacaagtttgtttctacaaataatgccagcttctgtacacaacttaatgtctgtcaattcctcagtttcacactctgcattgttccaagaatgtgtctaaacagcaga

SEQ ID NO: 404492 - DNA, 620 bp, Homo sapiens
acactaggcaaaggataaacaggagcaaaagttggagagatttgtatttgcaaaaatctgaatattcaaaagcagtttaatacattgaagcacttagaaaatcatgcatatgcttatgacaggaacattctaaaaaacatgtaaaacaatatactttaaccctcaagtttatctatagcttcagagtcagaagaaagtgaatgttaggaaagaattagaaacaacccccctgagagttaaaggagagtgttaatacataccctgtatttaaaggtgatagttttcatattgctcttattcaaagtgctaatggaatgtmagctgagcttttaataactaacacgttgcatttcagaaataccaaaaagcattcagagttagcacgttatgacatttcaaatacagaggtaacattcagtgttagcacattatggcatttcaaatatagttttctgaaaaccaaaaacacaaaaacaaacagaaagttttgaacaatgtaaactaaatgcaggaattaaatgtgtcccaaattttatagacaaagaacttaaaacaacagttttaagtagggctaaagagaaatgacggacaaatgatgaaagaataacctgagagcgtca

SEQ ID NO: 404493 - DNA, 561 bp, Homo sapiens
atggcacctttgtcacaggttcccttgagcctgcttttctaattttacaaacccatcttacaggctgcactcagctcaaactatgggcttaggtttcattttgctatggatgcaccaggcacagactggaggcagatgcatgagtgagtgttggttcagtccagccactgcacacagctttgcctgttatctgtgatgaggtaagcaggtcaggtgctggtacaggtgacagctccctgmaaatctttaggtgaatcaggcataccacaagctttctcttctgcaggcactgaagaatgcagtggcatccacaaaagaagaaatgccagaaaatgcaaaggcccaaggacgtcatcctagccctggcatgggaaaggtttagagctggggtatctaaagggccaatgtcctgctttctttttccttttttcttttttttttttttttttcttatctatgggatcactatgacttaaattagggttttcaaagggctctgtctctctttctactggaaattagcatcttgtcttttcttcactctttctctctttgactgct

SEQ ID NO: 404494 - DNA, 561 bp, Homo sapiens
atggcacctttgtcacaggttcccttgagcctgcttttctaattttacaaacccatcttacaggctgcactcagctcaaactatgggcttaggtttcattttgctatggatgcaccaggcacagactggaggcagatgcatgagtgagtgttggttcagtccagccactgcacacagctttgcctgttatctgtgatgaggtaagcaggtcaggtgctggtacaggtgacagctccctgcaaayctttaggtgaatcaggcataccacaagctttctcttctgcaggcactgaagaatgcagtggcatccacaaaagaagaaatgccagaaaatgcaaaggcccaaggacgtcatcctagccctggcatgggaaaggtttagagctggggtatctaaagggccaatgtcctgctttctttttccttttttcttttttttttttttttttcttatctatgggatcactatgacttaaattagggttttcaaagggctctgtctctctttctactggaaattagcatcttgtcttttcttcactctttctctctttgactgct

SEQ ID NO: 404495 - DNA, 561 bp, Homo sapiens
atggcacctttgtcacaggttcccttgagcctgcttttctaattttacaaacccatcttacaggctgcactcagctcaaactatgggcttaggtttcattttgctatggatgcaccaggcacagactggaggcagatgcatgagtgagtgttggttcagtccagccactgcacacagctttgcctgttatctgtgatgaggtaagcaggtcaggtgctggtacaggtgacagctccctgcaaatctttaggtgaatcaggcataccacaagctttctcttctgcaggcactgaagaatgcagtggcatccacaaaagaagaaatgccagaraatgcaaaggcccaaggacgtcatcctagccctggcatgggaaaggtttagagctggggtatctaaagggccaatgtcctgctttctttttccttttttcttttttttttttttttttcttatctatgggatcactatgacttaaattagggttttcaaagggctctgtctctctttctactggaaattagcatcttgtcttttcttcactctttctctctttgactgct

SEQ ID NO: 404496 - DNA, 561 bp, Homo sapiens
atggcacctttgtcacaggttcccttgagcctgcttttctaattttacaaacccatcttacaggctgcactcagctcaaactatgggcttaggtttcattttgctatggatgcaccaggcacagactggaggcagatgcatgagtgagtgttggttcagtccagccactgcacacagctttgcctgttatctgtgatgaggtaagcaggtcaggtgctggtacaggtgacagctccctgcaaatctttaggtgaatcaggcataccacaagctttctcttctgcaggcactgaagaatgcagtggcatccacaaaagaagaaatgccagaaaatgcaaagrcccaaggacgtcatcctagccctggcatgggaaaggtttagagctggggtatctaaagggccaatgtcctgctttctttttccttttttcttttttttttttttttttcttatctatgggatcactatgacttaaattagggttttcaaagggctctgtctctctttctactggaaattagcatcttgtcttttcttcactctttctctctttgactgct

SEQ ID NO: 404497 - DNA, 448 bp, Homo sapiens
ttcatatcttcagcttgtcctctatttgctttcatatctgcagcttgttctcagtttttgtttgtttgtttttgttatttgtttttttctttttttttaatgtctgaagagcaaacaaagctctggaccagtgccaggtaaaatccgatggattgcctgccattcttacaaagcttaggagaaagggattctgggagacacattggcagtctcctttcaccctccgctgttgaaartgttgcctctgttccaactgttttctttcagagaggatccagctgtcacataggactgaaaggatatctaagttaattgaagatttctggttaaggctataccacagtgttacgtgaaggcctcaaaactaactccagtttctgacagcccatcagagtgttgccaccaaaatttccaggcttttctgtggcattttatttatttgtttttt

SEQ ID NO: 404498 - DNA, 448 bp, Homo sapiens
ttcatatcttcagcttgtcctctatttgctttcatatctgcagcttgttctcagtttttgtttgtttgtttttgttatttgtttttttctttttttttaatgtctgaagagcaaacaaagctctggaccagtgccaggtaaaatccgatggattgcctgccattcttacaaagcttaggagaaagggattctgggagacacattggcagtctcctttcaccctccgctgttgaaagtgttgcctctgttccaactgttttctttcagagaggatccagctgtcacataggactgaaaggatatctaagttaattgaagatttctggttaaggctataccacagtgttacgtgaaggcctcaaaactaactccagtttctgacagcccatcagagtgttgccaccaaaawttccaggcttttctgtggcattttatttatttgtttttt

SEQ ID NO: 404499 - DNA, 531 bp, Homo sapiens
tgtttctcttttttttctctatctcgattaatttaccttttcattgttcccaaaaagagagtaaggtacacagcgagctgaaataaaaaaaaaaatcaaacctagagaagtgagaaaacaacattaaataagatggagacaaattmtttaatgagctaaaatccctaaattatctttgggtgtcaattaacagcacattcccaatagaaaagaaggcttcttgtgcaaaccacagacaggtgagattgctgtcaatcccagataatatatgaatgataaaacatttctgagcacttggacaatgcgaatagcattgagaattagtttcatccagtacaagtcaagtcaaaccacaatacttcctttttttgagcacagagctggtaaaagacgcaggcctggatatttggaattcagtcacaatacataaacacacaaaactatcagacctgaaggactgaagttaactttaaaacatatgatctgttcaagtattaacagtgtctccaaattttctgtttgatgttactg

SEQ ID NO: 404500 - DNA, 596 bp, Homo sapiens
ggcagctgttagagctggggaattgatctccaggaactctcagtcttgctggaccatttgtgagactggtcctggacttagtggtgcatgcctcattaatcagcacacccttcagtggtcaccaccactggttggagagtgttgaggtggctttctattgttttctcagcatttcttgggaaagtgtcctgtcttgccacactgatarcagttagcaggtgccactcagggacttggatttttacaaaactgtattgcattagctagagtctctgttcttcttttgtctttactcttcttcttttgtgcctcctcatgtttcctattgtaaaatctgaagtacccacattcaggaggctctttacagtgttactgagataagaaagctagcttgagttagggaggcagcaaggaaagtgtccctggaaaaccactgttctgcaggttcatttctcatttacacgtaacacataagcagccttaaaaaaaatcagtctgcagacaccaacaagataactaacacagagggttgtatctcaagatccgtattgtcacagacagaagaatcttcagtccattcagagaaaagtcttgtg

SEQ ID NO: 404501 - DNA, 596 bp, Homo sapiens
ggcagctgttagagctggggaattgatctccaggaactctcagtcttgctggaccatttgtgagactggtcctggacttagtggtgcatgcctcattaatcagcacacccttcagtggtcaccaccactggttggagagtgttgaggtggctttctattgttttctcagcatttcttgggaaagtgtcctgtcttgccacactgataacagttagcaggtgccactcagggacttggatttttacaaaactgtattgcattagctagagtctctgttcttcttttgtctttactcttcttcttttgtgcctcctcatgtttcctattgtaaaatctgaagtacccacattcaggaggctctttacagtgttactgagataagaaagctagcttgrgttagggaggcagcaaggaaagtgtccctggaaaaccactgttctgcaggttcatttctcatttacacgtaacacataagcagccttaaaaaaaatcagtctgcagacaccaacaagataactaacacagagggttgtatctcaagatccgtattgtcacagacagaagaatcttcagtccattcagagaaaagtcttgtg

SEQ ID NO: 404502 - DNA, 596 bp, Homo sapiens
ggcagctgttagagctggggaattgatctccaggaactctcagtcttgctggaccatttgtgagactggtcctggacttagtggtgcatgcctcattaatcagcacacccttcagtggtcaccaccactggttggagagtgttgaggtggctttctattgttttctcagcatttcttgggaaagtgtcctgtcttgccacactgataacagttagcaggtgccactcagggacttggatttttacaaaactgtattgcattagctagagtctctgttcttcttttgtctttactcttcttcttttgtgcctcctcatgtttcctattgtaaaatctgaagtacccacattcaggaggctctttacagtgttactgagataagaaagctagcttgagttagggaggcagcaaggaaagtgtccctggaaaaccacygttctgcaggttcatttctcatttacacgtaacacataagcagccttaaaaaaaatcagtctgcagacaccaacaagataactaacacagagggttgtatctcaagatccgtattgtcacagacagaagaatcttcagtccattcagagaaaagtcttgtg

SEQ ID NO: 404503 - DNA, 443 bp, Homo sapiens
ggtagtctctggaaggcccaaaggaagggaagtgggaaaatgtgaaagtaaaatgctgcagctgctgtggaaaatagtttggtgttctgcaaaagctaaatataaaattaccataggacccacaacatccrctccaagctgtatatacaaaaaatgtaaaagaggtattcaaagaaaaacttgtatacatatgttcatagcagcattcacaataactaaaatctggaaacacaacaaataaatgtccaccagcaaaatgtaagaagcaaaatgtagtatgcccatagaatggcataatattcagctgtgaagaggatgacaactctaatgctacaatgtgaggaaacttcaaagcaattttggctcaagaaggtgaagacaaaagtcacatagtgtatgattttatttatgtaaatatttagaataagtaaatccatagagaa

SEQ ID NO: 404504 - DNA, 443 bp, Homo sapiens
ggtagtctctggaaggcccaaaggaagggaagtgggaaaatgtgaaagtaaaatgctgcagctgctgtggaaaatagtttggtgttctgcaaaagctaaatataaaattaccataggacccacaacatccactccaagctgtatatacaaaaaatgtaaaagagktattcaaagaaaaacttgtatacatatgttcatagcagcattcacaataactaaaatctggaaacacaacaaataaatgtccaccagcaaaatgtaagaagcaaaatgtagtatgcccatagaatggcataatattcagctgtgaagaggatgacaactctaatgctacaatgtgaggaaacttcaaagcaattttggctcaagaaggtgaagacaaaagtcacatagtgtatgattttatttatgtaaatatttagaataagtaaatccatagagaa

SEQ ID NO: 404505 - DNA, 443 bp, Homo sapiens
ggtagtctctggaaggcccaaaggaagggaagtgggaaaatgtgaaagtaaaatgctgcagctgctgtggaaaatagtttggtgttctgcaaaagctaaatataaaattaccataggacccacaacatccactccaagctgtatatacaaaaaatgtaaaagaggtattcaaagaaaaacttgtatacatatgttcatagcagcattcacaataactaaaatctggaaacacamcaaataaatgtccaccagcaaaatgtaagaagcaaaatgtagtatgcccatagaatggcataatattcagctgtgaagaggatgacaactctaatgctacaatgtgaggaaacttcaaagcaattttggctcaagaaggtgaagacaaaagtcacatagtgtatgattttatttatgtaaatatttagaataagtaaatccatagagaa

SEQ ID NO: 404506 - DNA, 443 bp, Homo sapiens
ggtagtctctggaaggcccaaaggaagggaagtgggaaaatgtgaaagtaaaatgctgcagctgctgtggaaaatagtttggtgttctgcaaaagctaaatataaaattaccataggacccacaacatccactccaagctgtatatacaaaaaatgtaaaagaggtattcaaagaaaaacttgtatacatatgttcatagcagcattcacaataactaaaatctggaaacacaacaaataaatgtccaccagcaaaawgtaagaagcaaaatgtagtatgcccatagaatggcataatattcagctgtgaagaggatgacaactctaatgctacaatgtgaggaaacttcaaagcaattttggctcaagaaggtgaagacaaaagtcacatagtgtatgattttatttatgtaaatatttagaataagtaaatccatagagaa

SEQ ID NO: 404507 - DNA, 566 bp, Homo sapiens
caaacttaattttaccagtcaccctcaacctttattttcccctccctgaagaactctttttatttctgtaaaatcttgattcctgagttccagggtacagagcttatggaatagagtccccaggttttgatgyagaggaacctctttctcctgtctgaaaatatcctttaatatttcctttagtgtgagtctgcagatagaaaaaatccttgctttttatttcatcattgaagagtatcttcattgagcgtaattctctagatgggcagtttccttctttcagcacttcgcagatatcattctcttatgccagcttccattgtttctcttgaagtgtttatggtggttaaatcttgtgaagtctttgatcagttttgggaaattctccacaaccatatcttcagctcttgcttctgtcccattcttgtttttcttccagtgctctacgtatgtgataaacttttcaatatgttgtcttttattttctcaattttccacctttttgtctttctgaactttttgcagtttactgaatctgtcttctgctaggttactgctgtggttaa

SEQ ID NO: 404508 - DNA, 566 bp, Homo sapiens
caaacttaattttaccagtcaccctcaacctttattttcccctccctgaagaactctttttatttctgtaaaatcttgattcctgagttccagggtacagagcttatggaatagagtccccaggttttgatgcagaggaacctctttctcctgtctgaaaatatcctttartatttcctttagtgtgagtctgcagatagaaaaaatccttgctttttatttcatcattgaagagtatcttcattgagcgtaattctctagatgggcagtttccttctttcagcacttcgcagatatcattctcttatgccagcttccattgtttctcttgaagtgtttatggtggttaaatcttgtgaagtctttgatcagttttgggaaattctccacaaccatatcttcagctcttgcttctgtcccattcttgtttttcttccagtgctctacgtatgtgataaacttttcaatatgttgtcttttattttctcaattttccacctttttgtctttctgaactttttgcagtttactgaatctgtcttctgctaggttactgctgtggttaa

SEQ ID NO: 404509 - DNA, 566 bp, Homo sapiens
caaacttaattttaccagtcaccctcaacctttattttcccctccctgaagaactctttttatttctgtaaaatcttgattcctgagttccagggtacagagcttatggaatagagtccccaggttttgatgcagaggaacctctttctcctgtctgaaaatatcctttaatatttcctttagtgtgagtctgcagatagaaaaaatccttgctttttatttcatcattgaagagtatcttcattgagcgtaaktctctagatgggcagtttccttctttcagcacttcgcagatatcattctcttatgccagcttccattgtttctcttgaagtgtttatggtggttaaatcttgtgaagtctttgatcagttttgggaaattctccacaaccatatcttcagctcttgcttctgtcccattcttgtttttcttccagtgctctacgtatgtgataaacttttcaatatgttgtcttttattttctcaattttccacctttttgtctttctgaactttttgcagtttactgaatctgtcttctgctaggttactgctgtggttaa

SEQ ID NO: 404510 - DNA, 566 bp, Homo sapiens
caaacttaattttaccagtcaccctcaacctttattttcccctccctgaagaactctttttatttctgtaaaatcttgattcctgagttccagggtacagagcttatggaatagagtccccaggttttgatgcagaggaacctctttctcctgtctgaaaatatcctttaatatttcctttagtgtgagtctgcagatagaaaaaatccttgctttttatttcatcattgaagagtatcttcattgagcgtaattctctagatgggcagtttccttctttcagcacttsgcagatatcattctcttatgccagcttccattgtttctcttgaagtgtttatggtggttaaatcttgtgaagtctttgatcagttttgggaaattctccacaaccatatcttcagctcttgcttctgtcccattcttgtttttcttccagtgctctacgtatgtgataaacttttcaatatgttgtcttttattttctcaattttccacctttttgtctttctgaactttttgcagtttactgaatctgtcttctgctaggttactgctgtggttaa

SEQ ID NO: 404511 - DNA, 602 bp, Homo sapiens
cataatccgggattgtgacctagaattactagggtggatatgctgtatgtttgtactgtgctatgattaagggaataatacagttgacaggaatcacaagtcaatcgggcatcgtttacctggagttggtcctctttgctgccagaaaaacataagttcaaaaacacaaattgtaaattgagtggtaatgttttccacaacggtaacattaaaactgtgttcagcacaattattaaaattagatagtgttccgacacaaatgctgccattcatatagtggagtgctgccttccctatcgactcctgagttggacctctctttccttggtaatgccattgaggcaaagttgggctaaagcctgttccatgccaagttaaacttgctgcagattgggattgaatcccagygcaatgcagtgaagagatgctgaccagtgtcagcgaagtttatgccatgaggtcggattctcatctctcccatctaaatgaccacagggacctagaaaataatgtctccgattagcatgtactcttgtctagctagggcaccaagacactgggtccaaggaggggggggtaagaattatcaaagagagctcatt

SEQ ID NO: 404512 - DNA, 466 bp, Homo sapiens
aatgttacaaccatagttgaggcccactagattaaatagtatgaagtgaagcccagttaggcttggcaaccgtcctagtctgttttctgttgctataacagaatgtctgagactgagtaatttgtaaattaaagaagtttatttggcycatgattctggaggctgggaagtccaggatcatacaccctatctgtgaacacctcatgctgactcatgtcatggcagaaagcagatgggagagtgggtgtttgcaaagagaccaaacataagaggcagcctcactttataacaactcaagagcgagaacttattcacccatgtgagactgcattaacccttcatgagagcagatccctcattacccaaatacctcttaaaggtcccactacctctcaacatttaattacatcagcagttaaattgcagcatgagttttggcagggtcaaaccacatccaaaccatagc

SEQ ID NO: 404513 - DNA, 587 bp, Homo sapiens
gttgacagagtacattggcaaccccttccaggcagaaactgggagctttgagttgtaggcccttctctaccctgatcctggggtatgaagcctctgtaagtgcttacacacccatatataatcacctctttgttctgtggtctggggagacttgtgtatgcctctaatcccttctgcttctagaggcaggtgaattaaaagccacactgtggggaatcttagagttagggtggtaaatatgaggtccaaacccttctctcctcagggagaggataggtgttggggataccttcttaattggatggcacagtgcctggggtggggtttggacctgagtgtgcctcagcttttcctacctagtcaatgtggatattttctcagttgccggatacagaaaagtctctcaacttgtttctgactttctctcagagggaattgatctgtgtgtcaattaatcaattctcagagggaattgattagtgtgtccctatgtggagggagagtcagaagcctgccatgttggtgatgtcactytccaattattattcttattggaaatgttacattgactcagtttttgggattac

SEQ ID NO: 404514 - DNA, 618 bp, Homo sapiens
taaggattatcaagacattgtttaggatgtgcttattttctggaaatttcaaccccttaattattggcaggagtcaaaaccttatgtaaataaaaactctggacaatacacaaaaagtagctacctcaagatgctggaaaacaatagcaggtggattgtggaaaggagtcaaagcttagtgaatgactcrtactgggtaagttttccttctctgcccctcttctctctgctggtgttgatttaagagcaactctaattgtgtgtaagctgtgcatcagcatgggtagctgtaattatgagagaaatcccatccttctaaccagaggactggaaggaggggccctcaggagttgtagagaaggaggaagatatcatagagaagggaactggagaagaaaatcccttattctgagtataaaccaacacatgttccaagctcaccccgagctgagcatacatgaaaaagatgtaaagcagtatagtgaagtctttgaaaactaaaatgacattggaaccatttcccacagagattgaaatagagcttgaggtatgatctaactgggttgattgtctgttaaaacaataagtaatccacattctagaggaatataacaggcc

SEQ ID NO: 404515 - DNA, 618 bp, Homo sapiens
taaggattatcaagacattgtttaggatgtgcttattttctggaaatttcaaccccttaattattggcaggagtcaaaaccttatgtaaataaaaactctggacaatacacaaaaagtagctacctcaagatgctggaaaacaatagcaggtggattgtggaaaggagtcaaagcttagtgaatgactcgtactgggtaagttttccttctctgcccctcttctctctgctggtgttgatttaagagcaactctaattgtgtgtaagctgtgcatcagcatgggtagctgtaattatgagagaaatcccatccttctaaccagaggactggaaggaggggccctcaggagttgtagagaaggagraagatatcatagagaagggaactggagaagaaaatcccttattctgagtataaaccaacacatgttccaagctcaccccgagctgagcatacatgaaaaagatgtaaagcagtatagtgaagtctttgaaaactaaaatgacattggaaccatttcccacagagattgaaatagagcttgaggtatgatctaactgggttgattgtctgttaaaacaataagtaatccacattctagaggaatataacaggcc

SEQ ID NO: 404516 - DNA, 607 bp, Homo sapiens
aaaagaacagtttgactgcccttctaaagatggcaggacaagagagggaccaatggtaaaagcagggagactagtaaacgactattggaataacaagtaggagattatgatttcccactcctgagtgatagcagacgagatgaggagtggccagttctagacatgtttagaagatagacccagcaagatttctttactataggtaaaaaagagaggtcaaggatgactccaaggtttttgtacctgacaactagaagaattgagttgccgtcaagtgaaatagaggagatagtttgaggagcaggtttatggagaaagatcaaatttagtactggacatatcaagctgggatttttattagacatccaagtagaaatgtcaagtcagcaattgcacgtatgagtccaaagttcagaagaattgttatcagcttatagactgctctgttygtagaggagctgatgatcagccagtcttctcaactggagtttcacaatagagttaagcctgcttgccttaaaacatctcttgtatctaataaattaagttatatcttatatgtacaaaatagtactggttatggagcatccttgagagaattgatgaa

SEQ ID NO: 404517 - DNA, 559 bp, Homo sapiens
gtatttggagatagagcttttaggaagtaattaaggttmaatgaagtcatgaggatgtggtcctaatctgatagattggcagctgtattggaataaagatagaaatgtctccacaatcatacaccaaggtaaggccatggaagcacacagtgaaaaagcacacaagttcaagtcccacgataggccgtctgcaggctgagaagccgggaagccagcagtggctcagtccaagtcccaaaacctcaaaagcagggaagctgacagtgcagccttcagtctgtggctgaaggcctgagagcccctagctaccactggtgtaagcccaagaacttgtgggtattaggaagagggccctcatcagaaccaaaccatgctggcaccttgatcttggactttcaagcctccagaatgatgagaaaataaatgcctattgtttaagccacccaatctatggcattttgttatggcagcccaagcagagaaagacctcaccagcgtgacatacattgggagataggagtgttgaagcaatatttgccttatgtgcagtataggatcc

SEQ ID NO: 404518 - DNA, 556 bp, Homo sapiens
tcagctttcatagatatggccaacmagttttcatgagttactggtagtctcacagttactagttatgttctttggacttcaggattagacataactgggaagaattgggtaaataatttctaggtttctctcaggcctaaaattctgtaattcagcacttctttacaatggagagcattggcatagatttcaacaaaaggcagataatgagaatctgctatttggttttctactatatttctctatttgcatttgcatctggatttgactgttaataaacctgtgaagtcacattttatgataaataaatgaaattacagcattgaatgcagaaaagctgaaaagatttttggtttgcccaattatatgcttccctgtaatacagaacattttttgccaggctgatggtaataactagcttaatgcaatgccttctcttcagggttcctggttattctcactggagcagagcaggaattgtgtgtatgcatggtattttgcaaagaacaagtcctcaatacattttggttgaacatatttatccattttgtcaaat

SEQ ID NO: 404519 - DNA, 495 bp, Homo sapiens
tatgtgaaagcactgcttccatttcaatctataaatacagggtgtgtttattaccacatttcacaccaagcccaagccaggtcagtacgtgacgtttgtgtttagaagagattcgaagggatagtgtttgggtaattttccattaaaaaatatacattatgtcacttaggtgtatgatataatgggttccttcttgaactctgcatcttcacagagtggttttgttgcttaaagggtagatgaggycgacactctaattatatctgttttatagaaaggtaaagtcagaatctgagaaattaagtcatttgcctaagtaggcatctggtaagtaacaagacctggattcaaaaccagatttttttcacagcagcctggtggaactagagtagcatgcttgtctttttttctttttttctcttttttccaagttttgaatagaatccattggcttgattaacagaagactaatattttgttttctaattctaccac

SEQ ID NO: 404520 - DNA, 640 bp, Homo sapiens
aatctgggacatatatacagaccagattggcctctggagtgtccacagaataaaggaaaaggttagagtttattgggaaaggcggaggctatgcgttggttttggaagaaagcttattggtgctggcagcaacaaaagagctggtgagttctgactggcgagtgycaatagttattaggtaggacttgtaatcctggagttacagttaggcccttgtagttttggactgggcttgtgagactgtgtcaggcacatgttcttgtataagcagctagctgtccttatgctgcaaactgtccttgtgtgacccatgtaataagctgcagtttggaaaaatttcttctgatggctcctgttatcaagaaaatcatgtgtgagatccctccgttcatgatcctccttggcgccatttgcccgggtttgacacaagtgactctattttgaatcttacaactttcacaccccaaatgctagtattggaatagtaatgatactacatatctaatcacctcctattctgcaatggacatgcacaacttcctaaaaagaacacaaatccagaagaggaattagacaatggttatatatagtgatctcccactgaacacgacatatgtgttattaacaatgataatcatta

SEQ ID NO: 404521 - DNA, 574 bp, Homo sapiens
gggggagtgctagacttttaaaaaaaatgtttaaactgtagagatctttataagctacaaaaatcatgacagataagtgacaggtcttggaattaaacccagatcctctgacccctagtctgagtggtatatttgtaaaaaatactaatgactagagaactgtgtaaattcagatatccagcaagtagacataccttgcctcttatctctggtgaataattataaattaaattaggtctcaagggacacaaatacacactcatcatttctttttctgagcatcagtgtttatatcagtggtgcttggtatctcaaatccaggcctcccggcagcccatagccattttactctgcattttcttcaaatatgctcagctttgaggtttcccacaattggtcccagttccctggactgtcttagatcctgtggaatcctatacttaccttcatttcagcagcattcctggtaccacgtggacagagctgattttattctggcactttactcggytgtgttcagcaacatgtcgggcatgaaatatgcaggtgcaagccttgagaagcaaatgtagct

SEQ ID NO: 404522 - DNA, 549 bp, Homo sapiens
tatcaacttgatgattacctgactagcctttcctgctgacttcttgtcaacacgtgatagcccatttggcattgtttgactctgctctaaaatgcagaaataggcaaattatccaggctctcttttgaagtgaaatacatgcagcatggaagctgacaggcagtattacagggaactaggaaacaaaaccctcagagacygctcagaaaaatacctataggaggccattgagacaacaaagctcttgaggtaaaattctatctaagaagctttaatcaaagagcagcgtgaatcttatattcttgttctttcttcaccacgattaatatcatcagttccttagggcgctcagtaagaaacaacatttcaaaaatactccctggatagaccaagaaaaaagtgccaaatacacattctacgcaagcaaagaattcattgtagagggagatgtttttaaaaagagtgaaaataaaaaaacagagaggactttataacttttttttatagctagtcattcataaatagtaattcaagccagctccagacaca

SEQ ID NO: 404523 - DNA, 549 bp, Homo sapiens
tatcaacttgatgattacctgactagcctttcctgctgacttcttgtcaacacgtgatagcccatttggcattgtttgactctgctctaaaatgcagaaataggcaaattatccaggctctcttttgaagtgaaatacatgcagcatggaagctgacaggcagtattacagggaactaggaaacaaaaccctcagagaccgctcagaaaaatacctataggaggccattgagacaacaaagctcttgaggtaaaattctatytaagaagctttaatcaaagagcagcgtgaatcttatattcttgttctttcttcaccacgattaatatcatcagttccttagggcgctcagtaagaaacaacatttcaaaaatactccctggatagaccaagaaaaaagtgccaaatacacattctacgcaagcaaagaattcattgtagagggagatgtttttaaaaagagtgaaaataaaaaaacagagaggactttataacttttttttatagctagtcattcataaatagtaattcaagccagctccagacaca

SEQ ID NO: 404524 - DNA, 575 bp, Homo sapiens
tttttttatagctagtcattcataaatagtaattcaagccagctccagacacacttatacacgaagtccaacttgactccttttcccagccatttgcctcaaggtgtcccaacctttcatctcccctgttcagcatcttattggaaaaaagtctggtaagaggtggtatgaaaagcactatctatacacatatgcagatttgagattaagaaacaggatcctccagctatgtgcagtgtaattttgaagaaattacttaagyattcttgggactgtttattcatttgttacatggggataataatgctgacctcaaaagattattttgagaatgaagtgaggtatctaatgtatgtaagagcaggttcaataagtggctgttgtttttattgctataaactgattccccctgggtgaatttgctgtcactgcaactcatctgtagagtatttccattttaaaggggtttctagaggattggagaactctcaggaccaaaagatgtcaatttacttcaggcatttcaggcaccctgctgggctggtgggtgagttaatttctgtcatgggagccat

SEQ ID NO: 404525 - DNA, 556 bp, Homo sapiens
catataggataattcttacagatattaaaggttcatattattagatttgatgtttagatctgtgataaagctggttttaaagaatgtgatattttgggataaagaggagagtcagacaagtttcagctgtaaacaatattagaaatcacgtagtctacaccttcatctaggtaagaaaattgaggcgcacatggggtaaatgaaaatacaaacaaaggttccatctcaatgaaaygaagtatatagataacaagccacatctattggttctgtgttgtccagtatggtagccactagccatatttggctatttaaatttaaagtaatcacaattaaataagaattttaaaattaattccgtggttaaactaacaaccttcaactgttcaatgtgaccagcacctcccttatcaagcaccacatatatagcacattttcatcatcctaaaacattctattgagttgcactgtgttagttttacacaatgagagagaaaagtaactttcagtcactactgaaagcatttcacaatgaataaaaagcttgtttaatgtt

SEQ ID NO: 404526 - DNA, 594 bp, Homo sapiens
taaacacattcagtttggagagtcttcaaaatgttgaagttcacatgtcaactattcaattagaaataaaatatgggtcaagcatggtggcttatgtctgtaatccyggcactgtgagaggctgaggtgggtggattgcttttgtccaggagtttgagaccagcctgggcaacatagagaaacctcatctctgctaaaactgcaataaataaataaatatggaaataagggaaaaaatgttaagctaaagataaaatttgagaatcatcaccaaatgattggtcatagaccttcatgagctttcttattagtatatacagtggataataaagtggtttcgatttaggattctctcattatgaattagaagaatctggaaaggtttaatgggggaggtgagctgaatcatgaaaaactatagaatatggataatacgagagatgagtaaaatgaatgaaattggtaggcacacgataaaaatagaaataaatagaaaagatatttttaattgaaagtaatgaaaatactaagccaaagtggcttaatcaaaaaaggaatccctagattcacatataactgaaatgtttagggtat

SEQ ID NO: 404527 - DNA, 594 bp, Homo sapiens
taaacacattcagtttggagagtcttcaaaatgttgaagttcacatgtcaactattcaattagaaataaaatatgggtcaagcatggtggcttatgtctgtaatcctggcactgtgagaggctgaggtgggtggattgcttttgtccaggagtttgagaccagcctgggcaacatagagaaacctcatctctgctaaaactgcaataaataaataaatatggaaataagggaaaaaatgttaagctaaagataaaatttgagaatcatcaccaaatgattggtcatagaccttcatgagctttcttattagtatatacagtggataataaagtggtttcgatttaggattctctcattatgaattagaagaatctggaaaggtttaatgggggaggtgagctgaatcatgaaaaactatagaatatggataatrcgagagatgagtaaaatgaatgaaattggtaggcacacgataaaaatagaaataaatagaaaagatatttttaattgaaagtaatgaaaatactaagccaaagtggcttaatcaaaaaaggaatccctagattcacatataactgaaatgtttagggtat

SEQ ID NO: 404528 - DNA, 504 bp, Homo sapiens
tccagagtttctgcagtcaagaggtttctgctgagcagaaatwcttcttcaatttaggaatgcagatgataataattttcctatccttctcgcagcaggtttcctgccttcattttgcagactcctaagctcagttaaaaacaaatagggaatttcagttccaggtaacacattcttcaaacatagtcccattaacccaacttagttatcatgcaaagccgcttagcttcactagtgaaatggaatacagttgaattgcctttctaatgtaatacccatttgtgataaatgcaaagtggtttatgatggcaaattttgtagagcatgaaaacttatgagaaaagaagcttatattttctaacctaaaattatgaagaaatgtcatatatgttggcatgggatactcctattaaaatgaaaaaaatattcaaaaatgaaaatttaacacttggcctttattatatatacctcagcaaaaaaaaaattaaatcgaactattatatt

SEQ ID NO: 404529 - DNA, 504 bp, Homo sapiens
tccagagtttctgcagtcaagaggtttctgctgagcagaaattmttcttcaatttaggaatgcagatgataataattttcctatccttctcgcagcaggtttcctgccttcattttgcagactcctaagctcagttaaaaacaaatagggaatttcagttccaggtaacacattcttcaaacatagtcccattaacccaacttagttatcatgcaaagccgcttagcttcactagtgaaatggaatacagttgaattgcctttctaatgtaatacccatttgtgataaatgcaaagtggtttatgatggcaaattttgtagagcatgaaaacttatgagaaaagaagcttatattttctaacctaaaattatgaagaaatgtcatatatgttggcatgggatactcctattaaaatgaaaaaaatattcaaaaatgaaaatttaacacttggcctttattatatatacctcagcaaaaaaaaaattaaatcgaactattatatt

SEQ ID NO: 404530 - DNA, 586 bp, Homo sapiens
taatatgagtttcaacagagaatcctgagctcccggtaagatgcaggctggttgcrgtggctcacacctgtagtctcggcactttgggagccaaggcaggcggatcacttgaggtcaggagttcaagaccagcctggccaacatggtgaaaccccttatctctaccaaaagtacaaaaattagcccggtacagtggtaggtgcctgtaatcccagctactcgggaggctgaggcaagagaatttcttgaacccgggaggtggaggttgtgatgagccgatattatgccactgcactccaccctggatgacgatgcaagactctgtcttaaaaaaaaaaaaaaaatctaaacctaggagacaccttgaatgcaccttgtgaagtcctgagcaaagggtccagctgagctgtacctggattcctgactcaaggggaacatgtgaaaacaaatatatgtcgttttaacattctaaatctgtggtcattttgtactcagcagtatgaaataaatgcactaaatattgctttaaaagtttttataaatgtgatagcttcttagatatttctctgtcccattattgttttcc

SEQ ID NO: 404531 - DNA, 586 bp, Homo sapiens
taatatgagtttcaacagagaatcctgagctcccggtaagatgcaggctggttgcagtggctcacacctgtagtctcggcactttgggagccaaggcaggcggatcacttgaggtcaggagttcaagaccagcctggccaacatggtgaaaccccttatctctaccaaaagtacaaaaattagcccggtacagtggtaggtgcctgtaatcccagctactcgggaggctgaggcaagagaatttcttgaacccgggaggtggaggttgtgatgagccgatattatgccactgcactccaccctggatgacgatgcaagactctrtcttaaaaaaaaaaaaaaaatctaaacctaggagacaccttgaatgcaccttgtgaagtcctgagcaaagggtccagctgagctgtacctggattcctgactcaaggggaacatgtgaaaacaaatatatgtcgttttaacattctaaatctgtggtcattttgtactcagcagtatgaaataaatgcactaaatattgctttaaaagtttttataaatgtgatagcttcttagatatttctctgtcccattattgttttcc

SEQ ID NO: 404532 - DNA, 602 bp, Homo sapiens
ttgttgtgtcttcaataggctcataccttgaaggtgaaatctgcttaactaggtggggggagggrggctcaataattcctctcatctcagggaagactacaaggtctacctaaagaacatgattaataataaaatggacgtctctttctctctcatgacctgctttgctttctcatcctcatgatcaaatctagtcacctgagcccaacccatggacttctcattttctgttacctatacttgctataatgttcatgcattagtaaggcaagtatttttttttttgcatttttttgacataatgttaacccttgaattggagttacctgtgtgactgtttgcttcatccattattttgtgaccaaccaggggataggacctggggactgcgtggaagaataactaaacattgacaatatcacaaacatatataaatgaatactaacattgtattttctgactacatagcagaggttttaagaaaatgatataaatcactctatttgtataacgcaataataggtaactatctattctataaatcagggtttttttcaaggtaagaatgttactgtaaaggcataaccctatccatctgggaa

SEQ ID NO: 404533 - DNA, 602 bp, Homo sapiens
ttgttgtgtcttcaataggctcataccttgaaggtgaaatctgcttaactaggtggggggaggggggctcaataattcctctcatctcagggaagactacaaggtctacctaaagaacatgattaataataaaatggacrtctctttctctctcatgacctgctttgctttctcatcctcatgatcaaatctagtcacctgagcccaacccatggacttctcattttctgttacctatacttgctataatgttcatgcattagtaaggcaagtatttttttttttgcatttttttgacataatgttaacccttgaattggagttacctgtgtgactgtttgcttcatccattattttgtgaccaaccaggggataggacctggggactgcgtggaagaataactaaacattgacaatatcacaaacatatataaatgaatactaacattgtattttctgactacatagcagaggttttaagaaaatgatataaatcactctatttgtataacgcaataataggtaactatctattctataaatcagggtttttttcaaggtaagaatgttactgtaaaggcataaccctatccatctgggaa

SEQ ID NO: 404534 - DNA, 570 bp, Homo sapiens
tgtgcattgtaaactacaagccatagaagacaagacattcatttcctaggccttcccaggtaggtgatttggttaaaaatttccttaaaaaatacagagaatccaaaacaaatgagctagcttgacataatgtctgttctacctcagaagcaaaagtcgacattgaaagaaaagcatctagcctgcaagctttaaaattttaacaaagtgcctggaatccagctatatgcttaacttgcatttctctacactcttgaggcgagtatgttccacgtgcgaaaatattttytaatggaaacaccaaagaaatattatgtacaggaaagctcactggtctcagcaaggatcccaaaattttccatgtattccaaatgttcagaaagctggttctactcaccttagttcttctgtctttcagagctatgcaattgcttctaaatagagtaacggattccacttacaaaatagactgtggtgcagtttatccctaagtgtatcctcatggcatcaagatcacatccataagaaaaaagaaaaaaaaaaaaaacaaccacaaggaattcagtcaag

SEQ ID NO: 404535 - DNA, 549 bp, Homo sapiens
tggacctgtgtgtccagagcctatgtgtaagacctgtgtgtcagacctgcgtgttcaaggcctatgtctccctcggcctagtgggtgaagtgtaaggaaaatggatgtgctgcggtcaagaataggccaaggtagacatcccatccagatgactcagtragtttggacgcaggtgtgcaactccgctcattatgtaaccacaccacatgaggcacattaggtgatcacccacgtgagctcatgcttggctcagagccactcttgtctgtaaaaggtatatttaccctgctaatgttgtacatatggctcatgcctgggctcactcatgcccacgtccacttgcacccagggagagagtaaagccatattgaaactatctacaattcctcaagtgttttttcagctacccaccacttgcccaccaactcccctcggccttcagttagaacctgacaactaccctttaaaaatacatatatgtcattttttaaatttctggcacatgagtaccctcatgtaaaaattaaccttcctgctgaaaacaactat

SEQ ID NO: 404536 - DNA, 542 bp, Homo sapiens
cagtggcaaattattgtaattctacctgaatgaggaatgaggtaccagaaattttgtaataaggtcacctctgtggcttatatttggttgttgctcctggcagcccagttcccagcctggtcctccagccttctacaattctgttagctatacaaataattatatgattcattcgaaacaggcatttattgcttacacttaggaacctgattaatacaaytggcaaaactattacacagcctttaaatgaattaccaagcagaccgcacatggtctctttctctaaagcttattacctctgagaacaagtagttttttgagcacctctctttcctcaatgtgcattttttcagcaatcttgcatttcattttcaacctgatatcacgtgttctgtttctttaaaaatgtgtcacccttttacttttttggtgttcatgcccaggtttctaaaattcctatgtattccattttcttttctatatgctttcatgagatttgggctggttgagatttgggctggtaggaagagtaaatcttatta

SEQ ID NO: 404537 - DNA, 551 bp, Homo sapiens
tacataacaaatattgtatgatactcccattattgtcctgaaattaaattaatgataaaatcataatttttatgaaattaatataatgtcttatctgcaacataaaagaaaatagaacaaaagttttctatagtcactgctagtgactataaaaatagggactttataaggcatttctggatgctcttttaccaattcctcacttatgacaggctaaaataaacaaaattggctgttccacctctagtgatccctgcactcataatgcctcatgataataaactatatgacctgggaatcataaaaaattaggtccagactcatgtcttttatttaataagcatgtgacctctaccaatttacttgaatttctgtgcctactatataaattggagcttataattcctaatctatgttccttatcaggttgctatcaaaawcaaatgatacaatatatatgaagcatattgaagccctgaacaaatgcagtacattgtgaatattactggactggaaattagggaatctagtcaattagtacctagattgat

SEQ ID NO: 404538 - DNA, 636 bp, Homo sapiens
tattgcatttgtggtattattttaagacatccaagagcaaaagtgtgagtaagctgcttgctttaagtttctggtcccagaggtacaaatttggaaatcatcaacgtaggccttaaggagtttccatatatacagtccagttacagwatggcaaatctgcaaagaagtatgaatcttagtggctagagagatgggagccacacctggagaatgagataccatggaagtcaagtgaagagatcactcagaataagagaaccctgctcagtagtatcaaatgtcatatagagatcaagtgttatgtgaatagaaaatttcactggattgcacaatttgaaaatcattaattttatgagagtggttttgatatggggaactgagtatgacagatttgagtggttgaacaatgaatgataggtaaagaaatggttacagtgagtttagataaatcaagagagagaaaaaaacttatcattgtagctataggggaatactaggattaggggtttggtctgttaaatggtaagagagtcttgaacatatttaaatacttttataataattcatttaactattattaagagggtagaaaggatagttaaacataaaattcatttgtttccagagtagataaca

SEQ ID NO: 404539 - DNA, 567 bp, Homo sapiens
ctgcatcatgtgagattagatgacttgattcactgacgtctatgatgggtgtgttgtgcagatgagctgagaagaaagagcctgctttttcttctgttgaactattcacaggaaaccacccatgtctgtgtttttcagaaaacatgaagatatctccagctagtggaatagcagcctcttttcaactgcctttgacttttctttctgctgcttttgaaatgactctaaaaaagtgaaagattaaaggaaagcagtctgccaaatacctgaaagaaacccgtttttggaactgagcttataaatrtaagcttataaacaaggactcaggctccaacagaaaaagaaaggataaaagggccaaggaattcctctgtcctctgtactcagagaatgttccttctttgttgaagggagaaaaatgaatagaatgaacagctcttggccccagtttgtgccaggatggtgttgaggaggtagatgaactttcagacatgtgtgaagggtagaattatttttcccattattattttagactgtgtgaattcactcttctcaggggccaccctg

SEQ ID NO: 404540 - DNA, 583 bp, Homo sapiens
atacagtgcgaggattccctatttactcccaggtcctaagctacattaggagaaagaagatgtaactaaaagtaagcaatacaatattttagagatatcctgtttcctaatcgtattaaccaaatggtcaagctaagcctaagagtatctrtactttttccatcgggagccaaactgttttttgaaaaaactattctataacaagatgtaagtgagaaataatacggttggctacagttatgtatatagcttttttcccacatgtattttatatttcccatgatattttaaagaagttattcaagtattaaaattttcctcttaacacctgaaagataatacacccttaagctgattgaactgagcaggccccagaagctctaaatgtgtctatcaacccctttaagcaaataatatctgctctgaagccatattttaaacacacaagtttggctttttagtgtattgccacattatatgctacacacagcaaagcattaaaaaattgcattaagaattgcctttccctccccaccagaagaatggaggagaaataacatttattgaatatctaacacataat

SEQ ID NO: 404541 - DNA, 520 bp, Homo sapiens
tagcttttttcccacatgtattttatatttcccatgatattttaaagaagttattcaagtattaaaattttcctcttaacacctgaaagataatacacccttaagctgattgaactgagcaggccccagaagctctaaatgtgtctatcaacccctttaagcaaataatatctgctctgaagccatattttaaacacacaagtttggctttttagtgtattgccacattatatgctacacacagcaaagcattaaaaaattgcattaagaattgcctttccctccccaccagaagaatggaggagaaataacatttattgaatatctaacacataatagggtgttamggcacttctacttgtaatgtctacatttgtttgtcatatctcatttatatctcatttaattctagatgaatttctcatatattttccattaggtacttctacatgtattaccgcatttatttctcataagagcctgtaggtcaaatgtttttattccaatttatagatgagta

SEQ ID NO: 404542 - DNA, 512 bp, Homo sapiens
tggcttactgcagactagacctcctgggctcaaatgatcctgctgcctcagcttcatgagtagattgaactacaggcatgtgccaccgtgcctgggaatttttactttttgtagagacagagtgtcactccgttgcttaggctggtctcgaacttctgggctcaagcaatcctcccaccttggcctctcaaaatgctgggattacaggtgcaagctaacacacccagccatatgaagagatgtttgaaaagcgggatgcttaaaattaaggctataaatgtgttgtcttttcgtaatgaggagaactatgttatggccacaggagtgaatgactgtgctarggtgcaggacaagatcattggaacaaagttaggcaaagacttttgcaactagcttattcgaaaattcattgaaatggatattgaaatcggcaagaaccataactaagtaggacaaatattggagtcagtgggtgactacaaaaaagaagtgtggtttatggtatgtttata

SEQ ID NO: 404543 - DNA, 605 bp, Homo sapiens
tatgtttccctcctaggttgtaactttgcttatgaagcagcattgtctggggtaaatacctgagattcattgcctcatgccaaggaaattaaggacacagacacacacaaggagtgagtttaagagcagaggtttaataggcaaaagaaagagaaaggagaatagctgtctcttctgcgagatagaggggcaccctgctggcacctctcgctggcagtggagtgcactggattatataggcaggcttaaggagcctctgtgttttatttacattggcccacagattggttgaaccaggtgtgacatttacatcgctgcggggaagcggccaccccaccctaatcttcttcttatgcaaaggggctttctactgtgctggtgccatgttgtctgctccctactgcacacatgattggaaaggaaaagggaagatggagccgccatttggaasatgccttgtcccaggtagccttttcctattggcacaactgctggcgttcacctgtgcaggcttccagtttgcttgtctatgtctgaagcttgattttataggctgctttttgttagaaaagaaaatgatttgggggctgcttttcattaaaaga

SEQ ID NO: 404544 - DNA, 453 bp, Homo sapiens
aggtattgagcctagtacctattagttatttttcctgatcttctcctttctcccaccttgcaccctcagagagccccccatgtatgttgttcccctctatgtctccatgtgttctcatcatttagctccacttacaagtaggaacatgtggtatttggttttctgtttgatattgtctggctgtrtccccacccaaatctcatcttgaattgtagttcccataatccccatgtgtcgtgggagggacccagtgggaggtaatttaatcatgggagcaatttttttctgtgctgttttcatgttggtgaataagtctcacgagatctgatggtattgtaaagggcagttcccctgcatatactctcttgcccaccaccatgtaagatgtgactttgctccctcttgccttcttccatgattgttaggcctccctagctatgtagaactgtgagt

SEQ ID NO: 404545 - DNA, 453 bp, Homo sapiens
aggtattgagcctagtacctattagttatttttcctgatcttctcctttctcccaccttgcaccctcagagagccccccatgtatgttgttcccctctatgtctccatgtgttctcatcatttagctccacttacaagtaggaacatgtggtatttggttttctgtttgatattgtctggctgtgtccccacccaaatctcatcttgaattgtagttcccataatccccatgtrtcgtgggagggacccagtgggaggtaatttaatcatgggagcaatttttttctgtgctgttttcatgttggtgaataagtctcacgagatctgatggtattgtaaagggcagttcccctgcatatactctcttgcccaccaccatgtaagatgtgactttgctccctcttgccttcttccatgattgttaggcctccctagctatgtagaactgtgagt

SEQ ID NO: 404546 - DNA, 453 bp, Homo sapiens
aggtattgagcctagtacctattagttatttttcctgatcttctcctttctcccaccttgcaccctcagagagccccccatgtatgttgttcccctctatgtctccatgtgttctcatcatttagctccacttacaagtaggaacatgtggtatttggttttctgtttgatattgtctggctgtgtccccacccaaatctcatcttgaattgtagttcccataatccccatgtgtcgtgggagggacccagtgggaggtaatttaatcatgggagcaatttttttctgtgctgttttcatgttggtgaataagtctcacgagatctgatggtattrtaaagggcagttcccctgcatatactctcttgcccaccaccatgtaagatgtgactttgctccctcttgccttcttccatgattgttaggcctccctagctatgtagaactgtgagt

SEQ ID NO: 404547 - DNA, 453 bp, Homo sapiens
aggtattgagcctagtacctattagttatttttcctgatcttctcctttctcccaccttgcaccctcagagagccccccatgtatgttgttcccctctatgtctccatgtgttctcatcatttagctccacttacaagtaggaacatgtggtatttggttttctgtttgatattgtctggctgtgtccccacccaaatctcatcttgaattgtagttcccataatccccatgtgtcgtgggagggacccagtgggaggtaatttaatcatgggagcaatttttttctgtgctgttttcatgttggtgaataagtctcacgagatctgatggtattgtaaagggcagttcccctgcatatactctcttgcccaccacmatgtaagatgtgactttgctccctcttgccttcttccatgattgttaggcctccctagctatgtagaactgtgagt

SEQ ID NO: 404548 - DNA, 475 bp, Homo sapiens
aattatatgttaggtcacaaaacaaatcttaaaaattttttaaaattgaagtcctatcaagtatcttctttgtccacaatggaataaaactggaaatcaataatcaaaggaatttgggaaaccatacaaacacataatagttaaacaatatgttcctgaatgaccagtgggtcaatgaagaagttaacgaagttgaaaaatttcttgaaacaaatgaaaatggaaacacaacataccaagaggtatgggatacagtgaaagcaatacaaagaagaaggcttacagcaataactgtctataaaaaagcagagaaacttcagataaaacaacctaatgataaatcttaaataactagaaaagcaagagccaaccaaaatgaaaattagaagaaaagatmataacgatcacagcagaaatgaaagtgaaacaaagaaatcagtacaaaagatcaaccaaatgaagagttgggttttat

SEQ ID NO: 404549 - DNA, 523 bp, Homo sapiens
taaataagtccagtgaggttgcaagatacaagatgaatacattaaaaataaattgtattttcatgtttgccacaaacaatccaaaattgaaataaaaaagtaagcccatttgtaatagtatcaaaaagaagaaaaacatagatatgaatttaccaaagtccatgcaaaaatgttgctcttaaaactacaaaggattgttgcaagaaagtaaagaaaaactacattaattgagagaaatcctatattcatggatgaaacgttacaaaaattgcaacattctcccaaattgacctatagattcagtgaaatccctatcaaaacttcctatattcatggatgaaatgttataaaaaytgtaacattctcccaaattgatctacagattcaatgaaatacctatcaaaacttcagctgacttctgtgcggaaattgacaagcttatcctcatattcatatagaaagtcaagtgatatcatactgaatgggcaaaaactggaagcattccctttgaaaactggcacaa

SEQ ID NO: 404550 - DNA, 538 bp, Homo sapiens
agtgatttcctgtgccaaccagaaagcaataagcaatgtggtatccaactgcgcaggggcatgcacttcatccatcccattaaaaatccygcacacaggagaggaagtacctcagcagatacaggagccctaattttatcaacaatagtcctctgacaaagggagtgagtgattttcttctaaatgagaacaaatatttcacaagcacagttggaagaacctagcagttcaagctggcagttttaaaaatacaaacaattaaatgtttggctataaaataatttcagaaaccttatttaggaccaaagccagctctggtagtttgaaacaaacatagtgtgtttcattaaggggctcgggaagtaacataaaatattttccaccaaatttgcctccaggtagttgtacagaaattcagtcagcaattttagtataatttgagaagaagtagcaggcagtcccttcagcaactaaagacacatctcaaatgataaataaaatggagtcaactcagctctaaaggtaatcaatcctgcat

SEQ ID NO: 404551 - DNA, 538 bp, Homo sapiens
agtgatttcctgtgccaaccagaaagcaataagcaatgtggtatccaactgcgcaggggcatgcacttcatccatcccattaaaaatcccgcacacaggagaggaagtacctcagcagatacaggagccctaattttatcaacaatagtcctctgacaaagggagtgagtgattttcttctaaatgagaacaaatatttcacaagcacagttggaagaacctagcagttcaagctggcagttttaaaaatacaaacaattaaatgtttggctataaaataatttcagaaaccttatttaggaccaaagccagctctggtagtttgaaacaaacatagtgtgtttcattaaggggctcgggaagtaacataaaatattttccaccaaatttgcctccaggtagttgtacagaaattcagtcagcaattttagtataatttgagaagaagtagcaggcagtcccttcagcaactaaagacacatctcaaatgataaataaaatggagtyaactcagctctaaaggtaatcaatcctgcat

SEQ ID NO: 404552 - DNA, 510 bp, Homo sapiens
ccttgggtttattgcaattaaataattcttttatgctaaagaaaattgtgtctgacttattttgaagtatagaatttatgaaatgtatctctagtaagamatggtgtttccccaaggtctggttatttttatgctaaattctaatgtactatatggcatgagcaggattctccaacagaggctaaaggataaagcaaggcactttggaaattttaagtggtaagaagagattgcatttagcaccacctaccagagagcatttgtgttattccaaggcaggagtgttaaatcttcataacttcctagtggggccatggatagaattcaggtagttcaggaactccgacaggaaaaaaaagatacccttagttttatcaacctctacctaaaaaatagcaatttccttcaattatggatgtaggaaaataatcagtaatttaaaggaataactgtaactttgtcatcaatcaaaatcagacattttcatatctcactatgattgttcttgaa

SEQ ID NO: 404553 - DNA, 510 bp, Homo sapiens
ccttgggtttattgcaattaaataattcttttatgctaaagaaaattgtgtctgacttattttgaagtatagaatttatgaaatgtatctctagtaagacatgstgtttccccaaggtctggttatttttatgctaaattctaatgtactatatggcatgagcaggattctccaacagaggctaaaggataaagcaaggcactttggaaattttaagtggtaagaagagattgcatttagcaccacctaccagagagcatttgtgttattccaaggcaggagtgttaaatcttcataacttcctagtggggccatggatagaattcaggtagttcaggaactccgacaggaaaaaaaagatacccttagttttatcaacctctacctaaaaaatagcaatttccttcaattatggatgtaggaaaataatcagtaatttaaaggaataactgtaactttgtcatcaatcaaaatcagacattttcatatctcactatgattgttcttgaa

SEQ ID NO: 404554 - DNA, 510 bp, Homo sapiens
ccttgggtttattgcaattaaataattcttttatgctaaagaaaattgtgtctgacttattttgaagtatagaatttatgaaatgtatctctagtaagacatggtgtttccccaaggtctggttatttttatgctaaattctaatgtactatatggcatgagcaggattctccaacagaggctaaaggataaagcaaggcactttggaaatwttaagtggtaagaagagattgcatttagcaccacctaccagagagcatttgtgttattccaaggcaggagtgttaaatcttcataacttcctagtggggccatggatagaattcaggtagttcaggaactccgacaggaaaaaaaagatacccttagttttatcaacctctacctaaaaaatagcaatttccttcaattatggatgtaggaaaataatcagtaatttaaaggaataactgtaactttgtcatcaatcaaaatcagacattttcatatctcactatgattgttcttgaa

SEQ ID NO: 404555 - DNA, 514 bp, Homo sapiens
ccctgaagatccattttatgaaaagacagtttgaactattccgcttgatctacaaaattctgtagtaaattttgctctgctgaaaataagaatgaagggagaaaaatagagattccctctatattgcaatggtcaaacaaaggttaactaaacaatgaaaatgcttggttctaaaaatctcttaatgctgtggttaatggaagtgtttgaaagctacttaatagaagggtaaagccacgtgtcctagggaaagtgatttcatgggcctcagataactcatgagtaaaaggaaaaatttaacaatcctttcacagggatgttgtaaggatttcaggaaacaataaaagaacagtgcctactaaagtgcctgacacatagcagatactcaatacattttagtaccctgccttcttgtgctatttcttgtatccctactgaccatcaagtggagtagcacaawcaagaacaaatgaaatgcatgttgatttcaggtgtcaggtgagataaaatcaag

SEQ ID NO: 404556 - DNA, 604 bp, Homo sapiens
taccatattgtatttagtgtgtgttttttaaaatcaaatattgacttgattttgaataagaaaaacagcttcaaaaagtgattaaacatctyggccattcttcctgttttctttctctgacatgtgatggataggccggccctcctttcctggtctcagccaggaagagcacagcaaggaaagtcctcttcactggctgtcatagctgttccctcatgtgggctgagaatatttcaatcaggtcagcacacagtttctaaagaaaagaaactgaggtagagtagagatcattgcaaagataacaaccaggaataaaaagcatcctgagttggtgtttcaaaagggtcacaggaggattgaaagttctcaaatattctccaagaggcttttgtcctgaagcctagcttgctgccacggattagaaaaaaagagctgcaggaggagaccgtgaggatggtaagagtctctgctgctgtcaaagcccagtcagagaggcagggcccagggaaaaggaacaaagacgccaggagggagtctgattgcagccaaagaacctgttaaggtgcacaggcattaaaaacagaaaataaggagatcatttgct

SEQ ID NO: 404557 - DNA, 604 bp, Homo sapiens
taccatattgtatttagtgtgtgttttttaaaatcaaatattgacttgattttgaataagaaaaacagcttcaaaaagtgattaaacatcttggccattcttcctgttttctttctctgacatgtgatggataggccggccctcctttcctggtctcagccaggaagagcacagcaaggaaagtcctcttcactggctgtcatagctgttccctcatgtgggctgagaatatttcaatcaggtcagcacacagtttctaaagaaaagaaactgaggtagagtagagatcattgcaaagataacaaccaggaataaaaagcatcctgagttggtgtttcaaaagggtcacaggmggattgaaagttctcaaatattctccaagaggcttttgtcctgaagcctagcttgctgccacggattagaaaaaaagagctgcaggaggagaccgtgaggatggtaagagtctctgctgctgtcaaagcccagtcagagaggcagggcccagggaaaaggaacaaagacgccaggagggagtctgattgcagccaaagaacctgttaaggtgcacaggcattaaaaacagaaaataaggagatcatttgct

SEQ ID NO: 404558 - DNA, 531 bp, Homo sapiens
tactgcatcccttcacctgccaaaaagctgaagccaggaatcagctctgagccaaactagccagagaggagacccaaggagctgccagtgcagtacatgatttaatttgctgagcctcccaaatctagtcattctcattaagattgagaagtctgagatcattgcttgcattatcacacactgacaacattaaatcacagtcaaccttaaaattatagcatagatttctgacagacctctatggtcctctgggcacctttaaatccccttctgtgactgcagagccataaatatatggatccaactttggaaaatgtaagtttggtgtcatggcacctacccagaagggactgtttacaggggatgttgtaattatagacatgtagactatagtgctgtgcaccttgacyatggaaccaacactagagtgtataatcattcaaagaaagatttacagctaagaaaagggcagagggctctgggaaacagaaaggcaaaagggtaaagtgtttgagtagccaagaagggtgg

SEQ ID NO: 404559 - DNA, 612 bp, Homo sapiens
acaactggggacacactgccttgcagagggattctatttacctaaccaatggattcaggcaagacatgggatttgctttggaaaatgaattgtgagcaaaaatgtacgttacttctggatggaagatttaagagtcagtagttgcttcattgcactcttctccctttgccgggcagtgttccagataggggctgttctgtcagcccaggtcccagagcgaagatgacagagagagcaactacagtaaacctgcacgggcagaagcaacaaatgagaaataaactctggttgtcataagccactgagactttccactgtgtttgttaccacagcccaacatagcctttatacttggaactgcccacccagttagtcaatatctgcaacagactttgtcttcaggattacgagatccaattttaaaatacttccagacagrtatgtgctaaaaatacatcgtttacaaaaattaggtatttacgcaaaagcttttttttgtagttgccactaaaaataggctgacttgctaacctaggaattctgtaacaggttttctctcctattaccaattgctatagtattagaaaagtaaaaactatatagtgcatctgc

SEQ ID NO: 404560 - DNA, 612 bp, Homo sapiens
acaactggggacacactgccttgcagagggattctatttacctaaccaatggattcaggcaagacatgggatttgctttggaaaatgaattgtgagcaaaaatgtacgttacttctggatggaagatttaagagtcagtagttgcttcattgcactcttctccctttgccgggcagtgttccagataggggctgttctgtcagcccaggtcccagagcgaagatgacagagagagcaactacagtaaacctgcacgggcagaagcaacaaatgagaaataaactctggttgtcataagccactgagactttccactgtgtttgttaccacagcccaacatagcctttatacttggaactgcccacccagttagtcaatatctgcaacagactttgtcttcaggattacgagatccaattttaaaatacttccagacagatatgtgctaaaaatacatcgtttacaaaaattaggtatttacgcaaaagcttttttttgtagttgccactaaaaataggctgacttgctaacctargaattctgtaacaggttttctctcctattaccaattgctatagtattagaaaagtaaaaactatatagtgcatctgc

SEQ ID NO: 404561 - DNA, 559 bp, Homo sapiens
tcgattcttctagttgcttgggtcaaacaccttggattcaggtttaactctccttctcacatcctgcatccaatccatcagcaagtcctgtcagttctgtcttcacagtatattctgaatgttacccttctccaccaccttgctgttgccccctacaccagcctctaaggccctttccctggaatttcaccctagcctccccaccctccccaccccctccctgctcctcttttctatccctatatttggatgtttgcaaatcctacaaacaacctatccaccctrctcctttgaattcagaagaaatatgcacagttgccaaacaaaattgaaaattcttccaggtaccagggattgctaatgtacatgattccaaaatgatagatgttttcctataagtgacttatggaattcattcagcagcaaaaacattaacttgataggattttaaatgcagctctgtaggtttggtacccatagaaagacagtttcaaaagcatggtacttcaactttaggaccttacttttaaaggacgttcagaaattgtttcacatgtac

SEQ ID NO: 404562 - DNA, 595 bp, Homo sapiens
caaggaagcgctacagatataggctctgtgttctcatctacatcggctgatttaggggcctttcatgtgtttgcatcaggctctggcggctgtgaaaacagcaacagctgtaacctgccacactagaaaaaatacattcattgggtggatccccgagttctcacaggaggctggggcactgccgtgtaaagctagcgccctgccctcagaacaacttagtgtgtaaaacytaaaggagcttacagttcatataaaataatgacaactttgagctttttaagactttgaagggcgtgagtctaagataaaactgtgtggctatttttacagcatgtattggtatgccaaaagaaggtagcccagatagctcacgtgacaatttttgacatctaaatagaccaatacttgctcttgctctacattttatattcttttataacataactatatagttttagttataaatattttcctctctttttaaatggtgccacattatcagtacttcctgtgtccttttttttcttttgtgtctgtcatgagaaatattgaaaagtcttatatttaaaacaggatgttttgaatttgcttttag

SEQ ID NO: 404563 - DNA, 595 bp, Homo sapiens
caaggaagcgctacagatataggctctgtgttctcatctacatcggctgatttaggggcctttcatgtgtttgcatcaggctctggcggctgtgaaaacagcaacagctgtaacctgccacactagaaaaaatacattcattgggtggatccccgagttctcacaggaggctggggcactgccgtgtaaagctagcgccctgccctcagaacaacttagtgtgtaaaacctaaaggagcttacagttcatataaaataatgacaactttgagctttttaagactttgaagggcgtgagtctaagataaaactgtgtggctatttttayagcatgtattggtatgccaaaagaaggtagcccagatagctcacgtgacaatttttgacatctaaatagaccaatacttgctcttgctctacattttatattcttttataacataactatatagttttagttataaatattttcctctctttttaaatggtgccacattatcagtacttcctgtgtccttttttttcttttgtgtctgtcatgagaaatattgaaaagtcttatatttaaaacaggatgttttgaatttgcttttag

SEQ ID NO: 404564 - DNA, 595 bp, Homo sapiens
caaggaagcgctacagatataggctctgtgttctcatctacatcggctgatttaggggcctttcatgtgtttgcatcaggctctggcggctgtgaaaacagcaacagctgtaacctgccacactagaaaaaatacattcattgggtggatccccgagttctcacaggaggctggggcactgccgtgtaaagctagcgccctgccctcagaacaacttagtgtgtaaaacctaaaggagcttacagttcatataaaataatgacaactttgagctttttaagactttgaagggcgtgagtctaagataaaactgtgtggctatttttacagcaygtattggtatgccaaaagaaggtagcccagatagctcacgtgacaatttttgacatctaaatagaccaatacttgctcttgctctacattttatattcttttataacataactatatagttttagttataaatattttcctctctttttaaatggtgccacattatcagtacttcctgtgtccttttttttcttttgtgtctgtcatgagaaatattgaaaagtcttatatttaaaacaggatgttttgaatttgcttttag

SEQ ID NO: 404565 - DNA, 522 bp, Homo sapiens
accctacaattttttttaaaaccctcaaaatatatggagtttgatatcaagtgccagtacaacttgattaaagaatgaaaatattgcaaaactgtgctttactgaccatggcaccaccttctgggcctgtgagggggagcctgagtagaagtagtagggtctggtggttcacacagaagacttgatgttrctcagacccagctttgagtccaggcttctagttgtgtgatcttgaatgcattgcttggtctttttgagccacagtttttctatctgttacaagagggatgacagttacaataaaaccaacaccctcaaaggttgtggtgaggcatatataaaataatgcatgtacagctcaatgttgattatttagtaaataatcaaaatactagctcattgtaaagtgagacatggtcaggatgccttactgtcttttgaagagatggcatgtgtccacagaacaagcagagaatatcctgttaataacatgctaaattatgtaaaatatctaataaggcc

SEQ ID NO: 404566 - DNA, 612 bp, Homo sapiens
gtttttgcctgcttccagcagtgtttcagacaagggaatgccttgtgctttcctttccccggcttcctcctctgggtgtgctctcaattctaaccccgttaccagcatcgccacctgttaattatcactgttggttatgctcttcaacttcagtctttccctgtcctctgagaacttctcctttggcttcatggcaccaaagtacatcccattctgaaatcaaaagaatagtaaacacaaaaacctactaactccccacaatttccttctcaaactactgctggatctttcttttctttctttatcatcagacatcacaaaagagmaatcttctacccatttcctttatttcctcacgtccaattcacttctcagacaggagcacctggcttcttgccccctcaccctatactgaaatgctctctgaagcatcatcacaacttcattgccaaattggaagcctttagagaatggcacttatccagttctcacccaggagccattaatgggagaaatcctggaagaataggggaagaatgccacccaccatcttgatcccatcaaaacccaaatggacatagaaatgcctgatagcctctttcaattaaactg

SEQ ID NO: 404567 - DNA, 571 bp, Homo sapiens
tgtgtccactataaataaaaaagtttttaaaaagagacaatgccatcctaggaaactacatgtactttgttatactgggaatgctaataaaaawataaacaacaaacaatatgctgagaaatgaggttcaaaaactagagaataacaggataatagagagtcttgtccactaagctaagtggttaggctatattcaaacttgagagtcattcaaaaatctttatgtaaggaaaatataactaattatgcatatgataaaagtcactctaatgctagtggaggaagcggtataggatgtgagtgtgtgggcagggaaattcattaggaggcatttgataaagcccagatgaatgagaatggatcaaagaccattaaaagggaaaggaattatgaaatcaagtgactataagtgatagatttgaccagacttgataatcatttggacacatagaactaaagaaaaaaaagctgaaaatgagttggaggttttggcatggaccactgggttaacagtgccattcaccaaaaaagaaaaccaagaacaggtgcagtttcatgaggaaggagaact

SEQ ID NO: 404568 - DNA, 584 bp, Homo sapiens
tgaaatctcccttaatctcagctgaaaaattctacatctcattaagtaatctaaatcagatatgggtgagacagtgggtataatccattttgggggaaaaatttctctytattgtggtcttatgaaactggaaaacaggtaatctgcttccaaaatacaatggcgggacaggcataagataccagttatagatatttctgttccaaaggaaggaaatggaaagaagaaaggagtcactggtcccagacaattgtgaaattcagcagtgcaaactccgttgggttcaagtcttagaaataatcctctttggttttggctctgtcttctggcttgtggctcattcctctgagacatcgttcatttttcatgaaggatagcatttgtttgcagttgagtagtttaatcagcttgtttcctgcctgtaaagttttggtggtttgtcagacatctttcattgtgtcctctctcagtcttcttcagtccaaattggcagggtttctgttggtatagtattctcaagaatcttgaaggtctcctgtccactagacaagcagcttatccacagatctgtcctagataatgct

SEQ ID NO: 404569 - DNA, 606 bp, Homo sapiens
tgtagtgagggtgaaataatacatacaaagtgctcgaacagtacttggtggtgagctctcgttaaacttgagtctatacattttaaagtaatagggtatagctttggctttttttccctcatgtgtatcrtctgccttatgcgttattgatgtcagattttaacccagaagtagattaggatagtggaaaaagcagaagactggggaagggcagaagattaaaatcagcattttttgttttaatttatttcatcctcactactatgatataaaataggtactattattacccccttttatcaatgagtaaatggaagtattttgaggcagtatttaagggtgacagtggatacgtctcttaatgtattcaagcctcagtttccttgtctggaaatgggacgaataaaaagactgataagaattcaatgactacgtatgggaaagcacttcaaaagtgcaaagtgtaaaaaaaaaacagttcattattctttccttcatttatttttatttctcctaatatttcaccatctgatgtccagctgtgaattgtgtgttcagagaatgaaaaccttcatttcagtgctagcctattaataatatcgatac

SEQ ID NO: 404570 - DNA, 606 bp, Homo sapiens
tgtagtgagggtgaaataatacatacaaagtgctcgaacagtacttggtggtgagctctcgttaaacttgagtctatacattttaaagtaatagggtatagctttggctttttttccctcatgtgtatcgtctgccttatgcrttattgatgtcagattttaacccagaagtagattaggatagtggaaaaagcagaagactggggaagggcagaagattaaaatcagcattttttgttttaatttatttcatcctcactactatgatataaaataggtactattattacccccttttatcaatgagtaaatggaagtattttgaggcagtatttaagggtgacagtggatacgtctcttaatgtattcaagcctcagtttccttgtctggaaatgggacgaataaaaagactgataagaattcaatgactacgtatgggaaagcacttcaaaagtgcaaagtgtaaaaaaaaaacagttcattattctttccttcatttatttttatttctcctaatatttcaccatctgatgtccagctgtgaattgtgtgttcagagaatgaaaaccttcatttcagtgctagcctattaataatatcgatac

SEQ ID NO: 404571 - DNA, 555 bp, Homo sapiens
acggggtttcaccatgttgtccaggctggtctcaaactcctgacctcatgatctgcctgcctcggcctcccaaagtgctgggattacagatgtgagccaccgtgcttgcccccctttcctcttttctatacctctcctctccagtcctgtgtagccttcttccctacgttatttatttattttttacttacctgctcttatttttattatttctcctcattctagagctcacataggctctggagtctgatagcctggtgtgaatcctgscccccagtttgttattgttattctcctttaaaaataaccagagctccctgggtagaactgattacaaaatttggaacaggggtacatcaaggtggctctggggtatctgttttcagatatatctgagttagagcaaaaaagggccaagaggtaaactgaaagggctcccattggtcaatgtggaacaatttaattataaaaaagcaacaattattataattgataaaaataacttgctacaaaaaaatccatgaatacatgataatgctcaaaaagaatgtgacc

SEQ ID NO: 404572 - DNA, 511 bp, Homo sapiens
gacaaaatttacacagctactaagtggcagagctgcaacttgaagtcctggaatacaaagcctgcaccaactatccgccctccccctctgccaagaactcttcaagccctcacatgttaacctgttaagcatctgataaaggatagattcttctggtgttaactacagttagatctctgtgccaaagccaaagtycttctctttaccctttgccctagtcttcccactcacctagtgtcaagtcattaaactctgtctactatctccccgaacttttctaaaaacattaaaatattatattatgctagactgtgaccaacagtgctcacaaatatttgctgcccctccctagaggagaattgtactttccatctcctttaacttaaggcttggcgataagacttactttggccaatgaaatttgagcagaattgacacatatcatttctgagcagtagctttaaatgccagtagatgcttcacctttcttattttcccacaatttgccaca

SEQ ID NO: 404573 - DNA, 565 bp, Homo sapiens
acttagagggaaaatgatttgaagagacatagagagaagacagccatctacaagccagggagagagccccataacagacccttccctcacagccctcagaaggaaccaactccaccaataccttgattttggactcctagcatccaaaaatggaaagaaaaaattctgttttytaagccacctactcaacagtactttgctagagcagcccttgcaaactaatacaagataagaacagaaaagaggctgggcgcagtggctcatgtctgtaatcccagcactttgggaggctgaggcaggcagatcacaaggtcaggagttcaagaccagcctggccagcatggtgaaaccctgtctctactaaaaatacaaaaaattaaacgtgtatggtggcgcacgcctgtagtcccagctactcgggaggctgaggcaggagaatcgcttgaaccctgcaggcagaggttgcagtgagctgagatcgcaccactgcactcactccagcctgggtgacagagcaagactccatctcaaaagaaaaaaaaaaaaaaaacaggaatgaactggc

SEQ ID NO: 404574 - DNA, 565 bp, Homo sapiens
acttagagggaaaatgatttgaagagacatagagagaagacagccatctacaagccagggagagagccccataacagacccttccctcacagccctcagaaggaaccaactccaccaataccttgattttggactcctagcatccaaaaatggaaagaaaaaattctgttttctaagccacctastcaacagtactttgctagagcagcccttgcaaactaatacaagataagaacagaaaagaggctgggcgcagtggctcatgtctgtaatcccagcactttgggaggctgaggcaggcagatcacaaggtcaggagttcaagaccagcctggccagcatggtgaaaccctgtctctactaaaaatacaaaaaattaaacgtgtatggtggcgcacgcctgtagtcccagctactcgggaggctgaggcaggagaatcgcttgaaccctgcaggcagaggttgcagtgagctgagatcgcaccactgcactcactccagcctgggtgacagagcaagactccatctcaaaagaaaaaaaaaaaaaaaacaggaatgaactggc

SEQ ID NO: 404575 - DNA, 565 bp, Homo sapiens
acttagagggaaaatgatttgaagagacatagagagaagacagccatctacaagccagggagagagccccataacagacccttccctcacagccctcagaaggaaccaactccaccaataccttgattttggactcctagcatccaaaaatggaaagaaaaaattctgttttctaagccacctactcaacagtactttgctagagcagcccttgcaaactaatacaagataagaacagaaaagaggctgggcgcagtggctcatgyctgtaatcccagcactttgggaggctgaggcaggcagatcacaaggtcaggagttcaagaccagcctggccagcatggtgaaaccctgtctctactaaaaatacaaaaaattaaacgtgtatggtggcgcacgcctgtagtcccagctactcgggaggctgaggcaggagaatcgcttgaaccctgcaggcagaggttgcagtgagctgagatcgcaccactgcactcactccagcctgggtgacagagcaagactccatctcaaaagaaaaaaaaaaaaaaaacaggaatgaactggc

SEQ ID NO: 404576 - DNA, 598 bp, Homo sapiens
gtaaggtatgtgccataagaatttaaaagccatgaacaaggaggtatgcatgaagatgtatattgcagtattgtttgtcaaaaatctgaaccaagccaagttttcatcaatagcaaatgaatgaatacattgtggtattatgcagtagttcaaactaatgaactagatctaaatgtgttcaaaagaawaatggagagtgaaatgataagtttcagaggaatccatttgtattatgccatttagataattttgtaaaccgcataaggcaacagttaacactcactgagtgtttgctacatacccaatgatgttctaatacattatattaactaatttgcttaatccacagaacaatactatgaaatagacactctatttacaaatggtaaaaatgaagtgaagaagttaaggaaattgcccaagattacacagctagtaagagtcatagctaggatttgaatgtaggcagtctgtccccaaaggcttcacattttgccactagacataagccctctctactatctatcttgtatatggacacatacaaacgtggtaatatgtaagcatgcacacatacatacacacgtacatggacatg

SEQ ID NO: 404577 - DNA, 598 bp, Homo sapiens
gtaaggtatgtgccataagaatttaaaagccatgaacaaggaggtatgcatgaagatgtatattgcagtattgtttgtcaaaaatctgaaccaagccaagttttcatcaatagcaaatgaatgaatacattgtggtattatgcagtagttcaaactaatgaactagatctaaatgtgttcaaaagaaaaatggagagtgaaatgataagtttcagaggaatccatttgtattatgccatttagataattttgtaaaccgcataaggcaacagttaacactcactgagtgtttgctacatacccaatgatgttctaatacattatattaactaatttgcttaatccacagaacaatactatgaaatagacactctatttacaaatggtaaaaatgaagtgaagaagttaaggaaattgcccaagattacmcagctagtaagagtcatagctaggatttgaatgtaggcagtctgtccccaaaggcttcacattttgccactagacataagccctctctactatctatcttgtatatggacacatacaaacgtggtaatatgtaagcatgcacacatacatacacacgtacatggacatg

SEQ ID NO: 404578 - DNA, 471 bp, Homo sapiens
gctacagggttgttgctaatagcatcctttgtgcttgtgtgtatttttattttgttttgtaaaatagttccttgtcaagctatatagccatttgactgagagctaaggccaggaaaagttaagtgatatacccaggggtcaatagtgaaggctagagcttgggtccccaggcacgtggccccatgcctgctctgctagcccatgctgccaggcagtttctgtgcccgatttttttaacagactgtaagcatgagactggagccagcctagcttatcactacatgtgctttatttcatacaytggctgcattcacagaaagttgtatttaagtaaaatgtttgcatatcgaatctttttttcacttacattttaattttagagatgtgttcccacagaaaataatttagccccaatatgtaaagataaatcctaattagaatcagaacattcatgaaagacagtgtagtcaa

SEQ ID NO: 404579 - DNA, 562 bp, Homo sapiens
catcactttatgattaaaaacctcagcgaaactggcatagaagggacatacctcaaggtaataaaagccttctatgacaaacccaccacctacattatactgaatgggagaaaagttgaaagcatttcccctgagatctggaacaagacaaggatattcactttcaccacttctatgcaacatagtactggaagtcctagccagagcaatcagacaagagaaagaaataaacggcatccaaatctgtaaagtggaagacaaactgttgctgttcactgaagatatgatcgtatatctagggaaccctaaatactcatccaaaaagctcctaaatctgacaaatgaattcagtaaagattcaggatacaaaatcaatgtacacaaatcagtagcactgacatacaccaacaatgacaaagctgagaatcaaatcaagaactcaatcccttttacatcagctgcaaaaaatragaataataataaaatattaataatatacctaaccaaggacgtgaaaaatctatatgaggaaaactacaaaacactattgaaagaaattatt

SEQ ID NO: 404580 - DNA, 277 bp, Homo sapiens
tgctggcaaggatgtggagaaaaaggaatcctcacacactactggtgggaatgcaaattagtacagccatcatggaaaacagtatggaggttcctcaaaaaactaaaaatakaactaccatatgatccggcaatcccgctactgagtacatatacaaaggaaatgaaatcagtatgtcaaagagatatctgcactcccatatagcattattcacaatagccaagatatggaatcagtataaatgtccatcaatgaataaatgtgtttaaaatatgtg

SEQ ID NO: 404581 - DNA, 462 bp, Homo sapiens
tttggccaatggagcataaatagatgtgatatatgcaaaggcttaaaacatgctgtgcaataggcttgcctcctggcgtaccgccttgcaaagaaaagagtctgccctgagtatgtgctgccccatcattctgggctccagaaggaccacctatggagcagatttgagcttaaactactataaagagccaagcccracaacttaaagctgaactcccagtcaagctcagcctagattagctgattccgtcaacttgcagtcctataaaagagagaataaatgcttaccaatgtatgctcctgagttttagagtagtgtgttatacagcaatagctgactgatatagcatgttcagacagtgagaagactggtctgattatgacaagcaaggatgataaatagtataataatatggatgagatagaaaggagtcagataaggtaaaactttacaactttaaaa

SEQ ID NO: 404582 - DNA, 462 bp, Homo sapiens
tttggccaatggagcataaatagatgtgatatatgcaaaggcttaaaacatgctgtgcaataggcttgcctcctggcgtaccgccttgcaaagaaaagagtctgccctgagtatgtgctgccccatcattctgggctccagaaggaccacctatggagcagatttgagcttaaactactataaagagccaagcccaacaacttraagctgaactcccagtcaagctcagcctagattagctgattccgtcaacttgcagtcctataaaagagagaataaatgcttaccaatgtatgctcctgagttttagagtagtgtgttatacagcaatagctgactgatatagcatgttcagacagtgagaagactggtctgattatgacaagcaaggatgataaatagtataataatatggatgagatagaaaggagtcagataaggtaaaactttacaactttaaaa

SEQ ID NO: 404583 - DNA, 502 bp, Homo sapiens
tgaagaggtggagaagatgagacagagctcagagcaatatttgaagatacagaagctgaggacaagccagcaaaggttacagggaaataagggtctgtggggtaagaggaaagcaggcaaggactgaagcaggatacctagagaagactcaaggctcaaatttgattcattcctagctttaggtgatggctaaagaagatatacaactaattacaaaagaaaataaagaaaagaccaggaaaagtaaacagtaatctcatygttacaacaactcatgtctagaaagtagggttgggtttggcagataagcgatgagtcttgttccctgcacaaataggttttagtcagaaaagtttcagagtcactggatttttttttttaagacagagtctcactctatcacacaggctagagtacagtggcacgatcttggctcactgcagccaccaccccccgggttcaaggattgtcccacctcagtctcccaagtagctaggattac

SEQ ID NO: 404584 - DNA, 502 bp, Homo sapiens
tgaagaggtggagaagatgagacagagctcagagcaatatttgaagatacagaagctgaggacaagccagcaaaggttacagggaaataagggtctgtggggtaagaggaaagcaggcaaggactgaagcaggatacctagagaagactcaaggctcaaatttgattcattcctagctttaggtgatggctaaagaagatatacaactaattacaaaagaaaataaagaaaagaccaggaaaagtaaacagtaatctcattgttacaacaactcatgtctagaaagtagggttgggtttggcagataagcgatgagtcttgttccctgcacaaataggttttagtcagaaaagtttcagagtcactggatttttttttttaagacagagtctcactctatcacacaggctagagtacagtggcacgatcttggctcaytgcagccaccaccccccgggttcaaggattgtcccacctcagtctcccaagtagctaggattac

SEQ ID NO: 404585 - DNA, 632 bp, Homo sapiens
gttggccaggctgatctcgaactcctgaccttaagtgatacacctgcctaggcctcccaaagtgctgggattacaggtgygagctcccgtgcccacccagagtcactggatttaatagtttctacaagccctttgagctttctagagtctttgaatacagattggttagaagctacattagctcagtgtagattacctgatgtatatatctattgaaaatgtgcacacagaaacattctaggtgaaagaatagaatataaaggaagagctcttccctcccctacctgccacagctcttccacctccaaaaagcactgctatgggttagggatatcaaggggcagaaggcggtgatatggtttggctgtgtcctcactcaaatctcatcttgaattgtagctcccataattcccacatgtcatgggagggacccagtaggaggtcattgaatcacgggggtgggtctttcccatgctgttcttgtgatagtgaataagtctcatgagatctgatggttttacaaagaggagttctcctgcacacgctctcttgcctgctgtcatgtaagacatgactttgcttctcattcaccttctgccatgattgtgaggcctcctagccacatggaactg

SEQ ID NO: 404586 - DNA, 632 bp, Homo sapiens
gttggccaggctgatctcgaactcctgaccttaagtgatacacctgcctaggcctcccaaagtgctgggattacaggtgtgagctcccgtgcccacccagagtcactggatttaatagtttctacaagccctttgagctttctagagtctttgaatacagattggttagaagctacattagctcagtrtagattacctgatgtatatatctattgaaaatgtgcacacagaaacattctaggtgaaagaatagaatataaaggaagagctcttccctcccctacctgccacagctcttccacctccaaaaagcactgctatgggttagggatatcaaggggcagaaggcggtgatatggtttggctgtgtcctcactcaaatctcatcttgaattgtagctcccataattcccacatgtcatgggagggacccagtaggaggtcattgaatcacgggggtgggtctttcccatgctgttcttgtgatagtgaataagtctcatgagatctgatggttttacaaagaggagttctcctgcacacgctctcttgcctgctgtcatgtaagacatgactttgcttctcattcaccttctgccatgattgtgaggcctcctagccacatggaactg

SEQ ID NO: 404587 - DNA, 632 bp, Homo sapiens
gttggccaggctgatctcgaactcctgaccttaagtgatacacctgcctaggcctcccaaagtgctgggattacaggtgtgagctcccgtgcccacccagagtcactggatttaatagtttctacaagccctttgagctttctagagtctttgaatacagattggttagaagctacattagctcagtgtagattacctgatgtatatatctattgaaaatgtgcacacagaaacattctaggtgaaagaatagaatataaaggaagagctcttccctcccctacctgccacagctcttccacctccaaaaagcactgctatgggttagggatatcaaggggcagaaggcggtgatatggtttggctgtgtcctcactcaaatctcatcttgaattgtagctcccataattcccacatgtcatgggagggacccagtaggaggtcattgaatcaygggggtgggtctttcccatgctgttcttgtgatagtgaataagtctcatgagatctgatggttttacaaagaggagttctcctgcacacgctctcttgcctgctgtcatgtaagacatgactttgcttctcattcaccttctgccatgattgtgaggcctcctagccacatggaactg

SEQ ID NO: 404588 - DNA, 590 bp, Homo sapiens
cccagctagtaataacaatgctccttcgctggtttcttgtcctctaaccctttgttgctcaaagtatggtccatagacctgcagcatcagtgtcttctgggaacttgttagaaatgcagaatgcctaatctcctgaatcagaatccatgtgttatcaagatccccgaaaggttcatatacacattaaagtttaagaagcatgactccatcatatatttcccttaggactttgcaggaagkggtggctaactgagcacagaattacgtattcatcagttcccctgacaaatactccatctaatctctgtggaaacacggtcccagaattctgaaaattgagagaagtttataaagacttggagtgttccatcgtagaattaaccttgatgggtttgggtgactcatctacattttctttgaagtacccagtaccactagcaatccctctttaaggaaggaagctctaatctctgaaaagttcttaggattattcacagagatgaaaagaaacaccatgatgttcttggtggcttgacagggaagattctaaaatgtctctgccctttttatcctaatcaggaatattaaat

SEQ ID NO: 404589 - DNA, 590 bp, Homo sapiens
cccagctagtaataacaatgctccttcgctggtttcttgtcctctaaccctttgttgctcaaagtatggtccatagacctgcagcatcagtgtcttctgggaacttgttagaaatgcagaatgcctaatctcctgaatcagaatccatgtgttatcaagatccccgaaaggttcatatacacattaaagtttaagaagcatgactccatcatatatttcccttaggactttgcaggaaggggtggctaactgagcacagaattacgtattcatcagttcccctgacaaatactccatctaatctctgtggaaacacggtcccagaattctgaaaattgagagaagtttataaagacttggagtgttccatcgtagaattaaccttgatgggtttgggtgactcatctacattttctttgaagtacccagtaccactagcaatccctctttaaggaaggaagytctaatctctgaaaagttcttaggattattcacagagatgaaaagaaacaccatgatgttcttggtggcttgacagggaagattctaaaatgtctctgccctttttatcctaatcaggaatattaaat

SEQ ID NO: 404590 - DNA, 590 bp, Homo sapiens
cccagctagtaataacaatgctccttcgctggtttcttgtcctctaaccctttgttgctcaaagtatggtccatagacctgcagcatcagtgtcttctgggaacttgttagaaatgcagaatgcctaatctcctgaatcagaatccatgtgttatcaagatccccgaaaggttcatatacacattaaagtttaagaagcatgactccatcatatatttcccttaggactttgcaggaaggggtggctaactgagcacagaattacgtattcatcagttcccctgacaaatactccatctaatctctgtggaaacacggtcccagaattctgaaaattgagagaagtttataaagacttggagtgttccatcgtagaattaaccttgatgggtttgggtgactcatctacattttctttgaagtacccagtaccactagcaatccctctttaaggaaggaagctctaatctctgaaaagttcttaggattattcacagagatgaaaagaaacaccrtgatgttcttggtggcttgacagggaagattctaaaatgtctctgccctttttatcctaatcaggaatattaaat

SEQ ID NO: 404591 - DNA, 577 bp, Homo sapiens
aacagctatagctcaaacctcaagcacggttttgtgaaaatggttacacatgggcagtgttcctatgaaaaagaaaccacatatttaactcctgtacatcttccaaggtctgttcaggtgccacctcccccaaagaccatttcccaggtcatccagtaagaaatttctttcttgaacactcttaagactttatccacacttgacggcaagccagytctcttttattctgaattagggtgccagaggtcatatttgcccttctgaactgtaacgtagttgaggctgagatctttaccttattcatctaggtcttccacaacatgtagctcaaagcctagaatgcaaacaggtgctaaattcctgaatcttcccctggaagcagctacattagcctttgttctatcttgttacataaaacaagctacttgaaagatactatctattcttcctttagaaactcttttgaagcagaactcctgaaaggtagcactttcctggcagaaaaaaaaaaaaaaagcaacatattaaagaatttgcactcatgcatattctaattcacttttataaatgaaccacc

SEQ ID NO: 404592 - DNA, 545 bp, Homo sapiens
ctcttctagatagacatcatttattaggtcccttttggcatagtttaaaataaatgtggcaataatgttaaatatatccctctgcagcaaaagcagtgttaagaagaaggcttatagcactaaaggcctaccttaaaaagttagaaagatctcacatcaatgatctaacatcacacccagagtaacaagacaaaaatgaccccaaacctagtgtttttcacwcctagaaaaagaaaaaactaaccccaaagctagcagaagaaaataaataactaaaataagagcagaactgaaagaaattaagactcaaaagtccacccaaagaatcaatgaaaccaaaagttgggtatttgaaagtataaacaagatcaatagagcactagctagattaacaaggaaaaaagaatatccaaaaaagcacaatcagaaacaacaaaggtgacatttcaaccaatcccccagaaatacaaaagatcctcagagactactatacacatctctatgcacacaaaccagaaaatctatccagaaatggataaattcct

SEQ ID NO: 404593 - DNA, 527 bp, Homo sapiens
ggctattggcctaggtacagtgaagagggaaccagcaatatatcatattcattcattcattcattcattcattcatgcactcaacaaatatttattgcacrtcatgtgacaggcactgttctgagtgttaaggatgcagcagagaaaagacagtccctgtctacatgaagcctatattctagcaaagatggccaatggccaatcacagtaaacaagtatactaataaatgagtaactttagattgtaatatatactatgaaggaaatataagagctatactggagagagaaagagagagagagagacttagggggagagttgactttacattggggaaggcttccccgcagaggtgacgtttgagctgaagcctaaatgaaggagccagccatgcaaagataatattattattaataatcactcacattattaatgacgaacacttcatatgctaggtactattctaaattctttatattcatgagctcatttaatccttataacaattgtgcaaaggagataggta

SEQ ID NO: 404594 - DNA, 527 bp, Homo sapiens
ggctattggcctaggtacagtgaagagggaaccagcaatatatcatattcattcattcattcattcattcattcatgcactcaacaaatatttattgcacatcatgtgacaggcactgttctgagtgttaaggatgcagcagagaaaagacagtccctgtctacatgaagcctatattctagcaaagatggccaatggccaatcacagtaaacaagtatactaataaatgagtaactttagattgtaatatatactatgaaggaaatataagagctatactggagagagaaagagagagagagagacttagggggagagttgactttacattggggaaggcttccccgcagaggtgacgtttgagctgaagcctaaatgaaggagccagccatgcaaagataatattattattaataatcactcacattattaatgaygaacacttcatatgctaggtactattctaaattctttatattcatgagctcatttaatccttataacaattgtgcaaaggagataggta

SEQ ID NO: 404595 - DNA, 551 bp, Homo sapiens
acttcccttttcattatgtctcaagagaagtgcaaattcaccctgaaagctgataccacttaagggtacacagaccaacagctccagtttttagctcaagattcatctgtgaacaatgctggagtaaaarggcacaaaatgaattcattttctctttttaacaaatacataatcatgttttgaatgctggaaatagctaaggagcattcccacctcttgttggtttgaatcaagataaactcaagacactgaatatataatactcagaaagagataaattattccatattcccaaagctgagagctgagtacccagaatcaaatcggagcagaactaaaagagacaaatgagccagcaatggtttttttttatcacgtcctcttcaaactcatcatgtatatctactaactatttctacagggccaattctgctaaacctacaatgactatacagactttcaaggaaagttattctaggataatgtattgtcctattttccagttagtgaacaacacatcccaaggattccatgatttcagagactaaacc

SEQ ID NO: 404596 - DNA, 536 bp, Homo sapiens
cttaaaaatcagacacccaggttctttttgtgattctcccttatgtgattctgattgtattactagtgatgaagataagttaaataagtatttgaaacaattgggatgtgatgggcattatkagattcctagataattttttatttttataattcagtagcttttagtataatcacagaattgtgcattcatcaccacaatcaattttagaaatgctcattaccctcaaaagaaatcccataccttttagctgtcacccacaatttccccataagctcccaagccttaggcaaccactaatctactttctgtctctgtagatttgcctattttggttatttcatataagtgaaatcatacactgtgtatccctttttgactggcttctctaacttagaataatgctttcgaggttcattcatattgtagcttatgtcagtagttcacttctttttattgcagaataatgttacattgtttggatataatacattatagatatccatttatcagttggtggacatttgaattgtttc

SEQ ID NO: 404597 - DNA, 543 bp, Homo sapiens
ttcattttcttggtggtgtcctttaagcacaaaggttttaaaatttgatgatgtccaatttttttttattttttattttttgtgattctgatgtcatatttttgcctaattcaaagtaatgaagagttactcctrtgttttcttctaaaagttttataggtttagctcttacatttatctcttagatatattttgagttactttcttctaaaagttttataggcttagctctcacatttatctcttagatgtattttgagttagtttttatatatcatgtgaggtaggggtcaactttattcttttgcatatgaatatccaattgtttcttcaccacttgttgaagactgcttttcttccagtgaattgtattggcaccctgttgaagatcaattgaccataaatatgagggcttatttctggtctcttactgctatggaatctttggggtgttgcttttctgaccagaaacctgtggctggtggtgcctttgcccgagttttgctagggcccactggctcgttctacccactcggcctggca

SEQ ID NO: 404598 - DNA, 500 bp, Homo sapiens
acatgctatttctatatctactgagatgataacatagttttaatcttttattctgttgatgtagtgtattatactaactgattttcagaaagctataccaaacttgcattcctgggataaattccacttggctatgttccataatcctttttctattttatggattcgatttgatagtatattgttgaggacttttgtatctatatccataagtgagrtattggtctgcagcttgctttctttccatgttttaatatgattttgatatctttcttttgagttttagctgatttttaagctatattgaatagcttttttaagctaacatttgctgattgcataccacgtgccaaacattaattttttttagatgatcccctttgacttgttaggtatataattgtgtaagctgaaaatattgaaaatttttcctttcttcaatttcaatatttatattagcgatttctttttcttgttttatgatatggtctggaatctcc

SEQ ID NO: 404599 - DNA, 500 bp, Homo sapiens
acatgctatttctatatctactgagatgataacatagttttaatcttttattctgttgatgtagtgtattatactaactgattttcagaaagctataccaaacttgcattcctgggataaattccacttggctatgttccataatcctttttctattttatggattcgatttgatagtatattgttgaggacttttgtatctatatccataagtgaggtattggtctgcagcttgctttctttycatgttttaatatgattttgatatctttcttttgagttttagctgatttttaagctatattgaatagcttttttaagctaacatttgctgattgcataccacgtgccaaacattaattttttttagatgatcccctttgacttgttaggtatataattgtgtaagctgaaaatattgaaaatttttcctttcttcaatttcaatatttatattagcgatttctttttcttgttttatgatatggtctggaatctcc

SEQ ID NO: 404600 - DNA, 424 bp, Homo sapiens
gtcacttttctctttccagtttatcctttgcttcagcttttaccagtgggagcccatgacctatggctcttaccgctatcctaactggtccatggtgctcggatggctaatgctcgcctgttccgtcatctggatcccaattatgtttgtgataaaaatgcatctggcccctggaagatttattgaggtaattctgtctacttctttccctcccaattcctcccaagggaaagcccataaaagctctgcatgttaaaaaacaaaagattcggtaaacttattcaagagggagacttggtgatgaagcgattacagttgccacygtttctgttaaacccatttttattatgtatgattcctctaatggaggggctcagccagtctgcaagcagaactgttattatgctggtcctcagtgtggtga

SEQ ID NO: 404601 - DNA, 464 bp, Homo sapiens
tttgtttaaagggacacgcttaggtgaaaggttccaaatttacctggaaatggttaccttgtaaatttagcttgtctaatggattgtttccatgatattaaaatgtacagtcaattggaagaaaaaaaatgataaaaataaaatgaataacattgttagaaactggcacctgaaaacttcccttcaaagtgggggaaaaaacsgagtagctgaggaaagactttcattggttcactgtgtagaatggtggagcattttccacttgtgagattatttcataacaccaacaaatgccagaaactcattcagaaaaaaagccatatgtgaaaaacagtaatcctgtcatatccttagaggagaaaaaatgtatatttcttaacaagtggtgttgtgacttcttatgcaaatgtcttgcatattagtaacttttattatctttaggactgtgcttatcaggtacaaat

SEQ ID NO: 404602 - DNA, 513 bp, Homo sapiens
gtcttacattctcattttgtcacctttgttattgtgctataagctgccagctttgccccacttcacactgcaaacacagcaattgacagagatccttccccatcctcctctgtggcttgtacaggtgttaattttgggaacgctggaggatgttggctgtaattcccacagaatccagtaggtggcactagaaaccagattaaggcctttgttttgcyattacacatggtcccagtttccctaaaggcaaccaagacaggatgaaagtacaatcgcagagggaatacatttttttctttctttcttctttccttccctccctctcttcccttccttcataaaatgagttttaatcaaaacatctcaatttctttctgaaaagctagaaatgtagacagaaaaatcgttcagcattgatctccctctgcgttgacacgaacatcatactgaagctgacatctgtacctatattttagagtctgcaatttgtctgaaaagtcccaccagatttgg

SEQ ID NO: 404603 - DNA, 629 bp, Homo sapiens
  misc_feature (1)...(629): n = A,T,C or G
cccaaacaagaattgagcatgaacaagctccctaggttaaattttagaaaagtgctaggaaaatggctcctcataccaatcattaaggtaatgacaaacttgagagttttttcaattattaactctcttctgggtttctagtgtttgcaagttatatgtggagactacatttcaaatatggctaattttaatagatattccaagagtagaacatgcaagattaacaagatattcagaatatctcatttaaatcatgccctttaaacttaggacagaaagcgtgggatctaaataataataacatttgacaattattgagtgcctatgtgccagacaytgtcttaaatccttaaagtatgcccattgggcagatatgattatacctagtttacagatgaagaagctgaagttcaaagatataaagtcatccaagaaaatacaaccagtaagtggtagatccaagatagaaacccaagtttatataatactaaagatgccctttctgctccatgacactatgtctaggatgttgtaaaggaaatgaagtttctagcaccaataaagagatgctgaggctgttgggagtaggtagcatagagtcaacagcggttagcagtcntcctttggga

SEQ ID NO: 404604 - DNA, 559 bp, Homo sapiens
attaaaacatctctgaggtgtttcacccacccacacctgcaggccctgggcatacctgccccaagaatgactcttgctctacaaaaggcttcctgtctccgaagaaaaaaaaagtttgtygtattcattcaaccaaaatatactaggcatttatgctatatcaagccctgccagggaatgaaggtagaaaatttgatcatctgattgctaatggcttccatctgctataccatctatttgatttctttctgtgaggacttaatgtctattacccaagtgctctctgagtcctgattatgccagtttaccaagccattcccttgagcttacctcttcaacttctgcgtgtctcctggagtctgtctgcctggtttccaacctactattttgcctatgagtcattctcgtatatgccccctgaccctcagtctactcttcactgctagttatcatctgctcctgtccactcctagactgacttggggacactcagggacccagtatgaacttaactaaacacagtggcctgattaagcactttaatatccttggtagaagc

SEQ ID NO: 404605 - DNA, 559 bp, Homo sapiens
attaaaacatctctgaggtgtttcacccacccacacctgcaggccctgggcatacctgccccaagaatgactcttgctctacaaaaggcttcctgtctccgaagaaaaaaaaagtttgtcgyattcattcaaccaaaatatactaggcatttatgctatatcaagccctgccagggaatgaaggtagaaaatttgatcatctgattgctaatggcttccatctgctataccatctatttgatttctttctgtgaggacttaatgtctattacccaagtgctctctgagtcctgattatgccagtttaccaagccattcccttgagcttacctcttcaacttctgcgtgtctcctggagtctgtctgcctggtttccaacctactattttgcctatgagtcattctcgtatatgccccctgaccctcagtctactcttcactgctagttatcatctgctcctgtccactcctagactgacttggggacactcagggacccagtatgaacttaactaaacacagtggcctgattaagcactttaatatccttggtagaagc

SEQ ID NO: 404606 - DNA, 416 bp, Homo sapiens
tggttatgagctgataatgtcactgcagaagaatgaatacayccacaccttcctcaacctcatcataatcatacttaagctcaatcaggcacttgacacatcttactgtagtgtaggagcctgagagcaagctgctcagtggtaaactctcccagaaattaagctggatagtaatttgtattctagagacaggtagaggaaggagaagggtggaggagggaaaggagtaatgcatcgtgcctttgtctttgatatcatgaccataatcgttccctccctccacctacctctgcaacccacaacttctccacctggtaaactctgactcatgcttcaagtcccagtttaaatgccatctcctctataaagcctcccttgactttccctggaagggttaatggcttccttctcttcct

SEQ ID NO: 404607 - DNA, 563 bp, Homo sapiens
taataaggtgtaaatctgtgaaaggaggtctgaataagtaatcaatgagtcctatgaggaaaagggtattctattctttgacaagagaaataggtacaaagggcttggggcagggtaagaggaagctggacatgcctgtgaacaacagggaggccactgtggctgagctsagtgacaatgtagtaggggcaggagatgaagtcagaagggcaggaaagagccagatctcacagaaacacagccttggtaaggactttggattttattatgaattagtggagaagaaatttaagagtgctaaccaaaggagtgacatgatattactcatttcttttgtaacacatattatggtgtgctgtaactgttgagtgacctgcctctcacaagggtacatctcaatctccccagctcctagcacagcacctagtttataataggtatttaataacattttagagaagaaaagagcagaatgggtgtaaaccggccacaggcctccagagcatacaggactgtctgccttccactaatatttgtcagggaaggattagcctcatacattc

SEQ ID NO: 404608 - DNA, 563 bp, Homo sapiens
taataaggtgtaaatctgtgaaaggaggtctgaataagtaatcaatgagtcctatgaggaaaagggtattctattctttgacaagagaaataggtacaaagggcttggggcagggtaagaggaagctggacatgcctgtgaacaacagggaggccactgtggctgagctcagtgacaatgtagtaggggcaggagatgaagtcagaagggcaggaaagagccagatctcacagaaacacagccttggtaaggactttggattttattatgaattagtggagaagaaatttaagagtgctaaccaaaggagtgacatgatattactcatttcttttgtaacacatattatggtgtgctgtaactgttgagtgayctgcctctcacaagggtacatctcaatctccccagctcctagcacagcacctagtttataataggtatttaataacattttagagaagaaaagagcagaatgggtgtaaaccggccacaggcctccagagcatacaggactgtctgccttccactaatatttgtcagggaaggattagcctcatacattc

SEQ ID NO: 404609 - DNA, 513 bp, Homo sapiens
gtcttacattctcattttgtcacctttgttattgtgctataagctgccagctttgccccacttcacactgcaaacacagcaattgacagagatccttccccatcctcctctgtggcttgtacaggtgttaattttgggaacgctggaggatgttggctgtaattcccacagaatccagtaggtggcactagaaaccagattaaggcctttgttttgccattacacatggtcccagtttccctaaaggcaaccaagacaggatgaaagtacaatcgcagagggaatacatttttttctttctttcttctttccttccctccctctcttcccttccttcataaaatgagttttaatcaaaacatctcaatttctttctgaaaagctagaaatgtakacagaaaaatcgttcagcattgatctccctctgcgttgacacgaacatcatactgaagctgacatctgtacctatattttagagtctgcaatttgtctgaaaagtcccaccagatttgg

SEQ ID NO: 404610 - DNA, 629 bp, Homo sapiens
ttgttttcctctcttttactgtttggtctttaccctgtcctcaaaagtcacccagaataagtagttccctcttttataggacaatatttgaattacttaaacccttcattttaaggctgtaccttttcataggaaacctggggctccagttaccagaatgggcaactgagagcggggaaggtgagggaagctgataygatttcacgaacaacggggagagtggatagggaagctgcccctaagttcatgttctcaactgcagactttttttgatcacgtgtctttacagattttttacaagaatgcatgcctggtttggcacttcctttctgtatcagtcccctagggctgcaataacaaattgccacatactaggtggcttaaaacaacaggaatgtattctctcacagttctggagacctggagtccgaaatcaagaggctggtggggttgattcatctggaggctctgaaggagcatctgttccatgcctctctcctagcttcttgtgatcaaaggcagcttgtagacacattgctcaatccctacttccatctttacatagtgtttgatatggtttggctgtgtccccacccaaatctcattttgaattgtaataatccccacat

SEQ ID NO: 404611 - DNA, 629 bp, Homo sapiens
ttgttttcctctcttttactgtttggtctttaccctgtcctcaaaagtcacccagaataagtagttccctcttttataggacaatatttgaattacttaaacccttcattttaaggctgtaccttttcataggaaacctggggctccagttaccagaatgggcaactgagagcggggaaggtgagggaagctgatatgatttcacgaacaacggggagagtggatagggaagctgcccctaagttcatgttctcaactgcaractttttttgatcacgtgtctttacagattttttacaagaatgcatgcctggtttggcacttcctttctgtatcagtcccctagggctgcaataacaaattgccacatactaggtggcttaaaacaacaggaatgtattctctcacagttctggagacctggagtccgaaatcaagaggctggtggggttgattcatctggaggctctgaaggagcatctgttccatgcctctctcctagcttcttgtgatcaaaggcagcttgtagacacattgctcaatccctacttccatctttacatagtgtttgatatggtttggctgtgtccccacccaaatctcattttgaattgtaataatccccacat

SEQ ID NO: 404612 - DNA, 629 bp, Homo sapiens
ttgttttcctctcttttactgtttggtctttaccctgtcctcaaaagtcacccagaataagtagttccctcttttataggacaatatttgaattacttaaacccttcattttaaggctgtaccttttcataggaaacctggggctccagttaccagaatgggcaactgagagcggggaaggtgagggaagctgatatgatttcacgaacaacggggagagtggatagggaagctgcccctaagttcatgttctcaactgcagactttttttgatcacgtgtctttacwgattttttacaagaatgcatgcctggtttggcacttcctttctgtatcagtcccctagggctgcaataacaaattgccacatactaggtggcttaaaacaacaggaatgtattctctcacagttctggagacctggagtccgaaatcaagaggctggtggggttgattcatctggaggctctgaaggagcatctgttccatgcctctctcctagcttcttgtgatcaaaggcagcttgtagacacattgctcaatccctacttccatctttacatagtgtttgatatggtttggctgtgtccccacccaaatctcattttgaattgtaataatccccacat

SEQ ID NO: 404613 - DNA, 629 bp, Homo sapiens
ttgttttcctctcttttactgtttggtctttaccctgtcctcaaaagtcacccagaataagtagttccctcttttataggacaatatttgaattacttaaacccttcattttaaggctgtaccttttcataggaaacctggggctccagttaccagaatgggcaactgagagcggggaaggtgagggaagctgatatgatttcacgaacaacggggagagtggatagggaagctgcccctaagttcatgttctcaactgcagactttttttgatcacgtgtctttacagattttttacaagaatgcatgcctggtttggcacttcctttctgtrtcagtcccctagggctgcaataacaaattgccacatactaggtggcttaaaacaacaggaatgtattctctcacagttctggagacctggagtccgaaatcaagaggctggtggggttgattcatctggaggctctgaaggagcatctgttccatgcctctctcctagcttcttgtgatcaaaggcagcttgtagacacattgctcaatccctacttccatctttacatagtgtttgatatggtttggctgtgtccccacccaaatctcattttgaattgtaataatccccacat

SEQ ID NO: 404614 - DNA, 515 bp, Homo sapiens
agcctggactggggaaagtctaaacttctgtccctgggatctggggagggtcaaagtcataaataagagtaggcagctctcttctgaactgtgcctgccctcctctatcccctgccctcttccacaacacctgggactgcagtccaccaatgagactgctagtgactggggattctggccccagccatggaattgagtgacaagctgtgaatgtcaggccgtttctctgcatccctggacgctgatgtgagtggggtaagacacagccctgggaaagtcccttttaacttctatgatgtttaaagcagagtcattataaacttcattttgataaaaataataattgcagctactttttgagcattcactcaaagccaggagccttgggacctgtctcctttaaccctctcatccctctctgaggttgctgcttgtrtgttttcagtgggggcatacattttcttgtactaaaattatatatgcagtgaaattatagttcaaggacaattctgtat

SEQ ID NO: 404615 - DNA, 597 bp, Homo sapiens
gagcagacccaccctttcatccacaaaaggagctgtgctattatctggttccttaactggctttttgggtatgtgacttattatttaacgtttgcttatctgtagtacagtagtcttcccttattcatgggtttgctttccacggtttcagttatccttgatcaactgtgatccaaaaatattaaatggaaaattccagaaataaacagtttgtaagttttaaattgtgtgccattctgagtagtgtgatgaaatctcgcactctcccgctcagttcrccctgaatcatcccctcgtccagcttatttgtgctgtagacactccctgcccgttattcatttagaagctgtcttggttatcagattgacaggtcacaagaagaagggtgagtccagtacaataagatattttgagagagagaaagagagagagagagacagaaagagatagatacaaagagagagagaccacattcatgtaatttttattacagtatattgatataattctcctattaattattgttgttaatctcttactgtgccaatttataaattaaactttgtcatagttatgtatgtataggaaaaaacattg

SEQ ID NO: 404616 - DNA, 597 bp, Homo sapiens
gagcagacccaccctttcatccacaaaaggagctgtgctattatctggttccttaactggctttttgggtatgtgacttattatttaacgtttgcttatctgtagtacagtagtcttcccttattcatgggtttgctttccacggtttcagttatccttgatcaactgtgatccaaaaatattaaatggaaaattccagaaataaacagtttgtaagttttaaattgtgtgccattctgagtagtgtgatgaaatctcgcactctcccgctcagttcaccctgaatcatcccctcgtccagcttatttgtgctgtagacactccctgcccrttattcatttagaagctgtcttggttatcagattgacaggtcacaagaagaagggtgagtccagtacaataagatattttgagagagagaaagagagagagagagacagaaagagatagatacaaagagagagagaccacattcatgtaatttttattacagtatattgatataattctcctattaattattgttgttaatctcttactgtgccaatttataaattaaactttgtcatagttatgtatgtataggaaaaaacattg

SEQ ID NO: 404617 - DNA, 428 bp, Homo sapiens
ccatgtccccatgagagaacctggtcagtggctatcgaaaggaagaccaagccatcagctcctggaagtgccctggcatggcaaaggttccctacttcctgtaggtctcaatcttgcatcccaagcaagatccctctttcctcactggtgtccttkccacacctacccccatgccccaccttccttaatattcaagagattctgcagtcaaagagcttgacaacaacttcaacctagctgcagagtctgggaaaaacagtcctcattttagtattacagttgtttggtttttttgacctgctctgctccacaatattaaggtggattgcaactccctcccacaaacctcacaaacacatactaccataagatgaaaagtaaaaagatagagattctgtgaaatagaaaaagaaaggtagttgaatgaa

SEQ ID NO: 404618 - DNA, 506 bp, Homo sapiens
cagagaagagctcccttaatccctcctgtcctcggtcccaggctttcatttgtcaaactaaaaatattccctccggaacctccttttgccagaggctgaacgaggtataaggggaawggcattttagtgtcacttcctgacagcgccttgttattgttcctgggccagaggagcagagccgggtggcaggagcaaggcgcctctgtcattcttgggccggggccaacctgttcacctttctcctgcaagcagccttccctttttcctctctcaaagctccagacaatagtccatcagtctgacatgtagccttgtcccggtcccttggggctgtgtgtgattcatgccaggtgaggactacagaatgccaacttcatttcctttgcagcctaagggctggcacagtttgcacttgtctgcaaggctagtttactgataaagagacgtagagctcgaaggtaaaggaaaaaaagggtaaaacagatgaaggtggaactccccaagta

SEQ ID NO: 404619 - DNA, 589 bp, Homo sapiens
atgggcagactactaggctagggcattttcccagttacacttgtgggtttgagccccagactgattgtacaaacaaatattcccggctgttagatcttatgctggttattgactgggcctgtttcattggatgaggaggagctgcatttcctggcttcacctccacacctaggtggtctacctgcaactggatgctattgatcaggttgaggaggagggagagaatagatgagtcagagtgacctgttctgtgactagtgaaaagcagaggtgcaataacttctaaaggtagaataaatgcttcaatccatgtttccacctccccagttgggctagatrcccttgttctgtgatgtgtatttgtccattcacttgtttgacttccccctcttagacttaactgtgtagtccctgttcacttttaggtcccgataccctttgaggtgccagattcaataagtccttgcctcttcatatgcgaagaaagtactttctactgtcttggctcttatttagctgagtaattgtaatttaatttattgatcatttattgagcacctgtgatgctggcactgtgctatgtgctagg

SEQ ID NO: 404620 - DNA, 602 bp, Homo sapiens
gtaattgtaatttaatttattgatcatttattgagcacctgtgatgctggcactgtgctatgtgctaggaacataaagatgattaaaattggtacctgaccctaaagaatttatactcaacggtaaagtaaggagagagctatctggggagaactgacaagtaccctgctaagttgcaatgtgtaagcctaagaatgcttatgcactagctacagtggggtcctaaacaagggagtgatccagtttgagacagccctagcggtagcctgaaggggctctggaattgtcttatccagagttcaagcatggagaggtgtcctgcttggaaaattgcatgcagcaaccagacctatactrtactatcccaaatacttggataggacaaacttggtcgctttctctgaagactcttagaagagaggttcttctctgctaaccaaatccagaaagccaccctgtggcagcaccaggacataaaccactgggtgccagactagctagaaaggctgattcatagctatctttggacaagaacagcataagtgtttctctattaccccagttgagattgtcaacataaagatctgaactgccctgacttc

SEQ ID NO: 404621 - DNA, 579 bp, Homo sapiens
agtttaaatagttaactgtgatccttcccttgtatagtatgtgcctgctcaataatgcttaattcaaagtgctcaccccttatatttgtttcaatattgtttgagatgggaactcaggagaagtatttttgtttttgatggtggyagatcctcatcatggagttgttctattgtgttctccatataacctgtggcttgggtttgtttgcaagaatagagtttatcaaaaactgatcctcctacttctctttataaagaagtatttataaataaagattctgcacagaatatgctggtcctctagggcagtgccaattcttctaatacagtaattatttgaagccttgtgccctggagtcaacatgttcttgtgggaattgctacagttgagaaagcaagatgagtttataggaaaaatgtgttaaaatgtaaacatatattaacaacttcaaaaagctggagcacatagtaacatccttaaaatcacttttcccttatttccagatgcttatggcatttataaaagggatataaaatcatacagtaagagcactgtgggcgggtacattatttacatgt

SEQ ID NO: 404622 - DNA, 217 bp, Homo sapiens
tatggatctttctgctcatgctcaaataaatkattgtctaactcttcagatgcttcttctgagtcctcattaagacactcatggcttggggaattgtggagtatcaactgcctttgtctaagggtctgaagatgcagaaacaagactagaaatagagaaagccaatcaaggcaggaagtgaggaactttctattgataggaacaggggatgtaaaaa

SEQ ID NO: 404623 - DNA, 579 bp, Homo sapiens
agtttaaatagttaactgtgatccttcccttgtatagtatgtgcctgctcaataatgcttaattcaaagtgctcaccccttatatttgtttcaatattgtttgagatgggaactcaggagaagtatttttgtttttgatggtggcagatcctcatcatggagttgttctattgtgttctccatataacctgtggcttgggtttgtttgcaagaatagagtttatcaaaaactgatcctcctacttctctttataaagaagtatttataaataaagattctgcacagaatatrctggtcctctagggcagtgccaattcttctaatacagtaattatttgaagccttgtgccctggagtcaacatgttcttgtgggaattgctacagttgagaaagcaagatgagtttataggaaaaatgtgttaaaatgtaaacatatattaacaacttcaaaaagctggagcacatagtaacatccttaaaatcacttttcccttatttccagatgcttatggcatttataaaagggatataaaatcatacagtaagagcactgtgggcgggtacattatttacatgt

SEQ ID NO: 404624 - DNA, 633 bp, Homo sapiens
tattggactgaaatgtttgattaatcctgagctttttagacaaatataaattgttttgcaataaaattactgctgctaacatatcatctttagttgagcacttaccgtgggcccgacactgttctgtgcttcttttcttctgtttactcatatactcctgaaaatctcctgtgagggagattacaaaccgtatctaccttcgacagacaaaggattatgaacacagagagtttaagccaggccactggggctcagctgtcagcaataaaccgggagggggctgggggttgaaactttctctcaccaccaatctgtaccacctgtaccctattcygagtagtgcaaccggtgatacttattaagccttcccactgttccatgtgctaggtaaaacacattccaggtgctataccatctcatcttcccaatgatgcttggtaaaagagctattcctatagcccttgtatctatcatactatcataaaactgatgatagtatgatttcatggaaagtttctcccatacagctcactgctagaaacaacttttatgttttgttaaattttgcaaagcaggatagcccctgggagctcagttcacacttgtgttttctcagtagtcccacacaaggga

SEQ ID NO: 404625 - DNA, 633 bp, Homo sapiens
tattggactgaaatgtttgattaatcctgagctttttagacaaatataaattgttttgcaataaaattactgctgctaacatatcatctttagttgagcacttaccgtgggcccgacactgttctgtgcttcttttcttctgtttactcatatactcctgaaaatctcctgtgagggagattacaaaccgtatctaccttcgacagacaaaggattatgaacacagagagtttaagccaggccactggggctcagctgtcagcaataaaccgggagggggctgggggttgaaactttctctcaccaccaatctgtaccacctgtaccctattctgagtagtgcaaccggtgatacttattaagccttcccactgttccatgtgctaggtaaaacacattccaggtgctataccatctcatcttcccartgatgcttggtaaaagagctattcctatagcccttgtatctatcatactatcataaaactgatgatagtatgatttcatggaaagtttctcccatacagctcactgctagaaacaacttttatgttttgttaaattttgcaaagcaggatagcccctgggagctcagttcacacttgtgttttctcagtagtcccacacaaggga

SEQ ID NO: 404626 - DNA, 486 bp, Homo sapiens
gttttttttaaaggttaggttatacatcaaaagtgtactacaaagttattggcttgatctttgaaccagtacaggttatctgggatctaattcataatttgtaagtaatatataaaacaagttgagagaaatagggggaaaaaagaaagaaaaagaaaactttgcaaaaagcactacttaaaaaaagttttatgtaaagttttcaaatattgctaattaactgaaggcattttagagtaggccaactgtagccacagaaggtagttttagaaagtaagttcaaagaaatctgaaaattatttaagctttacatctagagatggaattcctttaaaatgttactagaattcattyaccaggtttattctgttatctaatttttcattataaaaataaacataaatttacctgttagtcaacatttaattatgaatttggctcctttataccaggtactatagtagctgctgggaataagctaaaaga

SEQ ID NO: 404627 - DNA, 528 bp, Homo sapiens
tgtagcagttacagtcatgtggttaaggggaaaaactggcagaattccgcatagcatttgtagccccatcaatctgaaataagagaatttttcaaccacattgctgctaatttctaacctgcccacaccgggtataatagtmcaatgttaaatctaagtaacatacttggagttattaataccagctttgacttcaaccaatataatgacttgagattattgttgatgtttcttgaaatggaaaaaatattaattaagtcaggtggcagacacacaaatgtgctattatgtttccataaaacatatttccatggaccatattataaatacctaacaggcaagctgtaactttaatcttatatataaagctaattatgaaattgtaaattaaaaaataatgattagcaatccgttatgcattaactatgcaaagctatgtccgttaaatctgatatattttactcctaggaaagttctcatcagattccattaactcttattttagaaatttctaacaagtttaggtaa

SEQ ID NO: 404628 - DNA, 528 bp, Homo sapiens
tgtagcagttacagtcatgtggttaaggggaaaaactggcagaattccgcatagcatttgtagccccatcaatctgaaataagagaatttttcaaccacattgctgctaatttctaacctgcccacaccgggtataatagtccaatgttaaatctaagtaacatacttggagttattaataccagctttgacttcaaccaatataatgacttgagattattgttgatgtttcttgaaatggaaaaaatattaattaagtcaggtggcagacacacaaatgtgctattatgtttccataaaacatatttccatggaccatattataaatacctaacaggcaagctgtaactttaatcttatatataaagctaattatgaaattgtaaattaaaaaataatgattagcaatccrttatgcattaactatgcaaagctatgtccgttaaatctgatatattttactcctaggaaagttctcatcagattccattaactcttattttagaaatttctaacaagtttaggtaa

SEQ ID NO: 404629 - DNA, 570 bp, Homo sapiens
ctacatatttcaataaccatgaatctcggttctcctaagcaatttctttttattatgatatattttattttcaagacagtttgttaaacaggatttaatttttaacctttgatagacacatataaatgtgtctattaaattccaatcatataatagtatttttattttgaaaaatattttcactatgtctatataatattcatgctcaggttagggctcaatctcaagacatttagcagggtttaggatttattcaagaataaatcagcagttgagcatcattattttcattaaagtagtcaaaatttttctgattaattatactctttttatacttataataaacackataaagagagagtagaatttagttaatcagataatgccatatgactgcaatctgcaaccttgatatctaggtgtaccttttgggtaatagagagtgaaatcatctcttagtgacaacagctaaattatcagaattcagctgcacaagaagaagaattggtttcccatgtataacaggaagttctttcatatctaagcagggactactggtaaacataacaa

SEQ ID NO: 404630 - DNA, 623 bp, Homo sapiens
catctaacaaagaactgttattcaaaacatagagagaacccctaaaactcaacagtaagaaatcaaacaccccaatttaaaaatgagcaaaagaccagaacagacaccttgctgatgaagatatatgatggcaaataaacatatgaaaagatgctcaacatcatatgtcattatgaaattgcaaattgaaacaataagctaccactgcacacctattagaattgccaaaatctaaaacatcaaatgctggcgaggatggtggagcaacaggagttctcattcattgctggtaggaacgtaaaagggtatagctattttggaagacagtttggcaatttcttacagaactaaatatattcttactatacaacctggcaaatygctctccttggtattctcaaatgagttgaaaactggtatccacacaaacaaaacctgcacatgaatgtttatagcagctttattcataactgccaaaacttggattcaaccaagatgtccttcagtaggtgaatggataaataaactgtggtgtatccagatcatggagtattattcatcatgaaatgaactatcaaacatgaaaagacatggaggaaacttaaatgcatattattaagtaa

SEQ ID NO: 404631 - DNA, 499 bp, Homo sapiens
ctgcagctaagataaagcaattgttgaaaggatttatattccacattattcttaaaaatatttaagctggattggctgggtgcagtggctcatccctgtaatcccagcactttgggaggctgaggcgggtggatgatgaggtcaggagtttgacaccagcctggccaatatggtgaaaccccgtctctactaaaaatacaaaaattagccgggcatgatggtgcacgcctgtagtcccagctactcaggaggctgaggcagaagaatgatttgaacccaggaggtggaggttgtagtgagyccagattgcgccacggcaacagagtgagactctgtttcaaaaaaaaaaaaagaaggaaaaaaaagaagctggattatataatcacaaaaatatgttgtatatgagaaaaagagaggcaattttttaaagggaaaataaatatgaggatgtattaatagtaggaaaacatggattaggctaatataaaaatgcctacca

SEQ ID NO: 404632 - DNA, 499 bp, Homo sapiens
ctgcagctaagataaagcaattgttgaaaggatttatattccacattattcttaaaaatatttaagctggattggctgggtgcagtggctcatccctgtaatcccagcactttgggaggctgaggcgggtggatgatgaggtcaggagtttgacaccagcctggccaatatggtgaaaccccgtctctactaaaaatacaaaaattagccgggcatgatggtgcacgcctgtagtcccagctactcaggaggctgaggcagaagaatgatttgaacccaggaggtggaggttgtagtgagtccagattgcgccacggcaacagagtgagactctgtttcaaaaaaaaaaaaagaaggaaaaaaaagaagctggattatataatcacaaaaatatgttgtatatgagaaaaaragaggcaattttttaaagggaaaataaatatgaggatgtattaatagtaggaaaacatggattaggctaatataaaaatgcctacca

SEQ ID NO: 404633 - DNA, 570 bp, Homo sapiens
gaagcctgaccatgtcagcaatcatattaattgtaaatacaagtgagagaatgacgtactggacaaaaatgcaagaccaactatttgctgtctacagaaaacttttgtgttttttttttttttgagacaggrtctcactctgtagcccaggctaaggtgcagcggcttgatcacagctcactgcagccttgaccccctgggctgaggtgatcctcccatctcaacttcctgggtagctgagactacagttgtgcgctaccatgcccagctaatttttgtattttttgtagagacagggttttgctatgttgtccagactggtctccaactccagggctcaagtgatccactaggattataggcatgagccaccacggatagccagcaaaccatttttaaatataaagatacaaatatattaaaagtgaagagatttttttaacatgctaacactaatcaaaagaaaaatggaatgactatattgatatccaaaatagatctcagagcatagaatattagcagggctaaagaaagtcatttcataatgataaaggggtcaatcaagcaaac

SEQ ID NO: 404634 - DNA, 570 bp, Homo sapiens
gaagcctgaccatgtcagcaatcatattaattgtaaatacaagtgagagaatgacgtactggacaaaaatgcaagaccaactatttgctgtctacagaaaacttttgtgttttttttttttttgagacagggtctcactctgtagcccaggctaaggtgcagcggcttgatcacagctcactgcagccttgaccccctgggctgaggtgatcctcccatctcaacttcckgggtagctgagactacagttgtgcgctaccatgcccagctaatttttgtattttttgtagagacagggttttgctatgttgtccagactggtctccaactccagggctcaagtgatccactaggattataggcatgagccaccacggatagccagcaaaccatttttaaatataaagatacaaatatattaaaagtgaagagatttttttaacatgctaacactaatcaaaagaaaaatggaatgactatattgatatccaaaatagatctcagagcatagaatattagcagggctaaagaaagtcatttcataatgataaaggggtcaatcaagcaaac

SEQ ID NO: 404635 - DNA, 525 bp, Homo sapiens
attcttaagagttgcaaaggagactttgaaagtcagccctcatgcagcgagacttsccacatacatgcatagcagaaacatacacatacctagtgataatagcacttatattgcagaacttgttttacaatttgcaacgcatacacatatgcaggctttctagtggaatatgaacatacacagacataaagccatctggtctctccttaaatactactcacaagtagtattacatcatggggggctcattacattcaaggcagtctactcattcttttagtcttggagattctaacagaaatcatgccagccagtgagagaaaattcggttctttgatatggatagctgaacctcaatatttccaatctctcacctacacaactgcaggaagtccaattttcatagaaaactcctgacagtcttcagaggtgcttgtgtacagcggtccttgctccccacactagccaacctgcctgggatgtttccatagcaaccccagtctcaaattcagccccatcactgtt

SEQ ID NO: 404636 - DNA, 572 bp, Homo sapiens
gcctccacccacaagccaaaacttaaacgcctttgaaagtcatcactcatttatgcagtgagattatgcagtaagtgtaaatcgatgaacaattgaatactcaggaaaatgattgctgcctgcgtactcaccagatatctcagtttctggcaggtcatgactcccttttctatttcttctaagaaaaatatctacatcttattacctcttgcccttcatttaagttttgccctctggaaaatactttctcctcataaaattccattcagacaccactmttttccagtctaaatatactatttcattcccatttctcacaggccacaaccccaagatcactaatacgccctataaaatttaattgctccagccactgcccaacttcaacaggacatacttggatgtcctgcgtcccttattctgggtaccatttgcttcgaaaagtcctaaaattgatgtttgcctattgtgtaatactagataggtactgagctaataatttaaaaattaacaaaggttaagttcaccctaaacatggctctattcagggtcaacaagaatcttcacgttgc

SEQ ID NO: 404637 - DNA, 597 bp, Homo sapiens
tcaaaaatatttctagaaatattttgtctagggcatttaggtaatgaaaaaaggtctaaaaaaaaaaagcaagtgagatgagagcgctatcattaatcattcaaatggactcaaaatgaaaaagattgaaaatcattcattaatattttatctgtttctctgttaaattgttctattgaaattgagttcaaggatatagacagtaacaacagaccattgatatctatatctatatgtctagagagaaagagattttattttattttatttcattttattttattttattttattttttgagccaatggaaagttgtgtagtcaaagaaaccttaagatactgaatttcagaaaatgataagcccttggtcggtgacctgaggtcmgtactactctcttccattgatacaagtgccaagtctggtcataggtaagtatagtatcttgccagccataggtcaggggaagagagagttggtatgctggagtaaggagaaattagcaaagcttttagctatcacatgaacctgcttgaaagattggaatctgcggcagttccaacatcagaaacagttcgttccaacatcagaaacatttc

SEQ ID NO: 404638 - DNA, 607 bp, Homo sapiens
tctaaaaaaaaaaagcaagtgagatgagagcgctatcattaatcattcaaatggactcaaaatgaaaaagattgaaaatcattcattaatattttatctgtttctctgttaaattgttctattgaaattgagttcaaggatatagacagtaacaacagaccattgatatctatatctatatgtctagagagaaagagattttattttattttatttcattttattttattttattttattttttgagccaatggaaagttgtgtagtcaaagaaaccttaagatactgaatttcagaaaatgataagcccttggtcggtgacctgaggtcagtactactctcttccattgatacaagtgccaagtctggtcataggtaagtatagtatcttgccagccataggtcaggggaagagagagttggtatgctggagtaaggagaaattagcaaagcttttagctatcacatgaacctgcttgaaagattggaatctgcggcagttccaacatcagaaacagttcsttccaacatcagaaacatttccttccaactgccactgattctcccccacaagcctgcagtagttcaggatgcacagtgctatgct

SEQ ID NO: 404639 - DNA, 503 bp, Homo sapiens
ctagaagtaaaaaatacattatctaaattaaagatttttggataggcttaacagtagtctaaatttagtaaaagaaagtatcagagaactcttagctcaatagaaatgatataaattgaaccaccaaattttaaaaagaatgaaaaaagagcttttgagacatgtggcacactaacaaatggcctaatatgtatgcaatttgtgtcccagacaaagaagaaagaaaatcaggcagaagaattgtttgaagagataatgactggaattyttttcaaagtcaatgaaagacattaacccacatatacaagaagctcagagaatctcatgcaggacaaatactaggaaaactgtattaatttggggaaacaataataataagaagaattaaagcttactgtcttgtcatcataaaaaatggaagccagaagaaagtgatttggtgtcttaaacttctgcaacaacaacaacaaaattcaacctaaaattctataattatccaaaaa

SEQ ID NO: 404640 - DNA, 540 bp, Homo sapiens
aactcttagctcaatagaaatgatataaattgaaccaccaaattttaaaaagaatgaaaaaagagcttttgagacatgtggcacactaacaaatggcctaatatgtatgcaatttgtgtcccagacaaagaagaaagaaaatcaggcagaagaattgtttgaagagataatgactggaatttttttcaaagtcaatgaaagacattaacccacatatacaagaagctcagagaatctcatgcaggacaaatactaggaaaactgtattaatttggggaaacaataataataagaagaattaaagcttactgtcttgtcatcataaaaaatggaagccagaagaaagtgatttggtgtcttaaacttctgcaacaacaacaacaaaattcaacctaaaattctatrattatccaaaaagtccttcaaaattgaaaacaaaagtaattcatttttagatgaacaaaatctgaggcagtttgtcactagcagacctgcactacaagaaatactaaaggaatttcaggatgaacagaaattatt

SEQ ID NO: 404641 - DNA, 528 bp, Homo sapiens
ttttgcaaaaagatcattgcctaagcatgttgtcatcaggttatccaaagttaagatgaaggaaagaatcttaagagctaggagatagaaacaccaggtaacctttaaaggaaaacctatcagattaacagtagatttcttggcagaaaccttacagaacagaaaggattggggccctatcttcagcttcctcaaataaaattatcagcaaagaatttygtatctggtgaaactaaacatcatatatgaaggaaaaatactgtcattttcagacaaacaaatgctgagagaattcgacactaccaagccaccactacaagaactgctaaaaaggagctctaaatcttgaaacaaatcctggaaacaaatcaaaacagaacctctttaaagcataaatcccataggacctataaaagaaaaatacatgttaaaaagcaaaaccaaaaaaccaaagtacacaggcaataaagagcatgatgaatgcaatggtatctctcatttcaataccaatattgaatgtaaatggcc

SEQ ID NO: 404642 - DNA, 616 bp, Homo sapiens
aagaactcaccaaccgactatctgctgccttcaggaggctcacctaacacataaggactcacataaacttaaaggggtggaaaaaaggcatttcatgcaaatggacaccaaaagtgagcaggggtagctattcttgtgtcagacacaacagactttaaagcaacagcagttaaaggagacaaagagggacattatawaatggtaaaaggccttatccaacaggaaaagatcacaatcttaaacatatatgcacctaacactggagctcccaaatttataaaacaattactaatagacctaagaaatgagatagcaacacaataatactgggggacttcagtactccactgacagcatgagacaagtcatcaggatagaaagtcaacaaagaaacaatggatttaaattgtaccttggaacaaatggacttaacagatatgtatagaccatttcatccaacaactgcagaatacacattctattcaacagcacatagaactttctccaagacagaccatgtattaggccaaatgagccttaatacattaaaaaaattgaaattatatcaagcactctctcagagcacagtggaatgaaactggaaatcaactacaaa

SEQ ID NO: 404643 - DNA, 636 bp, Homo sapiens
tattcaaaataaagttttgtaatatattttccttatatttaagaaaaatcattggcctaagagggggaaattaaaagacgaacttgctcaagtgatagcwacactgtctacaactaaagatgttgaaagcaatgaaactgatactgaagcaacatatggaagggaggaatgcactccaaagacactaggggaagctaattaggaaataaaaacatggtgaaagctatctttttctcagttttgtagatgttaataatttacctcttcatgtcttacgtaacaattgtttttcaaatggcattatggtgtcaatgaagatgcagggttattatctaatcaaacacttagagtttaaagaaaagcaatttacatactgtaaatgctaaaacccaagatgaatacatatgtaaaatatcataaagatgaattcttagaaagataaatgtctggagcaatggttctcaaacttgtggtattacaaacacttggaggcctccttgaaattcagattcctgggccttacccccaagagttttgatgaagtaggtttgaggtgaacttgagaatttgctttagtagtaagttcccaggtgacaatgaagctgctggtctgagaatcacactttgagaatcacg

SEQ ID NO: 404644 - DNA, 596 bp, Homo sapiens
tttttggtaggatgtagaacttgtgattattaacactctattgcctaccttgtgaactaaacaggcagtggaaaccaaaggaacaaaagaggaataaagatgcccccatgagagaagaaataagtgctggaattcctggatacagttgttgctgaggcacaggtataatttaacctttatttctgtgagaagtctcatatcctttaaaaaraaaaacataattcatgttttttatttttgtttttgcttatgctcacttgacttagatatctataacttgtagtcaaaaaactaagaaacttgcctaaatttacacagaaaggtgggggcgaaggcagaattgaaaatgtctcattaatatttctcttttatattgcccagcctgtctgaatttgatttacctaaaacacccaaaggcaaaatagtgacttctctggtctacactgtagggtggctgtgcatggaactcctaaaccaaatcgtataagaatgaattggaatttccagtgattatttagccactgttaatctactgaattaaacactatgtttggacttggcagacatacatctccggaatctgtccttcatgattt

SEQ ID NO: 404645 - DNA, 548 bp, Homo sapiens
gtagcatgtgactaagctagaattaacacccaggtctcccgaaactctataccagtactccacattgttgctcacataacggatcacagtgaatgttacctgttcaaaggggaaacaaactgtgatcttaggttgattagcaatatgtgttatttaacccacaaattctaatatacctgatcatacaatgcaaaagaggtaatattcagctgaattagcaagataatattccacctacaatattacttaaatattctttgagtgagataaaataaaaaaaaagttcctcttttttatattttaattttacacacaaacctatacaagattatttgagatttcaatgtacacagtaaggtgttttttactgtgtggtagtatttcccaatcaaatcttctaacaaaatgtcrtatcagtcatgaaaaaattctagcatcaccccttccatcaaatttaagaaaaatataccatacttaaagtctttctgaataagttttaatgtttccttacttttggggttaattagaataggtaacatatccataac

SEQ ID NO: 404646 - DNA, 577 bp, Homo sapiens
aacaaactgtgatcttaggttgattagcaatatgtgttatttaacccacaaattctaatatacctgatcatacaatgcaaaagaggtaatattcagctgaattagcaagataatattccacctacaatattacttaaatattctttgagtgagataaaataaaaaaaaagttcctcttttttatattttaattttacacacaaacctatacaagattatttgagatttcaatgtacacagtaaggtgttttttactgtgtggtagtatttcccaatcaaatcttctaacaaaatgtcgtatcagtcatgaaaaaattytagcatcaccccttccatcaaatttaagaaaaatataccatacttaaagtctttctgaataagttttaatgtttccttacttttggggttaattagaataggtaacatatccataactatgaatactttttgttttattttgttttagcatttggtccactggcctgatgaataagccataaataaaactagaaacgttgccttatggcttcagttactgttgaaagtgccacggtactttctagtttacgaaacctgt

SEQ ID NO: 404647 - DNA, 577 bp, Homo sapiens
aacaaactgtgatcttaggttgattagcaatatgtgttatttaacccacaaattctaatatacctgatcatacaatgcaaaagaggtaatattcagctgaattagcaagataatattccacctacaatattacttaaatattctttgagtgagataaaataaaaaaaaagttcctcttttttatattttaattttacacacaaacctatacaagattatttgagatttcaatgtacacagtaaggtgttttttactgtgtggtagtatttcccaatcaaatcttctaacaaaatgtcgtatcagtcatgaaaaaattctagcatcaccccttccatcaaatttaagaaaaatataccatacttaaagtctttctgaataagttttaatgtttccttacttttggggttaattagaataggtaacatatccataactatgaatactttttgttttattttgttttagcatttggtccactggcctgatgaataagccataaataaaactagaaackttgccttatggcttcagttactgttgaaagtgccacggtactttctagtttacgaaacctgt

SEQ ID NO: 404648 - DNA, 513 bp, Homo sapiens
tattaagaaactggatcagccttcacaccagaatgtatatatacatgaaagtaattgagctcagatagtacctttttgattaagagaaaatactcacatctattttagtagaataatcgatgattaatttcttcctatagaagcaattctgaagccagagagcacagccacacgtacagtcaaaacaggtgagaggaagcyttttctttcagggatactgggtaaaacttgcaggggagaatccataatatttatttattctgatatccaagttactactttccaaagtgctttcactcaatattggcaggcttgtttgagaaatccagagagaaatgaaaaaaatggcaatcacttcattttctgtaaagatcagttgccaaaaattattttttctgaggttgctcagtgggccacgagagtaaaataatgcttatagggctcgaatgttagaatttcagggactatcagccagagtcacattaaaataaaaaaggtttggaaagcacattc

SEQ ID NO: 404649 - DNA, 606 bp, Homo sapiens
taaatcaagctctgagaatggaaaagagattgtctttttcttacatttttaagtgacatatttgattgtgcatatgtcttctttagaattggagttgcctctgctttgatggttttggtgtttggtaaatatttgcacatatttaaattttcttttggttctcatttgtttacataatctgatgtaaatgcatgtacacatatatcataaatattatatatagtttatgagcactattcaatataaatgtatccatgagaaatagtcccattgctactttttaccagtgaatgaaagcattgtttcaatgaatgcttttggaacaggtgagcactttcagattgtgctttattcattcattcataaattttttcaacaaatgattttattaccatgtgtcaacactgatraaaagtagataaaactcaccggtgtttaccctatggactctcagttaatggtgagtttgttgaagatgacaagaaaattagtcattataatttaagccttgatgtgtaaaaagtcaacaggactatcagacacagtctcatttttacaaaggtttttcaaagaactaggtaaaagagaagaaattgccttgcaata

SEQ ID NO: 404650 - DNA, 555 bp, Homo sapiens
ccagcatttatgatatagtctactgcacaggaatctccattcagtttataaaaaaaaaagaagaaagaaaagaaatatttatgagattgatgctccctacattttgttctattagaaaccaaggcacagagagcttatagatcatagagcatcatctagttcagttgaatatttaaggaattaggcctgagtatgtccactctgaaccgggcagtccccagcatcttcttatcstttctccttatcatcagggacaatttcactgtcaggtagcacatgggatgtttctttcaaaattttaaatgtatgcataattacattgttctttagcctttcagatatttcatgagaacctagccaaaatttttgactaacacatagttctgagccagcatctaattagtattatgtaagctataatacaactgaactcaaactaaaatatttttaaaaccagaatacgtatcttcccaaaatggtatctgttggtataactgatatgcatatttggtaaaattcattctttataccagatgtatatttatttcaaagtta

SEQ ID NO: 404651 - DNA, 558 bp, Homo sapiens
tcacaaaatttattttgtcctttatatcttaagtatctcattgtgcttttgatttcaaaaaatatcgttattgcaaatattaagtctcaaactgggtgaggaaataatctgtgcaacaaactcccatgacacgagtttacctgtataacaaacctgcatatgtacccctgaacttaaagttaaaaaaaaagaaaaggaaatgctagtcaactaaggaaaacagaaaatagtcaatagctacttattaagcacctactatgtgcctacacccaactgggcaccaaaattgtaatatgaaggaaaatcctagccttgaaaaacctactgacaatatgacttcaatgtcagaagtgctaaaatgaaggtggtatgtgcaaaaacagaggaagagcaattttcattttgattgtatggtttaagccaaattttatcaaagtgctgctcaagaaacactagtataagaaccaccamgattgttaaaaatgtatattttgattgagaacctcacagagaggggcaccaaaatatatacttttaacaaaatacctagacaagtgg

SEQ ID NO: 404652 - DNA, 485 bp, Homo sapiens
gtttgatcccatctttctaggaaaagtatcaatcctcctcaatagggacctttttatctcaaaagtctaaagataatttttgcattcaatctggaacactgtagaccaagtccaaaatctttagtctaattctaaaacagatgagcatctgttcacatgaaaattaaataatggcccttgatacagtcttttaaagcagtgtagattgrcaacagattctagttcaacaatttgtatgtaatagcatgacaataaaaccatatataggaatatggaaatgttcaagtcctttaaagcagcaaacaggcatatgcttatatagtatatgtcatttttttaaaaaatcacagaactaagcaaaacatttgttttcctttttccttagtattcatttttttcctagccagatatgcagtattatttttatactatactatttttatcctagctatagggtattattttttatttattatttttcctag

SEQ ID NO: 404653 - DNA, 495 bp, Homo sapiens
ctgtctgtttttagaatattacatccttagcaaaggacaaaaatggctaattaagttttagtgagaagtacctccgtgttgtgatagtttcagttatttctggctttgggttgcttttcttctctagggagggctgcatgagctttgggaagagcatgggctctggagttatacagacatggattctagtccaggcactctagcttatgtctccgggaaattggtcaagttatgcaatattcytgaacctccatttcctttagatgtaaactaaggataatgattcttcctttaaatgattatattgttagcggcagataagacaaagtgtatgtcccattggagatgctcagttatattagttcttttcccctttctcttccttgccaccttttaaccatgatgccaggaagagttctctagattgggtctgaaatactctgaatccttcttctcttaccagtgataatcttggtataagaaaaagcactgggc

SEQ ID NO: 404654 - DNA, 495 bp, Homo sapiens
ctgtctgtttttagaatattacatccttagcaaaggacaaaaatggctaattaagttttagtgagaagtacctccgtgttgtgatagtttcagttatttctggctttgggttgcttttcttctctagggagggctgcatgagctttgggaagagcatgggctctggagttatacagacatggattctagtccaggcactctagcttatgtctccgggaaattggtcaagttatgcaatattcctgaacctccatttcctttagatgtaaactaaggataatgattcttcctttaaatgattatattgttagcrgcagataagacaaagtgtatgtcccattggagatgctcagttatattagttcttttcccctttctcttccttgccaccttttaaccatgatgccaggaagagttctctagattgggtctgaaatactctgaatccttcttctcttaccagtgataatcttggtataagaaaaagcactgggc

SEQ ID NO: 404655 - DNA, 583 bp, Homo sapiens
gcagggcagtaaagcaaatacatctctttttgtagattggatgttttttgatcttcatttctgttttatcaacagctgcatatcttattattagggcaattgaggctaagaagccctcttcaaaatatattaattatgcgatgttgatcagacaatgaattatcacagattatgcagctctattacattcagtaaagctaagaagagcatttgaatatgtttcatcacacaaagtgatgtaataataattatttggggatggcagttttgacatcattattagcttgaatatagtctcattacctccaagtggctcagcaaaatattaactgagcatctgtgcgtacatggcattgttcattgtgggtgkgtactttatacatgttatcatatgttggggccttctttgcccaggacctagtccataataggtactcaataaatgtttgctgatcctgaagttgatcagcctttgtccttcctggtagagatgggaggagggacacttctgtgaatttatgaagtgcttttaggcaaatagggagtgagcagagagcttttcttgtatttacttcttaattgg

SEQ ID NO: 404656 - DNA, 562 bp, Homo sapiens
cttacattgatgacattattttgattggatccagtgaacgagaagtagcaaacacactggacttattggtgagacatttgcatgcagaggataggaaataaatctgactaaaattcagggaacttctaccttagtaaaatttctaggggtccagtggtgtgggkcctgtcgagatattccttctaaggtaaaggataagttgctgcatttggccccttctacaaccaaggcagaggcacaacacctagtgggtctatttggattttggaggcaacgtgttcctcatttgggtgtgttactctgcctcatgtttcaagtgacctgaaaggctgccagttttgagtggggcccagaacgggagaaggctctgcaacagttccaggctgctgtgtaagctgttctgctctgccacttgggccatatgacccagcagatccaatggtgctggaggtcagtggcagataggaatgctgtttagagcctttggcaggctcccataggtgaatcacagtggaggcctctaggattttggaggatggccctatcaacttctgcagataac

SEQ ID NO: 404657 - DNA, 615 bp, Homo sapiens
tgtaatccggcaatttaaaatctttggtgcacatcataatcccatgctgagttatttaaggaaataaatgtccaggtttagccataaaatagctgaatgaaaatctctggggatgaggtccaggtacaagtacgctgacaatctccataggagactgggatatcaatcaacatatgcaaacacttgtactaatttactttcaaacctcctgactgtcaaccctaagtcactgtgttaagtcacttgccaataccatttctctcccatttcttttgaactttgccttcaacccctgtaatyggtattctcaaacaaagtctctaatattgcactttgaagctaaatgcttgcttatgcctaatacctgtagtcagactgccctagtggcagcccctgaccagccaatggggcattcacctgtcacctagtttgtatcctgctgactgctgaatgccaaatgcccagaattccttctgctacctaatgacacacctttccctgactctctgtggaaccgtgagactgggtattacttctaacccatggtaatacccgatcttgtcattaagtcctgtcttatctttaaggaagcactggcaggaaaagaggcaagat

SEQ ID NO: 404658 - DNA, 547 bp, Homo sapiens
ttgtatcctgctgactgctgaatgccaaatgcccagaattccttctgctacctaatgacacacctttccctgactctctgtggaaccgtgagactgggtattacttytaacccatggtaatacccgatcttgtcattaagtcctgtcttatctttaaggaagcactggcaggaaaagaggcaagatttcaaccattgcagcccttacagaagctgccaaacccaaatcaaaacaccaacttggaacctaagccattacggtcagttagctacattctcttctctacaaaaaaaaaaaaaaaaaaaaaaaaagtcctgagataagtgccccatgaagtacatataacattgttacattatctacttacttgtctgtatttctactagagtgtatatcctgaaaaaaaaacatactcatttttttactattatagtctccatatcccacatggcacccagcatatagtagttataattaatatctttttgataaatgaatgaatgatttggtagagacattatagttaaaagactttttattatcccta

SEQ ID NO: 404659 - DNA, 602 bp, Homo sapiens
tataattctgattattttgatattgcttaatagatctgctacttcacttatctaaatattctaaaaagtgaatgtcacaaagcaatcaatctaaaaaaaccccagacaaataaatacatagarcaacaaaaaaagatcttggctgtcattttctgatatcactattgtgctttgattttgattgtttatggaaacaatagtttccctgcctgaaacctgacgaatttaataataaaaagggaagttttataagggtaactctgaaagtatttaatgctgaagttgcagtaatgttgaatctttaccatttcaaagaaaataaatatgacttacatactgctctagttgagagtatgcgctgagtgaacgtttcctgattaactcataagaagttgtagtaaagtatcaactaggcttcagaaaagaccatctgtcagtttaagtgtgcattatttctgtgatttctgtgacctcctttgcacacttgtaagctatacaaaagcacacagttaaatgacattttttcaaagttacaaaaatatttctgtttctaaaaattctatagaaactttctatgtggaaatggtggctaatttacctag

SEQ ID NO: 404660 - DNA, 547 bp, Homo sapiens
ttgtatcctgctgactgctgaatgccaaatgcccagaattccttctgctacctaatgacacacctttccctgactctctgtggaaccgtgagactgggtattacttctaacccatggtaatacccgatcttgtcattaagtcctgtcttatctttaaggaagcactggcaggaaaagaggcaagatttcaaccattgcagcccttacagaagctgccaaacccaaatcaaaacaccaacttggaacctaagccattacggtcagttagctacattctcttctctacaaaaaaaaaaaaaaaaaaaaaaaaagtmctgagataagtgccccatgaagtacatataacattgttacattatctacttacttgtctgtatttctactagagtgtatatcctgaaaaaaaaacatactcatttttttactattatagtctccatatcccacatggcacccagcatatagtagttataattaatatctttttgataaatgaatgaatgatttggtagagacattatagttaaaagactttttattatcccta

SEQ ID NO: 404661 - DNA, 538 bp, Homo sapiens
aagtctttaaatagatagattggtgtggatagacagattataaatgagaggtaggtggatagacagacaattgaagggyttgctcaattatacatgattcatgatagatgcataaattcatagctataggattgattgatagagggtagatgccagatggatggatgatgagatagataataaatgataatagctagctagctagataactgcatgggttttgcttcttccaattaagccccgaagaagtgagttggtgccccaatgttggtagttcttttgactgagtggtactgagcacatgttgttttgtctgtgtgctgtagagcaggggtcagtaaactatcaggccctggaataaggccaaagaatcatatataatctggggcctgtttttgtatagcctgtgagctaaacatgggttttatatttttgaaggtttgtgaaaaagcaaagtgacaatggcaatggcaaagcttagaatatttaatagtatttaatagaaaaagttgactaatccctactctgaggccagttt

SEQ ID NO: 404662 - DNA, 597 bp, Homo sapiens
tacaggttctgctctaatcatatgctgaatgacgtcaggttccagatattctggacaagtaacttttcattcttcttagctggtgaccagctctatttatataaaatctctcagggttaaaaacctactattgtgcatttatctagcaaggggctgggaatgaccagcccttgtgatctgtcaatcatgagaacatgaagtttgatttttgaagtattggatgaaaaataattgtcaaatacattcttgtaatttttatcactctaattgccaacaaagtacttgggcaagacttggggaactcatcctctcactgaggttctaggatccttatttcaagcccatttcattccataactgatccagaagtcacttttatagacccttatagaatcaccctttattatattmaagcaagtgtgtgccttgtgtagtttagatatgccagtactgttgtctttggaatcaagagatgagttcaaattactagattcttgtgtagtatatctatgactatataaaaataatttcaatactactacagtagtttttagattgtaaaaaaagctgttgttgtttatagccacttgagataac

SEQ ID NO: 404663 - DNA, 612 bp, Homo sapiens
aataaggtctggccttcagggtgtaacgtccaagtacctggaaaagctctttcctctaaaatagcctcctcagagtcctcaacaaagtgagacattcctttttcagaaactaagattgatgccatgataacttggtcaaatgttccctttatatcaaggtatatagaaattctattgtttwggaaacaggatacttggtggtacagattcattgcctgtttctctgaataagaaggctgtttcttgctgtctactggaaaagttccgttacatccagggaaactactcattgtttttactttcatttgccaaattctcatgttaaaaatttttaattaaaacaagttcatacttgtctattaacaaacagaaagtttgagcaattctagaattccaagaaatacaaccttgctcttggcctccaaataccacttttgaaatatagaaattttggggcatgtttttaggatgtctcacagtactccagcattatgtttctgcttagactttctctgagagcctgcccatagtcagtggctgcttttctaagacaaaatatccttgacctcagtgtgacctttcatatgtagggaacagatagaatccaaaaaa

SEQ ID NO: 404664 - DNA, 612 bp, Homo sapiens
aataaggtctggccttcagggtgtaacgtccaagtacctggaaaagctctttcctctaaaatagcctcctcagagtcctcaacaaagtgagacattcctttttcagaaactaagattgatgccatgataacttggtcaaatgttccctttatatcaaggtatatagaaattctattgtttaggaaacaggatacttggtggtacagattcattgcctgtttctctgaataagaaggctgtttcttgctgtctactggaaaagttccgttacatccagggaaactactcattgtttttactttcatttgccaaattctcatgttaaaaatttttaattaaaacaagttcatacttgtctattaacaaacagaaagtttgagcaattctagaattccragaaatacaaccttgctcttggcctccaaataccacttttgaaatatagaaattttggggcatgtttttaggatgtctcacagtactccagcattatgtttctgcttagactttctctgagagcctgcccatagtcagtggctgcttttctaagacaaaatatccttgacctcagtgtgacctttcatatgtagggaacagatagaatccaaaaaa

SEQ ID NO: 404665 - DNA, 579 bp, Homo sapiens
aactcaatatgctcttaccataaagttcagcaatcacccttcttgatatttacccaaagacactaataactaatgtccacacaaaaaacctgaacatagatgtttatggcagatttattcataattgccaaatcttagaagtaaccaagatgttcttcagtaagtgaacagataaactgcggtacattcatacaatggaatattattcagtgctctaaagaaaaatgagatattcagccatgaaaagacatggaagaaacttgagtgtatattattaagtgaaagaacccaatctgaaaaggctacatactgtatgattccaactataaggccattctggaaaaggcaaaactatagagacagtaaaaaggtcagtggttgccaggatactaatgtagggaaggaaggatggctaggcagaaarcaaaacatttttagggcagtaaaaatattccatttggtactatagtgattgatgtctgtcaatatatatttatctagacccatggaatgtataccatcaagagtgaaccctaatgtaaaccatgaactttaggtgataatgatgtgacaatgtaa

SEQ ID NO: 404666 - DNA, 612 bp, Homo sapiens
actataaggccattctggaaaaggcaaaactatagagacagtaaaaaggtcagtggttgccaggatactaatgtagggaaggaaggatggctaggcagaaagcaaaacatttttagggcagtaaaaatattccatttggtactatagtgattgatgtctgtcaatatatatttatctagacccatggaatgtataccatcaagagtgaaccctaatgtaaaccatgaactttaggtgataatgatgtgacaatgtaagtttatcaattgtaatataaatgcaccagtctgatagaggatattgataatgsgagaggctatgcatgtgtaggggcaggagacgtatgggaactctctgcactttttgctcaattttgctgtgaacctgaaactgctctaaaatataaagtcaatttaaaaaaaaaagaagcaagctcaaaatgtatttaattcaaattttgtgcaatctttaaaattctccaatgcttcacagagaccctgctttttggattttgagtcttgccatattttggtaatgtgtgagccagcagcaacaatgagcattcatagaaaaagactttggaaattactgtgtgattccaatacagtatat

SEQ ID NO: 404667 - DNA, 581 bp, Homo sapiens
gagttatcactctcatgattatgttatattacatgacaaaagggatttttgcatatgtaattagtttactaatcagttggctttggttaatcagatgagccctttaaaagcagaggattttctctggtgagtagtgagtagcagagaggaagtcaggtagattacaagagagaattggaaaaaagctcgtggcttgaatatagagggragcacatggaaaggacctgagagaagcttccagaagctgagagcagcccctgactcacggccagcaagaaaatggggacctcactcctgtggccatagggaactgaattctgccagcaagaatagacttgaaagcagattttcccctcaagcctctaaacaagaactcggctctgccaacactttgattttggccttgtgagaccctaaacaggaaactcagttttgccataccaacatctgacataaaaaaccgtgagctaatacaattgtgttgttttaagctgctgagtgtgtggtaatttgttatgtagcaacagaaaatgaatccagacaagacataaagatgagctacaccaccaagactaatggtg

SEQ ID NO: 404668 - DNA, 581 bp, Homo sapiens
gagttatcactctcatgattatgttatattacatgacaaaagggatttttgcatatgtaattagtttactaatcagttggctttggttaatcagatgagccctttaaaagcagaggattttctctggtgagtagtgagtagcagagaggaagtcaggtagattacaagagagaattggaaaaaagctcgtggcttgaatatagaggggagcacatggaaaggacctgagagaagcttccagaagctgagagcagcccctgactcacggccagcaagaaaatggggacctcactcctgtggccatagggaactgaattctgccagcaagaatagacttgraagcagattttcccctcaagcctctaaacaagaactcggctctgccaacactttgattttggccttgtgagaccctaaacaggaaactcagttttgccataccaacatctgacataaaaaaccgtgagctaatacaattgtgttgttttaagctgctgagtgtgtggtaatttgttatgtagcaacagaaaatgaatccagacaagacataaagatgagctacaccaccaagactaatggtg

SEQ ID NO: 404669 - DNA, 631 bp, Homo sapiens
taattgtttgcatgtttatgctacacaccaaaatattttcctgctttgtttacagtattttctctttgcctttaaaacataatgattgcaaccattagcactaaataacttcctccttcgtatggttgggggtgaagttatgaagattcaaattttgggttcctggaagcatggtttaataatataatattcaaaaatctgcttgattttattgactttctcaaagtcaaacttgttatgataatcaaaaaccctattttgcatmagtaattaggacacttgtcttgaattatgcagatgattttataagttgtccactttccaattcctgtgtagacaaaaatatgtgactggtgacaatttttgaaatacttataatgaacatcatcacctgggttttctggcaaatctgttcacttggaacatggccaattatcaatgatttattagaatagatgagaagaaaattaaaggaaaatggaaatgaaaaataatctccaaatttcacattgttcattcatttaaaagtacttttccactcagccaccagtaaaatcatttacaagtgatgacatttaactgaaaagattttcatctccttttttcccctcttatctatcttgtaatataa

SEQ ID NO: 404670 - DNA, 598 bp, Homo sapiens
gggcaaattcaatattgtagccctgtcatcctttacagtagggatgtaaggtttctccatcttggctctattgacattgtttgtttttgaggacaaatctgtgcactgtaggaggtttagtagcatccttagcctctactcactggatgccagtagcatccctcagtaatggcaacccaaaatatcgctattcttgctagatgtctttgctagagggaaaaaatgtctgctgttctagggcctcattgctatttgccttcagcagatggaaattgaacaatagcgcagaagaggcatactgattcccttacaagctcagatccagaaatggcagatagctcttccactcattrtcctttggagagaactaagccatacagccacatccaacttcaagggggctgggaaatgtggtctattcacataccctgctacaatcttgttatcatggatgaaaaaggaaacatattttgtttgatgactggtggcttctaacacacattttaaggaactaaaagttataattttccaatagcttgggaatctctgaacccttgctgctagcttgtgtatgcttgagttatacttggtgaaagaa

SEQ ID NO: 404671 - DNA, 614 bp, Homo sapiens
aggttcatattcgagttgagaaagtgttttaatctatatctaagatgtttagataataataattacatattgcattatcttttaaaaaaagtgaaaggaaggagaaaagaaataaagaaaaaaaaagaaaagaaaggscaggccagttatcaagctggacatttcacaggcattatttctgtgcaaggcagagatcaattcaatgttcagttaaagaaagactcaggtaatttgaatactttgttcaagattacacatgcagtaagtgttgaactgagatagaaacccaggttattatgactttagtctgtgtcccctttccttaatggtaagattcataaggaaattctttgagtggcctgataactgtagatgtgcaaagtactcagtctaaacaatagggagggtcagagactgtggtaaattgcagaattctgaatagatatttggtttcagaaatatttaacatcctgtgctgactaacaagacattttaaacaacaacagtaatagcagcagcagcaagaactattttccacattttagcctgctttatgcctgactgtccctttaaatcactgtccctgctttctggatctttatttcaggaactca

SEQ ID NO: 404672 - DNA, 614 bp, Homo sapiens
aggttcatattcgagttgagaaagtgttttaatctatatctaagatgtttagataataataattacatattgcattatcttttaaaaaaagtgaaaggaaggagaaaagaaataaagaaaaaaaaagaaaagaaagggcaggccagttatcaagctggacatttcacaggcattatttctrtgcaaggcagagatcaattcaatgttcagttaaagaaagactcaggtaatttgaatactttgttcaagattacacatgcagtaagtgttgaactgagatagaaacccaggttattatgactttagtctgtgtcccctttccttaatggtaagattcataaggaaattctttgagtggcctgataactgtagatgtgcaaagtactcagtctaaacaatagggagggtcagagactgtggtaaattgcagaattctgaatagatatttggtttcagaaatatttaacatcctgtgctgactaacaagacattttaaacaacaacagtaatagcagcagcagcaagaactattttccacattttagcctgctttatgcctgactgtccctttaaatcactgtccctgctttctggatctttatttcaggaactca

SEQ ID NO: 404673 - DNA, 614 bp, Homo sapiens
aggttcatattcgagttgagaaagtgttttaatctatatctaagatgtttagataataataattacatattgcattatcttttaaaaaaagtgaaaggaaggagaaaagaaataaagaaaaaaaaagaaaagaaagggcaggccagttatcaagctggacatttcacaggcattatttctgtgcaaggcagagatcaattcaatgttcagttaaagaaagactcaggtaatttgaatactttgttcaagattacacatgcagtaagtgttgaactgagatagaaacccaggttattatgactttagtctgtgtcccctttccttaatggtaagattcataaggaaattctttgagwggcctgataactgtagatgtgcaaagtactcagtctaaacaatagggagggtcagagactgtggtaaattgcagaattctgaatagatatttggtttcagaaatatttaacatcctgtgctgactaacaagacattttaaacaacaacagtaatagcagcagcagcaagaactattttccacattttagcctgctttatgcctgactgtccctttaaatcactgtccctgctttctggatctttatttcaggaactca

SEQ ID NO: 404674 - DNA, 572 bp, Homo sapiens
ttaaacggattttctcctgtgtgtttgtaaggtaggatggaagtaaccagtttttagctgaaatttaagaaggactttctaaccaacagagttgttatatgctgccttgtgaaataatgacaaagacatcgatgggcacaaaattagagggcacagttagcgtccatggaatccttaaagttctaggcacgccactttcacttaatcattctgtaattcataatggaaatatgttttgggctttatttaggtcttcaggtttaccactattaggcttatgagttccttacatttattattagctgaggtaagtaaaatttctttttattctaaatttaatgggctccaatttcagtggatatcttttaccttattctgaattgtgcaaagatcattactatcggctaatctttaaaattagtggttcttaacttctcccttcttatgctatatacwctatttttcaacaaacctctggtttctattaaatctatatttgttctcttatattgtttattaattaataaatttctttggtacatttttttcagtcaacacttacccaaacaaaa

SEQ ID NO: 404675 - DNA, 598 bp, Homo sapiens
  misc_feature (1)...(598): n = A,T,C or G
cagtctgtactttaactcagtggtccccaaccttttcagcaccagggactggttttgtggaagacaatttttgcatggatggggtgggggtaaatggttttgggatgatccaagcacattacatttagtgtgcatttttatttctgttattacattgtaatatataatgaaataattatacaactcgccataatgtagaatcagtgggagccctaagcttgttttyctgcaactagatagtcccatctgggggtgatgggagacagtgacagatcatcaggcattagattctcatgaagtgtgcacaacctagatccctcgcatgcacagttcataataggttcatgctcctatgagaatgtaatgctgccgctgatctgacaggaagtggagctcaagtggcaatgcgagggttggggagcagctgtaaataaagttgaagcttccctcacttgcctgtcgcnctcttctntctgtgtagtntggttctttataggccacggaccagtactggttcttatttctcaggggttggggtctcttgctttatcttgtctttgagacttttnctgttctccccacaatattcttaaggtga

SEQ ID NO: 404676 - DNA, 607 bp, Homo sapiens
attagcaattagcattatacaatggaacatgctcatattatataattataaacaaattcaaataagaggagccctgtctataacaggaaacttattcccagggtgaagaactgagaagggtctaagattttaccctgctagaaagayaaaaagttttcttgtcattttcctctatgctgggagaaagcacaaggctctggattcagagacaaaggactttataactctcagcatggcaggcagcataatcttcatgtttgtattggttccccttggcctctaaatcacatgacaatgttatagaagggagcccaggtagattctgtgcacacagtgtgtttgtgtcatagctgaggaatcctgagcataggaaaccccatcttacaagggaactgttagcgaacctgcccaaagctctgcccagagggagacattttctttttattctggatagaaaatcaatctgccctctgctatggtcaaaaacactctctattttccaagtttgttcattatgcaaacatctttgacaagatatcctggaataaaaattatcacagaatgtgcagaaatgtaagggaattgtcttctaagcagatgttttcat

SEQ ID NO: 404677 - DNA, 548 bp, Homo sapiens
tttccttgtcagtgatgttaagttgccaacaccattgttatgtcagtggagacaatacggctgctgccaacccaagtagtcacactcactcaatactacctccctttcccagcagaaattccccttaactgtggaaagttctgctgagatgaatgtgtgtcaaagggaaaaytaagagaagagcaaagataagaattatacaatacaaatttaaacaaacaaagatgacttacatccttttgaaaaaaacaagtagctaaaaaatagcagcccatggcccatgatttcccccacctggacttgaggcagttatcgctaaaatctcatttgttcctgctatgcctggatagaaactctgaatcatcctcctctcacaatgtcgggaaaacactaccaactggttaaaattggtacgcaaggaaaaatttatttaccatcctatgagagatttatgctaactttacagcgaaaatttctgaaagttatttgataccagtattgtttattgaaataaactttaggaggcatttaaagaattggttctcata

SEQ ID NO: 404678 - DNA, 524 bp, Homo sapiens
aggtgtctataatcccagctacttgggaggctggggcaaggagaattgtttgaatccgggaggcgggggttttagtaagcccgagattgcgccrctgccctccaacctgggtggcagagcgagactctgtccctctcaaaaaaaagaaagaatagaggtgaccatcagaaacagggaattgtggtgggggcttgggacattcaggagacaagatggggtgcaagaaatactctatttttgacctggtttaaagttaatagtttaatttagtctgtgaatactcttgaagctgtatattatgatttgggcatttttaatgttatacttcaataaaaggtacttgaaaaatctaaaaatatatacaaaaacaaaaatatatacaatacaaattatactcctaataatttcttggcctttggatgaggtatactcaaagaacataaacaggttaggctggccatgcaaaatcttaattagaaattaataatgaggcaaaggtaaacgatctctgtattacatcacac

SEQ ID NO: 404679 - DNA, 524 bp, Homo sapiens
aggtgtctataatcccagctacttgggaggctggggcaaggagaattgtttgaatccgggaggcgggggttttagtaagcccgagattgcgccgctgccctccaacctgggtggcagagcgagactctgtccctctcaaaaaaaagaaagaatagaggtgaccatcagaaacagggaattgtggtgggggcttgggacattcaggagacaagatggggtgcaagaaatactctatttttgacctggtttaaagttaatagtttaatttagtctgtgaatactcttgaagctgtatattatgatttgggcatttttaatgttatacttcaataaaaggtacttgaaaaatctaaaaatatatacaaaaacaaaaatatatacaatacaaattatactcctaataatttcttggcctttggatgaggtatactcaaagaacataaacaggttaggctggccwtgcaaaatcttaattagaaattaataatgaggcaaaggtaaacgatctctgtattacatcacac

SEQ ID NO: 404680 - DNA, 564 bp, Homo sapiens
ttttttcaaccagtctactaccgatgaatacttaatttgttttgaaacttttgccatttcaaacaatamtgcagtgaacagccatatacaaatgttattttgtatatatgtaaatataatggaaggataaattcctagagatgaaattgttgagtacgctgtattgctctccatagaagttataccaatttacagtagtacctgcaatgtagaccttattcagaattacactgtaattattattgtaattttatcttcaccactattctaaagagtatatactatcttgctaatgtaagatgaagaaattgatgcttgagctggctcatgacctgcataaaaccatgcgacatgccaaggattgacaataggattctgccaagtcagaagcactttccaacatagtctctgtttttcttaaagacaaaggagaaaccactattttttgaagcatcaggttgtgaatctgttggcagaagccagaagacaactcaaggactatccttgagatacagttttgctacatcaaagaagattctgttcatttgtcactatcctttaggt

SEQ ID NO: 404681 - DNA, 519 bp, Homo sapiens
aaacaataaaatgagagtatttggtctttcctttaaagcggggagggggaattttagaattttcagttaaaagcaaaaagaaaaatatacttcttttcacatattctccrtgtctacagaaaaagttttaagcccttgttaataatatcattgatgctcataataagtgtaggttttactagtgaatattagtgatgctgcactgtaattcttgtagagattggggtttggtgtgggtgggcacaagggaagataaatgcatctgaccaagagcaaattaggaaacttggaggaaaatcttgattccattgtaggtggtataggtgatgaataggttgtgttattcactatcaattaacactattcataaaactcccttgttcagattttaatgattcccaatattaaatacaagcagtgttctctgccaactaagcctggagaacagcagaaatagcatgttcattttattatcctgttgctccacacagaaggacctcagaaatttgagaaatgaat

SEQ ID NO: 404682 - DNA, 519 bp, Homo sapiens
aaacaataaaatgagagtatttggtctttcctttaaagcggggagggggaattttagaattttcagttaaaagcaaaaagaaaaatatacttcttttcacatattctccatgtctacagaaaaagttttaagcccttgttaataatatcattgatgctcataataagtgtaggttttactagtgaatattagtgatgctgcactgtaattcttgtagagattggkgtttggtgtgggtgggcacaagggaagataaatgcatctgaccaagagcaaattaggaaacttggaggaaaatcttgattccattgtaggtggtataggtgatgaataggttgtgttattcactatcaattaacactattcataaaactcccttgttcagattttaatgattcccaatattaaatacaagcagtgttctctgccaactaagcctggagaacagcagaaatagcatgttcattttattatcctgttgctccacacagaaggacctcagaaatttgagaaatgaat

SEQ ID NO: 404683 - DNA, 551 bp, Homo sapiens
tgttttgtttttatacatgaaaaggagtttaaataatatagcaataaaatggaattgtggttgagggtaaattgttaaaaaaaaacttaatctaggctgataaacactggagatctatattaaactgatatcarttccaaaagaaattgtatacccaatgattttataaagtatttcaaagcaaaattatgacaatgagaaggaaaacaaatattcccagtcaactcaaattttgttttcctgatttcatgatgggttagttaatctcctaagaacacttaagaggtattatactctcctcctgtggcaagaaaggatgacttcaatgtcaagctaagcgttttcggttatacccagtgtatagggaaagtccacggaaaatttttgtgtgaaacaatgattttagaaatctaacttggcaatagtatgaaaattaaattgggaggaaaagaagacagaaagatcatttggaaaattagtaaaataggacaaatttaattaagaatatgccgagagaggtaagaagagtgatgaaagcagcatgaaagtaa

SEQ ID NO: 404684 - DNA, 461 bp, Homo sapiens
gcataaccagcatttcagaaaaccagtgccctaaacaaaactgcaaccaaggacttccacagagtccatgtcacttttctgccatatctattagagcaggtgctggaatccataactgggaatcctgaaaatgggtaacatcacaggactctttgaagacattcccagcaccagctcagagcccagtagccccactgactggctagacagaacggtgaacacaatcactgctgttcagctctcaggaagccccatccccaggggaagaggaagagcaccacatcaagggattgccacatggaacaaaaaaatctggacagcagcccttcagtcccagatctttccactgaaacagtctacccaaaggggaaggaaccagaaacggaastatgataatgtgacaaaacaagattctataacattcacaaaagatcacactagagcaatgaatccaaaccaag

SEQ ID NO: 404685 - DNA, 511 bp, Homo sapiens
caatagggaaactgcctccagggcatgtcagaggtcttcayggcagcccttcctatcacaggcccagaggcctaggataaaaaaaaaatggcttcataggctggacccagagttgcttattgctttgtgcagtcttgggacttggtgccctgtgtcccagtggtggctcaaaggggccaaggtacagctcacaccatggtttcatggcatgcttggggtgcaagccccaagccttggcatcctccacatagtgttgagcctgtgggtgcacagaagtcaagaattgacatttgggaactccacctagatttcagaggatgtatggaaatgcccggatgtctaagcagaagttttctgcaggagtggagacttcatagaaaacctctgctagggcagtatagaaaggaaatgtgggtcagagcccccatacagagtccctactggggcactgcctagtggagctgtgagaagagggccaccatcctctgggctccagaatggtagttccacc

SEQ ID NO: 404686 - DNA, 533 bp, Homo sapiens
ttggtgctgactccttagagaacaagtgccttggcatttggccccttcaacttgcttctatcatgtcaaagtctattgtagtacaatatataccattgttttcttgtcctaaattgtcacatcctgttgctctgcatgaatctgtaagtgccaagttacgccctaaaaagagatgttttccaatggtgggtctatggcacagtttattaataagaatcttagttccagatgaaagaacagatctgggaagcaggcttctggagcaygcattgccaaaaggaacacatgaagtcaaaagtggtgaaaaggtggcttttaacattctagtacatgattatataagcatgtgtgatatcaaatctttctttagaaattgacaaggaacctgcttgagcaccaatttaaggttttactattaagaagacaacaaatatttagttgagagtgtgtcccatagcttacctgacaaaaatgtccagaatgacaattccattaatatcaaagtttatatccagacaggaattctctgaagg

SEQ ID NO: 404687 - DNA, 386 bp, Homo sapiens
ggttataatcatccatttccggtaaatatgcaaacgattcgaagttcagctccctttcaaggcacctcttttccttctcaagttgcgaggaaaagctggccccagctcatgtcattgagaaaggggcctttcgtcccggtgccccacttccctttcagtktctcatcctgctagcctgtggggagtaagcagcctctgtcctcactggcttcagtgctgaagtggctgcagtttcactcatggtctgatctctttttagagaagggaattgtgatttatcccagaaagcttgctcgcctcctggctgttcaggacccctcttcttttctcattgtcattacaaatcttctttgctttgcctggcttctgtttaactcagcaattaa

SEQ ID NO: 404688 - DNA, 631 bp, Homo sapiens
  misc_feature (1)...(631): n = A,T,C or G
taatacaacactaaggcatcaggttttgctcctgctatataaaggcaaacttttggaatttagaatgacattttctttctcaacaaagcttattttttaaaactcttattatcttacatgacaaaatcacttttgcaacttaggcctgaataatgacttctttgccttctctgagtgatccatgtgctccagggataatggactcactgggcaaaaagactgatggggtatgaaaaataaggtaaatatttttactttatatacatgcatttttaaaatattcattatatgggatttamacttcttaaggataatgtccatgacaaatttattttgttattagccaaaatatatataataggccttcaatgaacatttgagtaaacttgtgaattaaataaagtttggcttgtttgttttttaatgaaatccagactctaaccttaataaagactgagtacagaagttgcttcttggttaaatggtgtgacccttaatgtgtatgccaataagaaatgtatttggatgagaaaggctagagaaagaaatttcatngtgaaatccaaaagaagagaagacactctgtgatggttaattttatgtgtcaacttgattgggctaaaagatgccc

SEQ ID NO: 404689 - DNA, 550 bp, Homo sapiens
tgctgggtttaatacctaggtgatgggaacatctgtaaaacaaaccacaatggtatgcatttacctatttagcaaacctacacatcctacacacgcacccctgaacgtaaaataaaagttgaagaaaaaatttacaaattaaaataaaatcaaagatgtaaaaggagatgttacaactgatactgcagaaattcaaaggatcattagcaactacatactaataaattggaaatctagaggaaatgggtaagttcctagacacatacaacctaccaagattrtaccatgaagaaatccagaacctgaacagaacaataataagtaatgagatcaaagccataatgacaattatctcagaaaagaaaagcctgggacccaatgacttcacttctgattctattaaacgtttaaaaaagaaccaaaaccaatctactcaaactataacaaaaaacagaggataaggaagtacttccaaactcatttatgaggtcagtattaccctgataccaaaaccaaaggcacatcaaaaaaagaaaactaaaggttaaca

SEQ ID NO: 404690 - DNA, 532 bp, Homo sapiens
gacctttttctgtttttctaatttttttattttttatcttttatgttttttaggcaggatctcactttgtcactcaggctggaatgcagtggcatgatcttggttcactgcagcttcaacckcctgggttgaagcgatactcttgcctcagtcccccaagtagctgggactactggcgtgtgccaccacacctggctaattttttatttttatttttgtagaaacagagttcgccatgttgcctaggctggacttgaactcctgagctcgagtgatccgcctgccttggcctcccaaagtgctaggattgcagacgtgagccactgcacgtgcccggcctgtttttctaaaattaaattcagttgaagtgaccatcaccaaggttgatgacaagttcaatgtcagatcattttggtgtcccttgcctatgtccttcccgtttgagatcatgtgcaccataacccaccacagcccccatcccagggcttttaggcagtccagtaaaatgaaccctgaccagtattagtgactg

SEQ ID NO: 404691 - DNA, 532 bp, Homo sapiens
gacctttttctgtttttctaatttttttattttttatcttttatgttttttaggcaggatctcactttgtcactcaggctggaatgcagtggcatgatcttggttcactgcagcttcaaccgcctgggttsaagcgatactcttgcctcagtcccccaagtagctgggactactggcgtgtgccaccacacctggctaattttttatttttatttttgtagaaacagagttcgccatgttgcctaggctggacttgaactcctgagctcgagtgatccgcctgccttggcctcccaaagtgctaggattgcagacgtgagccactgcacgtgcccggcctgtttttctaaaattaaattcagttgaagtgaccatcaccaaggttgatgacaagttcaatgtcagatcattttggtgtcccttgcctatgtccttcccgtttgagatcatgtgcaccataacccaccacagcccccatcccagggcttttaggcagtccagtaaaatgaaccctgaccagtattagtgactg

SEQ ID NO: 404692 - DNA, 582 bp, Homo sapiens
agggtcagcttttcaagggcacctcctctgtgaacgttttcccagccttccaaagccagaagacagccttctctctcctctattgtcccacaatattttagcgccaacagtaaagcattcatcgcactgtattacaactagatgacattagggatactaaaggggagctgcttatttattgttgcaattctagtgcatagcaaatagtaggagatagaaatctcattgatgtgaaagttaattcgtgcatattatgtattcagcatggtgggaagcatagatagaatagttttctgagcaacagagtcccaatcacattaaaccattgggaagagtgaccatctgtattttagctgcattttcaatcccactggctatgaaatataaattaagaaaaaaaaamccttcctattattcatctcagacagctggttcacaggctttagattcaaggtgattctgtaatgttctattcctgtccagctaaccagctgctgaaattgcatcagaccatttcctcttccagccctaagagaacaaacattactgggtgcagggtgttaacaatacctgcaaaatcac

SEQ ID NO: 404693 - DNA, 545 bp, Homo sapiens
gtaacacatataagagggcatgtttgctcatttctgtttgccaacataatttcacaaagcccttgactctaataatgtgtagctctctagaaagatactttgaagacgaaacaggatagagcacacagccccgtagatctcttgccggagtcactgtacactttaaaagataaatgaggccccacaccatggctcacrtctataatcccagcactttggaggccaaggctgtcagattgcttaagcccaagagtacgagaccagccttggcaacatggtgaaacccatctctagcaacaaaaatttaaaaattagctacgtgtggcggcacacgcctcagcctgggtgacaaatccagaccctgtcttaaacaaacaaccaaccaaataaataaacaaatgataaagactctagtccttgccttttcctacccgataagataacatctgaaggggttagtaattatgcctctgtaatctacaaccagatgcactcttacatccaaaccttgctgtgattcagcttaatgtaatttctgaacaagt

SEQ ID NO: 404694 - DNA, 367 bp, Homo sapiens
aggaagttgaacaacacctcagaagcaagactctctccttccatcaccaggagcccttaagctgtaaaacaatggaacaaataattagctatcaaatttagctcagaggggaaaatgacattctgagatgacttaggaaggtgctaaggagatgtcacctgcctttatttccaagcacagatagagtatggacagattgaaagcatggacaaaactgtctgcattaagcataaacatcatggggaaaagcaaacakctatgtgatactgtgaagcaaaaataataccaaaaaaaaaaaagaaagaaaaaagaaaagaaaggaaaaacagagggaagggaaaaagagagcattcagtagataagaaga

SEQ ID NO: 404695 - DNA, 623 bp, Homo sapiens
gtgtgtgtgtttctgcatacttatatttttctttttgcaaaaaaacccgaaaatagcaacaaaaaaccctcacaaacactaagaataaccagaaactaggaaattgcttacccatagagaagaattgtaagagtaataggggagggtgtgacttctcacatataccttttatcatagtttctcaactttwtttttttctggctgggcgtggtggctcacacctgtaatcccagcactttgggaggccaaagcgagtagatcacttgaggtcaggagttccagaccagcctggctaacatggtgaaaccccatctctactaaaaatacaaaaattagcagggcgtggtggcatacgcctgtaatcccagctacttggggggctgaggcaggagaattgcttgaacctgggaggtggaggttgcagtgagccgagatcacgccactgcactcccgcctgggcaacagagtgagacttcatctcaaaataaataaataaataaataaataaataaataaataaataaatttaaagaacccccccaccccctttctttttctttccaacttttattttacgttcaaggcgtacatgtgcaggtttgttacatgggcaaaatttcaca

SEQ ID NO: 404696 - DNA, 589 bp, Homo sapiens
gattccatgtctttgctattgtgaatagtactgtgattaacatatgtgtgcatgtgtctttaaggcagatatttattttatttttgtttgggtatatacccagtaatgggattgctggtcaaattgtagttctgttttaagttctttgaggtatctccaaactgctttccccagtggctgaactaattttcattcccatcaacagtgtataagcattmccttttctctgcaaccctgccaacctctgttattttttgactttttaatgatatccattgtgactggtatgagatagtatttcattgtgattttgatttgcattgattaatgatgttgaacattttttcatttgcttgttggttgcttatatgtcttcttttgagaagtgtctattcatgtcctttgttcatttttaaatgaggttgttttttgcttgttaatttgtttaaattccttatagattctggatattagacctcttggatgcagagtttgcaaatagttttcccatcctgcaggttgtctgttactctgttgatagtttctttcactgtgcagaagttctttaattaggtcccatttgtcaatt

SEQ ID NO: 404697 - DNA, 483 bp, Homo sapiens
aggctgaggcaggagaattgcttgaacccgggaggcagaggttgcagtaagttgaaatcacatcattgcaytccagcctgggcaacaagagtgaaattttgtctcaaaaaaaaaaaaaaaaaaaaaaagaattccatatccagtagcatgtattaggtatgatactcaccaaaagctctctagcccccttatcagcccatcctcacttctcttttactggatgactctcacattcattctccccattcctggctcacacttgcaccaagcacattttctggaccagttatgaggaagaacatgaatcaaataagaaggtggagctttttggtgtcaacttggccaaaacagagctacatttttcagattccctttcctgcacagttccagattcaagttggccagaaagaattttccataatacctggaaggtggaagtgaagcagccaccatggctgttcactcgtggctgttatggttaaa

SEQ ID NO: 404698 - DNA, 483 bp, Homo sapiens
aggctgaggcaggagaattgcttgaacccgggaggcagaggttgcagtaagttgaaatcacatcattgcactccagcctgggcaacaagagtgaaattttgtctcaaaaaaaaaaaaaaaaaaaaaaagaattccatatccagtagcatgtattaggtatgatactcaccaaaagctctctagcccccttatcagcccatcctcacttctcttttactggakgactctcacattcattctccccattcctggctcacacttgcaccaagcacattttctggaccagttatgaggaagaacatgaatcaaataagaaggtggagctttttggtgtcaacttggccaaaacagagctacatttttcagattccctttcctgcacagttccagattcaagttggccagaaagaattttccataatacctggaaggtggaagtgaagcagccaccatggctgttcactcgtggctgttatggttaaa

SEQ ID NO: 404699 - DNA, 571 bp, Homo sapiens
ttgtggaaccaagaaaagagaaacagtaatagtgtgatcttatgtggagaaaacaccctagtaggttggggagtgcaaagtatcaaggtttatgacaacagcgagtgtttattgagtaaataagcagtctgtgtactaytgcccgctttccattttgttttgcctgtgaccgtgaaagaagtgggtattttttgaaaggaaagagattaatagtactcagcatcggtgtagtgcttggtgtttgcaaagaggtttcaaatgcactatctagtgtgagcctgtgagaataggcgtttttacctgttgtacaagtgaggcatttatatcgttgaaacatagaagaggagaaattacttgattaatgtattccaccaaagggacctataacttaaatctgtatctttgattctaagtcccctcatcttttccacagtgacagagctttccaatactcttcccagtactctccaattttgttgtatctaagtaataagtatagatatttttggacttaatatcatgtttaagtttacatcgatattacccacacagaaaacaataaaaggaaatg

SEQ ID NO: 404700 - DNA, 628 bp, Homo sapiens
ggctctgtgtcctttttgacatgacctcatccatttttgaacagttcttttactttctggaacaagatgtcccaggcttaccttgtattttccttttctcagtcctggaatcagttatttctccaaagtggttcctttcactgggggagagtatctagaaaccaagctctgaacactcttgggacaaggttgcctataggctctttgcagttcgctactacagggcttctcttataacataattctctctcctttctccacagtcagaaacataactccccaaaacatcaatctatttcctcctttgctcaatcatacaacacacacaagatagtttcagaattgccatactcataccattaccaacaataaactcactaaatacacttcaaggtttcttagtagttattttctgtttacattagtgatatttaatcagaggatgggatagagaagttattcggattattctcattttcctttagggtatgggattatgtaaagagamcaaacctgtggctcgttggcatccctgaaacgtattcaatagaaatatggtaatgtttgtttctgtttgtattaaaatttaggtttcatgcccatccatgttgctttaattttgtgtttt

SEQ ID NO: 404701 - DNA, 513 bp, Homo sapiens
gagtgtggctatgagacaagctctctgctgggcamtggggacacatgagtaagtgaagccatgatcactgccccaacaagcttagagtttagagggaaagagaaggggcagacagtgagggtgcagtgttatcagtgctttggtggaagcagcacaggagccaggagaacactaggaagaatagaactcagattgaaagcaaggtcaggcaaagttccccagaggaattggttagcaaatttttaaagtgcatgtcacgtggaaagaacttggaaccatgggcggatgggcggcagctcatgtggcatctgtggaagagaagtctttcttgagacttttgccgctgttgcctgcagtcctttggctgtagcgctcagtggccaggatgccagatagtcctcattggttgtttttttttttctccccagtgtccaacaagcacccatttgtggacagcaatcttctctaccagttcagaatgaacttccggcggaggcgaagactgatggagct

SEQ ID NO: 404702 - DNA, 513 bp, Homo sapiens
gagtgtggctatgagacaagctctctgctgggcaatggggacacatgagtaagtgaagccatgatcactgccccaacaagcttagagtttagagggaaagagaaggggcagacagtgagggtgcagtgttatcagtgctttggtggaagcagcacaggagccaggagaacactaggaagaatagaactcagattgaaagcaaggtcaggcaaagttccccagaggaaytggttagcaaatttttaaagtgcatgtcacgtggaaagaacttggaaccatgggcggatgggcggcagctcatgtggcatctgtggaagagaagtctttcttgagacttttgccgctgttgcctgcagtcctttggctgtagcgctcagtggccaggatgccagatagtcctcattggttgtttttttttttctccccagtgtccaacaagcacccatttgtggacagcaatcttctctaccagttcagaatgaacttccggcggaggcgaagactgatggagct

SEQ ID NO: 404703 - DNA, 604 bp, Homo sapiens
agtctagcataattattgaaattactaatggtgggaaataaagagacctggcttttttttttttttttttgagacagagtcttgctctgtcacccaggctggagtgcagtagtgcaatctcagctcactgcaaccccacctcccgggttcaagcgattctcctgcctcagcctcctgagtaactgggattacaggcatgcaacaccatgcctggctaattttgtgtatttttagtagagacagggtttcaccatgatggtcaggctggtctcgaactcctgagctcaggtgatccaccygcctcagcctccaaagtgctgggattacaggcgtgacgaccatgcccagcctccaccaagggagccctccaccaagggctccaccatgcccctttctccaccaaggggggaaaagaagtgaaaaagtacataaagttcacaatgtacaagtagactctaatccaaaagttgtttggaattagagaaggccttttctatagaaatcattattagagctggcagtttaattccctggacagctcctagccacatctttcacacatatcccaaccaaaacacagctgaaacacattcacaatcaatta

SEQ ID NO: 404704 - DNA, 604 bp, Homo sapiens
agtctagcataattattgaaattactaatggtgggaaataaagagacctggcttttttttttttttttttgagacagagtcttgctctgtcacccaggctggagtgcagtagtgcaatctcagctcactgcaaccccacctcccgggttcaagcgattctcctgcctcagcctcctgagtaactgggattacaggcatgcaacaccatgcctggctaattttgtgtatttttagtagagacagggtttcaccatgatggtcaggctggtctcgaactcctgagctcaggtgatccacctgcctcagcctccaaagtgctgggattacaggcgtgacgaccatgcccagcctccaccaagggagccctccaccaagggctccaccatgcccctttctccaccaaggggggaaaaraagtgaaaaagtacataaagttcacaatgtacaagtagactctaatccaaaagttgtttggaattagagaaggccttttctatagaaatcattattagagctggcagtttaattccctggacagctcctagccacatctttcacacatatcccaaccaaaacacagctgaaacacattcacaatcaatta

SEQ ID NO: 404705 - DNA, 542 bp, Homo sapiens
tgcttctggaagaacaggagtccactttggattagcagggttctctggagacccagggcagggcccagatgccagccctcggaggggcctctgcatctctgaggcgcattaacatctgttcccatttccctctatcttccttccccataaccttccatcaggacaggggctgtagtcttggtagctcagacactggcaattcctccccattactacagaggacttggaccctggtatttagcccctgtcctccccagttctatgcttccgccacccagacctctcccatccccaaacttcctgtcttgctttgttaggtcgttctctctgcccactgctcttggctccactctgaccgtcaaggtccatctcaggcgccccagttagaaacctccttctctctgccccttcgcctgcgcccctcctggacacaaatcacagatgttggggtcctggagttccgtgtgtgtgygtgtgcgcgtgcgcctgccttcttcctgccttctggccagggcatcccagggctgggactgagtctcatc

SEQ ID NO: 404706 - DNA, 529 bp, Homo sapiens
gagagagcccaagactttgttggaactggagatgttttcctgcttccttgttacagtggtcatgcgatgatttggctccattactaacggcccaattatttgaccttggcctcagagacaggtgtgtggtggactggaaagaacatggtggrttttggcagggtccccactttagctgttcctgaacttgggcaaattactgcacctcccgcactcttccttctgttactagtaaagtgcaggcgcccatgcccaccctactggacggatgggaagatgaagtgaaaaatgcccccagctgttggaagctgggagccctgggaaagcagaccccacctttacagatcacagggaccttatcctgagagcctcacctcaccaaggggggcctcaggcctgcccctgcccatgaggcccagagagtgggggttggggagggatcgcagggtgaggcggctgctctatggccctctggcgaggggcctgggctaatgccttgggggtctgtcatcccttccatgtggtttcc

SEQ ID NO: 404707 - DNA, 529 bp, Homo sapiens
gagagagcccaagactttgttggaactggagatgttttcctgcttccttgttacagtggtcatgcgatgatttggctccattactaacggcccaattatttgaccttggcctcagagacaggtgtgtggtggactggaaagaacatggtgggttttggcagggtccccactttagytgttcctgaacttgggcaaattactgcacctcccgcactcttccttctgttactagtaaagtgcaggcgcccatgcccaccctactggacggatgggaagatgaagtgaaaaatgcccccagctgttggaagctgggagccctgggaaagcagaccccacctttacagatcacagggaccttatcctgagagcctcacctcaccaaggggggcctcaggcctgcccctgcccatgaggcccagagagtgggggttggggagggatcgcagggtgaggcggctgctctatggccctctggcgaggggcctgggctaatgccttgggggtctgtcatcccttccatgtggtttcc

SEQ ID NO: 404708 - DNA, 503 bp, Homo sapiens
agacctggattcaatcccagtactaatttttattcactttgggygaattatttaacctctctgagcctcagtttgatcatctgtaaagtgggagtgaaaacagtagctacctagttggcttactgtaggatgaaaggtgaaaatgcaaagtgcttagcacagggcctggaacatagtaagcccttattaaatgtcagtgatcattatgctttctccctccctccttttctatgaaaaagttatttcatagaaataacttttctatgaaataacttttttttattaagccataaacataatacttgatgaccatagtaaggaaaatattttgtgtccctaatggctgatgggatggcaagagcattggccctggagtcagacatcctgaggttgtaatcccagctctgccatttacaaactggataatttactcaaagcacttaacttctttgaacttcagtgtccccgtctgtaaaatggggacagtcctgatacctgccctg

SEQ ID NO: 404709 - DNA, 534 bp, Homo sapiens
agctggtgtctggggccctctcctgggggctgctgcgccatggcaggctcaccaaggaccttcctcttcaggagattccattgcttaaacacaatcatcgcttgtyatttttgggactgtccaaagaagagatgtgatttttttttttttaatatagtagaagctggaaattcatacaagttttttggctttagtgttattgataacttttcagtctttaaaaggaaactgttctcacaagcaactttatctttgccaaggtgaatatgtgaaatagcaaaggtgttctagtgcaatactgctgagtctttcatgtgtgctcgtatcccctgggaacctggtgaaaatgcagatgctgcttcactaggtctggcagagggcctgggattctgcatttctaacaggcttccaggtgaggccaaggctgctggtcctaaccacactgtaaggtcttggggaactgagcataaaaaataaaatgtccatggcaatataatattggcttttaatatattttaaatatttttagatggt

SEQ ID NO: 404710 - DNA, 582 bp, Homo sapiens
aaaagtgtagagattcttcaaagagctaaaacagaactaccattcagcccagcaatcccattactgggtatatatgcataggaatgtaaatcattctgccataaagacacatgctcatatacgttcattgcagcactattcactaaaacaaatagaattaatctacatgcccttcactggcatattggataaaaacaatatggtacatatacaccatggaatattatgcagccataaaaaatgagcttatatcctttgcaggaacatgaatgtacctggaggtcattattgttagcacactaatggaggaacagaaaatcaaataccatgtrttctcacttatatgtggtagctaaacaatgagaacacctggactcaaggaggggaacaatagaccctgagggaacaatagacactgagacacttcacgccctatgttgggtgagggaggcgatcagaaaaaaatgactattgggtactaggcttagtacctgggcagcaaaataatttgtacaacaaaccccagtgacatgagtttacccacataacaaacctgcatttgtgcccctgaaagtaaaatat

SEQ ID NO: 404711 - DNA, 611 bp, Homo sapiens
ctgagtgccctttctatttataaagcagggactattacttccccattctacaagtgaagaaacagaggaacttcccacattcacttcattttgctttgttttaatttctaaaatcttaccaggggttcattttagtgagttcttaagcccaggattttctgttgcttttggtatttgttgtttagtgttatgctttccctaaggagagaggctgtaactcaccttcaacctcattatctgtatgacctcctctttggtctatttcattcttctctaacaaatattttaaacatttacttatcagagtaaatatgaaaatgcagctctagttttccaagaaacttgtatttatatctacaatgttaagtgtttctgattgccacatgttaccatggctacaagaaattattttagtttgttagttttgtaggaacatggaaattattactttttaagcttttgattctcaatagcttaaaatgtattacctcatttgaaaagaaagtacacattttaaaaatgcaaactatttccttaacytagctatagttgtctcgttttaggttttatggaatacttcttcagccagtaaaaaacaaacaaatttaaat

SEQ ID NO: 404712 - DNA, 564 bp, Homo sapiens
tttcaaaaaataagcagaagaaaaaaaatgttcagattttggactttatttattttttaaaaaaggagttagatatgacagttttaatggactttaaagtctccctattcctataagttttaataacatgaatagaaactcaattaatagtatttttaatgcacaaagatttatgaattttatgccagttttaactgtaccttccctattattactagatatttgtaattcagtcattgtcaataggcttccctcggttcacctttggataccattactgggaggtggacgtggggacaagcaaatcrtgggatctgggtgtttgcaaagaatctattaatcgacaagaggaagttctgctgtcttcagaacttggctgtggactgtggttttgagaaataaaaagctcctctgagccagtaatgtgcctttaactaccttctggttactccaaatagacatttgtttggatttggatattggaatcattttctcttataacattagcaatggagccactgcacccatttcttgcttcttcagattcaattaatgatgattatc

SEQ ID NO: 404713 - DNA, 564 bp, Homo sapiens
tttcaaaaaataagcagaagaaaaaaaatgttcagattttggactttatttattttttaaaaaaggagttagatatgacagttttaatggactttaaagtctccctattcctataagttttaataacatgaatagaaactcaattaatagtatttttaatgcacaaagatttatgaattttatgccagttttaactgtaccttccctattattactagatatttgtaattcagtcattgtcaataggcttccctcggttcacctttggataccattactgggaggtggacgtggggacaagcaaatcgtgggatctgggtgtttgcaaakaatctattaatcgacaagaggaagttctgctgtcttcagaacttggctgtggactgtggttttgagaaataaaaagctcctctgagccagtaatgtgcctttaactaccttctggttactccaaatagacatttgtttggatttggatattggaatcattttctcttataacattagcaatggagccactgcacccatttcttgcttcttcagattcaattaatgatgattatc

SEQ ID NO: 404714 - DNA, 564 bp, Homo sapiens
tttcaaaaaataagcagaagaaaaaaaatgttcagattttggactttatttattttttaaaaaaggagttagatatgacagttttaatggactttaaagtctccctattcctataagttttaataacatgaatagaaactcaattaatagtatttttaatgcacaaagatttatgaattttatgccagttttaactgtaccttccctattattactagatatttgtaattcagtcattgtcaataggcttccctcggttcacctttggataccattactgggaggtggacgtggggacaagcaaatcgtgggatctgggtgtttgcaaagaatctattaatygacaagaggaagttctgctgtcttcagaacttggctgtggactgtggttttgagaaataaaaagctcctctgagccagtaatgtgcctttaactaccttctggttactccaaatagacatttgtttggatttggatattggaatcattttctcttataacattagcaatggagccactgcacccatttcttgcttcttcagattcaattaatgatgattatc

SEQ ID NO: 404715 - DNA, 616 bp, Homo sapiens
gcaacaactatgaatataaacctttacctaatactttggccgcggggttctcatttcttgtctttttgaggcatgaaataacagaatgttattaacttctttarggtcaaagatcccatatgctttgtctttagcaaactagatttatttgatctgactggatttgctatatttgtttatctgagttgtgtgattaatacatgggaaataaaatacaaataatgaagcactttggaagagaaatatttgacttacaaaatcataacagacagaactagtaaaacgtgtaggtgtgttcacaacacctgcaagagtataatctacaacatcacaaaacaaaatgaaaactctttccagcccttaaactaggctttcttccttcaatatctacagctgagagttttctactcctgcagtcctcacagtaggtggttcaatgtgccttttcctgctttctttgcttgaatgttgtccagagtacttgctagtaactacatagtgtgacaagactgtaaaatacagcattttgctttcaatataatggggaacttgtcagaaaatctagattgtgtctgtgtttttcttcctatgctgttcccagaattgtttttgcgtt

SEQ ID NO: 404716 - DNA, 579 bp, Homo sapiens
aataagttagttcaatgaatatacagtctaagaatgaaaatataaggagttcagaagtgggaagggtctcaggggtcatggatgtcttcaggaaacttaagacttggaataatagacttttttaacattttacttttaaacaattttagacatagaaatgttgaaaccagtgaagagaacgcttgtgaatgcttcacagctttctttattgttaacgttttttataaccatgatgtatttgtcaaaactaagaactcactgttggtataacgctatcagctaaactacagactttgtctggatctgcccttcttcccactgatgctcttgtctggtctaggaccctaccctgcatgtgatcatcaagtctcctcagtctctcccattccrtgacagttcttcagtcttccctggtctgcatttatattctgttgctgctattagaacttttaataaacttaacaccttaaaaacacaaatttattttcctacagttctgtaggtaagttgtctccactgattcttctgcttggattttaccagtgaaaatcaagctcagctcttactgaaaggttctgg

SEQ ID NO: 404717 - DNA, 600 bp, Homo sapiens
ctgctggtcaagcttaagtaattgaagtttatactcccttctcattcagtgttgcccaacaagatcaggtgttcatctcaaatttcaacgaagcagattgggaatgtttgtttttcttgtttctgttgttcttgaggataaagattatccttagcagttatgaaaaacgatatctttttgctgaatcatcaacttttgttcattctgaaatcctatgacagtgacaacagttctttggggraaaaaaaatccagcttagatattctaaccttaaaaagttaacagacattctctattgtgaatttttttcctattatatttttgtttgtgttgtaaatcatagttacagtgtcgcatagataccagccttaacttaggcttgagaggtagaattctcttaactaacaattgagagggacattttctaattcaaatttagctttagagttatggcacataaaggagacccttacagaaaatttgattgttttataggctgagtaataaaaaccttcttaggcccacaatttagcacaaactttcaagtagctgtaaccgctcaatgggttcaccttgcccactgcctagacagagccaatt

SEQ ID NO: 404718 - DNA, 600 bp, Homo sapiens
ctgctggtcaagcttaagtaattgaagtttatactcccttctcattcagtgttgcccaacaagatcaggtgttcatctcaaatttcaacgaagcagattgggaatgtttgtttttcttgtttctgttgttcttgaggataaagattatccttagcagttatgaaaaacgatatctttttgctgaatcatcaacttttgttcattctgaaatcctatgacagtgacaacagttctttggggaaaaaaaaatccagcttagatattctaaccttaaaaagttaacagacattctctattgtgaatttttttcctattatatttttgtttgtgttgtaaatcayagttacagtgtcgcatagataccagccttaacttaggcttgagaggtagaattctcttaactaacaattgagagggacattttctaattcaaatttagctttagagttatggcacataaaggagacccttacagaaaatttgattgttttataggctgagtaataaaaaccttcttaggcccacaatttagcacaaactttcaagtagctgtaaccgctcaatgggttcaccttgcccactgcctagacagagccaatt

SEQ ID NO: 404719 - DNA, 600 bp, Homo sapiens
ctgctggtcaagcttaagtaattgaagtttatactcccttctcattcagtgttgcccaacaagatcaggtgttcatctcaaatttcaacgaagcagattgggaatgtttgtttttcttgtttctgttgttcttgaggataaagattatccttagcagttatgaaaaacgatatctttttgctgaatcatcaacttttgttcattctgaaatcctatgacagtgacaacagttctttggggaaaaaaaaatccagcttagatattctaaccttaaaaagttaacagacattctctattgtgaatttttttcctattatatttttgtttgtgttgtaaatcatagttacastgtcgcatagataccagccttaacttaggcttgagaggtagaattctcttaactaacaattgagagggacattttctaattcaaatttagctttagagttatggcacataaaggagacccttacagaaaatttgattgttttataggctgagtaataaaaaccttcttaggcccacaatttagcacaaactttcaagtagctgtaaccgctcaatgggttcaccttgcccactgcctagacagagccaatt

SEQ ID NO: 404720 - DNA, 555 bp, Homo sapiens
aaactaacactggaacagaaaaccaaacaccacaggttctcactcataagtggaagttgaacaatgagaacacatggacacagggaagggaacaacacacaccacggcctgtwgggggatgaggagtgaggggagggaacttagaggacgggtaataggttcagcaaaccaccatagcacacatatacctatgtaacaaacctgcacgttctgcacatgtatcctgtttttctttttagaagaaataaagaaaaacaaaaataaaaaaataagtagatgttatttttctcacttgaggatctattcctagactgggtctgaaatgatactccttcatttaagatgtaggaggattatttcatttattttcaacattactagaagtaataactcagagctaaaatatgcatatttataaaattaagtataaattcatacctaaaaaagatattgttgtgcctgaataaaagtttctggttgtataacagatttatagggcaatactggaaatcaagaagtaggtgacagctttaatacatgatctaagaaaggttt

SEQ ID NO: 404721 - DNA, 555 bp, Homo sapiens
ggtacactataaactctgtgttttacacaaaatgytatatttttgtaaaataaaggcagtaataaaataactcaggaacaattgcatgacaataacccacattcagtacaagatagaacagttacgcagaaaataacaaggacaaaaacataagctaatgagacccaccagatatctatagatactcaactgataacagcagaaaacattattttcaagtacacatggaacattctcaggtatagtcatatacaagaataaattaaaaactataaaaaccatacaaagtatattttatgaccaaaatagtattaaattagaaaacattaacagaaagaaatttagaaaattctaaaatttgtggaagttaaacaacacactcagataattgatgagtcaaaaataatcacaaggaaatttaaaatataggttgagatgaagaaaaatgaaaacataatatgacaaacctaagagtaaggaactaaaagagtgctcagagagaaatttatgtatggaaaacatattaaaaagaaaagtctcaaatcaagaatataa

SEQ ID NO: 404722 - DNA, 568 bp, Homo sapiens
ttagctcacttgtttatgaaggctagaaatcccatgacaggccatctgcaagctggagaaccagggaagctggcagctggctcagtgcaagtccaaacacctcagaaacaaggaaggctgatgatgtaactctcagtacaaggcctaaggcccaagaacccagaggactgctcgtgtgagtcccagagtccaaaatggtagaacctggagtttggatattcaagggcagaagaaaggagtcctggctccaggaragcagttcattcctcccccatcttttggttccatcagtgcccacagatggtgagatactgccccattacactgagggtggatctttcctactcagtccactgactcacacaccagtctcctccagaaataccctcacaaacacacctggggcagaccaacatttaataaagagtaaaaccacctgtgtttttctttcagcagactagggacaggctcattacctactgaagaactgagaataaataagggattgccatctatctgagtctcccttaattgagtcaagttgacaccccacatcagccatgacaag

SEQ ID NO: 404723 - DNA, 585 bp, Homo sapiens
tgagtgattgtatgttagatatttattttccatatgaaatgaaaaaggaatgtgtgaccttcataaacatttacttgttaatatttgtaagtttctaattatgtgccagactgcactcagcctgagcagaaaggacacagagatgaatgttatggggccctgccatgagagaagggtaactgctgcagcaaagatgcagcctacttgtgctgaggcagagaggacatagcagcagttacctcgggggtcagggcagcttygctagaggaggtgctatttttcatgaagaaagaagatttcatcagattcagaaagaaggtagggggatcccagaaacaaaatcagctaaatcatttcagcagctgtcaatactgaaacatttttgtgtcaatctcttcaattcaggtatttcacaacatattaatgccaatctgtttaaatataggcaaagaaactcaagcatttttttcatagtccttccataatgactattgggatgctttctttttggaagacagtatctttacaaatctccgtgtccttatttactggtaccctaacaaatgcttgttctgccgtgttagt

SEQ ID NO: 404724 - DNA, 563 bp, Homo sapiens
agaatatgaaaaaaacatttttcaaagatatgcaaatgtcaagcaaatatgaaaaaatgtttaacatcactaatcatcagagaaatgcaaatgaaaatcaccgtgagataccatcttatagcagagaaaatggctattcttaaaaagttaaaaaacaccagatactggcaaggatgtggagaaaagggagcaattattcactgatggtgggaacgtatattcgtacaacctctgtggaaaacacaatggagatttctcagagaaatagaactctcctttgacccagcaatcccaccactgggtatctacccaaaggaaatataaattattacataaaaaagacacctgcacctgtgtgtgtatcacagcattattcacaatagcaaagtcatgcagtcaatctaagtgtccctygacaatgactggaaaataaagtgtggtgtatatatgctatggaatatcacatagccatgaaaaagaatgaaatcatgtctcttgcatcaatatgaatgaatctggagggcattatgcttattaaaatgactcagaaaattaaaaaccac

SEQ ID NO: 404725 - DNA, 576 bp, Homo sapiens
caatagcctcatcacaacacatattttctactataaaactttccactttctttgcctacctgtgagtctctgtcaaaacagagtgagtctggctgccttccttcctgtagcaatctctgcattaacaagtttctcttttctcatttaggtggtcttcttttatttctattccaataatgttacaataaaataattgataaatgaaaacataataaagattaatacaaatataaaagggcaaaaaaggaggactaaagaagcaaacaacatatggaacaaaggaaaagcaagtaagtatacaatatgtagagcagtaattacattaaatataacttaaytggacaaaaaaatctaattcaaaatcaaaaccttgtcagagagggttttaaaaaggagggacccaccaatatgttaattacaagttaaatataattacattttgaacaaagggcacacaacttgattgagtataaaatggtagaaaaatatatattatgcaaaacgaagcagaagaaatatgatgtggagaaattaatagcagttaaaatataatgtatgtttaatagaagtgaaagt

SEQ ID NO: 404726 - DNA, 576 bp, Homo sapiens
caatagcctcatcacaacacatattttctactataaaactttccactttctttgcctacctgtgagtctctgtcaaaacagagtgagtctggctgccttccttcctgtagcaatctctgcattaacaagtttctcttttctcatttaggtggtcttcttttatttctattccaataatgttacaataaaataattgataaatgaaaacataataaagattaatacaaatataaaagggcaaaaaaggaggactaaagaagcaaacaacatatggaacaaaggaaaagcaagtaagtatacaatatgtagagcagtaattacattaaatataacttaactggacaaaaaaatctaattcaaaatcaaaaccttgtcagagagggttttaaaaaggagggacccaccaatatgttaattacaagttaaatataattacattttgracaaagggcacacaacttgattgagtataaaatggtagaaaaatatatattatgcaaaacgaagcagaagaaatatgatgtggagaaattaatagcagttaaaatataatgtatgtttaatagaagtgaaagt

SEQ ID NO: 404727 - DNA, 507 bp, Homo sapiens
attcacttagcataatgtcctctaatttcatcccttttgttgcaaatggcaggatttccacatatgtatgcatgttatatatgtatacagatgtgtatatatgtatacacacatatgcatatatatgtacatataygtatacacattttatatatgtagacacattatatacatatgtgtatatacacatatgcatgtatgtgtactagttttatgtgtatatatacatacatatgtgtagatatgtgtatctatacatatatacacataaatatgcacacttgtttttatattttattttattttttgagagagagtctcactctgtcactcaggctggagagctgttgtcacaatctcagcttactaaaacctctgcttcctgggttcaagtgattctcctgcctcaggctcctgagtagctgggattacaggtggtgccaccacgcccagcttaatttttgtatttttagtagagtcaaggtttcaccgtgttggccaggctgg

SEQ ID NO: 404728 - DNA, 430 bp, Homo sapiens
cagaaagaacaacaccttgaacttacccgggaaacttccgcagactttattaaaaagaacttggtggaaataaataccacaagtcaaagagatgwaacgaccccatggttctgtaagcgatctgagtattttacaatctcccctgagctgtgaagtactcttttgctttggtgttatgaaatgtgaagaatattttatgcaaacactttggtcatctttttataaaagtaatcccattctgctaggctgtccaggaatctgacttttgcttataatattgcctataaggaaaaatgaatccatataatcatatttgcaatgtgcatttaatggcatataatcccttttaaacttgagcactatgcatatttgttatctattgctataataacctgaaaacatggattaaaacaatagattattattactt

SEQ ID NO: 404729 - DNA, 513 bp, Homo sapiens
cccttttctcattaggggcacactggcattgaatctatttctgtytccttattaagtgactcccagaatcccaggaattgtcataccattatttacaacatctccttaaaccaaatttgctactctttcacccatagatggttagcaaacattctgcttttgttattttcctaaaagcatataataaatcttttatggaaggaaaggaaaaagaacagaaaaaaaggaaggctataacaagcaaaagactttcattatttgaactactttccagtggcatatttctctttcttcatatacattttcattctggggaaataatgtcttatattcatagaaggcagactaaaggcccacaagatgccatatgtactccatggatattgtgaatataaataaattaacccagatgagctcgatatgatcacagagctcctaaaggcaggagaaaaagggcattttaagaaccagaaaggccccacatacaaagcctggcttgatgatgatgaagag

SEQ ID NO: 404730 - DNA, 603 bp, Homo sapiens
  misc_feature (1)...(603): n = A,T,C or G
cttaatagtattgcactgtatgtatgtgccagcatttgggtatacacatggacatatcgattgtctctaccgtggagcattgtgaataatgatgctacaaacactcatgtacacatatctgttcaaacccctgctttcaattatttggggtgtatactgagargtggaatttctggatcaaaccttgcaaaatttttaaaatttattgcagagatggggtctcactatgttgcccaggctggtctcaaactctnggggctcaagtgatcctctctccttggcctatgaaagtgctgatattacaggtttatttttctttcagcactttgaatatatcccctacctgccttctggctccaaggtttctgatgagacatctgctgataatcttattgaagatccctgtaatgtgataaattatttctccctttctgctttcatttttttgtctttggttttcaaaactttgattataatgtgtcttggtttttatctccttttgaatcttattttgagtttgcttatattcatgtctttcatcatatgtgtgttttcggtcatgatgtcctaaaacatccattctgcccctttctctctctcttc

SEQ ID NO: 404731 - DNA, 587 bp, Homo sapiens
aaatttaaggtcttctcaggtctttctctgaacatgaatgatcactttctaattttctctstgtgtgtgtgtgtgtgtgtgtgtgtgtatttaataccctgatctttttagttttgtttaaatatattaaaatattttaaatatatatttttatgtataataaaatatatagagaaaataaatatatatttgtatatacaataaaaatacatatttaaaacatgtttataataaaattatacattttatatataataaaaacatatatttaaaatgtttatgtatatatgttgtacatattttaggatacatgtgatattttgatacctgtatacaatgtgtaatgatcaaatcatgtaattgggatatccatcatctcaaacacttatcttttctttgtgttgggaacattgcaaatcttctaactattttgaggtatacaataaatttttgttaactataacttccctactgtactatcaaatgctagaacttatttcttctatgtaactgtttttgaaccccttaaccaacttctctacattctactccttcccttcccatcctctggtaaccaccaatctact

SEQ ID NO: 404732 - DNA, 579 bp, Homo sapiens
tcaatctattataatttagtcatcaaagtgatcataccaaaataactggagtacatgaatttttaatagatgtatgctttgtcaacacatgttatataaaataaatgggaagaaacatcagaattcaaagagtttgcctactactgagattgtaacatgtttgttaacactgcagcagagaacggtgtgcaaaagggagggaatcatggtgaaaaataggcagagtaggaaagaggaaggaaataatatttgttgattccttcatattttacagtattttaaccaaaggaatgtaataatgagtaaagtaatatattaagtatatgtctgtacaatattctgtgaggagatattagtacatttttttcagtttataaaatttaagatattattttcttaaacttacatttgtgtcagtatgattttctctcaagagggawgtgtctatgtacctgtgcttcttgaaagtgagttatgttattgtcagttgtgcctagtaaattatccttaagtatattcaacaaaagatagggaattgcaagttttagtactaccaagaagtagactagggcaaaaaag

SEQ ID NO: 404733 - DNA, 553 bp, Homo sapiens
gaaaaactcaagttgtggccaggatgactttgtctgttgggccttcaggctacctgctgagagactgratacaaatagatgctggccaaaccatatataaaaatagaggccaggtgccatggctcacgcctgtgatccaagcactttgggaggccaaggagggggttttgggggacctgccctgaaaatctcgtaggttcttttctattttcctaagcatcggctggcttgagaaataaaaggacagagtacaaaagagagaaattttaaagctgggtgtccgggggacacatcaaacattggtaggatccgtgatgccccacaagccacaaaaaccagcaagtttttattagggattttcaaaaggggagggagtgtgcgaataggtgtgggtgacagacatcaagtacttaacagggtaatagaatatcacaaggcaagtggaggcagggcgagatcacaggaccacaggaccgaggcaaaattaaaattgctaatgaagtttcgggcaccattgtcactgataacatcttatcaggagacagctttttga

SEQ ID NO: 404734 - DNA, 553 bp, Homo sapiens
gaaaaactcaagttgtggccaggatgactttgtctgttgggccttcaggctacctgctgagagactggatacaaatagatgctggccaaaccatatataaaaatagaggccaggtgccatggctcacgcctgtgatccaagcactttgggaggccaaggagggggttttgggggacctgccctgaaaatctcgtaggttcttttctattttcctaagcatyggctggcttgagaaataaaaggacagagtacaaaagagagaaattttaaagctgggtgtccgggggacacatcaaacattggtaggatccgtgatgccccacaagccacaaaaaccagcaagtttttattagggattttcaaaaggggagggagtgtgcgaataggtgtgggtgacagacatcaagtacttaacagggtaatagaatatcacaaggcaagtggaggcagggcgagatcacaggaccacaggaccgaggcaaaattaaaattgctaatgaagtttcgggcaccattgtcactgataacatcttatcaggagacagctttttga

SEQ ID NO: 404735 - DNA, 649 bp, Homo sapiens
atgtgagaaacatgaagctcaacattttctgtggagccacggtctataaccccaggagcaactcacttcccttacaacttctcttgggaaaaattcgttagcttgtcctgtgtgaaattaagtcccacagaattagaaaaataaatggagccaaactgttgtcatttgtcctcatttccatattacattaaagtacaggtcaccttaggaactctgacacgtgttcagagagttagaccctcaaagtaacagtgcattcctcggcaaattaattctttcagtatagtcgtttttgtatttacacttcaaactcagagtttagatatatgctagaggcttttaatcttcctcggtgatattgaaaatggtgaaatctaccaaaatgtatttataagataagcatgtttaaggaagatgtcttggtcagtggaacaagataggaaagcawgcagtttccagccttgttttttcctccataacccaactcagaaatatcgattctttttaacagcatttgattctgatgcagttctgagtgtacattcagaggcaaaggccatgtctacaagatgcaagtcatccaactgcagaagtaatggctcaaggcaggttattaaagcagccttgaaatccaatctgaccaaaattg

SEQ ID NO: 404736 - DNA, 538 bp, Homo sapiens
tcagaggtctaaagtggaatcaggaagccattctaagaagggctatttgcacaatctccaccttgcaaaaacagaaattcgcctcgaaactttgaattgggccaaacccgcacacccagaatatcatgaaaaatagctgacttttgttactgcagcaactcctaaatagcaacaagcaatgaactatggactcatgtactaagccagccacatccaccaatgataattctttcaaaacaacttttaaaacaacaaccatgtaatcaccatcagcatccctttgaaaatccctactccccttcatctcctcagaatacaatttggctttaagcgaaatctatgtctcttcaattgcaattgctaagaccccaacaaatgccttgtgttactgcattgcaatctggtcttttgtctcttcttagttgacactgwtaaatttaatttgcataaagtttttgttttgacagatggtgtcagaagtgggattcaaagtagaacttccaacaacttccaggcacatggagttatcaaaagaggt

SEQ ID NO: 404737 - DNA, 581 bp, Homo sapiens
attcaatcacctcctaccaagttcctcccacaacaggtgggaattgtaagagttacaattcaagataagatttgggtggacacacagccaaaccatatcagaatcactcatgctaagtgccacatattcaaactgaagctttaaaaaagcagatagattccaaaactgatggaaactaacaccaaatatttgtgaactccaaactgagatggaataagcccatttatgataataatagtgatgttgatgcctaaagtttttgtcaatctttcaaaattgagaatttgaccaaaaggagaaaattgttaagcttgacctagcagtgcctaaatattttaagtttggcctagagatttcttcatacttagtgaatgtaatctaacttcatgtggaaatacactgtaacctactcttgtracaagtagttaaatcttagccaatctcagccagagaactgttcaaacctggtttaaataaggcaaatacccacctgtaaccaatccagctgtttctatagctcacctccattttctgtaagaagttggtattgacatcttggacaacttgtttagcttctctgt

SEQ ID NO: 404738 - DNA, 581 bp, Homo sapiens
attcaatcacctcctaccaagttcctcccacaacaggtgggaattgtaagagttacaattcaagataagatttgggtggacacacagccaaaccatatcagaatcactcatgctaagtgccacatattcaaactgaagctttaaaaaagcagatagattccaaaactgatggaaactaacaccaaatatttgtgaactccaaactgagatggaataagcccatttatgataataatagtgatgttgatgcctaaagtttttgtcaatctttcaaaattgagaatttgaccaaaaggagaaaattgttaagcttgacctagcagtgcctaaatattttaagtttggcctagagatttcttcatacttagtgaatgtaatctaacttcatgtggaaatacactgtaacctactcttgtaacaagtagttaaatcttagccaatctcagccagagaactgttcaaacctggtttaaataaggcaaatacccacctgtaaccaatccagctgtttctatagctcacctccattttctgtaagaagttggtrttgacatcttggacaacttgtttagcttctctgt

SEQ ID NO: 404739 - DNA, 575 bp, Homo sapiens
ttttttctacatttgaatctgggaggatttaagcctgcagctgatatgtcactatgtagggtttggaattaaagctagcacaggatgtgaggagggaggcaacagaaccaagagtacaaagagactgtgatgatgcccttccagcctctggatctagtcatgcctgaagctaccagacttccctgatatatcagctaaggatattttttcttaattsaatcaatttgaggattgggtttcctatctattgtgagggacttttctattttagcattgtaagtcttacatcccaagaaactcctcatttctggaaaaactgggacagctggccactctatccattgtcaataaaaaggcaacactcaatgcaaaatgtatatatttccttaccgttgaggataaatgatattacagtattgataaaatgttgaaccaagtgcctcatttgacatgagacaggatttgacacaactgatgtgaaaaataagagggtagaacacagtcaaggcatgaaagaaagatgtcctctgcacaggaaccttacccctgagtatggaaaatgatggggtcaggga

SEQ ID NO: 404740 - DNA, 617 bp, Homo sapiens
acattttttattttattcctctaattataaaggtaatgcatctaccttattttaagaaagaaaatataaaaattatctatagttccatgactcaaatatacatactgatttttttcatcctcttatttttcttaatcaggacatttttgattataaacgatagatactcattcacactggacatgcttcaggtataacaaaacacaggactcagatgatgtacttagggctcattttcaggcccttcaactccgggctctgtttgcttgtgtgtaggttccatccacaggcaggttcttccctcttggttgcaagaatggttgcgcaggtccaggcttcttttttacatttaggcgatgttacrtagaaagaaaacttcttcccgacagctctaataaagtccccaaaatgaagtaactaacttggcttggctgagtccatttttaaaccaatcactaaccaaatagttaaactgtacttattttccaggactgggtcacacacatgaaatcagggcaggggatgagggtgtggcatcagagagcttttaccaatataatcctattattagaatttgggagaatgtatgccgagtagagaaaaataagatgtccatt

SEQ ID NO: 404741 - DNA, 551 bp, Homo sapiens
atgggctaggtttatacgcatgggaaatgatactgaccaaacacaccctggcagaacctctctttttcatctccttttccggttctgaatatccaagctgaactacaactctgatgacattacctaaacactcgtgcttccatatttccatgccttactcacgtaattttctctacctagtatccatcagatagatacagataaaaarcctcaggttgccagtatggcaacctccctataaattagtctgagtgattccatcagttagaagcgatttatccctctaaattcccatgaaattataaaagtctctctcataaagtgctcactatattttttgtggttttctggttatctttttaaacctcttatttcccaaaaataaatacaaatgatcatggacaaactaactgaaatccatacctgtaagaaacttacacagtcctttaactctgtaagtgtacatttcttataaacaggcccaatttagctcagtaaacagatgagtcactatctcagtctgcagaatgcagaaggatctgcattcaggt

SEQ ID NO: 404742 - DNA, 587 bp, Homo sapiens
taacatacttacagatcactgaaagagcatcttggttaagagttccagagtcagacgtgagtttgaatcctggctctgcagctcrcttactttgaagtgaatcattaagcctcagggctttttctgtcatccgaggatgattttaaaaaatagaatattcttcattgtgttataaaacctaaatgaaaaaaatctcatgtataaaacatttagcattgtgctgataaaatgctcagtaagcacaatgtcaacgctgatactgctgctaccactctgttgttattccataatcatagacaacagcctataaagggcattcagatgctgaagacttttttcacttgatggcaggcttcatacatgaatgctcttcttccttcctcccttctttttttaccttcattcaaaaatcatatgctgataatctggccaagatgtatattaggtgctaaggatgcaatcatgaactacacatctcttctccaagaggtcatagacaagtagagagacacataaattcataatgcattgcgataattacaatactagatgcacagtgtaaaatggtagcatgaaagaagcaatga

SEQ ID NO: 404743 - DNA, 587 bp, Homo sapiens
taacatacttacagatcactgaaagagcatcttggttaagagttccagagtcagacgtgagtttgaatcctggctctgcagctcgcttactttgaagtgaatcattaagcctcagggctttttctgtcatccgaggatgattttaaaaaatagaatattcttcattgtgttataaaacctaaatgaaaaaaatctcatgtataaaacatttagcattgtgctgataaaatgytcagtaagcacaatgtcaacgctgatactgctgctaccactctgttgttattccataatcatagacaacagcctataaagggcattcagatgctgaagacttttttcacttgatggcaggcttcatacatgaatgctcttcttccttcctcccttctttttttaccttcattcaaaaatcatatgctgataatctggccaagatgtatattaggtgctaaggatgcaatcatgaactacacatctcttctccaagaggtcatagacaagtagagagacacataaattcataatgcattgcgataattacaatactagatgcacagtgtaaaatggtagcatgaaagaagcaatga

SEQ ID NO: 404744 - DNA, 534 bp, Homo sapiens
agtcaaacctggctcccctacttagtacctgtgtgatcttcagcaaagtttttatgcactttgagcctctattccrtcatagaagaatggggattgaaattgcttggttgtcacaacaagatgatggtatggttgatgaaaaaatgccaacaagaacactgaaaggacataaactttctttatggaaatggaaacataaattatggacacattatacaaaatagaagacaaggcaggaggctcccagttgagaatattggcttctcaggtctttgtgtccccatgaggtcataaaaattgccaaagaattgcacaactcccgctgccaccatgagaaaattctgcaaagtgtgaagcttgcttctgctgttctcttgagtgtttttataccttcccacttgagttttctgccctggttgtgtatgcctgcccaccagacacaaatcatgggtgtataacaatcctagtacattcataagtgtttattatattagataggccattttcccttgtacattcctgaagtccattact

SEQ ID NO: 404745 - DNA, 592 bp, Homo sapiens
ggtggagcctaattcaatatgactggtgatgactggtgtccttactaaaaggggaagtttggatagtttggacatagacatgcacagagggtagatgatgaggacatgcagggagaatgccatgtaaacattaagatggccatctaccagccaaagagaaaggccgggagcagatcctttcctcacagtgcttagaaggaacaaactctaccaacaccttgatttcagactgctagcccccagaagtgtgagacaatatttttgttgtttcagccacctagtctgtggtactttgttatgacagctttagcaaactggctagcttcacatgtggtgtgtttagcctgcgtgaggtttttattttttaactacaccaacattttaaagtcaggaattctcacctaaaataatatgcttttcttgaaacaytgggagacatacagttctgaacttttgtttccatgtgatatgaccacttggagctgagtagcaactttctcttttagatggacatgtgtttgctagttcactatagtcttaccagttcatcttgcattccagaagactggattgattgttgacatttgccatc

SEQ ID NO: 404746 - DNA, 632 bp, Homo sapiens
taataatcacatcatggaaaattagctatttatccctcaagcatttatcctttgggttacaaacaatccaattatattcttttagttactttaaaatgtacaatttttattgaacattttaaaattatttcccccctgttgttctatcaaatactaggtcttattcattctttctatttttttttttttttgttttactcattaaccatccccatttcaccccactcccccacagccaccccttttcaccttcacactacccatcacagcctctggtaaccatccttctactctctatgtccatgacttcaattgtcttaatttttagatcccacaaataagtgacaacacgtgatgtttgtctttctgtatctggctaatttagcttaacataatgaactccagttccatccatgctgtgcaaatgacagaatctcattctttttatggctgaatagtactctattgtgtatatgtaccacatgttctttatccatccatctgttgatggacacttaggtkactttcaaatcttggctattgtgaaccgggctgcagcaaacatggaagtgcatggtatactgatttcctttctttgaggtatatacccaacagtagcattgctggattgt

SEQ ID NO: 404747 - DNA, 599 bp, Homo sapiens
aaaagttttctttctttccacactttagatatgtcatattaatccctctcagcctgtaaagtttccactaaaaagtctgatgccagatgttttggagctccattgtatattatttgtttcttttctcttgctgcttttaagatccattctttacccttgacctttgggtgttcgattattacatgccttgagtagtcttcyttgggttaaagctgcttggtgttctataaccttcttgtacttgaatgttgatatgtttctctagattagggaaaaagtgaggtgttgaagtttccagctattactgtattgagatcttcccaatctatctgttgggaagtgctctgatccctttcaacaaactttctaaccctctctctctctacttcctctctaaggccagtaactcttagatttgcccctttgatgctattttttagatcctatagggatgcttcattgtttgttgttgttgttgtttgtttgttgtttttatgagatagagccttgctctgttgcccaggctggagtgcagtggcataatcttggcttactgcgacctccacctcccaggttaaagcaattctcttgcctcagcc

SEQ ID NO: 404748 - DNA, 559 bp, Homo sapiens
ctggaggtattgttttggtggtcttgaataatttccagatgaattctctttatcaccaggcactcttgctctttttccttactttctcccaaacacacagagtctgtctatgctgagccacctggaacttggggtatggtgatgcaagcatctctgtggccaccaccactggaatggcattgactcagacctgaatctagcacagccctgggcttttcccagtgccyttccctttagtgtagcaagtttctccaggccccaagtgtgtccagagattctgtctgggaaccagaaactgcagtcaaaaaccttagcaatttacctgatgttctattctacggcaactaagctggtactcaaaccacaatacaaaatccttcctactttcctttccctttacacaggcagaggaacctctccctgttgcggtcataatcactggtccacaggtgcttctacctggccatcaccagtgttcacttaaagcccaagggctcttctgtcagcttgtggtaaatgttgccaggcctagaactcactcttcagagtagtgggctcc

SEQ ID NO: 404749 - DNA, 428 bp, Homo sapiens
ctacttacaagctgaatgtcctatgagttatttagtccctttaaaatttatttttatttgtttcacaatgatggtgatgatacttagagatgttgcatataaagcgcttggcacaggaaagccatatgatccacagttgttcatattttcccatccggatgggacaattcaaagctggtcatgacttgcatgggatgcagctccttccactgtcagggsgagcttcacagccactaaatcctctgacatttttatttcacccctaagctttcctgactttgcaggaaattagatgtgggttttgaaggatgctgtaaacactgggcctttttaggtggctttcaaagaagcaggaaaatacaggaagtcagaacaatattaaaaagacataaaatttaagccattgtcaatttctgctgttgtatcag

SEQ ID NO: 404750 - DNA, 428 bp, Homo sapiens
ctacttacaagctgaatgtcctatgagttatttagtccctttaaaatttatttttatttgtttcacaatgatggtgatgatacttagagatgttgcatataaagcgcttggcacaggaaagccatatgatccacagttgttcatattttcccatccggatgggacaattcaaagctggtcatgacttgcatgggatgcagctccttccactgtcagggcgagcttcacagccactaaatcctctgacatttttatttcacccctaagctttcctgactttgcaggaaattagatgtgggttttgaaggatgctgtaaacactgggcctttttaggtggctttcaaagaagcaggaaaatacaggaagtcagaacaawattaaaaagacataaaatttaagccattgtcaatttctgctgttgtatcag

SEQ ID NO: 404751 - DNA, 610 bp, Homo sapiens
tgggggaaaataatgtacaaccctgcctaccttctgaccaacttaaaagctgtttctctacagcatgctgaggtacatgtcctgttctgcaaaaacgtactgaataaagttgcttcatcttgtggaagcttccactgctcaccattctgctgtagagactgtcttactgttcctctagaagaaaacaatgtaatgcactagtttgtgttgaatatttctctgtcaccccatctctcctcacacttttgttaaagagtaaaaagaagacaatctccaggtggcagggaacaacgtcctatgaagaccttgcaaatctagaactagttgatcttacctttactgctttcactctttwtagaccccatagaactccctccatgatgattcctgagaagcccatattctctgcattgttccctgtacccacccttcacaaacacatgagaatacaggtgaccaaacctgagaaatacaatttttggtcactgcattggaatcagagttaaaatgaaaacgtatgactttacagatccatagagtatgttttagctgaatttctattttatggataagagcaacaagagacctgcgttctagtcctggttgttaa

SEQ ID NO: 404752 - DNA, 559 bp, Homo sapiens
aagaaggaaagaggggaaggagcaagaatgagaagaatggagaaagccagcctgaaaaggaggcagaagtggtgtgcttctgaatttgaggtacaccaaaaaagaagagctgcatcggtcgtggtgcaagagaaggaaactggacacagacggagcagatgctgcaggctgggtggccagtattacactgyagggaacacttcaaagatgcatgatctaaatctctatggttcctgaattacagggcagggaagttcataacgttgtttttcaaagtggatatgctagtgagagaatttatcattggaataacattttacagcgtagaatgaattccttttcttacaaccaggaaaccagtctgaactcccctcatccgaacccagtggaatgattccatccttcctttgaaaatccctttcaatttactttctaacgtaaattctccattcaactcaaaccctttagtgtatggttcaaaacttactttgtctgtcatcgcacggtgtccttctctcactcctacatagcaagaaattctcatcctatccccgtagcc

SEQ ID NO: 404753 - DNA, 498 bp, Homo sapiens
gattaagatacaaatttgattcaagctcaatagaaattctaattatatggttttaatgtacttagtaaacctattccaaaactttaagttgactaaaaatagctaaattaactataaaaatagtaaaaaggggaagcttgcctctaccagatatcaagacatatagtaagactgtagtaatataaatagcgttttattggtgtaaaaacaggcaaattgactaatttgataataagtagctctggaacaggctcattagcatgtgacatctaaatatatgataaatttggcacacgaaattaatgggaaaaggacaaattatttagtagacrgcaagagcactactggttcattttcatgtgagaaatgaatccagatctttatctaacaccacatataaaacattgaaatctggaaggattaacatcgtaagtgtaaaacataaagctataaatttaatgggagctttgccccgcgtttaaaattaaaaaaaaaaag

SEQ ID NO: 404754 - DNA, 550 bp, Homo sapiens
aaattttctttctcttttcttgaactggaatatctatcttctcctgccctcagacattggasctccttgttctcaggccttcagagcatgccaatttctacaataaattcactgatacacacacacacactcacacacacacacagcctattgattgtgttttttctggagagccctgactaatatgaaaatcaagattcttctttacaagttattcaccaacaatagaggactgctcaataaaagaatttcacttcatttcaacaatctcgttatcacttataggatattttgtcactcacacacacaacaacaatgaaatctaaccttggtattgcaaaactcataaatttaaaaatactctttagcaatttgtgtaggaggtttgtggcctttattgggaagaataacaccaagcctttgtttagctgtcaatcaagggaacaattaatgtgaacgctagccagtctattgttctccttcacaggccaacagtctttcagtgaatatcacaaaaggaatgcacaggtgattaaacaccaagtttcac

SEQ ID NO: 404755 - DNA, 550 bp, Homo sapiens
aaattttctttctcttttcttgaactggaatatctatcttctcctgccctcagacattggacctccttgttctcaggccttcagagcatgccaatttctacaataaattcactgatrcacacacacacactcacacacacacacagcctattgattgtgttttttctggagagccctgactaatatgaaaatcaagattcttctttacaagttattcaccaacaatagaggactgctcaataaaagaatttcacttcatttcaacaatctcgttatcacttataggatattttgtcactcacacacacaacaacaatgaaatctaaccttggtattgcaaaactcataaatttaaaaatactctttagcaatttgtgtaggaggtttgtggcctttattgggaagaataacaccaagcctttgtttagctgtcaatcaagggaacaattaatgtgaacgctagccagtctattgttctccttcacaggccaacagtctttcagtgaatatcacaaaaggaatgcacaggtgattaaacaccaagtttcac

SEQ ID NO: 404756 - DNA, 550 bp, Homo sapiens
aaattttctttctcttttcttgaactggaatatctatcttctcctgccctcagacattggacctccttgttctcaggccttcagagcatgccaatttctacaataaattcactgatacacacacacacactcacacacacacacascctattgattgtgttttttctggagagccctgactaatatgaaaatcaagattcttctttacaagttattcaccaacaatagaggactgctcaataaaagaatttcacttcatttcaacaatctcgttatcacttataggatattttgtcactcacacacacaacaacaatgaaatctaaccttggtattgcaaaactcataaatttaaaaatactctttagcaatttgtgtaggaggtttgtggcctttattgggaagaataacaccaagcctttgtttagctgtcaatcaagggaacaattaatgtgaacgctagccagtctattgttctccttcacaggccaacagtctttcagtgaatatcacaaaaggaatgcacaggtgattaaacaccaagtttcac

SEQ ID NO: 404757 - DNA, 621 bp, Homo sapiens
acgtacaacatgcaaaatcagtgttaatcaacagtttatgttattggcaaggcttcaggtcaatagtaggctatttgtagttaagttttctagttaaagttgtatgtggattttcacccgcttgggggttcggcacccctaagctctgttttgctcaaggtcaactgtataatttttcagccttggcccattggcaaayggacagaaacatttgtaaactttgcaactacaaagaaaagtacagtttgggggcaataaaaagttaaaatttcttttggatattgatagaaacttcaaagaaagatgatgcaagactatgaatacaaataagttttaaaaatcatgtcaaagatgattccttttattgttcttagaacactgtaatgtatagaataaactcagttttaaatgtatttggaaatgtttttgggttttatgtcatgtcaatgtctacatagaaaaatgtcctttttgttgtttaagttaaactttaagtgtaaagagctgagctagtcatcttaagaacactgacataatctatccctgcaggtaacagtggagtttaattcaccttttcccccaaatctttggtgtccagtcccattctctagttcaaagata

SEQ ID NO: 404758 - DNA, 621 bp, Homo sapiens
tgcaactacaaagaaaagtacagtttgggggcaataaaaagttaaaatttcttttggatattgatagaaacttcaaagaaagatgatgcaagactatgaatacaaataagttttaaaaatcatgtcaaagatgattccttttattgttcttagaacactgtaatgtatagaataaactcagttttaaatgtatttggaaatgtttttgggttttatgtcatgtcaatgtctacatagaaaaatgtcctttttgttgtttaagttaaactttaagtgtaaagagctgagctagtcatcttaagaacactgacataatctatccctgcaggtaacagtggagtttaattcaccttttcccccaaatctttggtgtccagtcccattctctagttcaaagataaccaatataaagcgctcaatatatgcccttaaatattatkaatagtatgttcttataagataacaacttagtttttatatgtgtgttttaattcacataaattatattatgttgtaacctatcttttttctaactcaatacttttgttgtgatctacccatgtaactatgaacatctagtttgtgttccctactgatgcccacagtgtgttagtgaacaac

SEQ ID NO: 404759 - DNA, 657 bp, Homo sapiens
aatggttgttacactttactttccatcaacagtgcatacaatttcctatctcttaaagtcctgacaacaaatgatagtctcaatatttctattttttgccattccaatcggtgtaaagtagtatctcgttgttttaatgtttattcctgtgatttccgatgagctcaagcatatctttgtatactcttcagacacctgtgctgccatttctgcaaattgcctggtcactctgcctattttttctactatagttttctgctttattttgctaatttggaattgaggcatatctcagaaattaatttctctttaattttaaatattaaaratatattttcccaacacatcactcatttgttaacactgcctaaggtattgtctcaaataaagacccaaaaatgtatataattatttcatttgatgattttgtgcattggaatcttgtttaactagcttttcaccacttttaagtcattaggatattcttgtacaaggcattctattatacaggtaccgtttgaagtatttcacacgccctagcatgtttaggtctaggaactacctccaagcaaataagatcgctgttgttgttgtccccattttacagatgagaaaactgaagcatcaacaaattaaataacttgcccaaaattacat

SEQ ID NO: 404760 - DNA, 571 bp, Homo sapiens
tgagactttttataattcttcatgtttcccttttttgcttcagctatttggaagctgaatacctgacaaaagctcaagcactgtcaccatataatccttttttttttttttacaattttattctcttccatcggtgttacttctgttgtctcagttttcatgattattgatccgactgaatatgtgattttattgtgagccgtatgaaaaacttataaattataaaaacaaaatgttaaaggttttacctctattattcctggtgtcataaattgccagccacycaatcaggtgttattttgtatactatatttgcatattatatttataacatgttgtaaataaatattaaatttatttaagactcaagaatattcaaatatatttgggtggaaaacaattgcccttgattgacaaacttatatccacaaaaacactacttttctagataattatctcattcactttttaaaaaataaacagcagtattaaggaaagggataccttgtttactagttggtaggtacttgtaggccctttgcatatgttgactcatttgaactccaaaacg

SEQ ID NO: 404761 - DNA, 595 bp, Homo sapiens
gtaaataaatattaaatttatttaagactcaagaatattcaaatatatttgggtggaaaacaattgcccttgattgacaaacttatatccacaaaaacactacttttctagataattatctcattcactttttaaaaaataaacagcagtattaaggaaagggataccttgtttactagttggtaggtacttgtaggccctttgcatatgttgactcatttgaactccaaaacgacccccaaaagtagacatttttatagtgttaagaaatgggctgagagaggttaagtgatgagtccatggtcacatcactgataagtagaaagatgggctttaagctcagtttagtctcrccccaaagtccaagatccctccatgtgacaggtttgtagtctaattagtgtcacataaagtgtagagaaatgctctagattttccaaaatcccatagcagagcagaaaataaacaaaacaatgcctagactccaaggcctccacagcaagcaggaaatcacatcttcccattgtctgggctagccaaagagcattttgtaggggcctgcctgccagggtccatttcagtggtgtcccaccca

SEQ ID NO: 404762 - DNA, 595 bp, Homo sapiens
gtaaataaatattaaatttatttaagactcaagaatattcaaatatatttgggtggaaaacaattgcccttgattgacaaacttatatccacaaaaacactacttttctagataattatctcattcactttttaaaaaataaacagcagtattaaggaaagggataccttgtttactagttggtaggtacttgtaggccctttgcatatgttgactcatttgaactccaaaacgacccccaaaagtagacatttttatagtgttaagaaatgggctgagagaggttaagtgatgagtccatggtcacatcactgataagtagaaagatgggctttaagctcagtttagtctcaccccaaagtccaagatccctccatgtgacaggtttgtagtctaattagtgtcacataaagtgtagagaaatgctctagattttccaaaatcccatagcagagcagaaaataaacaaaacaatgcctagactccaaggcctccacarcaagcaggaaatcacatcttcccattgtctgggctagccaaagagcattttgtaggggcctgcctgccagggtccatttcagtggtgtcccaccca

SEQ ID NO: 404763 - DNA, 584 bp, Homo sapiens
ccgaaagaggcctgtctcactgagaggtgccatccatgcccccatccagatccacattcccctccagaaggaaaaagtgaggacataggtcccaccttcagattcccaccttcccagtagctcctcaagattaagttctttcacagcttctacctgatcagtaggccaggagatggtgttttggccaatgattttcagtaacacagccaattcttgaaaccttagtgatcacacaattccatccatgattaatctcacggtgagaaagaactcacttttcaccaagcatccaccaatacacagacacttgatttaattctcacaaccttttgagataataatatataagcttctttaagcataagaaattaaagtggcctagatgtcactttgctagttaaaattgaagctaagaatggtactgaggcattctgtttcacagttcaayattctttctgctacatcacaagaacttgactcattcattttcattcagtcattcttttatgaactcatttaagaaacatttctttgagtgcctggtatgtgctgcacatggtgcagatcacagagatacagcagtg

SEQ ID NO: 404764 - DNA, 584 bp, Homo sapiens
ccgaaagaggcctgtctcactgagaggtgccatccatgcccccatccagatccacattcccctccagaaggaaaaagtgaggacataggtcccaccttcagattcccaccttcccagtagctcctcaagattaagttctttcacagcttctacctgatcagtaggccaggagatggtgttttggccaatgattttcagtaacacagccaattcttgaaaccttagtgatcacacaattccatccatgattaatctcacggtgagaaagaactcacttttcaccaagcatccaccaatacacagacacttgatttaattctcacaaccttttgagataataatatataagcttctttaagcataagaaattaaagtggcctagatgtcactttgctagttaaaattgaagctaagaatggtactgaggcattctgtttcacagttcaacattctttctgctacatcacaagaacttgactcattcattttcattcagtcattcttttatgaactcatttaagaaacatttmtttgagtgcctggtatgtgctgcacatggtgcagatcacagagatacagcagtg

SEQ ID NO: 404765 - DNA, 502 bp, Homo sapiens
caaaaaagggcttgtgccattcaaggaactggaagaagttaaatttgatcagagcatcctctgattgctctaaatcacatcaatttcctaataaatgccagccgacagaccccatcatctaatgagaaaaaaagaagacagggattcaggccagaagtttatttcatgaatgagaatatgcttttccctggagtggcctctgtgtgaatagcatgcaggagcaaggaaagaaatgacttcatactcaagaagcacatgacaattcccatcaagtccctgttaaggggatgaaaataaagttaaattcctgacaccacatcttactccatctatcattattttagccatcacactggcccaactactcttctccttttaactccagaattaatgasatttaaaagttattcttttatgtaatgtatataccaggggtcctaactgatatattccacttaagcccaaagaaagctaactgttggcattctctagccttccaata

SEQ ID NO: 404766 - DNA, 531 bp, Homo sapiens
ttggttatatccagagcaaggaccctttgggctattaaccaaggaagagaacatcagaagagaaagaaatgagaactttccaccccctcttcctgaactatccttttgctagcacacaaaaccaggccaagaattgcctcctgaggctagagagggtttgattgtacttttttggctgtttatgtggttttactgctttatattttcacatgcctttgtggaagggaagaggaaatatagtcctgagagtctgttctcacgaagaggaagccacagcaaatcctgatagaggcagaaaccccttgggtcatattttcccttgctctgttgtaggaggaaaatacttgagtgactgggttcatcttctcacataaataargagttctttatttggaatcagtgttgaccaactagggcattggaaagcacagtatattctcacttaagggctaatataatccagtggagtgacatgaattagttagtggtacacaattctcagagaaagtcactttatgagttcttctattt

SEQ ID NO: 404767 - DNA, 588 bp, Homo sapiens
aatccccttactgagatccaagggtctgtttacaaaagccgtatcttaaacttgttcctctgtgaagtacaagtgggatttgtactcctctgtataaactggtcccctggagcgacactgcattctctccttgctggatttctctatttcatggaatgggaagagaaagcaaacagcatcatayagagttggttataaacgtctctcaggaaccaacccctctaacaataacaataacaacagtaataataatagtcccaaaccactatctcccagagcaaatgggaacttaacaggaaaaatgagatgaacaccagaagagaaatagaacagtttatgtgcaatgttctaggcagcagacaggagccagggacattggaaacagggctgaaaaacaaaagaaaccatttacaacacaaagtaaaagtattcaggacttaattcaggattcaggaagagctaccaggacatcaagtttatgggattccaatgtggtctggttaagatatttaggaccaaaccacacccctgttatcacaaatacatcatggtggctttacaatgtgtcagcttggctcagctgaacta

SEQ ID NO: 404768 - DNA, 588 bp, Homo sapiens
aatccccttactgagatccaagggtctgtttacaaaagccgtatcttaaacttgttcctctgtgaagtacaagtgggatttgtactcctctgtataaactggtcccctggagcgacactgcattctctccttgctggatttctctatttcatggaatgggaagagaaagcaaacagcatcatacagagttggttataaaygtctctcaggaaccaacccctctaacaataacaataacaacagtaataataatagtcccaaaccactatctcccagagcaaatgggaacttaacaggaaaaatgagatgaacaccagaagagaaatagaacagtttatgtgcaatgttctaggcagcagacaggagccagggacattggaaacagggctgaaaaacaaaagaaaccatttacaacacaaagtaaaagtattcaggacttaattcaggattcaggaagagctaccaggacatcaagtttatgggattccaatgtggtctggttaagatatttaggaccaaaccacacccctgttatcacaaatacatcatggtggctttacaatgtgtcagcttggctcagctgaacta

SEQ ID NO: 404769 - DNA, 588 bp, Homo sapiens
aatccccttactgagatccaagggtctgtttacaaaagccgtatcttaaacttgttcctctgtgaagtacaagtgggatttgtactcctctgtataaactggtcccctggagcgacactgcattctctccttgctggatttctctatttcatggaatgggaagagaaagcaaacagcatcatacagagttggttataaacgtctctcaggaaccaacccctctaacaataacaataacaacagtaataataatagtcccaaaccactatctcccagagcaaatgggaacttaacaggaaaaatgagatgaacaccagaagagaaatagaacagtttatgtgcaatgttctaggcagcakacaggagccagggacattggaaacagggctgaaaaacaaaagaaaccatttacaacacaaagtaaaagtattcaggacttaattcaggattcaggaagagctaccaggacatcaagtttatgggattccaatgtggtctggttaagatatttaggaccaaaccacacccctgttatcacaaatacatcatggtggctttacaatgtgtcagcttggctcagctgaacta

SEQ ID NO: 404770 - DNA, 568 bp, Homo sapiens
atgtttgtttttgataaagtataggatctggagaggttaaaaaaagagaaaagagagaaacaggcaaagaattagattctctgctcaaactagacaactggtcatgggacaagattctgggcatctcagtcctcagttttcttacctaccctggggagttatcaggttaatcttagagggagtcagcctgagtaagtaattaggtgatactccctagtgctttgaacatcatacaaatggcaaccactgtttatcggccaaatgscatcattaaaccctagcgatacgtacacagagaccttggcaagcaaagggaaaggaactaaaataagcataagctataggattgtccctaagaaggttaacaatcctattgggaagatgtgatttttagtcaaggaactatttcagccgcagtccttgaaactgttatgtagacccattgtgaatctactaaactgaagtaaaatgaaagtaggtaatctggcttgaactactgagccaatatagaatcagagcatttctactcaaatcctcactccctgccaccctggaatagtgcaacact

SEQ ID NO: 404771 - DNA, 555 bp, Homo sapiens
aacaaattttaactttagggaatttgttttcagtgttcttactccaggaattatcttctctcatatactgtcatagacttgtccttcactccatctaagactttatctaaatgtcttctccttagaggatatttctgatattccagtctgaaatacatttgcagtcactatcttttccctcactcctgatttatttttcttcaagacctttttctaaaatatccaatatagtatatatttgttagtttatttgttttctgaatctcccactaaaatcaaagctatsagagaggaaaacttttggctttttggtttatccctgtattctgagagcctagaggagtaactagaaccacagaaagttctctttagttattgattgaattgactaaataaatatattttgttgaacttttaaatctatacatagtatagctcttcacttctgtccttttacaaatttaaataatgttctgaaacctatagtgattttcagcaatagagttcttagagctaaagtgctttctgatagtgagaaagagaataagaaaaaga

SEQ ID NO: 404772 - DNA, 562 bp, Homo sapiens
agttcactcttgggttttttgtggtggctcaataaatattggcaataattggcttaactattggaataatgtatctgtaacctcttcagtcaagggcagagacttrgtgtgccaaacagaaagaactgtcatttattgagctcctcctctctatcagcaattatgtctttttaaaaaaaaaaaattggttatgtatttctaataatgacatcatcattgtgtcctcatttggcagctaaagaaaccgaggctcaaacatggtgagctgcttgctcaagagaaaattgctattaaaagcaaggtttatccagcactaggattaccaacatatatgcgcaataaatgaaattaaccactaaaaatatttccattgtatcagagatagtctccccaaaaatcaatggaaatggcccataggaagtctttcctggtccttctttcaggtaaagcacgaatcttgtccctttctgggtggtcagaatctccctgtttggctcttggattccccagaaagttcaggttgcctgggtggagaggagtagggcagcagcagattccatct

SEQ ID NO: 404773 - DNA, 577 bp, Homo sapiens
ttaaaactttgcacccatatcacagtttgtcctcatgacctaaaggaaaagatctgaaatcaattcaaattattaagtgaattgaatttctttggaaacaaacaccatttagaaaatcttattctcatctacttttccaaataagatatataatgtactatttctgcttagaacttataaaartcttttatgtaatttttttcaccaggaaccctaaagctctcatagctcttgggagcatcagaagtagcaaaaccaatcaaatttcaaatacctggtatcctctatcaatttttagaggcttgataatggtagcttaggaatttttggataaatagagcagatagtgaattcttggaaatccataggaaacaaaatgactattcatagaaccaaataaaagccttccgttagaaactaaaaaaaatcaatggtgttttatgtgtttatataagcaaaatgcaaaggagaaaaaacagcaaataaatgaaaattagaagaaaaaaaaacaaagaggaaaccactccccaatttttctcttacttggtttacccaggaggctatagtattgcccaga

SEQ ID NO: 404774 - DNA, 587 bp, Homo sapiens
aaaattaaactaaggacttttttttaaagttttaaccagagaaagtaatatgatcagaacattgttttaggaaaattaatggtggctgttgtggaagatggattgaacatagataaataagctattggaatagttcaggcaaggatattaaggggcggtattcaggcatggtagtgttaatgaaaggagaagggaggatgsatgggagaggcttcagtgggaaagttaaaagacttgtctgatgggataatggggatgtaggaggcatgaaaaatcccaccaaggttttgcctgcttttatgaaacaatggaggctggtgaaatgtggggcaaaagagatgtttggtttagacatttgagtttgagatgcttatagattatcaagacataatgctaagtaggcttttggacacatagaactgtagattagggtaaagaggaaagcttagaagttttactaccgccaaaaaaaaagttgattattaaagtagtgagagtatgtagatagtgaaaagttattaaagaattaaactctggtgaaggtcttgctcagcaagcaagaggagaaagacaaagatttttaagga

SEQ ID NO: 404775 - DNA, 587 bp, Homo sapiens
aaaattaaactaaggacttttttttaaagttttaaccagagaaagtaatatgatcagaacattgttttaggaaaattaatggtggctgttgtggaagatggattgaacatagataaataagctattggaatagttcaggcaaggatattaaggggcggtattcaggcatggtagtgttaatgaaaggagaagggaggatgcatgggagaggcttcagtgggaaagttaaaagacttgtctgatgggataatggggakgtaggaggcatgaaaaatcccaccaaggttttgcctgcttttatgaaacaatggaggctggtgaaatgtggggcaaaagagatgtttggtttagacatttgagtttgagatgcttatagattatcaagacataatgctaagtaggcttttggacacatagaactgtagattagggtaaagaggaaagcttagaagttttactaccgccaaaaaaaaagttgattattaaagtagtgagagtatgtagatagtgaaaagttattaaagaattaaactctggtgaaggtcttgctcagcaagcaagaggagaaagacaaagatttttaagga

SEQ ID NO: 404776 - DNA, 530 bp, Homo sapiens
caacttacatgaggtacctagagtagtcaaattcatagagatagtataatggtggtctcaccctggggagarggaggaatagggaattattatttaatcagtgcagagttttttagtagatgaaaaagttagttatagagatggatggtagtgatggttgcatagcaatgagaagataccagtgccactgatctgtagacttaaaaatggtgaaaatgtacattttatgttgtgtgtatcgtactacaataaaaaaaatttatttatttactgggggaattttaggaagatggaggcctcaacttcatcccaactctgtccaaactgcttccctggaaaagtgaacaaacttagggcacctgcaggatctctttaggcattctacgatctccagggaaagaacaggttcaggctccatctctgtggcataaaaagaaccatcatcaggagaaagcttgctacctgtagaagtcaggatcattttggaggagggagcctggtcagcccagtgaatgtctgcagaaaggggc

SEQ ID NO: 404777 - DNA, 547 bp, Homo sapiens
gtgagctcaggatacagcagtgcggaataatgtcctcatgtttaaagttctaaaataactttgggtttcagaagagagtggagaaaagccaaggtgctacaaattatacttggtatctagatttcttaaagctccctgcagccaaagttaaaaatcactaccttaaaggaagcaggaaatcgctacagtctcaaaaaaaaaaaaaaaaaaaaagtcgcctggaaataaatgtaaacctgacagataaaaaaaatcagccatctggaaaattctgttatgaggaagtagaaaagtaaaataaaatatttagacgtgtaacaaatcttccaattccctaaggactgaatcactagctctccacccaccaacaatcacgcacaaatgcagaagcttttaatcagtacttgtttcatcagctattcagcctgtaatgatttcttttgaacttcattttatcygaccatctctccctgtccaggaaacagagtcacccctctcactgtggcttagcagggccacctgaaggagaaatgtgatggcactgtcc

SEQ ID NO: 404778 - DNA, 543 bp, Homo sapiens
ggtatatgtggtcagtgctgagaattttctattgaattcatgtatctatattttttgagacagggtctgtcacccaggctggagtgcagtggtgagatctctgctcacttgcagcttctgcctcccgggctcaagagatcctcccacttcagcctcttgagtagctgggactacaggcatgtaccwctacacccaactaattgttgtattttttgtagagacagggtttcactatgtttttagagatgggggtctcctgtgttggtcaggatggtctcgaactcttgagctcaagcctcctaaagttctgggattacagccgtgagccactgttcccagcccaagttcatatatttcttatcaagagcttttttgatatttatatttatagacattgcttcacaaatttttccacagatgcatgatatgggggaatgtatgcatatttaaaagtgtttggaatataacaagcatgacacttcttttaagtctcttctgttttatctaaaattaatgtgaatttctcattctgtttcagaaaca

SEQ ID NO: 404779 - DNA, 487 bp, Homo sapiens
ggtgagttgggtggggaggatcattcctaactgacagcaaatagtttatggcacataaagtaaaatgcacaactgacagaatgaaacaagatgttgaagaatgggctctgcctacagaagatcccttcagtccagcccaaagacttagtcccagaagctctggtacagacaagctctagtcccaaatgcaacactaaatcctaaaaaagctcctgagtccagcctgagacacgtcattttgctgmcatcgaattatgcatgagccatgaaaggtgatggtcatggtatctaggtgacaagacgataactcatttgcctgcttgttcagaagagcgatggagtctgagaaagtaaaatgtcagagtggtgtatgctttgtttgtttgggggtttaagatacaaagtcatccgcagtctttctttttctaacctaatgctatagcaaacagatgctacagcgcctactgtacctggtatctttcagcag

SEQ ID NO: 404780 - DNA, 579 bp, Homo sapiens
tctttccaaaactttatttaaataaaattataacaagaccatcttaagcctcgtcatcctggccatttctcctcagtgccaggtgctgcccacactgcccacgctgacctycagagttcccaggtctgggctcaagagacctcctcctccagggagcactcctgggtcagctgtccgtcttctgtgtttccatggttcccagcttcctgtccgctccccaccagaatgagatggcagcagggacacagtgtccaatgcataaaaggcattcaaatacttgggggaatccctgactcgttcagggaaatcttgtggctgggacgtgaaaggggaaagggaggggcagtatagcaaaaagtgcagcctgcatgacaaaattaaaatctgaatgtacattttagcaaactaaagcagaacaaagatgagttttattgcatttatttctactacgtgatttaacacatcactttttgcacacatggtgctttttatttcaacactatttaaaatgtattaatcatcagtcatcacaggagccactgaaaagctaattttatatggaattttaacaacaagata

SEQ ID NO: 404781 - DNA, 579 bp, Homo sapiens
tctttccaaaactttatttaaataaaattataacaagaccatcttaagcctcgtcatcctggccatttctcctcagtgccaggtgctgcccacactgcccacgctgacctccagagttcccaggtctgggctcaagagacctcctcctccagggagcactcctgggtcagctgtccgtcttctgtgtttccatggttcccagcttcctgtccgctccccaccagaatgagatggcagcagggacacagtgtccaatgcataaaaggcattcaaatacttggggraatccctgactcgttcagggaaatcttgtggctgggacgtgaaaggggaaagggaggggcagtatagcaaaaagtgcagcctgcatgacaaaattaaaatctgaatgtacattttagcaaactaaagcagaacaaagatgagttttattgcatttatttctactacgtgatttaacacatcactttttgcacacatggtgctttttatttcaacactatttaaaatgtattaatcatcagtcatcacaggagccactgaaaagctaattttatatggaattttaacaacaagata

SEQ ID NO: 404782 - DNA, 506 bp, Homo sapiens
caatcagggcccaaagacaattgttttcaaagctcaaaaaatttcagatctcaaggtaggagttcatcattaaaaggtaggcaaagccaacaagtaactgtcacattggagagctgactgctggggtccagttcaacatgrcatccagcaggcaggtctccactgattcctactgaacagtggaagtacccatgaagacacaaaagtgatgcatgcacactgacagtctgacatcaggactaggaaagaagtcacacctgtggccagactttgcccttcccagtcctgactccaagccagggcctaccaggaacctgggcagtgggcaccctctgccctgtggaatatgcaaatacctgcctccatctccctaacaccagactgcccttcccaaatccagaaagggaactcgaggctcagatgacaaacagccaggcagaagaggcatcgaccatcagcaagggacatcttagaagatgggagtccctgagataaagacagaaaaa

SEQ ID NO: 404783 - DNA, 552 bp, Homo sapiens
gaagtcttaaaatttttttaaaaggagtgatcccctctaagtatttgtaaaagctcttataagtgtacacagaaagtaaattttactgcacataaaatttttttaaaacaacactgacataacattttacatccaccatactgaataaatttagttttaacaagtcaatgtatctgacagcatcctttttttttttttttttttcttgaggcagggtstcactctgccacccaggctagagtgcgctggcacaatcagagctcactaaaaccttgaactcctgggctcaagtgatcctcctgtttcagtctccaaagtagctgggactataggcgtgcaccaccacatccagaagcagagtatctgaaaaaatgtatcggcagatgtgaaacacttgcggcttttctgaaggataatttacctatacatgtatcaaattttaaaaggtcatgcactgtgcccatcactactactgctaagatgttttccccaagaagaaatttgattgcagtattgcttataatagcaaaaaattaaaaataatcaaaatgt

SEQ ID NO: 404784 - DNA, 552 bp, Homo sapiens
gaagtcttaaaatttttttaaaaggagtgatcccctctaagtatttgtaaaagctcttataagtgtacacagaaagtaaattttactgcacataaaatttttttaaaacaacactgacataacattttacatccaccatactgaataaatttagttttaacaagtcaatgtatctgacagcatcctttttttttttttttttttcttgaggcagggtctcactctgccacccaggctagagtgcgctggcacaatcagagctcactaaawccttgaactcctgggctcaagtgatcctcctgtttcagtctccaaagtagctgggactataggcgtgcaccaccacatccagaagcagagtatctgaaaaaatgtatcggcagatgtgaaacacttgcggcttttctgaaggataatttacctatacatgtatcaaattttaaaaggtcatgcactgtgcccatcactactactgctaagatgttttccccaagaagaaatttgattgcagtattgcttataatagcaaaaaattaaaaataatcaaaatgt

SEQ ID NO: 404785 - DNA, 579 bp, Homo sapiens
tttcaccttgtgtatgatcgcttccagttaaagatctcctccaggttggaagaggaagagacttcccgcctctgcaaggctcccccacgacgacggcccccaaggaaggaagctctgtgcctgctcagccctttaatcctctcctccgttcggaagaactcagtcaaggcccggaaggactccaagatgacctcatggctccaggctggcaagggctcctggcgcaggaagccacagtggcctccgtggcgactgagcaggaggaagaagtaggggttgctgtggaagagttcagttgtcagagtgtggtctgggggtccacacacggggtcgtcagcactgcagatacacagcacaggcacggctgcctcatcgacatcccggagcgggtcgttgcggtcccagtaggyatcccagctgatggggaagcttttggtgtggcagaagagagcctcctcaaactctcgaagggaacggctcctgaacagtctgctggtgtccacagtgtcctccagggctgtggcatacctggcagcgaggtgtttagtggggaaggtgggaaagagagggaagaatgag

SEQ ID NO: 404786 - DNA, 632 bp, Homo sapiens
caagactccatctcaaaaaaaaaaaaaaaaaaaggtaaacatggccaagccaataaaaaaatcttattcagccatttaaatgatgtctgcaaaaccagtattaatatggaaaaatgtttatggtgtgttgaacaaaattttaaaagamaaatcctacttgaagtaatgttagtagtggctatgttaatgtgataggttgatttttttctctgtttcttttttaaaatatggttttattcatttcataatggaaaaatgcatacaattatttagtatttaaaagagtaaaagaacaataggatggtacatctatagtgcttcaagatgttacttggtttttatggctaatattttgcctttcaagcaaagtatgtgactacaaggcaggctggggtcaattagcaatcactaagaccctgtacctctctacaaaaactttgtaaaatcttaaaagctgtgatttctgcactttatgcttgccggttgtacatacagataaaaaggagacatctgaaaataaatagaaatggaactggagtgaatgttagttgattctagatgaaaaatcattctgtttgaagattgttgtaagtctccaagtgaaccaaaaattgttcatttagtttgagaca

SEQ ID NO: 404787 - DNA, 635 bp, Homo sapiens
tatacatccataaaataaccacttcaaagctgaataattattgcttcctttctttatagacttaaaaataataaattggctttcatttttcttccaatctccaacagattgaaaaagaaatgttggctttgcagaatgagcccccagaacgaataccaagcctgttggaacgtcaagcccaaaaaaatgaagcttttgactctgaaagcatgagactaggttgtattaatatggtcctttctaatctctcccctgaggcattcagccacagctacccgggagcttctggcatggtcacacaacccctactgggggtccaggacctcactggggtcatcccatgggtggcccaccacaagcttggggccatccaatgcaaggtggaccccagccatggggtcacccttcagggccaatgcaaggggtacctcgaggtagcagtatgggagtccgcaatagcccccaggctctgaggcggacagcttctgggggacggacrgagcagggcatgagcagaagcacgagtgtcacttcacaaatatccaatgggtcacacatgtcttatacataacttaataattgagagtggcaattccgctggagctgtctgccaaaagaaactgcctacagacatc

SEQ ID NO: 404788 - DNA, 632 bp, Homo sapiens
caagactccatctcaaaaaaaaaaaaaaaaaaaggtaaacatggccaagccaataaaaaaatcttattcagccatttaaatgatgtctgcaaaaccagtattaatatggaaaaatgtttatggtgtgttgaacaaaattttaaaagaaaaatcctacttgaagtaatgttagtagtggctatgttaatgtgataggttgatttttttctctgtttcttttttaaaatatggttttattcatttcataatggaaaaatgcatacaattatttagtatttaaaagagtaaaagaacaataggatggtacatctatagtgcttcaagatgttacttggtttttatggctaatattttgcctttcaagcaaagtatgtgactacaaggcaggctggggtcaattagcaatcactaagaccctgtacctctctacaaaaactttgtaaaatcytaaaagctgtgatttctgcactttatgcttgccggttgtacatacagataaaaaggagacatctgaaaataaatagaaatggaactggagtgaatgttagttgattctagatgaaaaatcattctgtttgaagattgttgtaagtctccaagtgaaccaaaaattgttcatttagtttgagaca

SEQ ID NO: 404789 - DNA, 420 bp, Homo sapiens
tcagcaatcatcaaatcttatttattagttgttattctgcagttactctttcagrtattttttcctctgctatttgtttttcttctctaagtttctacagaaaacaactacgtacctcactccagcttatttttccattcttatcttccaccaaataatccagttagagaagagatgtgcttttgactatgttctctgtttctccacacctaggtattggttactagcacttgtctggcatcctgggttgcccattgtcacctcagtgtcactgacatcacttcagccttaatgcagaagtgaagccaccaaatatatatcccagaattctcttccctgcatggatctaatttagagtttgccaagaagaagtacaaatacaagatttggaaggcttaagagaaagcaaagttattactc

SEQ ID NO: 404790 - DNA, 593 bp, Homo sapiens
ctcattcttctgcatgtgtatatcctatttcccatcaccatttatggaagttattcctcaccaaatgtgtattcttggcaccttggccaaaaatcagctggctgtaggtgtgtgaatttgtttgttggctctctattctgttccattggtctatgtatgcgtctgatcttatgccagtaatatgctatcttggtttctatagctttcattgtgtgttttgaggttgcgtagtgtgatgctttcacttttgttctttttgccratggttgctttggctatttgggatctttccttgttccatacacattttaggactttatttcctgtttttctaaagaatgtcattggtaatttgatggggattgtattaaatttgtagatcactttgggtgatatgaccatttagcaatattcatgcttctgtgaatatgtgatatctttattatttgtgtcctcttcaatttctttcaacaagtttataattttcagagtagatctttttaacttcttaattaagtttatttctagatgttttattttttacagctattgtaaatagaaatgtttttgtgataccttttttcagagttcac

SEQ ID NO: 404791 - DNA, 593 bp, Homo sapiens
ctcattcttctgcatgtgtatatcctatttcccatcaccatttatggaagttattcctcaccaaatgtgtattcttggcaccttggccaaaaatcagctggctgtaggtgtgtgaatttgtttgttggctctctattctgttccattggtctatgtatgcgtctgatcttatgccagtaatatgctatcttggtttctatagctttcattgtgtgttttgaggttgcgtagtgtgatgctttcacttttgttctttttgccgatggttgctttggctatttgggatctttccttgttccatacacattttaggactttatttcctgtttttctaaagaatgtcattggtaatttgatggggattgtattaaatttgtagatcactttgggtsatatgaccatttagcaatattcatgcttctgtgaatatgtgatatctttattatttgtgtcctcttcaatttctttcaacaagtttataattttcagagtagatctttttaacttcttaattaagtttatttctagatgttttattttttacagctattgtaaatagaaatgtttttgtgataccttttttcagagttcac

SEQ ID NO: 404792 - DNA, 574 bp, Homo sapiens
aagaaattgaaataatactaatattcttctccctgaaataaatagcaggcccagagagtattgataaagttttaagggtaaaattataatacatatacagaatctcttccaaaaaatagaatcagagagaatacctcctaagtcactctttgaggtcatcattaccctaatacctaaactagataaaaacactgtaagaatgaaaaattaccaacaaagtatccaaagaattataagcatcacaaagygaacattgttccaggtaaggccagcctggttcaatattcaaaaatcaagcagcgtaatccaccacatcaacaatctaaagaagaaatattatatgagcatatcaattgatgtattaatgtgtatgacaaaattcagtaaatatttattataaaagcattgagcaaattagaaactgaggagaacttccctaacgtaattaaaaatatattaaaacagctaacatcatactcattatacttcttggtaagaaactagactcttttcctctattaaggtcaagaacatggcatcacccttcatactgaaagtcctgggtagttcactg

SEQ ID NO: 404793 - DNA, 425 bp, Homo sapiens
acatactatgtgattccaattatatgtcattttggcaaagaaaaaacaagagataggaaaaagatctgtggttcacaggggttcagagtaggacctagagttgaataggtgaagcacaggacatttttatggcagtgaaagtattctgtaccatactgtaatagtgaatacataacattttgcattcattaaaaaccctatagctttatagcacaaagagtgaaccttaacatatataaatctaaaatacatatttagcaaattcgtagatcttcagatggaatagagaagatgacaaaataatctaaatatattttaaaagtataaaacaccctaaayatattttaaaagtgtaaaacacacaaagattctaacctaataactttagatatgaatgaaatctgtaagactaaaggcaaaagtaa

SEQ ID NO: 404794 - DNA, 593 bp, Homo sapiens
ctgagtgcacaaagttttacatatgtgcwggtagcattaagattctcctacatggcttttttctgcagtaagatacgaaaatgtcttagaatccactatttccaatctttaagtgaacagccttcatgtttctatttaattactaatttggtcacttgtggaaaaattaggaaatctcttttaatttgtgttccttgaacttctatatggatttattagtttaacatctggtattctcatcacaaagtgtcaaatacagaggaaactcatataccagagggttttagaagcaatgaagcaacaaataatttattttattagatataattatttcccacagtaaacatattacaagaaatctgtcaaatatgtaagatggttgtggcatctctataattatctatggtagtagtctgaaaaaacatagattaaaacaatctcttggtagggaagaagaaaaatcagtttaagtgggaaatgatcttataaattgtgttttatattcttattcttgatataagtgcaggaaagtatctagggttcaatatataataataaagatgaggatttttagtgatgtattttcttaatca

SEQ ID NO: 404795 - DNA, 619 bp, Homo sapiens
ctagaagaataagcaacacacggagaggtcactaattacctttgaggaaaatcaaggagaagtagactgggattgggatggtggtcattaaactgaactttagcatttttttctacttatataatgtttcatttaaaaacagaaatctccaagtccaatgccagagttcaaattctctctctgccatttactacttgtgtgaattttgcaatatattaccctctgctgctcatctacaaaatgtttataatacacctacctaataggcagggctggcttcttggtcattcaaataatttgtaaaattacaatcctgatgttaaaaagcagaatatttagacagaaaacatacagtcccactccccaartatatgttttacatttccatattataccatatttcatattatagctgagaagtttatatatactatatatcatgatctgaaaatgaaaattaactctatcaatttaaagatgtatatgtagtttagtcattgaatttagtatgtcctcataggttagaacatatttcagacaagactaaatatctctgagatcctcaaatgtaaaattcaaagcaaatttaataaactatttttctttctgctagaataat

SEQ ID NO: 404796 - DNA, 622 bp, Homo sapiens
attcaaaaccttattgaattaatagaggcatccttcaaaggaaattcacatatgaaaattgttgctagaagcttacttatcaaagaagtaaaataacacaggatatcaaataatctacagtggtttactcatcactgattattatgatctgatgtctcacatttgttaaagaacacactaatttcaggaacactattctctgcttaataattttctttttgttattattttctaggaaaaaagcaaatgtatctttgagtcaagaatacaactttttatactactgaaattcagtagaagaaataagtgccaggctycctaaactaaatgttttcttaatctgcataaaaaagataggcttttatttttttacaacaataaaagaagcgaaagaaagtaatgttcaatttgtttccagctgagtgatacctcatgatggtgttaatccgccatatatgctgatacttctttattgtctcacatggtggtgaaaactattttggcttctgcttgtttttattgaactaagtaaatatgaaaaaccaaatccatcattaaaactttttaattttaatttttagtaacatagtttatataagtgtatgtactgctaaaaatattt

SEQ ID NO: 404797 - DNA, 595 bp, Homo sapiens
tggtggtgaaaactattttggcttctgcttgtttttattgaactaagtaaatatgaaaaaccaaatccatcattaaaactttttaattttaatttttagtaacatagtttatataagtgtatgtactgctaaaaatattttaacatttgatcatttaattgaatcytctacatttccattataaatggtaacagtccatatttctattctctcaaatctgttttataccatggaattggtatgtggaatgaagtttgttttgaaaggtagaggggaaaaacaaaaattattggaaacttaggggctacagtagattcatttcaacagtggaactagtcctactctgccttgcacaggacactctaatcagtgataatggtgttcccctgagaaccaggtactatttacttaactaacaaacaaaggcacagaaaatttctaaagagcattggcaaactagggtaattgaatgatgatcaacataatgagcaatgattaaagatgctgagaacgttatgtagaaaaagaagaaagagagattatgcttaatgagatgatcttcaaaatcccccttttttccccagggctgctgcac

SEQ ID NO: 404798 - DNA, 583 bp, Homo sapiens
tagctttttctatattgatttagtatcttgtgatcttgttaaattcactttttagtcctacttgcttttttatagattcttaggatcttctatatgcataatcatgtcattgacaaacaaagacacatttacctatttatttccaaagcatatgtcttttatttctcttacttttcttattacactggcttgaacttccactaaaatgtggaagaggaacatgagagaaattgtaatcttttttcccaaccttagagctattaaatacgatgtcagatgaaggttttggatatactctttttcagtttgcrtaagtttttatttattcccgttctcttaatagctttttaaattatttaatattgagttttgttaaattagttttcttcacatattgaaattattatatagtttaactcctttgttgtattaatgtgacaaaatacattgattgatactcaagttataaaccaactttgcattccagagataaattttatttactcatggtgtgttatattttgtgtttattgctggatttaattatgataatattttgttaaggattttgcatttgtattca

SEQ ID NO: 404799 - DNA, 577 bp, Homo sapiens
tctttttcagtttgcgtaagtttttatttattcccgttctcttaatagctttttaaattatttaatattgagttttgttaaattagttttcttcacatattgaaattattatatagtttaactcctttgttgtattaatgtgacaaaatamattgattgatactcaagttataaaccaactttgcattccagagataaattttatttactcatggtgtgttatattttgtgtttattgctggatttaattatgataatattttgttaaggattttgcatttgtattcataaagtatattcatgtgtaattttacatgcattctgtaatgccagtaccataaatcagtttggaattatttctcctttcagtatttgtgaattttcaaacaatagctagtatttcttttcttaaatgattgtctagagttcacaagcaaagctattctggattgtatttttcttcatgggaaagtttttaattgtatatttaatttctttcatatatatatggctataaaaattttccttcttattaattcaatttttgtaatttgtaccatttaagaaatgtatctat

SEQ ID NO: 404800 - DNA, 599 bp, Homo sapiens
agaaacattttctaaatcttcatgtaatttctacttgacctgtgggcactttgacctatctagtctagttggttgatgtttgttgatatgtgtttttcttctaccagttactgagagaagattctagaaatttataactataattgtaaatttgtctatatctctttcagtttygctagttttactctcatgtatattagactacttgatatttgtcccacatatcaatgagaccctttatgacactttggtttctttttctatgtgtttcaattcaagtaatttctattaatatatctttaagatttgtgttagtctgttctcactctgctacaaagaaatacctgaaactaactaatttattttaaaaaaaggtttttaatttgctcacagttctgccagctatacaggaagcatggctgggaaggcctcaggaaactgtcaatcataacagaagggaaatcaggcctgtcttacatgggcaaagcaggagaaaagagagagaaggggagaaggggaggtgctatacactcttaaacaaccagatcttgtaagaactcactcactataatgagaaaagcaagggggaaattcacccc

SEQ ID NO: 404801 - DNA, 528 bp, Homo sapiens
tgtacttgaaggagttgaaaaagtatttccacacaaaaacctgcactttatagcaggtttatttataattgccaaaacttagaagcaaccccaaatatccttcattaatccaaccagtgaaatataagttaggactaaaaattgatctgtctagctctggaaagacaagaaggaaactttaaatatatattaccacatgaaagaagccaatctgaaaggctacatatgtatgattccaattatayaacatgctgaaaaaggcaaaactatgaaggtagcaaaaagatcagtggttgataggattttagggaatgtagggaggttacttcaggcagtgaaactactctgtatgatacatttgtgtagacccataggatatacaacaccaagaatgaatcctaatggaaaatatgtgtgctgggtgataatgatgtgtcaatgctggtcatcagttgtaagaaatgcaccactctgattgggaatgttgataacaggggaggctatgtatgtgtagggacagaggatata

SEQ ID NO: 404802 - DNA, 580 bp, Homo sapiens
aggcattctttttgtcattttttcatacatcatggttcagagtctttcatcagttctcagactttatagtgttaccatcatcttggatcctaaccaatgcaaactgtattgcttttcgtttttagtatgcacacaatatagactcatatcaattggttgcttttttaatatctttatttttcttcatcttatgttgtccctgaatccatgccttgcatttaactaagacttagcttcaggacatgccattgatcagagatttcaaaatatgagttttgactcrtgggtgagacaaggatatttcagtgaatctaaaatgtgtttctataatggaatagaaaaaatatatatatatatgtatagcttgttgttaggtttaaatgagtttgtatatgtaaatcattagaacactaaattttcaaaatgaagaaaaccttataaaggaatgaaattctgacatatgttacaacatgtatgaatctagaagacattatattaagtgaaataaaccaatcacaagagaataaatattatatgattccacttatatgaggtcaagagcagtcaagttcacagagac

SEQ ID NO: 404803 - DNA, 520 bp, Homo sapiens
atatactgttagatagcctagaataaatattaatttcatatttatcctgtgcctttttacttctctgtggtctttccttaataatgtagatacttatttcatagttattgatggtcccttctttcaatatgagagtaaggaacttggagtaaaaagaatgtatgcaatgaaactgttaaagccttttttagagaaatgaaacacaaacataagaatgacagctcatacacagtgaaattgagcttcccttttacctctgtgttttatggcagccgcagatgcctgaaattacagatgtgcctataaacccccaacacsctaaaacctttagttgctcctttgaaggtgtcatttgtatagctacatctttaaaaggtggcaatttttcccatatcctgaaaacactcacccattaagccctgttgtattgctcttaccttcttgctattatcatattactctttattcttgacatccaatctatcgaaagtgagagacttgctgtgctgtttccattcac

SEQ ID NO: 404804 - DNA, 563 bp, Homo sapiens
ggagtgtccagttatttttcccctttaggtgatgagatgtcttatagcgtgtgctccaaaagaaaagtgactccatccaaatcttctctaagttttgcagatacttgcttaaaaaaaaaaaacttgtctcacagagcctaactgcttttggcgagaaagtttaatgctcagaggagctgcatcaactctctggtggctgatgtctttttcagggtatctaaataggtaattatgaagtggtagccaaagggccaggagctcatgttacttcccaaaatgccaaaatcatcccagaaaataccttaggtgttcagaatattgaacccaatgcagaaatacatttataaagcaaactgaaaaaaagaaattagtatttttttgaaagaaagaaaaggaaaatatcaaaaagtacactcaagtagaataatttttaacttaataaacaatgcacatcataaagtatgtatttatttagtaaacaccaagtacrccacaacatcagttacaaaaatcaccaccttggtcttgcaagtgaataataaatacagtgccttaaaatatct

SEQ ID NO: 404805 - DNA, 527 bp, Homo sapiens
taggccttggagatagctgcagcactctgaggcactgaataatggatagcctgagaagcccttggtggaggctgcaaaactgccacagggggaggggaggatgcccaagaaccttaaaggtcttgcagtgaccgggggraaaaccagagaagagattggcaataaatctttcaatgcctaagaaaacaggctaccagattttttttaaaaaagtatgcattttagccagaagagcatttgttctcttgttatcatagccactcatttgaaataaatgtatgaatgctatattagatccagtctgagaaagacagaccaaaattatctattcaaaaccattagttgtttaaccctggcttgcagattagcacaaattaattgacagaacacattttgccgggaattttcagaaggctttccaaatggttaaactgagacacattattgatcatcaagagttcctaatgcaaaggaaggaatgctgaggtggcactactgtctacaataggttgcagtttacagcgata

SEQ ID NO: 404806 - DNA, 527 bp, Homo sapiens
taggccttggagatagctgcagcactctgaggcactgaataatggatagcctgagaagcccttggtggaggctgcaaaactgccacagggggaggggaggatgcccaagaaccttaaaggtcttgcagtgaccgggggaaaaaccagagaagagattggcaataaatctttcaatgcctaagaaaacaggctaccagattttttttaaaaaagtatgcattttagccagaagagcatttgttctcttgttatcatagccactcatttgaaataaatgtatgaatgctatattagatccagtctgagaaagacagaccaawattatctattcaaaaccattagttgtttaaccctggcttgcagattagcacaaattaattgacagaacacattttgccgggaattttcagaaggctttccaaatggttaaactgagacacattattgatcatcaagagttcctaatgcaaaggaaggaatgctgaggtggcactactgtctacaataggttgcagtttacagcgata

SEQ ID NO: 404807 - DNA, 527 bp, Homo sapiens
taggccttggagatagctgcagcactctgaggcactgaataatggatagcctgagaagcccttggtggaggctgcaaaactgccacagggggaggggaggatgcccaagaaccttaaaggtcttgcagtgaccgggggaaaaaccagagaagagattggcaataaatctttcaatgcctaagaaaacaggctaccagattttttttaaaaaagtatgcattttagccagaagagcatttgttctcttgttatcatagccactcatttgaaataaatgtatgaatgctatattagatccagtctgagaaagacagaccaaaattatctattcaaaaccattagttgtttaaccctggcttgcrgattagcacaaattaattgacagaacacattttgccgggaattttcagaaggctttccaaatggttaaactgagacacattattgatcatcaagagttcctaatgcaaaggaaggaatgctgaggtggcactactgtctacaataggttgcagtttacagcgata

SEQ ID NO: 404808 - DNA, 527 bp, Homo sapiens
taggccttggagatagctgcagcactctgaggcactgaataatggatagcctgagaagcccttggtggaggctgcaaaactgccacagggggaggggaggatgcccaagaaccttaaaggtcttgcagtgaccgggggaaaaaccagagaagagattggcaataaatctttcaatgcctaagaaaacaggctaccagattttttttaaaaaagtatgcattttagccagaagagcatttgttctcttgttatcatagccactcatttgaaataaatgtatgaatgctatattagatccagtctgagaaagacagaccaaaattatctattcaaaaccattagttgtttaaccctggcttgcagattagcacaaattaattgacagaacacattttgccgggaattttcagaaggctttccaaatggttaractgagacacattattgatcatcaagagttcctaatgcaaaggaaggaatgctgaggtggcactactgtctacaataggttgcagtttacagcgata

SEQ ID NO: 404809 - DNA, 508 bp, Homo sapiens
ataaaatgcaaatattgattaaraagatagaaaacctaaaaggaaaccagaaagaaattcttgagctgaaaagaacaaaagtgaaatgataaaatcactacagatattcacaagcagaattaagaagggagaagaaaggatcagtgaacttaaaaataacaatggaaattatcaagtctgagaaaaaacagaaaacagaaagaaaaaggattgaagaaaagtggtcagaacctacgagatctaaggaatagtgagacactatcaggcaggccagcatacatgtggtgggagttccagaagtagaagagagtgaaaatggagtagagaatgtttgaagacatatcggaacaaaactttccaaatttgatgagacatgaatagaaacatccaagaaggtcaacaaactctaagtaagattaactcaaagagactcacatcaagacatatcacaatataactttaaaagccagagacacagagagaatcttgaaagcagcaagagagaagt

SEQ ID NO: 404810 - DNA, 606 bp, Homo sapiens
tgttagagtatttatggattttgcaagtttccctttagcttattcattggaagttttgcataaaagataaaagcatagactaaatcaacagcagcattaattggaatcataaactaaaaataggaaaaatttaaacaaaaactaggaaaagctccattcccatattataagaataaattctaacccaattattttctcctactcaattcagttaccgttttgtgtccttgggatgataatgagaattttactttcctttttttggtggctctgcctgtcaaagaagagccccatgggagcagaaagtattatgtcttatatttgtgcctacaacctgtatttactcctgatgaggctgctgtgtatggctctgctttccatttaaaacttaatttctcattaaatagtttctgtttttaatcagccrgtcagcaggccataatagctaatcttgtaaaagggttaagtttttatctgattcacatttatttgaatctcacaattcaaataagagagaaaaacatatccaacttttcttaggctggagacactgagtgggatatgagatgttacatagtcatgagacagttgctctgaataataagt

SEQ ID NO: 404811 - DNA, 633 bp, Homo sapiens
aaaagaaaggatcttgatgatagatttaaacaggactccaaaaatatatagataattcccctgtgagaagctaaagcttcctttcttcatacatgtaatcctaagaacaatattttgttttaatttaaacctaaaattacaaaactaagccatgcctgatgctggaaaaggcaactattttcacaaatgcagttacaccatcttggcttgagagttttgcaaatattcatttggaagctgaggttattagcctttactcctggtaccagaatgacagcataaatcctcrgaccaatgtacactgtagtacattcattaagatacccccagatttttggattgcctagttattaggtgacaatgctatgacattttgtgtcaaggggcagtggcagctgtcacaaagaacagcaggtggtcatgcaattgctgtatctctactttaacttttcacagctctttcagttaggagtgaacagtagcaaatgggacacccacgttactctcatttatttaacaaatttgaaaggtatattgaggtgaattactatctcttgtcaaagcggtctaatggctgctacagttacctttaagagggtagtagtcagtggcctaagggattgagtggaaacc

SEQ ID NO: 404812 - DNA, 318 bp, Homo sapiens
tccagcccaaattgtacagtttctctgaagccttcccagattaggccatcccaatacattaatagatgcattcagtcagtcagcaggcatttagggagcacctgttatcatgattgaaaacctaaacccttcatcaacctccagtgctcactcactctccttttrgctcctaaaagcctcttctctactgcgcatttgacttttaaccttcccttgtcttgtcgagttgattaacttttcaaacgcatgtgccatattttcacatttaagtttttggtttcttgaagacgtttctcacagccaaaaggtaggaggcag

SEQ ID NO: 404813 - DNA, 580 bp, Homo sapiens
tgcctaagttgcagtaacaaaatactatagacgaggtggctaaaacaagagaaatatattttctagagactaaggagctcaagatcaagtactggtcaattcagttcctggtgagggctctcttcctggattgcagaagcctccgtcttgatgtgtcatttcgtggcagatggagagatctgagagaacatgctctctggtgtcttcttctaggggcactaatcccatcatgaaagcctaccttcacaaccttatctatccctaattacctcccaaaggcccaatctccaaataccatcacactggaggttagagatttaacgtgtgaattgtcgggagacacaaacatttaagctacaacattataataatgaatttagggtgttagccttttgttttgagatacatagcccaaagttttctgataggtacttataaaggccttattctttyaaaagccatcttcagttttctagtctaagatacaaacgtttaaatcagggtaaaaaagcccctaacaggatagtaaaacatgaacagggatttgtgaattgagttaaaatcagacaaaggaaaacaa

SEQ ID NO: 404814 - DNA, 575 bp, Homo sapiens
ccttttcttcctgcagccacacacatgaatgaacaaacacaaacatatctaagaaatatcaatttgtattcctttcatcaggaatcaatagagccacaatctaccagcaactggctcttcctgtaatttgcactgatttaggttatttgtttttattcaattactaacgcttatttttccaactagcttagacatactccaggaaagcattctacatttatrttagaggaagtggagggtttatcccactgtcataatcggcctagattccaggtcttattttcaatccctaaaaaaagactttcttatgattctttataatctagtcaaattctgtcttcccttatgttttgtttgtttgtttgtttttaagagtatcagaaataattggagatgatgctgtttgttttgactcccactctttctactccttaacatgaaagatcagagtctgggctctctactcttcccaaagtgttacatcctctggcccatctttattcctttgctcacattcttactcctgctcaagtgtattcccaccccttcctgcccagccaatccctattcatgtt

SEQ ID NO: 404815 - DNA, 575 bp, Homo sapiens
ccttttcttcctgcagccacacacatgaatgaacaaacacaaacatatctaagaaatatcaatttgtattcctttcatcaggaatcaatagagccacaatctaccagcaactggctcttcctgtaatttgcactgatttaggttatttgtttttattcaattactaacgcttatttttccaactagcttagacatactccaggaaagcattctacatttatgttagaggaagtggagggtttatcccactgtcataatcggcctagattccaggtcttattttcaatccctaaaaaaagactttcttatgattctttataatctagtcaaattctgtcttcccttatgttttgtttgtttgtttgtttttaagagtatcrgaaataattggagatgatgctgtttgttttgactcccactctttctactccttaacatgaaagatcagagtctgggctctctactcttcccaaagtgttacatcctctggcccatctttattcctttgctcacattcttactcctgctcaagtgtattcccaccccttcctgcccagccaatccctattcatgtt

SEQ ID NO: 404816 - DNA, 564 bp, Homo sapiens
attccaacctcctaccacaattttttcatgtatattttttcttaaatataggacttccattttcccatattgtagaagaaacaaaaattctggaatttgaggctgggcatgattttagtattatattgcttttgcattttaaaactttaaagattttaagtatttttgataatgaaaagaaacaagtttcaaaaaagtttgaggaaaattctgaacatcaagttttgtcatctgtaaatgtagataatagctgccttgtacttttacaaggtataatgaacacaaaggtacttttcaatctgtagaataccatatgaatgtctaatatttctgttttcatagtataatcacattgcctcatataacattttcccctatacacaaaaatacaaaactctaaaatagttctcagaaatacaattaatatatactaaaaatcttagtgcaaagagcacgagtgacctgaccagcattaatagtgaccagcacgatgcagatayttatacatatctgatttttttaaataaaaatgtgttgaatattttatctgtcagactccagtca

SEQ ID NO: 404817 - DNA, 611 bp, Homo sapiens
atctacattaggtatttctcctaatgctatccctcccctaaccccccacccactaacaggccccgatgtgtgatgttcccctccgtgtccgtgtgttctcattgttcaactcccacttatgagtgagaacatgcggtgtttggttttctgttcctgcgttagtttgctgagaatgatggtttccagcttcctccatgtccctgcaaattatatatattatttacaaacttatacacataaaacaacactgtaaaggataagtacatattcagggaggcagaaggatatatttcaaatcaatttgaaaaggcatttgtagtaaaggagaggaaaaggaaaaagagtggcattggtgaagtgggaaacaagtaaaacaagagagtccttcatggagcaatgtgagcagaccatgacmtgaagagaagaactgattggaatctctgtgcgttttctaatctcttaatagagaatttagaaaaattttattttgtagagtttgtgacatgcattcttaaacatgattgatgtgaagaaaattgggagcatttttggaaaataattttaattaccaaatgctttctgatacttaagatatgacaaatacaaattta

SEQ ID NO: 404818 - DNA, 530 bp, Homo sapiens
tttcagtcatttgcttacctatttttcaagtaatctaagctattttgtgtacctgtgtgtgtgtacctttctgttcttatcatataatgtattttggtttatgctcaataggtaaaatatcctatcatttaaaccaattcttaaaatttgtgttaccggggccrggtgtggtggcccatgtctgtaaccttagcactttgggaggctgaggtgggtggatcacctgaggtcaggagtttgagacctgcctggccaacatagtgaaaccccatctctactaaaaacacaaaaattagccgggcatggtggcgcatgcctgtaatcccagctacttgggaggctgagtcaggagaatcacttgaacctgggaggaggaggttgcagtgagccaagatcgtgccattgcaccccagcctgggcaacagaggagggctctgtttaaaaaaaaaaaaagaaagaaatttattaccaagaatgtggtgaggatgttgttatacagtcaaacatgactttggtgggagctaaataat

SEQ ID NO: 404819 - DNA, 571 bp, Homo sapiens
tttttttttagggaattacaaatccctatcacttatgatatgtagcatactctggtaactaaggctaatatttgcttccccgcttactatagtggggaaatgtgttcctgagattgagtgatcatctagccattacrctttctagctcatcttgccgcagttgtgatcctatgactaaatataaccaatagaatataaaaatggtatattcataattttatctcatttattgtcataataacttcgggaagtcactatggttagcagtattatttttgaaatcagaaatatagaggcttagaagttcttgaagctcataaatgagaaccttagaggtggaaaataattcttctgatgtcaaatcccatgctcctcctaccacaataaaatcttaaaatatatagtttctcttttttctcttctattcttgggcaggtatttgcaaatatgcttctatgttttcttttttttttcctagataagaccagacatactgcatagagtgggtacaaatcttaagcacatattttttttatggctctaggcataagtttgctgggtcggcctaaac

SEQ ID NO: 404820 - DNA, 534 bp, Homo sapiens
caggaataaacttaacaatatttctaacagtgccgctgttgctttggcctaagtgtggaacagcctttgaaagattacaacagcaaaataagtctaacatggctgactgtaycttgcctttagcctcacaggctggctgtccttgctcattcctaggcataggccaagctatccatgggagaaatttagtgtatagtttaactttgaagcaacaattatagtagttcctccctaaaacgaagcccctctttgctcagagaccaaaactgcctttgtaagactaatggaaggccacaagcttaggattatgggataagtctgaattctgctaaaatgtaggagtaaacaaacccaaccattgtccctggcttgcctttctataatcccttgctgtttgggagtcacgtggccagaggttacaagatttgtgacttccctaattggacctataggtaacatcattattgtagaaactaagattggtcttttgagatgtttttcagactttggcagtctggcaatcaactgactcct

SEQ ID NO: 404821 - DNA, 534 bp, Homo sapiens
caggaataaacttaacaatatttctaacagtgccgctgttgctttggcctaagtgtggaacagcctttgaaagattacaacagcaaaataagtctaacatggctgactgtatcttgcctttagcctcacaggctggctgtccttgctcattcctaggcataggccaagctatccatgggagaaatttagtgtatagtttaactttgaagcaacaattatagtagttcctccctaaaacgaagcccctctttgctcagagaccaaaactgcctttgtaagactaatgraaggccacaagcttaggattatgggataagtctgaattctgctaaaatgtaggagtaaacaaacccaaccattgtccctggcttgcctttctataatcccttgctgtttgggagtcacgtggccagaggttacaagatttgtgacttccctaattggacctataggtaacatcattattgtagaaactaagattggtcttttgagatgtttttcagactttggcagtctggcaatcaactgactcct

SEQ ID NO: 404822 - DNA, 622 bp, Homo sapiens
actatcttattgatctctgtatttttaatctgattaaaaaatacttgatgtaaggtgcacattcaataacaatttattgaataaataagtcaaatagaatacattactccaacacagctgaccaaggctgttcatttatttattaacgttagaacttcaactactcaggctaagtgcagtggctcacatytgtaatctcagcattttgggagactgagacaggaggtttgtttgaagccaggagtttgagacaagtctgtgtaacatagtgagaccccatctctagaaaaataaaaaaatttagccaggcttggtggcatgcctcccaagtagctggtgtcatctcagctactgggaggctgaggcaggagttgtacttgaggccaggagtttgaggctgcagtgagctatgatcatgccactgccctccggcctgggcaacagagaaagacagaaaaagaatttcaaatgtcatagttcaagtaaataaacttttttttgccattttccctccaacttacatatatgtaatctatacacatgtatatgtatatatatatacatacacatacatacaccattggacagttagttactaatattttgctgcatttatcttcta

SEQ ID NO: 404823 - DNA, 564 bp, Homo sapiens
ctgcaaaaggaatagaaaattatctttttatgcatgtgcaatatgaactcaattcaagtgaatttcagtaatacatgttcttgatgtttttaccatcttaatagatctcactatttatcttttatttttgttgattgactgataatgagacataaataatyctatttctttgctaatttgatctcaatttctacaaatgtagacagtattaagaagtattttttaaatggtcatttttgaccttattttggtaatgtccactcttacttccactcctccctaaaacctctctaaaattctcatcatcctataaatcagttcaaacacttgaacatcatacatgaagctcattgtgaactatccattattctccctgcactcaactttctttacctcccataacctcacacagtacacatcggcattttgcaatcattcattatcttttggttctgcacacgctgttcctttattctggaatgtttgtcttgcccctctggacaccattttttagtttcaagacacagttaaagcctcatcttctctataaaatggtccttgacc

SEQ ID NO: 404824 - DNA, 564 bp, Homo sapiens
ctgcaaaaggaatagaaaattatctttttatgcatgtgcaatatgaactcaattcaagtgaatttcagtaatacatgttcttgatgtttttaccatcttaatagatctcactatttatcttttatttttgttgattgactgataatgagacataaataatcctatttctttgctaatttgatctcaatttctacaaatgtagacagtattaagaagtattttttaaatggtcatttttgaccttattttggtaatgtccactcttacttccactcctccctaaaacctctytaaaattctcatcatcctataaatcagttcaaacacttgaacatcatacatgaagctcattgtgaactatccattattctccctgcactcaactttctttacctcccataacctcacacagtacacatcggcattttgcaatcattcattatcttttggttctgcacacgctgttcctttattctggaatgtttgtcttgcccctctggacaccattttttagtttcaagacacagttaaagcctcatcttctctataaaatggtccttgacc

SEQ ID NO: 404825 - DNA, 564 bp, Homo sapiens
agagctaaaacagctttcttatcttcaggattaatttatgattgagaaaagtcagsgagcagggtgatgcaaacatcttaaatgggcccccaggaattcccagtttcttgccttcctttctcaagaacgtagtattctcagtccttacccccaagcctcctgtttgaattacactaaaattcccttgcataaagtctccatgtcacctctgtccattaacagatttcatgaagacagtatgtgtttcacataaaagataagatgaaggcctctattcagagtggtaggagatgtggtagggcacataggctcacagcagaggagtttagtagatgtggtattgattccttaattcatacaatatcagaaaatgaaaaatctcagaatatcagcaaatgtctgaacaatgttcgtgatttcaattttattagaatacaaggtaatgttaaatccggttgaaaataacaatgctctatcccagattattacatttgatacttcttcaaacctttgctgggaacctaatatgtctccaataggcccctcttgtctactactccacat

SEQ ID NO: 404826 - DNA, 609 bp, Homo sapiens
catgcatattatgtatatattttattttacatttacccagggatgtgtgtaaatattaaagtacatttttcmtgtctttggtaatttgtttttgggataaattctgatttatctttctgcatagcaaggcaagaagcaccattaaaaagagtctcatttatttccccaagcagataattgtccatagtgaatttcctgaaaaagagttgtacctggacatgagaaagaagaaaactcaaatcatgccaaaatgaaaaattgaatcgtgcctgagtaggctaaaatggccttctcagacctcaatacagcacttggcctacttttttcttaagattttgttcctggctcccagtttgtcatttctgtaatggatttttaaatgactcttttcttcaggaaggtagcatttatcatggtgtggtagaaagagccctgggatggaacttgggagaactgggttatggccttgctggttctatattgctatgagctgtgtgatttggagaaaattatttacctgtctgaagtttggaagacaaccagaacttcttcattctgtttttcttttgcttgtttgctttagcagtagcttttaagctggagactgaa

SEQ ID NO: 404827 - DNA, 548 bp, Homo sapiens
agggctttagttcttccctcacctgtggagcctggacataggattcacaccctccccgagttctggccaggaggcttctcgacctgttggaattgtgacagagttcagctggagacttcctactccctgtggcatttcccccaygctgttggccaccctcccaaacgatccctgtgatgccaggcaggaatggactgcttggggacccgtcaagctctcagggcctttcccgctgcttcctctacccctgtatttcgtttggctctctaaattgactcagctccgggtaaggtcggaatcatctcccgtaaactagaccttcagtttccccagtgggggtgtgtgttcaggggcagatgatctccctttcccacttctgcaatttgggcactcagagtatttgaggtgtctcctgggtcctgcaggaacaatccactttcttcagagagtctgtggttcatcttggctttcctggatttattactgcagttgttctggagctaaaattcatgatgtgggcttccacatgctgctctgtccgtctgact

SEQ ID NO: 404828 - DNA, 548 bp, Homo sapiens
agggctttagttcttccctcacctgtggagcctggacataggattcacaccctccccgagttctggccaggaggcttctcgacctgttggaattgtgacagagttcagctggagacttcctactccctgtggcatttcccccacgctgttggccaccctcccaaacgatccctgtgaygccaggcaggaatggactgcttggggacccgtcaagctctcagggcctttcccgctgcttcctctacccctgtatttcgtttggctctctaaattgactcagctccgggtaaggtcggaatcatctcccgtaaactagaccttcagtttccccagtgggggtgtgtgttcaggggcagatgatctccctttcccacttctgcaatttgggcactcagagtatttgaggtgtctcctgggtcctgcaggaacaatccactttcttcagagagtctgtggttcatcttggctttcctggatttattactgcagttgttctggagctaaaattcatgatgtgggcttccacatgctgctctgtccgtctgact

SEQ ID NO: 404829 - DNA, 548 bp, Homo sapiens
agggctttagttcttccctcacctgtggagcctggacataggattcacaccctccccgagttctggccaggaggcttctcgacctgttggaattgtgacagagttcagctggagacttcctactccctgtggcatttcccccacgctgttggccaccctcccaaacgatccctgtgatgccaggcaggaatggactgcttggggacccgkcaagctctcagggcctttcccgctgcttcctctacccctgtatttcgtttggctctctaaattgactcagctccgggtaaggtcggaatcatctcccgtaaactagaccttcagtttccccagtgggggtgtgtgttcaggggcagatgatctccctttcccacttctgcaatttgggcactcagagtatttgaggtgtctcctgggtcctgcaggaacaatccactttcttcagagagtctgtggttcatcttggctttcctggatttattactgcagttgttctggagctaaaattcatgatgtgggcttccacatgctgctctgtccgtctgact

SEQ ID NO: 404830 - DNA, 560 bp, Homo sapiens
gttttctccacaactcttacagctttattagtatattttattgtatttcccttttatttccattttccaagtaatggaaatactgttgacctacaaaatatgattgacctatgaaatatacatcatattggtacttttgagacagcttaacttacttttttttkttgttgttgttgttttgagacggagtttcactcttgttgcccaggctggagtgtaatggcgtgatctcggttcactgcaacctctgcctcttgggttcaagcaattctcctgcctcagcctcccgagtagctgggattacaggcatgcgtcaccatgcccggctaatttttctttgtatttttttttttaatagagacggggtttctccatgttggtcaggctggtctcgaactcccgacatcaggtgatccacccacactggcctcccaaagtgctgggattacaggcgtgagccactgtgcccagccaatttatgtctttaaatgtgtgtccttggtgggaaatgggatcataagagcatcaacgtttcttcagattctttaatctaaaagaac

SEQ ID NO: 404831 - DNA, 561 bp, Homo sapiens
actgactaaaaatagtttgagtttagtttgattttacttgcagcctaagggactcttaatttcttctctaatttctaactcaaaatatcttggtgatgcttaatcttcctctctatatgtgttgatcatatctcagttttctatgttcattagagaaaaatagtagttttcccattataaatacatcctatgtatgttagaggggtgaaagaaacatgtatattaaaacacataatacatttattatggaagttatgaaattatagagagaccagtgagtgcccttggatttgcaactggaatatagtcataaattactacttcccctaccccttctatattctacctgaattcactatgctcctttactcatatggaggagcaaggacaatacttaatcttaataaaagaaagccttgaccattgtgatggcagaatagaaggcagccaacaagaaccatttctttttccygaatattcctaaatacccatcatatttgccctggaaggtcaaatccaataatttaaaaaaattcctttttcagaattttcccattaaca

SEQ ID NO: 404832 - DNA, 666 bp, Homo sapiens
aataaaccagtctgttgacttgttaggctccaagggatcaaagtctctagagcaggggtgtccaatcttttggcttccctgggccacattggaagaagaagaattgtctttgcccacacataaaatacagtaacactaatgayagctgataagctaaaaaaattggaaaatatctcatgagagatattttaagagagtttatgaatttgtgttgggttgcattcaaagccatcctgggctacatgcagcctgcaggctgtggtttgggcaagcttgatctacagtttaaattgtggcaggaataaagtatcagagccttattggtatagagctcccataccagatgagagaggttggctttggatgtccccctgttctagaagggagagcaatatgtttgctaggtcaaatactgtgcttcaagtaccaaggcacataagtggagcaatagtcacaattaaggccactctccaattatatttatgataatataaattgttctcttagctccatcagtcttcctttcaggctaaattggaaaattcaaaatttgctgttgaagaaataaaaagggtacagcacttttgaaagattccaacatattcccttgatgtggaaaaagaaagagtctagtggattttaacagcatacaagaatgaagcagta

SEQ ID NO: 404833 - DNA, 623 bp, Homo sapiens
gcactgtgcctgtggtgatttggtaaaattctaattttctgattattcttagtagtagcttgcaaaatattttaatgcttgcccttgagctcatttgaagtcaactttttaacttttaacagtctttaggcgatagtgagcaagatctttcatcgaaagaaaaataaaatgagaaaagtaagatttgtgtataagaaaaattagagaccataaggtattgttgataaaagcatagtttggtccatctacacatgtgtaatctgcaaccatcactattataatttgctccaaagaagaaaataccatttagtattttctagaatgagccctcctatttttgcccagagggatcattcataacagcagagagaatttatcaaagaagtggttgtgagacattcatcagaagggagcttctccagaggctacaggaagaacatagtctatgaagcaagagctgaatttaytttctaattctgccatttattggctgagtagccttggaaaatgacttaacttatttaagccttacttgttacttttgtaaaatgtgattatttatgacactcactggcatagatgctattgctactgtgtccagataccttttacctgactcagcc

SEQ ID NO: 404834 - DNA, 596 bp, Homo sapiens
tgctcaccctcctgttttccgtgtaacctcattcttcctggagactggataagaactcaggacctgtcgaatggcaggcataaaaagtgctataacacattcctggccagctctctgagctatgagtgggagcaaaaggagctgtaacacattcctggccagctcaccaagctgtgacatgctcccattcaccagactgcgggagtgaagagcagcaaccctctgggaacccagaccttgggattcccccagccagagctgtgacattatagctatcccaccctctgccagcattgggcagcattgggaatgtcagcattcccatgtgataggaagcagctgcagtgctagcccagcctgggagccatgggacaaaggcaggtggcgsgactaaaagagattaaacacgctcctccctattcactgagctgcaggtggtgggaatgagagagccatagcatgccccctgccttggggctctgtggttgctggtgtctccaaattttcaggcaccatcgtgttcccctcatccagacaccagcaccctcagtggaagccgcttgggatacgcctggtccagctgcagccttgcatgg

SEQ ID NO: 404835 - DNA, 603 bp, Homo sapiens
tttgagggataagattagttcagagttttctataaattaaacattaataccaaaagcacactaatggaaggctcacatctgggcccatgtgtcagaataacagagttttcttggaaaattatctgttctttaatagaaaattataaaggttataaaatgtttatgaaaattttatgatcaaattgattacaactaaataaattagtttataaggttttgttaaaattgtctttaacattaatrctataccatataaaggtaagatggtaagatttgctttactgttttgaacaaattttttaggtaagagataacaagagatttctgtttaaaactacagaagaaaaaaatgtcaggcgtgagagagacagatttcgttggcttcatattatctttattaggacttactgtttgagaaactgagggtcctcactatcaaagggtaaacatttttgtatatttattttggctaaatgaataactattttatagtaactcgtggtgctattttatgatatcaagtgtcttaaacctttgatatttgacggactttccaaaagcaaaattccaagttctatattcagtctttttgacctcaaacta

SEQ ID NO: 404836 - DNA, 592 bp, Homo sapiens
tgcactttgtgcctggaaaagctgcagaccctcaacaaaagcccaagaaagcagcttggtgggaggctgtaccccgcagagccacaggagtggagctgcccaagaccacgggaacccacctcttgcatcagcacgacctggatgcaagacatggagtcaaaggakatcatttttgagctttaagatttgactgccttgctggattttggacttgcatggggcctatagccccctggttttggccaatttctcccatttggaatggctgtatttacccaatgcctgtatccccattgtatctaggaagtaactaacttgctttggattttacaggctcaaaggtggaagtgtgtccagagttggttcctgccagtgggttggttcgtggtcttgctgacttcaagaatgacaccgctgacctttgcggtgagtattacagctcttaaaggtggcatggactcaaaagaatgagcagcatcaagatatattgtgaagagagaaagaacaaagcttccacagggtgaaaggggaccccagtgggttgatgcttctggctggggtgaccagcttttattcccttattggcccctcc

SEQ ID NO: 404837 - DNA, 595 bp, Homo sapiens
gcaagacatggagtcaaaggagatcatttttgagctttaagatttgactgccttgctggattttggacttgcatggggcctatagccccctggttttggccaatttctcccatttggaatggctgtatttacccaatgcctgtatccccattgtatctaggaagtaactaacttgctttggattttacaggctcaaaggtggaagtgtgtccagagttggttcctgccagtgggttggttcgtggtctygctgacttcaagaatgacaccgctgacctttgcggtgagtattacagctcttaaaggtggcatggactcaaaagaatgagcagcatcaagatatattgtgaagagagaaagaacaaagcttccacagggtgaaaggggaccccagtgggttgatgcttctggctggggtgaccagcttttattcccttattggcccctcccattttccatttctgtcctatcagagtgccctttttccaatcctccctgcgattggctacctttaggatcctgctgattggtgtgtttcacagagtactgattggtacatttcagagcgctgattggtgagttttacagagtgctg

SEQ ID NO: 404838 - DNA, 592 bp, Homo sapiens
tgcactttgtgcctggaaaagctgcagaccctcaacaaaagcccaagaaagcagcttggtgggaggctgtaccccgcagagccacaggagtggagctgcccaagaccacgggaacccacctcttgcatcagcacgacctggatgcaagacatggagtcaaaggagatcatttttgagctttaagatttgactgccttgctggattttggacttgcatggggcctatagccccctggttttggccaatttctcccatttggaatggctgtatttacccaatgcctgtatccccattgtatctaggaagtaactaacttgctttggattttacaggctcaaaggtggaagtgtgtccagagttggttcctgccagtgggttggttcgtggtcttgctgacttcaagaatgacrccgctgacctttgcggtgagtattacagctcttaaaggtggcatggactcaaaagaatgagcagcatcaagatatattgtgaagagagaaagaacaaagcttccacagggtgaaaggggaccccagtgggttgatgcttctggctggggtgaccagcttttattcccttattggcccctcc

SEQ ID NO: 404839 - DNA, 595 bp, Homo sapiens
gcaagacatggagtcaaaggagatcatttttgagctttaagatttgactgccttgctggattttggacttgcatggggcctatagccccctggttttggccaatttctcccatttggaatggctgtatttacccaatgcctgtatccccattgtatctaggaagtaactaacttgctttggattttacaggctcaaaggtggaagtgtgtccagagttggttcctgccagtgggttggttcgtggtcttgctgacttcaagaatgacaccgctgacctttgcggtgagtattacagctcttaaaggtggcatggactcaaaagaatgagcagcatcaagatatattgtgaagagagaaagaacaaagcttccacagggtgaaaggggaccccagtgggttgatgcttctggctggggtgaccagcttttattcccttattggcccctcccattttccatttctgtcctatcagagtgccctttttccaatcctccctgcgattggctacctttaggatcctgctgattggtgtgtttyacagagtactgattggtacatttcagagcgctgattggtgagttttacagagtgctg

SEQ ID NO: 404840 - DNA, 491 bp, Homo sapiens
gtaatggcattactatttgacatattcagaaacctaaaatttatctttgatacctcccagttcttcattcctcatattcaatgaatcagcaatcttgtccctatctaaagtatatctttaagttgcagcctctctgttgtgtctggtgcccacctaatcaaattccctctcctctttcttcttggatagcttcatactggtgttgctgcatccactgtggcccctctgtaatgccttctgcatgacactgccagagtgatcttatataaccttaactatatgacctcacagccctgcttaaagacctttgagagctctccttagcacaaaagataaaatccatattcactgctatagccgacacggccattgtgatctggcctgttgtggctgtcccccattgtcactaagctcmttccacacaaggctttatttctgattcttgaacaatgcagctctttactgtcttaggacattggagcatgctgttt

SEQ ID NO: 404841 - DNA, 597 bp, Homo sapiens
aaaattgggtattatgatttcaagtggtattatgaatcttacatgccatctcccaagattaaatgatcaactcattcccactcctgtttgatctatactctttgaaacttctctcctcttcacaaatcattttgaagcaaatttcaaacattattgtatttcatcagtaaagattttagtagtatatcttagtgataaagcatttataaaaactcacagtactgttgacccacctaagtaaaggaacattaattctttaaatgtcataaaatattagttaatatggttggaaacaaaaggagatcctattcttcagtagagcccatggacatttagmaacaaggattagtctgggcacagtggctcatgtctgtaataccagcagttttggaggccaagacgtgaggatctcttgatcccaggagtttcagaccagcctgagcaacacagtaagccctcatctctacaggaaatcaaaaaattaggcaggcgtggtggtttgctcctgtagtcccagctgctggggaggttgagctggatcaattgagcttggaaggttgaggcttcagtgagccatgaccatgatcatgccattgc

SEQ ID NO: 404842 - DNA, 615 bp, Homo sapiens
tatccttctgtattcacatccttctaccatccctaactttaagaactaataatctgtattcaataactatggttttrtgctttttagaaccttatttaagtggaatcatacagtgtatggcttttcaagactggcttcttatgctcagatcaactcatttgagatccaagttgtgtgtcaatagtttgttccttttagatactgagtagtatgtcattgtatggatgtatcacagtttgtttacacatatatctactgacggacatttggattacatcttgttttaagcaattatgtatagagttcttaatatgtcctggatacaaattctctgacagatgtgcaatttgcaaatgttttctatcaattattgtcttatcttttcagtttcttaacagtgtcttttgcagagctaaagcttatatttcggcaatgtccaattaacttgtttttattctatggattatgctcttagtgctatatctaataatttttgcctaaactcaggtgatgcgtattttctcgtgtgtattattctaaaagtttaatagttgacattttacatttagatctgggattcatttttaattaaattgtgtacgaggtattagattt

SEQ ID NO: 404843 - DNA, 596 bp, Homo sapiens
tacatttttaagaattgaccttatagtctatgctcttacaaaatttatttattaagtataattgttcttatatatttctttggattggctatgtccaaaatcatgtcatctgtgaatagggattattttatctcttcttttctaatctgtgtactttttaatggctttgttttcgttgccttattgcactggctaagacttccaatattgtgttcagtacttgtggtgagacacccttcccttattctcaattttaggagtgaagcattaactctttcactattaaatgtgatagcagctgtcgatttgttagagatactccttatcatgttgaggaagatactttctattcctgatctgctcagagttttaatcatgaatggatgttgagttttgtcaactgctttttctgaaataattgarataatcatgtagtttttcttctttaatgtagtaatatagtggattacattgattggtttttgtatattcaaccagccttgcattcctcagataaacttttcttggtcattgtctgttatcctttttatatattgctagattttattttgaaatattttcgcaaagagttttgc

SEQ ID NO: 404844 - DNA, 660 bp, Homo sapiens
ggcccttgccagatggtggccccttgaactgtgagccaatgcatttctgtttgctataaattacccagtttgtgatattctgttacagcagcacaaaacagtctaagacatttgataatcatctggaaaagggagacccctgttccatgcagcagcatggcatgatactagcaatgatggcaaaggtttaaagaagaagatttgggaaacaaagacttgtctcatgaaatggccattctgactgcagtggagaactcacttctacctaagaatattcttttcattctgaagactgaataaatcccacttctgccattttattaagaagtaaccagagttgtggggagagacgtatggaagtactgtacattatgcatttatgcttctttggatgctttttcccataaactaaagtaaggtcgaaatagacttgtatattcaatgttttcataatatgagctcaaacaagaattatgaagggtgtggtaatgaaaatggaatctgaagtgtcctcatgagaaaaatgtaggattgttatrtataaactagggcaacggataacatatctccccacttcatgcatctacatggtgatgaactgaaaatgcttatgaaaaccttttcaatttgaaacttcagtcagcataggagaaacccacg

SEQ ID NO: 404845 - DNA, 623 bp, Homo sapiens
ttccctcccttattctgagcattaaaagttagcacaggggcacatagaaaagacactcccatgagaataaaatggttttggttttgtcartaggcaaacttatctctggagttcaaagaccaggagcagatgccaagcaagggaccgcttcaaagaaactggaagactgccagcttctaagattagcactgccactacaataattttgccacgttcagagttgggctgaatccagaggctgcttctctaattgaagggtcctagtgtggctccctaagttctttactttccgtcagctgttccccagcatgcaggcttttccagccactgctggattgcttgtactgcttcctatatgcaagagtcaacattcttagttaataatagaaaggaatgaatggtaataagttcagggaaattaattgctagattatgatgagacttcttgtttattttgttctctgtgtttgtcgtacccacctaaattaggtgcccccttctgtacctggctctcttgcctgtattatctatcttcctcagcaaagtatcctctgtgttgaatggacaatcaaataaatgttagaagacaagacacttaattgtctgtttataggcaaattcaa

SEQ ID NO: 404846 - DNA, 623 bp, Homo sapiens
ttccctcccttattctgagcattaaaagttagcacaggggcacatagaaaagacactcccatgagaataaaatggttttggttttgtcaataggcaaacttatctctggagttcaaagaccaggagcagatgccaagcaagggaccgcttcaaagaaactggaagactgccagcttctaagattagcactgccactacaataattttgccacgttcagagttgggctgaatccagaggctgcttctctaattgaagggtcctagtgtggctccctaagttctttactttccrtcagctgttccccagcatgcaggcttttccagccactgctggattgcttgtactgcttcctatatgcaagagtcaacattcttagttaataatagaaaggaatgaatggtaataagttcagggaaattaattgctagattatgatgagacttcttgtttattttgttctctgtgtttgtcgtacccacctaaattaggtgcccccttctgtacctggctctcttgcctgtattatctatcttcctcagcaaagtatcctctgtgttgaatggacaatcaaataaatgttagaagacaagacacttaattgtctgtttataggcaaattcaa

SEQ ID NO: 404847 - DNA, 516 bp, Homo sapiens
aggcttttccagccactgctggattgcttgtactgcttcctatatgcaagagtcaacattcttagttaataatagaaaggaatgaatggtaataagttcagggaaattaattgctagattatgatgagacttcttgtttattttgttctctgtgtttgtcgtacccacctaaattaggtgcccccttctgtacctggctctcttgcctgtattatctatcttcctcagcaaagtatcctctgtgttgaatggacaatcaaataaatgttagaagacaagacacttaattgtctgtttataggcaaattcaactgattagaattatgcttcagtctcttattttggggtttgtagtgaattcttaattccttttctaaaaataaaaattactaggtaaaaagttaaatgactttagtcctcctttttttctagtttaygttattcccgtgagcttcacctttaggccattcttcatctcaggtatattggcttcataatatttttgtcatttgtttc

SEQ ID NO: 404848 - DNA, 631 bp, Homo sapiens
gggtcgagttgttacacacttttaaatggccggatcttacaggaactcactcataaatgattacagccatttatgagtaatctaccctgatggttacatcacctttcaccaggcccaactccaacattgagaattacatttcaatatgagatttggaaggggacacacattcagaccccatcagaggagtctttatgtttttccaaatataggattatatcatcagcaagaaaaaaagataatttgactcattttycaattgggatgccctttattactttctcttgtctgattgctccagctaggactttcagaattatgttagataacagtggtaaaagtggatattcttgtcattttccagattttcgaggaaagtcttttagtttttccccactcagtatgatactagctgtgggtctgtcatatatgacttttattatgttgaggtatgtttattccatacccagttttcaaagggtttttattataaaagaatattaaattttatcaaattatttttagtataattgaaatgatcatatggattttgtcattcattctgtttatataatgtatcacattgattgatttgcatgttgaaccatccttgcttccctgggataaatcc

SEQ ID NO: 404849 - DNA, 631 bp, Homo sapiens
gggtcgagttgttacacacttttaaatggccggatcttacaggaactcactcataaatgattacagccatttatgagtaatctaccctgatggttacatcacctttcaccaggcccaactccaacattgagaattacatttcaatatgagatttggaaggggacacacattcagaccccatcagaggagtctttatgtttttccaaatataggattatatcatcagcaagaaaaaaagataatttgactcattttccaattgggatgccctttattactttctcttgtctgattgctccagctaggactttcagaattatgttagataacagtggtaaaagtggatattcttgtcattttccagattttcgaggaaagtcttttagtttttccccactcagtatgatactagctgtgggtctgtcatatatgacttttattatgttgaggtatgtttattccatacccagttttcaaagggtttttattrtaaaagaatattaaattttatcaaattatttttagtataattgaaatgatcatatggattttgtcattcattctgtttatataatgtatcacattgattgatttgcatgttgaaccatccttgcttccctgggataaatcc

SEQ ID NO: 404850 - DNA, 589 bp, Homo sapiens
accaaaatctggaacagtggcaacaccaaatcctgcgcagaatgcgggacagcaggagctctctcattcattgttagtgggaatgcaaaayggttcagctactttggaagacagtttggctgtttcttagaaaactaaatatattcttaccataggatccatcaattgcactctttggcgtttacgaaagggtttgaaaacttatgtccacacaacaaccagcacacggatgtttagagcagctttgttcataattgccaaaacttggaaacaatcaagatgtttttcagtaggtgaatgaaaaaataaacagtggtacactcactactaaaaataaatgagttatacatccgtgaaagacatggagaaatccccctttttttttgagacacagtttcactcttttcgcccgtggagaaatctcttttttttttttttttttttgaggtggggtctctctgtgtcacccaggctggagtgccgtggtgccatctcagctcactgcaacctctgcctcctggattgaagtgattcccgcacctcagcctccagagtagctgggattacaggcatccaccaccacacccag

SEQ ID NO: 404851 - DNA, 589 bp, Homo sapiens
accaaaatctggaacagtggcaacaccaaatcctgcgcagaatgcgggacagcaggagctctctcattcattgttagtgggaatgcaaaatggttcagctactttggaagacagtttggctgtttcttagaaaactaaatatattcttaccataggatccatcaattgcactctttggcgtttacgaaagggtttgaaaacttatgtccacacaacaaccagcacacggatgtttagagcagctttgttcataattgccaaaacttggaaacaatcaagatgtttttcagtaggtgaatgaaaaaataaacagtggtacactcactactaaaaataaatgagttatacawccgtgaaagacatggagaaatccccctttttttttgagacacagtttcactcttttcgcccgtggagaaatctcttttttttttttttttttttgaggtggggtctctctgtgtcacccaggctggagtgccgtggtgccatctcagctcactgcaacctctgcctcctggattgaagtgattcccgcacctcagcctccagagtagctgggattacaggcatccaccaccacacccag

SEQ ID NO: 404852 - DNA, 554 bp, Homo sapiens
acttcatcatgggtatggtgtttcagtttaggataaagaagttgtagatatggataaagggaatggttgcacaacactgaatatactagatgccgctgaactgtacatttaaacatggttaaaatggtaagttttaygatacgtatattctaccaccaaaaaagggccaggcttagatgtttatatattaggggtttggagtctctaacatttattcaccctccagggctctaatttataaaacacccacataagaaaatatggacttcacaaatctccatggcaccttacaagccccgcagcaggggctgtctgggaaagcagaggtggaaaacatcacatcaacttgaggtcagtgtgagacctcccatcccctactctggaaccagatggaggaaggcatgcgtgcagactgacctggagagatgaaatgggggtgggcagaacagtccgcccatgagcctagaccttaagtgctgtcacatgctctcaggcacatatcaaaccaagaaagcaggctaggagggtaacacatcctcctgtatacagggagc

SEQ ID NO: 404853 - DNA, 567 bp, Homo sapiens
agcacccattccaatttcctcctccaaaccttgaagttttatccttgcatcttagatgctcttggtgtttcctttcaatcttgcatggatcttattccaggcaatatcttttaccctaaaatatctyctgtagttatggcattgccaggtgcatttatatttaactttgaatgtgctcatgggctcagtaaatatgaatggatttggcttactctcaaccaacaattagtgagaattgtgcaatatgcaaagatgtgcttgatacagcctcttccctcattgggaaggtatgagtggatcatttcttctctgtttatgttctcaattgtgcatcaactgggttatttgtttccaagcttcagaagctctgtttaagccaagaacacagctacacagctgggaatgttcctctcctgggtggagagtattacagaatgattcaaatcatggaatagcatgtacttaaaaccatccaagggtggccagaccacctttaaatctctctctttaaagtcttggctttggtatatggatttttggtgttttggtgaataaaattactaacac

SEQ ID NO: 404854 - DNA, 567 bp, Homo sapiens
agcacccattccaatttcctcctccaaaccttgaagttttatccttgcatcttagatgctcttggtgtttcctttcaatcttgcatggatcttattccaggcaatatcttttaccctaaaatatcttctgtagttatggcattgccaggtgcatttatatttaactttgaatgtgctcatgggctcagtaaatatgaatggatttggcttactctcaaccaacaattagtgagaattgtgcaatatgcaaagatgtgcttgatacagcctcttccctcattgggaaggtatgagtggatcatttcttctctgtttatgttctcaattgtgcatcaactgggttatttgtttccaagcttcagaagctctgtttaagccaagaacacagctacacagctgggaatgttcctctcctgggtggagagtattacagaatgattcaaatcatggaatagcatgtacttaaaaccatccaagggtggccagrccacctttaaatctctctctttaaagtcttggctttggtatatggatttttggtgttttggtgaataaaattactaacac

SEQ ID NO: 404855 - DNA, 550 bp, Homo sapiens
ctacttgtatggaaacgcctgggcttgataaaacaatagtgttaaaccgcagatgctagccaatacacattrcattacagctgaattatgtaaacttttggtgtttctaatattctaaattgggtgcctttgtggaaattgctcatcttctcggaggtacctgcctaactggttgaaagacaagaacaccaccacctctcagaaatgccgtgcagatcaactgagacaatgtgtcaagaacatttgtaagagaccgggcacagtggctcatgcctgtaatcccaacaatttgggaggctgaagggggcagatcacttgaagtcaggagttcaagaccagcctaaccaacagtggcgaaacctcgtctccactgaaaacacaaaacaattagccaggtgtggtggcgcacgcctgtaatcccagctaatcaggaggctgaggtgggaggatcacttgaaccctggaagtggaggttgcagtgagccaagattataccactgcactcaaaaaaaaaggagaaagatttttaagccataaactactatactca

SEQ ID NO: 404856 - DNA, 550 bp, Homo sapiens
ctacttgtatggaaacgcctgggcttgataaaacaatagtgttaaaccgcagatgctagccaatacacattgcattacagctgaattatgtaaacttttggtgtttctaatattctaaattgggtgcctttgtggaaattgctcatcttctcggaggtacctgcctaactggttgaaagacaagaacaccaccacctctcagaaatgccgtgcagatcaactgagacaatgtgtcaagaacatttgtaagagaccgggcrcagtggctcatgcctgtaatcccaacaatttgggaggctgaagggggcagatcacttgaagtcaggagttcaagaccagcctaaccaacagtggcgaaacctcgtctccactgaaaacacaaaacaattagccaggtgtggtggcgcacgcctgtaatcccagctaatcaggaggctgaggtgggaggatcacttgaaccctggaagtggaggttgcagtgagccaagattataccactgcactcaaaaaaaaaggagaaagatttttaagccataaactactatactca

SEQ ID NO: 404857 - DNA, 611 bp, Homo sapiens
attacgctctgatttgaatgttattggatcatattttctgagttgtctttaaagatcttcatcctctatttatattggaaagtaacatataatttcaacgtttttaatcctgggaattgaggtcatatttccaagattggttgtgcatttgtgtgggaaaactctaaattagaaaccatctgtgtttgtcttgcaaggggctcagaatgtctcatctgcttttcagaattttccgcccatggggaataggagagtccataagggaattaataattttttaatgtctgagccaaaaggaatgggtttgagagccagatatccacttcataaaaagagatcttttctccttactaatttatctctcatataaaaataaatcayaaataatcttcacccttactatgatttaattggactccttgtacatgactgtcatcgcactgttagcccatttttttaaaaaaaaacacgaaattgtagcattcagaaactgccaataaaatcagaatactattgactattgcagactcaaagttcacttttaagcctttgctaacctctccaatgatagttttttttttaaaagtatgcctctcagattgattctcttt

SEQ ID NO: 404858 - DNA, 597 bp, Homo sapiens
gaagacactgtcagaatttaaaaatcaattaatttaaaatcaatggtggtagcaaaataatgaacaactcattaattgtagtaattatacaaggaccttaaggtaagcaaatacatctggcaaataaaattgaaatcaacaaaaacaatttattaaaggacaaatcccaaatgtgtaagacccctaaaatgctatttttcctttatatatctgtaatccatagttcctacttcatttagccattttactatttcagtcaaaaattaaaatactttagaaaatatttaaaatttgtatgataacattcaaataattgcttgaacaaagtctggtatttccctgaaaaactaaagcaatgyaggagtttaacagtactgatggagaaatacgtgtcaaactaaattgtctgaaactatgaatttagatcttagatcaaaatgataaaggaagaacaggccaggaactcagaatattttccaattcaatgcgcacaacgtgctcctaaaacttctttacaatgagaatagtaaggttaatcaacctacaagaggtcgaacataagacatagcactacagctatttaaattgcaattttaa

SEQ ID NO: 404859 - DNA, 590 bp, Homo sapiens
cattaatgtctttatctcagcctttcttatttgctgtacaccttcaaatgctagcaattttggctacacatgaaagttttgaaaagctcagaagaacaatgagcaataatgctaatctttagcagtaattatacattaataataattacaacacaatcaccctataaaacagggtctcacaatgatttttaagtcacctactgttgtctcatattttcttggtcaatacttagcaatatcactgttatatcagaacaacttattgccctaatagcaaattctggtacacctatgggactattttatacatagtttaggaaacacataacatgttttagagyttgctggatatgatgcaagcatctcatctattataaagaaagtatattctattctacagaacatcacagtattgatttccccaacattctctgggatagattagtattaaaagttgtgctcacattttgcaaaagtgaaatgtaggcctttatgagaacttggtagagcacttaagaaggatttgaaatatatgtatatgtgtcaaaaggaatgccttactttattgacaatttctggtttacattcat

SEQ ID NO: 404860 - DNA, 421 bp, Homo sapiens
aagcagcaccaccatcagctaaagaacttcgggatcctaaataaatttgaaagggactgtaggtcgcaaggactgcaatttgtgggcaaggcctagtgctatgctgggcttgaagccagtgggcttggagtgaacacaagctagtgagacatcatcaccaagcacagtcctgaagtttccattccaggatctagctcccagacatttctagacacatccaggaccagaagggaagcctctgccttgaaggaaagggacccattcctggcagaatttaccacctgctgaatcaagagcccttgagccctgaataatcagcagtgctagccaggcaatactttccatgggccttgggtgagactaacagctgtactgactgcaartattatgagtccattatcacactgctatgaaaaataac

SEQ ID NO: 404861 - DNA, 594 bp, Homo sapiens
ttcatctgagacatggcaagtccctcccacctatgagcctggaagataaaaaacaagttagctacttccaagatacattagggaggtatcgggtaaatgttcctattccaaaagggataaattgaccattttataatgggacaaattgaccatggggctacagaccccatgcaagtccaaaacccagcagggcagtkattaaatcttaaagctccaaaatcccctttcacttcatgtctcatatcagggcacactgatgcaagaggtgggctcccacagccttgggaaaccccattcctgtggttctgaagggtacagttctgtgactgctttcatgatctggcattgagtgcctgaggcttttccaggtggatggtacaagctgtcaatggatctgccattctggggtatggaagacagtggccttcttctcacagctccactaggaagtgccccagtgggaacactgtatgggggctacacctcacatttcccctctgcactgccctaatagaggttccccatgagggcttcactgctgcaacagacttctgcctggacatccaggtgtttccatacatcctctgaaatcta

SEQ ID NO: 404862 - DNA, 574 bp, Homo sapiens
gagaactttccaaacctagggaaagatagcaatattcaagtataagaagggtatagaatgccaagcagatataacccaaataatagtacctcaagacacttgataataaaactcccaaagatcaaggaggaaaaacaatcctaagagtagcaaragaaaagaaacaaataccatacaaaggaactccaatacatctgtcagcgacttcacagtggaaatttacaggccagaagacagtggcataacatatttaaagtgccaaatgaaaaaaaagccctattaacatagaatattatatccaatggaaatatacttcaaacatgaagctaaaataaagactttcccagacaaacaaaaactgagggatttaattaacatcaacctcattctacaagaaatgctaaagggagttcttcaatctgaaagaaaataacattaatgaacaataagaaaatcacccgagaggtacaaaattcactagtaataataagtacacagaaaaacaaaaaaaattataacactgaagttgtggtgtgtaaactactcatatcttgagtaggaagaccaaaagatg

SEQ ID NO: 404863 - DNA, 574 bp, Homo sapiens
gagaactttccaaacctagggaaagatagcaatattcaagtataagaagggtatagaatgccaagcagatataacccaaataatagtacctcaagacacttgataataaaactcccaaagatcaaggaggaaaaacaatcctaagagtagcaagagaaaagaaacaaataccatacaaaggaactccaatacatctgtcagcgacttcacagtggaaatttacaggccagaagacagtggcataacatatttaaagtgccaaatgaaaaaaaagccctattaacatagaatattatatccaatggaaatatacttcaaacatgaagctaaaataaagactttcccagacaaacaaaaactgagggatttaattaacatcaacctcattctacaagaaatgctaaagggagttcttcaatctgaaagaaaataacattaatgaacaataagaaaatcaccygagaggtacaaaattcactagtaataataagtacacagaaaaacaaaaaaaattataacactgaagttgtggtgtgtaaactactcatatcttgagtaggaagaccaaaagatg

SEQ ID NO: 404864 - DNA, 568 bp, Homo sapiens
ctggatcacgaggtcaagagagggaggccatcctggccaacatggggaaaccccgtctctattaaaaatacaaaaattagctgggtgtagtggcgtgcctgtagtcccagctacccgggaagctgagaccagagaatcacttgaacccaggaggcagaggttgcaggtagctgagatcacaccactgcactccagcctggaaaaagagtgagactccatctcaaaaaaaaaaaaaaaaaaaaaaaaagatagagtggctaaatggatttaaaaaaataagacccaataatctgttgccacaagaaacatacttcacctataaagacacacaggaactgagaaaaatagtaatattaaaaaaatgccacgaaaatggaaaccaaataagagcaggagtagctatacttatatcagataaaatattttcagtacatttcaagayaaacactataaagggacaaagaaggtcattatatagtgataaacgcgtcaattcagcaagaggatataacaactataagagcacccaacactaaagtatccagatacatgaggcaactattgttaa

SEQ ID NO: 404865 - DNA, 599 bp, Homo sapiens
gacaataaaagccaggttgaggtggtctcagatggagatgagaaacttgttggcaactggtgtaaaggtgactcttgccatgcaaagtgactgtagggaaggcatgattacttttgaaatatgaagacatgagatttgggaggggacaggagtggaatgatataatttggctgtttccccacacaaatctcaccttgaattataataatccctacatgtcacgggcacggccaggtaaagataattgaatcatgggggcagtttcccccatattgttctcatggtgtgaataaktctcaccatggtgtcttatggtagtaaataagtctcaagagatctgatggttttataaatgggagttactctgcacaagctctctcttgcttgccaccatgtaagatgtgactttgctcctcatttgccttcaggcctccccagccatgtgtgactatgagtcaattaaacttctttccttcataaattacccagtctcaggtatgtctttattagcagcatgagaacagactaatacatcagatcacaatggaataaaactagaaatcaataacaagaggaattttgtaaactacacaaccata

SEQ ID NO: 404866 - DNA, 512 bp, Homo sapiens
cttgaaacaagtgaaaattgaaacacagtatatcaaaacctgtgaggtataataaaagtagtacgaagaggaaagtttacagcagtaagcacctatgtcaaaaaagtagaaaaattttcaataaacaacctaatggtgcatcttaaagagctagaaaagcaagagcaaaccaaactcaaaattagtataggaaaagaaatagtgaaaatcagaacagaaaaaaatgaaattaaaatgaataaaagcaatataaaagaccaacaaaggccaggcgcagtgagccaagatcatgtcattgcactccagcctggacaacaagagcgaaactctgtcttmaaaaaaaaaaaaagtacaacaaaataaaattttggtgtttttaaagataaacaaaattgatgaaactttggcccaattaactaagaaaaaaagagagaagacccaaataaataaaattaaagatgaaaagtgagaaattacaactgatactgcagaaattcaaagaatcattagag

SEQ ID NO: 404867 - DNA, 573 bp, Homo sapiens
tcatctcttaccttctttagtgcaggtctgccatatacaaaatctctctagttttgtttatctaaaaaacaatgtttattctaacttgcatttttaaggatcattttttgatacgtaattgttttcagttmttatcttgttattctttcaaaatatcattttgattttcctttggcttccatcacttctgttgagtagtcagctgtcagtcttattggtgctcttttgaagataatgtgccgtttttcactgactgcttttgagataatatatttttagcagttttaccataattatatctggaattttgttgctgttttacaatcttgcctttttgaaattggtcgtttattatctattcaaatattgcttcagccctactctgtttcacattttcatcttacactagatatttttactctgtttcaatatgattttttttcttttttgtatctatgctatccttttttcttagacatgttttcaatatttacatttcttgcacatcttctggtccttaactgtaatttaagcagtatctaatagaatgttaattttatttgttagttgttt

SEQ ID NO: 404868 - DNA, 549 bp, Homo sapiens
ttgagttaaacagaaaatgcctttttccagttggatacatttttaaatggattttttgttcaaatgttttagaaatattcatccacatattgaaatttcttccataactttactttacatcaagaagattgaaagcccaagtaaatgacatgacaatgaaaatggaaatctggttagtaatttaaacttagcatgtctgagtataatgtgattacatcaagtcttttgatgatatagttattaaaagattggcacaacaaaactggaaactttttgcaacttagcaaacattcactgaacaactttttttgtgtaagttctgtatgtagtattctgctatgaattcttctattrcatgatacaagcatgggatgtgtttcctcctctcagaacacttatacaggttattatgtatgtgattatgtagtatgaagtgatataaaggtgacatgcacatgaatgactaagagaaaataaaaattatgaaagaatcacatggtaatacacattgctatagagcagagattcttcaagaagttttcactaaaa

SEQ ID NO: 404869 - DNA, 602 bp, Homo sapiens
catgtgcctgtagtcccagctacttgggaagctgaagtgggaggatcacttgagcccaggaggcagacactacagtaagctgagattgcaccactgcactctagcctgggtaacagagcgagatcctttctcaaaaataaaatagtatcaaaataataaaatacttaggaatatttttaaatgcaagacatgtacacttaaagttacaatgatgtacaaaacatcattgaaagaaaatttttaaagcttaatagaaaggaatcccatgatcatggacttattaagatgataatactttataaattgatctatagattcaacacaactcctatcggaatcccaactgatctttttttttgagggggtgggggcagaaattgccaacctgctcctaaaattattgagaaaatgcaagaggctcagaatagctaaaaggaaataatcatgaaaaagaacagagtagtggactcacacttcagaatgtaaaaagttattgcaaagctaccttaatcaagacagttttttactgacataaaaatagacatacaaatcaatggaatrcaattgagaatccagaaataaaccctaacatttatgtgatc

SEQ ID NO: 404870 - DNA, 341 bp, Homo sapiens
aacacagcaagaccccatttctttaaaaaacaaacaaaaaaaaaagaaaagaaaagaaagtgaagacaaccctcagactggcagaaaatattttcaggtcatatagctgataagggacttgcactcagaatttataaagaattaataaaactcaataattataaataaccagttacaaatgaccaaaggakttgaataaacatttctccaagtaagatatatgaatggttaatcttgttaaatgatcctcaacaccactggtcattaggaaaatgtaaagaacacaatgtgataccactttacatttgcaagaatggctataatcaacaagacaaatagag

SEQ ID NO: 404871 - DNA, 616 bp, Homo sapiens
gagcacctttttatatgcctgtttgctatttgtatgacttcttttgagaaatgtctattcacatctcttgcccatttttaaattagattattaggttttattttttcctctggagttgtttgagctccttatatattctggttattaatcctttgtcagatggatactttgcaaatattttctcccattctgtggattatctcttcactttgttgattgtttcctttgctgtgcagaagctttttaacttcatgtgatctcatttgtccatttcactttggttgcctttgcttgtagcgtattactcataactcatatattattttaaagttaaagacacttattatatgacctacaattctacacctagatatttgccctagagcaatgaaaatgtatgtttacatgaaacctctgcacaaatgtttataccagcattattgcaatagcctcaagctggaaataacccyaatatcttcgaagaatgcgtgagtaaacaaaaggtgttatatttatacaatagaataccacccagcaataaaacatcagaagggaatattgatacacacaataacataaatgaatctcaaaactattatgctgagtgaaagaagcc

SEQ ID NO: 404872 - DNA, 466 bp, Homo sapiens
taacctgggtttttgacaaaatattcaattttctagaaatttctttattgaaccaatagtcctgaattgtgtaattatgtatttgaatagaatagaccaagggaaagcctgtggctccacccttggaggcagagctgtcgcgacacgcgaacacgcagctctcacgcgaatgcgcgagagagagagacacacacacaaaaaaaaaaaaaaatatatatatatatatatatatatwtttttttttttttttttttgagatggagtctcgctctgttgcccaggctggagtgcagtggcatgatctcggctcactgcaacctctgcctcccgggttcaagcaattctcccacctcagcctcctgagtacctgggattacaggcatacaccaccatgcccagctaatttttgtatttttagtagagatggggtttcaccatgttgatcaggctgtggaatcaattttta

SEQ ID NO: 404873 - DNA, 524 bp, Homo sapiens
gggtgagaaggagattgcaaaagagaagtggaggcctgtgtgcaaaagtgcgctggcaaaattgtggtggggattaaggaaagctggcctgaagagattaggaaggaaacaaaatgaagtgtgaaagttatgaggtgggcagttaggaaaaagtcttttgatgttaggatgattttttttttttttttgcagcctttgggaagttagcatttccagctatggaaccttttaaaaatggaagttgagattctttatcttccatttaatagcctgctttcattgttgccctacaaaaatggaaaatacagggtcckggtcccattcctggagctcaggcctacagtgtaactagatgggccctagctttagcaggtttctttaaaggatgtcagtagggtggagaattcaggtatctgctgactcctgcataaacgttctagcttaaactaaatgacccttggtagtgacatccagagccccttacatgctggccttgaacccgtaaggctgaaaaatgcctttca

SEQ ID NO: 404874 - DNA, 577 bp, Homo sapiens
gctataaaattcttaccactgcttttgctctatcttacaggttttggtatttggtgttttgatttttacttgtttcagaaaaactttttgttttcctgcttaatttcttccatgactcattgatcattcaggagtagttgtttaacttctatgtatttgtacattttccccaaagtcctcatgttaattgatttctagttttattgyattatggtctgagaagatatttgatataattttgagttttaaaaatgtgttgagacttgttttgtgacctaacaaataatctatcctggagaatgtttattgtactaatgaggagactgtattctgtagcttttggataaaatgtactgtaaatgtaatatctgctaggtctatttagtctaaagtgcagtttaaatctcatgtttctttgttaatttctgtcttgataatattcataatgttgagagtggggtattggagtcccaaacaattattgtgttggagtctatcttttcctatagatctgatgatatgtgctttatgtagctccatgctctggttttgggtgcatatatgtttagaattgtta

SEQ ID NO: 404875 - DNA, 577 bp, Homo sapiens
gctataaaattcttaccactgcttttgctctatcttacaggttttggtatttggtgttttgatttttacttgtttcagaaaaactttttgttttcctgcttaatttcttccatgactcattgatcattcaggagtagttgtttaacttctatgtatttgtacattttccccaaagtcctcatgttaattgatttctagttttattgcattatggtctgagaagatawttgatataattttgagttttaaaaatgtgttgagacttgttttgtgacctaacaaataatctatcctggagaatgtttattgtactaatgaggagactgtattctgtagcttttggataaaatgtactgtaaatgtaatatctgctaggtctatttagtctaaagtgcagtttaaatctcatgtttctttgttaatttctgtcttgataatattcataatgttgagagtggggtattggagtcccaaacaattattgtgttggagtctatcttttcctatagatctgatgatatgtgctttatgtagctccatgctctggttttgggtgcatatatgtttagaattgtta

SEQ ID NO: 404876 - DNA, 540 bp, Homo sapiens
gtctcttccactactattaccactcactaaatgattctcattaccatcaattttgagaatcagtgttgtgagaaaatgcattgtttacagatacatttgcttattttaacttttaatatttgttgagtgcctactcggtgccagcaaatcttgctatatttggaggatactacagagaacaaaacagacaaaatttttgctctcattgagctaactcagagtggagaaaataggcaattacttgaactttcttcatcaatatttgtgctctgaagaaaaataaggcaggctaaaagatagatagggagtgactgtaagcaatatattagcaagatgatagggacgcttctccacctctgaagtggaaatatatgagcagagatatgaataaacgtgagtcaagttgcctgcaagtrctgatctaggactccagaggatggcacgtcattaaagcttgtagtgaaataccccaagggaccagcagctgagggtgttgaggtctggatggccactgtcagtttatcttctgtccccaaaact

SEQ ID NO: 404877 - DNA, 537 bp, Homo sapiens
aaatcagtaatgtattattaattatgtaattattttactttggctattaacgtagtaacatttacaaatggagattgtgggagcaattggccagtggtgaaatgaaagggaagaagggactgcctgtctaataaagggaacaaaacaaagcaacataattgaagacctgcttcctctactcacttccaaacttccrcaaactaacctgtttatgctgttatcagtgacgtatgtttcaatatttctctcagctgactatcaaataatgctttaacattaatgacctgttacttgatgctgtggtctgaatacttgtgtcccctcaacatttatatgttgaaaattcatcaccaatgtggtagtattaggaggtagagcctttgggaggtgactacagagacctaatgaaccagattataaaagggcccccagagaggtttcttgtcattttccactatatcaggacacagtaagaaggcaccatctctaaaccagaacctgggtcctcagcagacagcaaatttgctggtactttta

SEQ ID NO: 404878 - DNA, 471 bp, Homo sapiens
gtctcctctcttttccttttctctctctcattcttatgcatacattcactggatattttacaaacttcaccattcattccactataaaagtacattttatttacctgctcaaacttttctcctgctttaaggcccaactcaaatgctactktcatcaaataatctttcctcattacccacatcttaatgttatgacttttaaactctggttgttcctctcttataacagatattctattttgcatgacgtgttcatgtagtacttgttgttttatcctactaatctgaaagttctttagggtaagtgtccattgtaggtatgatatatgtcacagaaagtaacatcactttcaattccacagtctgtaagatgagaagaatataatactcttttaatatttgaataagtataggtcctaatctaacaaggaaacttccatctgttactttatatcgatcttcttcaaaaaa

SEQ ID NO: 404879 - DNA, 614 bp, Homo sapiens
aaaggatgctcacaggtagctaaacatttaaattatttactatcaagcacagaataaattatattaattcagatagaggcaaaactattaagtgaatacaagcttgttgtgtttcatgaaagcagtttactttgattgttccctttgcctgggtctaaagatgaggctttggttaacttgagtttgttatcaaatactggcaggagttggtgtctcctctagatgagatatgtgtacccaggaatcaaagccctgtaatttaacagcaccaggattagtaatagcacctgataaaggcttattcaaagggctggaggctagaggtggtaatacttgagtccgcgacctgactggaagctgtaaaaatattttacaatttttagtgattaatttttatggctttgataaacctcagcaacaatccagagacttaaactagaatttgattatgagggtactttaacacgttaaaaggcccaaaatatttgattgatatggaaccacaggttattgtaaacaatagttacttatttatccaaagtgataatgccctatacrgtgtgattacctctcttcatgggaggcacacttaaataacctggaaggtaaattta

SEQ ID NO: 404880 - DNA, 439 bp, Homo sapiens
gctgccagagaactcacccagcagtggagacaccaaagaaagtgttcacatcaccacttgtctgctgctgcaggaagtcatctgtcaagtcagggctccaggaccccagaaaaatgggcttgagcaaggaagctcatttggggctttcagtttaagcagagggagaaacagagacaagagacctgtagctagccattgcagaaaaaaaggaagttctgactttaggacagactagaagaggttgctgaakagggtggaataagaaaactaacaaagaacaaaaggtggttcagtctctaataagaacaaaatacatttgagactgactgctgatgtaatcaccctacccaaatccaggatcccccacaaatcaatttatgccaaatgccacaagatacagagcatccaggagtcatccaatgagggtccccacaacaac

SEQ ID NO: 404881 - DNA, 589 bp, Homo sapiens
acattctgttatatgttcaggtatctgagtggacactgtaatgacgtaaatgattttgaattgcgtaatatatatatatattccatgctatacatataattatgatatacatataatttctgatatatatatgtgtgtatatatatatatatataaatcaggaaaaaaattagagtgattctggcactctaactcaattgctgataggccttaaattcttccaaaagagtaaaataatgttattttaggtaaacataacaaatagttatagagcatttgcaaaaggaaagagctatagtttttgcctcaagaagcttgtttagtgaaaatatgcatcattagtttacccagctgaagcatgttacacaagttaaactagagaaccagaaaactagaggaaaggaataaatttcagctggtatgctaggaaaacacttcacgtgggaaatttgagcctaacttggggggraaaaaagatttgaccaggtcaatgtagtggttgcactgtaattaagtacaaaacaaagaaacaaagaaagaaaacaccatacctgtaggagaaatgtatgagggcacatactgggaagac

SEQ ID NO: 404882 - DNA, 589 bp, Homo sapiens
acattctgttatatgttcaggtatctgagtggacactgtaatgacgtaaatgattttgaattgcgtaatatatatatatattccatgctatacatataattatgatatacatataatttctgatatatatatgtgtgtatatatatatatatataaatcaggaaaaaaattagagtgattctggcactctaactcaattgctgataggccttaaattcttccaaaagagtaaaataatgttattttaggtaaacataacaaatagttatagagcatttgcaaaaggaaagagctatagtttttgcctcaagaagcttgtttagtgaaaatatgcatcattagtttacccagctgaagcatgttacacaagttaaactagagaaccagaaaactagaggaaaggaataaatttcagctggtatgctaggaaaacacttcacgtgggaaatttgagcctaacttggggggaaaaaaagatttgaccaggtcaatgtagtggttgsactgtaattaagtacaaaacaaagaaacaaagaaagaaaacaccatacctgtaggagaaatgtatgagggcacatactgggaagac

SEQ ID NO: 404883 - DNA, 512 bp, Homo sapiens
tttttccttccaagacccaggctgaaggagcagttcttatctaggatatgcccgtcccctggcagagggaacatggcatgaccagacgagatgatggctatcacagcttctacatggctcttgacacttttgcacatttatctagttgaagcatgccctgtggttgagcccatgcgaacgggacagggaagaaycttcttcccatggggaaagtgtggtggggaggtcactgcaaaccacaaagcagtgggcagatatgatgattccacagagatggtgagtaaaacattggaaacaatattgaatcttatggtgatgttagaagtaataacgtctcctgtcagttgaggagaatcacatggcattaagctctacatacgatgactttctctgctcctctctgttgtatatgccccaagaagaccagctaagaggatttttcttctttgtttatttatccatttatttttaagacagggtcgccttgtgccatgcaggctgaagtacagtgg

SEQ ID NO: 404884 - DNA, 565 bp, Homo sapiens
tacaattcccatcaaaataccaccatcattcttcacagtactagaaaaaaacaatcttaacattcgtataaaatgaaaaaagagcctgcgaaacaagcaagactaaggaaaaagaacaaatctggaggcatcacattacctgacttcaaactatactttaaggccatagtcacccaaacaacatggtactggtataaaaagaggcacatagaccaagaaacagaatagataatccaaaaataaagccagatagttacarccagctgatctttgacaaagccaacaaaaacataaagaatgaaaggacaccctattgaacaaatggcgctgggataattggcaagccacatgcagaagaatgaaacttgatcctcatctctcaccttatacaaaaatcaactcaagatagatcaaagacttaaatctaagaccagaaaccataaaaattctagaagataacatcagaaaccccacccccaccccgcccagacattgcttaggcaaagactttgtgacacagaacccaaaagcaaatacaacaaaaacaaagataaatagatgggac

SEQ ID NO: 404885 - DNA, 565 bp, Homo sapiens
tacaattcccatcaaaataccaccatcattcttcacagtactagaaaaaaacaatcttaacattcgtataaaatgaaaaaagagcctgcgaaacaagcaagactaaggaaaaagaacaaatctggaggcatcacattacctgacttcaaactatactttaaggccatagtcacccaaacaacatggtactggtataaaaagaggcacatagaccaagaaacagaatagataatccaaaaataaagccagatagttacagccagctgatctttgacaaagccaacaaaaacataaagaatgaaaggacaccctattgaacaaatggygctgggataattggcaagccacatgcagaagaatgaaacttgatcctcatctctcaccttatacaaaaatcaactcaagatagatcaaagacttaaatctaagaccagaaaccataaaaattctagaagataacatcagaaaccccacccccaccccgcccagacattgcttaggcaaagactttgtgacacagaacccaaaagcaaatacaacaaaaacaaagataaatagatgggac

SEQ ID NO: 404886 - DNA, 560 bp, Homo sapiens
agaacaaccagcccaaatgcccatcaatcaccaagtggataaagaaaatatgatatatatatacacacacacaccatgaaatactactcagtcataaaaaggaatgaaataatggcatttgcaacaacctggatggaactggagactattattctaagtgaagtaactcaggaatggaaaacctgacatcatatggtgggarctaagttatgaggacacaaacgcataagaatgatacaatggactttggggacttggggaaagactgagagggagatgagaaataaaagactacacattgggtatggtgtacattgcttgggttatgagtgcaccaaaatttaaaaatcaccactaaagaacccattcttgtaaccaaacacaacctgttcttcaaaaacctattgaaataaaaaacattaaaaaataaaataaaataaataacatatctactgccatccattttagaattctagagaaaatgatggatttgtaacaaatgcaatgcaatgtaagaatttaaaaaatgctatgcaaagagaaatgtgtgattaagaaaa

SEQ ID NO: 404887 - DNA, 560 bp, Homo sapiens
agaacaaccagcccaaatgcccatcaatcaccaagtggataaagaaaatatgatatatatatacacacacacaccatgaaatactactcagtcataaaaaggaatgaaataatggcatttgcaacaacctggatggaactggagactattattctaagtgaagtaactcaggaatggaaaacctgacatcatatggtgggagctaagttatgaggacacaaacgcataagaatgatacaatggactttggggacttggggaaagactgagagggagatgagaaataaaagactacacattgggtatggtgtacattgcttgggttatgagtgcaycaaaatttaaaaatcaccactaaagaacccattcttgtaaccaaacacaacctgttcttcaaaaacctattgaaataaaaaacattaaaaaataaaataaaataaataacatatctactgccatccattttagaattctagagaaaatgatggatttgtaacaaatgcaatgcaatgtaagaatttaaaaaatgctatgcaaagagaaatgtgtgattaagaaaa

SEQ ID NO: 404888 - DNA, 593 bp, Homo sapiens
ttttaatgttgattacattttaaagaggaggaaagaggctaaacatattttgctactgttaggtgtcagtactttacattctgtccctgcttctttgggcaaaatgaaccaacatctccttttggagcaaatgaaagctctgctcttagctctcatcacctaagtctagaaactsccacacagccactaaatcacagaaataagtcaaagggagaattagtcaaatgtctttttcccttggttctctgttttgcctatttttaccaactatcatataggcaagaaagaatgtcctagaatgaattacttcattcaaaagtattcattgattaactttctctacctgggttctctcagacagcgccatccatttatcatcagggtcagtaaaaaaggacagaaaaaaccattttgcttctgtgcctggctctgtcctaaacacaggggataaagacgtgagtaaaactggcaagatgctcgatacagttcagctgtgtccccatccaaatctcaccttgaatagtattaatcccctcatgctaagggtggtgccaggtggagataattgaatcatggggggcggtttcccccat

SEQ ID NO: 404889 - DNA, 584 bp, Homo sapiens
aacaaatgtatggccaacagaattaacacaagatatgggttggtatcactccctgaagacgaacgaggaagagaacatgacgttgcacattggaatgactgaaactgacagtggttctcgctgatgctggtgattctggccacaacacatgattggaattttatttgaaactcatctgagtgttttgtttttaatgttgattacattttaaagaggaggaaagaggctaaacatattttgctactgttaggtgtcagtactttacattctgtccctgcttctttgggcaaaatgaaccaacatctccttttggagcaaatgaaagctctgctcttagctctcatcacctaagtctagaaactcccacacagccactaaatcacagaaataagtcaaagggagaattagtcaaatgtctttttcccttggttctctgttttgcctatttttaccaactatcatataggcaagaaaraatgtcctagaatgaattacttcattcaaaagtattcattgattaactttctctacctgggttctctcagacagcgccatccatttatcatcagggtcagtaaaaaagg

SEQ ID NO: 404890 - DNA, 576 bp, Homo sapiens
tttacattctgtccctgcttctttgggcaaaatgaaccaacatctccttttggagcaaatgaaagctctgctcttagctctcatcacctaagtctagaaactcccacacagccactaaatcacagaaataagtcaaagggagaattagtcaaatgtctttttcccttggttctctgttttgcctatttttaccaactatcatataggcaagaaagaatgtcctagaatgaattacttcattcaaaagtattcattgattaactttctctacctgggttctctcagacagcgccatccatttatcatcagggtcagtaaaaaaggacagaaaaaaccattttgcttctgtgcctggctctgtcctaaacacaggggataaagacgtgagtaaaactggcaagatgctcgatacagttcagctgtgtccccatccaaatctcaccttgaatagtattaatcccctcatgytaagggtggtgccaggtggagataattgaatcatggggggcggtttcccccatactgttcttgtattagtgagtgagtctcacgagatctgatggctttataaatgag

SEQ ID NO: 404891 - DNA, 455 bp, Homo sapiens
caagagcatctctcctgccttgttaataatggtaactgcatgatgtcttagttcattcctgctgctataacaaaatacctgagactggatgattatagacaatagaaatttatgtttcatagttctgaatgctgggagtgcaagaccaaggtgctggcagagtcattgtctggtgggggctgctctctgcttccaggatggtgccttgttgctgcattctctggagggagaaacgctgtgtcctcacraagaggtgaaagggcaaaaagggggtcaaacgtagcatgaagcctcttttctaatggtcttaatccctcccgttcacatggaggagccctcatgacctaatcacctcttaaagattcctcctattactatcacactggccattaagtttcaacacatgaattttagaggggacacattcaaacaataggaggtgataaactgacgtt

SEQ ID NO: 404892 - DNA, 575 bp, Homo sapiens
cagtggtgtattaggtagaatatattcctactcccatgaagcattcatttaatgaagtcagtcaatacagaatctttcataaaataagtattttctgatactagaatattatcaaaaagaaaataaaacactgtaagagtaagggctaatgttttagaaagaagtgaaaccttttacctgaagccttaggaattgaagaattttggaaagggcatcacccagagattatagcaagtgcatagtgagtcaggagacagggtgtttaaagttgataagcaagacgaccgtggctcacgtatggtgaaaaagaaaagggagggagtgcatgggactcagggtggagatgtaagcaaaggtcacactgtatagtttcttatattagtccattcycatgctgttaataaagacatacccgaggttgggtaatttataaaggaaagaggtttaatggactcacagttccacatggctggggaggcctcacagtcatgatggaaggcaaataaggaacaaaatcatgtcttacatggcgacaggaaagagagcttgtgcagaggaacatttataaaaccatc

SEQ ID NO: 404893 - DNA, 600 bp, Homo sapiens
ttcttttaacaatgcaccaagacataacagcctttctttcatttgagattacactaagagtcttttttttacatttaagaagattaaggactgtagacaaaggaaactgtttggagcaaaagtttaaataagtggcaaaagcagctctctgccagcagagatagaagcttgaataagttgtccactggggtttaaggtttttatggcctaaaaaataaagatatatacttagtttgcaagctgtcttggagaatgggtgacttagctttgccctggcccaggacctattagacagcttagcccaggcactttgcctgggagcagtctgargtggtaatttgcaaagactgcttagcttggtacaggacctaaagtaaaagcttgttctgggatgctggctcaggaccaatcagggactgaagtgatgattcatatgggttgagcaaccagtgaaatacaaaaataaatatttcatccaatacccgctagatcgcactgcgtttatgcccacaaaaaacaaaacaaaacaaaacaaaaaacaactttattttctgaaagccctctgagtatacagaaaacaacaagcctatgccaggcatt

SEQ ID NO: 404894 - DNA, 600 bp, Homo sapiens
ttcttttaacaatgcaccaagacataacagcctttctttcatttgagattacactaagagtcttttttttacatttaagaagattaaggactgtagacaaaggaaactgtttggagcaaaagtttaaataagtggcaaaagcagctctctgccagcagagatagaagcttgaataagttgtccactggggtttaaggtttttatggcctaaaaaataaagatatatacttagtttgcaagctgtcttggagaatgggtgacttagctttgccctggcccaggacctattagacagcttagcccaggcactttgcctgggagcagtctgaggtggtaatttgcaaagactgcttagcttggtacaggacctaaagtaaaagcttgttctgggatgctggctcaggaccaatcagggactgaagtgatgattcatatgggttgagcaaccagtgaaatacaaaaataaatatttcatccaatacccgctagatcscactgcgtttatgcccacaaaaaacaaaacaaaacaaaacaaaaaacaactttattttctgaaagccctctgagtatacagaaaacaacaagcctatgccaggcatt

SEQ ID NO: 404895 - DNA, 566 bp, Homo sapiens
ctctagaatttagaaaaatgttgttgttgttgttgttgttgttgttgttgttgttgtttaatttccattttacctccagaattacttgaatcctgtagatcacaatggcttgtagagctggggagccattattcctgctgaacaatctgggaaatacacactggacctggtgacctatggctctgggaacacttctactttcactggtctcccccacaggctggacaaagttgagatatattctttttctgcctgagcaattyatttgaaagtgtcctagcttgtcacactagtagaaatcagcaggtgcctcttggagattccggctcttgtaggcctgtgaagaggccagtaatgcctctttcattctcttgcgactcccctcttctttctaggtctcctctccccagttcttgttttaaaagataaaagccaccccagaaagtctttcaaagtgctatctgatcccacagcctgcttctgtagttttgttctgatattagaggatggctgagaaataaagtaatattttaaaattgtgtatcccttaattgaattaggagatg

SEQ ID NO: 404896 - DNA, 574 bp, Homo sapiens
taaaagaacaaataagttatagtttaatacttgtcaccatgataaagataaaaactaacacatcatgcttactatgtgccaggtcatacctaagggtttgatttatttcaacccatttaatcttcacaacaaagttataaagcaggctttgttatcatccttattatagagatgagaacactgaggcacagagaagttaagtataataacttgcccagggtgacatagctggtgactaaaggagctgggattcaaacactagcagtttgcttccacaatccatgccctctctactaaacttaatgtgttatggacagattgcaacttatgccaggcatctaactgtacttttccacatgataattggtatggggtagacagtgcaatggtttgaggaatgcttaggagcctaacatatgtagagcaattatgaggaacttcaggaatgctccaaagcatagcttakctgtcaagaatgtcttcatcctggatgggtcttaccttttaaaaaagaagatactgtttttacgttagaaacataaaatttgttaatttttcaaatactaggctgaaa

SEQ ID NO: 404897 - DNA, 502 bp, Homo sapiens
aatgtgacctttagtgagagctggcattatatacagatattttgatgtctcaattgcatgaaaacatttcttagcaaatcgaaatcagtgaactgtctctactcatatatatatatgtatatatatatataaaatatatgtgtrtgtttatatatatgtgtgtatatatatacacattgaacccaggaggcggagttcatatatatatatgtgtatatatgtatatatgtatatatatgtgtgtgtgtctaatatgctcttgtctaatatttatacttatgtatatacacacatatatatctataaaatacagagtagaatcttttgagctaaggggagaacgtggaagaggggttactaaataatgttagaatagcttcattgaaaagcagtgtaaacagcttcattgaaaagtaatgctagagggaagccataaaccctctcattctgtaattaagaattttgatagatgagataaaaacagcaacttcatttctcaaat

SEQ ID NO: 404898 - DNA, 510 bp, Homo sapiens
  misc_feature (1)...(510): n = A,T,C or G
acctggaggcaaataatttcattagctgnggtttgtttttctttttcccattctctttttgtttctcctaatttacaggttctttgaacttcttttggatttgaggtgagacccaagcttaacagtagcacaattcctccaaagatttctttctactgagtttaagaaactaaaaaaaaaaaatctgatggctgagggagacactcctgttaaaaaggcctttttaagattccacctcctgtattaggggaggtttatagagtcaaaakttcctgagaatagatgaccctgatttgccttagaaggtttgatcatggaagattctgtggctgcaattgctctgtccagcaccgtgtgcacgctttggaatttaaatttagagatcatttagtctctgcaactatgtctggggaaacttccaaatcaatagcctgctttctttcaaaggctagacaagaatttgcaaaatatcatccagttttctctttataggttgaataaggtaaaaat

SEQ ID NO: 404899 - DNA, 582 bp, Homo sapiens
tttgagtcaggcagaccatgcttctgggtataggtgctgaaaatgacagatgtgtaacactagacaagttatttgatctctctgtttcagtttccttatatagagtataaaaataaaaacagaactcaaaaacaaagctattgtgaagattaaatgacacgataggcataatgtggttagcactttacagaaacttgacagggctatgcctcccttcctatctcacccccaggcacctccccactctctctatttatggatgtatgtccatgatctataatatcctttagaaatgtcacattgtcttgtctaaaatcctcacctccactgactagtacacattctgctctttgcaaatatactaaaaccaaacaaccaaaaatgctttaaaatttkttattaataatcatgaggttatacactgacctgtgataccgagaacatataaaaatttactcatattcccataaatgtactgtttggatatattttcttctgctaagagaggtaacacccacataagctgctcactgactacacaacatcattacccacatggcctgaccaatgccaacaaggtga

SEQ ID NO: 404900 - DNA, 619 bp, Homo sapiens
aacaaggtgaaccataatattttgcaaagcatcaaatggtgctaaaagttctatatttgagcattgaataaatgttgaaacaactggtgataattgttaacaatgagtccttgacctttcatgaattgtttgcccccaaacatcatcaccttttgtacacaaacagtattttgtcacaaaaattgcttgatgacactattaggacagtattgtctttacttgttctagtgaaagtcatttgaaatggcaacagacattgctctgtattatccacagcagcacagtactattaatcctccaaatacaaaaagcaatgtcttatcatgccaatctaacagattttacaaatgatgctgtttatgtaacagtcatacaatagtggataaattgctcttgracaacttctgtcaacatttggcttttgttattaatgtggtgcatatcaaatatgtccatacctatcatataattttaaaaattgtttagttagaaaggatctcaaggatcatctcacttaatttcttccatatacaatgacgatactgactttaagagagaagttagataacttgtctaaagctatgcaaacaaagagtggtagaggcaatactagattgta

SEQ ID NO: 404901 - DNA, 551 bp, Homo sapiens
tttcctaacaggcacatctctgggatgtaggaggacacctaaatacccagagaaaactcacacaaacatggggagaacatgcaatctccacacaaacagtggccccagctgggaatttatttttttttatcatcatcatcataacgaaaccacattgagaaaaacattatttgaggacttttctatatatagtttcagtttggggtgatgaaaaakttcaagaatggatggtagtgctgattgtataacagtgtcagtgtacttaacaccatcaaagtgcatccttgaaaattgttaaaatgataaatttagattatatattttttttaccacaatttaaaaaaaggcaacttaccctagttgggcaatgagagagatggtagcaatatgaaaacacagaggccagctggagaatcttgtagtttcttgtggaaaatgattgtttccttgacaaaggagtggcagcagaaataagtatttccattcgagataaaattgtagctaaaacctgatgatggattggatatcgatgatgaggtaaaagaaaaaag

SEQ ID NO: 404902 - DNA, 583 bp, Homo sapiens
tatttatatctcaaaatttatttttaagaacagtgaaaaagatgcaaagactacatgccaagtcattaaccttggatagcagaatactagggtaaggggaaagatacatttycaaatattacttaatagatgtaattttttatcaaaaaagatattataagtttgtactttggaaggaaggtttgcttcctaggtgacaaatcaatcttgattagccagaaaacaaaccttgaccataaaatggtagaactcatagctttcccagtattttacacttaaaaataatgatccactcttcagtcattcagaaagaactccctttcataagtgacagtgtaaaagaaaacttgaagaaaaatctcaattcattttttacattattttaaaacatttgtttgaaaggctaatgcataaatcaaatatgtattttttattctgttcattatgcacttaacatttacatattttatagttcctctatctgtacataagtcatagggtttattgttaatggttttctctttgctttcctcataaacataattgcctgtagcttagcacccatgagtaacctagcaacaag

SEQ ID NO: 404903 - DNA, 600 bp, Homo sapiens
ctacatgccaagtcattaaccttggatagcagaatactagggtaaggggaaagatacatttccaaatattacttaatagatgtaaytttttatcaaaaaagatattataagtttgtactttggaaggaaggtttgcttcctaggtgacaaatcaatcttgattagccagaaaacaaaccttgaccataaaatggtagaactcatagctttcccagtattttacacttaaaaataatgatccactcttcagtcattcagaaagaactccctttcataagtgacagtgtaaaagaaaacttgaagaaaaatctcaattcattttttacattattttaaaacatttgtttgaaaggctaatgcataaatcaaatatgtattttttattctgttcattatgcacttaacatttacatattttatagttcctctatctgtacataagtcatagggtttattgttaatggttttctctttgctttcctcataaacataattgcctgtagcttagcacccatgagtaacctagcaacaagtcagctctctagcaagtaagaaatgaatgcaaacaaagtgttatggaaaaagcattcagtttaagaa

SEQ ID NO: 404904 - DNA, 583 bp, Homo sapiens
tatttatatctcaaaatttatttttaagaacagtgaaaaagatgcaaagactacatgccaagtcattaaccttggatagcagaatactagggtaaggggaaagatacatttccaaatattacttaatagatgtaattttttatcaaaaaagatattataagtttgtactttggaaggaaggtttgcttcctaggtgacaaatcaatcttgattagccagaaaacaaaccttgaccataaaatggtagaactcatagctttcccagtattttacacttaaaaataatgatccactcttcagtcattcagaaagaactccctttcataagtgacagtgtaaaagaaaacttgaagaaaaatctcaattcattttttacattattttaaaacatttgtttgaaaggctaatgcataaatcaaatatgtattttttattctgttcattatgcacttaacatttacatattttatagttcctctatctgtacataagtcatagggtttattgttaatggttttctctttgctttcctcataaacrtaattgcctgtagcttagcacccatgagtaacctagcaacaag

SEQ ID NO: 404905 - DNA, 387 bp, Homo sapiens
cagctgcttctaatctttcctgaccaccagaaatatgttctagctgtagagaactcttatcccatttgtaaattatactatcttaatatcttgcctaaacattgattctcagtacccaaaatgttccattcctgcccgacaaatttctagtccatttgcatgatccagccaccagaaatcataaacacttaatagctccctaaacagaaaccctaaaaactccatataaagatctacttaagaacgggtgggcayaggaatcatgtctttcttagttttcaagtctacgtacttgacactctgaaaatgtcttctactgaagtgttattataagaaaataaaaatttccaaattaaataaaggcctgaaaattttaaatgtgagact

SEQ ID NO: 404906 - DNA, 367 bp, Homo sapiens
tgttctagctgtagagaactcttatcccatttgtaaattatactatcttaatatcttgcctaaacattgattctcagtacccaaaatgttccattcctgcccgacaaatttctagtccatttgcatgatccagccaccagaaatcataaacacttaatagctccctaaacagaaaccctaaaaactccatataaagatctacttaagaacgggtgggcacaggaatcatgtctttcttasttttcaagtctacgtacttgacactctgaaaatgtcttctactgaagtgttattataagaaaataaaaatttccaaattaaataaaggcctgaaaattttaaatgtgagactaccattaattcaatt

SEQ ID NO: 404907 - DNA, 557 bp, Homo sapiens
  misc_feature (1)...(557): n = A,T,C or G
nnnnnnnnnnnnnnnnnnnnnnnnnntgatatgatttggaggaaactatgtctttacctgtctaacaagaacactttgctggtgaatgagcctgaaggaaaggaccctgcaaaataatagtgtttcagaatttcaagagattagggagacattaattgactgttagagatgtaatgccaaaaagatttactgcttaattgaaattcaaacttttaaccagcaacagcagggcagctagagtagtgtcaggctgaagtattgatcatttatcaaaagaacagcctctatctttgcttgtggtactggtggctatggggagaattaattcatttgtacatcctcgattctaactrtgtgtgaaactatttttgtatcacaaatatgcatggcacaaatctgacatcttcatggataaactttttttttttctttaatctagtcctggaatgccccctggcttacttacctgaattactttctttctcttctattcagagctcttgagagctgggaaacagaacagcttgtttatttagcaaaaatgcaaatgaaagagc

SEQ ID NO: 404908 - DNA, 513 bp, Homo sapiens
  misc_feature (1)...(513): n = A,T,C or G
ttttgaaaagggaaggacttgatatggacagtcnaggactttaactcatccttaaagtaagataacttattaagattttaaattctaaaaatattaactctactacatttttcttatcaggttttaaaactggagaacgaactctctcaataattcggctttcacacccattacagaggatttatatatgtttgttcttaaaaacatgacttttttccttttttcctggaatgagcttcattttactgagtctatttcattttacaacactggtaatcaaaagtttgatagtactgacttttttaaaacctttcagttacatagccttacatgattactgcgcagtctctacttggttattaatttttagatccttrtgtgcagttggaaagtagcagaaaatttggtatagtcacattcacaaaaatatgtcactatgttagtattacaaaaacatataaatggatcatgaacattaaaatgcatataatatagagttgttaataaaggaag

SEQ ID NO: 404909 - DNA, 571 bp, Homo sapiens
gggcaacagcctagccaggagtggcatggatccaaaggaactcccacccccagccaagagaagcggtgagtgattgtatgatcccactcgggaaaccacacttctcccacagatctttgcaaccagtggatcaggagatcccttcgtgagcccacgccaccagggccttgggtctgatacacagagctatgcagagtcacagcagagcagctgctcaggcacacacagagacccaggagttttgcatactgtggtcctgggattcctggcaaggagggagatacaaagctacatacacccgggggyggggctgaatccagggagccaggcagcgtcgttttaagggccccacttccatagcacctcacaagttaagacccactggcttggaattctctcaagccagcgatgacaggttggggtctgcctgagaaggacaaagttcccagggagagggatggccaccatctctgtggtttggtctacacagctgttccagcctgccagctctggagagtctagcctgtccagaagaagaggggtcccccacaatgcagcacagctgtgccac

SEQ ID NO: 404910 - DNA, 506 bp, Homo sapiens
ttttatttgaaaacaaattttgtcctcctatcattgtgataggaggaagcaaccaatccattaaaaattaagacggaaatagagaatgttaaatagaaaaacagacaataacaaatttcaattcttgtcaggctggtcatgctatgtcctcaccatcaatyttaatttaatagcaatatataaagattctagaatgaattatcctaaagaaagtaactagtatcttaattcttttttaggttaataattgacaactgaaaacaaatgagtctccatttcccttagtcagaataaaagacattatgcctagtatcacaaaaattacttaatactgctctggaacaactagacactacaattgtctagaattaataagagaacaaaaaacagaaaaggaggcaaaattaagtgtgaatgatatagccatgtatcagaccactcaagataatctatggaaagaatacataaaaccttatgattatgtttcatatgattatatgaaaata

SEQ ID NO: 404911 - DNA, 627 bp, Homo sapiens
  misc_feature (1)...(627): n = A,T,C or G
nnnnnnnnnnnnngggatatctaaaagaaactgtacttgttattgcaggtttggttacaaaagtacggctaccttccaccgactgaccccagaatgtcagtgctgcgctctgcagagaccatgcagtctgccctagctgccatgcagcagttctatggcattaacatgacaggaaaagtggacagaaacacaattgagtaagtaatggctcccatcctcctttctttttggtccttgagccaaactaagtagtctggaaaactttatatgaactccaccaaccagaaatggagtaatttgtctcatgaactttctttggaattatataacctaatttaaccccactcctccaatatttcataagatatttaaggcccaatgtcaggtttgcttacctgattttagcaacatagtttcaaagtagtaaagaaatatgaatgaaatgttgaggtaggtgtacagttgaagcyactacaaaaagagtgaccatgagcaacagaggtgggttgtgtgattgatgagaatatattgtacacatggcttcccaaatctctgttcattggtatcatattaggagcttgaaattggccaaatggaaatatctacaccctggaaactaggaaacaa

SEQ ID NO: 404912 - DNA, 525 bp, Homo sapiens
aatttcttgttatcacagggcttgttcttattttttaataattttgctttttaatgattggttcatcaatcattcacttatttattcagctctttattgggtgctttatctgtgaaagataaagcatgtacagattcagaaggcataatctcttcatcaaaggagcttaattcttatcttctgcatagatagacataatcgcaaatggtrttaccacaggtacacagtaagtttcgtaagattatgaaacagcattacttttctggacagcaaaggaagaagtgattaatttttttcagtagagggaaaaattatttgtgtttttagaatccttgatactcacaaagtttacatattttttgttacttagtttgatcatggtacatcaaccttcaacaataggaaagacaagcatgcatttttctctgctttctcaaatagaggaactaaatgtcaaaggctaagtgaacttcagagtagttgcagaatccgtcttttgacatttgatctggggaacttgccctg

SEQ ID NO: 404913 - DNA, 555 bp, Homo sapiens
tgacacattcaacttatatgtgtggatatcagccctcttgagttcatggtgaacgcattctactcctatgaatataccaccaaacccaccaacaatacaccaaacaggtagctgtttgggccaccagcatctgtgaatgtggagaacctctataaaaggaaycatcagagttaggcacaatggagagggaaatcagtcctcaaagtcatcacttttagacttttagacaattgaatgagggcaattctctatattcttcagataagttatatattattgttcccattttccagatgtctaggtgaagctgagagagcctaattaattgcctaaagtcacataagaagttcagctgaggtctggtaccaagtgtctcattttttccctaaaccaagcagttatcttcctgtgacacaggaagaccatttaccatgactgggacctctggtgctgagctgctggcaggagagctaaaatcccgcatattgggagagctttacaaaaggcattttccccctcacattaactttagaaatgtgataagggaagcattag

SEQ ID NO: 404914 - DNA, 536 bp, Homo sapiens
tagtcgggcccacctcttagtggcaaaatggctgtgataggctggcagcagggatgaggaaaagaagaggaaaaatagacaaagatgaaaagagttcctctatatgaatgttttaaggactttgaggatactgcccatatattttcaatcttaagacctcagcctcagcctttcctaccaatttgtctttttgtcttctgtttgctacaagttgaaaaaaaaaaaaaaacacaccaaaaccagccatcagaggcaggaggaaaagcagcagcataaatgtacaaatttcttcaacaaacaattaraaagcatatgctgcagtttcttcaaaaagggtaagaggaaaatgaatgactggagctcagagactaggataatcagtcaatatcaatgttattttaggtatatccacctaacgaaatatattattttggtgatgtcaataaatatgcaagattcttactgtaaaatatccatttcaagattaaatttgaaatgacatcttcctcatctgttaaatcttagactttaaataa

SEQ ID NO: 404915 - DNA, 529 bp, Homo sapiens
  misc_feature (1)...(529): n = A,T,C or G
nnnnnnnnnnnnnnnnnnnnnnnnnnnnnnattcagaattagggtatactgggatggttggcaatctcatgcctatggagaactagattcctgccattgtgttgttctagtctccctcatgagcaacctgatgatccaagaggctgcttgaactatacttaacatgtttacattaacagttaacggtgtatcacttaacatgttaggaaaatgtaagtatacctcttgaaaggacattttccataaatcatacacagtgtttctgcttaacatcattggccagaatataagcatggggccacacctaactccacagaaagytgggacatgtagaatgcccaggaggaaatggctaatatgataagttataatatctgccaaatgaagtgttttacaaatattatcatctttaacccccacaaaacaccctgtaaaagtgatgctaatactcccatgtttagatgctaaaacaaacatcccaggagagggtaaacaattctaccacttcattctcttcagccaacatttg

SEQ ID NO: 404916 - DNA, 587 bp, Homo sapiens
agaattgtttggtttcctacactgtctactcccatctccaagtatatattagcctacatttttttgttattaatttatagaattcactagttcaagagacgtttaatctaamttagtagatttactcagttttatttctcagtccatactctaggtgctgtagaatgccactttgctcatccaaaaagaaacatttttatcttcttcactaattactcacttttcgtgtccagagtaatgcattactgatttacagccatatttttttctatataaaaaggaaagataattggtaacacttaagaacacaggtaattaaacagcatggctgaatatctaagttgcttaatttaccagaaatcattaatgtatagcactactttgatatattttaaaattataaaattatgacatttagagtaattgtttctggttttggtgattattcatactcctttgtatttaaccttatgtttacttgacagtagaatggttcgttcttcctaaccaaataatcaacttatatttgtgtatttaattaacgttaatttattttattaatttgctcaataactattggtgaagga

SEQ ID NO: 404917 - DNA, 597 bp, Homo sapiens
ctgtcagcaggtctggctcactgggactgagttcaccacaatgttttgctggttgagatcatgsacacacaatgagtggttcagtggctcaaggacgggcctgctaggtgtaagtccaccaggctgtttctttcgctggggatgttgggcgggcttgctgggggagtttctaccaggttatttctccctccagggacatgagtgtgctgtggttcagctagcttgcgggtgaactcagtgggaaagttctgtcaggctatttctcaggccagggacataggcatatggcattgtgcttaggagctatgcaagtcacagctgttttggggctcaggctccaagcggctagtgtcatgccttgtggccacctgtgttagtaaggtaaaatgaaggtggagtttaaagatggacagaggcagtggctactggcccacagagcagagtgtgctccagcagcaactccggtttcaagatggtgccatgctgtattagcttgcgtcgtaagagtggagagtgcacagcatgagctcctaccctggagcaatgccaccgtgtgaattccaggcagttccccaaactgcatttagggactttaag

SEQ ID NO: 404918 - DNA, 624 bp, Homo sapiens
attgatggcctcttatatgttagaaattttactaatgtaaatatgcaagagatgtaggcttaaatattaagaaagggaatatcttggtccacaggctgctacaacaaactactataagctgagtatcttataaataacaaaatttacttatcatagttttggaggctgagaaatccaaaaataaggcaaatttggtatcaagttttggtacctgttttsttgttcataggtagtaccttctcactgtgtctcatatgatgcaaggagctagctagctctctgcagtctcttttataagagctctaatcccaatcatgaggactttgccctcatgacaggacctcccaaaagcccctactttctaataacatcactttagtggttaggattgtaacatattaatttggggagccttaatatttataccacagcatgaaatgacttaattagttttaaaatatttatctagaaaccattttaagaattatttaaaagtaattgtggaatagagaaagattgacattagataaaagtaattagcctattataatatttttatttaaaggataaattagtcagtagctgatagaattgtataagtgccttaggtttaaaaagcattcc

SEQ ID NO: 404919 - DNA, 599 bp, Homo sapiens
acttatttgcaatccagaaagtcttaattagtacagaaggygaacaaaatttttgaaaaaatgtaaaaattctaataaacatatatatttatcccccaaaacatgagtatgccattttcccctattatgaatggtagttaatatatactttttctttttgcatcctgtattagttcattctcacactgctaataaaggcatacccaagactgggtaacttataaaagaaagaggtttaattgactcacagttccacagggatggggaggcctcacaatcatggcaaaggcaaaggaagagcaaagtcacatcttacatggtggcaggcaaagagagagcttgtgtgggggaactgccctttagaaaaccatcatatcttatgaaacttattcgctatcacaaaaacgtcatgggaaagacatgcccccatgattcaattacctcctatcaggcccctcccatgacatatgggaattacggaagctacaattaaagatgagatttgggtggggacacagtgaaaccatgtcacatctattattaaatccaaataagtaacatacatttactgtaaaacaaattcaaacaagaattctatg

SEQ ID NO: 404920 - DNA, 301 bp, Homo sapiens
ccggacacaggcaggctaccctttgcctaccaaatcaagctccttacttaggtagcctacaggcttctgagaaggactctgggcctgtgttaraaatcccagtgcccttctctttatttctgacatgtaaaggttaaacattttctctatggggagactaaaggcctgtgttagaacttccagtgctactccctttctttctgacacataaagattaaacgttttctctaaggggagactaaaggctggtgctttaagcaaggcttgttttagttggccaaagacttttctagcctctggt

SEQ ID NO: 404921 - DNA, 587 bp, Homo sapiens
ctaatgagggatggacaaatataagttaaatattgtggtaaaaatgtatgtttgactgtgagtgttagaataggttgaaaattttttaaggttttttttttgcccttattttaaaaaattaaggaatatcatgtcagctctgatgacagagctttagaaaatctgcacaaattctgctttctgaaattcctttgctgcagttttatagcactcattttcattagtaactgtctttatatagagactctaagcagagtctttacttcctatgtcacttgyagtactggggactaactatgcatttcctcttagtaagagcatggtgtgagtgtgagagggcttccctcattcacgctgtcttttgcacaatcatctagggacaattctctgcattctttgtaagtctgcctggcttaagttatatgaatggtaaataaatctacctaaattctaattgcatttacttcaatgggtataataataatatagtattaattattttaatagttaataactatcaatatgtcatatttatttgtaaattttcagccaatacttcagcacagaaaataaaaattacctttaaa

SEQ ID NO: 404922 - DNA, 607 bp, Homo sapiens
aaactttatttcagcatgtgtatcaatttttttcttgcatttctggtctaagatgggtccccagaaaagcagtgggaaagcctgattatctggttgctgatatttacgttcagcagaggctaattttatttccaaataggaactgaggcagcaggaaaatcagggaatacagaaaaaggcacgttgagagattgacaacattgcctcagagaaagcaccatttaggtgccctgaattttctttgatttaccaagaaaagcactgaacaagattcagtcattctctctctctttctctatctctttcttcatagatgtgcatgtatacacrtatataacttcacatctatataactttacttatattaatttgacagtatgggcaatgtgtatttcttcatcatttttcaacttggcacaaatttagaatggattgtgataaaaacaatttggagaaaaataccacacttaaggatctatacatggaaaagactatagaaggtagattactacagggaatacacttgtgtatctgccccattagtgtctgctcagcttctgaagtgcagagacactttcttcctcaatttataaaagcaagtcgtaca

SEQ ID NO: 404923 - DNA, 571 bp, Homo sapiens
ttttctagagaagcattaaaaatccctggatcatatgtcaaaaaagaatacatatttctgcctatggagcacagaagtatcactttcattttagatgaaaaaagacaaagtaattccattcaaactctttcaaaagctttatagatgacttctttcaattttgacttactcccagggcaaaacccatatccattttattaaaagtcatgggttttatttatttatttctttgttgtaaagcaaaacaaatgtcaaagtgtaattagaagtgacttttcaagaatgggtcctgagtgccattcaaagaaacttgtattagatggagaatcatttcatctgagtctcagaccctagctctggacatctaaccaaaggcaattaagttatttgttggatatataaggcttagagggrgatagattcagggctgcaaatatagaaagtaatgctttctaatacacttggaatttcacatcaggttctaaagcagtgaactggttcttgaattcaacccatggaaagaatgtcaaagacttaaattcctcatatgtagtagtaggtggtaaggaga

SEQ ID NO: 404924 - DNA, 540 bp, Homo sapiens
ttagtttgattttagacattttgagtttggtgcactggcacactatcttggggaaatgtaaagcaaatattacagtcttatacttctgcctgctgcgaacataggttctagtggatttattataattattccttaatttattcaaaagattttcttaagcatctactttataccagatactgattggggcctttggtattcagcagtggataatataaagtccttgtcttcattctaataaagaacacattttatcctcttctaggacatgaaaaagataacttcrttttacagatttcttctgtgttatgatagcacagtaattgaattgataccttagcattatccagtatcttagccaaaactttactttttaacgtaatttcattttattatattatacaataaaagagctagctgcttaaccttgaaattttcgaaatgaaagagtaatagaaataaggtatagaacagaaactaaaggaaaacagtcttacacattccactgattctaagcaatgattttctgagtaaaatcta

SEQ ID NO: 404925 - DNA, 585 bp, Homo sapiens
actagctaaatgaccttgagcaatctttcaataattaggggtactggttttcttctttgaaaatatatttctgcctatatccaggaaaaacatgggattcacatctgataatttatatcaaagcaccttatattttactcagatgaaaaaaaataaatgattaatattggtgttgtgttgtcactactgttttgtggatcgctggagagtgattatataccatatgttccaggaaggacagtaaagctcrttactcattgctctgtaaactgaatctcctcatccatgacatctgatcctacttatcttctgttcacacattcctggcctgtctttatagtacttgtcaggaagatgacaagtaagtcaacttccatggctcctaacagtgattctgctccaaaacttcagttctgaggtttggggtggcatacctgaagctgtgttctggaatatattctctagaagcctatcaaggaaattagaaacagacttaaaaactgagatgggtttacaacccagctgtgattcaccatatccatttgtcttttgctattctcctcttatattgctgctagaagttcc

SEQ ID NO: 404926 - DNA, 630 bp, Homo sapiens
tgctatttctgataatagtttaatgatatacttttgtatggtagggaagatcatcatattatgatttcttttctagaccaaacttgaaaaagtgatttgtggaagccctgctttcgataaagttggatcctttctgagcagtgtataaatttgatcagaaatgttggcagtctttggtaccaaagcatgaaatcgagaaataatgaagcatgaagcttctttttttaccaaaccagagaaaccagatgttattacagagacctgtctttacagagtactgagatttttttcctagtcaaatgtggstgctaacactaacacacacaaacgacaattttgaagaggttgacaatctctaaaatttcaaacaggagcccttaaagtagtcaggcttttgtgactgcatcagcagcacataatgcactaaactcaggaagtggatgtgatgcaggagaatagggtctggaggcaggcagcacgagtctgattcatgctgacttactagaacgagatcaaatggaaacacttcagcaatgacataaatgtgaatggctttgcaacttcacttcatcctctccatttacaaaggcaacatgcaccatgttacatcttctccatttacgtaggcca

SEQ ID NO: 404927 - DNA, 582 bp, Homo sapiens
ttttgtgtgttctgactgctccactaactggctattcccacatcactggccctcttctcaggcytccctgtttcctgacgcacagcaacatggaaattaggccaattagcaactcaacaatagcttctaagagttcaagtgaaaagaaaatttgcacatctccactttagatcaaaagctaaagatgactaagcttagttaggaaggcatgtcaaaagctgagataggcccaaagctaggcctcttacacaaacagtcagccaagctttgaaagtaaagaaaaagattttgaagaaaattaaaagtgctactccagtgaatagccatagattaaaaaaaaagacagagaaccagtcttattgctgatatggagaaagttttagtgtcctggatagatcaaaccagctacaacattcccttaagctaaatctaatccagagcaaggctctaacactcttcaggttctatgaaggctaagagaggtgagaaagctgcagaagaaaagtttgaagctagcagagattggttcatgaggtttaaggagaaaaagccatgtccataatataaaagtgcaaggtgaag

SEQ ID NO: 404928 - DNA, 602 bp, Homo sapiens
ccagcactctttaaaaagaaaatccttaattaatttctgattgaaaaggggcatgtttacaattcttctttaaataagcttcttatatatttaaataaaacctggtactcaatttatctttctaaatttcagttggtccaactgacccaaacttgacaacagaaagaacaactctaaaaagaatagctattcttcatcactggccaactgtttaaatacatacaaagtatcttggatcagtctcctataatggtgtttaataaccagattttctgacagcccacaaagaatacaaagttttattttcttaataatgataccatgtctgtacgatggtgaaataggaagggtttcagtgactcakttttgtaaaacacaggaaaacaaaagaccagtgggcaccaggaaactaagtaagacctataaacttccctatttcaaagaagcagaaacactaagaaatggaagctaaggctcatatccttcagggaggacttcaactctctgatctttcaagtcaatgttagctttttgatattgatgaaataaatgatcaagtttcaatatagcaaagtcttagttatatgccctgatggagagat

SEQ ID NO: 404929 - DNA, 553 bp, Homo sapiens
gtgcatccattaaaaagtattatacttaatctgtgcttcagactttttttctaggtaatcgagggtagagcagatgtcaaagctctttcataaattttccatcaaagtagtgttatctatgtcagccctctgcrcgagatattacatgttgagatggcatattgatccacaggttacaaaagtgacatggttttggaaggcaaaaagaacatccttaagatattatcactaaatcaatagtgtaaaaattgtctgagggcactattataaaatagttttgtttgcaagattttccttctttgtatgtactttgatcaacagtgacaactcactcctcatgtaatcattaactatttcctttactatccttactttgtgatttgggtgcgcaaaataattcattttcaacatttctccaaagggcttgggttttcaaaggtattagcttaacattgctttcataatgtatatctaaaattctatctttggatatataatgtctgcactatttttacctcttcttttgaaatgaatgcaacacttatttcctaaa

SEQ ID NO: 404930 - DNA, 551 bp, Homo sapiens
atccctgtgtttaatgcccaccacaaggacagggaatgaatgtgtctatattcctgaagagccttgcactgcacctaacacrtaagaaattctccaaaaatatttgtgccatgccttcatggaatatcagtgtaaccaaagtgagatactatctttgttcttcacaagctgacacgctaccagaaaagaaaatgtataatatacaaatattgtagtctgcccttcatgattgcttataatcatcaaaagataactaaaagtgctatagttgttcagacgagaaaagagagtttaattacaggcacatctgcatagaagatgcagcatcaaaactggctcttagaacatgagtaggattaggtagacggagatgttggaggaagggcatctcaggcaaaggagacatgataagcaaatacagggatatgggaaaagatggggcatcttcatagaacagacactgcttggtttgattgagcattgggcaagagagtaggggtaatgaaaggcaaggctagaaaaggagtttggagaaagcacgtcttaaatta

SEQ ID NO: 404931 - DNA, 536 bp, Homo sapiens
cgaccaggtactggttcccacacttccaggctcaggaaaaggtctagagttcaaatgcatgcaaagagtcatccatacaactcttgctgggtagagttagctatgaaagctcccattaggcctgaggccagagctccttctggataaataaagtcattcaatgaagctgcaaatgtgtgacattttaagtgcactgacctaattaaattataccagttagtaaaacttttcaacttgaatagattttccattcctttgccataatattgtgaaagggactgggcagagacatgctaawcctggggaaaatttggtgtttggatacaggaagagcagaaaggcctcatgttgaagccttaataacaggaaaaataaaaagtggccttccactcatgagaaatgcttcaagtggcctcacaccatgggaaagcgccagtctactgggtggagctcagacatctctagttatgaaattttcatctctccctcatccccactggatttgtgagagtgtccatcttcagtagtaccaaccc

SEQ ID NO: 404932 - DNA, 507 bp, Homo sapiens
tgtttctatattttagcgcttatgaataacactgcaaaaaacataagagtacagatgtctttacaagatgatgattttatatcctttgggtaaacgcccagaagatggattgctgggtcttatggtggttcaggatttccktttctccacaccctcaccaacatttgttatttcttgtctttttaataatagctatcctaatgggtgtcaggtgatatttcatggtgctattcgtgtgtgtttccttgatgattggcgatgcttaacacattttcatacatctgttggccatttttatgtcttcttcaaaaaaatgtctgttcaggtatttgtccattttcaaacctggttatttgtttttctgctattgacttgtaagagttccttataaattttggatattaaccccttatcagacatgtggtttgcaaatattttttctcagtccataggttgccttttcattttgttgattgtttcctttactgcacagaagctttccagttt

SEQ ID NO: 404933 - DNA, 571 bp, Homo sapiens
tgcttcctgccttcgttttcagcataaatcaccccactagcttttcttgtcctctctccttgcccttacccttgggattctaaccagcctgaggaattcagctccttatgtactttagaattcagaccactgcattctctttcctctaaattttgttgtactcttaaaattatcccttcaaactcttcttttctccagttatcagtactaaacaagtaattgtttccctaactacatataaacaaattttaaaatgctatctgtggtatgaaaaatactaaaacatgttaatggatagaggaagagtagggtggaggtaaaattttagataagagataagaaaagatattgttgaagaggatacctttgaaatgaacaaaggaagcctgccatcaaatggctgagaggagaatgtgaagaatttgagacacttggcttgagaggaccccaactggtgtttcagaaacaaaaaggaagccrgctcaggatgaggaaagtgataatgatgcattcagaaaggagggcagtgggagattatgtgggtccttgttggctggacaagaagttggat

SEQ ID NO: 404934 - DNA, 633 bp, Homo sapiens
aagatgctgcttctgcttcaaagcaaaatagtagtgtttctgactatctaagagtttagtagctaatagccagagtacctgatgactagaaggtttgctcataccaaggttttagaattgattggtcagtcaaratttaaacataacatttcctatttgcgtctaatgtctttgtttgcaacatgggtgaaagtgagaggaaatttgaggataggagtttctcctctgctaggccaaagtgtgtgtggccccatctccagtgccctattccccacttctgaaaccagactgggatttgtcctgatcccctaactgagttcttacacagacctgctacagtcagtccattttttttttttaactctgaatgttttcttctccatagaatggagatagacattctgggctggtctttctcagtgctatttggctcatagaatctgagaagtgggaaggagttgaaagaagaatgtttagtgtaacgtcaaactggacatgtgactctccattgcattatcccacccagccaccacccctaattagttctttcacccctccctcaattccaacactttattaaatgttagttttttataattacttacactgtatagtttttctaggattatgtta

SEQ ID NO: 404935 - DNA, 577 bp, Homo sapiens
atcagtttcatccacaaaaagggttatcagcttctatcgtataactaaaaatagtattaggtgaacattttacagataagaatgcatgcttttggtacaaagcaaggttgatatattttatttctcatcgttcttctctttcttcctcaccgttcctctcaccctaccatttttctttcccttattcttctccatttctcctgcatttccaactgccagtaacatataaatccacttaaagcaatcatgggtattagtttcgctgacgccttttctaacatgaggatttaggcagcagaaagtatagatatcgaatgtgggcttgtgtttcctggttctaaattacaccaaatcagaaaagaattgcatttataaaactgaggggaaactttattgttttcttaaccggtaaattaaaattgtgtatatttatggcatacaacgtcatgttttgatatattgtatacactgaagaatggctaaatcaagcgaactttaggttttagtaacccctgtgtcatctttagtgycaaatgcaaaagaaagagccatgaaaaggggaagggaaaagataaca

SEQ ID NO: 404936 - DNA, 515 bp, Homo sapiens
ttgtgtatatataccacattttctttatccatttatccattgatggacatttaggttgattccctatcttagctattgtgaataatgctgcaatgaacatggaagtgcagatgtctcttcaacatgctgatttcctttcctttgggtatacagtatatccagtaatgggactgctgggtcatatggcagttttgtttttaactattttttctttttttttgagatggaatctcattctgtcacccaggctggagtgcagtggcctgatctcaattcactcactaccaccttggccacttgggctcaagtgatcctcctacctcagcctgctgaggaccagagaacataggcacgcaaggtgttactatgttgcccagactggtctgccactcctgggctctcaaagtgccagtactacaggcatgaggcactgcatctgtcctatatatwtttttttgagggaactctacactgtttcccataataattgtactaagttacattcccaccaacaa

SEQ ID NO: 404937 - DNA, 585 bp, Homo sapiens
ccaacataaacacacagtaaaagtaactgggagagatgagacagggtagaaacagaaaaactgttgtccaaataaattaatatcctcagagaggaaagagaagatatcatagctattggaacaaaaagcaagatrctatttttaacagaacattaagaatacaagaaagagctctggaaattaaatgtatgatatcagaaatttcacatgcaatagaaggattgcatagaagggatgaagtggagacagtaacctagaaagtaaaacaaaagacaaagagttaggacacaagaaaaataggccagaacggtcaacatttaatcaacagaaattccagataaatagaatagagaaacacaaagggcaaagttttgtcaaagaaataatccaagaaagtttctaagaactgagcttgaaagtacccaccagattctcaatacaatgaataatggaaaatccacaccacggcccaaaatcatgaactttcaaaatcaaaataccaagagtgaaaggtccaagatcttccaaaattaggaaaaaaaaaaaagttcatctacataaagtcaaaaatcaaaataacattgt

SEQ ID NO: 404938 - DNA, 552 bp, Homo sapiens
aagtgatcatttaccccagtcaggaggaaaactgttgggctgaaaaaaatgaaagagattgtgaaatcctctgatgatattgatgacatttcaccctatccaaagattaactcagtgaatggcgtaactaaaagaatgtgacttaaagatgtgccttacaaatactgaaactccatgtttttcaaagagattaatcataatagcatgaggataaggcatgattctgactaacagaaagaagctaatctgggagatcctcttgagtagattagccattccatgcaaaacgtcacagtggcaatcagaaaaggcatctctgaaatgtacaatgaagaaggacgttaaaagaaaatttatttacccagagtcagtgaataatacagtttagtctttatgtaaaaggctcagtcagarcaaatgatggggtgtccttgaggggttccagaaatttgaaccaaggatgagaatctgagaatttgttgctgcttcattcaatttctgtcacctcaatggctactcattctcttttctaccccctacagtcatgaacaa

SEQ ID NO: 404939 - DNA, 613 bp, Homo sapiens
agggtagtttggtggctgttgtgaatatttagtgagctggccacctgccattcatacataggaggcaatccctaaatccttgttcattactcagagtccctatactttttaagcttaaagtcagtgagttaatctattctttcttttcttgaattaaatgttatacaaaatcctagtattaaaaaacatattttaagtgaagctgttctatttaaggtaatgggggttagggagggtaggaatcaagccctgatcattcattttccatatgctgtagcctggtccctgaggcccctttgagtgacccctgctagtgaggctccaagccctaagaatatcaagcagaatatcaagtatgcactgacacataagaagaaagcctttcaaaacaaccatatctactggttatttataaaaattgcccaggtaactgaactgcatttgcttctctcttccctactgyttagtgtgtaacaaatagcaacatctttaaatggcaggaaacaacaagacaagaaatatgtcagcatctgtattgctcaggagatggaacattatgcaggtttgtgcagaatgattggctctcaagggagtaattagtatttggcgcact

SEQ ID NO: 404940 - DNA, 569 bp, Homo sapiens
gtggatggttagccactaaaagattcatttttaacaccatgtcatcccttcttaaaacaagtcatccatttgtaaactgtttttctttggggacattgtccccacaaacttttcatagagcatcaatgatttcaccattcttccatccaagttttaccataaatttgatgtttgttcttgcttcattattagcagaatttatgttgctattattagagaataggggcttttttgacactgatttcttatccttcttagtgcctcaaactaaatcctgttcaaacatgttataacaaattagtatgagctcatttttgtgcaaaaacttttgaaatccatgcatrgtttttcataatatccattttccttgacctttttgaagacccctcctataatgtggaataaaagtatttcagatatataaagattcagaatgtttacatcggaatctcacacatcctctcttagtaacttacttaaggatgctttccaaaaaaaaagaaaggaggaaaccaagaaaggagaacttcaagccaagagattagggaaccatgccagaaaaataagaa

SEQ ID NO: 404941 - DNA, 464 bp, Homo sapiens
tttacaaatgtatatacattaaaatttttatttgttctataaagttctgtaggttttaacaaatgcttaatgtctggtattcactgcaagagtatcaygcaaaagagtttcatgccctaaagcatcttctgtgcctcacctatccaaccctgcctttgcccccacactcttaaataatctgggttatcattaatctctttattacctttactgttctgtcttctctagggtgtcatataatcaaaattctatgctatacagctttttcaaatggtttcttttacttagcaatatgcactgaagatttatccatatcttttcctggcttgagagcccatctctttttattcctgaataatatcccattttctggatgtgccacagtttatttatccatttgtccactgaagtacatcttggttgcttcctggttttggtgagtataaagaaacctgctataaata

SEQ ID NO: 404942 - DNA, 464 bp, Homo sapiens
tttacaaatgtatatacattaaaatttttatttgttctataaagttctgtaggttttaacaaatgcttaatgtctggtattcactgcaagagtatcatgcaaaagagtttcatgccctaaagcatcttctgtgcctcacctatccaaccctgcctytgcccccacactcttaaataatctgggttatcattaatctctttattacctttactgttctgtcttctctagggtgtcatataatcaaaattctatgctatacagctttttcaaatggtttcttttacttagcaatatgcactgaagatttatccatatcttttcctggcttgagagcccatctctttttattcctgaataatatcccattttctggatgtgccacagtttatttatccatttgtccactgaagtacatcttggttgcttcctggttttggtgagtataaagaaacctgctataaata

SEQ ID NO: 404943 - DNA, 521 bp, Homo sapiens
gtctgggcccattttatttaaagtagaaaggacagcgtacctcaactgaaagctagactatatatgtatagaatgttcacatgcttgccatgttttagcttagtactgggctggagggaggccagacagggaagcatragaacagggagaaggacccaataccctacagtgtttcaccaccagggtgctggggagctcagtttgggaaacaaggcacctcatctctctccaggagaagcagtatgctacaatgggaagagctcaggccatgcatgatcggacagtcttgagtttgaatcctatccctgccaggcctgttatgtgaccgaatctagtatctgagtcttcttttcctcatctgtaaaatacttaaatgattcttgtcaaggttatcaagaatctgtgtaaagctcatagcaggtgttcagctctggcttattgttattccaccgtgtctagcagggtgccttgcacatactaggagcttagtatgattttgcaataataacatattgtagtct

SEQ ID NO: 404944 - DNA, 521 bp, Homo sapiens
gtctgggcccattttatttaaagtagaaaggacagcgtacctcaactgaaagctagactatatatgtatagaatgttcacatgcttgccatgttttagcttagtactgggctggagggaggccagacagggaagcataagaacagggagaaggacccaataccctacagtgtttcaccaccagggtgctggggagctcagtttgggaaacaaggcacctcatctctctccaggagaagcagtatgctacaatgggaagagctcaggccatgcatgatcggacagtcttgagtttgaatcctatccctgccaggcctgttatgtgaccgaatctagtatctgagtcttcttttcctcatctgtaaaatacttaaatgattcttgtcaaggttatcaagaatctgtgtaaagctcatagcaggtgttcagctctggcttrttgttattccaccgtgtctagcagggtgccttgcacatactaggagcttagtatgattttgcaataataacatattgtagtct

SEQ ID NO: 404945 - DNA, 527 bp, Homo sapiens
tacttcagaactaaaattaatggtaaaatctcaggaatagactggatgacataatctcaggggtaaatactaaatggaatttactttatacatagttctgcatcatgatttgaagttaattgttagatttagatatttctctgtaggttatgagtcgacaagcattctaagatgagtcaagaaaaataagctaaactgagcactataatgtgttaccaagatatgctgaaaakaacatgattatttttattataaactcacattgtaaaaggtatctaatttgactctattaagagtagcaatggacaatacagtggcatggtaagacaatgcaacatgtgttagaagataggagagtctatggaagcttttccactgttgctgtttggcttgggtaagccattatccattttgttcccaaatagacttctttattaaaaaatggcatatatacaaatatatgtagaaatcataattttatatcttgattaactattacaaaatacacacacccagataaataccag

SEQ ID NO: 404946 - DNA, 527 bp, Homo sapiens
tacttcagaactaaaattaatggtaaaatctcaggaatagactggatgacataatctcaggggtaaatactaaatggaatttactttatacatagttctgcatcatgatttgaagttaattgttagatttagatatttctctgtaggttatgagtcgacaagcattctaagatgagtcaagaaaaataagctaaactgagcactataatgtgttaccaagatatgctgaaaataacatgattatttttattataaactcacattgtwaaaggtatctaatttgactctattaagagtagcaatggacaatacagtggcatggtaagacaatgcaacatgtgttagaagataggagagtctatggaagcttttccactgttgctgtttggcttgggtaagccattatccattttgttcccaaatagacttctttattaaaaaatggcatatatacaaatatatgtagaaatcataattttatatcttgattaactattacaaaatacacacacccagataaataccag

SEQ ID NO: 404947 - DNA, 527 bp, Homo sapiens
tacttcagaactaaaattaatggtaaaatctcaggaatagactggatgacataatctcaggggtaaatactaaatggaatttactttatacatagttctgcatcatgatttgaagttaattgttagatttagatatttctctgtaggttatgagtcgacaagcattctaagatgagtcaagaaaaataagctaaactgagcactataatgtgttaccaagatatgctgaaaataacatgattatttttattataaactcacattgtaaaaggtatctaatttgactctattaagagtagcaatggrcaatacagtggcatggtaagacaatgcaacatgtgttagaagataggagagtctatggaagcttttccactgttgctgtttggcttgggtaagccattatccattttgttcccaaatagacttctttattaaaaaatggcatatatacaaatatatgtagaaatcataattttatatcttgattaactattacaaaatacacacacccagataaataccag

SEQ ID NO: 404948 - DNA, 548 bp, Homo sapiens
agtgtggcacagaggatcttacagagacccccaaggccctacaggaagatggggycaccagctggcagcagcctgggtcccagaatcactatttagcaaaacacctgtattgaactatatgtgagagagaaataaagtctaccttgttaaaactctgagatttgggagcgtatgtgagaacagctggccaaccctaatgagattgatcctaatagtggtgaaacagtgagtagtggagtgaaagtggtaagtggtaagatggcctcatcacaagtgtatagaatgctatagctcttccttggattgtgccaatggacgctgcaggaaaatcagtaatacttacatataataactacagtctggttaaggactatgacaacatcaaaggcaagtaagtagcacatatattaatgaggttattttgtagttctactgtgaatgataattgtttgtaccttaagacttcatgccttgatcaggtgtaagatatgtgaaaacagtcattctcaactccctgatgagggtcatataatttctcctctaagtct

SEQ ID NO: 404949 - DNA, 586 bp, Homo sapiens
ggattgtgccaatggacgctgcaggaaaatcagtaatacttacatataataactacagtctggttaaggactatgacaacatcaaaggcaagtaagtagcacatatattaatgaggttattttgtagttctactgtgaatgataattgtttgtaccttaagacttcatgccttgatcaggtgtaagatatgtgaaaacagtcattctcaactccctgatgagggtcatataatttctcctctaagtctttacttgggatactaatgayggtaagaaagacaaaagattgaagttaaacaaatcaagtgagcacagctgacaagtggataagtgctaatcaatgaatgtacagattgtctttcctgtcagatctatctttagacttgattactattagatcacccagagacacaccacccatctgcaccaagttgcattctatcttctttcaaatttccaaatttctgtttaaccactacagtaattgcccctttgtcctcacatatgcattgactgcagcaattgatacatcaaaaatccttgaaaacagtgccatagaaatggaaaaacaaatttcatatttgga

SEQ ID NO: 404950 - DNA, 429 bp, Homo sapiens
aaactggggtcttgggtttcaacatataaattttggaagggcacattcagtccatagcagaacatgaggcttagcttgaaagactgcaataatcccttaattacaaatttaggtctcaggatctaccatcctcaaagcaatgataagaaatgtagtgatgtttgcaaagagggaggcatggcagagttccaagtggggcttgatttagcctgccactctgccaggtggaacagaagggagagaaaataccgtatgaactcctrtttttaattacattgatctgtaccagcaataaagaggaaatatatcccaatcgatgctctgggaattgattagtcaggttatcaatgtctttctggaggcactgagggtggggaaagagaaagatatgaagaatgaaaagagacataagaagatttgagatgagca

SEQ ID NO: 404951 - DNA, 545 bp, Homo sapiens
tgtttgcctccttcaagccttaaggggcctgtgcaagtgagagccctggaagattcartattacagtaaatcttctgagcagaagtcttgtcattgcagaaaccaaaaatctttgaaggcattatttctaacttaaggaatgagtcaggttttaactgaagaatagctatgtacctatttttaaatcaaaacgtttcctaatgatctcctactgtagaaacaaaatttaagatggaaattattttctggagctttaaactcttaaaataacaacaataatcactacttagttatcacttacatgtgctagcacttaacatatgtgatttctaatatcacaaaaaccctataaaactggaagaacacaaacggcaataggccttctaaaaattcttgttagggaaaacagatttatggaataaagcttatgcatttatacagagttgcttgatttaaatttcaaaggtaagttgggttctgatagataaatcaatttctaaagattaaacagggattcagagtaaggcaatctctcagatgtgtta

SEQ ID NO: 404952 - DNA, 581 bp, Homo sapiens
gcatgggaacatcttagaaagcaggcatatgtatacatatgctccctccaaactctgtgtataacaaggaaaacaaagatagtcaraggttttttttgcatatccgttcttcgttaaaatgagacgctggtgatcttggacacagagtcatagctctgccctactgagcatagttcactggctgccagagactgtctctggaatgctctttttggaagcttccatttctctagagagagagagacaaataatagatagtttttgagttttcgagaaactctacttagtttctgccttagtgccagaagtactttgggttcgatgtcaaacataccattttggtcgcccttccttcttgcctgggctcatatcagttagtaccttcatgtctactgcctcctgttcatgccctatcttccccatcttagcaggaatagacgaagggttaggccagggctttctttgcctttgaactatgttaaatgactccttttcaagatgccagggtctagcaccctaagaacattttaccttccttgttttaaaaaggaggtatgggcttggagcaacttgcattctct

SEQ ID NO: 404953 - DNA, 606 bp, Homo sapiens
attccaatatgacatgaaaatattatgatagtgttaagtacaggatgccttcagagagcagaaaattacccagaaaatctggataatcaggacattttgggggagacaagctctctgtttacactgatattaactagtggttggtgaggcaagaagaaagagaagggcaatccaagcagctgtcactgaacgagcaaagacatggaagaaagaggcaatgcagtgtgtttaggaaaacacaaatacttctctggttctaaagagtatccagcaaaaaagcaagattgactggcaaggaagctagagaagtgagtctgatgttcctctcmccatatagaggaatagagttgtgtgtatatatatacacacaactatatatatagttaaatatatataaactataaatataaataaatatagttatatatataaaaatatataatatataaatatatgatatatataatacatattaaaaatatataaatatatagttatatataaatatatttatagttactataaataaatatagttatatataaatataaatatatatcaataaatatatatagttatatataaaatatatttatagttaatata

SEQ ID NO: 404954 - DNA, 627 bp, Homo sapiens
ctccccggagagactggacccttccctggggagccagcctgatccagggccaaatccaggcttccatgttggttatggggtgtgggtccagagatgagccctgaaaaaaaaaaaggcaggatggtgtttgtgtgcgtggtttttttttccaagggggtctaattcagtctctcgcacatgtcttgcccacagcacctgggccagcttctggccggaggggcctcagaaacctcagccgctcatgttgcaacagcgtggctgccacacggcaacgccgacagctgctcaggaagatgcggcgtcaggctgcccgacacaggtggccaagagagggacggaccaccctagccaagcgcagtgtggagtccggcctcaaggccagggcggcgtgactgcccgctgggggaccgtcacctccccgctcccaggtgaggtgagatcctgaaaccgaacctgccttgaccagttcccccttccaacggcaacgaaacatgggacttccaccaacgattcctctttgggagtcgtccgtccgtagggcaggacgtggagggctggattcaggaagttgctgggcgtcttcagttttcaacttcacrttttcacttttcttatcagaaaggtgca

SEQ ID NO: 404955 - DNA, 383 bp, Homo sapiens
attccattattgctatgttattaagaagaagaatttatgcagtactcacacacaaccttttgcaaaggctgcacgaggtttagtcatgcaaatgtccaccttgtaatacccatgaaaagcatagttaagaggccaaagacagaagaaaagggcatcccaatagctgaaatgggtatacaaaagccatgtattcttgcctaaggaggccccgattatgctctcccttgtagcctgttaggaatttatgtgcaatgtgaacatgcttggttatccagctttccaatccgttaaggaataaaamctgcacattaaaaaggaagcaatcaaatagccatgagagctggtacaacaacacccgccatcatgacaagcgcaggcagcaa

SEQ ID NO: 404956 - DNA, 383 bp, Homo sapiens
attccattattgctatgttattaagaagaagaatttatgcagtactcacacacaaccttttgcaaaggctgcacgaggtttagtcatgcaaatgtccaccttgtaatacccatgaaaagcatagttaagaggccaaagacagaagaaaagggcatcccaatagctgaaatgggtatacaaaagccatgtattcttgcctaaggaggccccgattatgctctcccttgtagcctgttaggaatttatgtgcaatgtgaacatgcttggttatccagctttccaatccgttaaggaataaaaactgcacattaaaaaggaagcaatcaaatagccatgagagctggtacaacaacmcccgccatcatgacaagcgcaggcagcaa

SEQ ID NO: 404957 - DNA, 586 bp, Homo sapiens
gataaagtcccaatttgctctgaaaggtgggtccagttttaagtggattcgctttctcagtgcgtaactcacttgcctttccgctgctactccccacccacagcagacatcactaatcaatcacagagcacatcacactccctctaatttgcagccctttccattcacctacttgggtctcaggttaaattctccagaacactttcctggccattcccaagctgggtcagccaccctttccccatgctcacctttcatgatgtgggtcacayggcacgtcacatccctgctttctcatctgtctctcacagcaggtctgagcttctgagcccacaggttaatgtcctgttcactgtgaccccagggcctggtacaaagcctggcatacagtaggtgggcatcacagaggtgtccccaagatctcctgcatcctgcctttttgtgattttagacataggttggggaggggctgattctactgcaagatcagatgtgaatccttgtcagcacgctcacccctggtaagtcagacctaaaccaatcagagtgagttattcctcagcccagagggattgatggagaaatg

SEQ ID NO: 404958 - DNA, 586 bp, Homo sapiens
gataaagtcccaatttgctctgaaaggtgggtccagttttaagtggattcgctttctcagtgcgtaactcacttgcctttccgctgctactccccacccacagcagacatcactaatcaatcacagagcacatcacactccctctaatttgcagccctttccattcacctacttgggtctcaggttaaattctccagaacactttcctggccattcccaagctgggtcagccaccctttccccatgctcacctttcatgatgtgggtcacatggcacgtcacatccctgctttctcatctgtctctcacagcaggtstgagcttctgagcccacaggttaatgtcctgttcactgtgaccccagggcctggtacaaagcctggcatacagtaggtgggcatcacagaggtgtccccaagatctcctgcatcctgcctttttgtgattttagacataggttggggaggggctgattctactgcaagatcagatgtgaatccttgtcagcacgctcacccctggtaagtcagacctaaaccaatcagagtgagttattcctcagcccagagggattgatggagaaatg

SEQ ID NO: 404959 - DNA, 561 bp, Homo sapiens
ttgtgcgtttatggatttaaaaggggatgagttcaatttttttttctttagagacagggtctwgctctgtcacccaggcaggagtgcagtggtgccatcatagctcgcggcagcctggaactcctgggcttaagcgatcttcctgcctcagccccttgagtacctggaactacagacatatgccaccacacccagatatacattttagagacaggatctcgctatgttgcccagtctggtcttgaactctcggcctcaagtgatcctcccacatcagcctcctaaagtgctgtgattacaggtgtgagccactgcgcccacccaaattagaccttggtttgaaaactctgaactctggcaaaggcttttctctaaccagaccttgtgacgtcacttgaacctctccctgaggcttcctcacctgtaagttgagaggctgtatctcaagagacccagaattctaaagcaggccactgtgtttatcataaagaagggacagacttgggagagggtacctgagaagagaaatggaacaccaataccaaagacccccccacactc

SEQ ID NO: 404960 - DNA, 584 bp, Homo sapiens
aacaaacaaaaaaaagaaagctgaactgtaatggagcaaataactttacactagtggtaggaagaaaaaaggaaaagaatacttgctgcgcatttattgtgtgacagacagattcacaaatatcagtgttaagaggtctgaaatggaggaaagaggaagtctggtaaaagataatcatttaggtgacaaataaaagccctataactgtggaaaatacagttacagcactttaaaagtgtaaaaaataataaacatataaaatcagaattttggaggaagggaagyaaaagaaagtatcaatacacatattgtctgttcttttatagcaggaagttaatattggaattattggaaatagtgataatactggaaatgttggaaacatttggtgaaaagataaactacaatgattccaatctttgagatatttcaggaccctatctactctcattattttattattttatttttatttatttatttatttattttgagagtctcgctctgtcgcccagactggagtcttggctcactgcagcctccgcctcttaggttccagcaattctcctgcctcagcctcccga

SEQ ID NO: 404961 - DNA, 552 bp, Homo sapiens
ttctttgaaggaaagatgccataattaataaattaatttttaagtattttttatcctgtagccattatttttgtaaactatgggaaaaaagaggaaaaaacagatgattgtgcttaagaactcaaggcttcctaatgaaatttgatatttctggccccatataaaaatgccatgagtgatttgtgaagaytgaaattaaagaatatagttagcaaagtctatgctctgaaataatggggaaaatgatgcctttgtcattcccccctcgcttggtaaaaaggaactgcgggcttagagagccccagcaaacggggcagctgatacctgcatgccaattctgcctctgccaggtgctagctctgcattcttgggttatttacgtaacttctgataatcatttccttattcttaaaataacatagtaatatacatattatctgaaaaattgttttgctgcctagtaagtactttgaacattgtagtaattttattttcctatgggaaaagggagcatattttgatatccctgaaattcattgttcttgcttagaa

SEQ ID NO: 404962 - DNA, 628 bp, Homo sapiens
ggaaatactagtaaaatgtgatgtgatattgttaattgcaggggtatgagagcagcattaaaacagtattttaaatatatgcactgtgcatagtacttttttaggaaaatataatgatgcatcacatccagtgaaggatatattgctacttcctattctatatcttgaactttaattacctttcaaaggccagggcatcctcctttcagacatttgcagtcattttagctgctgaattatactgttgagaataaaaggatgaattaaattgccttctgaactgtgggaagttattattctctccatcgtcactgttaacaggaacatgccttggctcttttacaaattaaagtgaaatttcacaataatggcaattcatttcattagatgaacaagtggtactgctgcaaatgctcttgtatgtacagacacaaaacacattamattattgcaatattctttcatgtagaaaatattttatttatactcagtgtacatggaaacacttaagaatgtggcaaagtgtgaaaaggaaggctattaaaagatcagctcaatatcttcttgctgaaaactcactgctgtgttggccttgacatgacctatagaattttatggcaggaaacca

SEQ ID NO: 404963 - DNA, 637 bp, Homo sapiens
tgggtggaatatttttttcttaaattctcttactatgagtcttttaatgttttggatgatttatctcttttgtttatccttactaagggtctgtattactgtcacaactactatcaccatccttatcactcccatccatattacttgtttctatgatgggctggtaatcagctattacacactmgctctcccaattgttataccactgaaggactcctatgtggtttggtaaaacctggcttccttgtagttcctcacatggccccaaatgcagcagtattcaccctcataagagccaatgccaagcccgcaaggccctacttgagcattaagacttgaatctgctctgattggtgactatgatgtgctggttgcaaaatattttaaatatttcttcagcttcaatgactcaagcactcatattcttagtgtgctaagcactttaaccagatgtcatattaaaagaaaaaaagaatacaatatccctgaataattgatgctatctcccttataaacaatgggaaaactgaagttcaaagggtatgaagtgacttgcccaagatcacactgccaggaactggcttggctggaattaatccagaactgtctgactctaacatctacggtgttaattagg

SEQ ID NO: 404964 - DNA, 602 bp, Homo sapiens
acattactaaagatttatatagagcaagtctttttattcaggacaccatattcatgtatttaaaaaaattcaaagacaaaagcaatatagtttgaagaaacaacaagtatcagaactggactggaatattcagggatccagagcagaattttaaaacaactattaatatgccaagggctctgatggataaagtaaacagcatataaggataaatgggcagtatgagcagagagatggaaaatctaagaatcataaagaaatgctagagttcaaaaacacaaaatgaagaatgcctttgatgagttcatttgtgtatgggacatggctgaggaaaaagtatcttaacttgaagatatctcagtagaaacttccaaaactgaaaagaaaattgaaaaaagagactaactaaaaaacaaaaatggaatatcccagaactgtgtgaaagaatagaacaatcaataactgggacaactacaaagtgtgtaacgttaatgtaatgagaataccaaaagaaggagaaaaaaaagaracagaagaaatatttgaagcaataattaatgtcagataccaacctacagatccaggaatctcaggaaacagaa

SEQ ID NO: 404965 - DNA, 540 bp, Homo sapiens
cattcttcactttcctttagaaatatgaattagtcatgaaggccataaagtgagtgccttggtcagaggcaatgctgtgtggaataccatgatggtgaataaggcattccgtgagttcatggatggtagtcttggcagaagcattgcatgcaggacaggcaaacccatatccagartaagtgtctattccagtgaggacaaacctctgccctttccttgatggaagaggtccaatataatcaaccttccaccaggtagctggctgatcgccctgaggaatggtgccatatcgaaggctcattgttggtctctgctgctggcaaattgggcactcagcagtacctgtagccaggtcagccttagtgagtggaagtcatgttgctaggcccagatataacctgaatccctgccatgatggccactttgttcataggctcattgggtgatgacaggggtggctggggaaagaggctgagtggtgtccacagaatgggtcattctatccacttgattattaaaatcctcctgccactgacacca

SEQ ID NO: 404966 - DNA, 540 bp, Homo sapiens
cattcttcactttcctttagaaatatgaattagtcatgaaggccataaagtgagtgccttggtcagaggcaatgctgtgtggaataccatgatggtgaataaggcattccgtgagttcatggatggtagtcttggcagaagcattgcatgcaggacaggcaaacccatatccagagtaagtgtctattccagtgaggacaaacctctgccctttccttgatggaagaggtccaatataatcaaccttccaccaggtagctggctgatcgccctgaggaatggtgccatatcgaaggctcattgttggtctctgctgctggcaaattgggcactcagcagtacctgtagccaggtcagccttagtgagtggaagtcatgttgctagrcccagatataacctgaatccctgccatgatggccactttgttcataggctcattgggtgatgacaggggtggctggggaaagaggctgagtggtgtccacagaatgggtcattctatccacttgattattaaaatcctcctgccactgacacca

SEQ ID NO: 404967 - DNA, 617 bp, Homo sapiens
gccagagatgaaattgctaaatcatgatagttctatttttaattttttgaggaatgtccatgctgtttaccataatggctgtaccaatttatattcccactaacagtgtactagagttcccttttatccacatcctctccaacacttttttttttttttgcaatagccattctaacaggtgtgaggtgatatctcaytgtgattttaatttgcatttttctaattattagttatattgaacattttttcctatacctgttggccatttatatgtcttcttgtgagaaatatctatttagatcacttgctgatttctaattgtgttttttcttacttttgagttgtttgagttttttatatattttggatactaaccccttatcaaatgtatggtttagaaagattttctcctattccatattttgcctcttcactctgttgatggttttctttgctgtgcagaaggttttcttgttgctgtaattccatttgtctatttttgcctttgttgtttgtgctttcagattcatattcaaaaaatcattgcccagaccaatgtcaaggagattttctcctatattttcttctagtagttttacagtttaggccttatgttt

SEQ ID NO: 404968 - DNA, 576 bp, Homo sapiens
ttataatggtaaatgcctacacttagaaaaagaatctcaaataaacaatctaactttatacctcaaggaactagaaaaataagaacaaaactgatcccaaggttagcagaaggaagaaaataacaacgattacacagaaataaagaaagactagatggacaatagaaaagttcaatgaaactgaggtttcttttgaaaaaatgaacaaaagtaatcaagttttatctaggctaaccaagagaaaaagagagaggagtcactgccatttctccatgtatacaataaagctaaaaatcaatgctatcccaaggatataattttatcactgatatcccaacaatataattttatttataaaattataaagaaaagtggagtcattacaactgataccacagaaatacaatgaaaggatggtaggagactactgtgaacaactgtatgccaataaatcacatagcctagaagaaaatgtacaaacttctagaaatatacaaccasagtagatataaacctatgcatatacaaggctgactcatgaagacagaaaatctgaacaaacccataatgaataag

SEQ ID NO: 404969 - DNA, 638 bp, Homo sapiens
atgcagaaaaaaaatttgacaaaattcaacacgctttcatgaaaaattctcatcgaattagggaatgcacttcaacataataaagaccatacatgaaaagcccacagtaacattatcctcaattttgaaaaattgaaagctatgcctctaagatctggacaaggcgacggttcccactctccccmcttttattcaacataggattgaaagttctatacggagattggtataattaatattgtacaaatgtccacactgcacaaaactatctataggttcaatgacaattttatcaaaattccaatgataatttttacagacatagagaaaacaatcctaacgtgtacggaatgacaaaagacacaatcttaagaaatatgaacaaactagaggcattacacatcctgatttaaaagtatattacaaagctgtagtaatcaaaaccctatggtattgccatagaaacagacacattaagccaatgcaacagaatatcgagtctggaaataaacctacacatgtacagccaactaatttttggcaaggatgacaagaatacacagtgatgaaaagatagtctttttaataaatggtgctggagaaactgaatatccatatgcagaagaataaaagtgtgc

SEQ ID NO: 404970 - DNA, 638 bp, Homo sapiens
atgcagaaaaaaaatttgacaaaattcaacacgctttcatgaaaaattctcatcgaattagggaatgcacttcaacataataaagaccatacatgaaaagcccacagtaacattatcctcaattttgaaaaattgaaagctatgcctctaagatctggacaaggcgacggttcccactctcccccmttttattcaacataggattgaaagttctatacggagattggtataattaatattgtacaaatgtccacactgcacaaaactatctataggttcaatgacaattttatcaaaattccaatgataatttttacagacatagagaaaacaatcctaacgtgtacggaatgacaaaagacacaatcttaagaaatatgaacaaactagaggcattacacatcctgatttaaaagtatattacaaagctgtagtaatcaaaaccctatggtattgccatagaaacagacacattaagccaatgcaacagaatatcgagtctggaaataaacctacacatgtacagccaactaatttttggcaaggatgacaagaatacacagtgatgaaaagatagtctttttaataaatggtgctggagaaactgaatatccatatgcagaagaataaaagtgtgc

SEQ ID NO: 404971 - DNA, 536 bp, Homo sapiens
atatgtactcatttccaatcagtcactttcacttgactatttcccsttaataattcatgttgatgtagcaagtggaagcttatcttagtatgttcaggctgctataacaaaatgtaggtgacctaaaaacaatagtagtttattttttacagttatggtgactgggaagtccaagatcaaggtgctggcaaattagatgtctgcttcctagcaagctgtctttttgctgtaacctcatgtggcagaaatggtgaaggatctctctcaggcctcttttatacaggcaccaatcccattcatgggagccacactctcctgacctaattaccctccaaaggccccacctccaaataccatcacaactggggattaggtttcaatagaggagtttggtggtgatattaacattcagtctatggcaaggctgaaaaagctaatctctcaaattggaaggaagaaataaaggcttctgtggattgagaataaggatgccagatgtatgaaggcagcctctcccctgtgttacatcagaagac

SEQ ID NO: 404972 - DNA, 518 bp, Homo sapiens
ctatttttactatctgagcatggggtaagccattccctgagtggacaaactatctgccagttgtggctattttaatgctataacaaacaacactaaaatctcaataactcacaacaacaaaaaaagtgtgtttctaacttaaattttatgtctatcataagttgactctgactctttttcttgttatcttactccagcatttgggcttacagtggagcccctatctaggacattctcagtctaagcatagactttacaaaaatagcakagaaacattacttagtaaacaaatagctatagcccacagcaaataacaaaacagaccctgaagatggaaaaaaatcttttttccagagttattaaattatataactcaaatatacagtttttaacaaaaaattatgaaacatgcaaaaaataagaaagtataacccattcacagaaaaacgttacagaaactatccttgagaaagtaaaggctttgaatttactaggcaaagactttaagttaattatat

SEQ ID NO: 404973 - DNA, 495 bp, Homo sapiens
tattcaaattaaggaggaatctctgacaataaaggaattaggaatgtaccccttagacaggagctcacactaaatccagcactgaaataccagaaagaaagaagtcaaagggggatatgaggacttttaaataagaaaaatgatcagaataatgaatactatatcctcaagagagcagttttgaaatgaactcttagatttgttttctagaatcatattttagaattccttcaagcacagggctaacactctgatatttacatatgatgtgtgtcttgttgattcactggaacctgagaaatgagggagacatgtgatttgatgttagaatgatcacttgctactggaggagcaacaatggttctattagatacagtgccaacaagacggattacgggccctctgcatggaaattggcagtataagaaaaaatacgtgtaaagagttatttgaacatatgtyacaattttaatttgcctgtggaaataaaaggtt

SEQ ID NO: 404974 - DNA, 585 bp, Homo sapiens
gctgggtgaggatttgggtgattgkttgaaggaatgttcttaagaaaagactacttaaggaaggagaatgggagaaggaggagtctaagcacggatgtaacctgtgctgaaggtgacttttatctttgcaggaagttctggagcctcaattacaccaccttgaggcaaggagtctggctttttgtatctcgtgtcggttggttattggctgttagctctgggaagaaggatggtctaacttccaggatgaggttgttatccagccaaagaaaattctagggagacaggcagctgtgagcttacaactcacagcaactgggacatggtgtaccgacttgtaaaggaaatgtggcatttgaccaatagcatccactatattatacatgtccagtttccagtccattttactaggtcttctactcattttataagtatgtaatgtcctacagatatgtatatacacacacatataattccttatatattgcttaaaagagctttagtaatttctgctttgcacaactaaattctaagaaaaacatgaacaatgattcatgatataagaagtagaaatttccaataata

SEQ ID NO: 404975 - DNA, 385 bp, Homo sapiens
tggaaaacaagttctcttaaacatgaagagatttaatcctgagaattagaggttcacacaaatcactggaagggtagctgagattcatggaaggatctgacacagaaactccatagaactggcccaccgaaagaaaggatgattctgctaaaatccagaaccttgaaaatgggggtagcctctgacccagctgctggggtccagatctggggatagggagctactgtccaaactgttggccccagggctctgttacagctgcttcatatgcagcagcaaaatgttttaagggctattgcctgtctccctacttagcttaattacagattcgatgctcaggcaagtgcatctaaatgrtgggccctaaattacatctggaacccca

SEQ ID NO: 404976 - DNA, 264 bp, Homo sapiens
tcctgtcctttgagacttataaagaaaactgttttttctttttctttgatcttatggtttttataaacttggatcactctaattacacactcaatttttcccatgtcttcatactaatacttgtcaacatggttttcaaaattgactcacttttcttcctaaaayacattcttgtgagagaaactagtgaagagggaaaaaatgtgcacaagtgtagaaaagaccatggtgcttgatataaaaagtggtacccagatttagaga

SEQ ID NO: 404977 - DNA, 622 bp, Homo sapiens
gttttcagctcactttacttagtgtaaacaattcagtatgtagggtaaagtgcaaatatccttaagcaagccattaggagtttcagtaggtgcttaacacttgagtaataattaatttatgcagtttactaatccaactataaaacatctgtggtgggcaggaggtttacagctggagtctcattaagggagagcagatatggataaccagcaagaatgctggtgaggaagtgattctagaaccctacagatgatkccaagtggaatctttcaatgcctttttttaccttttggttagctttggtgtcaccaaatcttatgtaggaagttgaattattggtgtcaattcttcactctcttgtttggaaattttgcatctacatccttgctatgtcctcatggtgaaatcacatgcctttttacttgcttttttcaatcaatgtgatgaaaaaaggtgactaggtgacttgcttttttcaatcaatgtgatgactgatttttgttggtaggagatttttaccaagtatcaaaaattcttgtatataattcttcaataacttttcaaattgctctgattccataatggaatactaatagtattaaaatataataagtcataata

SEQ ID NO: 404978 - DNA, 599 bp, Homo sapiens
tgtttcaaaacatccaagctatatactcatggaaatcatagtaatattgattgtaaattgtatcattgattgcagttttactatatgccaaacattgtgacaagcattctagattgtcatttaattattaaaagtatttgagtaggttctagtaatatcctcattttatagctgaggaaattaaggaaaaaatctatttttcttaaattcctaaagtcatattgaagcaaaaatgtctggtatcttctgtcaacataaggaaaatatgatctattgacaaataaactgatttamattaagtgagtgctgcttcgtgttaggccatcacagaatggggtagggactggtgtgaccccatgtcccaccactactaccattgacattatgtcgaaggcttttcaaatatctgcctacccatctaataaatacagacttggccacattttttccttatttgttagtgattgatggtgttaaatggaacagcactgaaaatcttgttaacgtcaagatatatttaatctattgcttcaccttcatctcctaagtcactatcacatataaagaaattagactaatctaacatgattcatattttt

SEQ ID NO: 404979 - DNA, 599 bp, Homo sapiens
tgtttcaaaacatccaagctatatactcatggaaatcatagtaatattgattgtaaattgtatcattgattgcagttttactatatgccaaacattgtgacaagcattctagattgtcatttaattattaaaagtatttgagtaggttctagtaatatcctcattttatagctgaggaaattaaggaaaaaatctatttttcttaaattcctaaagtcatattgaagcaaaaatgtctggtatcttctgtcaacataaggaaaatatgatctattgacaaataaactgatttaaattaagtgagtgctgcttcgtgttagrccatcacagaatggggtagggactggtgtgaccccatgtcccaccactactaccattgacattatgtcgaaggcttttcaaatatctgcctacccatctaataaatacagacttggccacattttttccttatttgttagtgattgatggtgttaaatggaacagcactgaaaatcttgttaacgtcaagatatatttaatctattgcttcaccttcatctcctaagtcactatcacatataaagaaattagactaatctaacatgattcatattttt

SEQ ID NO: 404980 - DNA, 611 bp, Homo sapiens
ttttgcatgctttaacttatctaacacacacagaaaaaggaaagtcattttattactctctcctaaaactgataaagtatcagaaattctaagtaactttttatgttatagagacaattaggtacatttctaattgactctgaagtgttcttttttattaagtatgttaacatttttcttcaaaagtgtaccagcttttaattaatctttggagattacttactttttgaagattttttactaacaggtatttaatatggtcctatccattgatgtgcttatctatttttcttttcttttcttttytttttttttttttttttttttgagacatagtctcgctctgttgcccaggctagagtgcagtggcgtgatctcagctcaccacaacctctgcctcccgggttcaagcgattctcctgcctcagcctcccgagtagctgggactacaagcgtgtgccaccatgcctggctagtttttgtatttttagtagagatggggtttcactatgttggccaggctggtctcaagctcttaacctcctgatccacccgcctccgcctcccaaagtgttgggattacaggcgtgacgaccgcgcccggccgtgct

SEQ ID NO: 404981 - DNA, 611 bp, Homo sapiens
tctgtatggacccaaacttataattgtatcatatttttggggtaacctcttgctcctccttggaattattatagtttaygttagaagcattctaatttgttctcagtgtcatgtatcactgaatctattacatatcgcactttgaaatatacataggtatttatatattatatgatacatatttatataaaatattatatttaacttctaggctctcaaatgtattcctcttctctaaaaaggactatatttcctccataaaaattcatatatgttttgcttatcaatataaatttagaagtagcaaaaaaatggagttttgatagaaattacactgactaaatataacagtctggaggaaaccaatacactttttgcatagatgacatctatttctttaccatgatataactttatttttaaaaatcttatcacataaagtggtgagttaataactattagatctccagtagaatgattagtagaaacaaagataattgcatgcttgtcttccccctgattttaaagataatgcttctaacattttcattaaatattgttttgccataggtcttgataaatatttttcagacaaaggtagtgctgttcta

SEQ ID NO: 404982 - DNA, 611 bp, Homo sapiens
tctgtatggacccaaacttataattgtatcatatttttggggtaacctcttgctcctccttggaattattatagtttacgttagaagcattctaatttgttctcagtgtcatgtatcactgaatctattacatatcgcactttgaaatatacataggtatttatatattatatgatacatatttatataaaatattatatttaacttctaggctctcaaatgtattcctcttctctaaaaaggactatatttyctccataaaaattcatatatgttttgcttatcaatataaatttagaagtagcaaaaaaatggagttttgatagaaattacactgactaaatataacagtctggaggaaaccaatacactttttgcatagatgacatctatttctttaccatgatataactttatttttaaaaatcttatcacataaagtggtgagttaataactattagatctccagtagaatgattagtagaaacaaagataattgcatgcttgtcttccccctgattttaaagataatgcttctaacattttcattaaatattgttttgccataggtcttgataaatatttttcagacaaaggtagtgctgttcta

SEQ ID NO: 404983 - DNA, 611 bp, Homo sapiens
tctgtatggacccaaacttataattgtatcatatttttggggtaacctcttgctcctccttggaattattatagtttacgttagaagcattctaatttgttctcagtgtcatgtatcactgaatctattacatatcgcactttgaaatatacataggtatttatatattatatgatacatatttatataaaatattatatttaacttctaggctctcaaatgtattcctcttctctaaaaaggactatatttcctccataaaaattcatatatgttttgcttatcaatataaatttagaagtagcaaaaaaatggagttttgatagaaattacactgactaaatatamcagtctggaggaaaccaatacactttttgcatagatgacatctatttctttaccatgatataactttatttttaaaaatcttatcacataaagtggtgagttaataactattagatctccagtagaatgattagtagaaacaaagataattgcatgcttgtcttccccctgattttaaagataatgcttctaacattttcattaaatattgttttgccataggtcttgataaatatttttcagacaaaggtagtgctgttcta

SEQ ID NO: 404984 - DNA, 611 bp, Homo sapiens
tctgtatggacccaaacttataattgtatcatatttttggggtaacctcttgctcctccttggaattattatagtttacgttagaagcattctaatttgttctcagtgtcatgtatcactgaatctattacatatcgcactttgaaatatacataggtatttatatattatatgatacatatttatataaaatattatatttaacttctaggctctcaaatgtattcctcttctctaaaaaggactatatttcctccataaaaattcatatatgttttgcttatcaatataaatttagaagtagcaaaaaaatggagttttgatagaaattacactgactaaatataacagtctggaggaaaccaatacactttttgcatagatgacatctatttctttaycatgatataactttatttttaaaaatcttatcacataaagtggtgagttaataactattagatctccagtagaatgattagtagaaacaaagataattgcatgcttgtcttccccctgattttaaagataatgcttctaacattttcattaaatattgttttgccataggtcttgataaatatttttcagacaaaggtagtgctgttcta

SEQ ID NO: 404985 - DNA, 574 bp, Homo sapiens
tgatcttgtctagtttctcagtgtaattagaacgcctatactatttcaccactaagtataatgccattggttaatactattactctgcatcataattgagaagcgtctttctgttaccaatgtatcaagattcaatcatccagacaatagtttatcctacaggactgtggcatcagcagtgttctagttaacttcaggagacatacatataacaaagtctgtgaaaaattgtagagatttggggttttgtttgcaatgcttactgctcagtggggaattacaggtaactcattatctgatttttggggctttgaagtttggcgcttgtgacctgacacgggtactcctaaactgataaggacattaacaaaaattaaggtagacctggaattacaagtctgaagaaacccaatctccaccacatgaataagtcagaaaatttcgctttccactactctgatatatgtcctgcacatcaattgtaattctaatatgtaggtgaaggctttgcacatagtaggyactcaatacacattgctgaatgaaattgtataaccctgtaaaatcaatagca

SEQ ID NO: 404986 - DNA, 616 bp, Homo sapiens
tatatatgaaaaaaaaaatctctctctctcctttctcccaggtacccattttgtgttcttagagataacactactacttcataactgtatatcatgtatgagatgatccacatatttacatacatttgtgcacatgtgttttttatatgatgagatgttccacgtatttacatacattcatgaacatgtgtttttttccccagattacagcctatttttatactatctgttcatatacaactacacaattcttttcagtgaaggtaaaataggccactgttttcctgtatcataatgtccgtcagttttctttcttccacttcacatattcagcgcccattttcttctttttcattgcatatgaattttggtgtaattaataactttgaagataattaaaattagtctaaaactaacacatgcataggaaaaatggaaatgcattttaaatcaacacttctattgagcgacataaccatgtaatcagattactgctacactctctacattgactatattgacttattgatgaatacatctagagatttattacaggaacatttgtttctttaggttctttctcagcamaggtgcaaccacagcattgattgggtca

SEQ ID NO: 404987 - DNA, 602 bp, Homo sapiens
agtttcactgtaagagtagaattcacattaaaataagtcaaagctgggattcatgggaacttaaaatctgtttttctcattcctctctctcccacttcctcttcttacctgcagtaactattctctccttacctttatttactcatagtttttaatagaaaaatactaattttagcttgggagataaataatactttttaagyactaaccataaatcctaagtataatagctgaaaaagataaaaagggaggaagttccagggcaactctagctattgaactcctgttcccactgaattctgaagaattcccagtttcttgcagtgtgtgtccaccatcagatgctgcaaggcccatcaattcgaatgtcaaaaatacgtatgatgacaatagggaatatcatatgcattaccttggctgatttccttagcaattgaacccgttaattgggaggaagttcttgtcaatcaagttctgacccctgagataatttctcttctctattttcttttagcgtcaccttgagaggggttttaggagttctcttaagggacagccatagcagttctcttccaactaatgtcaactgaagcctgcttatc

SEQ ID NO: 404988 - DNA, 602 bp, Homo sapiens
agtttcactgtaagagtagaattcacattaaaataagtcaaagctgggattcatgggaacttaaaatctgtttttctcattcctctctctcccacttcctcttcttacctgcagtaactattctctccttacctttatttactcatagtttttaatagaaaaatactaattttagcttgggagataaataatactttttaagtactaaccataaatcctaagtataatagctgaaaaagataaaaagggaggaagttccagggcaactctagctattgaactcctgttcccactgaattctgaagaattcccagtttcttgcagtgtgtgtccaccatcagatgctgcaaggcccatcaattcgaatgtcaaaaatacgtatgatgacaatagggaatatcatatgcattaccttggctgatttccttagcaattgaacmcgttaattgggaggaagttcttgtcaatcaagttctgacccctgagataatttctcttctctattttcttttagcgtcaccttgagaggggttttaggagttctcttaagggacagccatagcagttctcttccaactaatgtcaactgaagcctgcttatc

SEQ ID NO: 404989 - DNA, 591 bp, Homo sapiens
gcaaattttatatgtgacacagagaagaaacaattctaatgattcctcacaatatattcatagagatacaaataccaacaacattttttaacctgtagtagtggctcacagagaaatcaytgggagagtaaaggttagctcgaaaaagcaaacaaacaaaaaaaagaaagctgaactgtaatggagcaaataactttacactagtggtaggaagaaaaaaggaaaagaatacttgctgcgcatttattgtgtgacagacagattcacaaatatcagtgttaagaggtctgaaatggaggaaagaggaagtctggtaaaagataatcatttaggtgacaaataaaagccctataactgtggaaaatacagttacagcactttaaaagtgtaaaaaataataaacatataaaatcagaattttggaggaagggaagtaaaagaaagtatcaatacacatattgtctgttcttttatagcaggaagttaatattggaattattggaaatagtgataatactggaaatgttggaaacatttggtgaaaagataaactacaatgattccaatctttgagatatttcaggaccctat

SEQ ID NO: 404990 - DNA, 591 bp, Homo sapiens
gcaaattttatatgtgacacagagaagaaacaattctaatgattcctcacaatatattcatagagatacaaataccaacaacattttttaacctgtagtagtggctcacagagaaatcactgggagagtaaaggttagctcgaaaaagcaaacaaacmaaaaaaagaaagctgaactgtaatggagcaaataactttacactagtggtaggaagaaaaaaggaaaagaatacttgctgcgcatttattgtgtgacagacagattcacaaatatcagtgttaagaggtctgaaatggaggaaagaggaagtctggtaaaagataatcatttaggtgacaaataaaagccctataactgtggaaaatacagttacagcactttaaaagtgtaaaaaataataaacatataaaatcagaattttggaggaagggaagtaaaagaaagtatcaatacacatattgtctgttcttttatagcaggaagttaatattggaattattggaaatagtgataatactggaaatgttggaaacatttggtgaaaagataaactacaatgattccaatctttgagatatttcaggaccctat

SEQ ID NO: 404991 - DNA, 591 bp, Homo sapiens
gcaaattttatatgtgacacagagaagaaacaattctaatgattcctcacaatatattcatagagatacaaataccaacaacattttttaacctgtagtagtggctcacagagaaatcactgggagagtaaaggttagctcgaaaaagcaaacaaacaaaaaaaagaaagctgaactgtaatggagcaaataactttacactagtggtaggaagaaaaaaggaaaagaatacttgckgcgcatttattgtgtgacagacagattcacaaatatcagtgttaagaggtctgaaatggaggaaagaggaagtctggtaaaagataatcatttaggtgacaaataaaagccctataactgtggaaaatacagttacagcactttaaaagtgtaaaaaataataaacatataaaatcagaattttggaggaagggaagtaaaagaaagtatcaatacacatattgtctgttcttttatagcaggaagttaatattggaattattggaaatagtgataatactggaaatgttggaaacatttggtgaaaagataaactacaatgattccaatctttgagatatttcaggaccctat

SEQ ID NO: 404992 - DNA, 589 bp, Homo sapiens
gcgtggacatgaacacaaaattatcaattacccatctaggcgcttatgtcgtttgctggaccacgatctccttgaagtaggtaaacacatgggatttatctgttttcctgcctttctgcttaacattggaaatggccaagtgagttaagcatggcaaagggcttagaaccatgcctcatgtgtagtaaagattatgtaagtgccagctgctattcttgttttcattgccgctattgcttttataattagccagcatcaatatatatggaataactcaggaaatgaaagagtgagggatgtgttggcaacagcctcagaccagagatcaaaagcttggactgagtcctcagttcaacttctataaagtgggataattaaaccattcaagcccaggtgttataatggttagaggaaattacaaagcacacacatgaagcaaccagcatatggtaggtgctcagtgtgaattctgtttaccttccttgtcttatggtgccsagacacttagcacaggactgtgtgcgtgtatgtgctcaataaatatttgttaatgaattgatgagtaaaattctcattgtttaaagaatat

SEQ ID NO: 404993 - DNA, 582 bp, Homo sapiens
tcctccaaacagcacttcttcccccagtgaactcttacttatttgtcccgtttctggtccatcttctctgctccacaagaataaagactcagtcttattcactactgtaccccagcacttagtgactggcatgtgcgagttaaacagttgtagaatgactgaaagaagaaaaaaggaatctgcctgcagggctgggtgccagggccaggaggcaggcaggagaggcagcaaatgcctaggttcgggcaatggtgacaacagccctgccctcccccggaggctgttccctgaatcaaaggtgctggggttargggcacttcccagaggaagtggggaggcctcatggaatgtagagagggataaatggcctagaacatgaggaatagccatactccaggagattatgtggcccttaaaaatgacaagtgtaagaaataacatctgcggggggaaagcctatatgaattgcatgatagactgatggcagccccaggaaacgtaagtcttactgcagccttatttaaaaagcccagtgctgagacaaccttgatgtccaaccatgggggaacaggtaaataaacc

SEQ ID NO: 404994 - DNA, 567 bp, Homo sapiens
ttgctcttgtcattgttagtaatgttgttataatgctatccaagccaagcaaagtacatctcttccttagattttgttgctaggcaatattatcaactgtagaatagccttgcaaaatagactttttaacatgaagaattagtttttctgccttacatatatttaattaatatcactggctaactattagtggggaactrgaaaaccttcctttcagttgcatttctgtcactaattttgaggcttatggtgatagcaacagtaacaagcacacacatttattaggtacttactctttgagttcccaacatggtactaagtgctttacttgcattctctcatctaatcctttagacaacactatctgggttgtgatcataataacattattattattattattttttagatggagtctcgctctgttgcccaggctggagtgcagtggcccgatcttggctcactgcaagctccgcctcccaggttcacaccattctcctgcctcagcctcccaagtagctgggactacaggtgcccaccaccacggccagctaatttttttgtatt

SEQ ID NO: 404995 - DNA, 597 bp, Homo sapiens
catggataaagtctaaaaatggattgtttttagtatcagtgtgattgcagctgggatatttacttttgataactgccagcaaagaataaatatatttaaatgctttcacctcctccttgcctcatgaggcttaataacttactgtttcttgtttatcactttattgactgaattaatcaatttttyccccatctctaccaatgctctatttacagtgctgcgaactggcactattatggagtccaaaaggcagctcttcttttatacagatttggtaaaacagaaggctacagctgaattctgaatttagaaaagaaagaatgtgtactagagaattaggatgagcaatggaaaatccttttctcttcttattttcttgtgctgatttgattcaagactaagccttagttttcctatctctaagacaagaatattttcctaccttgttatcgctgaggaatgtggagaatttgaatggtgaaagatttgatcttagcagcaagaaaagaataaattgctcacttaataaattgccaggccacttgggtactatttagtagattaccttttccagagcactaaatgatagtaaatggt

SEQ ID NO: 404996 - DNA, 558 bp, Homo sapiens
ctacagctgaattctgaatttagaaaagaaagaatgtgtactagagaattaggatgagcaatggaaaatccttttctcttcttattttcttgtgctgatttgattcaagactaagccttagttttcctatctctaagacaagaatattttcctaccttgttatcgctgaggaatgtggagaatttgaatggtgaaagatttgatcttagcagcaagaaaagaataaattgctcacttaataaattgccaggccacttgggtactatttagtagattaccttttccagagcactaaatgatagtaaatggtaaatggcagtmactggaagagttaatgcagctttgatctcttgaactgagtctctgtagtttccttagaatgagatggaattatttctttccttttatctgaggctcggtaaacccttgaaaaaggaagacattattacttttttccatcttgcatgaccattagaataaaagggactttataaccctacacatacacatatacacactgaaagtggccattacaaactccttaaagaattcttttaa

SEQ ID NO: 404997 - DNA, 572 bp, Homo sapiens
cacctatctcatatgtccacgggctgcatatttgtctatctgtctccctcactgatttagatcagggagtaagtcttattcacaaggaaccgtgagcacctagcctgctcccaaatatttgatagttaaatgaatgatttaattaatgaatatctgaacatttgagaaaaaaaaccactctgggataccagaatggccctagaatttatagataagtaggcataacttttaaattgtttacattattttattgtagtgaaattacattggactaaatattggttggaataaytttttgttatgaaaacattttcattattatgactttaaaaaattgtaaagtgtactatgttaatgtaatttagtagaaaaaatttagaaaccattgctaaattaatttgcaaacatcagaaatatgaaaaacagtatagtgtatatagttataccctttgttatctaagtctaatctcttacaaaagaagataagactgaaaaaaagggaaatgttagatctaatccatattaagtaaggttttaaaaaattttgtttgaccttatatgctcattagtaa

SEQ ID NO: 404998 - DNA, 572 bp, Homo sapiens
cacctatctcatatgtccacgggctgcatatttgtctatctgtctccctcactgatttagatcagggagtaagtcttattcacaaggaaccgtgagcacctagcctgctcccaaatatttgatagttaaatgaatgatttaattaatgaatatctgaacatttgagaaaaaaaaccactctgggataccagaatggccctagaatttatagataagtaggcataacttttaaattgtttacattattttattgtagtgaaattacattggactaaatattggttggaataactttttgttatgaaaacattttcattattatgactttaaaaaattgtaaagtgtactatgttaatgtaatttagtagaaaaaatttagaaaccattgctaaattaatttgcaaacatcagaaatatgaaaaacagtatagtgtatatagttataccctttgttatctaagtctaatctcttacaaaagaagataagactgaamaaaagggaaatgttagatctaatccatattaagtaaggttttaaaaaattttgtttgaccttatatgctcattagtaa

SEQ ID NO: 404999 - DNA, 603 bp, Homo sapiens
acctttcagtaagcttgtatcagaaagcaaccccccaattttcttaagttttataacatccaactacaaatgtaagtatcttctatagtcttttcctccaattcttctcttccttctttcccttttattcctctcttcctttagacaaagagcaaagcaccttaagtgcaaaaacttttctcacttaacagaaatttacttaatcaaatgatgaatttaaataatttctaatctgtgtattaatctactccaggaaagagaagcactcatctttagaattttaagtttccatgcttttatttctgtccctgccatcttgttcctgttagtgagcccattaaggrcactttcttaaggaaaatcaatatatagactttaaatgttatttcatttcttataaaaggaaatgaatatactgtaaagctcctagacccaggttttgattactaaatgtctaaagagggtgccaatcattagtaagttgagaatgaaatgacccatagattctctctctctctctctctctctctcaattcactagttcttgtcaactaggggttcaccaccaggaaagcagaatgtaacccaacagatattggcttg

SEQ ID NO: 405000 - DNA, 566 bp, Homo sapiens
tttaaatttccagcttagggggtatattcgccatcagcgtgcatgtgtaagtaccattaaggctaataggaatttggtgcctgaatccaaagaaaaatctgtctctgagatggcattttgcacgtgtaatgcacaagaaaaataactaaaaaaaatcgatttctstccatccaaagcatataaaacaattatattaattataagtacaagataaaacacttgcttgtggaattttaaatcaatttaatacatttgcaattttacgcatttctcttgctcaaaattgcctttcccaaatatgttgtctcaggctttgaagaacctagtgatgaatggaaatcaagagaaataggaatggtgggagtgcatttctcaacacagtcttcatttatttatattctgcaacacatgcacccatgatgtttcaaacttatttccaccacattcaaaataaaacctggaacacaaaacagcttgcctatattttcttgtttaagactctatctcctgagctttcctttgtatctcagttcctaaccacataagacattttcaggcaagagtcg

SEQ ID NO: 405001 - DNA, 627 bp, Homo sapiens
aattcagaataatcttatctatgcaggaaaagagggaagagggatggactgaagaggggttcaaggttccaaagatactggttagcgtttcatttcttaagttggatacgagatacacagatgtccaccttatttatttacttactcgtgtttttgcatgtaagctacaaatgttattttgtgtctgtttaatatctgataacattatttaaagcagataattgtaagacatggtacaagtaatggtaatgacataattatttaaaaaaataatgacactgctgacatcctttagggctattagggctatggaactaagcaattggctgtttttcaaagtgtcctgagttttctgttccaatctattaaataaataaggtattaaatactatgagaaaactgaagtataaaaacagaagaaagacytaaatccagtgctaaggaattgcagctccttcagtgactccttgcctgagtggggctgtttacacatacaaggactctgtcttctgttttacacagggaaagactgctgacaactagcattgtggggtatgtttgcatggctctttccagagttcaaatcagagcactgtaattcagccacatgatgttaaccacttgtcc

SEQ ID NO: 405002 - DNA, 635 bp, Homo sapiens
tttcagtgtaccttgaaaattttccatattgtaaactatgttttcttacatgcctataagaaacaaaaaccatgtttggaaatccagtgtctacttgaatctggaatattaatgcaatgtgggtttatatggtctgaaagtcttgtatatttatgccatstgacttgattagtatctaaactttgaaaaatattcagggtagaaaaattataaattatttgtcatgtcagagtttaaaaggtttgtagaaagacctgggtattttgtagcacacaagatgtgatatgccttgggtgtgacttccctggttgtgttttgaaagcaacctctactttaataagacagttgtgaatcaacagtcaaactaatttttgattactggtaagtgaacatttaaaactggagccccacttttagacgtggtggtgagattatattggtctccattcatatctagaagcacctcagtctgatggtttattctatacgcaaggcattaccacatacaagtctccttgcttaactcttgtattattcacaagaatgccagagcagacatattaatactagtctgcaactggcattattccacatactcaagagttttcattctgggataagcaccattcactgaa

SEQ ID NO: 405003 - DNA, 576 bp, Homo sapiens
tgctgaccattgaatggggtttttgtagggtcttttttgttgaygttgatgttgttgttgttgttttctgtttgtttgtttttaacagtcaggccactcttctgcagggctgctgtgatttgctggggttctgctccagaccctagttgcctcagtttttcccatacctagagatatcaccagtgaaggctgcaaaatgcagacgacagcctgctccttcctctggaagctccatcccaacacagtagtgacttgctgctggctcaaatggttctgtaggaggtagctggagacccctgttgggaggtctcacccagtcaggaggaagaggatcagggactcagttaaagaagcagtctggctgctttttggtagagcaagtgtgctgcactggggggggcccttccttgtctgaattgtttgtattgtccaaagccagcaggctggaatggctgaattgacactaacctcagagatggcagctgcccctccccctgggagctttgtcccaggaagtgatcagagctctgtctgtagaaccctagctggagtggttgaatcccctgcagggaaatc

SEQ ID NO: 405004 - DNA, 635 bp, Homo sapiens
tttcagtgtaccttgaaaattttccatattgtaaactatgttttcttacatgcctataagaaacaaaaaccatgtttggaaatccagtgtctacttgaatctggaatattaatgcaatgtgggtttatatggtctgaaagtcttgtatatttatgccatgtgacttgattagtatctaaactttgaaaaatattcagggtagaaaaattataaattatttgtcatgtcagagtttaaaaggtttgtagaaagacctgggtattttgtagcacacaagatgtgatatgccttgggtgtgacttccctggttgtgttttgaaagcaacctctactttaataagacagttgtgaatcaacagtcaaactaatttttgattactggtaagtgaacatttaaaactggagccccacttttagacrtggtggtgagattatattggtctccattcatatctagaagcacctcagtctgatggtttattctatacgcaaggcattaccacatacaagtctccttgcttaactcttgtattattcacaagaatgccagagcagacatattaatactagtctgcaactggcattattccacatactcaagagttttcattctgggataagcaccattcactgaa

SEQ ID NO: 405005 - DNA, 646 bp, Homo sapiens
atttgaaaaatatttgtaagactaccacttggaataaaaagttttacttttgtaatcacatcacaaaaacgtggatatatggatcactacaagaccagcaatgccaacttagaccatctttctttctttcttttttttttttcttctgagacagagtctcacctgttgcccaggctggagtgcaatggcgtgatctctgctcactgtaacctcctcctcctgggttcaagtgattctcctactttagcctcccaagtagctggaattacaggtgcaygccaccatgcctggctaatttttgtgtctttagtaaggatggggtttcaccaagttggccaggctggtctcgaactcctgacctcgtgatctgcctgcctcagcctctcaaagtgctgagattacaggcatgagccaccatgcctggccagaccatcttgacatgattatatcctaatgtatcttctcttttttttaactgaatttatatatcactatttatatgtctggatcttttcccatgtttattttctgtggtaatgataatttatgttcttggatgtgaactagacttggaatattgaattcaatttgatccagagagtcaagcagaccatatctacctttacacatttgaaattgtagcatt

SEQ ID NO: 405006 - DNA, 554 bp, Homo sapiens
ctctcctcttcattcccaccactatctctgtaactcagacctgcattgttactcagctgtcctgtttctattactccaaacggaatataattctattttcatatatcttggggttaaggataaaggatactcctggagaaaaagtatgaaggtaaaagtaagaataagaataggaaaagccctaaggggatgggcaaaattagaagacagacctataaatcactttttcagggagataaatttttaagaatgcctttgtattcaaatattggcaggttttgtgctttattttcatgggcatgtcatcctcttacacacctatccctagcccatatcaattctattttgtggtgtgaataccctgctttaaaacagcctatctcttcattttcttgattaactktgtcatattagaataatagtttcctaaaggaattttcctggattcagtttcttacttgtcattcaaagttttaaaatctcactctttagagcagatatcgcatttttcacctattagattagcaaaaataaaagagactgatactatgcag

SEQ ID NO: 405007 - DNA, 588 bp, Homo sapiens
ggactgctttcaatagcctattgaggagttgttaattgcctttcctagtttgtgcttcaatttcatatcttctacttttacagragagccatgcaaaaatcagcaatgtaatatttccataaggctgttgttgataactcagagtggtggctctaatctcacattgcttgggtttgaatcccaaagctgccatttactgtatgaccttgggtaaactgcttaatctaagtcagagtttatttagctataaagtaaggatcacaatactactccaggaataactgagatcaatatgcaggagtaaatgagatcatgtgtgtatagtacctacttcagcagctggctcataattagtgctcaataaatattagctattattattatcaattaaaattgttcatgttttattaaagtttgtttcaaaaataaatgtcacaaaataattgtgtctctctcatgtaccccaaaccccaagaactgagttgaactttctccatccttaaaatgaaagctagatcacctagggtaacattatggtctaaatattgatttacctttaaaattaatatgttgaaacctaacccccaa

SEQ ID NO: 405008 - DNA, 504 bp, Homo sapiens
gcttaagtcatgagagctctgctcttatggacggatttagtgcccttataaataggccctagagagtggtcttgcccctttcaccatgtgaggatgcagggagcaggagccatctttgaaccagaaagtgggccctcaccagatagcaaatctgcttgtgcattgatcatgaacttcttaatctccaaaactgtgagaattaaagttccattgttcataaaccaccacccagtgtatgatattctgttacagatgtccaaatggactcagacaaccaatcagtagaaaaaaaaggcaactgtcraggaacgactttcccagaatttttcaaatcacatcatgctggtgctcatactgtgttttgtcttaagtccaaaaaaactgctctagggtgaaatttatatctgacacacgtttggttctacttaggaggcatacaaaggtattcctgagttaatcaatttatgaacatatacctacctccacattaagaatcaataatct

SEQ ID NO: 405009 - DNA, 614 bp, Homo sapiens
caggtgttgggtgcatcaaaatctcactaatcacctctaaagaacttactcttataatcaaacaccacctgttccctaaaaacctatggaaataaaataaaatgaagaaattttgtgtatgcataccacatattttttaacttttttcacaggttcattgagatataatttatatattatttaattcactcatataaagtataaaattcaattttttagtgcattaagtgggtgaatatgcaatcaccacaacataattctagaacatttttatgctccttaaaagaaaccttgcgcccattagcaatctttcctcattttcccyactctttctttaaacccctcccagccttaggcaaccatccatctacttcctaactaaggatttgcctattctggaaggatttgcctatcctagacatttcatgtaagtggaatcataataatatatagttacatgtgtctcactactttcacttattatgttttcaatgttcatcctttttggagcatgtattaatacctttttctttttcattgccaagtaatgtattttatggacaggccacattttattaatctactcctcaattgatgaacatttctgttgtttc

SEQ ID NO: 405010 - DNA, 504 bp, Homo sapiens
tccccactttatgttttgtttgctttatcaaatatcagatctgtagattgctttgggtagcattgagattttgacaatattattttttgagttcataaatataggatatttttctatttatttatgtcacttccaactttcatcaatgtgctataattttcagtatacacatttttcacatcctwcattaaaattactccttagtattttatttacttatatatttgttttgatgctactataaatgtaattactttattaatttatttttcagatagtttatcatgggtgtttagaaacaagaatactatttgtatgttaattttgtaactctcaactttattgaatgtgtttatcagctttaacgggtttttttggtggagtctaagattttctttatgttaggattacattttcagaaaacacagacgatctcaccccttcctttcctatttggatgcctttcatttcttggccttgtataattactctggatagtagatt

SEQ ID NO: 405011 - DNA, 526 bp, Homo sapiens
ttctatgttttcacaatactgtttatcctgttataaacctaaattccgtytgatcaattatcggtctcagagcaagggaatcagtcttgcatgtattaattgaagcttatggtatgaagtacagcccaaagattaattttgcaagaaatataactataaaccagattctgacacctctatacaacacattaacacatctttgtcataagcacgattcaagacaacaccactttagaactttagttctctgctgttgaaggttgggagattttgtaaaaattttttacaaagataatctagtcatttcaaaaatctgccataagagaaagattttaagtttgaaagaagtcagaactatagttaatgatactgtattgtttacttgaaatttgctaagagggtagccttaagtgtaacactatgttatacgcatgtacaagtgagtcttaaaacaaacactcatgattttacttgtagcaactttgatttgctctctttacaaccaaacttcttgaaagtgattttg

SEQ ID NO: 405012 - DNA, 526 bp, Homo sapiens
ttctatgttttcacaatactgtttatcctgttataaacctaaattccgtttgatcaattatcggtctcagagcaagggaatcagtcttgcatgtattaattgaagcttatggtatgaagtacagcccaaagrttaattttgcaagaaatataactataaaccagattctgacacctctatacaacacattaacacatctttgtcataagcacgattcaagacaacaccactttagaactttagttctctgctgttgaaggttgggagattttgtaaaaattttttacaaagataatctagtcatttcaaaaatctgccataagagaaagattttaagtttgaaagaagtcagaactatagttaatgatactgtattgtttacttgaaatttgctaagagggtagccttaagtgtaacactatgttatacgcatgtacaagtgagtcttaaaacaaacactcatgattttacttgtagcaactttgatttgctctctttacaaccaaacttcttgaaagtgattttg

SEQ ID NO: 405013 - DNA, 572 bp, Homo sapiens
agcctctcctgattctacttctatatttttagctactttgtattattggagcataatatagacacagaaattgtcctaaattatgagagtgtaggtcaatgagtttctcaaatagaacaacctcatataatcactacattgatcaacaaatagggcagcccccacaccttagatatcatcattttgacctcttccagttagtaaccatctaggtttgtcattaccttgacttctaacactatgaattagtttcgtctgattttgagcttaatataaatgtatcatactgtatgcattcttttatgtatggcttcttttgctcagcatgataaatctaatgtttggaagattgcttcaatgttacatatcattatagkaacattcattttcttacctcttttgtatgagtaaacacaaattatccattctacttttgatgaacatttgagttgtttcccaaatattactgtattataatgaaaactgttatgaacattatgtacaagtctttggagaacatattatacacttctgttgtttgattcactcattaaatattatttttaccagtg

SEQ ID NO: 405014 - DNA, 608 bp, Homo sapiens
tcaaactttaaatgtttgaaatactatatataattttagttttcttggccttggctcatatggtttaattttcctggaatagttttaccttacttgaccatttggaaaattcctattcttttctaagattccggtcctggatctcagtatttttgaaagcttctcttgaccttcataagcaaacctgtgttgttacttcttcttgtgtcatttttttcataatatacagccttggctcttcacctttagcatttacaaaaattgccattattttttaaatggactttctagccccaatgctaaatttgctcacaataatttttagaataaattcaaaaatatactaagaagattcttatacaaaaagtttgagtatcttactctgagaacactgttccatagctattatcacttttcacattaatattttctaacagtctttgttttccttaagggaaggaawggataacatttattttcctagcacctgttatagggatagacaagtagtattaatttaataattgataatttttgtttattatacacttatgtggaacttaatgtaggtctgtacaattgtaagctttttataagtattaaactga

SEQ ID NO: 405015 - DNA, 627 bp, Homo sapiens
catctatctacctagacagagatatctatagatatctatggtaaattttgaaacatgttccaaatacactataataaattgtatgttttgctgtttttgagtgcagtttttatgtcaaagtatttaattctactgctttaaatgtttgtattattgatattttgtatcctttttgctatcatgtatcaaaaatgtgtattaaagtctttatgattgaagatgtgcctattgctccttttagttctataaattatgcatgcgcrttaactgtgtgtgcgtgaatataaatacacaagttagacaacttcctcaataattgattcttttatgtgaatgatgtatacatcttcctctcaggtaataatttctgccttaaaatctctattgtctaatattaacatagctaaacaaattttcatttggcttgtgtttatcttttatatacatatatgaaatttttaaatttagatggttccatagatagaagatagaagatatatagatagaagatagtatatgtcttctacagatacagatatgtatatgtatatatacttatagatatattaatatttatatctatgtttataaatgtatatatgtagatagctatatatgtatatctac

SEQ ID NO: 405016 - DNA, 563 bp, Homo sapiens
ccagcggcccaggatctggcacttggaagagttctcagaagcacccctggatcaaacgaggagaaacagacttcagccatacattaaatacattcccattgtatttaaaaaagtgaatattctcagggatttccacatttttaaaaacttcttttaattgaaacatttaaaataaaataccgttgagataacaaccaagttacagttcttccagcagcacccagccagcgagagccctcagattttagaattttagaagagaagattgtggccatgtctggaattcaaagaagaaccagtgagaagagcttgatagaactgatggatgctaaracatctaatattaaaatagaagggcaaacttaaatgataatataaaattataatattaatggtaattaaggaagccattaatgttgaattatgtatgtgtatgttaaacatatacataaaatatcatgaacattatattgtctgtgctggtttcattaatgctaaattataaaattattaaactgtatgaataacatttaataatataaaattataaattgctattgttg

SEQ ID NO: 405017 - DNA, 586 bp, Homo sapiens
agaacagaatagtctgaagtggggccacttataattacaagaattgaaatacaagcacacttgtgtctaacagtgtcttggagttaaccctgcagcatttacgtgggtatctatgtgatacaaacaatttgagaaactctaatagcccagaagcagacagagggaaacaaggaaaggaaagaaatgcaaagtaaaacagatgattgcagttcttaaaatgattatgaagtttacttctaatagaatgatactaaaatccaaaccaatcttgtgacaattctcttttttattgtttcaggatttaaaagtatattcatgtgttttccaaagatgtgttatgaatgtgcattcaactgttattgaacttcttggagtacaaacatactgtgtttgtgtgtgtgtgtttgtgcgtgtgtgtatgtgtttttactgaccttacctgtgcacattctgcttcatctaactaaagtgcaagggagcagatttattttgtgcttttaggtacactcagcttttgttgcacgtrttttaaacaaatgaacaatttgatggatgaatagtgcttttagtacctttaaaatgctaa

SEQ ID NO: 405018 - DNA, 503 bp, Homo sapiens
tcataatggataaagaaaacttggcacatataccatggaatattatgcagccataaaaaaaggatgagttcatgtcctttgcagggacatggatgaagctggaatccatcattctcagcaaactaacacaggaacagaaaaccaaacaccacatgttctcactcgtaaatggggctcgaacagtgagaacacatggacacagggagggaaacatcacacactgtggcctgttgggggttgggagggctagggtattaggagaagtatctaatgtagataatgagttgatgggtgcarcaaactctcatggctcatgtatacctatgtaacaatcctgtatgttctgcacatgtatcccagaagttaaagtataaaaaattccatatttttatattttgatgtacatattataccagtatagttatatatgtaaaaattttaagggtaaatacatataaaacatatattagtctttgatcagaattgtattaccaatataaata

SEQ ID NO: 405019 - DNA, 591 bp, Homo sapiens
taatattgatttttaacatttccccacagttcaaaaatattgtttgcaaaaaatcaagggccttttctaacaattcatgtaattcctgttattagctaatgtgtaagagtagggaacaattaaacatactgtatacaaaatcttaccatcctgaattgcacccaagatattagttcagtcatccttcaaattacctcacaactaaaaaggatcagatacttaaataaaaacttcaggcaaggtaggaaagaagtcttttatcatccctgtatattgcaaaagtgttccattctctctaaattcacattatatttattaatgagcagcacatggaaagaaagaaaatgagagagagagagaaaaagagaaagaaggaaggaaggaaggaaggaaggagagaaggaagagaagaaaagataaagaaggaaagaagtcaggatggtaggaaagtgagagacagaaggagagctagagataacgatgagagarttaaaagagggaaactctaatgtctttgatatccccaatttaaaagagaaggatgtgaccccctcccccgtttacatataatggaacaagccaagtctccat

SEQ ID NO: 405020 - DNA, 591 bp, Homo sapiens
taatattgatttttaacatttccccacagttcaaaaatattgtttgcaaaaaatcaagggccttttctaacaattcatgtaattcctgttattagctaatgtgtaagagtagggaacaattaaacatactgtatacaaaatcttaccatcctgaattgcacccaagatattagttcagtcatccttcaaattacctcacaactaaaaaggatcagatacttaaataaaaacttcaggcaaggtaggaaagaagtcttttatcatccctgtatattgcaaaagtgttccattctctctaaattcacattatatttattaatgagcagcacatggaaagaaagaaaatgagagagagagagaaaaagagaaagaaggaaggaaggaaggaaggaaggagagaaggaagagaagaaaagataaagaaggaaagaagtcaggatggtaggaaagtgagagacagaaggagagctagagataacgatgagagaattaaaagagrgaaactctaatgtctttgatatccccaatttaaaagagaaggatgtgaccccctcccccgtttacatataatggaacaagccaagtctccat

SEQ ID NO: 405021 - DNA, 591 bp, Homo sapiens
taatattgatttttaacatttccccacagttcaaaaatattgtttgcaaaaaatcaagggccttttctaacaattcatgtaattcctgttattagctaatgtgtaagagtagggaacaattaaacatactgtatacaaaatcttaccatcctgaattgcacccaagatattagttcagtcatccttcaaattacctcacaactaaaaaggatcagatacttaaataaaaacttcaggcaaggtaggaaagaagtcttttatcatccctgtatattgcaaaagtgttccattctctctaaattcacattatatttattaatgagcagcacatggaaagaaagaaaatgagagagagagagaaaaagagaaagaaggaaggaaggaaggaaggaaggagagaaggaagagaagaaaagataaagaaggaaagaagtcaggatggtaggaaagtgagagacagaaggagagctagagataacgatgagagaattaaaagagggaaactctaatgtctttgatatccccaatttaaaagagaaggatgtraccccctcccccgtttacatataatggaacaagccaagtctccat

SEQ ID NO: 405022 - DNA, 537 bp, Homo sapiens
atgtggacagtaagaaaacttgcatggggaaaacttttggggggaaatgaaggtgatttccgagctgctactgcagttatatatgacactgacatttatttcccataattcttgcccacaggaaacacatcctttaagaaactgaataaaatcaagtttgacattctcataatctgcaaggtatcaacttccctgagaagctcacattcccccaaaacacacacatgtatgtaaggagcgagacattcaggagatgagctgtgaaaggtacttccacattgtgagggtgccaaggatttggttattcctgaacctgaatccgaaaagcgggggtggggtttgcgatgacaaatgagggtgagaagaatgtttccatgaaaccagacacccttttggaatctaggctgagaatcaggatcccacccccttgcctaccgccaggctccagtaagcaaccwctggcgtcctcccctctgctccttccgcagcagcagacatagggatccctagcagccagggagcttaggtcccgccgag

SEQ ID NO: 405023 - DNA, 606 bp, Homo sapiens
atactctacaatgtatttctcataccatcacatttgattcacatgatyttgtgaagaattttaattacataaataattgtagaaattagtaaagcagaaatcaaaagggttgagggtcatgcagttaggaaatataagaggtagataaaatcctaactcctctgacatcaaatcctgtgctctttccactattaacctgcctctcatagcagaactgaactagaattaaaattaattaagacccacttaaagtaatgtaactatactagtattttcacagacacactcacagtatagtatctaaactatcttgcaggaaaaaatatgcgatttttgctgatatttgcttttttgtaggcaaaatgggaacattcagccagatgagtttcttgatttcaagttaatattcaagaggaggcatgccatcccattgaagttagcacatttggaagcatccctctctatttcttaatcctgtccctgcccccattaatcctttctcttcactaacagttgtaagaaattgtgaggaagtgagcacaaaggaatccaattttgatgctggtcacaaaacctaagaagtacacaaaaggatgatttagagaa

SEQ ID NO: 405024 - DNA, 591 bp, Homo sapiens
aagttaaaaatattctttttgatgcttcccacattctcagctctttagtaaacaaggaacacacaaaatgtgaaactgaaattgaagtacctgggacaatgaaaacagcaaaaaatacttctaatttaagtttggtggaggaaaagctaatcttttggaatgcgtttatacrtgttgcacccattttgctgttacgtgttattgccaagttccttaactgtagtgtaagttgttaccactgtattgccttatggaaactgtaatactttcagtaagaatatcaaacccaggtttgtttttcttatcctagtgtaataatttatatcaacttccagttaagtcaggtagtaagaaaaggaaagatcaccgaagcaaagtaattttttttaactagtaaaggatctcaccaatttttcaaaagtcaagtgtatggatcttggcatagagacactactcccctgtcccccttttgaagaagggagttaatttttgtcatgttattaccaacgttttcattcattaggcaagacgtctaccaatgaatcttttccagatgcactgttccctatggttggcttatttccatttaat

SEQ ID NO: 405025 - DNA, 591 bp, Homo sapiens
aagttaaaaatattctttttgatgcttcccacattctcagctctttagtaaacaaggaacacacaaaatgtgaaactgaaattgaagtacctgggacaatgaaaacagcaaaaaatacttctaatttaagtttggtggaggaaaagctaatcttttggaatgcgtttatacgtgttgcacccattttgctgttacgtgttattgccaagttccttaactgtagtgtaagttgttacyactgtattgccttatggaaactgtaatactttcagtaagaatatcaaacccaggtttgtttttcttatcctagtgtaataatttatatcaacttccagttaagtcaggtagtaagaaaaggaaagatcaccgaagcaaagtaattttttttaactagtaaaggatctcaccaatttttcaaaagtcaagtgtatggatcttggcatagagacactactcccctgtcccccttttgaagaagggagttaatttttgtcatgttattaccaacgttttcattcattaggcaagacgtctaccaatgaatcttttccagatgcactgttccctatggttggcttatttccatttaat

SEQ ID NO: 405026 - DNA, 536 bp, Homo sapiens
tgggtatatgcccagaggagtataaagcattttaccataaagccacacgcatgcaaatgttcattgcagcactgttcacaatagcaaagacatagagtcaacctaaatacccatcagtgacagattggataaagaaatgtagtgcatatgcaccatggaatactttgcagccacaaaaaagaacaagatcatgtgttttgcaggaacatggatggagctggaggctattattcttagcaaactaatgcaggaacagaaaaccaaatactgcatgttctcacttataagtgggagctaaatgatgagaactcatgacacaaagacggkaacaacagacactggaatctacttgagtgtggagggtgagtggggggaaaggagcagaaaagataatttactgggcttaatacctgggtgatgaaataatctgtacagcaaacccctgtgacttgagtttacctacgtaacaaaccttcacgtgtacccctgaacgtaaaataaaagttaaaaaaaaattaggatagaaacacagcaag

SEQ ID NO: 405027 - DNA, 463 bp, Homo sapiens
gcacaaatgtgccttccttaggagagcaagctttctttgattccctcagcctagatcaggccccttcccctgacattgttctcacaacttccttgacctttccctaaaagtaagctttgtgacttgccattcgytgtatttcccgtctctaacgctgggcctggcacatagcaggtattcagtaagcatttattcaatgaatgaatgcatgattactgctcttccccatactgacttttcccactggacaagtcaatattcatctaatttggcctccagtttcccaccttggtaaagagtatcactgtccctcagacctgctggaaaaggaagaatccacagttggtgccatgagacttcatgttaccaatgaagttatactgaagtgcaggctccctgcttaccgttgtttgcattgattcacctgaccttgctgcttttcagaggatgaagtcagaaagga

SEQ ID NO: 405028 - DNA, 463 bp, Homo sapiens
gcacaaatgtgccttccttaggagagcaagctttctttgattccctcagcctagatcaggccccttcccctgacattgttctcacaacttccttgacctttccctaaaagtaagctttgtgacttgccattcgctgtatttcccgyctctaacgctgggcctggcacatagcaggtattcagtaagcatttattcaatgaatgaatgcatgattactgctcttccccatactgacttttcccactggacaagtcaatattcatctaatttggcctccagtttcccaccttggtaaagagtatcactgtccctcagacctgctggaaaaggaagaatccacagttggtgccatgagacttcatgttaccaatgaagttatactgaagtgcaggctccctgcttaccgttgtttgcattgattcacctgaccttgctgcttttcagaggatgaagtcagaaagga

SEQ ID NO: 405029 - DNA, 463 bp, Homo sapiens
gcacaaatgtgccttccttaggagagcaagctttctttgattccctcagcctagatcaggccccttcccctgacattgttctcacaacttccttgacctttccctaaaagtaagctttgtgacttgccattcgctgtatttcccgtctctaacgctgggccyggcacatagcaggtattcagtaagcatttattcaatgaatgaatgcatgattactgctcttccccatactgacttttcccactggacaagtcaatattcatctaatttggcctccagtttcccaccttggtaaagagtatcactgtccctcagacctgctggaaaaggaagaatccacagttggtgccatgagacttcatgttaccaatgaagttatactgaagtgcaggctccctgcttaccgttgtttgcattgattcacctgaccttgctgcttttcagaggatgaagtcagaaagga

SEQ ID NO: 405030 - DNA, 524 bp, Homo sapiens
tacgataattaagatgtttctttccattttcccaatggttgctacagacatttaaggtaaaatccattcttcttgtctcaggttttcattttcattcattgaatcacaaataacattctctgcagtagagaatactaaacttattaatgcccaaatgtttgagaccttaaaaaggaaaaaaaggccgggcgcggtggctcacgcctgtaatcccagcactttgggaggccgaggcgggtggatcatgaggtcaggagatcgagaccatcctggctaacaaggtgaaaccccgtctctactaaaaatacaaaaaattagccgggcgcggttgcgggcgcctgtagtcccagctactcgggaggctgaggcaggagaatggcgtsaacccgggaagcggagcttgcagtgagccgagattgcgccactgcagtccgcagtccggcctgggcgacagagcgagactccgtctcaaaaaaaaaaaaaaaaaaaaaaaggaaaaaaaaaagcaaactctggtaagcaga

SEQ ID NO: 405031 - DNA, 508 bp, Homo sapiens
tggcgcatgcctgtaatcccagctactcgggaggttgaggctgcagaatagcttgaagccaggaggcagaggttgcagtgagctgagatcacggcactgtactccagactgggcgacagagcaagactttgtctcaaaaaaaatatatatatataaagtaaaaagttagccagacgtgrcacatgcctctagtcccagctacctgagtggctgaggcttgagcccaggagttctaggctacagtgagctgtgactgtacagctgtactccagcctgggagacaaagtgagaccctgtctcaaaaaaaaaaaaaaagaaaaagaagataccactataggaggcatagtgggccatatgaaaggtacaaatgacctctgggggtctcctgggcatgcctaggacatgggggtgtgaatctttagcctttttcttctccctttctgctgttttcttggcccctccctggtctttcaccttctcagcccagctctttgcatgtggagttggt

SEQ ID NO: 405032 - DNA, 580 bp, Homo sapiens
  misc_feature (1)...(580): n = A,T,C or G
gatataacactctcctaaatgaacttccagtccttttaggtaccctcttcacttctacttcctgaagccagtttcttagttttttagggggttctgtgatacaaatagaattgcttgttggttttgctcactgggggtttagaattcaggtttttcaagtcaactgagccctttgctattgattccagaatttcatttccattattccttttctttaatccttaagggtgtatsactttaaaaatcctgttactgtcattttcagggagtcttagggagcaaatgtagaacactatgtttaagacagcatttttacctgataatccaaggtgatcattctaaaacatataccagatcagtcatagcattcttctatgagaataagaagcttcaatgatccctcgttgcctgcataacattcagactcttcagcaaggtaaacaagagagttcattttctttccaacctgatatctcacagcaggccactgctcccccacccatcttccacattccccacacctgatactgtaaactctagtcataatgaaaggctagtaagagttctgagaatacannnn

SEQ ID NO: 405033 - DNA, 598 bp, Homo sapiens
aatttaatttaaaaaatttaaaatgaagtaaagtttaagtatattcaatttttgtgtgtgtgatgatggcaaaaatcctaattaaatggtattagagtgttaggccaggtcctccttggaaattcattaaagaattatcctttccagcggggtgcagtggttcatacctgtaatcccagcaccttgggagcctaatgcaggaggatcagtggagcccaggagtttgagacgagcctgggcatcatggtgagaccccgtcwctacaagaaaatctgaaaattagccaggtgtggtggtcgatgcatgtggtcctagctacttgggaggctaaggcaggaggatcacttgagcccaggacatccaggctgcagtgagctatgatcatgccactgcactctagcctgtgcgacagaaagagaccctgtctcagaaaaaaaggaattatcctttccactgtaagcacaagaaatgtcctcatctcagcattggtaaaaagcagaccctcccaccaggacatgtctcaatctaaggggatttagaacagtttccagttcttggccaacactcctagagaaggctgggctgggcggacacagga

SEQ ID NO: 405034 - DNA, 513 bp, Homo sapiens
gcggtggggccatactgtatctcatgatccgaccttgactatctcttgcacctttcctctcttgcartttacactctatcaaatcacatattccatttgtttagaaagctccttctagcccagtctgacatatttctattagttcttcaaaactcagacccaatattatagttatcattagggttgacttctgcacctgtctcagagaatcaatcatttctccatgatgactttctctcttgtgcatatgcttattgtttaggggtgtatatgtttctgtgtgtgtgtgtgtgtgtgtgtgtgtatacacacacatagatatctgtcttctcaaatagactgtgaacgtcttgagaaaaaggttcctgacttgtcatttgtccatttccagtcctagtctggtaactgaaacagaataagagtcaaagtattttattttctattgattttaattgagttaaatatatggctttaaaataataagaaaggaagtttaaaatcctattaatatcc

SEQ ID NO: 405035 - DNA, 593 bp, Homo sapiens
tctccttttactctttaacaaatatgaccaataaatgataccaatacggtcacatgtcacttaacaatggggatgagttaygagaaatgcgtcatttggcagttttgttgtgggaacttcatagtgtgtacttagacaaacctagacagtacagcctgccacacacctggactatatggtacagcctgtttctgctaggctacaatcctctatagcatgttactgagctgaatactgcagaaaatttgaacaagatgataagtattggtgtatctaaatatagaaaagatacattaaaggtactatataaaagataaaaatagtagacctatatagggcagcttctttatagtcttttgaaacaccaacatacatgaggtctgtttatcaagatgttgctctgcggcacatgactgtttattgagtaaccatcatgcattaagaactgttttagaggccatgagaatccacccagatccccttcttccaggtgccatgagcgttgggtagtaaaaattcactgcccacattctcaagagacttgtgctgggagattgcagactctgctcttctattgctcctggaccaggtag

SEQ ID NO: 405036 - DNA, 593 bp, Homo sapiens
tctccttttactctttaacaaatatgaccaataaatgataccaatacggtcacatgtcacttaacaatggggatgagttacgagaaatgcgtcatttggcagttttgttgtgggaacttcatagtgtgtacttagacaaacctagacagtacagcctgccacacacctggactatatggtacagcctgtttctgctaggctacaatcctctatagcatgttactgagctgaatactgcagaaaatttgaacaagatgataagtattggtgtatctaaatatagaaaagatacaktaaaggtactatataaaagataaaaatagtagacctatatagggcagcttctttatagtcttttgaaacaccaacatacatgaggtctgtttatcaagatgttgctctgcggcacatgactgtttattgagtaaccatcatgcattaagaactgttttagaggccatgagaatccacccagatccccttcttccaggtgccatgagcgttgggtagtaaaaattcactgcccacattctcaagagacttgtgctgggagattgcagactctgctcttctattgctcctggaccaggtag

SEQ ID NO: 405037 - DNA, 593 bp, Homo sapiens
tctccttttactctttaacaaatatgaccaataaatgataccaatacggtcacatgtcacttaacaatggggatgagttacgagaaatgcgtcatttggcagttttgttgtgggaacttcatagtgtgtacttagacaaacctagacagtacagcctgccacacacctggactatatggtacagcctgtttctgctaggctacaatcctctatagcatgttactgagctgaatactgcagaaaatttgaacaagatgataagtattggtgtatctaaatatagaaaagatacattaaaggtactatataaaagataaaaatagtagacctrtatagggcagcttctttatagtcttttgaaacaccaacatacatgaggtctgtttatcaagatgttgctctgcggcacatgactgtttattgagtaaccatcatgcattaagaactgttttagaggccatgagaatccacccagatccccttcttccaggtgccatgagcgttgggtagtaaaaattcactgcccacattctcaagagacttgtgctgggagattgcagactctgctcttctattgctcctggaccaggtag

SEQ ID NO: 405038 - DNA, 654 bp, Homo sapiens
cttgctgtatttctgtctgtatttcactgatttttaaaaagctgcaaccatttatttattggtggcttactagctgtgtgtcagagtgtgctggacaccagaggatatgataatgaccataagtcatctcaaagtgtggaggaacacaaataaaggatgacaatggtgacatctatttaataataaagttatttccaggaaacagtgagagcatggggggaagtctgtgtaaatcatttggatacaggaaaggrtgtacagaagtggagggagcacaccgaggaagcttgagttggtggaaaatgagataacattttgtaatgatcaaattgagataactgagggcattcatcacctcaagcatttataatttccttgtgttaggaacattccaactccactgttttagttattttgaaatctacaataaattatgtttgtgctacagaacactagatctaattccttcgtactgttttttgtacccattaaccatccccactttattcctgcttcccactgcccttaatgttttgtttacataattgtgaaaataatcaagctgaggaccagaaattccctgttgactatttaagtgattgttccatatttatgaattaaaattaatcatacttgaattatttttaaaataat

SEQ ID NO: 405039 - DNA, 471 bp, Homo sapiens
cattcgattgcattcgataattccattcgattccatttgaggataattccatttgagtccattcgatgattgttccattcgattctattcggtgattccattcgattccatttgataatgattccaatcgagaccattcgatgattccattcaattccattcaataatgatccctttcgagtccattcartgattccattccagtccattcgatgattccatctgattccattcaatgaatccattcgattccattctatgacgattccattcatttccatatgatgatgattccattcgattccattcaatgataccattcgattccattcgatgatgattgcaatcaattttattcgatgattccattcgaatccattcgatgatgagtccatccatttcaatttcatggtaattccattcgtttcaattcgatggtgtttccatttgattcattcgatgttgattcca

SEQ ID NO: 405040 - DNA, 471 bp, Homo sapiens
cattcgattgcattcgataattccattcgattccatttgaggataattccatttgagtccattcgatgattgttccattcgattctattcggtgattccattcgattccatttgataatgattccaatcgagaccattcgatgattccattcaattccattcaataatgatccctttcgagtccattcagtgattccattccagtccattcgatgattccatctgattccattcaatgaatccattcgattccattctatgacgattccattcatttccatatgatgatgattccattcgattccattcaatgataccattcgattccattsgatgatgattgcaatcaattttattcgatgattccattcgaatccattcgatgatgagtccatccatttcaatttcatggtaattccattcgtttcaattcgatggtgtttccatttgattcattcgatgttgattcca

SEQ ID NO: 405041 - DNA, 472 bp, Homo sapiens
gattcattcgatgttgattccattagcttccgttggatgatgattccattcgggtccattcgatgatkatcacactggatttcattccataattctattcgattccattcgatgatgattccattcctttccatccgatgatgattccattcgattccgttcaatgattattccattcgagtccattcgatgattccattcgattccattcgatgatgattgcattcgagtccatggattattccattccattccattagatgattccattcgggtccattcgatgattctcttcgattccattcgataattccgtttttttccgtttgatgttgattccattcgattccattcgatgataattccattcgattctatgcgatgattccattccattccatttgaagatgattccattcgagaccattcgatgattgcattcaattcattcgatgacgattccattcaattc

SEQ ID NO: 405042 - DNA, 472 bp, Homo sapiens
gattcattcgatgttgattccattagcttccgttggatgatgattccattcgggtccattcgatgatgatcacactggatttcattccataattctattcgattccmttcgatgatgattccattcctttccatccgatgatgattccattcgattccgttcaatgattattccattcgagtccattcgatgattccattcgattccattcgatgatgattgcattcgagtccatggattattccattccattccattagatgattccattcgggtccattcgatgattctcttcgattccattcgataattccgtttttttccgtttgatgttgattccattcgattccattcgatgataattccattcgattctatgcgatgattccattccattccatttgaagatgattccattcgagaccattcgatgattgcattcaattcattcgatgacgattccattcaattc

SEQ ID NO: 405043 - DNA, 590 bp, Homo sapiens
gattccattcgaatccattcgatgatgagtccatccatttcaatttcatggtaattccattcgtttcaattcgatggtgtttccatttgattcattcgatgttgattccattagcttccgttggatgatgattccattcgggtccattcgatgatgatcacactggatttcattccataattctattcgattccattcgatgatgattccattcmtttccatccgatgatgattccattcgattccgttcaatgattattccattcgagtccattcgatgattccattcgattccattcgatgatgattgcattcgagtccatggattattccattccattccattagatgattccattcgggtccattcgatgattctcttcgattccattcgataattccgtttttttccgtttgatgttgattccattcgattccattcgatgataattccattcgattctatgcgatgattccattccattccatttgaagatgattccattcgagaccattcgatgattgcattcaattcattcgatgacgattccattcaattccgttcaatgattccatttgactccatttga

SEQ ID NO: 405044 - DNA, 541 bp, Homo sapiens
tccattcgatgatgagtccatccatttcaatttcatggtaattccattcgtttcaattcgatggtgtttccatttgattcattcgatgttgattccattagcttccgttggatgatgattccattcgggtccattcgatgatgatcacactggatttcattccataattctattcgattccattcgatgatgattccattcctttccatccgatgatgattccattcgattccgttcaatgrttattccattcgagtccattcgatgattccattcgattccattcgatgatgattgcattcgagtccatggattattccattccattccattagatgattccattcgggtccattcgatgattctcttcgattccattcgataattccgtttttttccgtttgatgttgattccattcgattccattcgatgataattccattcgattctatgcgatgattccattccattccatttgaagatgattccattcgagaccattcgatgattgcattcaattcattcgatgacgattccatt

SEQ ID NO: 405045 - DNA, 472 bp, Homo sapiens
gattcattcgatgttgattccattagcttccgttggatgatgattccattcgggtccattcgatgatgatcacactggatttcattccataattctattcgattccattcgatgatgattccattcctttccatccgatgatgattccattcgattccgttcaatgattattccattcgagtccattcgatgattccattcgattccattcgatgatgattgmattcgagtccatggattattccattccattccattagatgattccattcgggtccattcgatgattctcttcgattccattcgataattccgtttttttccgtttgatgttgattccattcgattccattcgatgataattccattcgattctatgcgatgattccattccattccatttgaagatgattccattcgagaccattcgatgattgcattcaattcattcgatgacgattccattcaattc

SEQ ID NO: 405046 - DNA, 587 bp, Homo sapiens
tcgagaccattcgatgattccattcaattccattcaataatgatccctttcgagtccattcagtgattccattccagtccattcgatgattccatctgattccattcaatgaatccattcgattccattctatgacgattccattcatttccatatgatgatgattccattcgattccattcaatgataccattcgattccattcgatgatgattgcaatcaattttattcgatgattccattcgaatccattcgatgatgagtccatccatttcaatttcatggtaattccattcgtttcaattcgatggtgtttccatttgattcattcgatgttgattccattagcttccgttggatgatgattccattcgggtccattcgatgatgatcacactggatttcattccataattctattcgattccattcgatgatgattccattcctttccatccgatgatgattccattcgattccgttcaatgattattccattcgagtccattcgatgattccattcgattccattcgatgatgattgcattcgagtccawggattattccattccattccattagatgat

SEQ ID NO: 405047 - DNA, 590 bp, Homo sapiens
gattccattcgaatccattcgatgatgagtccatccatttcaatttcatggtaattccattcgtttcaattcgatggtgtttccatttgattcattcgatgttgattccattagcttccgttggatgatgattccattcgggtccattcgatgatgatcacactggatttcattccataattctattcgattccattcgatgatgattccattcctttccatccgatgatgattccattcgattccgttcaatgattattccattcgagtccattcgatgattccattcgattccattcgatgatgattgcattcgagtccatggattattccattccattccattagatgattccattcgggtccattcgatgattctcttcgattccattcgataattcygtttttttccgtttgatgttgattccattcgattccattcgatgataattccattcgattctatgcgatgattccattccattccatttgaagatgattccattcgagaccattcgatgattgcattcaattcattcgatgacgattccattcaattccgttcaatgattccatttgactccatttga

SEQ ID NO: 405048 - DNA, 590 bp, Homo sapiens
gattccattcgaatccattcgatgatgagtccatccatttcaatttcatggtaattccattcgtttcaattcgatggtgtttccatttgattcattcgatgttgattccattagcttccgttggatgatgattccattcgggtccattcgatgatgatcacactggatttcattccataattctattcgattccattcgatgatgattccattcctttccatccgatgatgattccattcgattccgttcaatgattattccattcgagtccattcgatgattccattcgattccattcgatgatgattgcattcgagtccatggattattccattccattccattagatgattccattcgggtccattcgatgattctcttcgattccattcgataattccgtttttttccgtttgatgttgattccattcgattccattcgatgataattccattcgattctatgcgatgattccattccattccatttgaagatgattccrttcgagaccattcgatgattgcattcaattcattcgatgacgattccattcaattccgttcaatgattccatttgactccatttga

SEQ ID NO: 405049 - DNA, 579 bp, Homo sapiens
attgcattcgagtccatggattattccattccattccattagatgattccattcgggtccattcgatgattctcttcgattccattcgataattccgtttttttccgtttgatgttgattccattcgattccattcgatgataattccattcgattctatgcgatgattccattccattccatttgaagatgattccattcgagaccattcgatgattgcattcaattcattcgatgacgattccattcaattccgttcaatgattccatttgaytccatttgatgttgattccattcgattccattttatgatgattccatgcaattccattagatgatgactcctttcatttccattcgatgatgattccattcgtttccatccgatgatgattccattcgattccattcaatgattattccattcgagtccattccatgattccattcgattccattcgatgatgattgcattcgagtccatggattattccattccattccattagataattccattcgggtccgttcgaagattctcttcgtttccattcgaaaattccgtttttttccgtttg

SEQ ID NO: 405050 - DNA, 579 bp, Homo sapiens
attgcattcgagtccatggattattccattccattccattagatgattccattcgggtccattcgatgattctcttcgattccattcgataattccgtttttttccgtttgatgttgattccattcgattccattcgatgataattccattcgattctatgcgatgattccattccattccatttgaagatgattccattcgagaccattcgatgattgcattcaattcattcgatgacgattccattcaattccgttcaatgattccatttgactccatttgatgttgattccattcgattccattttatgatgattccatgcaattccattagatgatgactcctttcatttccattcgatgatgattccattcgtttccatccgatgatgattccattcgattccrttcaatgattattccattcgagtccattccatgattccattcgattccattcgatgatgattgcattcgagtccatggattattccattccattccattagataattccattcgggtccgttcgaagattctcttcgtttccattcgaaaattccgtttttttccgtttg

SEQ ID NO: 405051 - DNA, 579 bp, Homo sapiens
attgcattcgagtccatggattattccattccattccattagatgattccattcgggtccattcgatgattctcttcgattccattcgataattccgtttttttccgtttgatgttgattccattcgattccattcgatgataattccattcgattctatgcgatgattccattccattccatttgaagatgattccattcgagaccattcgatgattgcattcaattcattcgatgacgattccattcaattccgttcaatgattccatttgactccatttgatgttgattccattcgattccattttatgatgattccatgcaattccattagatgatgactcctttcatttccattcgatgatgattccattcgtttccatccgatgatgattccattcgattccattcaatgattattccattcgagtccattcsatgattccattcgattccattcgatgatgattgcattcgagtccatggattattccattccattccattagataattccattcgggtccgttcgaagattctcttcgtttccattcgaaaattccgtttttttccgtttg

SEQ ID NO: 405052 - DNA, 579 bp, Homo sapiens
attgcattcgagtccatggattattccattccattccattagatgattccattcgggtccattcgatgattctcttcgattccattcgataattccgtttttttccgtttgatgttgattccattcgattccattcgatgataattccattcgattctatgcgatgattccattccattccatttgaagatgattccattcgagaccattcgatgattgcattcaattcattcgatgacgattccattcaattccgttcaatgattccatttgactccatttgatgttgattccattcgattccattttatgatgattccatgcaattccattagatgatgactcctttcatttccattcgatgatgattccattcgtttccatccgatgatgattccattcgattccattcaatgattattccattcgagtccattccatgattccattcgattccattcgatgatgattgcattcgagtccatggattattccattccattccattagatrattccattcgggtccgttcgaagattctcttcgtttccattcgaaaattccgtttttttccgtttg

SEQ ID NO: 405053 - DNA, 196 bp, Homo sapiens
gataattccatttgagtccattcgatgattgttccattcgattctattcggtgattccattcgattccatttgataatgattccaatcgagaccattcgatgattccattcaattccattcaataatgatccctttcgagtccattcaatgatyccattccagtccattcgatgattccttctgattccattcaat

SEQ ID NO: 405054 - DNA, 531 bp, Homo sapiens
gatcacactggatttcattccataattctattcgattccattcgatgatgattccattcatttccatccgatgatkattccattcgattccgttcaatgattattccatccgagtccattcgatgattccattcgattccattcgatgatgattgcattcgagtccatggattattccattccattccattagatgattccattcgggtccgttcgatgattctcttcgattccattcgataattccgtttttttccgtttgatgttgattccattcgattccattcgatgataattccattcgattctatgcgatgattccattccattccatttgaagatgattccattccagaccattcgatgattgcattcaattcattcgatgacgattccattcaattgcgttcaatgattccatttgattccatttgatgttgattccattcgattccatttgatgatgattccatgcaattccattagatgatgactcctttcatttccattcgatgatgattccattcgttt

SEQ ID NO: 405055 - DNA, 531 bp, Homo sapiens
gatcacactggatttcattccataattctattcgattccattcgatgatgattccattcatttccatccgatgatgattccattcgattccgttcaatgattattccatccgagtccattcgatgattccattcgattccattcgatgatgattgcattcgagtccatggattattccattccattccattagatgattccattcgggtccrttcgatgattctcttcgattccattcgataattccgtttttttccgtttgatgttgattccattcgattccattcgatgataattccattcgattctatgcgatgattccattccattccatttgaagatgattccattccagaccattcgatgattgcattcaattcattcgatgacgattccattcaattgcgttcaatgattccatttgattccatttgatgttgattccattcgattccatttgatgatgattccatgcaattccattagatgatgactcctttcatttccattcgatgatgattccattcgttt

SEQ ID NO: 405056 - DNA, 531 bp, Homo sapiens
gatcacactggatttcattccataattctattcgattccattcgatgatgattccattcatttccatccgatgatgattccattcgattccgttcaatgattattccatccgagtccattcgatgattccattcgattccattcgatgatgattgcattcgagtccatggattattccattccattccattagatgattccattcgggtccgttcgatgattctcttcgattccattcgataattccgtttttttccgtttgatgttgattccattcgattccattcgatgataattccattcgrttctatgcgatgattccattccattccatttgaagatgattccattccagaccattcgatgattgcattcaattcattcgatgacgattccattcaattgcgttcaatgattccatttgattccatttgatgttgattccattcgattccatttgatgatgattccatgcaattccattagatgatgactcctttcatttccattcgatgatgattccattcgttt

SEQ ID NO: 405057 - DNA, 531 bp, Homo sapiens
gatcacactggatttcattccataattctattcgattccattcgatgatgattccattcatttccatccgatgatgattccattcgattccgttcaatgattattccatccgagtccattcgatgattccattcgattccattcgatgatgattgcattcgagtccatggattattccattccattccattagatgattccattcgggtccgttcgatgattctcttcgattccattcgataattccgtttttttccgtttgatgttgattccattcgattccattcgatgataattccattcgattctatgcgatgattccattccattccatttgaagatgattccattccagaccattcgatgattgcattcaattcattcgatgacgattccattcaattscgttcaatgattccatttgattccatttgatgttgattccattcgattccatttgatgatgattccatgcaattccattagatgatgactcctttcatttccattcgatgatgattccattcgttt

SEQ ID NO: 405058 - DNA, 205 bp, Homo sapiens
gataattccatttgggtccattcgatgattgttccattcgattctwttcggtgattccattcgattccagttgataatgattccaatcgagaccattcgatgattccattcaattccattcaataatgatccctttcgtgtccattcaatgattccattccagtccattcgatgattccatctgattccattcaatgaatccatt

SEQ ID NO: 405059 - DNA, 594 bp, Homo sapiens
agctaatgaataaaatgtgtaggaaatagcattgcagaatgttgacaaatgtaaatttctacagtcctgactagaaattggcacatgacagagccatcaaaattaagtgccaggagctcagtacaaaaaggcttcaagatgtttaactataggcatatttagttttctaattcagccaaatttctacacatgctggagacttttgtagtagaggaacattcagctgtatgttttgacatccaacttggcatctctgaaagtcaagcwctgaaagctacagtgcagaaagaaaagctagagatcagattttcatgattttttatgaaagatgtttaatggtcttgatgtgactccagctctaaaatgttactggcagaaaatatcacaaattatccagctttcctttgaaaagccacatggaaactgaagctattttccatatttttctttaattttgtaaatggaaagcttaatgaccccatgctctgcatgactttggcaaacagatgttgatacaaaacaataatgcaaaaataacataaatattaaaccataggttcttgctgtcttgatctgcatctgcatttataaaat

SEQ ID NO: 405060 - DNA, 594 bp, Homo sapiens
agctaatgaataaaatgtgtaggaaatagcattgcagaatgttgacaaatgtaaatttctacagtcctgactagaaattggcacatgacagagccatcaaaattaagtgccaggagctcagtacaaaaaggcttcaagatgtttaactataggcatatttagttttctaattcagccaaatttctacacatgctggagacttttgtagtagaggaacattcagctgtatgttttgacatccaacttggcatctctgaaagtcaagcactgaaagctacagtrcagaaagaaaagctagagatcagattttcatgattttttatgaaagatgtttaatggtcttgatgtgactccagctctaaaatgttactggcagaaaatatcacaaattatccagctttcctttgaaaagccacatggaaactgaagctattttccatatttttctttaattttgtaaatggaaagcttaatgaccccatgctctgcatgactttggcaaacagatgttgatacaaaacaataatgcaaaaataacataaatattaaaccataggttcttgctgtcttgatctgcatctgcatttataaaat

SEQ ID NO: 405061 - DNA, 592 bp, Homo sapiens
tggtgataaattagagtttctgttgttttgcctttttatatgtaaggatttatgaaattgaattctgagaataaagctgtgttatattattataatggcatttctctcttggagctgggagcttaaggaaatactacacggataacaataatatgccaaatattcacatttytgcatagctttaaatatatttttttgtttacagtctttggtaacatacataaaacctgtattgttcacaacatatactctgtataaataataaagcacaagtttgtgtgacaaagacttataaggggaaacaaagagaaaacaccacggggtccaattttaaacttgctgttggtgatagttagaagtcattgaacatctagcacaagatatgaaggtcactgcatataacctagaaatctactgcatcgttgttctatgctgtgaagtagaaatactgagagaaacaaaattataaaactttgaaactttatgtcaacagaggaatgctctttgtgccttaaacacaaatttttttctaccctaaccctaggaaaatatccaaatattgaatgtttccagggcagtttggggccagtgt

SEQ ID NO: 405062 - DNA, 538 bp, Homo sapiens
tttagtctactttaacctttccagcaagagtccacttcgctcatcaccctgaagccatactggacttgtttytcactatagagtctttacataaataattcccttagtctggagaactcaaacttgtttttcaagtcttagcataaatgtcatttcctccagcaagttttcctgcccttcagtctgggataaaatttcttgatatattctctggtagcatcttgaaaatgttaaacttacctttctgggtgcttgcttgatgcctgtcttccttcctgagtgaatgccagagcactatgcacacctcttgctctcagctcaatgcattacatgtagtaggtattaaatttcttttttaatcaacaaagttttcatcaattcctctcagagctgtatcacagaactataatataatgaacactcagcttttgatgaaaattaatgtaagaagtagtcttttgaagaatacctttttgttactttgaaagtctgattttgaataacataccaaatgagcttttctgtctttcatataaag

SEQ ID NO: 405063 - DNA, 538 bp, Homo sapiens
tttagtctactttaacctttccagcaagagtccacttcgctcatcaccctgaagccatactggacttgtttctcactatagagtctttacataaataattcccttagtctggagaactcaaacttgtttttcaagtcttagcataaatgtcatttcctccagcaagttttcctgcccttcagtctgggataaaatttcttgatatattctctggtagcatcttgaaaatgttaaacttacctttctgggtgcttgcttgatgcctgtcttccttcctgagtgaatgccagagcactatgcacacctcttgctctcagctcaatgcattacatgtagtaggtattaaatttcttttttaatcaacaaagttttcatcaattcctctcagagctgtatcacagaactataatataatgaacactcagcttttgatgaaaattaatgtaagaagtagtcttttgaagaatacctttttgttactttgaaagtctgattttgawtaacataccaaatgagcttttctgtctttcatataaag

SEQ ID NO: 405064 - DNA, 557 bp, Homo sapiens
gataattcttaagcaaacagagaccacagtgtaggggaaataagtaatgaaattcaatttaaccactagtgcatttctctgggccaagcataatttttgtaaaacacattgaaacamcttacttacataagctaagtattggatttagtaaaaatggctaaatatacttgccaattactccttctcaacccacaggcaattctacggcttccaaatgaaaacagaatagaagtagatgtctttaacaggtaataaaaaatttttacttaattcccaaaatattcatttttatatttatttttgcaataatgctgtatatttataaatttattatttctatttataaaagtaacaagtggatgttgcaaaaataatactaaaataaaggtcatcagtaataccaccaatcccagtgtaatcactgttaatgcgtgatatggtttgtctgtgtccccacccaaatctcatcttgaattgtagttcccataatccccacatgtggtgggggggacctggtgggaggtaattgaatcatgggggtggtttctcccacacta

SEQ ID NO: 405065 - DNA, 497 bp, Homo sapiens
ttacagtgaaaaaaagagagccctcaccagtaacctactgttgtggatgtgaatcaacacaatactaacaaatacatgaaacaaaatcatagcctggataattcttaagcaaacagagaccacagtgtaggggaaataagtaatgaaattcaatttaaccactagtgcatttctctgggccaagcataatttttgtaaaacacattgaaacaacttacttacataagctaagtattggatttagtaaaaatggctaaatatrcttgccaattactccttctcaacccacaggcaattctacggcttccaaatgaaaacagaatagaagtagatgtctttaacaggtaataaaaaatttttacttaattcccaaaatattcatttttatatttatttttgcaataatgctgtatatttataaatttattatttctatttataaaagtaacaagtggatgttgcaaaaataatactaaaataaaggtcatcagtaatac

SEQ ID NO: 405066 - DNA, 557 bp, Homo sapiens
gataattcttaagcaaacagagaccacagtgtaggggaaataagtaatgaaattcaatttaaccactagtgcatttctctgggccaagcataatttttgtaaaacacattgaaacaacttacttacataagctaagtattggatttagtaaaaatggctaaatatacttgccaattactccttctcaacccacaggcaattctacggcttccaaatgaaaacagaatagaagtagatgtctttaacaggtaataaaaaatttttacttaattcccaaaatattcatttttatatttatttttgcaataatgctgtatatttataaatttattatttctatttataaaagtaacaagtggatgttgcaaaaatmatactaaaataaaggtcatcagtaataccaccaatcccagtgtaatcactgttaatgcgtgatatggtttgtctgtgtccccacccaaatctcatcttgaattgtagttcccataatccccacatgtggtgggggggacctggtgggaggtaattgaatcatgggggtggtttctcccacacta

SEQ ID NO: 405067 - DNA, 543 bp, Homo sapiens
caatggaatgacccccaacacacatgcaaattctgagttgaaaaacaaagggaaaatttaaaaaataaactctgccattttgcctcttaagcttgaacccattcgcccaactgctgagatcttattgggaagttgctgatcaccagtttcaggtgttttctacctgttgggagacagcccttccctggcacaagctgtgactgattattattttagaaaggcagttaacaaccacctgatcatcaccagatagacattcctggtgggggaaagtggagccctctcctactctcctcatgcctcactagctacctactgtaacmgtcatggtgactaaatctgaaaactccaaagtgacaactagatgaaaattttaaccaggctgtactattaaatgttactagattgagagtccaggaggcatggtgaaggaaacatcaaatagcaaaaagcacattagtaaattgaatttattattatcataattatttgcgataggatctcattctctcatccaggctggagcatagtggcatgaacata

SEQ ID NO: 405068 - DNA, 543 bp, Homo sapiens
caatggaatgacccccaacacacatgcaaattctgagttgaaaaacaaagggaaaatttaaaaaataaactctgccattttgcctcttaagcttgaacccattcgcccaactgctgagatcttattgggaagttgctgatcaccagtttcaggtgttttctacctgttgggagacagcccttccctggcacaagctgtgactgattattattttagaaaggcagttaacaaccacctgatcatcaccagatagacattcctggtgggggaaagtggagccctctcctactctcctcatgcctcactagctacctactgtaacagtcatggtgactaaatctgaaaactccaaagtgacaactagatgaaaattttaaccaggctgtactattaaatgttactagattgagagtccargaggcatggtgaaggaaacatcaaatagcaaaaagcacattagtaaattgaatttattattatcataattatttgcgataggatctcattctctcatccaggctggagcatagtggcatgaacata

SEQ ID NO: 405069 - DNA, 600 bp, Homo sapiens
aataaagtattaattgtgtaatgtgggaatgcaatcagagttagagtggaaaaagataatttcaagatgaagtcctctgataacagggggaactgatggggtcttgaatggtagatgaagctgtaataaataggaaggaggcattctgagacagggtactaaaggaaaagttagaaaacaggcttatcactattcacaatagcaaagacatggaatcaacctaaatgtccatcagtgagagactggataaaggaaatgtgatacatatacaccatggaatactatgcagccatgtaaaaggaacaagatcatgtcccttgcagaagcatggatggagttggaagatactatcctcagcaaactaatgcaggaacagaaaaccaaacactgcatttctcacttataagtgggagctraatgataagaacacatggacacatgatgggaaacaacgcacactggggcccgtcaaagggggcatgggaggaaagagagagcatcaggagaatagctaatggattctgggcttaatacctaggtgatgggatgatccatgcagcaaaccgccatggcacacagttacctatgtaacaaacctgc

SEQ ID NO: 405070 - DNA, 621 bp, Homo sapiens
acaggtcaaatcccattataggaaagattattacactaacagcccacttttcttctgagcattcataactacgttagtgtatacttctctttcaccttggatacctaagggaatatgatccagaaaaaggaacactcagtggaaaaaggaggagtcacagttctctgcttcttggamcataaagaagtgctgagtgttgaactctgtggtctgcctcttctggcacatgtcatggctataagaaaatgagtcaaactaaagaatggacagaattagcatatgcttgctaatgctaatttcatgattaccaacaggctttctgattcctgagcatttctaccttcattaagcttctaactgaaatgccagtgaaactttacagctaactctacagctaacccaactgtctctctcatttgctataatgccagcactgacctcatctcttgctttcatccaccactccccacagcatttgtaccccctctttcccatacacacccattttatttggggagtcatgaccccacaccccttaattatgggggccagagcaagacagacacctcttcctacccatactctttctgggtcgggaggggtatgggaaggtgaatggct

SEQ ID NO: 405071 - DNA, 593 bp, Homo sapiens
gttgaactctgtggtctgcctcttctggcacatgtcatggctataagaaaatgagtcaaactaaagaatggacagaattagcatatgcttgctaatgctaatttcatgattaccaacaggctttctgattcctgagcatttctaccttcattaagcttctaactgaaatgccagtgaaactttacagctaactctacagctaacccaactgtctctctcatttgctataatgccagcactgacctcatctcttgctttcatccaccactccccacagcatttgtaccccctctttcccatacacacccattttatttggggagtcatgaccccacaccccttaattatgggggccagagcaagayagacacctcttcctacccatactctttctgggtcgggaggggtatgggaaggtgaatggctggaaaacttctttgtatggggttttctttttctgaattaaaaaaaaaaagattttattaacaacaaaaaaaaattgtcaactttctggtcagtgacctttagaaaattgtaagggatactaatttataaaaattgtctatctccagtttaaaaccataacagtgtcc

SEQ ID NO: 405072 - DNA, 593 bp, Homo sapiens
gttgaactctgtggtctgcctcttctggcacatgtcatggctataagaaaatgagtcaaactaaagaatggacagaattagcatatgcttgctaatgctaatttcatgattaccaacaggctttctgattcctgagcatttctaccttcattaagcttctaactgaaatgccagtgaaactttacagctaactctacagctaacccaactgtctctctcatttgctataatgccagcactgacctcatctcttgctttcatccaccactccccacagcatttgtaccccctctttcccatacacacccattttatttggggagtcatgaccccacaccccttaattatgggggccagagcaagacagacacctcttcctacccatactctttctgggtcgggaggggtatgggaaggtgaatggctggaaaacttctttgtatggggttttctttytctgaattaaaaaaaaaaagattttattaacaacaaaaaaaaattgtcaactttctggtcagtgacctttagaaaattgtaagggatactaatttataaaaattgtctatctccagtttaaaaccataacagtgtcc

SEQ ID NO: 405073 - DNA, 631 bp, Homo sapiens
atacttctttgggaatctgttataagccagaagtctttgtcaaaagagaccctctctttcaacataatgaacccttcacatgcaacctaactcctacaaaaagaaacacatgcacrcagtcttacggactgtattacatgaaatgagaacagatggacaaagtttactttatttccaatattgcagtagtgcttgagggggaaaaagttaagacatgtttcttgccatgaaagcacttataagcaggcacataaacacatacataaaataaataattataggtatatttatagagattggattagggtacatcaggtgcacagaaaaaaaaagggcccttttattagtggtatcaggggagggagaaggcttaaacagcttatcttgagataaatctctaaagataagcaggtcctcagaagccttgctcctcaaagtgtggtccttggactgcagcttgctagaatgcaaaactcaggcctcatcctagagctactgaatcagaattgaatcttgtgttttaacgtgatccccaaaagattcatgggcacatgaatcttaaacctttaatctgaaacctctaagaaacactggtctaaataagttttagaagagcgttagaggcagaaaa

SEQ ID NO: 405074 - DNA, 566 bp, Homo sapiens
cttgctcctcaaagtgtggtccttggactgcagcttgctagaatgcaaaactcaggcctcatcctagagctactgaatcagaattgaatcttgtgttttaacgtgatccccaaaagattcatgggcacatgaatcttaaacctttaatctgaaacctctaagaaacactggtctaaataagttttagaagagcgttagaggcagaaaactttctgcagtaagttgatcaaataccatgagacatcaagatagctagtgtaggccaagaattaaaaactggaggcccataatccaaaytcagcccacatatgtcctttattaggattgcacagtgttttaaatattgagaaatttaaaataaaaatccagattttctgatttccttggaaaaaaaatcagaagttttggccaaactggacccatattcacatataagaacaaagaacaggatagactgtcagtttcagacaaaggtgagcccacaattacctttcgctcagccctctttgcccattgtcattattacctttctagtctcaaacagacatttgagactgctacccttg

SEQ ID NO: 405075 - DNA, 613 bp, Homo sapiens
atgcccacactggaaggttgtgggttaactggaatgagggcaaggaacacctggcccacctagggtggaaaactgcttaaaggcattcttaagccacaaacaatagcatgagcgatctgtgccttaaggacatgctcctgctgcagataattagccaaacccatccctttatttcggcccatccctttgtttcccataaggaatacttttagttaatctataatctatagaaacaacgcttatcactggcttgctgtcaataaatacgtgggtaaatctctgttcgaggctctcagctctgaaggctgtgagacccctgatttcccactccacacctctatatttctgtgtgtgtgtctttaattcctctagcgccgctgggttagggtctccccagccgagctggtyggcaaaggtggaatatggagttgatgggaaaactctgaatatgtctttggctgtgaaataaatactaacaaaaagtaagagggtgttaatgtgggagagagaggggaaaaagggaacataattctgggggaaaaaagatgatatcaagatcacagaaggacttagcccacgtcttgttctgaggaaggatacaatggtgaggtgt

SEQ ID NO: 405076 - DNA, 613 bp, Homo sapiens
atgcccacactggaaggttgtgggttaactggaatgagggcaaggaacacctggcccacctagggtggaaaactgcttaaaggcattcttaagccacaaacaatagcatgagcgatctgtgccttaaggacatgctcctgctgcagataattagccaaacccatccctttatttcggcccatccctttgtttcccataaggaatacttttagttaatctataatctatagaaacaacgcttatcactggcttgctgtcaataaatacgtgggtaaatctctgttcgaggctctcagctctgaaggctgtgagacccctgatttcccactccacacctctatatttctgtgtgtgtgtctttaattcctctagcgccgctgggttagggtctccccagccgagctggttggcaaaggtggaatatggagttgatgggaaaactctgaatatgtctttggctgtgaaataaatactaacaaaaagtaagagggtgttaatgtgggagagagaggggaaaaagggaacataattctgggggaaaaaagatgatatcaagatcacagaaggrcttagcccacgtcttgttctgaggaaggatacaatggtgaggtgt

SEQ ID NO: 405077 - DNA, 607 bp, Homo sapiens
ttacataagtgattatcaaatgttattgttatgtatattattcagtcaattacccaacaatttaaaacatagtaagtgcagacttgggaagagtataattcacaatattgcaataggtttgaaacactaacagagcacaactttcagtaagtgctaagtttttttttaactctgctctaacagttgaggacaaatgcttaattgaagaaggcaagaatgagccaaaaagaaagaaagagtttagcaatgggcaaatacattctaggctctattcacctcagaaagtacatttccctacctaaaattggagaatgggaagataaaagtcatttaggagttcataaacccatcctcactacaatggtagaaagtcttttgccgaaggcagtcacaggcaataacagggtttacaagttattttcctttaagaagtctcaaccacattagacaattgtgtaccrtaataaaaagaaataaaaatagttaacattaatggaatctatttggttagttcttatagtagagtaacactcatcactgaactttaattacaactagttgcataaaaacataccaggacacactgcagttagtatgtgtcagtttt

SEQ ID NO: 405078 - DNA, 603 bp, Homo sapiens
cctttgcctttgcaattgtttttaaacttcacatcctccaaatcaaatttgtttaaaacacaaaaaaatacaacaaattaagagaaaatcaagttctacattggttctgttcatgtttagaagaaatgttaaaacaaaagaatgaatagttggatagatratttttgtaaaacaaagacttaaaatgtgcagagatttcaggatcacagttgtatataaaacggggactatatgcggctactcattcttctttgtaatagtggagatactatattcaacaaaaccagtccttggaatcccaacagaggtaaattatccagtttcctaggaggtacttcccaaagcaagtgacagtgtgaatgtcaaagtgataaacaccaccctaaaaatcccatgaaagggaaaagaaaatgtagaaactgccttttcaaaaagtattataacagtgagaaaataatggcaatgaggagatctgatctagggaacccaaaacctacctcttgccttttgccttcatgctgccttcattattcctggaattaagatagtttaaatgataatagcccttcctcaaaactcaaccacttctgtaaagataatgag

SEQ ID NO: 405079 - DNA, 603 bp, Homo sapiens
cctttgcctttgcaattgtttttaaacttcacatcctccaaatcaaatttgtttaaaacacaaaaaaatacaacaaattaagagaaaatcaagttctacattggttctgttcatgtttagaagaaatgttaaaacaaaagaatgaatagttggatagataatttttgtaaaacaaagacttaaaatgtgcagagatttcaggatcacagttgtatataaaacggggactatatgcggctactcattcttctttgtaatagtggagatactatattcaacaaaaccagtccttggaatcccaacagaggtaaattatccagtttcctaggaggtacttcccaaagcaagtgacagtgtgaatgtcaaagtgataaacaccaccctaaaaatcccatgaaagggaaaagaaaatgtagaaactgccttttcaaaaagtattataacagtgagaaaataatggcaatgaggagatctgatctagggaacccaaaacctacctcttgccttttgccttcatgctgccttsattattcctggaattaagatagtttaaatgataatagcccttcctcaaaactcaaccacttctgtaaagataatgag

SEQ ID NO: 405080 - DNA, 531 bp, Homo sapiens
caaggactaagtgctaatgctttgagaggtatacgtccagagtgagaggaaggcgaagtgaggcaggtaaggatggtaagccatacaaggtaccatattggttgttacttcacaacaatctggaagaaatagcaggtcatgcagcaggtcaaccactcaggctgtatggcaaaatcagtagttagaacattccattggagtgagggaagtaagaagaatttatctacctggccctcccccacttcttgattcctaatgatcgaagtttgycctacagggagttaactcctcaacactacgtgtttgtatcatcaaacatctttagcagcttctcagaaatttacaccaatactgtctggtgtatttcacctgaatctgagtcagatggaaaatggcagaagatagagactctggagtgtggctggttaccctcagacagcaaaacttcatgagtctacactgcatatgatggtcatggtggcaactgtctcaaagacaactgaaaacaatacaatctgaaaatttggcaaa

SEQ ID NO: 405081 - DNA, 609 bp, Homo sapiens
gatttttttcttaaaccaaataagtaacccttttttcttcccatttataccctaagatgaaccgtgggcattagctgctagatttcagacgctttctctgtatagtattaaatacattgatatggttgaagcaatgagctgaaagtttttaatccttgatggacagcagaagaaraatttatgagtccgattcttttcaagtttgaagataatgatttttgccttttctgcctctgcttttcccttctgcattttacattttgtgacggtgagtcagacatgctatcattctattcagcagctttgacatcagcagcaaatatgcatgagctaagaaagtgaggtttctatatattgtcttcaagtttaaatggtattttttgtagcggtgattttaggtatctctccattagaacttctaaatttgtaggggccttctatattgtctgttgatttgtttttagggccattggaatagaagtgaaccaggtttcttggatggtggggttgtgacatggaaaggtgaatgaattaactgaacactgttcagtgcacttatgggcaaggtgaatctacagcatggtcttgcataacatgctgaatttacta

SEQ ID NO: 405082 - DNA, 609 bp, Homo sapiens
gatttttttcttaaaccaaataagtaacccttttttcttcccatttataccctaagatgaaccgtgggcattagctgctagatttcagacgctttctctgtatagtattaaatacattgatatggttgaagcaatgagctgaaagtttttaatccttgatggacagcagaagaaaaatttatgagtccgattcttttcaagtttgaagataatgatttttgccttttctgcctctgcttttyccttctgcattttacattttgtgacggtgagtcagacatgctatcattctattcagcagctttgacatcagcagcaaatatgcatgagctaagaaagtgaggtttctatatattgtcttcaagtttaaatggtattttttgtagcggtgattttaggtatctctccattagaacttctaaatttgtaggggccttctatattgtctgttgatttgtttttagggccattggaatagaagtgaaccaggtttcttggatggtggggttgtgacatggaaaggtgaatgaattaactgaacactgttcagtgcacttatgggcaaggtgaatctacagcatggtcttgcataacatgctgaatttacta

SEQ ID NO: 405083 - DNA, 454 bp, Homo sapiens
attggtgaagggacagatttaatcttttccccttgccaataacccatctgcttgctactcagctgtagaccaaccatcatcagtgtaacctgagaatttgatagaaatgtagtgtcttgggccccagcccagacctactgcatcagaatctgcatttaaaaaaatatccccagaagatttgtatgcacmttaatgtttgagacaagccaatcaattgagtctttttctgaaattcaccctgctgcaaaagcagctgactgtaatgtattcttcaatgcagaccacaatttgaaattctgatttatttgatggcttaatgtttattgactgcacctggtgtgctaggtactgcaaggaaaatacaaaccaaccagtcattgttctgcacttactttactctaaaataagaagatacagacaatttgctattttttcattcctttgtactttaaaa

SEQ ID NO: 405084 - DNA, 496 bp, Homo sapiens
gcctgttgtgggcacttgtgatcatgtgagtaatacttaatgaactcatatatatatatatatatatatatatatatatatatatatatacacatatatatatatatacacatatatatatatatatattcattccattatttgtgtccctctagagaaccctgattaatacattacctgaagcagtctacagattcatkgtaatccccaatgacattcttcacaaaaataggaaaaaacaattctaaaatttatatggaatcacaaagtactcagaatagtcaaagctaccctgaacaaaaagaacaaaactgaaggaagcacattacctgacttcaaatcatactgcagagcattagtaactgaaacagcaaggtactggcataaaaacagacacataaaccaatggaacagaaaagagaacccagaaacaaatccacatacctggagtgaacttatttttgaaaagggtgccaagaaaatacgctggggaaaa

SEQ ID NO: 405085 - DNA, 496 bp, Homo sapiens
gcctgttgtgggcacttgtgatcatgtgagtaatacttaatgaactcatatatatatatatatatatatatatatatatatatatatatacacatatatatatatatacacatatatatatatatatattcattccattatttgtgtccctctagagaaccctgattaatacattacctgaagcagtctacagattcatggtaatccccaatgacattcttcacaaaaataggaaaaaacaattctaaaatttatatggaatcacaaagtactcagaatagtcaaagctaccctgaacaaaaagaacaaaactgaaggaagcacattacctgacttcaaatcatactgcagarcattagtaactgaaacagcaaggtactggcataaaaacagacacataaaccaatggaacagaaaagagaacccagaaacaaatccacatacctggagtgaacttatttttgaaaagggtgccaagaaaatacgctggggaaaa

SEQ ID NO: 405086 - DNA, 579 bp, Homo sapiens
ttcagggactcagtttctttctggttctggcttaggagggtgtatgtatccaggaatttatccatctctcttagactttctagtttgtgtgcatagaggtgttcataatattctctgatggttattcayatttctgtgttgtcagtggtaatatcccctttgtcatttctaattgtgtttatttggaacttctttattttctttattggtctagctagcagtctatctattttactacttttttcaaaaaaccaactcctgaattttgactttgtgaatggtttttcaggtttcaatttccttcagtttagctctactgtttgttctttcttatcttctgctagctttggggttggtttgctctttgttctctaattcttttggttgtaatgttaggttgttaaattgagatctttctaactttttgatgcaggtttttagtgctagtaattttcctcttaacactgcctttgctgtgtcccagaaattctgtatgttgtatctttgttctcattaatttcaaagaacttcttaatttctgccttaatttcataatttacccaaaagttattcagtagc

SEQ ID NO: 405087 - DNA, 618 bp, Homo sapiens
gaccccacttctgcaaaaaataaaaataaaatcaaggaggtatccagcttcaaccagatatgtgccactcagtgacacccactaattcaatccactagtgtgtcgcaatctgcttagttcaagtactgcttggtcctgtctaccaaggatggaaccatgaactggaaaaccaatcccawttcccttaatttttaactttacttttttacttttaatttttggtgtgtcagtaaaattgagtagtggcgtactcaattcattctcttgatatctattttcttctcttttattcctctatggaaagagtaaactgaatagctcattttgtctcagagggatgaggccggctcccaaatctcacttatgaaatataacatatgagtagcacatcctgcttttaagagaatgtgagcacagaagaatgaagagaatacacattgtatatttccctgagtggagtagacttctggttctgtaaatgtaacagagtccaaaatcctttagtgcaacattgaggtctgcaaagaaaatgtagcttatttgtttttataattgatcagatcttcctcttaagcttactgcttgatggtaatgctagaggtgtaaggaaggaggcaa

SEQ ID NO: 405088 - DNA, 618 bp, Homo sapiens
gaccccacttctgcaaaaaataaaaataaaatcaaggaggtatccagcttcaaccagatatgtgccactcagtgacacccactaattcaatccactagtgtgtcgcaatctgcttagttcaagtactgcttggtcctgtctaccaaggatggaaccatgaactggaaaaccaatcccatttcccttaatttttaactttacttttttacttttaatttttggtgtgtcagtaaaattgagtagtggcgtactcaattcattctcttgatatctattttcttctcttttattcctctatggaaagagtaaactgaatagctcattttgtctcagagggatgaggccrgctcccaaatctcacttatgaaatataacatatgagtagcacatcctgcttttaagagaatgtgagcacagaagaatgaagagaatacacattgtatatttccctgagtggagtagacttctggttctgtaaatgtaacagagtccaaaatcctttagtgcaacattgaggtctgcaaagaaaatgtagcttatttgtttttataattgatcagatcttcctcttaagcttactgcttgatggtaatgctagaggtgtaaggaaggaggcaa

SEQ ID NO: 405089 - DNA, 618 bp, Homo sapiens
gaccccacttctgcaaaaaataaaaataaaatcaaggaggtatccagcttcaaccagatatgtgccactcagtgacacccactaattcaatccactagtgtgtcgcaatctgcttagttcaagtactgcttggtcctgtctaccaaggatggaaccatgaactggaaaaccaatcccatttcccttaatttttaactttacttttttacttttaatttttggtgtgtcagtaaaattgagtagtggcgtactcaattcattctcttgatatctattttcttctcttttattcctctatggaaagagtaaactgaatagctcattttgtctcagagggatgaggccggctcccaaatctcacttatgaaatataacatatgagtagcrcatcctgcttttaagagaatgtgagcacagaagaatgaagagaatacacattgtatatttccctgagtggagtagacttctggttctgtaaatgtaacagagtccaaaatcctttagtgcaacattgaggtctgcaaagaaaatgtagcttatttgtttttataattgatcagatcttcctcttaagcttactgcttgatggtaatgctagaggtgtaaggaaggaggcaa

SEQ ID NO: 405090 - DNA, 584 bp, Homo sapiens
tgtgggaaaacattaagaggcctaatacacatgtaaaaggagtggaagatgatgggaaaagaaaaaacatttggccaaatactctgtaaactgaatttcaaaaactacaaacacacaaattcaagaagctcccaaaaccccaagaacaaagcaaaattaagaaaccaaaaaaaagcagatcataattatttgctaaaagattattttagaaacttgcctctcccctgaagaaattctcttcccacagtccactttactgtgcctgaaggtgacgcaggatattttcttgacccctttgtgggattcatgacagcggtgccccatgtactcagcctgccctgctcaatccytcacaaaagggaacgagtgcaagaactacagtgaggaagtgcagaaacctgctgtcaggagcaaacactgtttgcttaggtccaccatgctccacccctcatgggagggagcacagggggtggtgagtgcagcaaccagctggccgcttcagtgccagcaggagcaaattctgtgtggttcccgtggcagtgtccaggtaagggtgcctgtgaccccaaggccccagagggtgt

SEQ ID NO: 405091 - DNA, 584 bp, Homo sapiens
tgtgggaaaacattaagaggcctaatacacatgtaaaaggagtggaagatgatgggaaaagaaaaaacatttggccaaatactctgtaaactgaatttcaaaaactacaaacacacaaattcaagaagctcccaaaaccccaagaacaaagcaaaattaagaaaccaaaaaaaagcagatcataattatttgctaaaagattattttagaaacttgcctctcccctgaagaaattctcttcccacagtccactttactgtgcctgaaggtgacgcaggatattttcttgacccctttgtgggattcatgacagcggtgccccatgtactcagcctgccctgctcaatccttcacaaaagggaacgagtgcaagaactacagtgaggaagtgcagaaacctgctgtcaggagcaaacactgtttgcttaggtccaccatgctccacccctcatgggagggagcacagggggtggtgagtgcagcaaccagctggccgcttcagtgccagcaggagcaaattctgtgyggttcccgtggcagtgtccaggtaagggtgcctgtgaccccaaggccccagagggtgt

SEQ ID NO: 405092 - DNA, 581 bp, Homo sapiens
tttgcttgtctgaaaaggatcttacttctcctttgcttataatgcttagtttggctggatataaaattcttggttgggatttcctttctttacaaatgttgagtattagtccccaatctcttctgtcttacagtgtttctcatgagaaatctgctattaatatggtgggctacactttgtaggtgatctgacctttctctctagctgcctttaacatttttctttcattttgaccttggagaatctgatgattgygtttctttggaatgatcttctagtgaagtaacttactggggtctcttttcctgaatttgaattctggcctgtcttgctaggttggggaagttctcacggatgatatcctgaaatatgttttccaagttacttccattctccccatctctttcaggcataccaatgagtcatagctttggtcattttacataatcccatatttctcaaaggtttcattcattcctttttattcttttttctctattcttgtctgactgtcttatttcagaaatccagtcttcaagctctgagattctttcctcagcttggtctcttatgctattaat

SEQ ID NO: 405093 - DNA, 604 bp, Homo sapiens
ttgtcaagactgttgatgggcctgtttcccagaaaggttcagagacatttccttccctcctaccttttttctttttatttatattgaagctttgatatatttagggaatacaggagaagaaggaagacatatggtaatgtcattttctagcaaagatttagaatattatccaataaatcttcttagcctggttttgaactgcctgtatytcctcagcaggagtggacattctcaagagacagaagccaaatgtgaacactttggtccatattttattccttcataggatctccttttagctttaatccaggcataatttaatactttcttacattcagagtgagctaatgagtatggaaaacaagtctgcaaattgttactttgtgccctggtcatataagattgtaatttttatttacagttagtttaaagaactaactgtaaggtacagaattgtttcttgggaagctatcatttcttgctcaaaccaaattttccagggattggattaataggtcaatatatgaaaatgaactactttgcagggatagaaaggaggaagttgggagggaagtagattaagacagagggagaatatgagacc

SEQ ID NO: 405094 - DNA, 544 bp, Homo sapiens
acatacttcacctacaaagacatatataaactgaaagtaaatggatggaaaagttattccatgcaaatggaaaccaaagaaacacagaattagttacacttgtgtcagacaaaatagatttcaagacaaaaactgtaaaaagagacaaagaaggtcactatataatgataaaggggtcaattcagccagaggatttaacaattgtaaatatacatgcacaaaacactggagcaataagatatataaagcaaatattattagcgccaaagagagagataaccccaaaacaataatagccagagacttaagtaccctactttctgttcttccagacagaaaataaacaaagaaacatcagattttgtctgcactgtagatcaaatgggcctaacagatattgacagaatgttttatccaatggttgcagaatacacattcttctcctcagcacatggcttgttcttaargttataccatatgttaaggcacaataacaagtcttaaaacattcaataattgaaataatataaagcatcttctctga

SEQ ID NO: 405095 - DNA, 565 bp, Homo sapiens
aatatcctgtggtaggtgattgggttaagcaagcctgtcgcttcaagatctttatttaatgaagcaccaagaattctatgaagaattcatcagaacttcgtacatatcacatcaagttaaaacactgcagcacaacaaaggaaacaatcaacaaagtgaagagataacccacagaatggaagaaaattaacaaccagaaagagctcaaacaactctgcagagtgttttttgtttttgtttttcaacatataggtgctcrgaagatgttacttgagtcaaatgcaacttaatttaagtgaaatgcaatttaatgtaaatagagaaataccgaggggatctgaaaccttgcaagtatagagacagaaaccagcatccaaaaagagagagataattaaatatgtgagtttgaatttcgaccttgggttaaaaactgtgcactctctgaatgtggactgtgcttggccttcaaaagtttattgtagtcataaaggggaaaaaatcttggcagtgactctcttctgcctgagtgagtacaagtcatcaacattgcattatctgagaagcc

SEQ ID NO: 405096 - DNA, 393 bp, Homo sapiens
tacatagacttaattttgtattaaaatttctttaaatttttactgcatctgcaaaaatatgttttagtatgaactctgtggtgttttctaagctgtagtttttgaaaaagtatttttccaaatttattacatttgcagggtttttttttcaatataaattccctgatattaaacaaagtttgagcaattgcttctgaggtttcctctaatacaaaatgygtacaataagatctgtgacacaagtaaacatattacaaccctactacaatgttcttcttcaaaataatcttctttactttagaggcttccattttcttaaagatattttgacagtagttgcacttataatgtttttattaagtatgaactctctgatgttgagtaagatgtgag

SEQ ID NO: 405097 - DNA, 587 bp, Homo sapiens
gtaatgagaaaaaaattgtgcatgcaaatgaagttcctttttaccagattgaaatatactgttttatcttttagaggtttatgtaatccccaaggtacctcaaagaacatatgtgtatagatgcacaaaacaaattaagaaataagtaaaagaaacatatcaatataaaactaaaaagacacaaagacaaagagaaaatgagtgaccaagatataagaatcaaataaaacaataaaataacattagtatgtcttyctgtttcagaaaattatttaaatatatatctttaactttgcaatcaagaaacatacttttaataaagagatttatttaaatattttaaaaactgagatccaatttgcctttctacaagagtaagctgagatctactgataaaaaaaactgaaagtggcaagatggatatacatattgcaagtaaatattaaccaaatgagagaagaggtcaaaataatatgacataagctatatcttaagtgaaaaactttcatattttataaaatgtactaaaagtcaaaattgcaaagagacaaaagacattaaaaaataatagattcatttactgataa

SEQ ID NO: 405098 - DNA, 587 bp, Homo sapiens
gtaatgagaaaaaaattgtgcatgcaaatgaagttcctttttaccagattgaaatatactgttttatcttttagaggtttatgtaatccccaaggtacctcaaagaacatatgtgtatagatgcacaaaacaaattaagaaataagtaaaagaaacatatcaatataaaactaaaaagacacaaagacaaagagaaaatgagtgaccaagatataagaatcaaataaaacaataaaataacattagtatgtcttcctgtttcagaaaattatttaaatatatatctttaactttgcaatcaagaaacatacttttaataaagagatttatttaaatattttaaaaactgagatccaatttgcctttctacaagagtaagctgagatctaytgataaaaaaaactgaaagtggcaagatggatatacatattgcaagtaaatattaaccaaatgagagaagaggtcaaaataatatgacataagctatatcttaagtgaaaaactttcatattttataaaatgtactaaaagtcaaaattgcaaagagacaaaagacattaaaaaataatagattcatttactgataa

SEQ ID NO: 405099 - DNA, 606 bp, Homo sapiens
ctatctctgggcccatcatttagatgatgtgaccatctttttcctcctgatttctattcacagggggcatagtgcaagggtattgtgacatattgctggaccaagcacctaggcgatgtgactcctctctaatgcttggcttctgaccaaggaaaaattgtgatatatcactgtttccagcacctacgggayttgactctcctgaatgggccctgaatttattgtgtattgtgacatatggcttggtttgacacctacgtgatgtgactctcattcatatgcccactggggtattattacatatcttttctttatcacctaggtgatgtgactgaccacttctgcctggccatgccgaaaaaaggagattgtgacatatcactgcattcaatacctagatgatgtaagttttttcttttgcgtggctctgcatatttttcatattgtgacatatcattaggacccagcacctaggtgacgatactctattctcctgcctcagcactggagaccacgagtaccactgcgtcgcagcacctagacgatgggactgtcttctacgtgccttggcgcagcatacagagggtgttttcacatatcactggg

SEQ ID NO: 405100 - DNA, 524 bp, Homo sapiens
cttggaccctgctgacagggggaattgtgacatatctctggaatttgtcacatacaatttatsctaaattcccctgaaaattggaggtcatctctggttgctaattggctatattcaaaggaaaaataaacttatgctttcatgagaggtagtttggaaacttggagccaggtgcgtgatgaaagttggctcctatcttccaacaaaaagtgtggaatggagctctattttctttgctatttacattttaaataaatgattttcaggtcctagagaaagacagtcctgagtcagagatactcacaaaagacctatttagcagttagaataatttatatatatttcaagttggcagaaaaataatttaagtataaaagttttctgggctgggcgtggtgactcacacctgtaatcccagcattttgggaggccaaggcaggtggatcatgaggtcaggcattcaagaccagcctggccaagatggtgaaacgccatctctactaaaaactacaaaacttagccgg

SEQ ID NO: 405101 - DNA, 524 bp, Homo sapiens
cttggaccctgctgacagggggaattgtgacatatctctggaatttgtcacatacaatttatcctaaattcccctgaaaattggaggtcatctctggttgctaattggctatattcaaaggaaaaataaacttatgctttcatgagaggtagtttggaaacttggagccaggtgcgtgatgaaagttggctcctatcttccaacaaaaagtgtggaatggagctctattttctttgctatttacattttaaataaatgattttcaggtcctagagaaagacagtmctgagtcagagatactcacaaaagacctatttagcagttagaataatttatatatatttcaagttggcagaaaaataatttaagtataaaagttttctgggctgggcgtggtgactcacacctgtaatcccagcattttgggaggccaaggcaggtggatcatgaggtcaggcattcaagaccagcctggccaagatggtgaaacgccatctctactaaaaactacaaaacttagccgg

SEQ ID NO: 405102 - DNA, 391 bp, Homo sapiens
caaatggtgaaacaccatctctactaaaaatacaaaaattagctgggcatggtggctcatgcctgtaatcccagctactcaggaggctgaggcaggagaatcccttgaactcaggagtcagagggtgcagtgagctgagatcgcgccactgccctccagcctgggtggcagagtgagactatgtcataacaaaaaaaawttatttatatttaatttgactaaaacatgttcacatcttaaaaatactgctttgtaccatgaataataaatgtaaagtctttatcctcaaacggattctgattgtcaactcaatacatatggcaacccatttctctggtttctccaaactgaagtctcatgaaggctcaaatatggagtgagagggactcaa

SEQ ID NO: 405103 - DNA, 522 bp, Homo sapiens
caaatggtgaaacaccatctctactaaaaatacaaaaattagctgggcatggtggctcatgcctgtaatcccagctactcaggaggctgaggcaggagaatcccttgaactcaggagtcagagggtgcagtgagctgagatcgcgccactgccctccagcctgggtggcagagtgagactatgtcataacaaaaaaaatttatttatatttaatttgactaaaacatgttcacatcttaaaaatactgctttgtaccatgaataataaatgtaaagtctttatcctcaaacrgattctgattgtcaactcaatacatatggcaacccatttctctggtttctccaaactgaagtctcatgaaggctcaaatatggagtgagagggactcaacaacagaccatgagaagcaagaaggatgaggtaggatggtcagctctaaggctcagggattcctggggaccccaatataatgacgtcagctatgaagcttactaactgaaaataagcataagcagctgaaa

SEQ ID NO: 405104 - DNA, 522 bp, Homo sapiens
caaatggtgaaacaccatctctactaaaaatacaaaaattagctgggcatggtggctcatgcctgtaatcccagctactcaggaggctgaggcaggagaatcccttgaactcaggagtcagagggtgcagtgagctgagatcgcgccactgccctccagcctgggtggcagagtgagactatgtcataacaaaaaaaatttatttatatttaatttgactaaaacatgttcacatcttaaaaatactgctttgtaccatgaataataaatgtaaagtctttatcctcaaacggattctgattgtcaactcaatacatatggcaacccatttctctggtttctccaaactgaagtctcatgaaggctcaaatatggagtgagagggactcaacaacagascatgagaagcaagaaggatgaggtaggatggtcagctctaaggctcagggattcctggggaccccaatataatgacgtcagctatgaagcttactaactgaaaataagcataagcagctgaaa

SEQ ID NO: 405105 - DNA, 522 bp, Homo sapiens
caaatggtgaaacaccatctctactaaaaatacaaaaattagctgggcatggtggctcatgcctgtaatcccagctactcaggaggctgaggcaggagaatcccttgaactcaggagtcagagggtgcagtgagctgagatcgcgccactgccctccagcctgggtggcagagtgagactatgtcataacaaaaaaaatttatttatatttaatttgactaaaacatgttcacatcttaaaaatactgctttgtaccatgaataataaatgtaaagtctttatcctcaaacggattctgattgtcaactcaatacatatggcaacccatttctctggtttctccaaactgaagtctcatgaaggctcaaatatggagtgagagggactcaacaacagaccatgagaagcaagaaggatgaggtaggatggtcagctctaaggctcagggattcctggggaccccaatataatgacgtcarctatgaagcttactaactgaaaataagcataagcagctgaaa

SEQ ID NO: 405106 - DNA, 546 bp, Homo sapiens
ctttcttttccagaggacactgggtgaaaactagttgccccagtgactgttcgagcagcacctcgagcgaccgctcttagttctattcaggcaggaattcagcaagctagaygagagggtgatttagagccttggcagttccccattagaacacaacccccagatcaacagggaaatattacagctacatttgagccttttcctttgaaattactcaaagaattaaaacaagttataaatcagtatggaccaagttctccttttgtaatgggactattaaagaatgttactgtttccagtcagatgattcttactgactgggatgctcttactcgagcttgtctaactcctgctcacttcttacaattgaaaacttggtgggcagatgaagcttccattcaggctgctcacagtgcccaggcccaacttcaaattaatataactcagaccaacttttgggggttggcggttgggctagtttagatgcacaactggtcatgcaggatgatgtcatagaacagcttagaggagtgtgcattagagctt

SEQ ID NO: 405107 - DNA, 546 bp, Homo sapiens
ctttcttttccagaggacactgggtgaaaactagttgccccagtgactgttcgagcagcacctcgagcgaccgctcttagttctattcaggcaggaattcagcaagctagacgaragggtgatttagagccttggcagttccccattagaacacaacccccagatcaacagggaaatattacagctacatttgagccttttcctttgaaattactcaaagaattaaaacaagttataaatcagtatggaccaagttctccttttgtaatgggactattaaagaatgttactgtttccagtcagatgattcttactgactgggatgctcttactcgagcttgtctaactcctgctcacttcttacaattgaaaacttggtgggcagatgaagcttccattcaggctgctcacagtgcccaggcccaacttcaaattaatataactcagaccaacttttgggggttggcggttgggctagtttagatgcacaactggtcatgcaggatgatgtcatagaacagcttagaggagtgtgcattagagctt

SEQ ID NO: 405108 - DNA, 546 bp, Homo sapiens
ctttcttttccagaggacactgggtgaaaactagttgccccagtgactgttcgagcagcacctcgagcgaccgctcttagttctattcaggcaggaattcagcaagctagacgagagggtgatttagagscttggcagttccccattagaacacaacccccagatcaacagggaaatattacagctacatttgagccttttcctttgaaattactcaaagaattaaaacaagttataaatcagtatggaccaagttctccttttgtaatgggactattaaagaatgttactgtttccagtcagatgattcttactgactgggatgctcttactcgagcttgtctaactcctgctcacttcttacaattgaaaacttggtgggcagatgaagcttccattcaggctgctcacagtgcccaggcccaacttcaaattaatataactcagaccaacttttgggggttggcggttgggctagtttagatgcacaactggtcatgcaggatgatgtcatagaacagcttagaggagtgtgcattagagctt

SEQ ID NO: 405109 - DNA, 533 bp, Homo sapiens
ttactgtttccagtcagatgattcttactgactgggatgctcttactcgagcttgtctaactcctgctcacttcttacaattgaaaacttggtgggcagatgaagcttccattcaggctgctcrcagtgcccaggcccaacttcaaattaatataactcagaccaacttttgggggttggcggttgggctagtttagatgcacaactggtcatgcaggatgatgtcatagaacagcttagaggagtgtgcattagagcttgggaaaagaccacttcaggtggggaacaatacccttcctttagtgctataaaacagggaccaaaagaaccatacattgattttatagctcagttacaggagtctcttataaagatgattgcagattcagctggtcaggttatagtgttgcaattattagcatttgacaatgctaatcccgattgccaggctgctctgtgaacctatctgagggaaagcacatttagttgattatgtcaaggcctgtgatggtatagggggtaatctgcataaa

SEQ ID NO: 405110 - DNA, 533 bp, Homo sapiens
ttactgtttccagtcagatgattcttactgactgggatgctcttactcgagcttgtctaactcctgctcacttcttacaattgaaaacttggtgggcagatgaagcttccattcaggctgctcacagtgcccaggcccaacttcaaattaatataactcagaccaacttttgggggttggcggttgggctagtttagatgcacaactggtcatgcaggatgatgtcatagaacagcttagaggagtgtgcattagagcttgggaaaagaccacttcaggtggggaacaatacccttcctttagtgctataaaacagggaccaaaagaaccatacattgattttatagctcagttacaggagtctcttataaagatgattgcagattcagctggtcaggttatagtgttgcaattattagcatttgacartgctaatcccgattgccaggctgctctgtgaacctatctgagggaaagcacatttagttgattatgtcaaggcctgtgatggtatagggggtaatctgcataaa

SEQ ID NO: 405111 - DNA, 604 bp, Homo sapiens
cttctatttttacgtaggactggaagtaagtggcagaatcatgagtcaaaaacatttttgaaaagccactgaaattgaagacaaataagtaaaaagttactgtttgtggatcatatgatcttatatataaaaaaaccataaacactgcactgaaatttgtctatactaataaatacactcagtaaattagcaaaatataaaattaacatacaagtataagttattgttccatacacttaaaccatctgatacaataaagaaaataatcttatttacaatagcattaaaataataaatttctgagagcaaatttaaccaagaaggtaaaaaatctttacaataaaagatataagataggccaggcatggtggcttatgcttgttatttcagcactttgggaggctaaggggggcagatcacaaggtcaagagatcaagaccatcctggccaacatggtgaaactccgtctcttctaaaaatacaaaacattagcttggygtggtgacatgcgcccgtagtcccagctactcaggaggctgaggcaggaagattgcttgaacccaggaggcagaggttgcagtgagccaagattgcaccactgcac

SEQ ID NO: 405112 - DNA, 553 bp, Homo sapiens
tgtccatggattgaaagaataaatattgttaaagtgtcatattatctaaagtaatctacagattcaaaaaacttcctattaaaattccagtggcatttttttcacagtaataaaaaatacaattctaaaatttacaagaaactgcaataaacttcgaaaagcccaagcaatcttgaggcaaaagaacaaascagaggggtattatactttataatttaactctatttcaagaatatagtaattaaaaacagatgaaatgtgcagaaagattaacaaacaaaacaatggaacagaaacctctactttcacacatttcagacatgatgaaaaaggaaaactaaaaaatagtttaacatagagtttcccaaaattatgctgatatctgtgtgtccccccaaataatggaaaagcagggagattgtacagtcttttacatgccatgaaaaggactttggctctcactgtacacttgaaggaagatcaccaaagggaaagcagaatctttaaagaatttaaaagcataagagagaagatgcccctatgtcacagcaaa

SEQ ID NO: 405113 - DNA, 497 bp, Homo sapiens
ggattacaggcatgagccatcgtgcccagccctgtattatatctttatctttatcaagttgtggtctaagtgagcatttggtatgattttgggattattgaatttgctgaggattgttgtgtttctgattgcgtggtcaattttagagtatgtgacacatggtgatgagaaagatatatatactatgttggtttcagatgaagagtttcatatatgtttattagaatgatttggtcaagtgttgagtttaggttctgatatctgctaattttctgcctcaaggtgggaaattaaagaaaataaaattaaattaaaaagagaaagaaacaaggtttcctgtattaggctgacttatcctagaggcagtaacaggcacagcccacatccaggaaaagttttgataacactattkaagaagccagggctggaaagaatgtgctctggagactctcccagcattccctcaacatagggagaagagaaacaaattttccttt

SEQ ID NO: 405114 - DNA, 570 bp, Homo sapiens
ccctcaacatagggagaagagaaacaaattttcctttctcttatgattcctgtttttcatttaagcagcacattgaaggtcatgagatgcctgagcaggcctggattgcagccacctaggcaccatagtgaaggttataagataagcccatgcaaggcactagagcaagcctaggtaacagccatctgggccacatagtaagagtcatatgtaagtctgagttataaacctgtcatagtatgattaactgcttttgttctgtttctgtatccttgctttcacatcactacactttgtgccactgtaggcttgtttcaagttagcccaccctctttagaagtgtatgtaaaagttaaatgctgtctttgtccttggcccagtctctggatgttaatccactgggwctgagtgcactcaataaaatcctccttttctacctatcggtctttccagtctcctaattcccacaacacagtgatctaagtgtctgcggagtgttgtagtctcctattattgtgtcagaatctacatctctttataggtcttctaagaacttgctgtattcatgtg

SEQ ID NO: 405115 - DNA, 596 bp, Homo sapiens
gtggaaatcaaccattttacctctttcaatgactcttgtgtcttcaaacctgaaactgattaagagaccatggagccaagaaaccaaatcagagtaacacgtgtgcattgagtagacatgtggacatgagaatctccactttccccttcctcctcttggtaaacygctcacaaatgttcaggtaacatctgctactgctactccacctattcaggacctaaatctgcagatggaaattctgaatctaggtcatgagatttggaaaacagaaaatcttttatctgaggaatgcaaatcctctttttaggtcggggcgaaagttattgcggttttaccatttaatgtaatggcaaaaaccacaattacatttgcaccaacctaatagttgtcaaactcggagagacattaaaatgagaacacaattatgtctttctctcctctttgaaccatatagttatctcttgaaattgtttactattgccaccagtggctataaattaaactgatagtgccacactggacactatagcccatactctaaaccctaacgatgtacactcaatcagtaatcaatgttaattctgtaaataaataag

SEQ ID NO: 405116 - DNA, 576 bp, Homo sapiens
gattataataaattttataaaattgagtaatgcacacaagataatttttagatataattttaaaatagtgtatttacattttatttagttagggcattccattttattaactggagaaccctatataagcattttttaaaaattattgcttttcacttttataagtgacaagtaaatttattaattgagtcaatttgttcaggtaagtactagggagacttcataagtcatgaggatgtttttatatataaatgtagcaaacaaatatgaaagttcctcctgtgtcacagacgctccataataagccataaatattcctgctggagttagtttgtattttcaagtcagagatgaaaaatatccatggtgaagaaatcttcaygtggcgaaggcatttttgtccaggctgcaaagctgactcttaatgaatttaaagagaaattttgcttctcttgtttcttatcctgttttgtttgtcttatgtgtattccaaggttgtatgcattacaatgaactacagtacttcttttactgtgttatggcaacagttttctcactgttgtcttcatttcacat

SEQ ID NO: 405117 - DNA, 587 bp, Homo sapiens
catttctatgcaccatggctcactgctattactcaagccatttgtaaacaaacagtgtttaacttgcactcagaacaatccatgacaaggagggcctactccgcccctgggagttcaggaaacaggagccagggagccgtgccctgtgaaaaactgcttatagacttcacctaattgccstgagagggagggctatcagtacatgttggtgttcatttgcaccttttcaggataagtcaaggccttcctcacccagacagggaaggcactagaggtgaccaaggtgttgttaaaagacattattcccagatttggactgtctctaactctaagatcaaacaatggaccaacatttgtggctgaaatagttcaggactttacttgactattaaaataaagtggaaattacatacagcctacaggccgcagagctcaggtaaagtggagtgcataaaccagacactcaaacagctgctgaagaaattttgtcaaactcatcaaaagtaggatcaggtcttgtctgttgtcctcctccgagtcaggtgcactcccaccaaacaactgggtattcgccctgtaagatttta

SEQ ID NO: 405118 - DNA, 505 bp, Homo sapiens
aaaaatgaacaatatataaagatataatagtttcaattttatcttcaaatcccaaagtatttctcccacacagaagtaatgtagattcacaacagatactgaaattaggagaattttataactggtcacctagccaagactaaacgaccattcaaaacaaacctacaaaacaaatatasaagtgataaaataaacagagatgacatttatagaggtaaacaaacacagaggtaattatattggcagtagacttctggctgatttatattgattttgctagactgtcttaaattgcacagagttaaacactgtcatacacaattataatataaaataaaacaccaaaacacaagtaaatggtgtgaagtggcataccttaaaatatataacacaaaaatataacattgcaaaacaaaattaaaatatggaatgtaaaatgtattggacaccatcaagtagatcaatatattcatgaaaggaatcttagaagaatatagggaaaaag

SEQ ID NO: 405119 - DNA, 505 bp, Homo sapiens
aaaaatgaacaatatataaagatataatagtttcaattttatcttcaaatcccaaagtatttctcccacacagaagtaatgtagattcacaacagatactgaaattaggagaattttataactggtcacctagccaagactaaacgaccattcaaaacaaacctacaaaacaaatatacaagtgataaaataaacagagatgacatttatagaggtaaacaaacacagaggtaattatattggcagtagacttctggctgatttatattgattttgctagactgtcttaaattgcacagagttaaacactgtcatacacaattataatataaaataaaacaccaaaacacaagtaaatggtgtgargtggcataccttaaaatatataacacaaaaatataacattgcaaaacaaaattaaaatatggaatgtaaaatgtattggacaccatcaagtagatcaatatattcatgaaaggaatcttagaagaatatagggaaaaag

SEQ ID NO: 405120 - DNA, 505 bp, Homo sapiens
aaaaatgaacaatatataaagatataatagtttcaattttatcttcaaatcccaaagtatttctcccacacagaagtaatgtagattcacaacagatactgaaattaggagaattttataactggtcacctagccaagactaaacgaccattcaaaacaaacctacaaaacaaatatacaagtgataaaataaacagagatgacatttatagaggtaaacaaacacagaggtaattatattggcagtagacttctggctgatttatattgattttgctagactgtcttaaattgcacagagttaaacactgtcatacacaattataatataaaataaaacaccaaaacacaagtaaatggtgtgaagtggcatacyttaaaatatataacacaaaaatataacattgcaaaacaaaattaaaatatggaatgtaaaatgtattggacaccatcaagtagatcaatatattcatgaaaggaatcttagaagaatatagggaaaaag

SEQ ID NO: 405121 - DNA, 554 bp, Homo sapiens
aagttaccaggtaaagtgctaggagggagagttagacacatggtgagaggagatagaaacytcaggtagtagcattcactcattcattcaatgaacatggcaccaagccagggtctgatgtctccattccaatagctgctttcttgagctattaagacacctctaaactgaaaccgcctttgcaaaattatgactgagacagtgaaagagatctaacctaactgactccatcttgcttctaacctccaagctgtccttgttcattcctgggcataagctgaagtaacattgggagaaacttagtttatagtttaaacaaagacggtaacagccctttcccaaagcagacctccttcttgcctgggaactagattgactttatagaactaacattagccacaagattagaaattatggtttaggagtcatgcagctggaggctacaagattctgacctgccctaaactgctcctaagatcagtgcttgagatattttgcagcccctgcacttgatggattagctggcacaacccagatcaataaactggctcatc

SEQ ID NO: 405122 - DNA, 548 bp, Homo sapiens
tgtcctagtcaagctggtaagcagctccaaggggatgctggatcactggagatgttaggagccctacattgagagcatggaaacctggattccacctctgcttactttgtctttatcagtggtactcagagatgcagatagctttgtcctcaactgcaggacatggacataaacacgaaggtacggccaggcgcggtggctcactcctgtaatcccagccctttggcaggcaggcggatcacctgaggtcagcagttcaaaaccagcctggacaacatagtgaaacactatctctactaaaaatacaaaaattagccaggcgtggtggcccgtgcctgtaatctcagctacttaggaggctgaggcaggagaactgcttgaagccaggaggtggaggttgcagtgagccaagattgcaccattgcactccagcctgggtgacagagtgagactctgtctgaaaaaaraaagaaagaaagaaagaaagtacaatgttaagtgtatgtaagccccagttggctccatccactccaccagctctgtgccct

SEQ ID NO: 405123 - DNA, 612 bp, Homo sapiens
  misc_feature (1)...(612): n = A,T,C or G
gtttgcagcctgaaaatgcagtataaaagaaaaatctattttctgaggagaaattcatgaaagctgcagaaatttgcataagtaatgaggagccgaatgttaatccccaagacaatggggaaatgtctccagggcatatcaaaggtcttcatggcagcccctcccatcacaggcccagaggctgaggaggaaaaaaatggttttgagggccaggccangggtacctgtgctgtgtgcagtctagggacttggtgccctgcatcccagccacttcagctatggctgaaaggggccaatgtagagcktgggctgtggcttcaaagggtgcaagtcccagggcttggcagcttccacatggtgttgagcctgcaagtgcacagaagtgaagaactgaggtttgggaacctcagcctagatttcagaggatgtatggaaacgcctggctgtgcaggcagaagtttgctgcaggggcggggctctcatggagaacctctgctagagcagtgcagaagggaaatgtggggttggagcccccacagagagtccctactggggcactgcctagtggagctgtgagaagagggccactgtcctccagaccccaaaatggta

SEQ ID NO: 405124 - DNA, 575 bp, Homo sapiens
gacctcctccacctcaaacttgtggcctcctgaaggaaagaaaaagagacaaacactatctaggaagccctggggtccaccagactcctcggcagccactctcccgactgtggctcccaggagaacccagtctcatggcctagctgagtagcagagcactgtggaaaggctgtatggttgctgccctgcctcttgctgctctgtgaccytgggctcgtgacttcaccttgctgggccttctttcaccagtaagctgaaaataagctttgctgctaggatattaattggtgacatgagataaggtttgtaaaacacagggcacttgcctgacatctacttcctccttgccatctggaagcctccagtataacacctgcctgaagtcatagctgaagtacaacatgtttctgacaattaaatgtaacagacataatttctagggcacccactgcattggacaatgtgagacagatggactaagtacaagacatggacctctacctctgaaaaaagtagcatcttggttaagcaaaagacacacaagcacaagctttttaaattatgaaactaataca

SEQ ID NO: 405125 - DNA, 473 bp, Homo sapiens
gtatctgcaatgaataaattatttccagtgaagcactgcagatccacacacaccagtctgctaacctttaccaaggccatgtccggtgggcttgtgcttgtyccagttgactcttccttgagacctttcccttctgtgcaatgaccacagcattagagaccagtcctgcatgcgctggccttcctcgtaggcatggcagaccacgtggatgagcagtgggctggcatgcagtaggcttcaacaaatggcacttcactgtttccagtgaccctgaaatgttttacgtaagtggggcctgggctttaaagaaaagagccagggttcctcaggctgggccccttcactgaggcacagctccaggaaatactggtctcaggagccagcaacttgtccaggagttttgagccctcagttgaaggaaaatggccacgtggtgtccttgcaggcaacagtgatgtcggtgatggtgacaa

SEQ ID NO: 405126 - DNA, 473 bp, Homo sapiens
gtatctgcaatgaataaattatttccagtgaagcactgcagatccacacacaccagtctgctaacctttaccaaggccatgtccggtgggcttgtgcttgttccagttgactcttccttgagacctttcccttctgtgcaatgaccacagcattagagaccagtcctgcatgcgctggccttcctcgtaggcatggcagaccacgtggatgagcagtgggctggcatgcagtaggcttcaacaaatggcacttcactgtttccagtgaccctgaaatgttttaygtaagtggggcctgggctttaaagaaaagagccagggttcctcaggctgggccccttcactgaggcacagctccaggaaatactggtctcaggagccagcaacttgtccaggagttttgagccctcagttgaaggaaaatggccacgtggtgtccttgcaggcaacagtgatgtcggtgatggtgacaa

SEQ ID NO: 405127 - DNA, 605 bp, Homo sapiens
ttgcatgggtatacatgtgccacggtggtttgctgcacctatcaacccatcatctaggttttaagccccgcatgccttaggtatttgtcctaattctctccctcctgacagaacacttttgacctttaccttagaagctcaaggactaagtgacactgctataacaaaactcctttcagtctcaccaacttacttatctgaacaaagtttctcaacattaacaactctaaaagtgaaaaataggaatcttattgatgctgaatcctgctgtattctgctagatatgtgagccaatttttaagaactctattcatctgattaagagtagtgtttaattgtgtttataaaaatatgtcatagacctgtkctgatttgatcaattgtgctaatggtaattgtgttaggggaatgctagaaaactaagttgcaggggcactggcctaagccctttcttggagaacagtgctgccctcggcatctgtgaggatggccaagcaggaggaggtggtttctgggaaggatccttctgtcagctcttggccttcactagtgtgtgggagccatgtgcacagacctggctgagtcttgctctcttctcctcactc

SEQ ID NO: 405128 - DNA, 605 bp, Homo sapiens
ttgcatgggtatacatgtgccacggtggtttgctgcacctatcaacccatcatctaggttttaagccccgcatgccttaggtatttgtcctaattctctccctcctgacagaacacttttgacctttaccttagaagctcaaggactaagtgacactgctataacaaaactcctttcagtctcaccaacttacttatctgaacaaagtttctcaacattaacaactctaaaagtgaaaaataggaatcttattgatgctgaatcctgctgtattctgctagatatgtgagccaatttttaagaactctattcatctgattaagagtagtgtttaattgtgtttataaaaatatgtcatagacctgttmtgatttgatcaattgtgctaatggtaattgtgttaggggaatgctagaaaactaagttgcaggggcactggcctaagccctttcttggagaacagtgctgccctcggcatctgtgaggatggccaagcaggaggaggtggtttctgggaaggatccttctgtcagctcttggccttcactagtgtgtgggagccatgtgcacagacctggctgagtcttgctctcttctcctcactc

SEQ ID NO: 405129 - DNA, 577 bp, Homo sapiens
ggtaagcactatgctttgaatatagcttgtccccacccaaattcatattgaggtgtggtcggtccccagtggggcaatgttgggaggtggtgcctttaagaggtgattaggttgttaaaacagattaatctctttctcacaagactgggttagttccatgggagtggatcagttttcacaagagtgggctgttataaagctaggctgcctctcatgttttcatctttttcacacatgcccgtttcccttgccactcctctgctatattatggcacagcaagaggctctcaccagaagctgagcagatgctggtgccatgcttcytggactttccagtcaccagaatcgtgagccaaataaatctcttttctttataaattacctagtctcaggtattctgttatggcaacactaaatggactatgagagtaggtgtaagtttaacttcataagaatctgccagacaattctcccaggtggtcacaccatttgacactcccaggagcactccataagagttctgttgccgtccattctcaccatcatttgatgttctcagcctttcttgttttagcta

SEQ ID NO: 405130 - DNA, 592 bp, Homo sapiens
gcccaggctttccaaagagaacttgacgtcagtcaaagggatggccagggtattcttgaagatacaattgcagacaagtagctggccaattctgcctgtgttaggcaactgtagtagggtggggaggagagatggggagagaagatatgcatgagccaaccaaggaccctcagggttcttaggggccccgtcacactccatggccaacttccaggcagaaggagccctttatggcctgcaggaagctcacctctatagagaactcagggtactggaaagacgtgaatacttcagaggccatgatttccttagactccacaatttccgcaatgatgaaacctctgataactggctcatcatctaatatagccaggctgttgatgtaggtcttggagtccaaggtcagagtcacttctgatactgccaaagagtcagggtggaggggagaggtcattcatcatasccccccagtatgagttctcctcatcaagcacagaattagattaactttgtgtgaattgaactggataactttggacatgtcccatactctctttagaaaacaagacgttgggctcaagatggaataata

SEQ ID NO: 405131 - DNA, 624 bp, Homo sapiens
ttccccagagtttagtgaattgggagctctgtattgtaccctctgtagtagcatgtttttgttaaccctctgaccgatgaattgtactggaggtatgtgacaatacaaattatctaatggacaatacaaggtgagtaagaaatcaagagaatgtttagayggattgaagggatcctcatctgtcataagctcttatcctacaacttagcatgtcctttgcattgaaggagcctagaagctgccctaagacgttgtgagacatctccttcaaatgtcattgggctgaatgctgttttctgctttattttctttaaagctaaatgagcagatatattgaaaattgaggatctttttgctaattttgaacatatgactaaatgatatcaactcaattgacatgttgtttgaagcatcagaagagaaacttttgttttgttttgttttaattatggtaaaacgtaagattatttaccattttgaccatttttcaagtgtgcaattcagttgaattaagtatattcacattgttttgcacccatcactgccatccatttccagaactttttcatcattctaaactgaaaatttatatccaataaataactctccgtatctcatgtaagt

SEQ ID NO: 405132 - DNA, 518 bp, Homo sapiens
attcttggaccatctatcatccaacagacaaaatctcgtcatcgaggatttttttttctttaggtattttggttgcctcctttagctctctcccctgaactaacctctctgtataaatatatattaaaattatattaaaaatcaaaaggaaaagtaacacccctctgcccaaatatttcctgaagaatcaagatagctctaatacatttgcagccaaaaacagtcattttaaggttatttgctatagtgttcatcttttgttcttgtttgttttcktgcaaaaaaaagtggaaaggaattaggtagtaataagggaggttgtggtacagtcatcaatcaccctcttggaactgctccaaaacctccatctgcatcaactcgagaaagaatgctgagatcttttttgtccatttaccatatggtctggtctatctaacgacacccacgtggtttaaacaaaggaatgatcattgtaattcctcccatgatatcaacgtgaccacttattctggcatatg

SEQ ID NO: 405133 - DNA, 545 bp, Homo sapiens
tccctgacacctactaatattgactcttctactacagcactttttcatctcacatctctaagttctgtattatttcctaattgtgtatataaaacttaaattgattgcccccatcttcccaaataaactgaaaactgcttygagtagtaccttaaattatatttcacatcttcattatagttactaagaacaacacttggcatattagagtttttctgtaaatcctaactaaacgagtaaacaaaactctgttttaatgtgattgacaagagggacagagggcccaaccatactgctgagtggtatgacaattatgatttgtactatttttttcaccataataatcactagaattttaactcaattagaaatctaattattcataattgaaaagcttgctgtccgttaacttactcatctgaatatattcagatttctccagtgtgttatttttattctcacaattttggcctggaaaaaatgtttcatatggtgcaattaagcgtccccctctgggtggtaaagtctcatttgtacatgtggtt

SEQ ID NO: 405134 - DNA, 557 bp, Homo sapiens
tgtgtgtaagaatcacttacatttagtgaatcttaagtatgttttgctctgacyctgtagtttacaatattaaagacaggtcaattgtcactcgattatatcttagaatgaccaccctctattcatatttttaagtgaaataaaatacagaagtattttgattctcataatcttttgctagcttagatgttcatgaaactgctttgcaaaaattataacagaaaattatgacggtgaaaaatatcagacctaattgacaccatcttgcttctcacctctaaactgtccttgttcattcctggatgtaggccaaactaactccaggaaggaatttagtgtatagtttaaataatggcccttccccaaaggccaaactattcttgtaaaacaactgaaaggccaccaaccaccaattcaagatgagaggggctggaattctaaatattaccagccattattccagaggttgtgagatttgtaatttccccaattactcttgaaggtaacatcattattgtgaatgtcttttcaggtttttatatttctaacaatcgagt

SEQ ID NO: 405135 - DNA, 540 bp, Homo sapiens
cagacctaattgacaccatcttgcttctcacctctaaactgtccttgttcattcctggatgtaggccaaactaactccaggaaggaatttagtgtatagtttaaataatggcccttccccaaaggccaaactattcttgtaaaacaactgaaaggccaccaaccaccaattcaagatgagaggggctggaattctaaatattaccagccattattccagaggttgtgagatttgtaatttccccaattactcttgaaggtaacatcattattgtgaatgtcttttcaggtttttayatttctaacaatcgagtggctccacctggacctgccaaccagttccgtggccccactcaggaactcactcagcaaaagagaacagctgtgacgccctgtgatttcatccccaagccgacaatcagcacagcactcccgagtcactggccccctacccaccaaattatccttaaaaactctgatccccaagtttttggggagactgatttgagtaataatgaacctcgagtctcctacacagccg

SEQ ID NO: 405136 - DNA, 540 bp, Homo sapiens
cagacctaattgacaccatcttgcttctcacctctaaactgtccttgttcattcctggatgtaggccaaactaactccaggaaggaatttagtgtatagtttaaataatggcccttccccaaaggccaaactattcttgtaaaacaactgaaaggccaccaaccaccaattcaagatgagaggggctggaattctaaatattaccagccattattccagaggttgtgagatttgtaatttccccaattactcttgaaggtaacatcattattgtgaatgtcttttcaggtttttatatttctaacaatcgartggctccacctggacctgccaaccagttccgtggccccactcaggaactcactcagcaaaagagaacagctgtgacgccctgtgatttcatccccaagccgacaatcagcacagcactcccgagtcactggccccctacccaccaaattatccttaaaaactctgatccccaagtttttggggagactgatttgagtaataatgaacctcgagtctcctacacagccg

SEQ ID NO: 405137 - DNA, 540 bp, Homo sapiens
cagacctaattgacaccatcttgcttctcacctctaaactgtccttgttcattcctggatgtaggccaaactaactccaggaaggaatttagtgtatagtttaaataatggcccttccccaaaggccaaactattcttgtaaaacaactgaaaggccaccaaccaccaattcaagatgagaggggctggaattctaaatattaccagccattattccagaggttgtgagatttgtaatttccccaattactcttgaaggtaacatcattattgtgaatgtcttttcaggtttttatatttctaacaatcgagtggctccacctggacctgccaaccagttcygtggccccactcaggaactcactcagcaaaagagaacagctgtgacgccctgtgatttcatccccaagccgacaatcagcacagcactcccgagtcactggccccctacccaccaaattatccttaaaaactctgatccccaagtttttggggagactgatttgagtaataatgaacctcgagtctcctacacagccg

SEQ ID NO: 405138 - DNA, 512 bp, Homo sapiens
tgctttaagcaaccttagtgtcaatatcaggtatacataattaagttagccttcaaacattttatcttacccttttagctcttatatacataaactgtctccctgttgaccgcgaggcaagtcttcaattatttctgagtcctgtgcctggcatacttggagaagctgactctagacagtagtcttcacttcagttaagkgggtgattctgggagacaacagaaggcaactgcaagagggcacgccgacaagatcattaaaagggctgtgagagtccatgaatgagaaaagctagggaccaagacaggtatcttttacttgtgctgtatgtacagggctcagtcactacagtaagtatttctgtgctgtttccctttatttttaactgggggaagaggaagtaagggggctaatcaggactagctatagacatatttggctggcagtggaaaattacagaagcacttctgccgtcacctggccatggtgttttttgacatagatgaaaagag

SEQ ID NO: 405139 - DNA, 641 bp, Homo sapiens
gcttcatattttgtaacgctgaaatctttaacatggggccaacaagtttcccgtggtttgaagaaaaagcatgaggataacacagaggatgcatcactgtcttattaagaagtgatactcaggccagccatggtggctcacgcatataatcccagcactttgggaagctgaggtgggtggatcactttatatcatgagttcgagaccagcctggtcaacatggtgaaaccccatctctactaaaaatacaaaaaattagctgggcatggtggcacatgcctgtagtcccagctactcaggcrgctgaggtgggagagtcacttgaacttgaggtggaggttgctgtgagccgagattgtgccattgcactccagcttgggtgacagagtgagactccatctaaaaaaaaaaagaaagaaagaaaaaaagaagtgattactcagtaattttgcgcacatttcattagcttgagttgatcatatgtctctgcttagatacaagaagattgaaaaatataatgcttggtgatagctttctcccagtatttactttatgctatggataaagagcatgaatctttcatgaaatttagttgcctgttgcctccaccacgtagagagaatatgcagatcaggttgagg

SEQ ID NO: 405140 - DNA, 572 bp, Homo sapiens
ttgagaagctgcacatgacaaaagggggagaactaggttggtgcaagtccccccagacaactgtccagaaagtggcattaaaaagcatttatcttgacttttattttattcaaaaaaatttcagtcttggcttttctttttctctgatacctctttggatgctcttttttaattctctttcgagatgcgtataattctgcctacgctttaaatgctggtacccccagggttctgttcttgtctatattctcttgttaatttacttcccttcacgtattcatgttttatttacaaaattttgatgaagatcatatgttcacctttgatcccagtttcctcctgtgatttacccctwtgtatccacctgtctattagatattttaagttggctgttgcacggagccctagattccgtataaccaatcatatgaaaataaactgtctttagtttatccctttacctctattaagtacctcagacattggcatcaatattcacttggttacataaggaaaatagctgtgtggtgcataatacgattctttgcctactgtatctgattagctaacag

SEQ ID NO: 405141 - DNA, 572 bp, Homo sapiens
ttgagaagctgcacatgacaaaagggggagaactaggttggtgcaagtccccccagacaactgtccagaaagtggcattaaaaagcatttatcttgacttttattttattcaaaaaaatttcagtcttggcttttctttttctctgatacctctttggatgctcttttttaattctctttcgagatgcgtataattctgcctacgctttaaatgctggtacccccagggttctgttcttgtctatattctcttgttaatttacttcccttcacgtattcatgttttatttacaaaattttgatgaagatcatatgttcacctttgatcccagtttcctcctgtgatttacccctatgtatccacctgtctattagatattttaagttggctgttgcacggarccctagattccgtataaccaatcatatgaaaataaactgtctttagtttatccctttacctctattaagtacctcagacattggcatcaatattcacttggttacataaggaaaatagctgtgtggtgcataatacgattctttgcctactgtatctgattagctaacag

SEQ ID NO: 405142 - DNA, 597 bp, Homo sapiens
ggttcctttttctccacatccttgtcagcatttgttattgcctgtcttttagatataagccattttaactggggtgagatgtcatctcattatggttttgacttgcatttctctgactgctagtgatgttgaacatcttttcaaatacctgttggtcatttgtatgtatttaaaatgtctattcagatatttgcccatttttaaataagatgatgatgatgatkattattattattggtgttttgttttgtttgctatcgagttgcttgagctccttacatattctggttattaatcccttgtcagaggggtagtttgcaatatttgttcccattctgtgggttttattttccttttgttgattatttcctttgctgtgcagaagatgtttagtttgatgtaaaacccattgtctatttttgcttttgttgcctgtgcttttaaggtcttacacaaaatatctttaccctggagcatacccaatgttttcttctagttgtttcatagtttctggtcttagatttaagtctttaatgcagtttggtttgattttatatatatgatgaaagagagagtatagttttattcttctacaaa

SEQ ID NO: 405143 - DNA, 618 bp, Homo sapiens
tgaatctgacttctttagcaacaatgagcacttactgtgcatctatcatggttcttgatgttatagatgagagtaaagaaagataagacagcatctttaatttgtgctgggaagtacaaaacataattgtgagccatggatcaaatatcagctctgttttatgattctaaattatatagtaattatatcagcatgggcaatgactttgaggaacttttttccctgtctctttaaaaagttgactattctttattgacatattaccccttggttaaaatacaaaatagtctataatcacaagtaacatttacaaagagattactttgtattctagaagcaatatatatttaaatttaataaagcattttagctcatgactcacagaataatatagatggaagcatagacttttaagtaaatgatttatgtttctgtctcaaattgctgtgtgaccttaggcaattctaataatttccaaaccttgtttatccaagctattccaagatgattatgatctttcttgtcttatgtatgagacaatatagattaatattctttgtcawatgtatgaacctatgaaaatgtttattactggtcagatgcagtggctcacacctg

SEQ ID NO: 405144 - DNA, 640 bp, Homo sapiens
acctaaatgcctctctattaagtgaatagaaattactaggtgaaatcctaaggtaggtttagctactcctgtctgaaaaaaagcagcatagcatgattgaaagagaatagcctttagaatcacacactcctggtttgggttcccaaagctgatatttatctgctataaaacggtggataaatartgcctctgattctaaatttcttcagttctaaaagtggaacaaacacatacctcaataggctgtttaggatttaaaaattgcatttgaaaaaaaggcattattttaacagtactagctatatggtagttgctgttactattattactattactgtccccaaatggagtccataattggaactaattattcacctccttctaagataccatcggtgctgttctcaatatgttctgtatcccagtttatcacagttacctcaagaagctcaggatttctctggtcattctttatctgtcatgatcttactttttattagtaagtacttacttttattggttggtacatctctctaattgactcaaattgccactcagttggatccttgcagaaaacgccccttgtgcatttgggaacccatggcctatcaagcaaaaaattccccatatcctcagtgta

SEQ ID NO: 405145 - DNA, 640 bp, Homo sapiens
acctaaatgcctctctattaagtgaatagaaattactaggtgaaatcctaaggtaggtttagctactcctgtctgaaaaaaagcagcatagcatgattgaaagagaatagcctttagaatcacacactcctggtttgggttcccaaagctgatatttatctgctataaaacggtggataaatagtgcctctgattctaaatttcttcagttctaaaagtggaacaaacacatacctcaataggctgtttaggatttaaaaattgcatttgaaaaaaaggcattattttaacagtactagctatatggtagttgctgttactattattactattactgtccccaaatggagtccataattggaactaattattcacctccttctaagataccatcggtgctgttctcaatatgttctgtatcccagtttatcacagttacctcmagaagctcaggatttctctggtcattctttatctgtcatgatcttactttttattagtaagtacttacttttattggttggtacatctctctaattgactcaaattgccactcagttggatccttgcagaaaacgccccttgtgcatttgggaacccatggcctatcaagcaaaaaattccccatatcctcagtgta

SEQ ID NO: 405146 - DNA, 453 bp, Homo sapiens
acagtactagctatatggtagttgctgttactattattactattactgtccccaaatggagtccataattggaactaattattcacctccttctaagataccatcggtgctgttctcaatatgttctgtatcccagtttatcacagttacctcaagaagctcaggatttctctggycattctttatctgtcatgatcttactttttattagtaagtacttacttttattggttggtacatctctctaattgactcaaattgccactcagttggatccttgcagaaaacgccccttgtgcatttgggaacccatggcctatcaagcaaaaaattccccatatcctcagtgtaataaacgtttgattttatttttcacaaacctgctgaaaaccttcaggtttcatatttccccctttgtcttttgtaccacatctaacaagacaatacaaaaac

SEQ ID NO: 405147 - DNA, 508 bp, Homo sapiens
atttcagggacacaacctgtctgttatatacgtacaagctgtgcacctatacttgcaattttagctgactgtttccactcttttttcagtttttcactttccttttgaattcccccattaagcagaaagttaaaaggtttttgcgggaatacatttccattcattatagtaaaaacaygttgggagacttttatatgcaagtatcaaaagaatcacactagtactaacaagaaggaattgcattataatgtcatttttgcagtactaacatactcttttttctgaaataactaagagtagtttgggggaaaggacaccacctaaaggaatacagatccttctcattgttttcataccttatccatatttaccactgcgtctgacagatttcccgattcctaaaggtggactatcaagcacagaatttaaaagtttctttctttcaacttcattaaatatcttgccaagatatataggacagtcatggaaagagaacacagataaaaac

SEQ ID NO: 405148 - DNA, 578 bp, Homo sapiens
tgctgagaaaggcacttcccagacgtgggatttcatgctttcatgcagaccgcagacacattgtataagtaatgcatacattactcctgcctggatagggtgatctttcacttgtaaggctgcctctccaagaagccattgtagcttcacttgtagttatgctcttctaatttttgaaaaggttagcacagctttatcattaatagccacttgatcattgcagagattaacaagtcatgttggagacattagtcaaggaagctgaggaatccatcatgaggtctttacatccccccagactgtgcagtagcacattgatgggcattttcatgctgctatctctaaattgcatgcrggaattgaaagggtatgtttattagatatgaacccattggtttttaatcaaatttagagggctgcaaacagagctatctaccaatctttagcttttgctgacagtaatggatttatcattctccccatgacattcctcataggatagtcacaccattttctattagatccccgaaaggctctgtgatgatctagggaaccagtaacctagcatggcaaaggca

SEQ ID NO: 405149 - DNA, 638 bp, Homo sapiens
tgctgctatctctaaattgcatgcaggaattgaaagggtatgtttattagatatgaacccattggtttttaatcaaatttagagggctgcaaacagagctatctaccaatctttagcttttgctgacagtaatggatttatcattctccccatgacattcctcataggatagtcacaccattttctattagatccccgaaaggctctgtgatgatctagggaaccagtaacctagcatggcaaaggcagagctcctgaattaatgcctgattgtaatttaagcaacatcgacccagcaaaagggaaagatacataatgaatattgtagagattatttcagaaggctggtgttacaataaataaaatacagtgagagaaataataaactgcaccactgaaaaacacaccactctctcaagattctcaacttaataaaaatttcccagattcccctcactgccattgaacttaaatatgtttcaatacccaagatttacccatgcttcaataactgtagtagagagcagggttggcaaactacaaccagtaaaagacatccagtcctccatctattataacaacattgtattggaaaacaaccamactcattcatttatgtatttttcgatggttgttct

SEQ ID NO: 405150 - DNA, 479 bp, Homo sapiens
tgtttttagttgtctaagaattttaaagatcataatgggtatggaatttctatcagataaattttctgcattaattgagtttatcatatatttttctcctctagtttgctaatgtaatgtgatataattatagtctcatcayaaattatgaatatattatattacatggcaaaataaactttgcttatgtaattaaatttatagatcttaaaatggggagagtattctggattagactgaggtgatctcagtcttatcatatgagcccttaaaagcagagaacattatttgattgaaggcaagacagatatggcaaaagaaatctgaaagactccatctgccattgctgcagagagggcatatgaaaagcatcaggaggaatacatactgcctctaggactacgctctggctgatagtcaacaaggaaacagggacctaagtcctacaaggaactgagtttagccaacaacttatgagc

SEQ ID NO: 405151 - DNA, 602 bp, Homo sapiens
ttacattgcgggctgctggtcagatcccacaatagagttcatgtcctttgcagtgacatggatgaagctggaaaccatcgttctcagcaaactatcgcaaggacaaaaaaccaaataccacatgttctcactcataggtgggaattgtacagtggtgttcttttttaatttattgagttggaattttgataggtgattatcagattttttttccttttctaacatattaaggctgaaagttttcctttaaatacaacttgatctacatcacatacctattaacatgtacactctgcaataaggacattcttggactctatgccataaattgtagaattttatgcaggactaaatcattcccccagaataagactgyagtggtgtcagtactgaatgagactcgtgtgctgaactcagtatatcagctaccctggcggttagaggagcttcaaaagaggctcgccagtatgtattcaacagaattcagatgcagaggggaactgagaaagccaaaaggcagttcctgacagatggggtccgtgtggatggaggcagttatgttcaccactccttgccatgggaagccagggtcaaatggagct

SEQ ID NO: 405152 - DNA, 602 bp, Homo sapiens
ttacattgcgggctgctggtcagatcccacaatagagttcatgtcctttgcagtgacatggatgaagctggaaaccatcgttctcagcaaactatcgcaaggacaaaaaaccaaataccacatgttctcactcataggtgggaattgtacagtggtgttcttttttaatttattgagttggaattttgataggtgattatcagattttttttccttttctaacatattaaggctgaaagttttcctttaaatacaacttgatctacatcacatacctattaacatgtacactctgcaataaggacattcttggactctatgccataaattgtagaattttatgcaggactaaatcattcccccagaataagactgcagtggtgtsagtactgaatgagactcgtgtgctgaactcagtatatcagctaccctggcggttagaggagcttcaaaagaggctcgccagtatgtattcaacagaattcagatgcagaggggaactgagaaagccaaaaggcagttcctgacagatggggtccgtgtggatggaggcagttatgttcaccactccttgccatgggaagccagggtcaaatggagct

SEQ ID NO: 405153 - DNA, 567 bp, Homo sapiens
cacctgaggtcaggagttcaagaacagcctgcccaacatcgtgaaaccccttctctactaaaaatacaaaaaattagcctggcgtggtggtgagcacctgtaatttcacttacttgggaggctgaagcaggataacagcttgaacccaggaagtggaggttgcagwgaaccgagatcatgccacttcactctagcctgggtgacagagcaagactcatctcaaaaaaaaaaaagattatagattaattaaccaaaatatatctgtgattacttttaattaaaggagaataaaacctaattaaaagccagagtgtgtaagtttggataaagatgcaagactcaactatgcactctactcactagaaacccactttaaagataaagacaccaattaaaagtaagaaaagggaaaagctaaacagaataaactttcaccataagctggagtggatatataaataacaaagtatactgtagggcaagaaatacttccagagataaaatacatccttatgattgaaggtgcaattcacaaacacacacacacacacacacaaatcctaaatg

SEQ ID NO: 405154 - DNA, 567 bp, Homo sapiens
cacctgaggtcaggagttcaagaacagcctgcccaacatcgtgaaaccccttctctactaaaaatacaaaaaattagcctggcgtggtggtgagcacctgtaatttcacttacttgggaggctgaagcaggataacagcttgaacccaggaagtggaggttgcagagaaccgagawcatgccacttcactctagcctgggtgacagagcaagactcatctcaaaaaaaaaaaagattatagattaattaaccaaaatatatctgtgattacttttaattaaaggagaataaaacctaattaaaagccagagtgtgtaagtttggataaagatgcaagactcaactatgcactctactcactagaaacccactttaaagataaagacaccaattaaaagtaagaaaagggaaaagctaaacagaataaactttcaccataagctggagtggatatataaataacaaagtatactgtagggcaagaaatacttccagagataaaatacatccttatgattgaaggtgcaattcacaaacacacacacacacacacacaaatcctaaatg

SEQ ID NO: 405155 - DNA, 564 bp, Homo sapiens
aagtatctacttggtgccagatgaagctaatttattttttctaatacttgcagctaatttttttcatagacagaatttaatattctccttcaaataaagatttaaaagactaacaattaaaacaacaataaatttttaaaaaacttgccaagttcaaaaatctaattattcaaagccaaagtataaaaccagttctgtgtggctcagggaatgagtttctatctaccactcmggaatcttccaacactaacatggcatctgtataacttaagattttttatttgcaaatcttaagagtttacttagcggaagactgaaacaaactcaagatgttgggaaaagttgtgttcatttaaggaatgaatacaattaataagaaacaatgactgacatgatgcctaagtcattcaaagggaaaacacaaacaaacccaaaaatatgaatgttgacgcactcactgagccagaatgtgaatgcagtattgcagaaagttctgactctatttaattaatatgtgcttttggcaaaataagtgaggatttggcccaagataatagcttagac

SEQ ID NO: 405156 - DNA, 530 bp, Homo sapiens
  misc_feature (1)...(530): n = A,T,C or G
atagagctcactttgagtagcaaggacatagggccttgcacaccatgggaaaatgaatttcctgcgagttgaaatagaaggccacacttatctgatgcctttacacctagaaagcccttctcagttacacaaaggtctcattaccctttggcatttccacacacccactacaaaactaagtacttgataaatgcaccataaatgcctgcattcaatgataaggctaatgatctagatcctgctttgtggtttgcctagtattggaaagagtagcaaaaataatgatgtaatggggtgaagcaaaaagtggtgagtgaatggraagactttagatgggctttgaatcatatttctgggttcaaattctacattaccatctacaaggtctttggcaaattgttcaacttctctgagcctttattttctcatttaaaaatagaaataatatccacttcatcagggagatgtgaaaatcacatgcaatagtanagtggaagtttctttgcatagtagatgctccatanangntn

SEQ ID NO: 405157 - DNA, 530 bp, Homo sapiens
  misc_feature (1)...(530): n = A,T,C or G
atagagctcactttgagtagcaaggacatagggccttgcacaccatgggaaaatgaatttcctgcgagttgaaatagaaggccacacttatctgatgcctttacacctagaaagcccttctcagttacacaaaggtctcattaccctttggcatttccacacacccactacaaaactaagtacttgataaatgcaccataaatgcctgcattcaatgataaggctaatgatctagatcctgctttgtggtttgcctagtattggaaagagtagcaaaaataatgatgtaatggggtgaagcaaaaagtggtgagtgaatggaaagactttagatgggctttgaatcatatttctgggttcaaattctacattaccatctacaaggtctttggyaaattgttcaacttctctgagcctttattttctcatttaaaaatagaaataatatccacttcatcagggagatgtgaaaatcacatgcaatagtanagtggaagtttctttgcatagtagatgctccatanangntn

SEQ ID NO: 405158 - DNA, 514 bp, Homo sapiens
agacatgaagagtgtggagaggtgtgtgaagagctgcgagcagaggcgagttttttcagggctaggaggcagtgttccactcacatccagggagctgagtttgctgagggaagagaaaatgttcaggaccagccaactcctccttccccgaggcaagatggcgcccagatgtctcttggttcacaggtggataggagctcagasaaaagtgtccaggcaagactgggaaggaccatggcacagcagacaggtttcaaattcaagttcagcccagaccagggagttcctgtccttctggtaagtcaagagtggctctgttcatgtgtggcagcgtttttgtgttgtgggctattgcccacaccattgcctgctatgatttaatcaccattgttagtgccaactgaacagagagggagagtatctctgccctggtggcacagcatctcttctggagactggccctcagccatggggagtgtcttggagacaaacccctgctgggggcgccctcatc

SEQ ID NO: 405159 - DNA, 366 bp, Homo sapiens
cccttttttgttcctgggactaaacgggaaaaggagggcaacagggagctctggctgcagcaccagaggaacccactggaagggaaagggcagatagttttgtttctttattatttaaaaaatattaacagcaattaaaaacaacaacaacaamaaaaaaaacattcacaacctgtcacagagtcctataagctttggccatttattcccaacggagtctttcatccaaaggcaggtggggaatttcagccaaaaggccccttcatggttttcatgggtgggtactgctgctccatcggcatggccccaaagcagtcagagggattacagtggccagccttgcctggctggcccatgggacccggg

SEQ ID NO: 405160 - DNA, 586 bp, Homo sapiens
cctcagggtagggctggcctggggacctggcacttttggacatgtgggatattatgggagaagctgtatttctgacacatctgatggtttcttaaatgctttgtatctcttgcaggtggcaaagaaacacagcatgatgtttggaaatataattcttcaatcaacaagtggattcagattgagtatttaaacataggccgctggaggcataagatggtggtgttgggtggcaaggtctatgtgatcggaggctttgacggcttacagagaatcaacaaygtggagacctacgacccctttcacaactgctggtcagaggtataggacacgatttctaccagtaactgcctgtattattacttcagtgcttttttaaaaagctttggaacgtgcctgccgtggtggtcagctttctgatcactttacttccaaggagaacagttttggtggctctgagcttccctcctcctaggagctattgcttcagtattgctgatcaagtcacagaaacaatgtccttccaagtggtgaaggtctgtgtgggcacctgtcctaatttggacagaaccccagatgtgcacagagg

SEQ ID NO: 405161 - DNA, 533 bp, Homo sapiens
ttttagtgactttacctaatactatggaaaacgtatttattgcttgaattatgcaaattataataacaaattactaattttaaaaatgactttttcttatttattttattatatattgctgttaatactcagttattccttaacatcaccttagacatgaaggatatagtaacctaatccaaattagttcataagcaaaatgctgaagtagttatttttttcatgggggttggatgagtggatagaggactcttcataaatttaaattgcaggtgtaatggttcagaattatgactgaaagctgaatgtatgtatttaacattatatagatagcaattactaagtaccaaacgctagtctaattattaagctaatattaaatrcttatttctcataccatctccttcgaggaagaatgacagtttttagggattttcacatataattgatgtgattgttaatattaggcgtcgccttgactggattgagggatgcctaggtggctggtaaagttttgtttctgagtgtgtctg

SEQ ID NO: 405162 - DNA, 455 bp, Homo sapiens
gctggcagacaaaaagagagcatgtgcaggggaactccactttataaaaccacagatctcatgagacttattcactactatgagaacagaaagggaaagacccactcccatgattccattacctcccaccaggtcccacmcacaacatgtgggaattatgggagctacaattcaagatgagatttgagtggggacacatcctaaccatatcacccaccctcaatgtgggtgggcaccctccaatttgctgccagtttgactaaaacaaaggaggctgaagaagagggataagcaggttgctgagtcctctatttttctgtcttcccatggcttcctctcctcctgcccttggacatcatactctgggttcttaagctttagtactctggcacttgtaccagtagcctccggggggctcttgagcctctagcctcagactgagggctgcactgtca

SEQ ID NO: 405163 - DNA, 583 bp, Homo sapiens
taaacaattggcatatgttacacataattctgatgatgcctttgtatcaatatccaatgtaagctaacaaaggtatgtgattatttttgttctgtaccaatcagaccataaatggcaacatgacaatttatggcaaagaaagcacaaaaataaaatcttgatttacatttccatgtttataatgaaagttgtgaaaggcatacaaaatcacaatgttgaaaattcggaatttcaaaaacctaaggctattgtgtatgcttatgatatcaaataataatctactttatcatgtctatgactttaattgtctggttctgattaaaattgtgatctctagagaaaagtatgtgaaaagtagctgtcaactgctcaataaacatttactaaaaatttattttacttawaattattttttggtggataattgtgaacatttaatgtttctcaaatctatgcattgccaaaacaaagcaaaacaaaaaccaaaatatatatgtaataagcattatatatataaaatatataatatatattttacatatataacgtatacataatatgtattatatataacatgtataca

SEQ ID NO: 405164 - DNA, 583 bp, Homo sapiens
taaacaattggcatatgttacacataattctgatgatgcctttgtatcaatatccaatgtaagctaacaaaggtatgtgattatttttgttctgtaccaatcagaccataaatggcaacatgacaatttatggcaaagaaagcacaaaaataaaatcttgatttacatttccatgtttataatgaaagttgtgaaaggcatacaaaatcacaatgttgaaaattcggaatttcaaaaacctaaggctattgtgtatgcttatgatatcaaataataatctactttatcatgtctatgactttaattgtctggttctgattaaaattgtgatctctagagaaaagtatgtgaaaagtagctgtcaactgctcaataaacatttactaaaaatttattttacttataattatyttttggtggataattgtgaacatttaatgtttctcaaatctatgcattgccaaaacaaagcaaaacaaaaaccaaaatatatatgtaataagcattatatatataaaatatataatatatattttacatatataacgtatacataatatgtattatatataacatgtataca

SEQ ID NO: 405165 - DNA, 535 bp, Homo sapiens
gaaatacgtgagggaggaccctccaggttatgtgcagtgactgagtttttgctgaaagaatagcaaatcaaaggtctcaaggcagaaatatgcccagtatttttaagaaatggcaaggatatcagtgggactgcagtggaagaaggacaggaattgaggtaaaagaggtggagagaccacttgaaacttacaaacattaacctagtaacaaattcatattagagtctaatacttgcaaatcttttcatagtattctaatggtatgagaactacaaacatgtcttcttttacattgtacttatttgatagaaaatgttttgatttgtgtacatttttctattgttacaataaatattgtacaatggtaaaactattatctattggaagctatgtttaatattttattcagcattataatgccagaacctattacartattaatcactggatggtgaaaatacatatttgctcaatgaatgtgtggatgattcaaatctccttttacagtaagaaggagcataacatggttaaaagg

SEQ ID NO: 405166 - DNA, 566 bp, Homo sapiens
ggaagtaacgagcatggaacatcattttcagagataactattaaatgcaacaggcagaggtgtcagtgagaagaaagagagagggaataataatagcaaatgcttatatggcattgactatgtgccagacatgttgcgaatgatttatgtatataaactgagttaatctttacaacaacactgtgcattaggtacttttattaaacccatttctgagacacagagttatatacagtgtaaaatatctcaatggggaaactaaaagtaatgcaaagacaagctaagaaaaaataccatagctctygttgccaatattaaagttacacactttaaaaacagatttttttgctctgaggcaatgaagtctgaccttgtgttctgcactacctacacagttttccaagtgggagttactgggacttccagacctcaagtattcccacctacacatgccggctctttgtccgcaagactgaataagagcacaaattccatcacatatccacaaaatgcaatgtattttagaatttggggatacatttaaaaaattaaggaagtggaaaaat

SEQ ID NO: 405167 - DNA, 524 bp, Homo sapiens
aaaaaaaaatgctttttttttagatggagtcttactctattgcccaggctagagtgcagtggtgtgatctctgttcgctgcaacctccaccttccaggttcaagcgattctcctgcctcagcctcccaagtagcctggattacaggtgcccgccaacacacctggctaatttttttatttttagtagagactggatttcacaatgttggccacgctggtttcaaaytcctgacctcaagtcatccgcccaccttggcctcccaaagtgctggattacaggcatgagccactgcacccggccccaaaatttattttatcatggaagtttttgtttagttttggtggggttttcttggagaaagtgtgagagagagcacagctattatagatactatacagaaatgaaaattttttctttagaaatcactggcttaacgttatctactgacttagagaaggttgttagaatgagagaagcttacaaacttcacaaatagaagatgttttaggataggaaagacaat

SEQ ID NO: 405168 - DNA, 578 bp, Homo sapiens
tagcagataaatggcaatttctgtgttcttttagatatccatgaagatacagaagaaaaagaaaacatctcagcactatcaaaacacactttagtaatgatgaatatttgttgaattctagctatgccaaccaagtattgccataaatattgactcagtttctcttttaaaatattttatgcctatccacattttcccccattttatagctgtagacrttgagataagaaagctaagtaaaacactcaagattgcacagttaatgagcaacagagatggaatttgaacctactgaatgtagctacagagtctgttcttttgaacaccacactatactatctaatatcaaaatctataagaaattgataatgatttcaaattggaataaactgagaaaaatacagttttaataaaagaaacccaggctatcattaactaaactgcttatccctttttttgtggaaagtagtctgggtcatctctatctaatcctatccaagtataatccctgggtgatgctcacatgattgtcaacacactaactccacatgttgattaacttccacccagtttccatg

SEQ ID NO: 405169 - DNA, 629 bp, Homo sapiens
tgtttggtgtgaggtgattgtatactggggatggatttctcatgaatggtttggcaccatccctttgttgttgtgctcatgatagcaagtttttcataagatctgattgtttaaaagtgaggcrcctcctcaacattctcattttatcctgttttcaccatgtgctctgcctgcccttcctttgctctccaccatgattgtaagtttcctgagacctccccagaagctgagcagatatctctatgcttcttgtacagcctgcagaaccatgagccaattaaacatcttttctttataaattacccacatcagatatttctttatagcaataagaaaggtctaatacagaaaattggtaccaaggaatggagtgttgctttaaagatacctgaaaatgtgaaagcagctttggaattggataacaggcagaggttgaaagagggtagagggttcagaagaagacagggaagagaagggaaagtttggaacttctaagagactcaataaattgttgtaacccagatgctgatagtgatatgaagagtgaagtctaggctgaggaggtctcagacagaaatgagaaacttattgagagctggagcaaaggtcacttttgttatgcttcagca

SEQ ID NO: 405170 - DNA, 583 bp, Homo sapiens
aatcataaattattctcaataaactcctttctgtgtgttatattaccttggaatgatttttgtagcatctcattatttatcgtattatattcaatgagctataagataaaaattttagataataaatttttagatacataaataattttttaggtaatattacttagtatttctttgtgtaaagcataaaacagaatttattatttgcatgatatagatttgcatttcaaattatttatctgttcttaatatattttacccattattccaacatataatatttgcacatagccagtacagaaatcttgggatcataagactaaggattatcagtggtgtatcttacattcaatttttattttaaatttattttactgaattccttttccttctgcattgccaactaattttcatgacctatcagaaaaatgtwaaaaattacgtaatgctgtctcttccattaaaaaataatttatctcataaaacattgaacatttccatttggaaatttgtgttaccatgttctttcaagttgcaaaggcaggtagtattaccccataaaatttttaaaataaggaagggc

SEQ ID NO: 405171 - DNA, 558 bp, Homo sapiens
ggatctacatttattatttgtttttttctgatcaataggaaaaataagatccatgactctctctctctctctctccatatatatttttgttgttgttgtgttgttgttttgttttgttttttttgagatggaatcttgctctgtcgcccaggctggagtgcagtggcacaatctcggctcacttgcaagctccgcctcccaggttcatgccgttctcctgcctcagcctcctgagtagctgggactacaggcgcccgccaccacacctggctaattttttgtatttttagtagagacagggtttcaccgtgttagccrggatagtctcgatctcctgacctcatgatccgcctgcctcggcctcccaaagtgctgggattacaggtgtgagccaccgcgcccagccgtgacaatatttttaattatttattctaagttttaatgaaacggaggaagccttaagttttttcacaattttataagttagtttgtaattcatggagttaatttatagctctatggttaatatctccaaagcttatctaacacaagtgagca

SEQ ID NO: 405172 - DNA, 547 bp, Homo sapiens
agtaaatttcaaagaattgagaaacttacccatgagagactctgttaacaggcacatactgaattcatctataaaacatatgaacataattgtatctatttataagaacaaagcttcaatttgaggaagtgatcaggttttgaaaaatatcccctaaatcacccccttatttcataactagaatgaaatgacaagactgaagctggggaaaaaaaaagaaaaaaaagaaaaccaccaaaactaaagctctwtgttcatcgaaattaatatggtaaacccatgtcatttttgtaaacaataaatttcaaagtattggtggctttttccttcatatgttactgcttacagtatttttcagttagggacaatttgttacaagcaaggcaaaaacactggcagtatgactcacatacaatggctaaaaatatagttagatttgtttggcatctaatttggggctattttaattcaaatattaaaaacataaatgaaagttatgttttggagtgagattgagtttagcatattggactttggaaatcttatt

SEQ ID NO: 405173 - DNA, 547 bp, Homo sapiens
agtaaatttcaaagaattgagaaacttacccatgagagactctgttaacaggcacatactgaattcatctataaaacatatgaacataattgtatctatttataagaacaaagcttcaatttgaggaagtgatcaggttttgaaaaatatcccctaaatcacccccttatttcataactagaatgaaatgacaagactgaagctggggaaaaaaaaagaaaaaaaagaaaaccaccaaaactaaagctctatgttcatcgaaattaatatggtaaacccatgtcatttttgtaaacaataaatttcaaagtattggtggctttttccttcatatgttactgcttacagtatttttcarttagggacaatttgttacaagcaaggcaaaaacactggcagtatgactcacatacaatggctaaaaatatagttagatttgtttggcatctaatttggggctattttaattcaaatattaaaaacataaatgaaagttatgttttggagtgagattgagtttagcatattggactttggaaatcttatt

SEQ ID NO: 405174 - DNA, 547 bp, Homo sapiens
agtaaatttcaaagaattgagaaacttacccatgagagactctgttaacaggcacatactgaattcatctataaaacatatgaacataattgtatctatttataagaacaaagcttcaatttgaggaagtgatcaggttttgaaaaatatcccctaaatcacccccttatttcataactagaatgaaatgacaagactgaagctggggaaaaaaaaagaaaaaaaagaaaaccaccaaaactaaagctctatgttcatcgaaattaatatggtaaacccatgtcatttttgtaaacaataaatttcaaagtattggtggctttttccttcatatgttactgcttacagtatttttcagttagggacaatttgttacaagcaaggcaaaaacactggcagtatgactcacatacaatggctaaaaatatagttagatttgtttggcatctaatttggggctattttaattcaaatattaaaaacrtaaatgaaagttatgttttggagtgagattgagtttagcatattggactttggaaatcttatt

SEQ ID NO: 405175 - DNA, 438 bp, Homo sapiens
ctagtttgcaagtagaattgtaaaaggtgagaaaagtccaatgcagagcttttcagtgttggaaaaataattgttttatagtcctaaaaaatggtaagagtgaaaaggtctttacagataagtgtctggtaatgtatttccaattgattaaaccgcatcaaagcaaaaaataggttacggacatggtactcaataatttggtataacaactcagagcaaagatcagattaagagtgtggctcttctgggaaattcaaacaactttctagtaaccctgttatattgagagaatgaataatggaataaaagaatagagatggagaagatagaaagakctgggtatgttccaggttcataatgaagatttaaattaaagcttactgagtgtttgaaagttgtactagcaatgaaacgatgagtttggatcacacattaaca

SEQ ID NO: 405176 - DNA, 543 bp, Homo sapiens
tgtctcctaatatactacatagatgttgattagtttagcaatttgtcatgtatcaggcaccaaggcgcagaggtaagaataacagcagctactattactggacatttattataattcaaggactgttcaaaatgcctaatacctattggttattttaatacttaraacatttcagtgagtttgttattttaaattcactgtacaggtaagaaaatggagggagagaaagctcaatgaatttggataaccagtgacaatattagaaaattattcgacctgattgaaaagattcagatcttaattaggaggttctgtggcctttgcatcaatgtgatcaggaatatttagagggaaaaggaaagctggaagagtcaatagaccagagtgctcagctcattggtgctaggctctaagaaagggcaatttttgtaaaaaatgcaaatgcatttttgttgagtaagtctggtgcaccaaacaggaagggggaagggggtaaagaggtagattatatccaggatttacttcagtggcataataatttcc

SEQ ID NO: 405177 - DNA, 532 bp, Homo sapiens
  misc_feature (1)...(532): n = A,T,C or G
gtcccacccaaaccatcgttatatgaaaaatactaacatctgttgtargcagcattgagggtgctgagggagcaattgcatggtgattagacattctgtagtttaatatatatacatgcaatgtaaacttctgacattccttgtcaaatgcttgctatatttttgtaggctctttgtcctgctctatttttttctttactattagagtcatgtataacaaacaatcctacgtttcttttatttccatattacagggttatttaattgctgattcagtatatccctcttcaaatgatttgtctgtctcattatgggtcattcaaatttcatagtgcattctccaaaatttgttaatcttattcttttcagtttaaataaaaaataaaattatatttatatggaatggaaaagtacatctatataagctttattttcttgacatagaattttggagtttcaaaatattttcagaaattacataagaatccatttatttagaagttggcccatttttaaccatttannatttatc

SEQ ID NO: 405178 - DNA, 532 bp, Homo sapiens
  misc_feature (1)...(532): n = A,T,C or G
gtcccacccaaaccatcgttatatgaaaaatactaacatctgttgtaggcagcattgarggtgctgagggagcaattgcatggtgattagacattctgtagtttaatatatatacatgcaatgtaaacttctgacattccttgtcaaatgcttgctatatttttgtaggctctttgtcctgctctatttttttctttactattagagtcatgtataacaaacaatcctacgtttcttttatttccatattacagggttatttaattgctgattcagtatatccctcttcaaatgatttgtctgtctcattatgggtcattcaaatttcatagtgcattctccaaaatttgttaatcttattcttttcagtttaaataaaaaataaaattatatttatatggaatggaaaagtacatctatataagctttattttcttgacatagaattttggagtttcaaaatattttcagaaattacataagaatccatttatttagaagttggcccatttttaaccatttannatttatc

SEQ ID NO: 405179 - DNA, 565 bp, Homo sapiens
ggaggaaaccaagcaaaccatcaagtccacctgtaaatgaggaaaaggatgttatgatgggaaagacgggaaggagtactgagagccacctgaatcattagaaatgttggcattgactttatataagcacgatgaatgaatttttgccctctacaagcttctgatgcgtatctcaaaaatatgttctagtgtgttattttagggagtgtgtgtgtgtgtgtgtgtgtgtgtgtatgcatgtgtacatctgcatgcatgtgtgtttccctaagtttatataactttgtatttatactattaatagtctgtcttgaaaataatctaatctycaaggagaatcacaaaatatacacaactcaccttacttttacacttcgcaatcacaagcaactcttcaaggacaccaagtgtcaggaccaatcatgttaactatgtttcaacggttacatgaagaagctttggaaataataaatgagagataaagacaattgagaaatacaagttatgaaaataaaatagcaaccatatagaatttaaggatttagatgtttgttgagacagttgt

SEQ ID NO: 405180 - DNA, 579 bp, Homo sapiens
atctttacccaccctgccttctcacctccaaaccaattactttctactcattcttcacatgtcatctcaactcagtgaagcctttcctaaattatcaagtcagattcgtttgttccttgtcactaatttttttttttttgacggagtttcacccttgttgcccaggctggagtgcaatggcacgatcttggctcaccgcaagcttcgcctcctggattcaagtgattctcctgcctcagcctcccgagtaactgggattacagtcatgcagcaccatgcctggctaatttggtatttttagtagagatggggtttctccatgttggtcaggttggtctygaactcccgagctcaggtgatctgcctgccttgggctcccaaagtgctgggtttacaggtgtgagccaccacacttgccactatagaatttttttactttactattaaaggttacaatcatatttttgtgattgtttatttaacatctacacgatgaaggccatgaacacaagaaactctatgttcaaatgaactaaatgaaaattgaagaaattaaaaataattcagaaggaatatagg

SEQ ID NO: 405181 - DNA, 548 bp, Homo sapiens
attatatgtgtagaataatggttctattgccatagcctctctaagtgaaggttttttaacaatgaaagtcacattcttaaagattttatagggtccattttaaatcaataaccaaaaakttaaaataagaagtagaatatactgtagaaagcaggccgagtgtggtgcctcatacctgtaatctcagcactttaggaggctgagtcaggaggattgcttgagcccagaagtttgagaccagccgaggaaacatggcaaaaccctgtctctacaaaaaacacaaaagttagctaggtgtgatggcatgtgcctgtagtcccagctactcagggggctgaagtgggaagaccacctgattctgggaaatcgaggctgtggtgagctgtgatcatgccattgcacgctagcctgggtgacagggtgtcagagtgagaccctgtgtccaaaacaaacaaacaaacaaaaaaacacaaaacttagtagtagtagtagaagtaaaaatcaatcaattgaaattgcgtatgtagagagaaaaaacttgaaagcag

SEQ ID NO: 405182 - DNA, 503 bp, Homo sapiens
aattatagtgcattagcatgctaaaagacactcccaccagcaccttgacagtttacaaatgccatggcaatgtcaggatttaccctatatggtttaaaaaggggagcaaccctcagttccaggaattgcccaccccttttccatgaataatcctccccttgtttggcatataatcaagaaataaccataaaaatggcaaccagcagcccttggggctgctctacctgtggaatagccatacttttattcctttactttcttaataaacttgctttcactttagtctctggacttgcctcaaattctttcttgcgcgagatccaagaaccctgtcttgrggtctggattggactgctttccagtaacaaaagggaaaaggcaagctgggaactgggtcatgcaaacctgcctcccattttgtttcctaaataagatggctacaaagatggaaaactacatacctccctcatgttttgcccaaaaggaaattccttgtgggcccc

SEQ ID NO: 405183 - DNA, 565 bp, Homo sapiens
gagccaccacgcccagctaatgttttgtatctttagtagagacggggtttcaccatgttggccaggctggtctcaaactcctgacctcatgatccacccaccttggactcccaaagtgctgggatcacaggcgtgagccaccgtgcctggcatggtataacttttaaaggaggatttagcaatatctaataaaactacttatgcacatacttttgactcctgaagttatcctgaacatatgcctccaacaatatgaaaatgtatatgtaatgttattcattatagcattgtttgcaactgtacttggaaaacaatctaaatgcctatatgaggagaatgggtgaataaactatgkcacccacaaagcggaatactacaccgctataaaaaatgacgaggcaaaactctatgaacggatagggagtgatttccaagatataaaatcaaatggaaaagcaaagtgcaaaagtgtacctatagtatatgctgccttttatataacaaataaaaggatacaacaaaatatatagggatctgctcatttgtgcaaaatggaacactaaaa

SEQ ID NO: 405184 - DNA, 579 bp, Homo sapiens
acctgcaatgctgctgcctcattcagttttagccactttcaattaactgaacagcataaagcactcctgagggactagaagcaaacaaaatccaaattacaaacaagcagagatatctgaagcaattaagcccttggtggcttaactccagggtgcccagaactcttgttcaaggccaaggacccaattggagtaggtatattaagtcagttcaatcttgtgaagcagttaatatctattaaattcaggtsgtatagacagttacgtttcataattgataagagaaaaaaaaaaaaacctagggcctgaatgatctgatttaacactctctacagcccagttctacaaggtaatgtacaaatttccacttcactttgcaaacgtggcctcatttacttcctagcttacttaatacaatactgtaaaactgcattttataacttctaaaaaccccatcaaataacctaggccaagcagttctttaaatgtgtgtgcccccagaagaactaagcagttcccttacatgtaatttggcaaatgtaaagaagagtcagtggagagaaggggataaaaaggaga

SEQ ID NO: 405185 - DNA, 544 bp, Homo sapiens
ttatgtgtcttggagatgatcttctcatggagtatcttgctgggtgatatgktttggctctgtgtccccacccagatctcatcttgaattgtaatctccacatgtcaagggagggacctgatgactggatcaagggtgcagtttccaccatgctgttcttgtgatattgagttagttctcacatcatctgatagttttaaagtgtggctcttcctccctcactctctttctctctctctcctgccaccttgtgaagaaggtgcttccttctccttcaccttctgccataattttaagtttcctcaggcctccccacccatgtggaactgtcagtcaattaaacctcttttctttataaattacccggtctcaggtagttctctataacagcgtgaaaacaaactaatacactggggttctccacatttcctgaatttgaaagttggcctatctaactaggtttgggaagttctcgtagatgatatcctgaaatatgttttccaaattggttccattctcctcgtctctttcaggtaccccactc

SEQ ID NO: 405186 - DNA, 586 bp, Homo sapiens
tcatactgtttcctgatttataatcaattttattaaaaatatattttatggatctaggctttatgattgtattaactgaagagttcagatacaccaataagaaaagacaataaaataaacgaaaagaatataaaaagataactcacaaaagmggaattacaaaggaaaaggaatcaagttttaaaaaatatgagacttttttttacttaatagaggagaatatttattataattgacaatactttttactggaagaattcatagatgctggtatactcagatattggttttgacaataacaattagaacaactgttttataaacaacttggtactctgcatcaaaatttatgaaaaatgtcatacttttgtcagtgattcattccacttctgggactctatgctacaaatataaggtgggagatatattgaaagactatttgaattatatactttatttatattagtgaaaatgctaaaagtaccagaatatccaacagtaagggaatgattacataaattatgaagcatccactgaaaggaatagtataaaaggtgtcaaaatgaatgtcaatgaagactataaa

SEQ ID NO: 405187 - DNA, 707 bp, Homo sapiens
tctaattatttgtttgaaagttctattagaaaagattccaaaatctctttctctcttggatgttatttattgttcccagtagatgttacaaatagacatgcagtgagaatgtatcttcaagaagactagcttgttcaccaagggacttacaaacctgcttgaaattgatgaacacggcatggccctgtgtccatacctcttactgtattttattttgttgtcctttagatattttcatactgtttcctgatttataatcaattttattaaaaatatattttatggatctaggctttatgattgtattaactgaagagttcagatacaccaataagaaaagacaataaaataaacgaaaagaatataaaaagataactcacaaaagaggaattacaaaggaaaaggaatcaagttttaaaaaatatgagacttttttttacttaatagaggagaatatttattataattgacaatactttttactggaagaattcatagatgctggtatactcagatattggttttgacaataacaattagaacaactgttttataaacaacttggtactctgcatcaaaatttatgaaaaatgtcatacttttgtcagtgattcaytccacttctgggactctatgctacaaatataaggtgggagatatattgaaagactatttgaattatatactttatttatattagtgaaaat

SEQ ID NO: 405188 - DNA, 586 bp, Homo sapiens
tcatactgtttcctgatttataatcaattttattaaaaatatattttatggatctaggctttatgattgtattaactgaagagttcagatacaccaataagaaaagacaataaaataaacgaaaagaatataaaaagataactcacaaaagaggaattacaaaggaaaaggaatcaagttttaaaaaatatgagacttttttttacttaatagaggagaatatttattataattgacaatactttttactggaagaattcatagatgctggtatactcagatattggttttgacaataacaattagaacaactgttttataaacaacttggtactctgcatcaaaatttatgaaaaatgtcatacttttgtcagtgattcattccacttctgggactctatgctacaaatataaggtgggagatatattgaaagactatttgaattatatactttatttatattagtgaaaatgctaaaagtaccagaatatccaacagtaagggaatgattacataaattatraagcatccactgaaaggaatagtataaaaggtgtcaaaatgaatgtcaatgaagactataaa

SEQ ID NO: 405189 - DNA, 612 bp, Homo sapiens
cctaatactcagaacctgtgactatgttacctgataggactttgcaggtgtgattatattaaggaccttaagatgggggagattatcctggagattatgtgggcgggcccaatgtaattacaaggttcctcgtaaaagagaggcagcaagatcaagcttagagcagattcaatgaaggaagctatgctagtctgctttgctttgctataaaggaacactttgctataaaggagcctgaaactgggtgatttataaagaaaagaggtctattttggctcatggctctgcaggctgtatgaaaagcatgrcaccagcattagcttctgatgatggcctcaggctgcttccactcatggcagaagataaagggggaacaggcacgtcacatgacaagagcaggagcaaatggggtggggtaagtgccacactcttttaaacaaccggctctcccatgaactaccagagcaagaactcattcatgaccatggggatggaaccaagtcattcataagggatccacccctatgatctcaaacacctcctactaggcctacctccaacattgcaggtcacattttaacaagaggtttggaaacgacctacatccaaact

SEQ ID NO: 405190 - DNA, 555 bp, Homo sapiens
atatctttattaaataaataacttattcaaatcattaagaaaaaaacaacatccagaataggaaaatggtaagtttataatttacaaaataaaatatataactaaccaacaaacatttggacaataattcagactcttaaaatatcaacaagcaccgtttttgcttatttatgtccatatacaataaaaagttattaaagacactttacagtctatgataatttcaagtttctgacaaattattcaggttttatatggaaatactgaggcttgtttgtgctccatagagcccttttgcataagcttctggctagccagttattgtattgttctttagtttttcttttcaggttttatgtatggcttttggtaaggtttccagctccttctttggtagactgggatgggcttctcccctacaaamttttgctgtccttttttggtggggaggggtgaatggagtcttgctctgtcacccaggccgcagtgcagtggtgtacttggttcactgcaacctccactcaggggttcaagcgattcacttgcctcagcctc

SEQ ID NO: 405191 - DNA, 586 bp, Homo sapiens
tataacaacattatcaaaagctgcttgaatcccttgcactgcagtgagctctccagagcttatgacaggtccccaggcaggtgcctgagatatcattccacacatgatttagtagtaagcttgatgacaggggaaagaattgctcctttccatttcagatgataaaaagaatgagcccttgggcatgcgaggacatatttcaatcatctgattagaatgctgatgtttccattttttcaattctgaccactttctttgtaagyccaatcacaacaaaggctgctttgttcagagaaacaaataaacctggacatttagcctctctattctagtgtcaaataatctagactgttgactatatccatccattctcattgtaaaaccaaaaccatcacaaccccctttttggggacaaggacgagaatgtctgactgtttattcaacaaacttttattaaattcaattaagagccctgtattaggccactcttgcattactataaagaaatacctgagactgggtaatttattttaacaaagaagtttaattggctgactgttctgcagattgtacaggaagcacagcg

SEQ ID NO: 405192 - DNA, 593 bp, Homo sapiens
ctcaagtacgtccaaaacccaacgagacaaacattagatcttaagattcaaaaatattaattttttttactatatgttccatcatctggacacactgaggtgggatttggatccccaaaggctccatggctttgctgggcacagctcatatcataactctcatgggttggagtaaatgtctgcagctttccctggcaggagttgcacactggtggctttagatatcttgggtcttagcagagaccctgacacatggctccactgagcattgccttagtgaaggttttcttctatacccaaaccccataattacactggatattgccctcacygagggctctctacagtgactctaccctgtggcaggtctgtcctagggctatctagggcattctttgaatctaggtagaggaagccatgcctccactgttcttgcactctgaacttttgaagaatcagcagcatatggatgctgccaaggttcactgcttataccctctggagctgtggcctgacctgtatctagacctgtctgagccacaactggggcaactaaggagcactgtgtcagaatatgcggaggaaagacctga

SEQ ID NO: 405193 - DNA, 593 bp, Homo sapiens
ctcaagtacgtccaaaacccaacgagacaaacattagatcttaagattcaaaaatattaattttttttactatatgttccatcatctggacacactgaggtgggatttggatccccaaaggctccatggctttgctgggcacagctcatatcataactctcatgggttggagtaaatgtctgcagctttccctggcaggagttgcacactggtggctttagatatcttgggtcttagcagagaccctgacacatggctccactgagcattgccttagtgaaggttttcttctatacccaaaccccataattacactggatattgccctcactgagggctctctacagtgactctaccctgtggcaggtctgtcctagggctatctagggcattctttgaatctaggtagaggaagccatgcctccacwgttcttgcactctgaacttttgaagaatcagcagcatatggatgctgccaaggttcactgcttataccctctggagctgtggcctgacctgtatctagacctgtctgagccacaactggggcaactaaggagcactgtgtcagaatatgcggaggaaagacctga

SEQ ID NO: 405194 - DNA, 527 bp, Homo sapiens
cacttgctttgtcttaaggccacttccttgcagaggacctgatgggctagtatacaattgccacagcggacctgattagggcagccttaggggactcatgggagagagcagcaccctgaaactagagtgtttcaattaaagaaaaaaaaaatcattcccaaattgtaaagcgcaaattttgactttgagacaattttatctccatctgggcctagaaatatttcttcatatttccactcaagtgagaccaagcaaatatcttggtcaatttaaaaaatcagtartcccaagaatctgtgcatgaggcatacagcaatattttttaacatatataccttctggaccaaaagtagaggcacatggctaaacaacatgaatatcctcctgggttcaatctgaagtccagggaggtaagaagtgtgctagcttgcaaacatccctctggctgggatctggatttaaacactcatttatttagggtattgttggttttgtttatagagacggaaactatatgtgatatgaga

SEQ ID NO: 405195 - DNA, 494 bp, Homo sapiens
gccttaggggactcatgggagagagcagcaccctgaaactagagtgtttcaattaaagaaaaaaaaaatcattcccaaattgtaaagcgcaaattttgactttgagacaattttatctccatctgggcctagaaatatttcttcatatttccactcaagtgagaccaagcaaatatcttggtcaatttaaaaaatcagtaatcccaagaatctgtgcatgaggcatacagcaatattttttaacatatataccttctggaccaaaagtagaggcacatggctaaacaacatgaatatcctcctgggttcaatctgaagtccagggaggtaagaagtgtgctagcttgcaaacatccctctggctgggatctggatttaaacactcatttatttagggtattgttggttttgtttatagagacggaaactawatgtgatatgagatctgtggctgatacaaactgctgaagttaagcaagagaaacatgtttggt

SEQ ID NO: 405196 - DNA, 615 bp, Homo sapiens
aaagtcactatacacttacccaaatgacaaaaatttaaaggtctgacaataccaaggtttggcaatattgtagaacaacacaaggactcccttaaattgctagtgggagtgttaaatgtgagatcactttgaaaaactatatctcagtaactttgaaagataaacatccctatatcctaatgaatgacatagcaattcyactcatgaatatataccaagcagatataaatgctttatatatccaaaaaaacatagataaggatgctcatagcacctttattcataaaaactaaaaactatacataacccaggtgttcatcaacagtagaatggataaataaatgatacattcacacaacagaatactacgtagcaatgcaaaagaacaaccactgaaaaataaaacatggtcaaatttcacagatataacattgagtggaagaaatcaaacacaaaagagtattcattatataaatccatttatataaatttcaaaaacaggcaaaataatctatggggaaagaggtaagtgtggttatccttggaggaagggggtttactgactgaaaaggataacatgagttttccagaatctggatatcttaatttattttt

SEQ ID NO: 405197 - DNA, 499 bp, Homo sapiens
ataatgttgtgtcttatcatgtttagcaatgttttgtaagagttgtgatggaatgagtgttgaatgtaatcagaagcctgtttaatatttcatgagtagccatttttctcttttggtcatttgacctaattagtacatttcttaatattaattcaccattatattctctcgataaattccatattgtattttttgattatattaaaagtataataggattcaatttactctttggttatttacgttttatctctctatttaaatgagattttatttaaagacaaaaatacagatagcaattcggtttcgatatattttatttctgctgccattatgaggtttttgtatgtgaatttagtaattttactacattaagtcaataatgttacatctttttctaaatgctattcactaaatctttgaaaaaattggtctgtatataaacatggaaaccccaaattttaaaaatacatttctwtaattaatttaattcccaatt

SEQ ID NO: 405198 - DNA, 611 bp, Homo sapiens
tcagctaggagatgggaataggttagactgggcacaaggaaaattacagaccaaagacaagtaagtaaatagatattacttaataaaacacatttgggttttttttaaaactctaatttgtagtcaatttttacagtaattttgaaaatctttagaaagttttaaataagtacttcagaattcaggctttcaatgattgatttcttttctatttcttccctaaagtctcacttgaaaggatctcttgatgtcaaatatggttgtttgtgtcatacagagaaacgaataacataaaaacaggttctaatccttctagcagatatttttcaaagctcatttcacttacaaatcatgtctatatacttacgtattcatttcyttgctgaatattccttttctcccctcctgttctcaaccagagcctcgtattcccaggagtcctccccaggtgaaacctctgaaagcctgctcatcactgccacaattaccccacaaataaggagagatgtagggccatttccccatcatttttccccttaggaggaaaccaagtcctatctgtactggttcagtcctccctagtctgaggtggggcacagcaaggcaatcat

SEQ ID NO: 405199 - DNA, 615 bp, Homo sapiens
tcttgttctaccttttaatctttctggaattctcttctattctttaacaaacaagtttatgtggggaggggtgaactccttcctggaagagagtgggagtcatcccatacccacctaagcktctccaccctctccgacaaaagcccctgtgggattagatggatggcaacaggcttgggtgacatggagctgttgccctcgccaactaaaaagcagctttaattatgtctgtaactcgaattaactaattcagagcatatttattgaatgttaaccacatgctaggcactcttccaggcactgaggatatagcagagagtaaccttccagtgaggaaatcataaaagcagaattaaaaagtaaaacatatagtatgttctttggtgataagtgctatatagaaaaataaaggatgaaaggaggaagagaataatggaatggtaaggtcaattctttttttgttgtttgtttgataggccttttattaagagtgtttgcaacatgtctcctatgccgtgggtgtcagtcagtgtcacaatgcaagctttgttctgaaaaagaatctcatagattttataggctctagaaggagagtgacattccaattttctccca

SEQ ID NO: 405200 - DNA, 573 bp, Homo sapiens
atgtctgtaactcgaattaactaattcagagcatatttattgaatgttaaccacatgctaggcactcttccaggcactgaggatatagcagagagtaaccttccagtgaggaaatcataaaagcagaattaaaaagtaaaacatatagtatgttctttggtgataagtgctatatagaaaaataaaggatgaaaggaggaagagaataatggaatggtaaggtcaattctttttttgttgtttgtttgataggccttttattaagagtgtttgcaacatgtctcctatgccgtgggtgtcagtcagtgtcacaatgcaagctttgttctgaaaaagaatctcatagattttataggctctagaaggagagtgacattccaattttctcccaattctattggaaggtcaatcttaaatgctgtataggaggatctcattgagaagatatcatttgagcaaagatgtaaagcaagggagggaatgagtcagtggctacatagsgagagtgtcctaggcagaggaaacagcttctacaaaagccctgaagcaagagaatgtttgaagtgttcaaga

SEQ ID NO: 405201 - DNA, 529 bp, Homo sapiens
tggctctatgggctggagtgcagtggcacaatctgggctcaatgcaacctctgcctcccaggctcaagtgatactcctgactcagcctcccaagtagcctggactacgggcacataccaccacatctggctaattcttgtatttttagtagagacagggttttgccatgttggccaggctggtcttcagctggcctcaagtgatccgcccgcctcagcctcccaaagtgctgggattacaggcatgagccaccactcctggcatgtttgcagtttcaaatatggaagacyttatgctagtcattaatttttctgaattgcaagtaacaaatatgcatgaagtgcccaaaatatcttaggcactgttgcatcagttacgcaggtgaattatgaagtctttcaaagttctctataagctgaactctgtatccccacgcattaaagtatgagtgtctatcacagaaattgaatgtagtaaattctaagggcagggacaacatttgcatcatagatttgcccttcatagcaaa

SEQ ID NO: 405202 - DNA, 608 bp, Homo sapiens
gtgaattatgaagtctttcaaagttctctataagctgaactctgtatccccacgcattaaagtatgagtgtctatcacagaaattgaatgtagtaaattctaagggcagggacaacatttgcatcatagatttgcccttcatagcaaaattgtctctctcttttgccaaatataggaattaaacttaatttcctgtcccttaaaaaataatatttgtgatttaaaagtaaagactactctagaatgttatgtaaagttgtatcctttaactgagtaaatagctgtattacaactgagatagcaytttgtaagtttccttttcttctttgtttagattaataatatttatcataaaatgatatatacaccttttaaagaagttaagcacagttcagataagaattttaagatttacacttaatgtatcatccagtaactatcatttttaacattaggtaaacttcatttcagacacagagagaagagtgaatggaaagatgggtgagggatagatatatagataaattaatgcagaaataattttacaaaaatcgtatcataccataatatgttgctttttcatttgtattctaaaatgagcttaaaaa

SEQ ID NO: 405203 - DNA, 384 bp, Homo sapiens
gcagggctctggggacatttcatatcatgccctgaaaaacatacayaccatgcttctagaggccctgctttactatgctagacaaaatacagaccatccccctgcaaagagggccacaccaggctagatttattcagaagcaaagtgaacacagtgtgtgaactgatagcctagccagagctttctcctctggtgggctctgctgatgaagcctgtgttatcagtcttggggtgacagctagtcacctagtgactagtgacatagctagtcacagtgctatgtcaccattgcttgtgaccagcatctgttgagataggccagtgcccacattattctaattattaagtattttagatagctccttgtgttaattttccattgtt

SEQ ID NO: 405204 - DNA, 384 bp, Homo sapiens
gcagggctctggggacatttcatatcatgccctgaaaaacatacataccatgcttctagaggccctgcyttactatgctagacaaaatacagaccatccccctgcaaagagggccacaccaggctagatttattcagaagcaaagtgaacacagtgtgtgaactgatagcctagccagagctttctcctctggtgggctctgctgatgaagcctgtgttatcagtcttggggtgacagctagtcacctagtgactagtgacatagctagtcacagtgctatgtcaccattgcttgtgaccagcatctgttgagataggccagtgcccacattattctaattattaagtattttagatagctccttgtgttaattttccattgtt

SEQ ID NO: 405205 - DNA, 428 bp, Homo sapiens
ctgcctccagggttattatcaagatttcggaccagaagctacagaacaacttttttttyctcttaaactaaaatctaagtgaacgctattgtgtagcatacaggatttggtaagaatttgactatgcctcatctcctcttcctacccttatctatgcagacccgtcagacagtgccctatatgaagaaaaaaaatgacaaaataatcaactgacaatatcaaatagcaaagataattttaaagtaataaaactactttatgatttatagatgactatgaaaattgagtttgacagtgattgaaaaccttgagggtttctcagcttcataaggttggaatgatctctttcttggtgactgccaggtctccctgagcctggcatagtgcctggcacatagtgactactcaattaatcattgttgagtaaa

SEQ ID NO: 405206 - DNA, 417 bp, Homo sapiens
ggatttggtaagaatttgactatgcctcatctcctcttcctacccttatctatgcagacccgtcagacagtgccctatatgaagaaaaaaaatgacaaaataatcaactgacaatatcaaatagcaaagataattttaaagtaataaaactactttatgatttatagatgactatgaaaattgagtttgacagtgattgaaaaccttgagggtttctcagcttcataaggttggaatgatctctttcttggtgactgccaggtctccctgagcctggcatagtgcctggcacatagtgactactcaattaatcattgttgagtaaatgtggagcttccagaattaaaaaatcatgcaatagtataggatgattaataggayaagagaaggaggcaatggtgtatgtaaggcttgacc

SEQ ID NO: 405207 - DNA, 587 bp, Homo sapiens
gatacagaccacaaaatcacagaataatctggataaataggcactagacaactcgatttacttaaatatagttgtcaggcaaatgacataattgaaatctattcaaatcctatcacttttaccatctaagtatctcttaaatacaaccaatttcatcagttccatggtcaagccaacctaagcttcccttcttttgagtagactagcagaatggcctcaaaactaatttactggcttccattttgcatgactgtacctctcctctttttccaaaggatccatgacactttcaaatgcaaatcatatcccaatcatatttcctacccactgctttgaagggcatgtgtggatttactcttaattatttttttcaggcttatctcacttcgatcttcattattgttgttgttaaactgtgcccgtctctgttctaaccacacagacctcttgtagtctcttacacttttacaatgttttatatatggagtgattttttaaaaaatcttttttttttstttgggggaacttttattcattctttagagaggctctagtgtcacttctggaaaacagtcccagaccttgac

SEQ ID NO: 405208 - DNA, 224 bp, Homo sapiens
gtgcaggacacatacatacaaatatttcttttaaacgttgctatacattgaatgtttttgccccccgccagaagttatatrttgaaatcctaaccactttcaagaatgaataaaacaaccagatagaagatccatgaaggaatagagaactttaactacacaataaactgactagacctaacagacatatatatagaacactccactcaacaacagcaaaatat

SEQ ID NO: 405209 - DNA, 519 bp, Homo sapiens
atgagacagtttatagttcaaattatggagttgttactttttacctgcatatgttcttctcaatctcttccccaaccccataacctgataaaaataattgcaggatagcggggaatcaatggaagtacatattatacaaagcctatacaacttaagaactcaaaaatattagtttctaaccctatctctcccttttaaaggagctatttttgcatgaatttataattcattctgcacatgccaagtmagataatgcctgaaaaccagcaatttagaattgaagatggacaatgaaagccattaaataataagagccttaaattaatatcaaagagttacaaatatcaataatgtgtatctaaacaactaaaagataattacaggactaggttgtccctgaaagttcaaatttaagtcaagttctcaaataaacctcaaagccttttcctttagcaataccatttattttatacatgacacaataaatttattttatacatgtcacgtttagacataaag

SEQ ID NO: 405210 - DNA, 672 bp, Homo sapiens
cattattcttcacagaactagaaaaaaaattctaaaattcatgtggagctgaaaaagagcccacatagccaaagcaagactaagmagaacacaaacaaacaaacaaacaaacaaaaaacaaatctggaggcatcacataacctgacttcaaactatactacaaggctatagttaccaaaacagcatggtacgggtataaaaacaggcatgtagaccaatggaacagaatagagaaccaagaaatgaagccaaatacttacagccaacaaagcaaacaaaaacataaagtggggaaaagacaacctattcaacaaatgatgctgggataactggcaagccacatggagaagaatgaaactggatccttatctctcatcttacacaaaaatcaactcaagatgaatcaaagacttaaatctaagacctgaaaccataaaaattctagaagataacgttggaaaaaacatcttctacctattggcttaggcaaagtgttcatgatgaagaacccaaaagccaatgcaacaaaaacaaaaataaataggtgggacttaattaagctaacacacttctgcacagcacagcaaatgaaataatcagcagagttaacagacaacccgatcagagtgggagaaaatccttgcaaattatgcatccagcaaaggactaata

SEQ ID NO: 405211 - DNA, 672 bp, Homo sapiens
cattattcttcacagaactagaaaaaaaattctaaaattcatgtggagctgaaaaagagcccacatagccaaagcaagactaagcagaacacaaacaaacaaacaaacaaacaaaaaacaaatctggaggcatcacataacctgacttcaaactatactacaaggctatagttaccaaaacagcatggtacggktataaaaacaggcatgtagaccaatggaacagaatagagaaccaagaaatgaagccaaatacttacagccaacaaagcaaacaaaaacataaagtggggaaaagacaacctattcaacaaatgatgctgggataactggcaagccacatggagaagaatgaaactggatccttatctctcatcttacacaaaaatcaactcaagatgaatcaaagacttaaatctaagacctgaaaccataaaaattctagaagataacgttggaaaaaacatcttctacctattggcttaggcaaagtgttcatgatgaagaacccaaaagccaatgcaacaaaaacaaaaataaataggtgggacttaattaagctaacacacttctgcacagcacagcaaatgaaataatcagcagagttaacagacaacccgatcagagtgggagaaaatccttgcaaattatgcatccagcaaaggactaata

SEQ ID NO: 405212 - DNA, 672 bp, Homo sapiens
cattattcttcacagaactagaaaaaaaattctaaaattcatgtggagctgaaaaagagcccacatagccaaagcaagactaagcagaacacaaacaaacaaacaaacaaacaaaaaacaaatctggaggcatcacataacctgacttcaaactatactacaaggctatagttaccaaaacagcatggtacgggtataaaaacaggcatgtagaccaatggaacagaatagagaaccaagaaatgaagccaaatacttacagccaacaaagcaaacaaaaacataaagtggggaaaagacaacctattcaacaaatgatgctgggataactggcaagccacatggagaagaatgaaactggatccttatctctcatcttacacaaaaatcaactcaagatgaatcaaagacttaaatctaagacctgaaamcataaaaattctagaagataacgttggaaaaaacatcttctacctattggcttaggcaaagtgttcatgatgaagaacccaaaagccaatgcaacaaaaacaaaaataaataggtgggacttaattaagctaacacacttctgcacagcacagcaaatgaaataatcagcagagttaacagacaacccgatcagagtgggagaaaatccttgcaaattatgcatccagcaaaggactaata

SEQ ID NO: 405213 - DNA, 672 bp, Homo sapiens
cattattcttcacagaactagaaaaaaaattctaaaattcatgtggagctgaaaaagagcccacatagccaaagcaagactaagcagaacacaaacaaacaaacaaacaaacaaaaaacaaatctggaggcatcacataacctgacttcaaactatactacaaggctatagttaccaaaacagcatggtacgggtataaaaacaggcatgtagaccaatggaacagaatagagaaccaagaaatgaagccaaatacttacagccaacaaagcaaacaaaaacataaagtggggaaaagacaacctattcaacaaatgatgctgggataactggcaagccacatggagaagaatgaaactggatccttatctctcatcttacacaaaaatcaactcaagatgaatcaaagacttaaatctaagacctgaaaccataaaaattctagaagataacgttggaaaaaacatcttctacctattggcttaggcaaagtgttcatgatgaagaacccaaaagccaatgcaacaaaaacaaaaataaataggtgggacttaattaagctaacacacttctrcacagcacagcaaatgaaataatcagcagagttaacagacaacccgatcagagtgggagaaaatccttgcaaattatgcatccagcaaaggactaata

SEQ ID NO: 405214 - DNA, 447 bp, Homo sapiens
gagtggcagtgatacaatttcaaaacagggggattactttgggagaaaatccaaaaattccaatgatctggcaattctatttcaggtgtttttctcaaaacaaattgaaacataggtctacaagacagactggtacacgtaagtgtattctggctttattagtatcagcaaaaaattggggggggggtggaattctcyaacattttctattttcctcctcttcaacttctaacaactgaaatttagtacttacttgaggacgctgctttctctatattccttacatcacaagggctaggagtgaggtacggatttgccttactgctccttgaagaacattccttctaccgccagttttgttcaggggttagcaacccacagcctactggccaaattcaacctcttgcctgtttttgaacaactctaagctaaaaatggtttatacat

SEQ ID NO: 405215 - DNA, 572 bp, Homo sapiens
cctcactctctaagtcagtgtttcttgatcttcctgtacattgaaatcttgtgaagagcttcaaaaaaatactgatgcttaggccataccttcagagattgagacataataatagctcaaggtgtggcttcagcaaatgatgttttaaaactctcgtgtgatagtaatatgagaccactgccctatgtcataaaggaatgacttgacttcacccttatattttaaggttggggaaggaaaaaggaagttacagaaagtaactgcatgagccacaggtttttaggagactatctgacactttttcacatcttatttttagcattgacagaaccaattacccccttcctcttgaaattcttatgtccctgcaaattcctcagagacactcccctagtttttttgcagcttctcaggccacacaatcactgcaggtatagccagggcctcattctgtttccatttagtgtctctgcagtccacctascacactgttctcctaaagatcatatcacgtactgcatcaatcagagcaaccttcagtgtatttggctcagcagcccaggctcctcaga

SEQ ID NO: 405216 - DNA, 610 bp, Homo sapiens
cttctcaggccacacaatcactgcaggtatagccagggcctcattctgtttccatttagtgtctctgcagtccacctaccacactgttctcctaaagatcatatcacgtactgcatcaatcagagcaaccttcagtgtatttggctcagcagcccaggctcctcagaacttcacttctccagccagcttccctgccttctactctctaggaaagatgtcaaaggatgaartgaactatgtggtttactgcctccaggatctccaaagcattgtttctcctgttgcaaatgctttcccatagctatcctcttcactggggactcctgtttgttcctccaaattcagggcaagtgtcaaggttttcttggcagtatgcttccttccttctttccagtctgaagaacaaaattcttatttctatcaattgaagtggttaatatatttatctttctctgtcaccagattggttttatttcaaatgttctttttttggaatcatctaagggcttcttgatgaaggaaaattctgggtagtggtatctcaaaattcatttgttaaaagaaccctttgagatgattcttaatacacaacaaatttgaagaaacatca

SEQ ID NO: 405217 - DNA, 610 bp, Homo sapiens
cttctcaggccacacaatcactgcaggtatagccagggcctcattctgtttccatttagtgtctctgcagtccacctaccacactgttctcctaaagatcatatcacgtactgcatcaatcagagcaaccttcagtgtatttggctcagcagcccaggctcctcagaacttcacttctccagccagcttccctgccttctactctctaggaaagatgtcaaaggatgaagtgaactatgtggtttactgcctccaggatctccaaagcattgtttctcctgttgcaaatgctttcccatagctatcctcttcactggggactcctgtttgttcctccaaattcagggcaagtgtcaaggttttcttggcagtatgcttccttccttctttccagtctgaagaacaaaattcttatttctatcaattgaagtggttaatatatttatctttctctgtcaccagattggttttatttcaaatgttctttktttggaatcatctaagggcttcttgatgaaggaaaattctgggtagtggtatctcaaaattcatttgttaaaagaaccctttgagatgattcttaatacacaacaaatttgaagaaacatca

SEQ ID NO: 405218 - DNA, 606 bp, Homo sapiens
actagtaaatgatatttaccaggattctcaatccagtagtttgattcttgatgtaatgttcataacataatcctttaataaagggtatgaacactcaaagattgccagacatttcagagaagccagcaaaactaatcaggaaaaaagggacaaaccaggagcataaacgatcacaaaaaagcaagcaaacaaacaagcagataattcaggaataagaaagggcattaaaacaacttttaaaaggtatatcgactgagagctctgaaaatacattactttcataaattgtggacagaatgtaagtaaatgaatgaatkaattaattaaaaggctaccagagaagaatatatatataattgcttaaataaataaaaattaatataaagactccaagaaaaaaatcaaagacctctcacatattgtagcacagacagcaaatatgagggaaaaaaatgtgtccctttcttaaagctctttaatagctctgcatcacatacagaattaaatcaaaacttactaccagtgcccacaaagcactgtatgatatggcttctaacctctccaaactaattgcaacaatttccccattaaacccaaatgtttcat

SEQ ID NO: 405219 - DNA, 606 bp, Homo sapiens
actagtaaatgatatttaccaggattctcaatccagtagtttgattcttgatgtaatgttcataacataatcctttaataaagggtatgaacactcaaagattgccagacatttcagagaagccagcaaaactaatcaggaaaaaagggacaaaccaggagcataaacgatcacaaaaaagcaagcaaacaaacaagcagataattcaggaataagaaagggcattaaaacaacttttaaaaggtatatcgactgagagctctgaaaatacattactttcataaattgtggacagaatgtaagtaaatgaatgaattaattaattaaaaggctaccagagaagaatatatatataattgcttaaataaataaaaattaatataaagactccaagaaaaaaatcaaagacctctcacatattgtagcacagacrgcaaatatgagggaaaaaaatgtgtccctttcttaaagctctttaatagctctgcatcacatacagaattaaatcaaaacttactaccagtgcccacaaagcactgtatgatatggcttctaacctctccaaactaattgcaacaatttccccattaaacccaaatgtttcat

SEQ ID NO: 405220 - DNA, 665 bp, Homo sapiens
cttaacaactatgttatttatcaggtgtgtttcagatattttctacacattttatatatactcacaagcatatatgtgtgattctgcatgtaaatacctgatcaaaggaaactcttcttttttaaattcccaaatctctattacctctttaaggccagtcgtcacttttcctttattatacaaaaatgtacatgattaatctttctacttggttttgaatttcacaaacactgacatgatacctaagttgtcattgtaccccttactgggcctaagataataaagtcattaatatcatatgggaaaatagaaaaatgaatattttaataatatggaaaccataatattaaaaactataatatctgatgtataattcttttaacaggacactatatctggagccaggaataataggatccgagaaacagtaacaagtataaaacaagtaggtcccaacagtaatgctgaattattgacctatctatagcttagttctttcstcctagacctatatggtctcgaagatagccagctaagcaaagttcaaaagtgcacataaacattaatactaaaccaaaacaagcctagaatggagcattctataaaatggacatgaaggaatggatatgtatttctgattttgtgggtaactgatatgtacttga

SEQ ID NO: 405221 - DNA, 514 bp, Homo sapiens
caaatgtaaaaacatttaaaatgtgtggaatgtgtactacagaagaacagatagttccctaatatatagatgttctgtatattaagaataatactaccaacaatgcaacaggaaatcaatgaggtttatgaatgcacattcaaagcaaagggaaacacaaatggcctttaaacatgttaaaagaagtttaatatcatgtataataggctcataatatttcagtgaaatgtaattttttccaaattaattgtgaaaaataaaaaagattgacaactcattctaaaggcagcattagttttgcactaatacagtagtgcaaaatggtcaaaccataggaaagacaattgtaacacctaataatgtagatatatattccactttgatacaaacaacacatttccgagaatttgttatacaaatctaaattatgaaattatgtayatataactaaattttacttcgtgacattctttttagtagaaaaacgtaataagtaactcaaatgcccacctat

SEQ ID NO: 405222 - DNA, 569 bp, Homo sapiens
tcattatcttgaaaagtaggtaaagaaaaggaaatgattgacaatttatcctgcctttcttataagatgtgtgccactggataactaaataatatataaaggtaaccattttgtataaatcatccaggtaatgtataaaaacaaaataatagaattaaaatattttgcaatctccagtgaataaatctatactttgagtctcaatggtttctaacataaacaaaaagtgacaattatatcctttctaaggaaagaaaaccccactgtgtatactcttgccaaagtgattaaatttgaatctgatcaagcctttggattccaactggcaattcacagaaaatacagagacaatggaacatggtaaactgcaaaaaaaaaatgcaatcagcaaaatccagattttaggaagctacaggtcaaatggttcatgtccttaaatggctcatgtccttcaacagataaattagaaatacagtgtacctgtagattaaacagatttaaaagacataccatgttttaaaatgtgcaagaataaattagagtttstaatgattcataggttggtgata

SEQ ID NO: 405223 - DNA, 594 bp, Homo sapiens
tttaccaaatttgcacaacaaaggaaacaatcaccaacaggaaaagccaaccaacaaaatgggagaaaatatttggaagtcgtatatctgatgataaaagattaatatccaaaatgtataaggaacttcaaaacctcaacaagaacaacacaaataatctgatgagcaaaggacttgaataggtaattctccaaagaagatatacaaatggccaacaggcatatggaaagatagtcaacatcgctaaccataagaggaatgcaaatcaaaatccacaacaaaatatcacctaagatggccactatcaaaagaatagaattaacaaatgttaacaaggatgtagaaaaattggaactcttgtgcatggttgatgagattgtaagatggtacagccattatggaaaacagtatggaggattctcatgagattagaaatatgatccagcattccctctcccaggccctggaatcctcctgagtgacctaggacagatgatttactataaaaaatagataactcattracctctcagcctaaagaaggcaaaaggaagaaaccaatgacgacaacctaaaccctcacaaacagaaaag

SEQ ID NO: 405224 - DNA, 594 bp, Homo sapiens
tttaccaaatttgcacaacaaaggaaacaatcaccaacaggaaaagccaaccaacaaaatgggagaaaatatttggaagtcgtatatctgatgataaaagattaatatccaaaatgtataaggaacttcaaaacctcaacaagaacaacacaaataatctgatgagcaaaggacttgaataggtaattctccaaagaagatatacaaatggccaacaggcatatggaaagatagtcaacatcgctaaccataagaggaatgcaaatcaaaatccacaacaaaatatcacctaagatggccactatcaaaagaatagaattaacaaatgttaacaaggatgtagaaaaattggaactcttgtgcatggttgatgagattgtaagatggtacagccattatggaaaacagtatggaggattctcatgagattagaaatatgatccagcattccctctcccaggccctggaatcctcctgagtgacctaggacagatgatttactataaaaaatagataactcattaacctstcagcctaaagaaggcaaaaggaagaaaccaatgacgacaacctaaaccctcacaaacagaaaag

SEQ ID NO: 405225 - DNA, 571 bp, Homo sapiens
acctctgctagggcagtgaggaagggaaatgtgaggtcagagtccctatgcagagtccctcctggggaactccctggtggagctgtgagaagagggccaccatcctccagaccccataatggtaaatccaccaacagcttgcaccaagcacctggaaaagttgcaggcactcgatgccagtgcatgaaagcagccacaggggctgtacccttcaagccacagagctgtgggagcccatcccttgcatcagcatgccctggatgtgagacatggagtcagggagattattttagacctttaagatttaatgactaccccattgggttttgaacttgcatgcagcctgtggcccctttgttttggccaatttctcccattggaatgggaasatacaccaaatgcctgtacccccattgtatcttagaagtaactaaatagctttttatttttagactcataggtgagagagacttgccttgtctcagatgaaactttggacttggacttttgggttaatgctggaatgagttaagactttgggggactgttgggaaggcatgattgtgttttg

SEQ ID NO: 405226 - DNA, 597 bp, Homo sapiens
tctttttaaaaattgataagataatctaatattttaatgggaaagatatggaatactagatttttttttaaagaagaacagttgaagtcagtgtagtattggcagtaggatagacatgtagatcaatggaacaaaataatccagaaatagtcacattaaggttaaataaatgtttactcaagtgctactgtaattcaatgggaaagaatggtcttttcaacaaatggtgggggaagaactgaattatctatagaaaaaaaatgagcctcaatttctgcctcctatcataaaaacaaatataatgtacctgttgagtgaccgctgttgctaaattgcccccagaactgtctcccgmaatgcagattcgggtgggatccactccatattttgtaagaattttttccaaaagaaaaaatttgactgcagcaaggccatcttcaaactgagcaggaaagtggtgttgaggagccagcctatagctttaaagaaagaataataaagcatttatggttgtatctgtccatctaattctcaaataccaaatagatgcaatttaatgccagtctttattgttcagtcttctaaaaatcaagccta

SEQ ID NO: 405227 - DNA, 546 bp, Homo sapiens
tggtgggatgagttttctaatcagggtgtttcagcttggaaacatcttagctcaggggcrcaaacaggatgtttggagctgccttctctgggaacaaagtgatgtgtgaccacccttttctcactcattatggacactgagctcttagtgtcataatttgggtttctttatcagccacaagaaatccgtttcatccagagaccttgaggtcttatttccagtttcatttcataacctttaaagccactcagtgatgtatttcaaatctatgtcttcatttttatctcccaatccttttttgtcttagaattaaagccatatttttgtttgcttgtttgtttcccatttttatctcaaactgtctgtactcatagaatatttgctgatataatctctctggtcttgtttcttttattccatgcctttttattgttatagtgtctgtagaatgcgtatagaaacaaaaagatatgaggataaatgttgaaaaacaaaaagatatgaggataaatgttgaaaaacaaagatcacaaaagtatataaaaa

SEQ ID NO: 405228 - DNA, 617 bp, Homo sapiens
gttattcgaccattttaacacatgatataaattaaattatagatgaaatatagatgaaatcyaatgtattgaaaacattaagaaggtaaaaaatacataaaagaaatggattagaacattttggataataatccctctagagatcatcagatgtccctctcattcactatgtgtgtgtcttttttcttcacaaaaacatttattgaataatcactgtaagaaaaatgcctaaaaagacaagtagggaaccgagattttatgggaagagtttattattacatagtactattttgtgttttctttttagagtcaatactaacaactgcattctaagccttaccagtatttctattatgttatcagtaactgcaaacttgatcttgtagcaaccaatagcaaatgcttttgacttgttaattaaaacatctgcatcccctcaatgtttctgctcctgaattcagatcccaagaaaaaagtttaataactgactttatatcctattttcctttgatatatgttcattcaatatgaaagctaaggataataaaaaaacaaaacaaaaactgaatttaaaatccccataatattagttgccaaacatatgtctatgtctcttt

SEQ ID NO: 405229 - DNA, 617 bp, Homo sapiens
gttattcgaccattttaacacatgatataaattaaattatagatgaaatatagatgaaatccaatgtattgaaaacattaagaaggtaaaaaatacataaaagaaatggattagaacattttggataataatccctctagagatcatcagatgtccctctcattcactatgtgtgtgtcttttttcttcacaaaaacatttattgaataatcactgtaagaaaaatgcctaaaaagacaagtagggaaccgagattttatgggaagagtttattattacatagtactattttgtgttttctttttagagtcaatactaacaactgcattctaagccttaccagtatttctattatgttatcagtaactgcaaacttgatcttgtagcaaccaatagcaaatgcttttgacttgttaattaaaacatctgcatcccctcaatgtttctgctcctgaattcagatcccaagaaaaaagtttaataactgactttatatcctattttcctttgatatatgttcattcaatatgaaagctaaggataataaaaaaacaaaacaaaaactgaatttaaaatccccataatattakttgccaaacatatgtctatgtctcttt

SEQ ID NO: 405230 - DNA, 500 bp, Homo sapiens
agggtggggcattgcttcacccaggaagtgcaaggagccaggggacctccctcccccacccaagggaagccgttgagggactgtgctacccagcccatatactacgcttttccatggtttttgcaatctgcagatcaggagatgctctcatgtgcctacascagggccctgggtttcaagcacaaaactggatggctgtttgggcagacatggagctagctgcaggagtttcttttgtaccccagtggtgcttggaactccagtgagacagaaccgttcactcccctggaaagggggctgaagtcagggagccaagaggttttgatcagagggttccactcccgaggatcccagcaagctaagatccactgccttgaaatcctcactgccagcacagcagtctgaagtcaacctgggatgatctagcttggtggggggagaggggtctatcattactgaggcttgagtaggtggttttcccctgacagtgctaaggaggc

SEQ ID NO: 405231 - DNA, 271 bp, Homo sapiens
gtggggggagaggggtctatcattactgaggcttgagtaggtggttttcccctgacagtgctaaggaggccgggaggtttggactggttggaattmagcaccatgtagcaaagtggctgtggccagactgcctctctagattcctcctcacttgacagggcatctctgaaagaaaggcagcagccctagtcagaggcttacagataaaactcccatcttcctgagacagagcacctgggggaaggggaagctgtgggtgcagcttcagcgg

SEQ ID NO: 405232 - DNA, 643 bp, Homo sapiens
tattcagagctgcattaaatgccagtagagaatgttgaaacacctaaaaaatatatgcaaggaaacagagtgtgagccaagtgttaaatatccaggctaagtgtccttgaattatctttttcttttgctacaagaaggcagtttgctacagagaagtttccaggaaatcatgaatggcttcatatccaagtagttagcctcactagaaaaaaaccacaggtctccgagggccagtgtggacactgggggcagccagccagggagctgccctgtcgcctcagyggctcactctccttcaactgagaatcatgccgtgtgttcaatttcccttgaccttttaccagttgaccttttgacagaatatttcagtgagaatgcattttcatgcctgaatccaagattgttgtgtagaattttctataactaatcacagtgctgctcaattctaccttttctgaagtttatacttcataaatgcttcattctgtcagtattcatgccatgaaaatcacagtaagattgtttttctcagccagcatattttgttttctaatatttaaaattaaaattacttgaatacttccttcatacttattctgttagggatttgtgttaaagaatgaagtttgtttttttttttaag

SEQ ID NO: 405233 - DNA, 577 bp, Homo sapiens
ctagatttgttctttttgcttagtcttgctttggctacatgggctcttttttggttccatatgaattttaggattgcttcttcttgttgtgtgaagagtgatggtggtattttgatgggaattgcattgaatttgtagattgcttttttcagtctggtcattttcacaatattgattccatattccatgaccatgggatgtgtttccatttgtgtcgtctataatktcttgcagcagtgttttgtagtttttcttgtagaggcctttcacctccttggttagatatattcctaaacattttactttttctgcagctgtttcactgttggtgtatagcagtgctactgatttgtgtacattgattttgtatcctgaaactttactgaattcatttatcagttctagaagttttctgaatgagtctttacagtttactaggtgtataatcatatcattggtgaacagtgacagtttgactttctctttactgatttagatgccctttatttctttctcttctctgattgctctggctggactgctttattctttttattgtttgttgttgttgttgttt

SEQ ID NO: 405234 - DNA, 548 bp, Homo sapiens
gtctacaggtgtcctaatctactgtcactgtgctygcacccaagctacaaggcaaagtccttcccattcttccctattctttccacaggcaaaagagtctcagcttgtggtgaatgcttccagccccaagactctctgttcaggtcagtgggctactctctggcacagagcaggtccagaaatgtcatccagcagccacagcctagaatcagggaccccaggaaccctcttggtgttctaccacactgtaacctagctggtacataaactgcaagataaagtccccttctcttctttcacgctttttcaagcagaaagcattcctccctgtagtcaccacagctgggaatgtgctgggtcacacctgaagccagaacacagttctgagtctcacctaagatccactgcaagtactgcctgactaccactgctgattattcagggcctaagaactttttagtcagtggtgatgaattctgtcaggactgatccttcccttcaaggcagtgggttcccttctggcccagagtggagctagggcctggaat

SEQ ID NO: 405235 - DNA, 548 bp, Homo sapiens
gtctacaggtgtcctaatctactgtcactgtgctcgcacccaagctacaaggcaaagtccttcccattcttccctattctttccacaggcaaaagagtctcagcttgtggtgaatgcttccagccccaagactctctgttcaggtcagtgggctactctctggcacagagcaggtccagaaatgtcatccagcagccacagcctagaatcagggaccccaggaaccctcttggtgttctaccacactgtaacctagctggtacwtaaactgcaagataaagtccccttctcttctttcacgctttttcaagcagaaagcattcctccctgtagtcaccacagctgggaatgtgctgggtcacacctgaagccagaacacagttctgagtctcacctaagatccactgcaagtactgcctgactaccactgctgattattcagggcctaagaactttttagtcagtggtgatgaattctgtcaggactgatccttcccttcaaggcagtgggttcccttctggcccagagtggagctagggcctggaat

SEQ ID NO: 405236 - DNA, 612 bp, Homo sapiens
cttcagataatatcatgctcagaacattatggtgacccrcatttgcatattaaaaatattcttgaataaaatattcattcctggtcaatgataattacaatgaaagattttttcaatttagcaaatgtgtcattttaaaattaacttctatagctagttttattttagttttattttattaaattaaattaagtttaatttttgtttcctcatctctcacagcttctctcatggaatagatgctgactacctctctattaaataataatcagcaactattctagacattattaaatggtattatgggatagatgccctcctattctcatagtaacactgtagcttgttgattagctttctcattttgcagttgaaaaaactgagccactgaagaattagataaactttctaagatcttattgtctttaaagctcatgtttgtctcctactttaaactatataatttgaatgtgtgactgcagagtattatttttttctacaccatttttatcaagaaccataatattggtttccctgacatatatttaaaaattagcatctctccaagaatcacttgagttattgtaatttagtcatgacaataacagaaca

SEQ ID NO: 405237 - DNA, 575 bp, Homo sapiens
caaaagaaaatgacaattcagcaacaaaggattaatttctttactacacataacatttctacatattaataataaaacagaaatggcttaatagaaaaattgaggatttatgtactaacagctatggaaaaataaatttaactatatcctaaccatatgtcacctattacgtcaaagactgcacattattcccctatactcattacctttattctccatatatttagtcactctttcaaatcttttatatctttatcgctctctctttctgaggtaatctacttcttgatagctatcttctagtttactartattcacttcagctaagttgaatatgttttttaaatcatcttttatgttttaattttcaattgttaatctcccaagtgctcaagaataatcatgaccacataaattcaaatctcaagaaacgccctccagcaaaatagttcaacaagaacaaataaagctacaaagcctcaaacttcaaattatctctaagtagaaaagtaaacagcaactttcaacagagttgtttctcaagttcttgccttgaaactgtacagagaatgaga

SEQ ID NO: 405238 - DNA, 517 bp, Homo sapiens
ttccaattatctgccataagtggtagatgttttctttttaattattattcactttagaatttaaattggatttattttcaattaattgaaattatccttattgatgctcacactgtcgtatctttagatagtgagatcatctttgtattggttcctctgtcctttagatatattcctagaagtctttgacaaaatgttccaggttcaccttctatggtttgttccccagacctctatttctatgtgtgtttgtgtgcgtggtgaattttttacagtaagaaatgttcttttaaraccacaatctggtccttaaggatgctcattgctactagcttgatcatagtttgcataactttttttaaagtgttcattctgatagttacactttaaaatcgaaacaataaggtgggtttttacttaacctcttctactctgattcagaatatcctttcttccacattaagagtgctggttctcaaagacggtggagatgatacaattagcatatcacaatatc

SEQ ID NO: 405239 - DNA, 589 bp, Homo sapiens
tctctttttctattctttttgttctgataagtttatatatttttcagtcctctccttacatttttgtgagaatcagcaacagggaaaaaacagacatgtcttttattcccagtatttaatcagctctattttccttgtgaatttgtcctttccttatttaaactacaggaattttctatccactcatattaattaatctttcattgcttatatgtgttgcaaatacttactttcaatatgtgcttatagtcatttaaaaaaactcattatytgatgtattaacattttaattttaacttgttattcgttttctttattgtttatgctgttttatgtcttgttaataaattcttccctatttcgaggacatgacaatgttttcctatgtattctgagacatttaaaatgtgcttttatgtttatatttttaatttgtctgggattgatttttgtgtctagtatgacatagggatattgttagctgaggcatctctcttttctcttgatttgtatttccatttatatgccatgttcccctttcttcatagatctgtttatgggttcaatgttatcctacactggtctgtct

SEQ ID NO: 405240 - DNA, 558 bp, Homo sapiens
aagtctaggttttttctaggtataaaatcatatcattttctaataaggctaattttacttctttctttccattctgaatgccctttatttctttttcttgcctatttactttggccaggactttcagtgttatgttgaataaaagtgttaaaagttggcatccttgtcttgttttagtctttagagaaacagttttcaatttttttycccatttattgcaatgttagctatgagtttgtcatacatgacctatattattttgaggtatgttccttctacagccattttgatgagagtttttatcataaaaggatgttaaattttatcaagtgctttttcaatatcaattgacataatcatgtggtttttgttcttggttctattaatgtgatgtagcctgtttattgattagtgtatgttgaatcattcttacatccccgggatgaatcccacttgatcatgttgaatgatctttttaatgtgctgtcaaattcggtttgctagtatttttttgaggatttttgcattatgttcatccgtgatattggcctgtggttt

SEQ ID NO: 405241 - DNA, 504 bp, Homo sapiens
ataaaataagctaggacatcgattacatttatgaaaacaaaaccatgataacactacctatcaggttagcaaataaatccataaccaaactgaatatatggataagaaattctctaggatcattgtagaaaagaatagatgaagacaaattctcctgaataattttgaaaaatttgaagaaatgaaagtgcttagttattcttttcctacaagatcaaaaattctaagaaataaaactgcagctctaactcattgtgtgtgtgtgtctgtgtttgtggaatcctgaaaatgttaactttccttaagactaaagttgtaaaaaatacagttcaaataaacaaatttttctggtcatacccattctctttgaatttgcrtaataatttaaggaaatttttatggtatcttcttagatagaagtatttgcaaatactcaatattcatataaattagaggataataaaatacaaaatagaagcatggcaggaattcttttaactctat

SEQ ID NO: 405242 - DNA, 649 bp, Homo sapiens
accttctttgtctctttgcaatcttagatttgttgttgattttgtctgatgtaagtatcactactcttttttttttttttttttttagtattcaattccatggaatacctttatccacctcttcattttcattctgtatgtgtctttatgggtgaagtaggtatgttgaatattgttgagtcttgtttatttatccattcggccactttttgtcttttaattggagaatcgagatcgtttatattcagtgttattattgatgagtaagtacttactgctgccatcttattgcctgtctagttgttttgtgactcttttctttcttgcttcctttcgtactgtcttcctttgttgttaagtggttttgctstggtactgtattggtttgttctcacgctgctaatatagacatacccaggactggggaatttataaagaaagagaggtttaattgactcacagttccacatggctggggaggcctcacaatcatgggggaaggcaaaaggcacattttacatggcagcaggcaagagagaatgagacccaagcaaaaggggagacccctcataaaaccatcagatcttgtgagacttaatcactaccacgagaacagtatgggggaaactgccaccatgattcaattatc

SEQ ID NO: 405243 - DNA, 560 bp, Homo sapiens
ttctactcaaggatctggctcttcaggattgttttctccttgttgagatcaccctttcccaattttacctgcagaacatttcraagtccttacaatgtggaaaggctggctaggacctgtgaaatacctcatctgcatatttgagttctgggttgttgctgatgaaaatcttgatactgtatatttgtttctggttctcagtaaggggtgaggagtaaatattgaaattttcacctattccaaagatattagcttagatcatactttcctattatttttatctatctttacctaagagctgttatacctggttcctgtggaatttatgtactgaagatatatcctaagcagaattcaggattaaacagcagagcaataatatagctgctgaaccccaaatttacatctcttgaactttttcactcaaaccccaagctcaaacatccaactaccaactgtattagccatgtcaaacttgacaggttcgttaattgtagacctactctctctaccttctaacctatttttgtgccattctcctcatagttctttacattcct

SEQ ID NO: 405244 - DNA, 560 bp, Homo sapiens
ttctactcaaggatctggctcttcaggattgttttctccttgttgagatcaccctttcccaattttacctgcagaacatttcaaagtccttacaatgtggaaaggctggctaggacctgtgaaatacctcatctgcatatttgagttctgggttgttgctgatgaaaatcttgatactgtatatttgtttctggttctcagtaaggggtgaggagtaaatattgaaattttcacctattccaaagrtattagcttagatcatactttcctattatttttatctatctttacctaagagctgttatacctggttcctgtggaatttatgtactgaagatatatcctaagcagaattcaggattaaacagcagagcaataatatagctgctgaaccccaaatttacatctcttgaactttttcactcaaaccccaagctcaaacatccaactaccaactgtattagccatgtcaaacttgacaggttcgttaattgtagacctactctctctaccttctaacctatttttgtgccattctcctcatagttctttacattcct

SEQ ID NO: 405245 - DNA, 636 bp, Homo sapiens
tataccaggcgtcccacatattggcttcaactggccctttaggtttgcctgcattatcctgaatatattccatcaagtttgattgaaacttccatttatgaagttttaaccataaattagaatgattttagattttcataatccagtcacaggaacccccccactttttttgcagtagctaaatttcaaaatctcttctctaatctagctgaatattckacttgttctgcttggctgaagctcaggaatgtccaataatcaactttggtatttttttaaccttagacttttttttttgcacgataaataagactctcttcagcaagctcttgatggtgttaccagctggtttgtcactcacatctaggacttacgtcctcttgtgaacagaaacaatttcatagaacctcaacatatgataagaccattctgtgaccataattgatcaaaacaaagacagttctaaaattatgtctggacacaaagcatgaacattgtccaagccacaaaatactaagtatctctctttgactaatatgaatgaccactgtgcatgtgtgtgtgtttttttccaattatagttttagcctcagttcactctgccttctctataaacaagatttattgagataccca

SEQ ID NO: 405246 - DNA, 636 bp, Homo sapiens
tataccaggcgtcccacatattggcttcaactggccctttaggtttgcctgcattatcctgaatatattccatcaagtttgattgaaacttccatttatgaagttttaaccataaattagaatgattttagattttcataatccagtcacaggaacccccccactttttttgcagtagctaaatttcaaaatctcttctctaatctagctgaatattcgacttgttctgcttggctgaagctcaggaatgtccaataatcaactttggtatttttttaaccttagacttttttttttgcacrataaataagactctcttcagcaagctcttgatggtgttaccagctggtttgtcactcacatctaggacttacgtcctcttgtgaacagaaacaatttcatagaacctcaacatatgataagaccattctgtgaccataattgatcaaaacaaagacagttctaaaattatgtctggacacaaagcatgaacattgtccaagccacaaaatactaagtatctctctttgactaatatgaatgaccactgtgcatgtgtgtgtgtttttttccaattatagttttagcctcagttcactctgccttctctataaacaagatttattgagataccca

SEQ ID NO: 405247 - DNA, 438 bp, Homo sapiens
  misc_feature (1)...(438): n = A,T,C or G
nnnnnnnnnnnnnnnnnnnnnnnnnnnnnncttgttgaggttttttttacaatacagtatgtattttatgtattccatgagttttataaagttcaaaaacatgcaaaactaatatatgggttagcagtcaggttagtgattgtccttggtggcggggggttgagactaggattgggcaagaggaaacttctggggtactggtagcattctgtctcttgaccgtttgttcagtttctaaaaataaaatgagctgtacttttatgattcctgctattttatttatatgtgataaaattaaatgttcaattaaatcaattcaagtataaagagttacttgaaactatgttagtaaacctactgaagatctactcaaaatataattcaaatttgatgattacatgtgtwggaaattcccaagtttttccttcagttgatttc

SEQ ID NO: 405248 - DNA, 577 bp, Homo sapiens
ctgctcccttttgtgattcaaggaaattttcttcatcatggcttcttatctcatcatactgtgtgtccaaggaatgtactcttcaatgatgagctcaattctgcattatctcaattatttcctttcgctgattctttccccttagcatataaacatgtctacattttgccatcttcaaaaacaaaatatacttctctgcttcttagctctcactagctagtatgctattatttttccacttttcacagcccggcttgcttggctccatatcttcatctcccaacaacatctcccatggcaacacataactccatgaaaattgtgctccctaaagtcacaggaagcctctatacagtaattcgcctttgtgttattccttggaacatttcaacttttaataactatttcttgkggggagctgaggtgtatgaaacaaaagtcctaacctaatgtgtaatggtaaaaggaaatcagtccaatacagtaactttagtcctatataataatttaaacaatatcattaggtctcattttttataggtaaaatttctagcttctcagacatttgttaccattc

SEQ ID NO: 405249 - DNA, 533 bp, Homo sapiens
ggtcacgacagttgtctctgataggtgatgttgggtagtgatatgagcaagtaatacacttccaggcaaaaagaacagtaaatgcaaaggttatgaggaggggtagtgcttgtcttgcttcaggaatarcaagaaagccagttgagagggaaagaggaagagcaagaacgctactttagagtaagcaagatggagagtagaaggaaatgaggtcagtaagttagaggacctgatcataggacttggttgccatggaagaagctgtatatttcttcttcctcttttttttttttttctaagagtttcgctttgttgcccaatgtggagtgcaatgatgggatctcggctcactgcaacctctgcttcctgagttccagtgattttcatgcctcagcctcttgagtaggtgaaactacaggcacatgccaccacctggctaatttttgtatttttagtagagatagttttttgccatattggtcaggctggtcttgaactactgggctcaagtgatccacccacctcagcttccc

SEQ ID NO: 405250 - DNA, 616 bp, Homo sapiens
attaaccatcatattttagatataaaggaaaatgagaacttcattgattaagtaaacagtccaaagtcaagtcaagggtttactatcagatctaacatttgaattcagactactgtcttgcaggccatcataccagtcagtcagcctctaaaaaaatgagcagagattagggacatttaagaaagttctttctgttttaaaaccattttaacaatgctttgctccaatcaagtaaacatcagcatttattaaacaaagcaccataattcacagggaaaaccatagggtttcagggtggctgacaaatatttccttgctccttctactgttttgctccctggagccygttcagtattgttggtcaaagggacaattcactcctttcaaagtctgtaaatttagtgttgagctgctcagaaaatcattcatcacacataaatgaacagccagattgttatttacaaaacactaaaaatcttggataagaacaggaacacaaactttctttgaagaatgtcatgtctttgctgagtgggcctcagcagtttaaggcctacttggcctctgctttcgataattcatagcttatccccatttgacaagtcaaatagatttt

SEQ ID NO: 405251 - DNA, 616 bp, Homo sapiens
attaaccatcatattttagatataaaggaaaatgagaacttcattgattaagtaaacagtccaaagtcaagtcaagggtttactatcagatctaacatttgaattcagactactgtcttgcaggccatcataccagtcagtcagcctctaaaaaaatgagcagagattagggacatttaagaaagttctttctgttttaaaaccattttaacaatgctttgctccaatcaagtaaacatcagcatttattaaacaaagcaccataattcacagggaaaaccatagggtttcagggtggctgacaaatatttccttgctccttctactgttttgctccctggagcctgttcagtattgttggtcaaagggacaattcactcctttcaaagtctgtaaatttagtgttgagctgctcagaaaaycattcatcacacataaatgaacagccagattgttatttacaaaacactaaaaatcttggataagaacaggaacacaaactttctttgaagaatgtcatgtctttgctgagtgggcctcagcagtttaaggcctacttggcctctgctttcgataattcatagcttatccccatttgacaagtcaaatagatttt

SEQ ID NO: 405252 - DNA, 616 bp, Homo sapiens
attaaccatcatattttagatataaaggaaaatgagaacttcattgattaagtaaacagtccaaagtcaagtcaagggtttactatcagatctaacatttgaattcagactactgtcttgcaggccatcataccagtcagtcagcctctaaaaaaatgagcagagattagggacatttaagaaagttctttctgttttaaaaccattttaacaatgctttgctccaatcaagtaaacatcagcatttattaaacaaagcaccataattcacagggaaaaccatagggtttcagggtggctgacaaatatttccttgctccttctactgttttgctccctggagcctgttcagtattgttggtcaaagggacaattcactcctttcaaagtctgtaaatttagtgttgagctgctcagaaaatcattcatcacacataaatgaacagccagattgttatttmcaaaacactaaaaatcttggataagaacaggaacacaaactttctttgaagaatgtcatgtctttgctgagtgggcctcagcagtttaaggcctacttggcctctgctttcgataattcatagcttatccccatttgacaagtcaaatagatttt

SEQ ID NO: 405253 - DNA, 602 bp, Homo sapiens
ggcctataacatctttctgactttcaaattacagacaaaatataataaaccattatattataattaatgtatacattttagaatctctggacaagataaataaaagttctctggataatgttttaaatgataattttttgtttttagaatttcatacccaagaagactttctttcttgaagaataagtttcctttaatcaggtaataagaattttgtacctattttgttctggcctccagcaaattcaaatatragacctaatcacagtaacaaacctgttatgccgctcacgccttcatattactttgattctcaatttctatttaagcagcctaattagaagaagccttaactctctattataaaaatggtaactaagaaaagacacaagaagaaacagaacttttttatgtattatgtggttgtacatgcattatattagttattcctcccaacaggttatgacataggtcttatgatcccattttgataaatcaggaagctgggttcaaacagatctgaagtgacaaggttgacattcagacttctcaatatctaaccagtttattgaatgaatcatatcctaatagtttataatcag

SEQ ID NO: 405254 - DNA, 494 bp, Homo sapiens
aatttgttggggaaaaaacagaagggacaggacagagatatcttcatagatgaaattagagctgaagccaaacagattaatgggtgactgccaggcagaccatgagttagtagaggactctaagcagaggaagctgcagtaacaaatagcagagacatgaacaatactggcatattttgaaatcacaagggacattgtgggatgtggcgcagcaccttaaaattcctctgyaatctcatttctaaagttggaatgggacaagcctggaagtacagtgacctgacaaaaagttgtttgggtagcccagaaagaaattaaagtctggattaagtaacatggagacactgtgtaagttcaaggaatttttaagaatcacaattttcaagacctggtgattagttggatatagagggtaatggaaggagggtttaagaatcaatcctaaatttttagtctaagtgatcatgttcatgacagttctattaggtaagata

SEQ ID NO: 405255 - DNA, 610 bp, Homo sapiens
tcctaatacaaacctaacattaacagtttttattttgataaatgcaactaaaaagtatatagaattgcctaactacactatttaatttgtacacccatgtcatgctgtggaaccctggtagctggagacttaatctgtagcgtcaggcttggaataaagtttttaaatttattttaaaatatttacagcattattactttgagtcaaatactatgctaggtgttgtgtgaataaaaaagcatattcaatgagtttggatcctcaagggagcttacaaactactgaaaaagtggaatatacatctttcaaatgttgaaactataaaaccaagacatgaagagacaataaacattccaagactgagcataacaacagagatagtctttgttcccaggctgtttgttaattgccagagacattkgctgttaattggccaggacattttccagttcagttcatgtgatgtgcttctagttcccacttgtctactaaatctgttgctgccatagcctagagagattctaaaagtactgtagaagactacagaaatgttatctccctgcagagggaattggtgtgggcatgaacccatgagcagtttaatgtcatt

SEQ ID NO: 405256 - DNA, 544 bp, Homo sapiens
ttgctgcttgtgggatgagaattgggggttttaggtgtagaattttattaaacttggcattaactcctcctcagcatatctaaaaccaagtgaacttgaacgtccctccctccatctctccctcccattttttttgttctttcctgtctctctccctttcttccttcatttgcccatctagtctatagatttttatctcaatgttgytgggccctgtagtagatgataaagatacaaaggtataagtatgatttatttttctcatagagcttataaccatgggaagaatacacaaataaacagtaataatgcacctcaataactgtttgggagtattgtgcaataaacagggaaaggagggaggggaacaataattgtcaagaaagacattctgtgttgggtcttgaaacatggctgtgtgtgtgtgtgtgtgtatgtgtgtgtgtacacgcacatttactctcttggaagaacttactgcatgtgtagaagtcctgaggcaagaaagggccatgcatgggttttgatggagttttgagcattc

SEQ ID NO: 405257 - DNA, 628 bp, Homo sapiens
attcaacttcaacattaatgaactcaggaccaatgatgccctgtgtagatgctatgccatttcatcagcaaatgaagttttagyatatatctccaaatacagaaatgtttatggttatttttttactcatctttgatattttatatttataaaattatttctttcaaataattattccactttttttctccctcataatggttctcaaacattagtttgggtgagaatcaccaggcatccatctggagtaggaatcagatgttatacatacgcataatggaaatattgatattgttgatctgtggagcacactttgagaaataggactgtagaaattcataccagagtttcaaagtaactcagtaaagttaaggaaatgtgtttcatgtgaagtccaattttaaagcttttttttccatgtccacaatatatattttgaactcagcaatatgacttaatttatcattttcccttattctgattccacatttcttctccgtttaatcatttttaagtttgatttatatgaaatctagaatgttttatataaattgaggttttaccatctctttaaggaggtgacggttttagaaagcagttgttttggatcttgtgtataatagttgct

SEQ ID NO: 405258 - DNA, 628 bp, Homo sapiens
attcaacttcaacattaatgaactcaggaccaatgatgccctgtgtagatgctatgccatttcatcagcaaatgaagttttagtatrtatctccaaatacagaaatgtttatggttatttttttactcatctttgatattttatatttataaaattatttctttcaaataattattccactttttttctccctcataatggttctcaaacattagtttgggtgagaatcaccaggcatccatctggagtaggaatcagatgttatacatacgcataatggaaatattgatattgttgatctgtggagcacactttgagaaataggactgtagaaattcataccagagtttcaaagtaactcagtaaagttaaggaaatgtgtttcatgtgaagtccaattttaaagcttttttttccatgtccacaatatatattttgaactcagcaatatgacttaatttatcattttcccttattctgattccacatttcttctccgtttaatcatttttaagtttgatttatatgaaatctagaatgttttatataaattgaggttttaccatctctttaaggaggtgacggttttagaaagcagttgttttggatcttgtgtataatagttgct

SEQ ID NO: 405259 - DNA, 338 bp, Homo sapiens
tccattaactacgttttggtctctcaattttgagtaggcrtatttgggaaatcatcagagtatctaacttttctccaactggcttagtagcaggacctgagtgtgggttgctttcctaatgaacaaccatacttactatccctcgtggcatctaggagaagacctagacctcagtaacacaggaaagttatttctaggatgtctaactttaaatgaaaagcaggttttctaaggtcagctttcttttccatccagatggtttgccttttgcagatggtaaggcccatatgcagattctgacccacttgctaataaagggattggtctgtgccagggcc

SEQ ID NO: 405260 - DNA, 601 bp, Homo sapiens
tgaacaaaaattttacaatagtattttaaaatatcttcatccattactagtcasagtgactttgtcttttaatttttatatccttacttctatcaccttgtaggcacaatataagaaaggaatgataaaaacccatgtaaacataacacaattttttaaaaagaaatactgtaattggttaataaattctcacaagttaagagaaatttgtttaagccagaccattttactcataggcaaaatgaagaaattaaactagaggatttgtaagatacctttctattaaaagggttcagaacatgtctcgccaaaatataccactttggggtattattttgagctaatagaaattgaggaccaacaaacacagttgctaaatcaagtttagcctaaagctgcctgcttacctattttaggttcagcctaaagacttctctgtaggtaggtaactatagcttaaatgggggtgtaaacagactgtaatgtacttttgtgccaatcgccaagttttgaccaatcaacaggggccaattgttcaaaacatgttcaaataaggcaaacaccaagttgtaaccaatttggctgtttctataccttactt

SEQ ID NO: 405261 - DNA, 539 bp, Homo sapiens
taaccttcttgtaaatattatttctggactcaggctatgtctccaaaagcatgctgccatcattctattttgcagttttttttctcctagtacaaaaagttcattagatacatcatcatccatccacatcattgacagcaacagttttactaaaagttttctactacagagaacagagaaatagtctgaccttcaatattttcttcccccctgcttcccagagtccattttttaatgcgaaaaawtttggttttttattgcaatatccctcacattctagataccaattttcacattagttgagtaatgctggggttgcaaaatctagtgtcctaccacaataaacactttttatttctgtgtgaaagtgataactgccacatatgtttgtatctcattgggcaaaacaagaaccaaggccacatctaacttcaaaggtggtgaggaaatacagtcatactatgtgccccaaaacagagagctaaaagtatatgatggacagcactaatgatcaccacggggtctaatttgtccctaag

SEQ ID NO: 405262 - DNA, 559 bp, Homo sapiens
ctgaacacacaagtaatataggaataaaaatcataaaacacacttaaattaagcataaatgtccctctttaatcccttttttcatttccattttcctgtaaagaagtgatctttgatctatattctgtcagttmtttttatatatatgtgcatacacacttttgtatacttaaaatgtattggtgtcttcatctgtttgggttgctaaaacaaaacaccacaaactgagtggcttataaaacagaaatttatttctcatagttctggaagctaagaagtctaacatcaaggcaccaacagattcagcatctagtgagaggccattccctgtttcatagataaaaagatgtcttctcgcagagtttccatatggtagaagaggtaagggatttatagtagtccattttcatgctgctaataaagacatacctgagactgggcaatttacaaaagaaagaggtttattggacttagagttccacctggctggggaggcctcacaatcatggcagaaggtgaaaggcacatctcacatggcagcagacaagagaaaagagct

SEQ ID NO: 405263 - DNA, 477 bp, Homo sapiens
tttggggatttatttatttttccctttaattttattcatttttgcttcatgtattttaaagtattgttattaggtgtattcaacttaggattgttatgtattcttgatgaattgaccctttgggattataaaatgaccctctttatgtctggtaatactccttgtcttgaagtcagtttcatctgacattgacatagcacaatagctttcatttgctttgtgtttgccttggtgtacctttttctatamcttcacgttcaacctgtctttcccaatatatttagagtggatctcttgtaggcagcaaatagttgggttttgctttcttatgcagtctgataaactctgaatttaaattattgatataagtgagattgggtctataatagtgtcatttgctatttattcgctctttgtttctttgttcttccttttctgtcttctttgtggttaataaaaattttaatatctcaaatt

SEQ ID NO: 405264 - DNA, 498 bp, Homo sapiens
tgacttattttgagtcctccaaacccttccaatctctgcctgtttcaaagctgcttcttcattttcaggtatytttataacaatgccccattcttcagtatcaatgttctgtttgcattctcacattgctataaagaaatacatgaggctgggtaatttctaaagaaaagaggtttaattggctcacagttctgcaggctgtacaggaagcatgatgctggcatctgctcagcttctggggaggcttcaggaaacttacaatcattgtggaagccaaaggaagagcaggtgtatcacatggccagagtaggaacaaaagggagcaagcaaggtgtcacacacttttaaacaaccagatttcatgaaaactcactcactattgtgaggacagcaccaacggaatggcgctaaagcagtcatgagaaatcaacccacatgatccaatcacctctcaccatgacccacctccaacaatggcgattacaattcaacatgaga

SEQ ID NO: 405265 - DNA, 498 bp, Homo sapiens
tgacttattttgagtcctccaaacccttccaatctctgcctgtttcaaagctgcttcttcattttcaggtatctttataacaatgccccattcttcagtatcaatgttctgtttgcattctcacattgctataaagaaatacatgaggctgggtaatttctaaagaaaagaggtttaattggctcacagttctgcaggctgtacaggaagcatgatgctggcatctgctcagcttctggggaggcttcaggaaacttacaatcattgtggaagccaaaggaagagcaggtgtatcacatggccagagtaggaacaaragggagcaagcaaggtgtcacacacttttaaacaaccagatttcatgaaaactcactcactattgtgaggacagcaccaacggaatggcgctaaagcagtcatgagaaatcaacccacatgatccaatcacctctcaccatgacccacctccaacaatggcgattacaattcaacatgaga

SEQ ID NO: 405266 - DNA, 477 bp, Homo sapiens
tgatctcaatcatcacttccccaaaccttcctcagcctcccaccatgctactttcattttacactccttcgttctttcttccttcttccytgacacaattagtaaggggttgtctctcttaactgaatggaaaatggcttctatctttgtgtttatctctctctgctccaccaaaatcactctagttctcacgtcttctcccatgatcaagtttcttgtcagcatttaattttacttaggttactccatgttaaggagagacagaggaaagagagtgggaaggaaggaaagaagaaaagaagggtgtcagagagggtgagaggagaaagaaacttcatttgggatgccactagttaatatgcctggcagataagaggttatgataaacatttatgaaataaatattgaagagcattatgtttcagtgtgataaaccttgacttacgagcttcatgatgtcaaagaagaaaacagtat

SEQ ID NO: 405267 - DNA, 572 bp, Homo sapiens
tgattctccaaatacatggattcatttaatgactggctgttcttttgaaattcaacattcatgtgtttttgatactgaaaacaaataccatatgtttggtgctcctatcacaaaactcaaccttacaaattaaaacacttcatgaattatacttgacagtgtatacttttttcttggatataaaatgacaataaaagatcagaaattaaaagaaagatggtgtacgtttttatatattatctgtcttcctatcatacataaataatgcagaaaaagtatttgctttgcaaatttctccaacaatactcttctgttcttgtgaaatttcaaattaataatgcagttggaatgggtgattytatgcatggtaaaatggagatggagttcataaagaacaacatggtaagccttggacagacaggcactttggaaaaaatatgtcaaagccagaaaatggaaacgagaaaaatatttcatggatttcagcagcctcaatactccatgctgccttgccaagtttagggggaaaaataatgcttttggagttaaaaatagaaaaaacactgaatcaa

SEQ ID NO: 405268 - DNA, 572 bp, Homo sapiens
tgattctccaaatacatggattcatttaatgactggctgttcttttgaaattcaacattcatgtgtttttgatactgaaaacaaataccatatgtttggtgctcctatcacaaaactcaaccttacaaattaaaacacttcatgaattatacttgacagtgtatacttttttcttggatataaaatgacaataaaagatcagaaattaaaagaaagatggtgtacgtttttatatattatctgtcttcctatcatacataaataatgcagaaaaagtatttgctttgcaaatttctccaacaatactcttctgttcttgtgaaatttcaaattaataatgcagttggaatgggtgattttatgcatggtaaaatggagatggagttcataaagaacaacatggtaagccttggacagacaggcacttkggaaaaaatatgtcaaagccagaaaatggaaacgagaaaaatatttcatggatttcagcagcctcaatactccatgctgccttgccaagtttagggggaaaaataatgcttttggagttaaaaatagaaaaaacactgaatcaa

SEQ ID NO: 405269 - DNA, 444 bp, Homo sapiens
ctgtgatgaaggtctggaacagcatctgcctaaaaggcaaatatagtgattactctttacatataacctgaaatccagaacaatatagcatctgaggataaaataatttaaattgtaggtgcctaaggtttgcatcctgatgtatctgaaaygtgttccatattaccttggctttcaatttctctaatttttctatttgattagaagttattcattttgggggcaatgatgaaattccaattcgaactgtcttatatcttttaatcagaattttcccaaagcacaaaagtgaaaatgtagaagttgctgtgtttcattagtttcattcttttgaatgttgctacactgaaagcgctgtgtgaaattattagaagacaagttttcaaatggttgtaaaagaagatgcatatatggggactcactcaaagggcattatttaaaaaa

SEQ ID NO: 405270 - DNA, 578 bp, Homo sapiens
tacatacatatagtgcaattctagtggttttgaaatatctcattgtggttttgatttacatttctgtaatggctaatgatgttgagcaccctttcatgtgcttcttggccatttatacttctttgtggaaatgtctgttcactttgcccacttttaatttgttatttatcttttwatcattgagttgtaacagttccttatacattctagatactagacccttacctgacatatgatttgcaagtattttctccaattctgtgggctgtctgttcattttcttggaagtatcctttgatgaacacaagtttattttgatggtatgttttgtttaatttctctttggttacttatgcttttggtgatgcatccaagaaaccatcatttgaaccaaggtaaaaatatttactcgtgttttcttctaacattttttatagctttagcttttatatttatgcttatgatatatcttgtgctattttttgtatatggtgtgaggaagggtctaacttcctacattcttttacatgtaactatatagttgtctcagcaccatttgtgaatattctatcctttta

SEQ ID NO: 405271 - DNA, 578 bp, Homo sapiens
tacatacatatagtgcaattctagtggttttgaaatatctcattgtggttttgatttacatttctgtaatggctaatgatgttgagcaccctttcatgtgcttcttggccatttatacttctttgtggaaatgtctgttcactttgcccacttttaatttgttatttatctttttatcattgagttgtaacagttccttatacattctagatactagacccttacctgacatatgatttgcaagtattttctccaattctgtgggctgtctgttcattttcttggaagtatcctttgatgaacacaagtttattttgatggtatgttttgtttaatttctctttggttacttatgcttttggtgatgcatccaagaaaccatcatttgaaccaaggtaaaaatatttactcrtgttttcttctaacattttttatagctttagcttttatatttatgcttatgatatatcttgtgctattttttgtatatggtgtgaggaagggtctaacttcctacattcttttacatgtaactatatagttgtctcagcaccatttgtgaatattctatcctttta

SEQ ID NO: 405272 - DNA, 582 bp, Homo sapiens
atacctgcttttgtatataaaaggctcaactcacacaatctggtgagttgcaggagagcttgaaagcatatgtgttctagccttccatctttaggcagagaaatttctcattcaactaagacaaatagttaccaaacacattaaatgtttaacattgttttcttcagcagccaatttcgatgttttatcacccatatgatcaagaggtacctcccatgtccatcagagcmctttcttgccattgatttaatattttctcttgaccatttacttctgaatattaagtataactagtaaacatcccccaactaaacgtcctaaaacttctcaaagatagtaaccaagttgctccttagagcttttctcatcagaatttcacttttcctcaatgacttttcaatccctataatcatttttcttccttttgtttggatgccttttttaaatgactaacatggaatacaaaatattcagtcagtatcaaggctaggctagatttaggggggaaaaagagattcctcactcccaaactttgtagtgacatagtggcaaaaccgtgcaacttcaacaatggtaaaacat

SEQ ID NO: 405273 - DNA, 558 bp, Homo sapiens
aggatctggagcagcactgttaaaaaaaaagtataatgtgagccacataagtaatttaaaattttctagtagccacattaaaagcataaaaagaaacaggtaaaattaattttaaaattttaaatttaaccttagatatccaaaatattctcatttcaacatgtattattataaaattattgagtttttttactgtttgtatattaagtctttgaaatttggcataaattttatgcttacagcaatatcaatttggattagtcatgtataaagtgctcaacagagtgtaaatggagggtttggcatgagataaaacgtatagaaatttcattcattgtaacaygaggtaagacagaaatatatgtaaatgaacagtgctgtttggtggtgggaataagagatggctgtcatctgactttatgttttaagtgatgtctgaagaagtgttagacattttaatagaagacaagaaataggtgttgcaaaaatggctattttgttttcattttttaattttttaaaaatattttgtcaaggacccaatatggaaagaggtaa

SEQ ID NO: 405274 - DNA, 587 bp, Homo sapiens
aggaaatggacagttattgtgtaatggatatagagtttcagttttgcaacatgaaaaagagttctggagataaatggcaatgatggctgtaccacattaggaatatacttaatgtcactgaattgtatattcaaaatggttaagatggtaaatttaatgttatgtatattttaccatattaaaaacaaattgataaaatgaaggtctgagtctacctaatttagcatatccttatgactaaaatcatctgtacttaattcccagtcaaaggaaagtccctaaagtgtgctttattttactatatctgaaactaaaaargacacaaaaagtatatatgaaccacaaaaaaatctgatgttacaaaaaggatcatcatacatattgcatgcaatttaccaatctggcaacactacactttatcagctagggtttcctttgtttgtgtcttcggctcaaaatcaaaacaaacacagtcttcttaaattcctggtcagaccctagaatagtaaggtttcatatctatcacttaatctatatcttaattaaaccattaaatgctatctcagtgcatacagaaattagctgtg

SEQ ID NO: 405275 - DNA, 579 bp, Homo sapiens
ttcacagcagctatattctataatatcactgcaaacactgaattggtgaatactgaacacttgctcctagggcaaatacagggttaggttcctgtgagcctctagtcacacatttttcttgaccaatcaataacattgatttaggttgacttatgtttaaaaatttcttacttaatatacactgttgattcattaacattgaactcacaaccaacagccactaatttatgctagaacaaacttatctaacacatattttctgcataaggcacatcacagtcttcttgtatttaggaatgctacacagctcttcagcctgattcttagcggcattttaaacagtgaaatcattaacaaaaggcactaaaaagccaaaaccatgccattgaatagaccacaaaaaatacagttgtttacrgtatgaaacaagaacttgtttacagagctgaaacaagaaaacagagaatgtgtgtatcaggtgactcaaatttttcactatttcgagcatgatcacgaatgacagtgaaggtatcatgagtattgttttgggggttacaaataaattttagtaaacaggca

SEQ ID NO: 405276 - DNA, 425 bp, Homo sapiens
ctgtgttcctgtgcctcctcctccctcaagaccagatcaacttgttcatttctgaaagcaatcatttggtacaaagtgttacaaaacgatgtatgagcaactcaagtatttctcagccatagaatactggacagatacagtggaaactcacttccccatctgtgattttttattcctttcaaatgtcctttatttccctttgacttttcatctggagtgtaaaacaggcaaatgaaagtaatcctgattaatgtcattcataatttctattgcgcatctactaggtgcatggaatttattaaggcaggtcatattttaaagggtatagtgtgggaactgttgtcmaagtataacatataaatcgattttgaccatttatcataaaattattatctttacactaaccatatcattatttattgtat

SEQ ID NO: 405277 - DNA, 642 bp, Homo sapiens
actctttgggtttatggctatttcaacaccaaatgagattatcattttcccttttagggagctcttccattataattaatgactcacacaagtcatgaaaaatggccatgattgtaccacatctaagacatgtttgcagtaaattctggaagatttagcctcatccatcaattgaataggttgtcctaaatacacatgatcattcaagccacagcacctttgtggcagttaataagctatccttgttcagtgggtgtttaaatcttgtccttcagccaagtgaaataaaaggaatgttctcattaaaagtcaaaatctaaaaagcaaaattcaatctgtcaaattgtcaagtgtattaaaggtgaaaaataaagctgctaagacgcttgggtctttttttagactcttgtttccctggcgagaagagagagtctttctgagacaggagtcctttttatacacatttcataatagtttgtgcccctaaacgtaagctctgagccaataacattcaggtcctgytaacacatttatacaggtttctaatcaataagtggttattaatttgaagtacattttagtgactagatcttcaaacctatctgcctcccacaagcttccaactcggatatatatgtcata

SEQ ID NO: 405278 - DNA, 594 bp, Homo sapiens
gcagatagcaggaaaataactacatttcaaattcaaatagtcatccctcaaaaatatgaaccttctcttaggcctttttcaaaagtttatttcagtgtctttctttttttcattaggcttaattttctaataattgtttctctatttatttggttttttaaaatacagctagtcttttgcaaattttttaatttattttctgtgcgcctctccttaatattaacttttaaaaagtagataatctccacaaaaagtttctttgttattaatatctaccccctgttttcatcatataatcatgtaatggtggatatctgaaatggcattttggtttttcaaaaattctgaaacttttaaaggtggattttttagtgatctccctataatatggaaatacttttcccaaggacaattgggtttaaacagtctgatatgtcacagaaatttgctttttgaggttggcaaaagaagaatttctttaatatcttttttttttgttttgttttttaatgagtgttttctggtcacraaagaagagattgtaagaaccaaggtggattttggagaccacattgtccaaacttccattatttt

SEQ ID NO: 405279 - DNA, 459 bp, Homo sapiens
cttgaagcttatacattttggagggttctctttttaaaagaaatgtaaacaattttttaaaactttttaaaataaatacaaaaaagtttgtatgcatacaaaagtagattaaaaagtatatatttatttaaaatgagaaaaaacaaattatagatttttagaagctgtgaaataccacaaacatcacaaatccmgcccccctaaaaaagaaccctcaaaaatcgaatttttataaatgagtatattggcataactctagactggtacttcaatgtgctgagaagtcttataagctgcctcagaatcaaggttccttcaatctttttatccaccctccacatttccccttgccaaatgtggggaggagctctctttggaatttccttatctgacgaagaaaaacttctttccaacagaaatgcaattgtcttgaaggtcctctctagcgatctcactgaa

SEQ ID NO: 405280 - DNA, 594 bp, Homo sapiens
ctctgttaggcaacggcaagaaaataatcagcaagattgatatatatattctcccccgatctcatagtcttgcagaaaagatagataagtaaatgagcactaccaattaaacatggtctgataagtaacatgataagcatgctctggctggggttgatgggtcatatggggtctggcagtgaaaggatccaacaatgctttggcataatgaggaatgggcactacacacaaatcaagggaacgagaaccatctctactcacctcaggtttaagagttggtactcctcatgctacccttcttctgctctaatctgccaaacttttatgatcaataaatattcatgagtatgcattttgtttggaaaccagtttcaaargggcaagccatagagactcacttctcccaggaatgctaactagcattccctaaagaaagaaagggaaacaggttctcagtttagataccaggaaccactaatgattcctggtaatcaccagtaatcagcagtaaacaataatagaaatggaaattcggaaagacttaatgaccttctaaagtggggcatttgacaaagcttgtccgagagcaagtat

SEQ ID NO: 405281 - DNA, 497 bp, Homo sapiens
tatctttatagtatctcatatctaccaacctccactatgtaacaatgctttataacacataaatataaggcaacaacaacaataacctaccaaacacctttgattctattttattgcttcttccttggttcttgaacctatggaataattctgagctgcatcagtctaagtgttcttcttctgatgaatgtatgcttttgaaggggtgttgatctactaagacaagaaagctggaagcaatatgtcttgctttcgtgatgtctaraataacttgcaaatcataatgacataggctgtcttcttatttttttagctctgatacttgcaaaggtgcccagaggctaataaatgatgggcaaatctcataaatataataaatacataataactaactaaataaataatagatatatagctttactattgactttcatgagagatgtgtgtataggaagtagagatacaggttgacagtttttaaagtgctttataaaagg

SEQ ID NO: 405282 - DNA, 497 bp, Homo sapiens
tatctttatagtatctcatatctaccaacctccactatgtaacaatgctttataacacataaatataaggcaacaacaacaataacctaccaaacacctttgattctattttattgcttcttccttggttcttgaacctatggaataattctgagctgcatcagtctaagtgttcttcttctgatgaatgtatgcttttgaaggggtgttgatctactaagacaagaaagctggaagcaatatgtcttgctttcgtgatgtctagaataacttgcaaatcataatgacataggctgtcttcttatttttttagctctgatacttgcaaaggtgcccagaggctaataaatgatgggcaaatctcataaatataataaatacataataactaactaaataaataataratatatagctttactattgactttcatgagagatgtgtgtataggaagtagagatacaggttgacagtttttaaagtgctttataaaagg

SEQ ID NO: 405283 - DNA, 497 bp, Homo sapiens
tatctttatagtatctcatatctaccaacctccactatgtaacaatgctttataacacataaatataaggcaacaacaacaataacctaccaaacacctttgattctattttattgcttcttccttggttcttgaacctatggaataattctgagctgcatcagtctaagtgttcttcttctgatgaatgtatgcttttgaaggggtgttgatctactaagacaagaaagctggaagcaatatgtcttgctttcgtgatgtctagaataacttgcaaatcataatgacataggctgtcttcttatttttttagctctgatacttgcaaaggtgcccagaggctaataaatgatgggcaaatctcataaatataataaatacataataactaactaaataaataatagatatatarctttactattgactttcatgagagatgtgtgtataggaagtagagatacaggttgacagtttttaaagtgctttataaaagg

SEQ ID NO: 405284 - DNA, 614 bp, Homo sapiens
aattagtgttaatccataacatgcaataatttagctagggaaaatgtaaaattttctctggggcagttgacttaggagacattttcaagatgtagtattaaatgatataaacagaagactgataagcacatagactccaatcattctaagtaaaacaaacaataacaacctcttmtgcatgatttgagaataaaaaggaagaaaaaaatagaaaaaagggaaaatttaaaaaataaaaataagaaactttttattgttatgtattcataattataagttatgaaaggacacccaccagattgtcaatactggttgtacaggtaaagggggaagagaagacaagcaaaagtgtacaagaaaatggaaagaagtcaataataaaaacagtgtttgctatcatctcgattatgcaaatatttaccaacattttgcttgtggaaatttcaaagcggtgacatttcaggggatttatttttagttttattttttgagacagagtctccctctgtcacccaggctggagcagtggcataatctcggatcacggcaacctctgccacttgggctcaagagattctcatgcctcagcctcccaaatagctggaattacaggt

SEQ ID NO: 405285 - DNA, 527 bp, Homo sapiens
aattcatacattgaaatcctaacctctagtgtgatgatattaggaagtgaggctttgtgaggtgattaggtcatgaaggtggagscctcatgaatgtaattagtatccttataaaagagacctgagagagctccctcattctttgtattatgtgaggataccaggagagggcaccatctatgaattaatgatccagccctcacgagacactgaatcttctggcaccttgattttgcacttcccagcctagagaactgttgacaaatatatgtttgttgtgaaagtcacccagtctatagtatgtttgttatagaagcctcaatggactaagacagagggtgtctgaatggcacatgctagtgaaggctagtctcagggggcatatttctaattgatgaccagaggaggcattgcccacatcatgaagtagtttcagcatcaagtgtctttctacaaccatcaaaagtgttgcttgagagaaagaagtcagattgaacatctgtcacagcaagagagtaatcatgtca

SEQ ID NO: 405286 - DNA, 516 bp, Homo sapiens
gtgttaactcctcagggctgcactttaatgccccttcccttgtgcttccttctcagtggaactgctggtcatcaaccttaccatgaccttcattttgtctctctgccctcagctgtaacatttatttcaaatattgcattttttcttctaaaatttccttatgtttctttgatatattttatatttatctgctgagagatttaatctatttattcattatgagcatactttcctttagctcattgagaaagttataataatcactttaggatcctcatgtgatatttacaacaygtgagataccttgaagtgggcttcttctgcttgtcttttctcttgataatggattacattttccaagttttttatatattaagtaactttggagtatgtcctcaacattgtgactgatgtgtttggagactctgaattttgctgtattcttccaaagaatgatgaagtttttgttttggcaggcagttgacttgattagacacagtctgcagtgtgtctcag

SEQ ID NO: 405287 - DNA, 669 bp, Homo sapiens
gtgctggaaagatcagcaaagatataaaatatccaagggaaaacaaaagaaaaaaaatggcaggcagtctaacaccggctaatagttaaataacaatttgatgtttagacataagaggctgaagttaggaaacttgaggttcacccatacattctgggcttcgaaatctgccatcagtaaaggggcacaatggtgtgaatttttagccaagcatcagttgaaccttgaatttcctgggtttttgttggaccgtatcacagtgaaacattatattctttycccccaaatatatatctgatttcctttacaaagagcaaaaaatatttttcccaccaagctacaagaaaacacatgttatctttcccaatagggcatcatctattattggtcttttggaaagctaaaaaaaatgcttcaaacaatattctaaacccgtttattgtgttttgtcagatgaaaaaaactgattttgatttattatttcatgtagatattatatagacatttgtgttcgacatttcctgagaaatatttccgtttctgaggtcttttaaaaacgcacttttagaaaactttataatttttttctgtgcatgtatgtgtggtggcagatgaggaattcttttaagatccttcatgtttaagatgtttagtaactaaaaataattt

SEQ ID NO: 405288 - DNA, 404 bp, Homo sapiens
aacacaaaacacccccaacaggtcactaggaatgatactaagtgaggccattcctgcttccactccctggatactggacacatagttttttctgttgaggacmcagcaccatgtagcggtctccgatctaatgcataccctgtatcctgaaagggggctcccatccatccacagtgttgcatccaagttggtgtttcagctacatctttagagggctgtttcagaactctatgaagctagctttttctagagtgtgcggtatgttttacaactaagagttataaatttgtgtccactagtcacatgctctgttgcacggaattccatgcgtatagattgggcattctacaagcacccagataatggtgttggctgaagatctatgggcaggaaaagcaaaccca

SEQ ID NO: 405289 - DNA, 553 bp, Homo sapiens
ataaatttgtgtccactagtcacatgctctgttgcacggaattccatgcgtatagattgggcattctacaagcacccagataatggtgttggctgaagatctatgggcaggaaaagcaaacccatacctgcattcagtgtctatcctgatgaactgctgctccttccaggataaaaaagggcctaatataatcaactttccaccaagttgctgacttttctcctcaaggaacagtgccatacagggctcagtgttggtctctgttgctcacccattggacattcagaggcagcactagatcagccatgagaaagagtccattttattgggtttctatgaatgccaactgaccaagtctttttgtctacttgtgttttcagtacttttgtatgctttctatcrtatgtatttatatgtgtacaaacatcttcacacattataccgactcccttagttctatccacatgcttatagccgagacctccttgcctttgaactttcagccattttcccaggcccttgaccaggcagccaggccattagctattgccca

SEQ ID NO: 405290 - DNA, 549 bp, Homo sapiens
aaaataactgttcaaaaagagcacaatatcatctatgttagtacattctatgatgttcacacaatgacaaaatcacctaacaatgcatttatcrgaaagtatccccattgttaagtgacacattactgtattgggagggtggcatttggagtttatttcagtcctgacttttttgttttcagtgcctttgagatacccaagtgaaaatgtttggaacacatctggttatatgccctggagctcaaaggagttgcctgtgagacagatacttattcgagaaccacgacagatacgtatttgagaaccactagtatttagatggcattaaacccatggggctggataaagtcacctagggagagaatatagggtagcaagagaagagggcctatggctaagcctagagatcctcagatacaggttgaatacccctcattcaaaatgcttgggaccagaagtgttttggatcagttttttttttttcagaatatggaatatttgcattactctttccactccaacatctttaatccaaaactccaaaaccca

SEQ ID NO: 405291 - DNA, 325 bp, Homo sapiens
gactgaaacctgggcctttaaactcgaaagctacccaagccaatgcattttctcttttgctcaagctgtttcaatttggttcctttcactcaaaagacttcttaatataaatgggcttgggttttaagttggagaaataaacmaatgggattgtttgtatcccaacacagtcacttgaggaaaatgcactaaaagggggtaggatggcttcaaattcttcttaatgaagatgactgatggtactcgaaatcaccttatagacacctctataaagctgctcccttattctttaaatgggaacttgagctggaagattcatgatttt

SEQ ID NO: 405292 - DNA, 325 bp, Homo sapiens
gactgaaacctgggcctttaaactcgaaagctacccaagccaatgcattttctcttttgctcaagctgtttcaatttggttcctttcactcaaaagacttcttaatataaatgggcttgggttttaagttggagaaataaaccaatgggattgtttgtatcccaacacagtcacttgaggaaaatgcacyaaaagggggtaggatggcttcaaattcttcttaatgaagatgactgatggtactcgaaatcaccttatagacacctctataaagctgctcccttattctttaaatgggaacttgagctggaagattcatgatttt

SEQ ID NO: 405293 - DNA, 325 bp, Homo sapiens
gactgaaacctgggcctttaaactcgaaagctacccaagccaatgcattttctcttttgctcaagctgtttcaatttggttcctttcactcaaaagacttcttaatataaatgggcttgggttttaagttggagaaataaaccaatgggattgtttgtatcccaacacagtcacttgaggaaaatgcactaaaagggggtaggatggcttcaaattcttcttaatgaagatgactgatggtactcsaaatcaccttatagacacctctataaagctgctcccttattctttaaatgggaacttgagctggaagattcatgatttt

SEQ ID NO: 405294 - DNA, 546 bp, Homo sapiens
aggcttttatacagctgatagcacagggctgtcaaatgctttttatgggagaagaaacaggaagaaggtttgtttggcagacagcaagttattgggtaattacattttatagagctgctgtgggacaagtcacggacctgctgtctcctttgatgctaaaaggcagacggccccataaagatcagaacaagggaaggtgaaaggggtcagggacagagctgccccttgggggtcagcttctgcctggaagcatccccctgccccccaccaccaggtgcccctttgggaaatgccctccttcccttgccacatgttttggttagagtcacattcatgccagcctcttctatctgtttctctgcatacagagaaaaggagagaccgaaaaaaggcattaactaataggaccaccctcaaggaagccattgtcattcacttattcattcgctcttttacttcccccttcactcatgsagtcactatgttactcattcactcattcattcaataactcactcattcactcacccgctcatttattcattt

SEQ ID NO: 405295 - DNA, 581 bp, Homo sapiens
ttttaaattacaaatgtgtctggtgttatatttctattggacagcactcatctgcatccccacgctttcccaacctcatgacctcagctgaacatttatgcatcaaaagacgaaaaagacagacagaaactccagcaatgagtgcccctcctctgcctctggagagaagcctcagctcacccctgccacctcgccatgccttyctttgctggaggggccccatctgtggctggtgtctcatgtggtgccatctccgttagcacattaagtggcagcagctacaaagcccctcggagcccactctccatgacgcccagccaggggccttgggctccgatgcacccagggatgggctgccttttcttggaagtgccactgttgcctttcggaacagacacttaccaggtgattctttgcggctctgcattcataagagcttctttagaaagcagaaaatgcttcaagcgagtttggagagatgtgtgtttaccagaacaaataatttgctctctgtcagtccttgattatatctgactgctcttttctctctgaattgaattcagggggaaagaaaccagttc

SEQ ID NO: 405296 - DNA, 433 bp, Homo sapiens
ctgcagccaggagatggcttactataccatgattgtgcaggctttggtcatgggacccatgtcacacgtgattgttgccactgtggggttctgtgattggtggttccattagaatcacatggagctggggaactacattctccaaaaccctgttttatgtgggagggcccttttaccagaaaaaaaaaaaaaaacaaacaaaaacggtagaagggaggctgggcagacaacactaacgatgttatcactgcaaacatttcccttcctgttttctccctgccttctgcaagaactaggggatctgtgcttgtgtttgtgctctgtaaacactggctctgtcaggacctgctagagctgtggatagaggtttgaggagcatgrgtttgggctcagacatgtctgagatcaaattccaacttttctccttactggc

SEQ ID NO: 405297 - DNA, 583 bp, Homo sapiens
gatttggcacacaggccagagtytgccaatcgctgacctagaaaaatgtagccctatcttctcattgtgcagatggataaagcaagactcaggtgagagatgacttgcccaaggtcacacacctcggtaaagacagagctctaggggaaagcctaaaatgttaactctatcttctaaagctctctctaccataccacatggcccccctgtttcttctttcctgccttcttccccttcattacttgcttaacaccgggggtaccatatgcaagcaaacagtgcctgtatgcacacagctttcagcctactgctacaccaagaaaccattttttaaataagcttcaagaatcagcattaagtttgtgttggtttataaatgttaatattctaaaaccactgcaattacattattagaatggtgctgtcctgaggcatgcactacccttaatatgttttctttttgtaaatatgtaattatttgtggattattcaaataattgtgttcgttgaaaggaaattttttttaatgtaaataaggcatggagaaagaaattgctcactatcccattattcaaagataccc

SEQ ID NO: 405298 - DNA, 583 bp, Homo sapiens
gatttggcacacaggccagagtctgccaatcgctgacctagaaaaatgtagccctatcttctcattgtgcagatggataaagcaagactcaggtgagagatgacttgcccaaggtcacacacctcggtaaagacagagctctaggggaaagcctaaaatgttaactctatcttctaaagctctctctaccataccacatggcccccctgtttcttctttcctgccttcttccccttcattacttgcttaacaccgggggtaccatatgcaagcaaacagtgcctgtatgcacacagctttcagcctactgctacaccaagaaaccattttttaaawaagcttcaagaatcagcattaagtttgtgttggtttataaatgttaatattctaaaaccactgcaattacattattagaatggtgctgtcctgaggcatgcactacccttaatatgttttctttttgtaaatatgtaattatttgtggattattcaaataattgtgttcgttgaaaggaaattttttttaatgtaaataaggcatggagaaagaaattgctcactatcccattattcaaagataccc

SEQ ID NO: 405299 - DNA, 583 bp, Homo sapiens
gatttggcacacaggccagagtctgccaatcgctgacctagaaaaatgtagccctatcttctcattgtgcagatggataaagcaagactcaggtgagagatgacttgcccaaggtcacacacctcggtaaagacagagctctaggggaaagcctaaaatgttaactctatcttctaaagctctctctaccataccacatggcccccctgtttcttctttcctgccttcttccccttcattacttgcttaacaccgggggtaccatatgcaagcaaacagtgcctgtatgcacacagctttcagcctactgctacaccaagaaaccattttttaaataagcttcaagaatcagcattaagtttgtgttggtttataaaygttaatattctaaaaccactgcaattacattattagaatggtgctgtcctgaggcatgcactacccttaatatgttttctttttgtaaatatgtaattatttgtggattattcaaataattgtgttcgttgaaaggaaattttttttaatgtaaataaggcatggagaaagaaattgctcactatcccattattcaaagataccc

SEQ ID NO: 405300 - DNA, 588 bp, Homo sapiens
gtttggcagttcccatggtgtaactattcccagcatggctgtcttcaagctaccaacacgatgtccctgaatgcagaggtaaaatgaaatggcttgcctggcatcactcctgttagggaaagagatgtgcatgcacttagtaagtgtggtggaaaatattagagccaaaaagccttcattctgtcctttagagagcttctgtaagggtccacagagacaatgtgtgagaaaggagcttcggaaattgtaactcaaatgtgaggcagtggtctgtgtatgttcaccggcattcgatctgttctccctagcagsattacctagcatttttctggacaggtttatctctcttagccatgtggtttgggtgggactgcgccaacacccagcttcaagacccaactagtgcaagccaatgtacaaatctccctccaccacgcccccagcccagaccacaagcattggctcagggttgagtactgaaccaatccaggcctgtgaaatgcaagaagatatttgtttggatttttgacagacaggcctcttttcccctctgagaaagcaaccagaggagaccctctttccccctca

SEQ ID NO: 405301 - DNA, 534 bp, Homo sapiens
taacatgtgccatctagtgaagattaaaggtaatatatacatagatatttatatgtccctagcacagagcctgggacaaagtaggaacataattaacagctgactgggggagctaaactggagttgaccagatcccatggctgcagtcattagggcctttgtagaccactcacttcttggaagagaggcagaacaaagagtgtggaccaagcaagggtggtttataagtggggaggcagagcataagaaaatctttactatatggcaggactcttaactttcgatgtatgatgaaccccttttgtagtttggagaaactatttctaaatgcatagcatatacatagaattacaaaggatatcaattatacgatcatgtgctgcataaagaccttcagtcaacaatggaccaaatatactgtggaggtcatctaataagctaaggttaatttattatttaagaaaggagaaatttaraaataaatttagcatagcctaagtgtactgtgtttataaggtctgcagtagagcacgg

SEQ ID NO: 405302 - DNA, 523 bp, Homo sapiens
cttctgttgatttggtgccaattaggaccatgctattaatggagccggactatgagtggctgtgagcatggaatgagataatgtcagtggaagccctgcacactgtaggtattcacaaatgattctcaataaggataacacaccccacggatttaaaataaattaagccttaatatttatggagtacctagtatgcaccaagcactttacatagaccatctcattgcatcctctcaacaatcctatgggactagaagtccagtgtggtagaccaaatcccactttttcaagttaagaaattgagattgttatatgaaattttctgatgttagtgttggctcaatagtttttttttttttwaaaaagtagactttatgtttttagagaagttttaggttcacaaaactgggaagaaagtacagagatttcccatacaccctcttcccccacacatgcacagcatccctcattactaacatccctcaccagacggtgcaggtgctaccatcagtgaacctgcact

SEQ ID NO: 405303 - DNA, 583 bp, Homo sapiens
gattagagatgaagaagagtagaagcagggaagctaatgagattattgcagtgatcccaggcaagagatgatcatggcttggcccacagttgtggcataggagatggaaagaaargaatgatttcaaagtaagtggagatagaaccagtaggaagtaatatgttgggtttggatacgctgtttttgacattgttgaggtgtctgagacatccaaatgtatgtcaagcatttggacctcagagcctgaaagtgggctagtctgaagaaatcactgatgaaactaaagatatttagagaaagtgtgtagctagggaagaaggcttttatgactaagaggttgccacaattagaagtcttataaaggagatggtcgctaaccatctctgtacaagttagagaaccagtctgtaacttggtggctgatagagggttaccaatgtaataagagaaccagaaacagcagcctgttgagagattaagataaatttggtttggggttttgtaatttcaaatgcttataaaatagccaggtgggtaatgtttgccatgtggtcacaggagaatcattcaaaggttgtttttt

SEQ ID NO: 405304 - DNA, 552 bp, Homo sapiens
tgtattacaagacactttattgccttgcctctgataaacaacagtatttgtgatataatttttaccgatgtccctatacttaaaatgtgtgagctacccactttattaataagacttttatacagaattactcttaatgataaatcttccaaaaaaaaaaaagatttgccatcattgaggatattttytttaaaaagtatcccagagtataaaggaaatttcaaaaaaggagagcaaatgttttaagcaatggcagcattattagaatgatttaagttaattcttggtagaaaaataaacatttattaggctatatatgttctggtatttattttgaaatatctgttattgctttatagtcataccacatagtaagcagcatataggacagagtttagagtatcttagctattcagtaaaagcttaccacaaagaatcctagcatacagaaagttcataactggggtttctgcacattttatgcctaaactatagaaaagtaaagcaattgataggaatttattcaaaagttgaattctaggtttgtgttag

SEQ ID NO: 405305 - DNA, 346 bp, Homo sapiens
acatatatggtgaactcattttttacaaaggtgtcaagaacctatattggggaaaggacagtctcttcaataaatagtgctgggaaaactagatatccatatacagatgaataaaactagacctgtatctttcactatatacaaaaatcaaatcaaaatggattacagacttaaatctaaggcctcaaactatgaaactactgcaagaaaatatttgggaaactttccagggcattggacagggcatagatttcttgaataatatcccacaarcataggcaatcaaagcacaagtggacaaatgggatcacatcaagttaaaaagcttctgcatggcaaagaaaac

SEQ ID NO: 405306 - DNA, 262 bp, Homo sapiens
ctcctgttcttagaagtaaatgccacaaccaactagacaaacagttttatttcttccaactgtaaagtgaaagatattatttyttaggaaacaaagtcagccaatcaattaattgtttcccagcattttagtattctttttacatcccacattataccaaaaaaaagatcaggtttaaattttaaaaaaaattaagatcacttgtacaaatacatattgaattcttcatgctcattattttcttgatttataaaagaaaatt

SEQ ID NO: 405307 - DNA, 541 bp, Homo sapiens
tcctgggaaaaagaaggattttttctccttcaatagaaatggatttcaaatgtaatttactgtttctacctggtgaaagggcatctcacctcatgaatccatgggatgctgagagaagcgccatttctttccagaaggctgtgtttccaaattaacttgttcagatgctaagcagaaaagcagccgtgctgctaggatgaacaattactttctctgggttgcctgcaggctgattcattcagctcactttatgttccaaaccttggctgggtctggaatggtggttcaatattgtgggggctttgagtttttatttcagccaaactagtgacacaaaaaaatgagagcctgatgagaatcttgtaagatgccaggtttgtgcaacctgcctttggagtcatgcaggttgacttccaagaggagagctaagaaatacagagtagttattgattggcttcyctcttcttaggtgtacagatgtgtggttacacatgctcctgcacacacacacacacacacacacacacacacaccagcttgt

SEQ ID NO: 405308 - DNA, 612 bp, Homo sapiens
gaaaaatcaaaatcaaactcaagctatttgtgcttaataagtacataaagttcttcacaaacaaataggtcatttttgtgtacatgacccctgtaaccacgccagtgtgagcaagacctcaggtattcaggcccaggtaagatcattttgtgaaaggagaacttaattgtgcccagtactaactactgtgcaatttttaagattctatttttatttttttagaatttggcaaaatggaatgctaggtgtttacagtaccatcatttattattgtccttgacagtctcctccatttccaatgcktttttctaaaaacaagagttccaagatattaacaaagtatctgtggtgaaataagtggcagaaatactatgtgagatgaagctgaacaggtttttttctgcatgatcttttcatacctttaatatgttgaggtatataaaaatctacaagagagggagatggtaggtggtaattttttaaaatgtatttgatcatgggttttttttttagcattttgcagaactagtgctaggcactagtcactttgggacatgctagtgagaaggctgatgccctcaaattactttaaaaggacactttttcaatccc

SEQ ID NO: 405309 - DNA, 495 bp, Homo sapiens
gctggtaccattccttctgaagctattccaaataataaaaaaagaggaactcctctctaactcattttatgagggtagtatcatcctgataccaaaacctggcaggcacacaacgaaaaaagaaaacttcaggccaatgtccctgatgaaaatcggtgtgaaaatcttcaggaaaatactggcaaactgaatccagcagcayatcaaaaagctatccaccatgatcaagtcagcttcatcccaaggatgcaaggctggttcaacatatgcaaatcaataaatgtaatccgtcacataaatagaaccaatgtcaaaaaccaatgtcaaggattatctcagtaaatgcagaaaggcctttgataaaatttaacatcccttcatgttaaaaactctcaataaactagatactgatggaacatatctcaaaatagtaagaactatttgtgacaaacccatagccaatgtcatactgaatgggcaaaagctggaagcatg

SEQ ID NO: 405310 - DNA, 573 bp, Homo sapiens
tccagttgcatctgctgtgccagatgtggtttcaattgcttgagcaaaattaacacatctcctggtccatggtatgcagccattgacttggggaatatctttttctccattcctgtccataaggcccaccagaagaaatttgccttcagctggcaagaccagcaatatacctttactgtcctacctcaggggtatatcaactccctggctttgtgtcataatcttagtcagagagatcttgattgcttttcacttcaacaagatatcacactggtccattayactgatggtattatgctggttagatccagtgagcaagaagtatcaaacacactggacttattaatgagacgtttgtgtgccagaggatgggaaataaatctgactaaaattcagggaccttctaccttcgtaaaatttctaggggcccagtggtgtggagcctgtcaagatattccttctaaggtgaaggataagtcgctgcatttggcccctcctacaaccaagaaagaggcacaatgcctagtgggcctatgtagattttgggagcaacacattcctcatttgggtgtg

SEQ ID NO: 405311 - DNA, 500 bp, Homo sapiens
tctgattttttgagtttttttttttagcatgagatgttaacttttttcaaatgctttttctgcatctattgagatgataatatgattttatccttcatttgttaatgtggactatcatactgattaacttgcatgtgttaagccatgcttgcatttcagggataaatcttacttggtcatggtgtatgatgcttctaatgyggtttgaattctgttagcaaatgttttgttgaggatttttgccttcatgttcatcaaggataatggcctatagttttgtgttggtgccattgtctgcttttggtatcagagtgatgctgggctcacaaaaaagagtttggaagtattccctcttctagtttaaaagtgattggtattaattcttttttaaaaaatctttggtagaattcacctgtaaagccttctggtccttggcttttctttattggaaggttttcgattactgatgcaatctcttttgtttttggcctattcagtct

SEQ ID NO: 405312 - DNA, 532 bp, Homo sapiens
tgctgcttatttccccaagatgagaaatcaggaattgacaatgtctccttccaatggtctctcatactctatttctggcagaaacatcttagtgtttctgttatggtgaagacattcttttccagttttcagtgagggtgctagtctcctcacctttatttctgtatcatgtatgtggttttaatgggagttaggaaagatagaaatgatcacttgggaacacattgtcatctgacccggggtcctcatcaattgcctgttcatggtaattggcctagtatttccagtacaaaaaacatacattttggtatacaatatagaaataagtaaaagaagaattcagctttctctgtcagctgtcagcattaataatgagcaatgaactcatttcttccctctatcttttacacttatatagctttttwaaaaaaatgcgcagattttccagtgctctgggtgttgatcttctctacttatatattgtgcattcttcaattgttcttgcaaccatctgagctcacaggagagggtc

SEQ ID NO: 405313 - DNA, 409 bp, Homo sapiens
cttctttcatattagccatattttgttgctataaaggattactggagactgggtaatttgcaaagaaaagaggtttattttggctcacagttttgtaggcataaagatttttcaggaatcgtggtgctgacaccacatctgatgaagctttcagaaagcttacaatcatggcagaaggcaaaggaagagccagagtatcatatgacaagagaggaagcaagagagaggtggggaggtgccagcttctttaagcaatcaattctcatgtgaactaccagagcaagaactcaccccttacattgtggatatcaccaagccattcataagggatccacccccatggcccaaacacctyccactaggcccttctccaacactggaggtcatatttcaacatgagatttggaga

SEQ ID NO: 405314 - DNA, 506 bp, Homo sapiens
ccaaaaacctctttgccttatatatcttttttttgtcctctccaacacactattatacagattattttaccctatctaaaatcccttgtaagcctctccacatggcccaagaaatagggcagagccagactgggttatgcttccaagtgagtcacgctaacctatcttgtcattagaaatggctctgagtctttatctgcccacamactctaattaatgatcatttaactgtactgtcaactctgtttaaatttgagtgataccagttgtttcttccttgggccaaccaatagcaacaggggaaggcattcatgcatgccattgtccgggtggttctgggcctatagcagcccagtttaatgggcattcagagctcattagtgaggaaacacatcaggagtgaccgctccggtgccacacgttgcaactaatagccctgccgaacagaatcgtttctgtttctgctcagttgttgtgaaattctttcaatgtcaacaagtggtcgt

SEQ ID NO: 405315 - DNA, 542 bp, Homo sapiens
actattttaaaatcataagaaaaatgccttatattttaagtaagtraaataaaaatctgctctccttggatgttatactttcttcattctttcagtgttctctgaaataaatatctgttataattggcttcgtatttgacaaagtaggcaatggtcaaagtgataaaaattcttaactccttagctcaccctccaagccccagtcctggcctctgaatgtcttcagtgtccagtatctgtatgctcttgtaaatacctctttcctccactggatttttaaattattggtttgtgcatctgtatcccttgctagacaaagagctgctataaagctatttctacttattgataatttttggttgactaaacacatagagatgagtaaatgctcaataattgttcagttaggtaatccacatcacaaagttgtcaaaaagtgaactatgtgtttgcattttccatctaggagtccaacaaaatatgatcagctatttaatattttggagcatttaatatccaggtcatatttcaactcacagccc

SEQ ID NO: 405316 - DNA, 542 bp, Homo sapiens
actattttaaaatcataagaaaaatgccttatattttaagtaagtaaaataaaaatctgctctccttggatgwtatactttcttcattctttcagtgttctctgaaataaatatctgttataattggcttcgtatttgacaaagtaggcaatggtcaaagtgataaaaattcttaactccttagctcaccctccaagccccagtcctggcctctgaatgtcttcagtgtccagtatctgtatgctcttgtaaatacctctttcctccactggatttttaaattattggtttgtgcatctgtatcccttgctagacaaagagctgctataaagctatttctacttattgataatttttggttgactaaacacatagagatgagtaaatgctcaataattgttcagttaggtaatccacatcacaaagttgtcaaaaagtgaactatgtgtttgcattttccatctaggagtccaacaaaatatgatcagctatttaatattttggagcatttaatatccaggtcatatttcaactcacagccc

SEQ ID NO: 405317 - DNA, 621 bp, Homo sapiens
aacttgattgccatttatttctattccaaatattagggtggcaatatcttgtgagtgcacatctgatgcttattttattgcatatggttagtgggataaaatgacttctcagaaattagaatttgggtgttttgtgaccttttaaatttttttaagcagaaaaaaaatttgaaaaatgtaataaagaactttttaaaaagacagggtgaagtattaaaaacaatatttcacagaccaataaacttttcgttcaaaccactatttatttgaaaaaaggatattgatgtggtcttaccagtgcagaaaacacaacttagctattattccagtagtttccattgtaaaaattgaggctgaattgaagtctgagaaaatgtttcatagcacaactgaaagaaaataaatttaggtcaaacacaactgcaatctagagtgtccttaccttttccagtcttacaacaggtggatctcagagctgagtyctggtgctgaatttggaaagcacttaagaagaaagttaacaattagtttctttctaggctctcttagacaagaaaagattcatgttctgagacttggaagagtagttgactccatgagccaatgaatgaaaaggaagag

SEQ ID NO: 405318 - DNA, 409 bp, Homo sapiens
tgtctactttttatttgaattgtggagtcaggctgtgkactgtgacaagtggctcaggattttggctcaaaaggagaaaatatataatcatctctgttacatgcactaataaaggagaaatatgaggcagaaaataagaaaagctatttgtcctttctggtcatttccacagtagattgacctttccaatttacagaatgagaattgcaaaaaattaaaaaataaaaaaatcttagcaagaatcttattaactgccattttacatttgaattgttaccacaaccctgttatgcaatctctgaacacgtagaagagattccctcaggtgtctacaccaccagggccctgggtttcaagcacaaaactgggtggctgtttgggcaaacactgagctagctgcaggagtttt

SEQ ID NO: 405319 - DNA, 622 bp, Homo sapiens
tattgatttttccccgattcaaagagagtgcaggtgtttaagcacttatgaaattgattgactcccctctagaagscaattgataataagtttaagctttggagtgaggctgtaaaaggtttgattatattaacaatactaatagtcatgggttcataaatcttaagagaaagcatgcatgtgtcacatataatgcatgaaaaagttgttcttttatcatggataactctcttttgtgtggagacccagttgatcagctattccattatttgaataagtatctgatgtcttgttttctttcaagaaggcaggtgcaggatgaagcaggaaacctgccaagaaagatgataaattaccatttggtgctagcgaccagagctctacaagtacagggctgccaggaactgtgagggagagtaaccacaaacaaggagggaaatgacttctgatgacaacttcagagatgtttactttttgtcttcattatctttgtagtgttttaaggatctctgttcattttgtaacctacaaaatgaagtgctattttaaaacaatcatatactggctcaaaatattctattacatctgctgaggtcaaatttaaaaattagagtttagaggg

SEQ ID NO: 405320 - DNA, 622 bp, Homo sapiens
tattgatttttccccgattcaaagagagtgcaggtgtttaagcacttatgaaattgattgactcccctctagaaggcaattgataataagtttaagctttggagtgaggctgtaaaaggtttgattatattaacaatactaatagtcatgggttcataaatcttaagagaaagcatgcatgtgtcacatataatgcatgaaaaagttgttcttttatcatggataactctcttttgtgtggagacccagttgatcagctattccattatttgaataagtatctgatgtcttgttttctttcaagaaggcaggtgcaggatgaagcaggaaacctgccaagaaagatgataaattaccatttggtgctagcgaccagagctctacaagtacagggctgccaggaactgtgagggagagtaaccacaaacaaggagggaaatgacttctgatgacaacttcagagatgtttactttttgtcttcattayctttgtagtgttttaaggatctctgttcattttgtaacctacaaaatgaagtgctattttaaaacaatcatatactggctcaaaatattctattacatctgctgaggtcaaatttaaaaattagagtttagaggg

SEQ ID NO: 405321 - DNA, 558 bp, Homo sapiens
aacaaaccaccaagagccccaggacccacatggtattggcatctgtgaaggagaaagtagaggaaatcaaatggtgccatgtctaaaggtgaatggatccccgtaatagccaacagttatttactgaaaaccacagtgggccaatttgagaacacctaagaaactgaaaatagatttttctctcctaataccaagtgagttgaaagagcatgaagtaaggattaaaggggttggagcagcttaactgttgtgaaatctcaaaactgaaatgggttcctttctaatacaggaaacacctatggagaaaccactagaaatagaataaaaaatgaacaagttggggaaaacagagcctaaaacagaarattcttggttggggaagataaccaagaaatatcaagaaacaagcaattatatatttttaacattacataaaatttacactcctacaagcagtgtatatacattccctttttctccacaaacctcaccagcatctgttattttttgactttaataatagctactcgaactgtgtgagatagtgtctcattgtgg

SEQ ID NO: 405322 - DNA, 490 bp, Homo sapiens
tgctgctactctactgctggcagcacacacatgtgactgtggatcctgctgcctctgtcccagtgaaacacttttgctgggaccccctcccccattggaatgttattgtcagtggactgggaacacctgggtctcttcagtacagcaggtgctcaaccttaaggggccagagaacaaagccatgggcctggtcccagccccctacaattacagcatgcagcccaggagtgctgagctgargcttgtctcactgaagtcatccagaaacaaagccggttgactgaacccaactcatacaaaaaccaaaccctcacagccatcaaagagtataaaagcaaaaagccctatccaaaggaagcaacttcaaagattgaaggaacatcagccagacagatgagaaacaaccagtgcaataactctgtcaattcaaaaaaccagagggtcttcttgcctccaagtgaccatactagctctccagcaattattctta

SEQ ID NO: 405323 - DNA, 490 bp, Homo sapiens
tgctgctactctactgctggcagcacacacatgtgactgtggatcctgctgcctctgtcccagtgaaacacttttgctgggaccccctcccccattggaatgttattgtcagtggactgggaacacctgggtctcttcagtacagcaggtgctcaaccttaaggggccagagaacaaagccatgggcctggtcccagccccctacaattacagcatgcagcccaggagtgctgagctgaggcttgtctcactgaagtcatccagaaacaaagccggttgactgaacccaactcatacaaaaaccaaaccctcacagccatcaaagagtataaaagcaaaaagcyctatccaaaggaagcaacttcaaagattgaaggaacatcagccagacagatgagaaacaaccagtgcaataactctgtcaattcaaaaaaccagagggtcttcttgcctccaagtgaccatactagctctccagcaattattctta

SEQ ID NO: 405324 - DNA, 562 bp, Homo sapiens
actaaagagcttctgcacagcaaaggaaattgtcaacagagtaaacagatgacctacagaataggaaaaaatatttgcaaaccatacatctgacagaatctsatagaatctataaacaacttaaaaatattaatgagcaaaaaacaaccccattaaaaaatgggcaaatgacatgaacagacaatttgcaaaagaaaatatacatctagccaacaagcatatgaaaacatgcttaacatcaataatcataatataaatgcaaatcaaaatcacaatgagatagcatctcataccagtcaggatggccattattaaatgtcaaaaaataacagatgctggcaaggttgtggagaaaagaggatgcttatacattgctgatgggaatgcaaattagttcagccactccggaaagcagtttgacaattcctcaaagaacttaaaacagaaccatcattcaacccagcaattccattactgggtatataccccaaggaatagatatcattctaccataaatacacatgcatgtgtatattcatcatagcactattcacaaagcaag

SEQ ID NO: 405325 - DNA, 475 bp, Homo sapiens
gttcagaaggaaaaacctgagatgtctcataaaggacctggtgggttttaatatgtgtctgtgggttggggaaagacattataatagaagaagaggagggaactgaaggaacaaaggcaagacagggttaraaaacaaagcaagttaagtggtccaatgtattagtgatttttggaaaaaagtccaagaaagtaaatttaatgtaagatgtagtgagatccatgatcccccagtacactaggcagtaaatgggatctgctgtgtaccaatggagtaggcattagcagggtgagggtccatttggcattgttcttacccaaacaattttttttcaatgaatataacagtaatactaagaaccctttcctcagtcctcccacttcctcagattcacaaaaaagtcaccatgacaaatctctttagaataacaatcacacacaaaattataagatatagaaaatgagaagaataaaat

SEQ ID NO: 405326 - DNA, 628 bp, Homo sapiens
ttatgtttttctataacacttacacttctatttcccaatatgatcttaattaaatattaactcaaaatattaagatgaagaccattgatcatgrtttttttttgaaaaaatggtacttgttgcagtgagaatcaacttgagaattcatagtcttgaaatttcttatcaaatactgattttatagtttgttcctttttaaaaatcatgaaactttttcatttcttataaaacatagctttataaaaataaaatgaaataaattattgcaaataaagaaaataaaatatgaaaatcttatttcagtttttacaaaattaactatgcatattaaaaatgaagcatacctgctaggaataaataatatagactgataaatttcacacccaaaggatttttatgtttccttctacctacaataatgagcctctgggctcacactgagtagggaagaaagcttttaaaaacatagtccatggtcattttaagctctgcatttttattcttctctgctttctccttcccagattcaaagcctccatctgttgggccacaaagtggattgtttactctgaccatatgaatagataatccctttcactcaggtctatgtctttaaaaagatattaaa

SEQ ID NO: 405327 - DNA, 591 bp, Homo sapiens
ttccagtactatttactgactcttcttgctttccccacggattcgtaaggttttctgtcacagatcaagttacatggatgcaccagtctgtttgggggctctttattctattgcattggtctatcaatccgtgcgcaagaatatgctgctttacgatacagtagtgtcttcacactagctaactagctagytgttataaagatggacaagtcactttaccttctccttcttcctcttcctcttcttcttcttcttttttaatctttgaattaaaaaaaaatacggcggggtgaggtggctcgcgcctgtaatcccagcactttgggaagccgaggcgggcggattacctgaggtcgggagttcgagaccagcctggccaatatggcgaaaccctgtctctacttaaaaaatacgaaaattagccgggcgtggtggcggacgcctgtaatcccagctactcgggaggctgaggcaaggagaactgcttgaacccggaaggcggacgctgcagtgagccgagatcgcgccattgcactccagcctgggcaacagagccagactccttaaaaaaaaaaaaaaactcataatacc

SEQ ID NO: 405328 - DNA, 608 bp, Homo sapiens
gcatgagaccaaatggttccagctgggacaacagtcagtcatccatcaggcgcccaccaggcctccttccaggcagaaggctgtgaagggggagaactggggggaactgcgggggattgggggcatacaatgcaggctgagggttcatttgtttccacctttcctgactctccaggaaatttgttcgtttttcctgagactcttgcaaaccagagaaagcagcagaaaaggacaataacaaaaatcttacctggcctaaaatggctgaaatgagagaggtttttccacttcccacactgccrcagattccaaccagtttaccctggacaaggcacacagagaggagggtcatttagagactactaaccactcatcgctaaggacttgaggaaaaacacattaactgtagtctacccatacagaactgtcaccctgatgactcagcaggccacttacctgttttctcactcattagctgcctatctcatgggtttctgtggagacacctgagataacaggaatggaagccctttggggaaagtaaatatgccgcacacattccagtatcccaccgtcattcttaggcccagcctctttcctattctgct

SEQ ID NO: 405329 - DNA, 618 bp, Homo sapiens
tcacgacctgtctgtgcctgctagaatgtaaactccaagaaggacgggatttttgtctgtttgggtttttgtggctctgtgcccagccctatcacagcatctggcatggagtttgatactcatgaaatggctgttgaatgaatgaatatatacacatccggggccctctaatgacacggacctgtgaatatggtgctggttccgaaatacatagtctgtattttaaaagccttgaacctggcatctctgttccaccattccctataggaggccctctgagactaatcttgtgctacctgggctgtgacatcatctaccgttaacgatccttaacttatattaagaataaatcattacaacacaaatgttgtcacagtagcactgagaatacctatcatgtgccaggtatgatgcacagcctagtgcacaagggcgctcacagacttgtaacaatcagaaataattgtcacagctcacatacaactaaaatagaatcctctttggggaaaaatcctggaaaatcctcttgaatgtttcatttccttgcttataaaaygatcacctcataagattagttgttattcatttctgttgctaaatgcttagttggtttttttt

SEQ ID NO: 405330 - DNA, 547 bp, Homo sapiens
catataccagtttatatcccatgctgacctcttcgggatgctgaatacccagggaaagatttattgcatggcgacaagataaaaaatttggaaacacttgcttttatttttacatgacagagcccattgtaccaaaccaactataactttacaaacttcagaatacttatgccttctagattttacatataaatgtacaaaatggcctacagtatggttatatttgataaatctttgatatattgataaatttgataatctggygctatcctttagtgcaaactttgagtatacctttgggagataaagaatgagaggttttctgcttcagtgctacatgtttgcataaatctatgttaagtaattttaataaaaagtttagagtagtaaaaattatatcttttttttttttttacattttttgacataaaaagttgcgaatgtattacatagaatttgcaaatgtattaagatctgttttgccacctagtggataaaggaactttgctcatgaaattttgtttctgtttcctccctcctttctgtc

SEQ ID NO: 405331 - DNA, 552 bp, Homo sapiens
gctggccaagttcacctagaagccttctgtttcactataattaatttctcaagcctaagagttgctatatacagggcttttttgcctatcctagagaagtactaggacaagtttctagagatctcagaattgagggtctctgaatatggccagattacaatctagaattgcaggttwagggctaattcttgatagcattaacctcacccagagttgatctgtgaatccttgtgccaacctttagatcttcacagtcatgtataaactcaataggaatactggctaatgactgctggcctttcttctaagctgaggccatgtgacagcccctacttactccagaaaagctaaagaaatctttgggatctctatcttggattccagtgcttccagtggcagttagggctatggtcttcctgggatttttttcccatgagaagataaggtaaaagatttctgggggcaatcagggcacaaccaatcagctctagggggcagcctggacaccgtcactgacctggaagtagctcaggtgctgattctgccttcagg

SEQ ID NO: 405332 - DNA, 393 bp, Homo sapiens
tagcctgggcgacaaaagcaaaactccgtctcaaaaaaaaaaaaaaaaaaaaaarggatggttacattttattgccttttcttgctggatttctctcttggccttatagggcccaatggaaaaaagaaacatgttttaaaaatatattctcaatgtgtgcttacaaaactgcatgtgtctaactttcattcattcaaagaaaatttcttataatgaatctttgagaaaatatgcttatatttacctcttatagctgcatatgtaaatccatgtgatatgaacaaatagattctaataaaaaaattacaaagcagcaacaaatgatattaaaagaatacacttcattgcaagtttatttggcataatctccaagaaaaggaaccagagacagga

SEQ ID NO: 405333 - DNA, 600 bp, Homo sapiens
gcttcactgtaatcactcactaatgtcaactaaaatgatgctcttcaaaaatggcaatagaaggaactagtcaacagttaatactgaaatatctatttactttctgactacactgagcccagtaaaaggctctagagggctactacagcatgacaggttcttattcttgaggaaattaaaatctagttagaaaaagaagtataaaatatacaacaaagcaacaaataatactaaaagaatacacttatttgcaagtttattgggtataatcactaagaagacatacaagtgaccacacaaagtgctcaacatcactaatcatcagagaaatgcaagttcaaaccacaacgaagtaccgtctcacaccagtcagaatagctattattaaaatgtcaaaaaacaaaaaacagctgttggtgaggatatggagaaaaggaaatgctyatgcattgttggtgggaatgtaaattggtacaacctctgtggaaaactggatggagacttctcaaggaactaaaaatagaactatcattaaatcatcaatctcactattgggtacacacccatcatcaatcccactattgggtacccacccaaagg

SEQ ID NO: 405334 - DNA, 580 bp, Homo sapiens
ataaaatatacaacaaagcaacaaataatactaaaagaatacacttatttgcaagtttattgggtataatcactaagaagacatacaagtgaccacacaaagtgctcaacatcactaatcatcagagaaatgcaagttcaaaccacaacgaagtaccgtctcacaccagtcagaatagctattattaaaatgtcaaaaaacaaaaaacagctgttggtgaggatatggagaaaaggaaatgcttatgcattgttggtgggaatgtaaattggtacaacctctgtggaaaactggatggagacttctcaaggaactaaaaatagaactatcattaaatcatcaatctcactattgggtacacacccatcatcaatcccactattgggtacccacccaaaggaaaagaaatcattgtatcaaaaagacacctgcagaaagaggaggcagagcaagatgtccaaatagaagccttcactaatcatcctgactgcaggaatattaaactgaacaactagtcacacgcacacacaaaatcaccttcataagaaccataaatcrggtgagtaatcacagaacctgg

SEQ ID NO: 405335 - DNA, 576 bp, Homo sapiens
ggcagtttcccccatactgctcttgtggtagtgaataagtctcacaagatctgatggttttatcaggggtttctgcttttgccacttcctcattttctcttgccactgccatgtaagaagtgcctttcacctcccaccatgattctgaggcctctccarccatgtggaactgtaagtccaagaaacctctttttcttcccagtctcggatatgtctttgtcagcagtgtgaaaatggactaatacattggtggtatttgctgtgggcctgaggcagtgttgaccacggggagagactcctctgcttgtggaaagcggaaaggagaataagaaggactttgttttgttgcttatgtgccagatcagccagagtagaagagcgcaccatggagattcctagagcttctgactccagccttgggtcccacatggactctctggacttacccaaggctggagaaaactttctgtcctgaaggaaacaacacaccctatctggcttccccacctggtgattgtacagccttagggcattgatcaaacatagggcgtagccacgcagtggctaccacaggcc

SEQ ID NO: 405336 - DNA, 483 bp, Homo sapiens
tgtcatagtcaaagctggctacataatctgcagagctggtggaaaatgcaaatacagggacccgggaataaaggaagaactggtcagtctcctcttcccaaaggctttccactcaacccattatgagtgggtgaagtattgcatcctaaaagaattaagacactggaatgaattttgtatctggattagaggagggtaagaggctctttctaacttatctgcccartgctctatgggcagagagtaatggtagaatgttgaccctgaagcaaccaggctacctccctggacaaaaggtggtagtggacataaaggaaagggcagggcgcctagaacctgtctcagggaggtgaggtgatgggaagcaggatagtacatgtgcccagggtctaatctcacacacacgctcctttgtcctatcagacttagcttacaaaacacaaattcaaatataaaattattaagactttcaagacagcaaac

SEQ ID NO: 405337 - DNA, 537 bp, Homo sapiens
cctgtctcagggaggtgaggtgatgggaagcaggatagtacatgtgcccagggtctaatctcacacacacgctcctttgtcctatcagacttagcttacaaaacacaaattcaaatataaaattattaagactttcaagacagcaaacagctgtagaacattaaaccccaagtgcggggtctcctgagtatagggctttgygcaactgcagtggttgcaggcccatgaagccacgctaaaaatagtaacaaatttcttgcattgatggaaagcctacatttgcatgcactgaatagcaaaaagacaaagttttaagatttaatttgctgtttatacagaaacattggaaatgagagtatgaatatggagctagctacaatatgaacattcccctttttttctttctggaacccctattccaaaaaaaaaaatagaagaagaagaaagaaagaaaagaagaatacaagaaagaaagtgaacaataagcaaattccattttttgcttaactaggagatttaaaaatccacaaattcaga

SEQ ID NO: 405338 - DNA, 537 bp, Homo sapiens
cctgtctcagggaggtgaggtgatgggaagcaggatagtacatgtgcccagggtctaatctcacacacacgctcctttgtcctatcagacttagcttacaaaacacaaattcaaatataaaattattaagactttcaagacagcaaacagctgtagaacattaaaccccaagtgcggggtctcctgagtatagggctttgcgcaactgcagtggttgcaggcccatgaagccacrctaaaaatagtaacaaatttcttgcattgatggaaagcctacatttgcatgcactgaatagcaaaaagacaaagttttaagatttaatttgctgtttatacagaaacattggaaatgagagtatgaatatggagctagctacaatatgaacattcccctttttttctttctggaacccctattccaaaaaaaaaaatagaagaagaagaaagaaagaaaagaagaatacaagaaagaaagtgaacaataagcaaattccattttttgcttaactaggagatttaaaaatccacaaattcaga

SEQ ID NO: 405339 - DNA, 557 bp, Homo sapiens
taaccattgttctactctgaatctccaggagttcaattgtttttaatttttagctcccacaaatatgtgagaacatgtgaagattttctttcagtgcctggcttatttcacttaacataataacctccagttctatcagtgttgtcaatagataacatctcatttgcaaatgagaggatctcattctttttaatggttgaatagtacttcgttgtctatattaccacattttctttatccatccctctgttgatggatacttaggttgactgcaaatcttggctactctgaatagtgctacagcaaacatgggagtgcagatatttcttcaatacactgacttctctctctttttttttttttttttttggkatatacctaggagtggaattgctggatcatatggcagttctattttcatttccttaaggaacctccaaactgtattccacagtggccgtactaatttacattcccaccagcagtgtacaagggttccctttcctctacatcttcgccagcatttgttcttgcccatcttttagataaaagctgtt

SEQ ID NO: 405340 - DNA, 530 bp, Homo sapiens
tatgtcctatttatgtagtgatttgaaatgtaattatttgaacatataaaaaacagtcattcaaattcagtggsgtagatttggcctgtgggctatactttgctaccctctggccttgaaagtcttctaaatttttgctagcctaaaatccacctacttttcaatgtcaagttcaaataaaacctcccctacgtggcctctcatactgggactctgagctgtgagtgacagaaaatcaactattactagcttaagcaaaactgaggataagttgagagtttgcgggttgtagatcccagaatccaggagttgctgaaatgccagctgctctggggatatcctgctttgctactgtggtaacatcagaacatgccctcttcatctccctttctcttctctttgcttctgtcttcagtttggcctcatcatctcctagaggcagatcttttccacaagaaacagaatatgtaactctttatgtacccaggaaagtattctgtttgacctgtcttggtcacccagccaccctt

SEQ ID NO: 405341 - DNA, 483 bp, Homo sapiens
cagttcttactagatacacagtttgcccatgtccatgcttttaaaaaccttagttcaatatcagaatgatatggggatccaaacaccttcctagccctacttgatattagctaaatctcttagagatggtttcaggaatctgtagtttttatatacagactatgtactcagacttatgcaattacatttggaaaattacagaatgagtatactgtggccaccccaatacaaggatcttctcctaatttcttaagtttttgcagtgacagctcatttatctgataaagaatgagcagtaatcctctctagtaattsaaatttgttgcagggacctgcaaactactgccacttgttttgtatagcaaggtagctcaggatggcttttacagtgtttaatgattcaaaaaaaataatgttttgtgatgtgaaaattgtatgaaattcaaatttcagtgtctgtaagtaaagttttattggaacata

SEQ ID NO: 405342 - DNA, 566 bp, Homo sapiens
tgagtatactgtggccaccccaatacaaggatcttctcctaatttcttaagtttttgcagtgacagctcatttatctgataaagaatgagcagtaatcctctctagtaattcaaatttgttgcagggacctgcaaactactgccacttgttttgtatagcaaggtagctcaggatggcttttacagtgtttaatgattcaaaaaaaataatgttttgtgatgtgaaaattgtatgaaattcraatttcagtgtctgtaagtaaagttttattggaacatagccatacttattcatttacatattgtctttgtctgcttacatactgtagaggcagagatgagtagttgtagcagagaccacgtgattggcaaagcttaaattttttgcgacctgatactagacagaaaaaaaaaaaagatttgttttggagccattttcaatgaaacttttaaaaaactttgttatttaaccttttttggacagttcagttatcggtataaacactgtttttcataactttgctttaatataatgatgcccttgggaattattgttgattgaactc

SEQ ID NO: 405343 - DNA, 488 bp, Homo sapiens
tttttttttagcttatattattggtcctgtttaaaacttattacagatatttgtgtgaatgaagtatcatttcatctttttagaaacttgtatcagaggtacctaggctaatttatcaccaaatttttcatcttgcctgatgagcatttccagtcctgatacagctcctcagtgaccaaataccmggggagtctcccctggacttttttggcttttgtttttccaatgagtcataaaggcttagtcattttccattaactttaggagttttaactgcatatagtaaaactatgaatgacttataaggatatctttccctcttcaccgcttccccatcagcaacaaattctgttttgtttattgactatggaggagtccatgattgactttaagtattatattcactaatttttgagtagcatcttcccaccaaatactttgaaaatattaggtttttcttttatattatgaaggtctgtgtaaatatc

SEQ ID NO: 405344 - DNA, 567 bp, Homo sapiens
tcttgctggcttagatgttgacccccaagccctgtcaccagtgaactctgtacagccttagaaaaccccttcttccttctggctttcagtttcctcacttattaaatgagggtgttatctagctcatcttgaaactacttttattctgtgaaacataaggtaactaggacctgggcttcaagatattasaatcggttgagaatatgaaaagctgatgaaaaagaacagggctttctgttcgaattactggttttgctgttatgtttgagcgaggattaagcaggttgtatccagttgaatatagttcttgggcaagaattattcctccattataaaaccatttcaaaataatcttgacctccccaagatctccctccctttttgtggcattatccctcagtcgtgaaggacacaactaatgttgagtgtatatgtgaacatacataagtgcaaagaacggcaaaggaacgtttttcattctgtttcagttaagtgtcctcataggcaaatccaaagcttcggaaagaaatctatcacttttcctaagccctggggaatgtttcatga

SEQ ID NO: 405345 - DNA, 567 bp, Homo sapiens
tcttgctggcttagatgttgacccccaagccctgtcaccagtgaactctgtacagccttagaaaaccccttcttccttctggctttcagtttcctcacttattaaatgagggtgttatctagctcatcttgaaactacttttattctgtgaaacataaggtaactaggacctgggcttcaagatattagaatckgttgagaatatgaaaagctgatgaaaaagaacagggctttctgttcgaattactggttttgctgttatgtttgagcgaggattaagcaggttgtatccagttgaatatagttcttgggcaagaattattcctccattataaaaccatttcaaaataatcttgacctccccaagatctccctccctttttgtggcattatccctcagtcgtgaaggacacaactaatgttgagtgtatatgtgaacatacataagtgcaaagaacggcaaaggaacgtttttcattctgtttcagttaagtgtcctcataggcaaatccaaagcttcggaaagaaatctatcacttttcctaagccctggggaatgtttcatga

SEQ ID NO: 405346 - DNA, 567 bp, Homo sapiens
tcttgctggcttagatgttgacccccaagccctgtcaccagtgaactctgtacagccttagaaaaccccttcttccttctggctttcagtttcctcacttattaaatgagggtgttatctagctcatcttgaaactacttttattctgtgaaacataaggtaactaggacctgggcttcaagatattagaatcggttgagaatatgaaaagctgatgaaaaagaacagggctttctgttcgaattactggttttgctgttatgtttgagcgaggattaagcaggttgtatccagttgaatatagttcttgggcaagaattattcctccattataaaaccatttcaaaataatcttgacctccccaagatctccctccctttttgtggcattatccctcagtmgtgaaggacacaactaatgttgagtgtatatgtgaacatacataagtgcaaagaacggcaaaggaacgtttttcattctgtttcagttaagtgtcctcataggcaaatccaaagcttcggaaagaaatctatcacttttcctaagccctggggaatgtttcatga

SEQ ID NO: 405347 - DNA, 602 bp, Homo sapiens
aatgttctcacctcaggccaggggccaaggctaaccagtattttgtgacaccctgtgcttggcactaagcaggcactatagatttttgtgactaaagactgcatacttaactagtcactattttatgcattgagaattataaagtgtgtcattctgaaatattagaattgattttttttaaagtaaaaaaaaaaaatcctttcctttgtatgttaaagtattactaatgagccttcctgtctgtttttcctccatctactstagtatgccgagattttgctgtcctggaggaccacaccctggctcacagcctgcaggaacaagagagtgagtaatacctctcatttatgctccttcagttttctttttttagtggtagcttgaggctggtttcttagggcttaggtggggagagagcacagtcacttggcttcaccatccatacatcctgaaggatttctttaggcaaatgatgcctgggtgatcagtgaagtttcgggcatgttaagtaagataggctgccaggaattagtagactgctgcgtctgtaggaggaaaaagagaggtttgaacctttttcctagcctcttgttgtaggaggg

SEQ ID NO: 405348 - DNA, 602 bp, Homo sapiens
aatgttctcacctcaggccaggggccaaggctaaccagtattttgtgacaccctgtgcttggcactaagcaggcactatagatttttgtgactaaagactgcatacttaactagtcactattttatgcattgagaattataaagtgtgtcattctgaaatattagaattgattttttttaaagtaaaaaaaaaaaatcctttcctttgtatgttaaagtattactaatgagccttcctgtctgtttttcctccatctactctagtatgccgagattttgctgtcctggaggaccacaccctggctcacagcctgcaggaacaagagagtgagtaatacctctcatttatgctccttcagttttctttttttagtggtagcttgaggctggtttcttaggkcttaggtggggagagagcacagtcacttggcttcaccatccatacatcctgaaggatttctttaggcaaatgatgcctgggtgatcagtgaagtttcgggcatgttaagtaagataggctgccaggaattagtagactgctgcgtctgtaggaggaaaaagagaggtttgaacctttttcctagcctcttgttgtaggaggg

SEQ ID NO: 405349 - DNA, 579 bp, Homo sapiens
ctgtacttctgatacccttggttgttttcagctaccatcagttataagacttcagaaaggtcttgtttgtgcctgtcttcagaaaaaataaagaaaagaagggagrgaaagaagggcaggaaggaggaagataggctatattgcctttggtctggaatttcagccacaattccagccttgtatttgctaaacacctgtttctggccctctagtttaattctcctgctgtcctaaccacttaatgctagatccatctttgttctctgatctctgacattgaacttggctgaaatttgtcatactctattctctttcccataaaggtagtctgtgttcattcctagcaaatgactgtcttgtgccaaaggtcatccaccatttagtcaagcttccccacctcaacagagtctagagaattagattcacaaatcctcccacttatacctctatcgctactgtgcaactccccattctattcataaaactggctactcataagaagaatatctttaggaaatggtttgtggctgtggaaagctcagagatagccctctggctcaaaggaagagttaatttaag

SEQ ID NO: 405350 - DNA, 579 bp, Homo sapiens
ctgtacttctgatacccttggttgttttcagctaccatcagttataagacttcagaaaggtcttgtttgtgcctgtcttcagaaaaaataaagaaaagaagggagagaaagaagggcaggaaggaggaagataggctatattgcctttggtctggaatttcagccacaattccagccttgtatttgctaaacacctgtttctggccctctagtttaattctcctgctgtcctaaccacttaatgctagatccatctttgttctctsatctctgacattgaacttggctgaaatttgtcatactctattctctttcccataaaggtagtctgtgttcattcctagcaaatgactgtcttgtgccaaaggtcatccaccatttagtcaagcttccccacctcaacagagtctagagaattagattcacaaatcctcccacttatacctctatcgctactgtgcaactccccattctattcataaaactggctactcataagaagaatatctttaggaaatggtttgtggctgtggaaagctcagagatagccctctggctcaaaggaagagttaatttaag

SEQ ID NO: 405351 - DNA, 579 bp, Homo sapiens
ctgtacttctgatacccttggttgttttcagctaccatcagttataagacttcagaaaggtcttgtttgtgcctgtcttcagaaaaaataaagaaaagaagggagagaaagaagggcaggaaggaggaagataggctatattgcctttggtctggaatttcagccacaattccagccttgtatttgctaaacacctgtttctggccctctagtttaattctcctgctgtcctaaccacttaatgctagatccatctttgttctctgatctctgacattgaacttggctgaaatttgtcatactctattctctttcccataaaggtagtctgtgttcattcctagcaaatgactgtcttktgccaaaggtcatccaccatttagtcaagcttccccacctcaacagagtctagagaattagattcacaaatcctcccacttatacctctatcgctactgtgcaactccccattctattcataaaactggctactcataagaagaatatctttaggaaatggtttgtggctgtggaaagctcagagatagccctctggctcaaaggaagagttaatttaag

SEQ ID NO: 405352 - DNA, 579 bp, Homo sapiens
ctgtacttctgatacccttggttgttttcagctaccatcagttataagacttcagaaaggtcttgtttgtgcctgtcttcagaaaaaataaagaaaagaagggagagaaagaagggcaggaaggaggaagataggctatattgcctttggtctggaatttcagccacaattccagccttgtatttgctaaacacctgtttctggccctctagtttaattctcctgctgtcctaaccacttaatgctagatccatctttgttctctgatctctgacattgaacttggctgaaatttgtcatactctattctctttcccataaaggtagtctgtgttcattcctagcaaatgactgtcttgtgccaaaggtyatccaccatttagtcaagcttccccacctcaacagagtctagagaattagattcacaaatcctcccacttatacctctatcgctactgtgcaactccccattctattcataaaactggctactcataagaagaatatctttaggaaatggtttgtggctgtggaaagctcagagatagccctctggctcaaaggaagagttaatttaag

SEQ ID NO: 405353 - DNA, 520 bp, Homo sapiens
tttaaaatatgaattattaagatcaatatttttggaaaataagataaacaatttttagttagcaagttttcattccatcttgtcttctctgagtgccatcatagaggtctacttattttctcacatctagttaagaagtattatgaagtacatatargaagtatatatcattcccttgaaaattagagcatggtggccatgcaatcttaggaaaaggataaatgaaaacaaattagtgaaaatttatgttaaaaacaaaaaggatatcaatattagtttaatcgattaattagtaatagcttaactaatatgaactaaatagacaaaaaaaaatgatcctttggatattaattctgagctcattctaatgaagtctctgatgaatcaggataagaatatcaagcctgctgctaatagatgtgtgactctgggaaggttgtcaggtctctggattgtgagtgattcatctgtaaagtagagaggacattgatgtttttgctatgataatttatattctagg

SEQ ID NO: 405354 - DNA, 520 bp, Homo sapiens
tttaaaatatgaattattaagatcaatatttttggaaaataagataaacaatttttagttagcaagttttcattccatcttgtcttctctgagtgccatcatagaggtctacttattttctcacatctagttaagaagtattatgaagtacatataggaagtatrtatcattcccttgaaaattagagcatggtggccatgcaatcttaggaaaaggataaatgaaaacaaattagtgaaaatttatgttaaaaacaaaaaggatatcaatattagtttaatcgattaattagtaatagcttaactaatatgaactaaatagacaaaaaaaaatgatcctttggatattaattctgagctcattctaatgaagtctctgatgaatcaggataagaatatcaagcctgctgctaatagatgtgtgactctgggaaggttgtcaggtctctggattgtgagtgattcatctgtaaagtagagaggacattgatgtttttgctatgataatttatattctagg

SEQ ID NO: 405355 - DNA, 349 bp, Homo sapiens
tcatatatatacatatttctccttgatctgtctgctgaaagaacctggaaacaatggcactttaattgcaaagagcacacgtagtgctcagatcttggtttttaataccattagaaaagtgtaaaagaaaccaaggctccttggagaattggctgaatctaggaacagtgcatgacatagacaagrtaggtccatactgatatacataaatgattaaataaataaataaatgggggagaagtgacaggtctcctatggtgaagaatttttaataccttacagatacaccaccttaagaacgcagagtgtaactttccactcctttagtgtgaactatatacatggtggc

SEQ ID NO: 405356 - DNA, 546 bp, Homo sapiens
cccttttttcttcatttttattgcccttgcacatagctacgctacccccaccaaataacatttctgcataagttttggttcacactctgtattctagggtactcaggctaagagagtggaaaaattaaagaatattagaaagacaataatcattccattaggtaatacgacttsttccttttttatacaaatttaaaatgtctggtttggcattgtaaaggaacaaacaaaaatattttaagttaatatgttgaaaatttatctcaaatttccagctctaggagaaatattataagaaactattggtcttgctgaaggaaaaacaacaaaacccaaatcctcagttccagaccagctgccaaacaagggcaggcaaagaatttcatatgtaggtacaatgtcattgtggaggctggaattttacagcttttatccagaatatgatttggaaggtctgtgggagaataatgacctaacacgtaaaacaacctgtagtttgcctgcaattgtaaacaccatcatgactttaaatggaagaaactgaaa

SEQ ID NO: 405357 - DNA, 635 bp, Homo sapiens
ttacttccattctccctatgcctgccttgatgtcttcatgggaagtttctaaatattattaaagtatgaataaaatcattaaaattttctattttattgatatatagtatatactctaaaggaaaaagcatgcagtgtgcatgtcatgcagtctaaacaagattcgccattcaagccggaatgcactcataagtctcttccatatagatattcttgaattattggtgttcaacactgaacagatttcttatttagataaaatgacagacttagataacttaagcattttcccaatatatgatagtagatatgacagtaaactctgaccacaacttaaaaaaaatatatagttgaatacatagaaaagaaagtgagatctccaaatcagttgttttagcctgtatgaagggtcatagcccaattaatggctctcacattttcagktgaatctgaggtgaagtgataatcacatttttcaccctgtaattgttgtaacagctacccaattagaatggaatttcataggttaagcagagctactaacttgcatttcttatttcaacataattagttaacaaaatgtcaaaatccaatgtgaaaaattcacagaagcagcaaagaaaaaatttctagta

SEQ ID NO: 405358 - DNA, 593 bp, Homo sapiens
ttttattgaataaattaatgaaaattattgacccttatttatgaaaaaagaaaacaaggagacattaaatgttttcaaaaggcaatgaagccagatttctcactggtctgtcacaattactctttatcacactgcacttatttatgtcaaatatgtatcaaaggaattataaggtagacttttattttttagtagtgaacagaaaggaatctaaccctttatcttccccttcaattcttctcttctttcttccatacacaggaattagtaaataagctgaaaatgtgaagtcatgcaaagatttgtttgaaaagcaaaacgtttcaataaaaggtcttcctggattaagaatctaagtatgattttcatgaaccaccaccactaaagatcagataatattattcatgctgcaatttgaaagagaagcaagaggaagatcagaccgactctgccactgcataaaatcayccccctgggaatgaacaaagcattccgagaatgagaaatggaatattggtgacttcctggctaacagttccatctagagtcaactgcggtcatgattttccaataacagcctgttactaaaccaa

SEQ ID NO: 405359 - DNA, 575 bp, Homo sapiens
aaaatacattcacagaattatcagtagaataattaccaaatgttctattgcttacagatacatatgtgtacacacaaactagagattccattctaaggaggycccttttgtttagataagcataatgatggttttatgtgtgcaagtctggagataacttgtttagagtagcactggggcagagaggatgatctgtaatggagacatgtcctagacaggataagcaaagttaggctgggcagcgtacaaccctcacagctcggtgctttagctgtcttaacataatgagggcttctttttccacaaatcaccttttgagtttgggcagcattccaactcagcagtccaggccacttctgtcctaggtctctactgtcaaaacccaaggtcttctcatgattgccatagctgtagaagagagaataaagggtctcatatatacaataaaatgcttccacctggaagtaatgcatttcacttctgtcacagtcctttgaccaaaactagtaccataatcccacccaatccaaaggagctgagaagtaagggttaccaaatatccagaatgataagaa

SEQ ID NO: 405360 - DNA, 575 bp, Homo sapiens
aaaatacattcacagaattatcagtagaataattaccaaatgttctattgcttacagatacatatgtgtacacacaaactagagattccattctaaggaggtcccttttgtttagataagcataatgatggttttatgtgtgcaagtctggagataacttgtttagagtagcactggggcagagaggatgatctgtaatggagacatgtcctagacaggataagcaaagttaggctgggcagcgtacaaccctcacagctcggtgctttagctgtcttaacataatgagggcttctttytccacaaatcaccttttgagtttgggcagcattccaactcagcagtccaggccacttctgtcctaggtctctactgtcaaaacccaaggtcttctcatgattgccatagctgtagaagagagaataaagggtctcatatatacaataaaatgcttccacctggaagtaatgcatttcacttctgtcacagtcctttgaccaaaactagtaccataatcccacccaatccaaaggagctgagaagtaagggttaccaaatatccagaatgataagaa

SEQ ID NO: 405361 - DNA, 627 bp, Homo sapiens
tttgtccctttttttatttatcttttcttgtcatgcattaggtactgggaattgatcccaaaattctttattttcaatccaggtttctttccaatacacctgctggtgcccattagcttatatatatwttttattcattgtctgggtgtcacacagagagtggctctggaaggtatctggaagaatatagtttaagagagaatacagaactgtaggcctaaccatcataaaatggttcctcatattgggaaatataatgaatcaacagtgaggagctcttggtgaccaagtcaatattttttcatcatcttatagtaaaataccgaggccacatcacatagtggtctagagaatatctcttttaaaagtgttcatagtaatattagctgtttaactttggtgaatttttttccagacattattttgcaaaatatggcctccctaattaatgaggtttttttttgttgttgttctggcaatttctttctaatatatacacatatatgacaaaatcttttttaaaaattgaaaaaaagcttggaatttatacaattaatataatattggcctgggtacagtggttcacacctgtaatcccagcactttgggaagccaaggaaggcagat

SEQ ID NO: 405362 - DNA, 603 bp, Homo sapiens
aaacaaatttcttgtgtcaaggaaactttctataccttaattttcatttgaatttgtgcaccagctttttgagtacccacaaaataacaagagctcagaaataaggcctgagaaggtccaacatttaaaacttgggcaaagaaggattaagccacaaaagagcatgaaaatggagaaaggaggaaaacaaggagattgttgtgtcatagaagataggaagagagtgcttccagaaagtgtggacttaaaagctactgagaataaataataatagtaaaaactgaccattgagctaaaaaaaataaagtttgttaatatgttaaagcctattgacatttttgctatatttctagaaatttaaagtttttaatattatcaaatagatgccaattttgagagaaaaaatgataggaaatttagataaaaggagaaaggaaataataaaaactacctgaaatctsatcattagagataaagctattaacattttgatgcacgtctttctagacttcttatgcttattaatttcaggtgtcatttcttaattaaatgcttcagttttaaaatttatcctggtagatatttaattttgccttatacaaa

SEQ ID NO: 405363 - DNA, 642 bp, Homo sapiens
tttttaatattatcaaatagatgccaattttgagagaaaaaatgataggaaatttagataaaaggagaaaggaaataataaaaactacctgaaatctcwtcattagagataaagctattaacattttgatgcacgtctttctagacttcttatgcttattaatttcaggtgtcatttcttaattaaatgcttcagttttaaaatttatcctggtagatatttaattttgccttatacaaatgtgtttctaaactacagctactactactacaattactaatttttaatacttatcatattatattatatatagtgttgactttcacagtgaaataagcaatgagcttaatctgatggtcttgctgcttatctggccttggagaaaatatttataaaaatgctttgtaaatagtcaggtgttcatattcatctcttcactcaacaaagatttatagatcacctactatctgctggtcactgtgccagatgtggacaataaaaaatgagtaagacaaagttatacaaaattctaagaagtttagtatacaatgaaagcataaatgggaggacctactttagactgagggtcagacagccctaccttggaaacctacacttgaacagaggcctgagagaagtata

SEQ ID NO: 405364 - DNA, 642 bp, Homo sapiens
tttttaatattatcaaatagatgccaattttgagagaaaaaatgataggaaatttagataaaaggagaaaggaaataataaaaactacctgaaatctcatcattagagataaagctattaacattttgatgcacgtctttctagacttcttatgcttattaatttcaggtgtcatttcttaattaaatgcttcagttttaaaatttatcctggtagatatttaattttgccttatacaaatgtgtttctaaactacagctactactactacaattactaatttttaatacttatcatattatattatatatagtgttgactttcacagtgaaakaagcaatgagcttaatctgatggtcttgctgcttatctggccttggagaaaatatttataaaaatgctttgtaaatagtcaggtgttcatattcatctcttcactcaacaaagatttatagatcacctactatctgctggtcactgtgccagatgtggacaataaaaaatgagtaagacaaagttatacaaaattctaagaagtttagtatacaatgaaagcataaatgggaggacctactttagactgagggtcagacagccctaccttggaaacctacacttgaacagaggcctgagagaagtata

SEQ ID NO: 405365 - DNA, 642 bp, Homo sapiens
tttttaatattatcaaatagatgccaattttgagagaaaaaatgataggaaatttagataaaaggagaaaggaaataataaaaactacctgaaatctcatcattagagataaagctattaacattttgatgcacgtctttctagacttcttatgcttattaatttcaggtgtcatttcttaattaaatgcttcagttttaaaatttatcctggtagatatttaattttgccttatacaaatgtgtttctaaactacagctactactactacaattactaatttttaatacttatcatattatattatatatagtgttgactttcacagtgaaataagcaatgagcttaatctgatggtcttgctgcttatctggccttggagaaaatatttataaaratgctttgtaaatagtcaggtgttcatattcatctcttcactcaacaaagatttatagatcacctactatctgctggtcactgtgccagatgtggacaataaaaaatgagtaagacaaagttatacaaaattctaagaagtttagtatacaatgaaagcataaatgggaggacctactttagactgagggtcagacagccctaccttggaaacctacacttgaacagaggcctgagagaagtata

SEQ ID NO: 405366 - DNA, 551 bp, Homo sapiens
aagaggcggggccttttggaaagtgatgaagccatgaagactctaccttcatgaatgggattggtactcttgtgaaagaagwttaacggagctgccttgccccttctgaaattgttgtgaggacacagcagccaccatctttggagcacaaggtgacttttcatcagacaccaaatctgctgataccttgatcttggacttttcagtctatagaactgtgagaaataaatttcttttttttataaattactgagtctgaggcatggcatctttcaataaatcatgaccaatgttaatattactaagattttcagtttcatattttgaatttttaaaaattaagttttaaaactgaagttgtatcatagtttatgaatttaatacaataagcagaattctttggcaatatggaaacaagtaaaagcttaaaatagtgagactgaagttctaaaaattcttatttcctcttctaggttatggtttaactcagcagaatttgttgaacaactacgacatgctggggatcatggtatgtttagagacacaaaagt

SEQ ID NO: 405367 - DNA, 517 bp, Homo sapiens
tgttacattccatcaaagagtattgatattttgtatatacatttacaaatgtacatgtacacaataataaaaataatttttttctcagacctgcctgcartcatgaagggtttcttctttatgtgcttataacagtgtagacaaggggactcccaggcaagatggccaagtaagaacagctctggtctgcagctcctagcgagaccaatgcagaaggccagtgatttctgcatttccaactgaggtacccggttcatataactgggactggttagacagtgggtgcagcccacggagggtgagccgaagcagggtagggtgtcacctcaccctagaagtgcaaggggtcaggaactccctccctagcgagaccaatgcagaaggccagtgatttctgcatttccaactgaggtacccggttcatataactgggactggttagacagtgggtgcagcccacggagggtgagcagaagcagggtagggtgtcacctcaccctagaagtgcaaggggtca

SEQ ID NO: 405368 - DNA, 620 bp, Homo sapiens
cctgttattaattcttagactttgttgtgcacaagggtattgtcattcaattctgtaggcagtcaagaatcagagtcggtgcttttagaatccaagtacataggcttaagctctggtccctcccgttattgattctgcaatcttgagaaagttaattgacctctctgaaccttagctttttaatctgcaaaatgagaaaaatcttaaataataacaacctcagaggattactatatgcatttgatgcataaaggtacttagtgtaatacctgcctgccacatcacaagaactcaacaaattatagatatttttatttcatgtaaatgcacatgtttgtatacataaatattcatacatgtataaatatattttacacatgtatataaagtgtgtaatatagacacatatgtatgtatatatgtatgtgtatatatacatacatatattttgagttyctgagtttttaagctgtcagatattggtgaggagaaatgcttagttaggaggatgcctgtaacagagcttctttttgggcttctgcctgtcattgctaactcaatattcaacttacatagcatttaaattgaattactgctgcctgcacaattatgggctttct

SEQ ID NO: 405369 - DNA, 558 bp, Homo sapiens
agaatggtaagctacatggcaaattgtgcctctcagtgtataaagtaaggccagatttccttctaaaggtgacctgtgagcaattaaggttttcagtattaagtgtttaaattaattctttataaatagatgtaaaacagcaaaataattgaaaaaaaaaagtcatttttatctctacgtttatttttcaacaaattaactgtcttcttttagttgtcaaatactaattttattttatgtaaaaggatttattatatttgctaacatctcaacaacttatatttcaacaaaatagtaattggatttacctaaataaatataactacttatggggaaaaattaaagttcctaaatgatttgaaacaatcatgtatttgatacatacacacacacacacacacacacacacacacacatatacatacatatatatatatatatatatwttttttttttttttttttttttttaagacagagtttcactcttgtcacccaggctagagtgtctgagtgccagagtgacacatttacagcatgtgttggctcactgcaacct

SEQ ID NO: 405370 - DNA, 379 bp, Homo sapiens
ggtggctcattcctgtaatcccagaactttgcaaggctgaagtrtggattgcttgaggtcaggagtttgagaccagctggctaacatggcaaaaacccgtcttgactaaaaatacaaaaattagccaggtatggtaacgcacacctgtcattgaagctactcaggaggctaagacacaagaattgcttgaacccatgaggtggaggttgcagtgagctgagaaaacaccactgcactccagcctgggagacagagtgacacactgtctcaaaaaaatatattattaaaatataccagtatatcaataagctttgccatgaagaagaaggatcacttaatagaggtttctgacatggctttgatgctaaagcgacatgtt

SEQ ID NO: 405371 - DNA, 379 bp, Homo sapiens
ggtggctcattcctgtaatcccagaactttgcaaggctgaagtgtggattgcttgaggtcaggagttygagaccagctggctaacatggcaaaaacccgtcttgactaaaaatacaaaaattagccaggtatggtaacgcacacctgtcattgaagctactcaggaggctaagacacaagaattgcttgaacccatgaggtggaggttgcagtgagctgagaaaacaccactgcactccagcctgggagacagagtgacacactgtctcaaaaaaatatattattaaaatataccagtatatcaataagctttgccatgaagaagaaggatcacttaatagaggtttctgacatggctttgatgctaaagcgacatgtt

SEQ ID NO: 405372 - DNA, 582 bp, Homo sapiens
ttgaccacctcagtgctttgctgtctgcttattccttcacccaacaattttgtttgcattccccagaaatctgttctcaccctcccagtcatcctgtcagaaatgaggcactcattcagatctatttttttaatcttctgtctttttctcctctaacttcccacatcaatggacaaatttgcttaayttcaagcctgtaaccttttcttttcaggactaatttattcttcctctctagagttcagagttcttaacttagtaggtccagtccaatcttcactcctccagttaatctatactgtattcattggaggtaaacagatgaatctcaagagccctaggactcaggtgggttaggtgattttctcacataattgggacttttatcccagtgcttccacttctaaatgtttttgtctttctgctgtaattctatacatcaagaaatatacaaccttcacacccaatcttgattactcttgccaaataaactaagtttagcctaaagctgcctctttgcatattttaaaggtttcttgatacacagtgagttgtaacttaattggatgtgtaatctactct

SEQ ID NO: 405373 - DNA, 576 bp, Homo sapiens
ttttcccacgcaggtcacgctcaagcccagacagatagagaagatttgtctttaacgagagaaatgcaccattacttggtcataaattcaacttaatggtaattttagtagggcagcttgcccagggtttgtagaaacacaaatcaaaaatcccaaattccatgcatatcctcctagaaactcttttggcaactccmttccatttgctttttaaggaaatcaatttccttagttatggtccctagttgcttagggtggttttgcacagagtctagaatcactgtggcagcagagaggggagtgggtggcatgctgcttgaactatttttgccaagcattcggccttgacttcagttgtcaaggaggcacaagtgagctgacacacagattcggtagacagtcccaaaaaagtagtatgtggtgaaaatgttcagatgactctgtctaaggaaaaatttttttcaaatcctcctgtccttgactgattccaaactgacaaattctggtcattatgaatctcaggtcacataacaagctctgaatccttacagagttggtttagtccaagctggcata

SEQ ID NO: 405374 - DNA, 525 bp, Homo sapiens
gtttgagggcaggaagcatccagcacaaaagaaagatggaggccagaagattctgccagtttagtccttccacattcctctgcctgcttttatcctagccatgttggcagccgattagatggtgcccacccagattgagagtgggtctgcctttcttagtccactaactcaaatgttaatctcttttggcagcaccctcacwgacacacccagaaacaatacttcacatttttcaatccaatcaagttgacactcaacattaactatcacagtaactgatgactgctatctccattagcagttctttagcttcagaagagtgtaatctggttataaatctttgttagaattacttcgttggttaattttatgtgtcaacttgactggcctaagcaacgcccagatagctggtagaacatttgtcctgggtgtgcctgtgagagtatttctggaagacactaccatttgaatcatcagactgagaaaagaagatacactcttgccaatgtgggtgagcatcgtcca

SEQ ID NO: 405375 - DNA, 564 bp, Homo sapiens
atagcacagactagatcccttataatgaatagaaatttatttggcttacatttctggaggctgagaagtccaagactgagaggccacacctggtgagggccttcttgctgtgttataaaatggcaggaagcatcacacaggtgggagagagagagagaaagagagaggaagaagaaggaagaaggaagaagaagcagaaacagaagaagaaaagaagaagcagaagaagaagaagaagaggaggaggaggaggacggagcagaagaaaacgaygaaggaaggaaggagaagaaggagaagaaaggagaggagagggctaatttttttaaataaaaaattagcaacctctaatataacctctattctcatgaatggattaatgctgccatcgcagtagcattaatccattcatgagagtagagccctcaagacctaattacctcttaaaagtctcatctcttaacactgttgcattgggaattaagtttctaacatataaacttctggggacccattcaaactgtattaccactcattagctgtatgtccttaggaaattgcctt

SEQ ID NO: 405376 - DNA, 613 bp, Homo sapiens
acttcctataaataaaggagaaaaagtgacattaacttgatgaagttttatgtatccatctatttctaacattgggcctcaaccttccatgtcttacgccttaccagttgagctaatagagagcttgaaccttggttttcctgagaagggcatgtataggtggacaggcccttagtacttttsccaaacctcactcaggcatcttctatgtacccctggtggcgtgaataccacagacagctttataatcacacaaagatgagatttgattcatctgcttctatcacagattcattgattgaaaggagatcctgaaaaatccagccttctggcctctagatcctttcctagtaagaaaaaaaatcaatcacattctggattcatcctctgttgttttattgcagtttgttctgttttaatttttgtaaaaaagagacatttatttttcattgtttttcttgttttcctctagagcaaggcagagtttcagaaatcgaagattaggaaatcttataattaattttgagtctgtaaaatcatagacatactgggctgagctcaactcgtagcttttctattttctggctgtgtaaacttgtatgagtggcaatct

SEQ ID NO: 405377 - DNA, 613 bp, Homo sapiens
acttcctataaataaaggagaaaaagtgacattaacttgatgaagttttatgtatccatctatttctaacattgggcctcaaccttccatgtcttacgccttaccagttgagctaatagagagcttgaaccttggttttcctgagaagggcatgtataggtggacaggcccttagtacttttgccaaacctcactcaggcatcttctatgtacccctggtggcgtgaataccacagacagctttataatcacacaaagatgagatttgattcatctgcttctatcacagattcattgattgaaaggagatcctgaaaaatccagccttctggcctctagatcctttcctagtaagaaaaaaaatcaatcacattctggattcatcctctgttgttttattgcagtttgttctgttttaatttttgtaaaaaagagacatttatttttcattgtttttcttgttttcctctagagcaaggcagagtttcagaaatcgaagattargaaatcttataattaattttgagtctgtaaaatcatagacatactgggctgagctcaactcgtagcttttctattttctggctgtgtaaacttgtatgagtggcaatct

SEQ ID NO: 405378 - DNA, 503 bp, Homo sapiens
agactaaaagtcctgggttcctaatttggtgttaacattcactcatcaacaagcaatgatgttatcttaaggatagtgagggttttttttttttggacagggtctcactctgttgcccaggctggagtgtggtrgtgccatctcaggtcactgcaacctctgcctcccaggcttacacaatcctcctgcctcagcctcctaagtagctgggaccacaggcgcatgccaccatgccttgacaattttttttttttttttttttttttttttgtagagacggggttttgctatattgcccaggctggtcttcaactagtgggctcaggtgatctgcctggccttggtctcccaaagtgctggcattccaggcatgagccactgcacccggcctggatattgagttttgcttagaatagaagccctgtgagaccagagatgtatctgtctgtttactgttatagtcccagtgtctagagcagtgtgcaggttattgcaggtgctca

SEQ ID NO: 405379 - DNA, 651 bp, Homo sapiens
tcctaaattcaatgataagtgtgtttgtaatatacagaagaagttaagacacagacagacagaggagatggcaatgtgaagatagaggctgagattggagtgctgtggccacaagtcaagaaagccaaggaatgctgactgcccccagaagctgcaaaaarcaaggattttccctttgcacctccaggagtgtggctctgctgacaccttgatttcagacttgaggcttctagaactgagagaataattttctcttattttaagccacccagtttgtggtaatttgttatggtacccctaggaaaagaatacatctttctgttgaaatctttatctctttaagtatgtattatagtttttccattagatcctttaacgtattaattataattattttaaagttcctgtctgttagtttcaacatctggaccaaattctgagtttgtttaatctcttgacaatgggttgttatgttcttgctttttgtgtatatggcaattttgtttacataccagataatgtgtacaaagtaacactagaaactgagctaaataatatttatgcccagcagtaggcatgcttcttcttctgttagatcatgagtctttgggcagttgaggctctctgatatgtacatgagctgagtttaag

SEQ ID NO: 405380 - DNA, 578 bp, Homo sapiens
ttaatatttcaaattttggatcactttccttatattgcctagaaaagaaggaatcattgtgtttttcaaaatgaatagaatattatttatagtattaaacraggttttactagatatgtagtaactgcatagaagagtcagtgagtgctaacaaagagtaattaattcccctttcactggtagaaatctctttgtttttctcctttttcttttcctttctctcttttcacttatctttgtattcataaaaccaaatgcagaattcaaaatcaaattgaaaatcaaatgcttcccacatattttgaaaagtgttttaagagattgagctgttagcttttaacaactagttggccagttatttggatagcttcactgacaagaactgagatgtcaggagcattcaattcaccaatctctagctatgctatgaatgggttatttatagaattccttgcatctcagcaactcaagcgccctgatgttgcacccttacagcaacccagggtaaaaaaaatctgaatctttatctttttaaaccttataccacccctttgaggtaggtagatgacatattgccc

SEQ ID NO: 405381 - DNA, 615 bp, Homo sapiens
cttccaggcaccctgtccccagcgttcttcaaggtgtcctgatccttcagcacaacaaagtggtcctggcctcacagcttcaagaaagagggcatctgacttattgaaaacaagatggtggctctgttaatttctgaattacctttagggtcatttttcctcttattgaaggatagcacatgttcacagccaaaagactctttcatcttttcccccacaaatcctgatgagtctaataaccttccttcctttagtcctttctgcatctccttcagtttaaactggcaatgttgctgcttatatagtcccataagctcttcattgaatgacagtccaggcacacccttggtgttctcttctgaatactttttcatttttttgcaatatacgtrggctgaaactgttccaaatcttcaaattcaggttcctttttgcttaacaattccttcttcaacttatcctttaacaatcccttcttcaactgtctcttatcaggttttagtataagcagtcaggtggaagcaagccacttcttaaacatttgcttagacatatcctcaactaaatatccaatatcatcatttgcaagatctaccttccacaaacactagaacc

SEQ ID NO: 405382 - DNA, 569 bp, Homo sapiens
atcataatacttatcacattgttctgtgactgtttatatacacctctctccactagactataattcctgtgggactgtgtcctatttatctttctaccccagcatctaacacatgcrtagtccatagcagttattcagtaagcttatgataaatgagttagacagggaagctagattcctctataatccaggtacactctaaaggtaaatccactatcaatcaacaagtctataaattgccagtgttcgatgccaaaaaagttttctccaatattagttggaaacacacatgcatttgaaactttccagtctttttggctcatccatattccttaacaataccttagttgaaccctccacccagcataggaccacagaaacacacatttacagagtttaagtacaagaatctcctatacacacacatggacattgtcatactccccagcccaggtaaatcaaagggaagcattcttttctccagcttctccaacctggaaacacaagcagaggcagtgaaattccatacctaatacaatttatcctctcttgcctattttctgtaagct

SEQ ID NO: 405383 - DNA, 538 bp, Homo sapiens
  misc_feature (1)...(538): n = A,T,C or G
acacactgtgcttgtcatgaccaaagccataaaacaggtaatattctgagaaggacttcactagagtaaagaaattgatttgcatgcaactgacagacaaggtcgcaccatgttcacatctcagggaatgcaatatttcattattttaattaaactttttgaawgataaaattttgtggaggggaataaagtaggttcaaggttattatttggaaatggaactactctgggatcaatttgtaatgtccagaaaagatgaagatgaaaatatatcatgtaggagggtgattaataactgacatattaaaaattcctggtaaatccagatatagaatccaagcttgccttctgaatcatggtctttcccactacctcacttcttttccttagccgtatggaatactgatcaatttaagaaagttatgcctatattcaaatgtaaacgaaaatatgctataggatatgaccagagttacctaagggcctatacttactaaaatgccaccctcttttatctttccttgctataaanaaaacc

SEQ ID NO: 405384 - DNA, 585 bp, Homo sapiens
ctatgaaattccctttacaaagctataaaaaattaattactcagtaatacatttatgcaagcagactgatgtttaccagctatatgactgaaaatgtcaggcaatcatattgagcttttgttttttcatctgaagagtaaacataatgcaaggaattattaaagggctaccataggaataaaagagctaatggtataaaacattattagtattattagtattgcatagtatctatgcaatagtgtaagtcagaaactgaaatggcagaaatctacttttaataaccatttacatttaatgtaattattggtatttttgagccatttttgtttttcatatttatactacttttgattgtttttctttttcctgatctatggattccttgaaaatgttttttgattccattttagttgatctgtaaattttttgcgtgactctctgtacagcattgttagtggttgctcygtgttacattatgcatacatagcttttcacagcctagtgctgtgcacattttaccctattcagtaaaatatggaaaccttgctttcctgtctttttaactgctccccctttcccact

SEQ ID NO: 405385 - DNA, 585 bp, Homo sapiens
ctatgaaattccctttacaaagctataaaaaattaattactcagtaatacatttatgcaagcagactgatgtttaccagctatatgactgaaaatgtcaggcaatcatattgagcttttgttttttcatctgaagagtaaacataatgcaaggaattattaaagggctaccataggaataaaagagctaatggtataaaacattattagtattattagtattgcatagtatctatgcaatagtgtaagtcagaaactgaaatggcagaaatctacttttaataaccatttacatttaatgtaattattggtatttttgagccatttttgtttttcatatttatactacttttgattgtttttctttttcctgatctatggattccttgaaaatgttttttgattccattttagttgatctgtaaattttttgcgtgactctctgtacagcattgttagtggttgctccgtgttacattaygcatacatagcttttcacagcctagtgctgtgcacattttaccctattcagtaaaatatggaaaccttgctttcctgtctttttaactgctccccctttcccact

SEQ ID NO: 405386 - DNA, 585 bp, Homo sapiens
ctatgaaattccctttacaaagctataaaaaattaattactcagtaatacatttatgcaagcagactgatgtttaccagctatatgactgaaaatgtcaggcaatcatattgagcttttgttttttcatctgaagagtaaacataatgcaaggaattattaaagggctaccataggaataaaagagctaatggtataaaacattattagtattattagtattgcatagtatctatgcaatagtgtaagtcagaaactgaaatggcagaaatctacttttaataaccatttacatttaatgtaattattggtatttttgagccatttttgtttttcatatttatactacttttgattgtttttctttttcctgatctatggattccttgaaaatgttttttgattccattttagttgatctgtaaattttttgcgtgactctctgtacagcattgttagtggttgctccgtgttacattatgcatacatascttttcacagcctagtgctgtgcacattttaccctattcagtaaaatatggaaaccttgctttcctgtctttttaactgctccccctttcccact

SEQ ID NO: 405387 - DNA, 599 bp, Homo sapiens
acataatttttggttcctatggaagtgctttgattatgtaggcagttgttaaatttggtgttcctgtgggtgggatgattggtggagccttctattccaccataatgctctgccacttctatagtgtttttctctttgacttttgacagtttgagtataatgtgacatgaagaaaatatttttgggttgtatctatctaagcttcctgtatctaggtgtttaactctcttgctagacttgagaggttttcttctattatttcattatataggttttttatgtttttgcctttcattttgcctttgggaaaaacccaaattcaaaaatttggttgctttatggcatcccatatgtcatgtaggatttgttcatctttttcacattttatccctctttttttgtctgactgggttatttaaaatatttgttttcaagttctgatattctttcttctcaytgacctattctatttttgaagctttcagatgtatttttctttcatttattgatttatttatctccagcgtttctgtttgattcttttttatgatatccatttcattgttgaatttctctttaatatcctgaaatggttttct

SEQ ID NO: 405388 - DNA, 599 bp, Homo sapiens
acataatttttggttcctatggaagtgctttgattatgtaggcagttgttaaatttggtgttcctgtgggtgggatgattggtggagccttctattccaccataatgctctgccacttctatagtgtttttctctttgacttttgacagtttgagtataatgtgacatgaagaaaatatttttgggttgtatctatctaagcttcctgtatctaggtgtttaactctcttgctagacttgagaggttttcttctattatttcattatataggttttttatgtttttgcctttcattttgcctttgggaaaaacccaaattcaaaaatttggttgctttatggcatcccatatgtcatgtaggatttgttcatctttttcacattttatccctctttttttgtctgactgggttatttaaaatatttgttttcaagttctgatattctttcttctcactgacctattctattttygaagctttcagatgtatttttctttcatttattgatttatttatctccagcgtttctgtttgattcttttttatgatatccatttcattgttgaatttctctttaatatcctgaaatggttttct

SEQ ID NO: 405389 - DNA, 597 bp, Homo sapiens
aaatggggaaaccctttgtaaaagcataatttgggttacacaggtgggcagaaggatgatcaaatgctaacagcagtggcaacttacatttatttgggtaggtttttttccccctctttatgagacmgagtctcgctctgctgcccaggctggagtgcagtggcgcgatcttggcttcactgcaacctctgctccgcctcccgggttcaaacgattctcctgcctcagcctcctgagtagctgggactaaaggcacccatcaccacacccagctaattttgtatttttaatagagacgatgtttcaccatattggccagactggtcttgaactcctgatcttgtgatctacccaccttggcctcccaaagtgctgggattataggcatgagctaccacacctggctgggtgatttttaaagttctggcttttaacctttagaagtgtgggttgcagataaatttaaattacattattattacagaaaggagatgtgatttcactccttttctctaatatggatataaaatctgccagatcctgcagcaggttcatttcaggtacataggcatccttgtttatcccagaacccaaatg

SEQ ID NO: 405390 - DNA, 562 bp, Homo sapiens
tgccagatcctgcagcaggttcatttcaggtacataggcatccttgtttatcccagaacccaaatgggattctgtagtgttgacctgtgagtatgctgacctcagctgtagctccttggctaggggatggtgcaggtagtggggagaggagrgatagctgatccctgaaaggaaatgaatggggatacaggccagaagtctgtccacagaaactcctgggcctctcaattatccatgatatggggtgaaaatggagcaatcatggggtgaacaaagctccagggtggatggcatgggttcttctggtcagatgagtcccaggagttcagcatgtcaaatcatttgttccattaaacccctgcttgcaacagcccagcacatgggtgggcatgccttttactgagttaccatctactaattagcttttttaattgagtgtctactatctgacagacactgtgctacatgctttgcatacattttcagaaaaaaattttctgcagcatcttgatgaggtgggtattgcctccactgcccagataagaaaataagggtttggagc

SEQ ID NO: 405391 - DNA, 458 bp, Homo sapiens
agatgtgatgttttccccccagtgaagcaactctggaacaagaaaagcatgatgaggaggagaaattcagattacagaagaatggtggcaattctttcatttataacttgctaaagaatgttgaatcagttccttaatgagcatgcagaactgaaagtttttatgggagaacattgaacgttgtttatactggatgaatgaatagcgttagagtaaatcrcttgtccttattctattgggcggctttggttatttgaagtagattttcttttattacctttccaatgtcctacacaacacaaacctacagcattttttagagagaacctggcctcaatgggaactcacctgacattggaggcagacttgggacatatcaaattgcctatgtcacgagtacctttgataaaatgatctcagtatagctaatttctcttgagttatgtctcatgataaac

SEQ ID NO: 405392 - DNA, 578 bp, Homo sapiens
cactcctgagtcaggctgaatccaacccttctgatgaggggagaaagcaaatgcactccaaaactggcagggatgtatttcaagaagtgttcattctttttttttcttttttaataaaaaaagaattgttcttttaatttctttaacgctaacaaaactccaaagaaatgaggaaagaagacatctgctgcttgagaaagacttccatttcctaagtcccagttcctttttactccgggaagatctaattttatctaggcttcccgaatgcagtcacacagtggggactgctgagattggggctctggcagggggattacaagcagagcttttgttttgatctcactgcttaggttaatgcatcatgactcctccacgggctgtttcgcgggacgctgctatcccactgtctgctagggaagaaaatgtctcgtgaaaataaatcaaatgcagcagtatttacaaatcctgagtcggattyccatcctgtacaacaggatgagaatttgacccattatttacaccagtaagctgagaatgacatcaaaagctctctcattatctccgcaggggagata

SEQ ID NO: 405393 - DNA, 508 bp, Homo sapiens
tggtatttgctaattgtgattgctgctgtgaagaattagacacaatgaggaagtgtccaatgactacagggtgggtggaggatatggcttcagaggttgtgaagtcaggaaaggcctctcaaaagggagcatttcagctgaatcctgaaaggtgtgtgaggagacttccaagactgagagaatagaaaatgcaaagtccctggggttagaaagggctgggtctgctcaaggggcagcaattgtcaaatgcagctgagcagatgcgcaaagagagaggtagggaatgactgtctcaaggagagcattggcagcaaaatttgcatctggattttattccagttaaaacaggacgtcaataaatagtttaaaataaggaccgtagagaattgcaagaaaacccccacttcactcctcccttggaccttattccatcctgctacaaattaaatcttgacctgtcttcccyccatctggtatttttcattcaacttctgatcctgacagtgat

SEQ ID NO: 405394 - DNA, 598 bp, Homo sapiens
atacatgcgtttcgtactttgatgacaatgataaaagcaatcctacacacaacttcttataacatgctgtgtcattcacatacatttgctcttgcatgaagaacaagctattgggggaaggtatgaaaacttagagcccatttctgatagaacctatgttccaaagccaaagcaatgtcttccttcctaaagtgagaagcaccgttctggtgttgacagatcctcttgaacaacaggctcaaggatgaagagtagcaatagcagtggtggtaataggagatactatccccactccagcagaccagagcattgggctgacagkgttgcagctcttcaagattgcatttcccctacccacaacaccacgttttagactttctgtgtctaaaatgggggctgtgttctgcttggattctggtctgattcatcttcatatctcccaaaatgtctaacacatttcctagcccagagcatctgttcaatgcatatttgttgagtgaataaagaaaggaatatggagtgtctaaacagctgtcatctttaaaaactgaggcactgaaccaagaaaggtgccagctggcatagcttccataacaca

SEQ ID NO: 405395 - DNA, 598 bp, Homo sapiens
atacatgcgtttcgtactttgatgacaatgataaaagcaatcctacacacaacttcttataacatgctgtgtcattcacatacatttgctcttgcatgaagaacaagctattgggggaaggtatgaaaacttagagcccatttctgatagaacctatgttccaaagccaaagcaatgtcttccttcctaaagtgagaagcaccgttctggtgttgacagatcctcttgaacaacaggctcaaggatgaagagtagcaatagcagtggtggtaataggagatactatccccactccagcagaccagagcattgggctgacagggttgcagctcttcaagattgcatttmccctacccacaacaccacgttttagactttctgtgtctaaaatgggggctgtgttctgcttggattctggtctgattcatcttcatatctcccaaaatgtctaacacatttcctagcccagagcatctgttcaatgcatatttgttgagtgaataaagaaaggaatatggagtgtctaaacagctgtcatctttaaaaactgaggcactgaaccaagaaaggtgccagctggcatagcttccataacaca

SEQ ID NO: 405396 - DNA, 566 bp, Homo sapiens
actgttgtctgcaagccatgaagaagatcctcacccagaacagaacctactggtctccaggactttgagaaattaagatctgtggtttaaaccacccaatctgtgatattttgttatagcagtataagsagactaatacagaaaccctgtagcttatcttgtgctttttgaacgcttgctctaggagaagttggctgccatgtcaaaagttcaaatactcgatattactgtgctgtgagaaagctccagacagccaggaggagaagctgtatggctggagagagaggtgccaatccatttccagctctttcagccttccaagctgaggtgccagacaggtgactaaagatgccatcttggacacctaatacatacaaatattcatgtaactccagccatctgactacatggcaggaaagaacaagtaaaaatacctaaatgaattcaatcaatccacaaaactgtaagagatagtaatacgttgttgttatatgccactaaatgttaggatgtcatgtaactcagcaatagataactggaatgttataaacaggggtggaaaagat

SEQ ID NO: 405397 - DNA, 566 bp, Homo sapiens
actgttgtctgcaagccatgaagaagatcctcacccagaacagaacctactggtctccaggactttgagaaattaagatctgtggtttaaaccacccaatctgtgatattttgttatagcagtataaggagactaatacagaaaccctgtagcttatcttgtgctttttgaacgcttgctctaggagaagttggctgccatgtcaaaagttcaaatactcgatattactgtgctgtgagaaagctccagacagccaggaggagaagctgtatggctggagagagaggtgccaatccatttccagctctttcagccttccaagctgaggtgccagacaggtgactaaagatgccatcttggacacctaatacatacaaatattcatgtaactccagccatctgactacatggcaggaaagaacaagtaaaaatacctaaatgaattcaatcaatccacaaaactgtaagagayagtaatacgttgttgttatatgccactaaatgttaggatgtcatgtaactcagcaatagataactggaatgttataaacaggggtggaaaagat

SEQ ID NO: 405398 - DNA, 518 bp, Homo sapiens
cagcatatcaaaattgtagatgcaggtaaaacagaccttggaaggaaatttttagcattaaatgtttatactagtaagacagagaggtttaaaattaatagtctaagctactggtttaagaaactagacaacaaacaccaaattaagggcaaagtgggaaggaagaaatcataaaaataaaaagagaactcaggaaaataagaaatggacaagcaataatgtcaatgwaatcaagggctgctctttcaaaaatacaataaaacaagatacatttctagacaaatggacagagaaaacaaataaaaagcacaaaatactagcaaaatacaagacacaagtcctttggatgccctctaaacactaaatggaaaataaggggatattgtgaacagcttcatgcctttaattcaataatgtggatacatagacaactcctgtgaaagacacacggtatcaaaacttactcaagaagaaacaggtaacctgaatagcttcatatctagtaaataaattgaatt

SEQ ID NO: 405399 - DNA, 565 bp, Homo sapiens
aaaattgctttcatggaaacatctaagtcaaatattcgactttagggccttcagagtgaattttaaatgagaagaaaagtgatatcatttgagatgaaagaaagccctaggccagcatgccctagaatcttttgatacagagcagacttcggagttaggtgtgaattggaaatgtcccagatgataggtagtaggtratcagaactattacattttgcacctgacacaggtattgcttcctccaacaatgacagcagcagagcctgagcaatttcaacatcttaatccctttccctttctttctgaatccagggaatttagtctaattcttcatgccttcccttaggaattatgaagtgtcagctaccacagagaatatgcaagtggctcagtataagaaatgtttgctgcaattcaggggactatgtaattgagttaacttgtaggaaacatgtttacttcctggactagaactgagagtctgaccatgggaaggtatcaagcaataagtactaggtggactctaatgcaaatcatacatcacatgctgctgcagggagcaaat

SEQ ID NO: 405400 - DNA, 569 bp, Homo sapiens
ctatgtattaattatgccactaaattgcaaaggaaagaagccaattctaatgaattgtaaccatagtttcttttgcgtgttacatattagaagtgggtagcactttaaattaccatacacaaaacagcatataattaattctgaataaaagataatgtattcttgctaaatacgagttattttaaaatctcttaatgaagaactaagcatatgctgtgttgyactgtgaaaatgtttagcatatgccattagagccaacattttgcatttattattgtatttattttcaataataatatattatttaagtgaacatacaaaaaatttaatcactaacattccgaatgtggaaaatatatgcaaattacaggaaactttttggctccccctaagttgtcactaaataactttttgatgacatggtgtgattgcaatttgtaataaaatgagaaaaatggaaaagattgttacttttaagtggcagaacatatgcacaatgcattttaaaattcagatacggaaataaacatttctattctgaaaactgacatgttctaagttttcgctta

SEQ ID NO: 405401 - DNA, 562 bp, Homo sapiens
acaccataatttatgacacatagtgttctttcctagcaagccaaagcaactggagaaacaccaatagttataaaactaaacaaaataaaaatgcattcttgtccaggtgaaacaaaacatttcttgatacttgatgtcagtagaatttctcccacagagtctaataaagaaatcaatacmttaaacaataacccaaaaataaacagaaaactacacacacacacacatacacacacacacacacagtagatatgtatttatatataaatatgcaggtgtatatatagacacatctctagggttgcttaattcaaacggggacccaagcatagcagtccagttcaataaccacaatctcagccagtgactcttccatggaatttataaaatcctgtcttagtctcagcctctcctttgtacccctctctgtgcttctttaacatggtttcatgatctcctcccagaaggagacacgatgatactgactacaaacagaggactataaaagaataggattaatgcccttatcaagggacttaaaggaggaaatacacctgttttc

SEQ ID NO: 405402 - DNA, 507 bp, Homo sapiens
aatccctcctgtagggaggtaatgttccattctaatcctcttattctaccaaagaggaaacttgagtccacacaagaggagtgagttccttcttgttaacagtgagtgggatgggtatagggtttagacctggtggtctacagatgaaaatgttacacaaatataagagttgatcaatacaaaacatagaaaccttagtggactgtgtctctttgaacaaarctttgccatcttggtctttgctatcacatctattctgaagacctgccttagagtgccaaatttcatatctcttaatgtcatcctcaaattcggtgtagattattctttatctcttataaatcttgtttcttattgaatatgcattagagaagctgcaatgggactccctttttgacatgcaacatacaagaccttaatgctgcataacagagaatggatagtacctattgatggacaaaaactgaatgtatacatcttctttcaacaacccttcaaaacaaactg

SEQ ID NO: 405403 - DNA, 328 bp, Homo sapiens
aaagcatttgacacacaaggataaggtttatgcttactaattacccttattaataaaactaaactcagccttactcttcataccagagggattttaccattaaaatacccttttaaatttgaaagagaacagtgaaaayccaattagaaaaatgctgtcactcctaaggcttcagctcacatttgatgactcttacactccatgtccaggccctacttctacaatgagcgaactgaaaatccatacttctgatgacttacttgaaagtccatccagttgtcacacaaacacctcccatttacaatcccaacccaaactcaattcaatt

SEQ ID NO: 405404 - DNA, 570 bp, Homo sapiens
aaaacatttctttgtatgcatgttgactaaatcataaaaatagtacataacatgatatcaagaaatgcttgaaacaaactttcacaataaagtcagaaaaaaactgtaaaaattgtctgcaatccaagaaaaagcacgtgccctgtgtgtagggggaaagagggaaagcacttgcagtgtgactttatgtggtctttccccaagtattgctacgttttgacctttggcccaactgaacaggtgaaatgcccttcacataagtttcaatccccaagaaactagctggaatgcaggggactgtagacacactcctggaccaaatgkcatcgactctcagaatccaaaatggtccctgccctcattctgagcttacggccccaagcatattctaaacaaagcttttttaaatgaatcgcccattctcattaaaacataaaatgccacatcattttacaattagttaaaattacaggaggaaaaataagcagtttcaactatcaagagtcttacaatagcctggtaagttcaacagaagaaaaaatagaataacattagagtctgggcaaattt

SEQ ID NO: 405405 - DNA, 440 bp, Homo sapiens
gtggtttgtggtttttgcatttagctattttgatctagttttgatttcaatttgtttacagctttacttattcaaaaatatttattactactttaatatttaacattggattttgttgtaatttttcttctaatattttcttcatttttctcttttgttatttatgattattatcattattacattgaaattgctaattcttggttattttgacctatacaactagaaatttttaagctaggaggtccctttttgttaaattgrtttttaacattcttcaggcatgttgtaaattgattttttgtttcattttttcttcaattacttgtttgcctccgagttgtcattctaaaacataaataggatttcagcatttaaatgtgaagacttgaaggcataccttttgaatgaatatatgagaattacattcatgagaaact

SEQ ID NO: 405406 - DNA, 440 bp, Homo sapiens
gtggtttgtggtttttgcatttagctattttgatctagttttgatttcaatttgtttacagctttacttattcaaaaatatttattactactttaatatttaacattggattttgttgtaatttttcttctaatattttcttcatttttctcttttgttatttatgattattatcattattacattgaaattgctaattcttggttattttgacctatacaactagaaatttttaagctaggaggtccctttttgttaaattgatttttaacattcttcakgcatgttgtaaattgattttttgtttcattttttcttcaattacttgtttgcctccgagttgtcattctaaaacataaataggatttcagcatttaaatgtgaagacttgaaggcataccttttgaatgaatatatgagaattacattcatgagaaact

SEQ ID NO: 405407 - DNA, 440 bp, Homo sapiens
gtggtttgtggtttttgcatttagctattttgatctagttttgatttcaatttgtttacagctttacttattcaaaaatatttattactactttaatatttaacattggattttgttgtaatttttcttctaatattttcttcatttttctcttttgttatttatgattattatcattattacattgaaattgctaattcttggttattttgacctatacaactagaaatttttaagctaggaggtccctttttgttaaattgatttttaacattcttcaggcatgttgtaaattgattttttgtttcattttttcttcaattacttgtttgcctccgagttgtcattctaaaacataaataggatttcagcatttaaatgtgaagacttgaaggcataccttttgaaygaatatatgagaattacattcatgagaaact

SEQ ID NO: 405408 - DNA, 604 bp, Homo sapiens
ttttccacatggaccagttcagcctgacatcaagaattcagttctgtcccccaagaatgccacactcttctgtgtgcctggtctttttatccactactgtcttgctcaaaataactgttccttttatcataacagttgtacttctcaggcctcaaaatataattcaaaagtcatctcttcagggagaccatccaagacctctcccatcatctcttgtgtgacccaccacactgtatatttgtatagmaatacataacctactcttctgtcatgatttgttgacataaccactttgacctctgtgagactgtgaacttcttgagaataggggatttttgtctgattcatctcagtctctccaaggccagaaacacagcagacattcaataaatatttgttgaacaaatggcataactgtgttctgggaaggatttaaccaaaattccagatgttggcttttctgtatttcccaatcttttgtagcctctgcccccaaaatatttcctcatcatgttttctctaccagcctcaactaattttctaagatttattttctagtgggaaagcattggtattataaaacagtagaaatttttaatatgtt

SEQ ID NO: 405409 - DNA, 604 bp, Homo sapiens
ttttccacatggaccagttcagcctgacatcaagaattcagttctgtcccccaagaatgccacactcttctgtgtgcctggtctttttatccactactgtcttgctcaaaataactgttccttttatcataacagttgtacttctcaggcctcaaaatataattcaaaagtcatctcttcagggagaccatccaagacctctcccatcatctcttgtgtgacccaccacactgtatatttgtatagcaatacataacctactcttctgtcatgatttgttgacataaccactttgacctctgtgrgactgtgaacttcttgagaataggggatttttgtctgattcatctcagtctctccaaggccagaaacacagcagacattcaataaatatttgttgaacaaatggcataactgtgttctgggaaggatttaaccaaaattccagatgttggcttttctgtatttcccaatcttttgtagcctctgcccccaaaatatttcctcatcatgttttctctaccagcctcaactaattttctaagatttattttctagtgggaaagcattggtattataaaacagtagaaatttttaatatgtt

SEQ ID NO: 405410 - DNA, 475 bp, Homo sapiens
ttttaaaattttagttcttcttaaattgatccataaatttaagataagctcaataagattcacaaaagtacttgtagggcacctgaaaaataattctaaattatatcagaaagaatraaaaaagcaagatttgtaaaatagtaataaaataaaaataatgcggagaaaagcatctgtcaggtttcaacatatatatgtataaaattattaaagaaaaatatgataccagtaaatagacagaatgggaagaatagaaagttaaaaaaatctaatcataaaaaatgtagaagacaataaagatacccttacaaagcagtgagacatgactaaatatttcataaataatatttttaaaatgcccaacaggtgggggaaaaagatatataagaaagaagaaaagataagttaatgttgatatcaatttgggtgaggaacatcttgctaaggataatagtaaatagacaaaaactgatac

SEQ ID NO: 405411 - DNA, 447 bp, Homo sapiens
ctgtgaagatttttaagtcmtttaaaggtgttagaagggtccatagtcattatgtaacatatctttctgcacaaagagaatatagtaatcaaaccttcttgggaaatctttccattagtggctgctgggttaaagtaaaaagctcaaaatgaactcaagacagatctgggctgaaatccagtgttcaatactgactgtccacgtgactttaaagaagtctcatcattgctctgagcctcactcttcccacctgttcaattctagagcagtcatagccacaaaggatgtcagtgagaactgactgaaataactttgtaaaacctgttgtatgaggctgaaaagatgctcagtaaatgttaattatctctcttttcctcagaagaatcagtgttcaaagatccaaaagcaacccaacaccacttacagttgggaattccttctttcctg

SEQ ID NO: 405412 - DNA, 601 bp, Homo sapiens
taaacttcacactgtgaagatttttaagtcatttaaaggtgttagaagggtccatagtcattatgtaacatatctttctgcacaaagagaatatagtaatcaaaccttcttgggaaatctttccattagtggctgctgggttaaagtaaaaagctcaaaatgaactcaagacagatctgggctgaaatccagtgttcaatactgactgtccacgtgactttaaagaagtctcatcattgctctgagcctcactcttcccacctgttcaattctagagcagtcatagccacaaaggatgtcagtgagaactgactgaaataactttgtaaaacctgttgtatgaggctgaaaagatgctcagtaaatgttaattatctctcttttcctcagaagaatcagtgttcaaagatccaaaagcaacccaacaccacttayagttgggaattccttctttcctgccactattttctttgatataaatggacaaattccattgtccgtgtaatttcctttcatatttagatccatttactttttcataagtaaattcattagtgcctccctaggtatattgggaacccccagtgtgtgctcaatgaag

SEQ ID NO: 405413 - DNA, 518 bp, Homo sapiens
gacccgattgttttatagggamgagtgaatattcctcaaagagagaaaatcagagtctactcaatttccaattacctgagccatttggtcagaaaatcacacaaatcaattgctgaaacctagaatgtgcttaatgggtcattcgaagagcacaacagacacagaaagaccacgtcatctaaaatgaaacttattctatatagcaacactaatgttgcccaaataagtcactaagaattacctaaggaagggaattaaaacattgcaaaaatacatttggtacctcattctgaaaactaagaatcctggtaacaaaaataccactgaatttcagccaaaaagcatgtcttgtttgatgactgcttcatacctctcccacccgcaaccatccagcttgatcatattgaaagcttcatgttgaaagtttctgaccacgttgtttcccaatgtctgggactcttaccagcagtggcccataagatgacatagggtggtttataggtaatttgataggtgag

SEQ ID NO: 405414 - DNA, 616 bp, Homo sapiens
tgtcttgtttgatgactgcttcatacctctcccacccgcaaccatccagcttgatcatattgaaagcttcatgttgaaagtttctgaccacgttgtttcccaatgtctgggactcttaccagcagtggcccataagatgacatagggtggtttataggtaatttgataggtgaggttgtcaaatgatattaacttacatagtgagataattctttcttttccaagtctttaaatccttgacacaccaagtagaacatctccgktttaacacatctgttctgcttcacaatctcttttgtgagatattatgatacaactctagctagaatgtaatggcatcgttttggtttgattgcatttatttttaagttaccttctatttttggcaagtgacaagataataagggaaatgtttccttttttaaaatgcttctttttttaaaaaaaaagaatgcatatatattaaagatggtctatttaaagaaaaacaaatgaaagcagtaaaattttacacaaatatgaaagaaaaaatgagtagtagcatttgaatggctgtagttatagggaaattgatagtaaacactgcctaattttgaatgagaggagttacagtgaa

SEQ ID NO: 405415 - DNA, 616 bp, Homo sapiens
tgtcttgtttgatgactgcttcatacctctcccacccgcaaccatccagcttgatcatattgaaagcttcatgttgaaagtttctgaccacgttgtttcccaatgtctgggactcttaccagcagtggcccataagatgacatagggtggtttataggtaatttgataggtgaggttgtcaaatgatattaacttacatagtgagataattctttcttttccaagtctttaaatccttgacacaccaagtagaacatctccggtttaacacatctgytctgcttcacaatctcttttgtgagatattatgatacaactctagctagaatgtaatggcatcgttttggtttgattgcatttatttttaagttaccttctatttttggcaagtgacaagataataagggaaatgtttccttttttaaaatgcttctttttttaaaaaaaaagaatgcatatatattaaagatggtctatttaaagaaaaacaaatgaaagcagtaaaattttacacaaatatgaaagaaaaaatgagtagtagcatttgaatggctgtagttatagggaaattgatagtaaacactgcctaattttgaatgagaggagttacagtgaa

SEQ ID NO: 405416 - DNA, 404 bp, Homo sapiens
ggctgtagttatagggaaattgatagtaaacactgcctaattttgaatgagaggagttacagtgaatcagtcagcaaaggatggaaagtaacattgtagcagagaaacaagcccggctgcctgggaaacaactttctaattagtgctctggatgttgctgaactaccaaatgtttggaaagagtttcatcttttaaggcgagcatctgcctgccatgctgttgtcatttgcctggcaaacgcttattctgaatgggcatatagtcatggggcttattcctgatctaattttgcagtactctacactaaagctgatgatcccagtttcaacagggttaagcaagttcaatatccttgatacttyttctatcatcttcccacctccatcttcccagagtcaggaaa

SEQ ID NO: 405417 - DNA, 570 bp, Homo sapiens
cctgccatgctgttgtcatttgcctggcaaacgcttattctgaatgggcatatagtcatggggcttattcctgatctaattttgcagtactctacactaaagctgatgatcccagtttcaacagggttaagcaagttcaatatccttgatactttttctatcatcttcccacctccatcttcccagagtcaggaaacaytaccttttcctaaatctaaatctgcccccagcctttccatcatcctgggacccagcagttcctttatccttggctaggttactgagcagcagaaaggaatgatatttataggctgaacatacaggattgctgcaacttctaaaaaatcctttcaaatattagatagcattaaacactggaatatgatagttctgagactgggtaatttataatcagaaaagtggaaattttctaatatcacatagtctgttgatcttgctagagcagaaacttttgtacttggtttaggcatatgcctgagaacctggagctattttcccactgggaagccctgtgggtgttgaggataatatcctcatgctgcagtttca

SEQ ID NO: 405418 - DNA, 570 bp, Homo sapiens
cctgccatgctgttgtcatttgcctggcaaacgcttattctgaatgggcatatagtcatggggcttattcctgatctaattttgcagtactctacactaaagctgatgatcccagtttcaacagggttaagcaagttcaatatccttgatactttttctatcatcttcccacctccatcttcccagagtcaggaaacattaccttttcctaaatctaaatctgcccccagcctttccatcatcctgggacccagcagttcctttatccttggctaggttactgagcagcagaaaggaatgatatttataggctgaacatacargattgctgcaacttctaaaaaatcctttcaaatattagatagcattaaacactggaatatgatagttctgagactgggtaatttataatcagaaaagtggaaattttctaatatcacatagtctgttgatcttgctagagcagaaacttttgtacttggtttaggcatatgcctgagaacctggagctattttcccactgggaagccctgtgggtgttgaggataatatcctcatgctgcagtttca

SEQ ID NO: 405419 - DNA, 570 bp, Homo sapiens
cctgccatgctgttgtcatttgcctggcaaacgcttattctgaatgggcatatagtcatggggcttattcctgatctaattttgcagtactctacactaaagctgatgatcccagtttcaacagggttaagcaagttcaatatccttgatactttttctatcatcttcccacctccatcttcccagagtcaggaaacattaccttttcctaaatctaaatctgcccccagcctttccatcatcctgggacccagcagttcctttatccttggctaggttactgagcagcagaaaggaatgatatttataggctgaacatacaggattgctgcaacttctaaaaaatcctttcaaatattagatagcattaaacactggaatatgatagttctgagactgggtaatttataatcagaaaagtggaaattttctaatatcacatagtctgttgatcttgctagagcagaaacttttgtacttggtttaggcatatgcctgagaacctgragctattttcccactgggaagccctgtgggtgttgaggataatatcctcatgctgcagtttca

SEQ ID NO: 405420 - DNA, 539 bp, Homo sapiens
cttttccctgtgtgttgactaagtatctccttctataaaataggaggttggaaatagcctataaatggtctcccatgcatatctgcaggggcttgtgagtctgtgctgagaataagtgactttgcctagacggatgttttcatctcattttgaaggtctaggtcctagctggcagggatgctctgtatacaacttgaggccccagtgacctacagcatcatgggaatcgtgccttctggggctagacaatgcagaggccctgctactgtgacaggtctttagattccagtattaggaatcaggactttactggatggacaatgggaatccactcggaatttctagtcggggttgacaggagccgagctgtcagaggtgtgcaggagaaatggaggtaaggagtgtcagctcttacaaaacagttaagaggatgggctcagsaatcagaaggagttggaaggttagagctcaagagttacaactcactacactagaggtggaaatcagcctctgcaagtctccacactgccctgttaaaa

SEQ ID NO: 405421 - DNA, 525 bp, Homo sapiens
cagccgggcgcagtggctcacacctgtaatccagcactttggaaggctgaggtgggaagatcacagggtcaggagtttgagaccagactggccaacatggtgaaacccagtttctactaaaaaaatatacaaaaattagcctggcatggtggcgtgtgcctgtaatcccagctactcgggaggctgaggcagaagaattgcttgaacccaggaggtggaggttgcagtgagctaagatcgcaccactgcacttcagcctgggcaacagagcaagactccawctcaaaaaaaaaaagaaagaaaaagggaaaaaccctaggaccagtctcaaagggagagtgccaagagaaaaagagacaatgtgtgtactttgtacagtacctgtcatatggtaatcattcacaaaatataaagtctatgaaggcggggaccttttctttgctgctcactgctgtaacacagaacatggcctggtccacagcaggtaattaagaagatgagttaagagttttgtttattcaacaa

SEQ ID NO: 405422 - DNA, 551 bp, Homo sapiens
taaagtgaaagtaagcttattaagaagtaaatgaatcaaacagtggctactccatagacagagtagcagcatgggctgcttgactaagtatacaaatggttatttcttgattatatgctaaacaaagggggtatcattcataagttttccaggaaagggctaaggagttcccagaactgagggttattcccctttatagaccatatagggtagcttccagatgttcccatggcatttgtaaactgttgtggcactgctgggagtgtctttaagcagaggaatgcattataattagcaaataatgagcaatgaggatgatcagaggtctctttcattgccatcttggttttggtggactttggccagcttctttactgcctctccctttatcagtagggtctttgtgatctgtatcttgtgaaatcagtcctgctaacctcctatctcatcctgtagtgaagaatgcctaacctcctggcaatgcagcytaccatatctcattctcattttacctagcccctactcaagatggagtcactctggtttgaatg

SEQ ID NO: 405423 - DNA, 526 bp, Homo sapiens
catcttttgaagaggatgaaagcaacacaccattgtctgtggaggacaaaaagtcttacagcagccgcagtcaaagatgcaattgacaaggaaatccagttacctctgtggtacacagcaatttaacataacagttatgggtattattgttcacattcactaattcatgtcaaaattataggagtttcacataatttggaaacacatacagataacacatttatacaaataaaacccaaagaaagccaaacaccattttatatttgacaatgtttcctctatgattttaatataccaagaacccaaatatgtcatttttggactttaggagacttagtatttaaaaagattaataggataagaaaacaatttacaatttgattttggcaagtttgtcaaatatcaaaggtgtgaaacatttgagaatttaagacagaactccaggttrccataaatcatttatttatctaaaacaataactcaaaatttcaaaaatgcaataacttattcattgataaagtggaga

SEQ ID NO: 405424 - DNA, 544 bp, Homo sapiens
gtagctgtaaaatttttcatttgtcagtttttaggtttttcttacttggactactggcttcaagatggaaccctttcaggaacatggacaggaaagcatgcaatttctagggcttaataagcaggcacagttggaaggcaaaacaccaaaaaatcaagaattccattttttttttttaccaaatcctggatccccaaaaagggaatcagcccatcccccattggagtcttacccctcattgggaggtggggacatttttataccttctagatgaccaagagcatgcttctctgatccaaaagtgcaaagagcagagtgcttccccataactgccattagccatcactgaaagtatattccctacatagttattacacaccaaagctctctcataatccaaagtaatttctgatacctgcaaaagtmaaaaacaccaggtaactgaatgcaaaacagaacagaggcttagattttgggaggatctatccgttttcaattcctgggattccataaggaaaatagaggtttttcccagaatggggtc

SEQ ID NO: 405425 - DNA, 561 bp, Homo sapiens
ccttgtcaacatcagatcaatattctgatctgatagatgagacataatgttttagttagtatttttttttttttttttgagacagagtcttgctctgtcacccaggctggagtgcagaggcctgatctcagctcactataacctccatctcccaggttcaagcgattctcctgccgcagcctcccaagtagctgggattacaggcgcacaccaccacgtccagttaatttttgtatttttagtagagatggggttccatcatgttggtcaggctggtctcraattcctgacctcatgatccgcccgcctcagcctcccaaagtgctaggattacaggcatgagccaccacgcccagcctgtacttttcatcattattaatgaggctgagtcttttcacattttttggccattttttttttttagtcattgttgaactatctgaactttattttaaaagattcaaatataacactatcctgtttctgatgagctattaaagccaaaccatatatgtagaagacatttcttcaatctgtttcgctggcttcttgaaaattttg

SEQ ID NO: 405426 - DNA, 561 bp, Homo sapiens
ccttgtcaacatcagatcaatattctgatctgatagatgagacataatgttttagttagtatttttttttttttttttgagacagagtcttgctctgtcacccaggctggagtgcagaggcctgatctcagctcactataacctccatctcccaggttcaagcgattctcctgccgcagcctcccaagtagctgggattacaggcgcacaccaccacgtccagttaatttttgtatttttagtagagatggggttccatcatgttggtcaggctggtctcgaattcctgacctcatgatccgcccgcctcagcctcccaaagtgctaggattacaggcatgagccaccacgcccagcctgtayttttcatcattattaatgaggctgagtcttttcacattttttggccattttttttttttagtcattgttgaactatctgaactttattttaaaagattcaaatataacactatcctgtttctgatgagctattaaagccaaaccatatatgtagaagacatttcttcaatctgtttcgctggcttcttgaaaattttg

SEQ ID NO: 405427 - DNA, 595 bp, Homo sapiens
ggcctgctccctctttctcgaaaagggagattagcagtggttgagaggtgctgaagacattttggccctaaactgmgaggcactgctctctgaggaacctaaaggattgaaagagaagtgaacagggaaccactttgtctctggagagcccaggccctggcacacgtagtaggtgctgaaatagatatttgctcagtgatggactgactgaatatgtgactcacggtttcttgtgctatctctagatgtcatttcaatcttgcacaccacccaaatccatagtgaatttctcctgctatgtaggtgcagccctgggaaaccacatgtgggaagcatttctattattttattcttttttttccggggtggggtggtgaggggaggagggataaatcgaggaacagatgttgccgtgagcccacccacatcacttagtctttgagtgcccaagggcgatttagagggactgagaagtgcaagggtcaaaggctcacattgagcaggatatacacagggaaaaacatttcttggctggacatggccccagcaggtcatccttaagctgacattcaacaaatctgaacagtgaacaatg

SEQ ID NO: 405428 - DNA, 568 bp, Homo sapiens
cccatgttcagttcaaaatctactttttaacaagatcctgaggtgagaagtattgccttagcccgcattacaattttacttttaagaactatttttgtgtgtatcttgggattcatgggtgagcacaggctgggctgagagccacctcactatggggttgacccccttggccccaatcctccagtgactcctctagtttgtaggataaagttcaaactgcttaggttagaatataagacctattcaacgtggctgcaatggactgattctctgcaagagcattgacttttctggcccctttccctttattcacgctgtccacactggtctgagatacccttttctctccatcctttccaggcctggctcaaattctttcttctcataaccactttcctctgaagtgtgaaagcagaaggcaggaatgaacagcctgagaagacccgctaagatccagatgacttacacacccgacctattaatgttttcatcttcacaataggcaygagggtgcctcgtgtaacgccttgggttccgtaactcccaatttacaaatgtggaaatggaa

SEQ ID NO: 405429 - DNA, 520 bp, Homo sapiens
gaacatacagaaaaaatgatgagtgttcaggggtttgtttctgtttttgcttccatttctgtttcagtggatgaatagatctatttccttagactctcttttccttcctatgggtaggggtgggaaagagaggatgagccagagggagaggaaggaagagattggactttgggttggaagcacagtgactccccagcttccacagaagtttaacagttaccaccaccatgcagggaggaagtgaatcccccactcctgagaatctgaatccaggcccttattcctggagcttgctggagycagcacatatgtccaagaagactgataagaacagtatcacagaaagatgtttgcatacacatctttgctagcacaggaaaggctggcagggtgttggtcgtttgtgcggaaaagcaagtgatgatgtctcaaagatgacgccacaaaatgaatataggcttgtggaaggtgggggtaggccccagtggccagacattggctggtgagcagagtgcagtgt

SEQ ID NO: 405430 - DNA, 509 bp, Homo sapiens
tgtaatcccagcactttaggaggctgagatgggtggatcatgaggtcaggagttcgagaccagcctggccaatatggtgaaaccctgtctctagtaaaaatacaaaaaaaaaaaaaaattagctgggcatggtgatgtgagcttgtagtcccagctgctcgggaggctgaggcaggagaactgcttgaacctgggaggcagaggttgcagtgagcccagattgcaccacagcactccagcctgggcgacagagcaaaattccatccgaaaaaaaaaatttggtgagaggtgggagatawgtgagtaaagaacttaaaaaagcccaaaaacaattatctgggcatggtggtgtgctgcctgtagtcccagctactgaggagacagaagtgagaggattgcttgagcccagaagttcaaggctgcagagagctatgattacaccactgcattccagcctaggtgacagagtaacaccaccctgtctgtaaaaaaaaaaaaaaaaaaaaagt

SEQ ID NO: 405431 - DNA, 469 bp, Homo sapiens
cagaatgctctgggttatcagattaaatatctggattttcagttcatatggattcaactaattttacaaaccggctaaagatttttgtaggttttsttttgagagaagagtcaccagcataccaaagatttttgatgacttaatttttgataaataataaatcttgttatgtgagctacattacttctaccagtttcagccactggtaacagacagatataatgaaaatttaaacccttttgaagtaaaatcgaggcaaaaatcattaattacttgaaatagctgattaagataaagcaaaacctttgaaatagatgtcagactttaacatttattttaaaagcaaaactttgaatagatgtcagactttaacatctatttatattagtctctctgttgagaaaggaaataaataattagaatagttttttatatctaaaattactataattgatactaatattggatc

SEQ ID NO: 405432 - DNA, 568 bp, Homo sapiens
gttttagaggggtggagtgagaggcagtgggacacctagatccagaaattgtgattcatctttagaatactcttagtgttgtgaacactattatatgctagtttaatttttttttttttaattcaacaagttaaagggaccaagtaagttttggggcataatttacacctgcaataaaagattagaaacagcctttcaaatgaagccaratacttcagtgggcactgtaaaatgctcactattctgatgaattaattttaatagtttttgtaagaagtcttttttctataaactttattctttttacattttcccaagctagtggagaagttgctttcttttaagagcacttgagccacaaattttaaataagccagcaatgtgtctttaagtagttaatgcatattgtaatgaacagtttgtccattaaacttggatttaaaaaaaagacatatctattattgtgtatcacagggtatactgaatacatttccctgtatggagctcagtttctgttacccgaattttccattggttaactttaagtagaaactggtagtttttggtt

SEQ ID NO: 405433 - DNA, 568 bp, Homo sapiens
gttttagaggggtggagtgagaggcagtgggacacctagatccagaaattgtgattcatctttagaatactcttagtgttgtgaacactattatatgctagtttaatttttttttttttaattcaacaagttaaagggaccaagtaagttttggggcataatttacacctgcaataaaagattagaaacagcctttcaaatgaagccagatacttcagtgggcactgtaaaatgctcactattctgatgaattaattttaatagtttttgtaagaagtcttttttctataaactttattctttttacattttcccaagctagtggagaagttgctttcttttaagagcacttgagccacaaattttaaataagccagcartgtgtctttaagtagttaatgcatattgtaatgaacagtttgtccattaaacttggatttaaaaaaaagacatatctattattgtgtatcacagggtatactgaatacatttccctgtatggagctcagtttctgttacccgaattttccattggttaactttaagtagaaactggtagtttttggtt

SEQ ID NO: 405434 - DNA, 601 bp, Homo sapiens
gcttttcatatttagatgattttagatgtattggcttgctattgcatgttagagttttctcttctaaaaagccaggatgcagaaatgatgtcatgtagaaagttcaagaatcatggtttggatcatccagtggtaaatctgagaagcaggtgagatttggcttcccaccagtgttctcagtatcttattctrtctttctgaggctctgggttggtggcttcacttgtctgtatctttcatgaaagttcacattcccattcccttaaactctctttactgatttttatcaaccagtgtatcagtattaatggttacctttatcacattggggtacaaaactgaagaggtgaacaaaatattgaacagaattcctgctagagaaaggtctgacttcaggagaaatattttgataacctgcttggagaaaaggaatatatccactagggcgtgctgaaacatggaatgctcagaagatagctatgactaagcaaagagaaaccactttttttgttctgaaagagacagaaagaagtgaaggtggtgggaggaaagaacaggattggagagaatctaacagaaggctctgtgctctatgatgtca

SEQ ID NO: 405435 - DNA, 601 bp, Homo sapiens
gcttttcatatttagatgattttagatgtattggcttgctattgcatgttagagttttctcttctaaaaagccaggatgcagaaatgatgtcatgtagaaagttcaagaatcatggtttggatcatccagtggtaaatctgagaagcaggtgagatttggcttcccaccagtgttctcagtatcttattctatctttctgaggctctgggttggtggcttcacttgtctgtatctttcatgaaagttcacattcccattcccttaaactctctttactgatttttatcaaccagtgtatcagtattaatggttacctttatcacattggggtacaaaactgaagaggtgaacaaaatattgaacagaattcctgctagagaaagstctgacttcaggagaaatattttgataacctgcttggagaaaaggaatatatccactagggcgtgctgaaacatggaatgctcagaagatagctatgactaagcaaagagaaaccactttttttgttctgaaagagacagaaagaagtgaaggtggtgggaggaaagaacaggattggagagaatctaacagaaggctctgtgctctatgatgtca

SEQ ID NO: 405436 - DNA, 559 bp, Homo sapiens
accttttgaaaactgtacttttctcatccctaatctatgactcacttccatttactcaaagccataatatagggcaggtaattctctcactggatttaaatactggatatcagtttcctctcagtaaacaagcctcctaatcttctgacttagtgcttgcaagtattaaccatttactgatagagatttatgatagcatgtttgtsttacttggctttctggttacaacctaattccaatttctattaaattagtctaagtggcaagattgtatggtggcaatctgtgaaagtgattttacttacagtgttgaattcttctctaacctgagcaaaatgctgcccttaactccttgccattcaaggaggaaaatgtgtatgctgatgaggttggctgggggaggaaagggaaaggagtactagagagcatagatagatgaagattaatcattatctctggcatttatcattatttgtcattaataattatctctgacattaagcaaatatctaacaaagaaatagaggtattttcagagctggcccttggattctgtagt

SEQ ID NO: 405437 - DNA, 559 bp, Homo sapiens
accttttgaaaactgtacttttctcatccctaatctatgactcacttccatttactcaaagccataatatagggcaggtaattctctcactggatttaaatactggatatcagtttcctctcagtaaacaagcctcctaatcttctgacttagtgcttgcaagtattaaccatttactgatagagatttatgatagcatgtttgtcttacttggctttctggttacaacctaattccaatttctattaaattagtctaagtggcaagattgwatggtggcaatctgtgaaagtgattttacttacagtgttgaattcttctctaacctgagcaaaatgctgcccttaactccttgccattcaaggaggaaaatgtgtatgctgatgaggttggctgggggaggaaagggaaaggagtactagagagcatagatagatgaagattaatcattatctctggcatttatcattatttgtcattaataattatctctgacattaagcaaatatctaacaaagaaatagaggtattttcagagctggcccttggattctgtagt

SEQ ID NO: 405438 - DNA, 475 bp, Homo sapiens
gtttcagcttcttcctggttcagtcacgggaggttgtgtctttccaggaatttacacatttcctctagattttctagtttaggtacataaaggtgttcataatagtttctggggatcttttgtatttctaggaactgacttttaatgtcgtctttgccattctgattgtgcttatttggatcttatttccttttttatttgttaatctagctagaartctattgatcttgtctatcctttcaaaaaaccaactttgatttcgttgatcttttgtgtggatttttgcatcttagtttcatttagttctgcttttattttagttatttcttgtcttctgatagctttggggttggttggttcttgttttcatagttactcgaggtgcaatattgtattattaatttgaggtctaacttcttgttacaggcatttagcattataaactttcctcttttcactattttgactgtatccc

SEQ ID NO: 405439 - DNA, 578 bp, Homo sapiens
aaattttctgggtttttttcttatctcagttgtaagtaatttttccttagggtttacctattttacctgaatgttctggttttaggctaaagttgcttattgccattttgcattacatttataatatctatgcaggatctgtagtgatgcttcactttttacttctcatgttagtaatttgtgttgtttgtcttttttctaaattactctctcagggttttatcaattttattggaagaagtagtaatcttactttcaaaaacccaacttttaacttaaacttttccagtttgtttgttttcaattaattgatttccagtatttattatttcttttctattatgtttgggtttaatttgccgttctwttctagattcttgatattactgattttcagcccttcttctctgatatatgcatttgaggcttcatatttccctcaagcagacccacaaattctggtgttttatttttattataattcagtttaaatattttattattttattgtcatttaatttttaattgattggttatttagaagtgaaatgaattactttaaatatttagaatttttt

SEQ ID NO: 405440 - DNA, 515 bp, Homo sapiens
tgttcataaattacccagtgtcaggtagttctttgtagcagtgtaagaatggactaatacacaagatatgaattttttttgtggctcttgatttccaaattgtcttccaaatgaacaaaatcttaaaattttaagactgaaatctccctcagctggtgttctggtgaygggtgtcatcattctttcctggcccttaagtctttaggctttatttatgctgggttattctctgccttctgcttaagcttttcgtcttctcattgaactttattattctccagaccaaatatgaggctctgaatggtgatcagcttaatgacacatgaaatatataaaatttcgagtcatatagacatgacttcaaatttcagctccatcacttacctgcactgtgtgcttgggcatgttccttaacctctctgatcctcagttttctcatctgtgaaggaagggtaataatttctacttcaaaattattgctgtgagttattggggtcatgtatgtgaaggcttaa

SEQ ID NO: 405441 - DNA, 578 bp, Homo sapiens
ttgtttacactgtcaaccttttaccagtatttcttttttgtggtctcttccaaggcctaatcagtaagatctatggctaaggtacagcctaagagccccttgagtaatccaagagttgttgctaattacatctattaattctccagcagagaatgccacagcattgatacagagctgtagacttctgagattaaccagacaaaatttttactcgacaaatattctttttcaaatctataagtatcactgatttgggtaggtagaagtgagttgttgagcagtaagaacaaaaatgataactcagttagctactgtgactaagattgtgtcttttatttccaaagtagtctataacattaggaaatagcaagtgcgtaaatagacctaatrtatttttccagtgagagatttgctgagactttctgcccaagaaattctcagcaattatgaatctggctgtatcaataacatctactatgtgcctgacaatgggccaagttgagggcagagcagtaaacaagaccataataatctcagaattcatgatgtttccagtgtatgggggatagagacatcac

SEQ ID NO: 405442 - DNA, 562 bp, Homo sapiens
tagagcttggtctccaaagatgactggctgattaatgaaactaatatgatgggtcccattgtgaaactcacattgaaaatttagaaataataccaagatatgtttgaagagaaaatagaagaacatttttgtcagcctctgtaaataattgtccctctgaatctaggaagtagaagccaatgaaacctatccaggatttgttgttgytgatgttgttgttgttgttgttatgcaaggaacttaactatggctcctcatccttccccactgggtctgaaacatggttttgttagagaataaggatttgtttgtcttaccaaattaaaatgaaaatttcaagactaaatggatacagagttaaataatttccaattatggctagattgcacattctccaaattcagaaggaaggcacagggccctgctggtacactaggcacagataggccctcacatacacttagcttccacctttccctctctcaactcatctggggaatatgttttctcaaccaagatattgagacactaaatgactgagagttaactgaattagatgttc

SEQ ID NO: 405443 - DNA, 579 bp, Homo sapiens
aggatttgtttgtcttaccaaattaaaatgaaaatttcaagactaaatggatacagagttaaataatttccaattatggctagattgcacattctccaaattcagaaggaaggcacagggccctgctggtacactaggcacagataggccctcacatacacttagcttccacctttccctctctcaactcatctggggaatatgttttctcaaccaagatattgagacactaaatgactgagagttaactgaattagatgttcattccaaagtagattactttagctctttggacatttaagtttgttgtgtaatatttacagatcatttcctattaactgtaataatttaccaatcagttaccattaactatagcaaacatgtctcctttttggggagtcacaataaaatttaattctagaaaactgatggaaacagttctaaatgataaagatgctgtacattccaataacgatttatttgtgtatttyggtgcaggaatattcttggagtaaggcaagggcacacatttctgaactggatatgaattgtttgctgtaaattatggcacaaaataga

SEQ ID NO: 405444 - DNA, 599 bp, Homo sapiens
ttcattatatctgtaccactatattttctgacaatgaactgtgacagttgtaggaacaaagatgagacccatgtgttatgtccctttagtaatataagtattatattgaatgttagaggtgagtttcttttgagttctgcatgccrttgcttgcttgatgagaactcaatttcctggtcatttatttttctttcagaactgccatgacctgtctttagtatggcttgctgtggggtcactatcctttacttgtgccacattgattgtcaaaatgaacctttgacagtagttctgttgttggaattttactggttccctgataacttccaagcaacttattacaggtcagcttaggatccagtactgctgcacggtttgttcctccatgagaaaaaaaatgtttgtttgattaattgttgcaaagggcttatggtctctcatttgacagtgatactgaatagtcagaaattttctacagatatattactgtacccctaggtacaacagaattatttttgtgaattgaaagttaatatcagctttacttagaggtggaatgaacagactcctttattttcagttttgaagaatattagaat

SEQ ID NO: 405445 - DNA, 581 bp, Homo sapiens
ctataataatttaattgtacatataacatttactaaagtggtataattggatttttttgtaacacaaaagataaatgcttgagggaatagataccccattttccatgaagtgattattacrcattgcgtgcctgtatcaaagtatctcatgtaccccataaatatatacacctactatgtaattacacaaaattaaaactttttttaaaaaaagcaatagcaacagtgatccacaacagtgtcttccatttgcctggaactttgctgctttattttgaggattaaaaaatatatgattactttaccttagagcaccagagttgggttttttccccctaaaaggaattgtagtgtattaaatgctttgctaatggcttgaggagcggaagaccaggcctcaaatgtattagttttaaagagacaacaaagaaccgagctattttatatcaaccgacatagattttgggtggtgggaaagatgaatgatgagctagctgtactggggagagaggacagcaataaggttaaacaccgtattgtaggagcctaatgcctgccttggtaaatatggcccagaaaat

SEQ ID NO: 405446 - DNA, 617 bp, Homo sapiens
gatttaatctcaaaagtctactcatttgagaaacattactatacagttttttatttgtacattttaatattttttcaaaaggtactttttaaaaaaaatcactatttttccaaaatgytgactttgttcttgtcagagattcgtggttttaaaaatagctttgttttctagatgagggagagaatagaaaagcaaggtaagatcatcagcctcacagtgcagattaggagaaatgaatgcacttagcaggggaaatggatttggttttaaagagctaccacctttctcctaaccagaggctttttggctttagtggtgagtcaacctctcagcaagctggacttcacagacataaaagggtgtagagcactcttcattccatgttcattttcagcaatttttacttttatttcccactttacctgccacccgaccctcatccctcagccaagcttaggacagtgacataaatgctggttaatgactttgtgtagtaggtatgggcaaacacaccgggcagaggaaacgctggcttcatggcctgcccaattgagagcaccagggaccctgctgtttggggctgaggaaccatccagcagagccatcaagagaagggg

SEQ ID NO: 405447 - DNA, 483 bp, Homo sapiens
caaagccttcccttcctcctcatttgtactccatttgtgatccactcctgttttccactttaatgagattgttaatgatatttacaccactgctgctatgaaaaatagtgagagcttccacatcagctcatgcatccttatatatatttttccagttaaaaaagcttttcatgctagcagacaaatacatttaccttaaaaatctaaactatataaagtttgagtatataatttcctttttaatcttctttcatttgtagctataacacatttttctttcactggctacttatayttttatttcttaaacaccaaattccaaatacaatgcttgaagaacaatgtgcccataaattattaggtgtccttttctttagatctctttgttctaattttcttttcattaaaattctgacaattttcagtgatatcaaactatttagcttttaatattaatgatctttgaatataagagacagtcaa

SEQ ID NO: 405448 - DNA, 483 bp, Homo sapiens
caaagccttcccttcctcctcatttgtactccatttgtgatccactcctgttttccactttaatgagattgttaatgatatttacaccactgctgctatgaaaaatagtgagagcttccacatcagctcatgcatccttatatatatttttccagttaaaaaagcttttcatgctagcagacaaatacatttaccttaaaaatctaaactatataaagtttgagtatataatttcctttttaatcttctttcatttgtagctataacacatttttctttcactggctacttatatttttatttcttaaacaccaaattccaaatacaatgcttgaagaacaatgtgcccataaattattaggtgtccttttctttagatctctttgttctaattttcttttcattaaaattctgacaattttcagtgatatcaaactatttagcytttaatattaatgatctttgaatataagagacagtcaa

SEQ ID NO: 405449 - DNA, 376 bp, Homo sapiens
ttgatggacttacctattaagagaaaaaaaagattctcaatttgttttataaacgaaggctctcatatgttctgtatacaagagacatatcaaaatagttcgaaaagagtaagaggtaggcataactaaatttggcaaatgaaaacaataagaaagcaaggttagcaaacwaatatcatacaaagtataattcaatccaaaaagtactaagcataaaaattgaaagatgccttttaatgttaaaaactacaatttataattaatacataacaattatgaatatgcaacaaaataacacagcaactacctttataaaacaaaaaccacacataaggcatggagacagagaaaacatgttagtaatttgaaatgttaa

SEQ ID NO: 405450 - DNA, 547 bp, Homo sapiens
tgaaagcagaaattaataagagtagatctaattaataaaacttatttgaaacattaatatagacaaacctgtagataagataatcaagaaacaaaaggaaaaaatcacaaatatacaaaataataaatgacatggaaaaaaattgagtcagacataattttaaaatgtcatgagactattttggagagtctaagaaaatgaatttgaaaatgttgacgaaatggrtaatttcctgggaagttataatttaccaaattgactcaattagagcagaaactgagaaagttatccaagaactactctacaaaaggttaacatgtccaggtggaaattcacaggggaattttagcaaacttcaaagagcagatgatcccagtgctccatgaattatcctggagtactgaaaacaggaaaattagctgatgcttttatgaagtgaatgtaacattgatattataaagttaataagacagtacctgaaaaagaaatttatagaccactatcaccaatgaatattgatgcaaaagttccaagtgaaatattgata

SEQ ID NO: 405451 - DNA, 596 bp, Homo sapiens
tggaggagaattcatgaaggggttagtatctaagtaagtcatggcaaaagataaacgtggtcattggaaggggtaggtgaggaggcatgcttggcaaaataaatagcatatatacctgttgggtggatatcattttctttaagtgacatttagggccagtaaggcagtctgttgtgatgaagtagaatgtgtttgacattatgagttcttcagcagggatgtaatctgattgaagcagaaatttagagagttatccaataagtacaatgaaatggaagtttagaatcaaacaggatgataaatgtagtaatattgatcataggtggagtaataagaatgataaagacgtattcaaaagctgcttctcaggraaagttcacatgcttttgtgtcttatcagatacagggttgaatcataaactatctcaacatttttaaaataatggcttgaaaaatagtggtatcattgatagtaattggctattggaaatgcagctctttccttggagagagaagagagagaagaggatggagatgaacttaattttgccacaattatattttgagcagctgtggaaatgtccagcacttatttg

SEQ ID NO: 405452 - DNA, 596 bp, Homo sapiens
tggaggagaattcatgaaggggttagtatctaagtaagtcatggcaaaagataaacgtggtcattggaaggggtaggtgaggaggcatgcttggcaaaataaatagcatatatacctgttgggtggatatcattttctttaagtgacatttagggccagtaaggcagtctgttgtgatgaagtagaatgtgtttgacattatgagttcttcagcagggatgtaatctgattgaagcagaaatttagagagttatccaataagtacaatgaaatggaagtttagaatcaaacaggatgataaatgtagtaatattgatcataggtggagtaataagaatgataaagacgtattcaaaagctgcttctcaggaaaagttcacatgcttttgtgtcttatcagatacagggttgaatcataaactatctcaacrtttttaaaataatggcttgaaaaatagtggtatcattgatagtaattggctattggaaatgcagctctttccttggagagagaagagagagaagaggatggagatgaacttaattttgccacaattatattttgagcagctgtggaaatgtccagcacttatttg

SEQ ID NO: 405453 - DNA, 547 bp, Homo sapiens
tatacacatattttagcaaatgaaaactttaaaatatttagtttacaaaaataactctaaaatagtggttttggaagtttgttccctgaaacggtaggttctcctatgaccactgctggtgataggtrtagaactggcttggagaacaccaccaattttgtctgtcttatacactatattggcctttctagtctgatttcaattgaagaaaataaactagcatttcacacatataaaacaggattaccactttatatcctgtttgttttcagcattgtgtaggttagtattttcactttccaatttttttgtttgttttaagacacctttcatactaatttctagttttaactgcattttggccagtgattgcaacttgtataattctacctcctagagtttgatgttttcaattaataactgctataaatgtttcatggatgtttaaaatgtttattctctggcagaatacaaatatcatatatgttggatcaaaattatgttattcagatgctctccatccttatttgtattttgttcacttgtt

SEQ ID NO: 405454 - DNA, 547 bp, Homo sapiens
tatacacatattttagcaaatgaaaactttaaaatatttagtttacaaaaataactctaaaatagtggttttggaagtttgttccctgaaacggtaggttctcctatgaccactgctggtgataggtatagaactggcttggagaacaccaccaattttgtctgtcttatayactatattggcctttctagtctgatttcaattgaagaaaataaactagcatttcacacatataaaacaggattaccactttatatcctgtttgttttcagcattgtgtaggttagtattttcactttccaatttttttgtttgttttaagacacctttcatactaatttctagttttaactgcattttggccagtgattgcaacttgtataattctacctcctagagtttgatgttttcaattaataactgctataaatgtttcatggatgtttaaaatgtttattctctggcagaatacaaatatcatatatgttggatcaaaattatgttattcagatgctctccatccttatttgtattttgttcacttgtt

SEQ ID NO: 405455 - DNA, 566 bp, Homo sapiens
actttaaaatatttagtttacaaaaataactctaaaatagtggttttggaagtttgttccctgaaacggtaggttctcctatgaccactgctggtgataggtatagaactggcttggagaacaccaccaattttgtctgtcttatacactatattggcctttctagtctgatttcaattgaagaaaataaactagcatttcacacatataaaacaggattaccactttatatcctgtttgttttcagcattgtgtaggttagtattttcactttccaatttttttgtttgttttaagacacctttcatactamtttctagttttaactgcattttggccagtgattgcaacttgtataattctacctcctagagtttgatgttttcaattaataactgctataaatgtttcatggatgtttaaaatgtttattctctggcagaatacaaatatcatatatgttggatcaaaattatgttattcagatgctctccatccttatttgtattttgttcacttgttctctgaaggactaaagagggtgaaatattaaagcacaagttaca

SEQ ID NO: 405456 - DNA, 596 bp, Homo sapiens
gtttgttttcagcattgtgtaggttagtattttcactttccaatttttttgtttgttttaagacacctttcatactaatttctagttttaactgcattttggccagtgattgcaacttgtataattctacctcctagagtttgatgttttcaattaataactgctataaatgtttcatggatgtttaaaatgtttattctctggcagaatacaaatatcatatatgttgratcaaaattatgttattcagatgctctccatccttatttgtattttgttcacttgttctctgaaggactaaagagggtgaaatattaaagcacaagttacaaataatcattcacatatagatgtttcttgtttgcccttgcagttagctatgcatgcaatgttatttttaaaattaatcaccagcatttaaaagccaggggattttatataacatcctgatttctaacttcctttgaaaaattagaaaatctactaaatctgtgtcttcattgccacacagaaatgtttgactagagctaagtgtttggcctcttgtgatgatacattcactccccatttgacatgggcttatcctattgcctgtg

SEQ ID NO: 405457 - DNA, 614 bp, Homo sapiens
ttgttccctgaaacggtaggttctcctatgaccactgctggtgataggtatagaactggcttggagaacaccaccaattttgtctgtcttatacactatattggcctttctagtctgatttcaattgaagaaaataaactagcatttcacacatataaaacaggattaccactttatatcctgtttgttttcagcattgtgtaggttagtattttcactttccaatttttttgtttgttttaagacacctttcatactaatttctagttttaactgcattttggccagtgattgcaacttgtataattctacctcctagagtttgatgttttcaattaataactgctataaatgtttcatggatgtttaaaatgtttattctctggcagaatacaaatatcatatatgttggatcaaaattatgttattcagatgctctccatccttatttgtattttgttcacttgttctctgaaggactraagagggtgaaatattaaagcacaagttacaaataatcattcacatatagatgtttcttgtttgcccttgcagttagctatgcatgcaatgttatttttaaaattaatcaccagcatttaaaagccagggga

SEQ ID NO: 405458 - DNA, 526 bp, Homo sapiens
cttgaatgtgagttgccatttatctttgttcttgctctcttgtactacttgtgatagaatagaggaaactgaaaaaataattaacccctgggagtatcaagttgaaagataggctcgaaaagacattgcatttaagggaaaaaatttaaaatctygaattaatcattctttattcatttacattatgtgtttggccaccgtaggaaaataaatttgtaattcctgtaacaatatctgtcagtttcttatattttaaatccactttattgaagtataagttaatggatccatgtaaagtgtacaatttgctgatagatacacctaaaaccacctgtgctgtataaatctgtgaaaataaggtctcattcaagatacagaacattttcaatagtacccaaggtttcctggtgcctttctgcagtctgtctcttccccttccttcaccccagacaattacccacctattttttgtcactatagattaattttcagttttaaaaatttcgaataaataagactgtatatg

SEQ ID NO: 405459 - DNA, 554 bp, Homo sapiens
ttcacttgactctctctcaattctctcttgcctgcaccatgtaagacgtgcctttcaccttccgccatgattgtgaagccttcccagccgtgtggatctgtgagtccattaaacctctttttctttataaattatccagtcttgggtatgtctttatcagcagtgtgaaaacaaaccaatacagaggaattgaagagaaggaaattgagagcacagacmgtggatacaggagaggtggtacttgtgaatgtccagtgggagacttactgggcaaggatggcacacactggttactcgaggcaagaatgaagaaagtgatttttggcctcagtgtgcagaggaggccaggaagtgttcttcaaaatctaagtatttcagagcttttgattttttctctgcaggacttgatccacgaaagctgaataaggtgatgtgagatctctaatcccctcaaagaaaatacagtgagagaaatgagttacatcttacatcttttatgcattttcagtctcctttcttgcacctggaagagcattagaactccaaatggcagg

SEQ ID NO: 405460 - DNA, 567 bp, Homo sapiens
caatcaggttatctttgaaaaactactattttatatattattttccagcctggataagtttcatttttttgtcttattgcattgaccagaacccccaatatgattttgaatagaagtggtaagagtaggcattgtttctttttcctgatcttaaagaaaaagcattcagtctttaaataataactgggagtttagctatagggttttcatagattctttttactggttgaggaggttcccttttattcttagtttgctgaaagtttttatcaaaaaagattttgtattttgttgaatgctttctctgcatctcttgagatgatcatttgatttttctttttcagtctgttaatatggtgaattatattkattttgaatgtataaccagacttgaggctttagaataaactccactggttataatatgttcttttaaaatacaattttggatttgatttattaaacttcatgttttttacatgtaagtttatgaggcatgtttggtctttagttttcttctatctttttatttattcattttgggggttttattttggtcaggctaac

SEQ ID NO: 405461 - DNA, 530 bp, Homo sapiens
ggatgacactgctgcttctctgggtgaccttgcacaggtcacatggcctctctggacttcagcttctgtgtctgtcaaaataaataatgggctagatactctctagcatatctgccatttctaaaattctrtgctatgtctttttagtgacttctttaagacccaactcaaagaagtaattacaactggggatctcagacccaggagatggaaaaagcatatgcccatgatgaaagttagttgggaaatacttggggcaatgaagaaattatttttttctctaaaaattggtcaccatcatgcctgcagttataccagcccttactttgttgctaacaattgattacctgcacaattcttattttgggtgagtctggaaaatttcaaaattgaacttttcagcaatatgaaatatcttggaactaaagtatagagaggacccaatgtgtttggaatccaaccccacagtttgaatttttcaaatttctaccaaatggaaaaaaacaacatatctcagtgtacacacagct

SEQ ID NO: 405462 - DNA, 530 bp, Homo sapiens
ggatgacactgctgcttctctgggtgaccttgcacaggtcacatggcctctctggacttcagcttctgtgtctgtcaaaataaataatgggctagatactctctagcatatctgccatttctaaaattctatgctatgtctttttagtgacttctttaagacccaactcaaagaagtaattacaactggggatctcagacccaggagatggaaaaagcatatgcccatgatgaaagttagttgggaaatacttggggcaatgaagaaattatttttttctctaaaaattggtcaccatcatgcctgcagttataccagcccttactttgttgctaacaattgattacctgcacmattcttattttgggtgagtctggaaaatttcaaaattgaacttttcagcaatatgaaatatcttggaactaaagtatagagaggacccaatgtgtttggaatccaaccccacagtttgaatttttcaaatttctaccaaatggaaaaaaacaacatatctcagtgtacacacagct

SEQ ID NO: 405463 - DNA, 594 bp, Homo sapiens
attcccttagctaagaacatggtctcctatagcttgtagtttttcttaaaactttatcatatttaggctaaatgtattttcaaaatgtatattttagtaaagcttacatttatttgtaatatttagcctcaacataaaagtgattaagtctaatgttaagagttactatatagcgaaaaaggctcaattwtaaatagatgtaaggcacagaccaataggagtgatgtggggatgaaagaccttgcagatcaaggtgaaaataatttttaaaaatttagaaacaaggtatgaggaaattattagcaagaaaacaatagttaggaaaatatgttctagaaaaaatacaggtgaggcatggcttatgtattgcttttaaatgatgagatgagggaaaatctaggtgcaaggtgaataaaataaatatagtaggaaagcaagaaaggccaaatataaaaggctatctgtgtgtatgttaacagctaacatcttaataaagccattgcataattacagccgttgtcagaatgaaaaagtgtaccaacttttgatacaaactatcttgtaagtctgaattgtcagaggtcaagtcataaa

SEQ ID NO: 405464 - DNA, 594 bp, Homo sapiens
attcccttagctaagaacatggtctcctatagcttgtagtttttcttaaaactttatcatatttaggctaaatgtattttcaaaatgtatattttagtaaagcttacatttatttgtaatatttagcctcaacataaaagtgattaagtctaatgttaagagttactatatagcgaaaaaggctcaattataaatagatgtaaggcacagaccaataggagtgatgtggggatgaaagaccttgcagatcaaggtgaaaataatttttaaaaatttagaaacaagktatgaggaaattattagcaagaaaacaatagttaggaaaatatgttctagaaaaaatacaggtgaggcatggcttatgtattgcttttaaatgatgagatgagggaaaatctaggtgcaaggtgaataaaataaatatagtaggaaagcaagaaaggccaaatataaaaggctatctgtgtgtatgttaacagctaacatcttaataaagccattgcataattacagccgttgtcagaatgaaaaagtgtaccaacttttgatacaaactatcttgtaagtctgaattgtcagaggtcaagtcataaa

SEQ ID NO: 405465 - DNA, 511 bp, Homo sapiens
tgtgttcaagttcctctgttagacacagtagcttactcctggtgaccttctttgcctagagggtgggacttacctgtgtctcccctttaattgatgttagggtttttctgggaattacatgattcaatggcagcacctgtttgcatgggacagcacattgccacatayatatcacccaagatcacagaggtttacttgctttaacctgcttctgcacagtacccttctatttaaaaggagaaatcaggctgcagaggaataccagagaaagactgtaacattcacaaatgtataattttgtaccaagatacgtattttactgaggaaattaaaatgtgaggccaagagtctctggatgtttgcttacatctaaatgaatgtctggattgtttttttctctttaccaaaagattgtgccattatgtggtcaaggcctgtaaagaaatccttagcaatctgaattctaaaaattttgactcaattccagcattcaattaaatgaatgatagtt

SEQ ID NO: 405466 - DNA, 560 bp, Homo sapiens
taaaacagatagaataaatcaattttttaagaagaatacaagtattcaataggagtgctgttttaaaaacgaaggagagggttgaagactgcaacactgacgaggcagcgggtgggccggggcagtgcacagggagggcttgctaactctcgtgggcttgccctgagtctcgcgagtgccagcattgccccgcccttggatgggctcctgctttccagcgtctcaccgtcccactgtcctaccgtcccagtgtcccagcgcttctattaaaccagctgctctcgccagcttgcctygtgccgccccctcccctttgccctccaaatgcatttctccaaatttgtctcacactgcatggataagactgcatgggcctggagaaaatggagccatacacggttacagcatgccaggaagagctgaggacggccctgggtggggcagctgacccatgcagcctcttagagaatgcttagaaaccagaaataagctcagaaactaacaggacaaccacacatccgttaggttttatcaagaagacactcccatcctgagtctat

SEQ ID NO: 405467 - DNA, 595 bp, Homo sapiens
cagttaaaagaagaagccacaccacaatttgaccaggaaaatttaacacaaagaattattcattgtaacggggaattggttagtaagaagtgaagagaactctacagacaacaggaagctgtaagtagctatttcccaaaaagaagaaacacagtcccagtagtcattgtatccaatgctgaccacattaattcctcctcaaattcagtcacagacccattgaatattttgttacctaaaggtaaaagttaaagttaacttctaataatttstatatgaaataaaaatgggaagaaaaaggaaggtggctaggttataccaacaagcatatgatgcacataacaaagagaaaatatgccaagctaatacagtcctcatctctgtaatggatcatgaggttgtagttaatatctgtgacatccttcttcaagtgcttgtcctaaatattttccttgctttcattcagaacctcagttactttaggctctttacctggggaaggttactaagcattcattcctgaatggtgtgagacctcagtcattttgcattttattgtaattttaaaataacttttactattgggcgtggaata

SEQ ID NO: 405468 - DNA, 570 bp, Homo sapiens
acaaacaatgcagcagtgaatgtttctgtacctgccttcttgccactgtgcatcgaaagtaaataatgatattgatattaggaatttctgggtctgagcgtataagcatttataattttaatatatactgtcaaattgctttccaaagaggctgtaataatttacagctctaccagcagtgcagtttctctaattttgacctcgatgtagtcaatttacatttgctaacatgatggataaaaggtggtcatttaaattttgtttccttgatcactgctgaggcttastataattttatgtttactggatatttgtatttatgtcagcctgtcccagtgcttttcccacttttctattttttctggtcttttttctagtcaatttgtaggctacattctggacacaaatcatttgcctattatgttgcaaatattttctcccagattatcacttgatattattgtttttttccaacttgaaatcatcatttcattttaaaatagtgcttggtttacagaaaagctgtaaaggtagtacagagagttcctacacacccctcacccagtttct

SEQ ID NO: 405469 - DNA, 552 bp, Homo sapiens
aacattagctaattagatcaaaacaaagtgtaactgccatctatttttgttattgtcatgcctaacaatacattatgataagtgatactgaaaacaaccagcatagcttctgctcactaggaatgaatacaattagttctccagattctttcctaacattttccatgcaagcatataccaggataaacctctttcattactttgcttttcattacatttatatagcaatttctccccgcccttgagggacattttttytgaggtgcatataatgtttgttaggcgatgtttggattaaatatataatggccctcataagtattatttatgattttttaaataataataaagataatacagaaaaacatgttaaagatacttaattcattcttacctagtaataacaggtgaacaggtttgatttgcactttccacctctttcttgctagaaaattatgagatctccttccgtctattccctcaatgaactcacatgtttttcctatcccttggagagttgggcagggagagcaagactgaatagatactgtg

SEQ ID NO: 405470 - DNA, 513 bp, Homo sapiens
tactcccatttgtagcaaacacatttgatgaatatattataattgccaccacgaccataagtcatgtcataaaaagattgtttatagctgtgaaatttatccttttcaactgaattacagatttttcattttaaatacactctgcagtctgaaaaatctggtgacatagttgtgaccaaatagtcaatagatcttactgttttgcaggtgaggaagatgawgacagaaataaatgtgctttaaaaatgtaataaggtgtgatggttaagtttatgtgttaacttggctgggccataggatgcccagatatctaattaaatattatttctgggtgtgtcagtaagagtgtttccagaagagattagaattgaattggtggactgagtaaagcagtgagctgtctccagtgtagatgggtatcatccaatccattgagagcttgaatagaaaaaaagggcagagggaggttggattcgctctctgcctgactgcttgagctgtagcatccctctt

SEQ ID NO: 405471 - DNA, 513 bp, Homo sapiens
tactcccatttgtagcaaacacatttgatgaatatattataattgccaccacgaccataagtcatgtcataaaaagattgtttatagctgtgaaatttatccttttcaactgaattacagatttttcattttaaatacactctgcagtctgaaaaatctggtgacatagttgtgaccaaatagtcaatagatcttactgttttgcaggtgaggaagatgatgacagaaataaatgtgctttaaaaatgtaataaggtgtgatggttaagtttatgtgttaacttggctgggccataggatgcccagatatctaattaaayattatttctgggtgtgtcagtaagagtgtttccagaagagattagaattgaattggtggactgagtaaagcagtgagctgtctccagtgtagatgggtatcatccaatccattgagagcttgaatagaaaaaaagggcagagggaggttggattcgctctctgcctgactgcttgagctgtagcatccctctt

SEQ ID NO: 405472 - DNA, 561 bp, Homo sapiens
gtgtttcatcatctatcattacattrtaaagaaggctggtgtcactgtagagaaagaagctgctatagagaacagtgatgcagccacaggacagagagaggcagagagtagggcctcctgcagccattttcatcaacaagtccatgaggcaccatcacctcacagaacattctggaggaaagacatctcctggagaaatctcttgaaaaagactcaggacttcaagactgcactttggggcaagtacataaaaagagaccgaagaattatctgtgatgagaaagacattatcacgaggaaaaatcagaagaattggcttggaagagaacaatctgcagcacaaggaagggccccagaggaggtgcatgtgttctccttgtcacgtggctcagggccagtgacacgaccttcgtgaggaagagctgcagatgtgcatccaaacccactgcatcttctttacagtttgttgtgtgtaaataatagatatgacttcctttaccagcttgtgcatcaaaagaggtcacacagcttttactttttttaaatgaagcacttgtacct

SEQ ID NO: 405473 - DNA, 579 bp, Homo sapiens
agtggttgcatacaaattctttgagtttcatcccagtggaggagctccgtgttgcagaataggaaagagagaaagctaaaatgatcaaaatattcatcttatacacatggaaggctttttaatttaatatttttcttggtcccacacaacagattcatgtagacactaatcaggttttagtcacagtcttgctgtggatctaatacttcatagagtagcacctcactcaaatgggggaacmaataatttttagtaaagccagcttccttagcgtaacagaaccaacttgcttttgctattccctaaacaactttccctggtttataattttcaggttctatgattcaagactcttttacttgaaagcagtagaaacccaatgcaattagcttgagcaaagaggaatttattacaaatctgaacatgtaaaaataaaaaggcctaagtagatcttagttacaactgaaaagaagaatttgtaatctctgagactctctatctcctatccatgcttctctctacccagtatgttgttccttatgaacagcttcttccagatgttaaaaatatggccaccag

SEQ ID NO: 405474 - DNA, 579 bp, Homo sapiens
agtggttgcatacaaattctttgagtttcatcccagtggaggagctccgtgttgcagaataggaaagagagaaagctaaaatgatcaaaatattcatcttatacacatggaaggctttttaatttaatatttttcttggtcccacacaacagattcatgtagacactaatcaggttttagtcacagtcttgctgtggatctaatacttcatagagtagcacctcactcaaatgggggaaccaatawtttttagtaaagccagcttccttagcgtaacagaaccaacttgcttttgctattccctaaacaactttccctggtttataattttcaggttctatgattcaagactcttttacttgaaagcagtagaaacccaatgcaattagcttgagcaaagaggaatttattacaaatctgaacatgtaaaaataaaaaggcctaagtagatcttagttacaactgaaaagaagaatttgtaatctctgagactctctatctcctatccatgcttctctctacccagtatgttgttccttatgaacagcttcttccagatgttaaaaatatggccaccag

SEQ ID NO: 405475 - DNA, 368 bp, Homo sapiens
acactaatcaggttttagtcacagtcttgctgtggatctaatacttcatagagtagcacctcactcaaatgggggaaccaataatttttagtaaagccagcttccttagcgtaacagaaccaacttgcttttgctattccctaaacaactttccctggtttataattttcaggttctatgattcaagactcttttacttgaaagcagtagaaacccaatgcaattagcttgagcaaagaggaatttattmcaaatctgaacatgtaaaaataaaaaggcctaagtagatcttagttacaactgaaaagaagaatttgtaatctctgagactctctatctcctatccatgcttctctctacccagtatg

SEQ ID NO: 405476 - DNA, 561 bp, Homo sapiens
gtgtttcatcatctatcattacattataaagaaggctggtgtcactgtagagaaagaagctgctatagagaacagtgatgcagccacaggacagagagaggcagagagtagggcctcctgcagccattttcatcaacaagtccatgaggcaccatcacctcacagaacattctggaggaaagacatctcctggagaaatctcttgaaaaagactcaggacttcaagactgcactttggggcaagtacataaaaagagaccgaagaattatctgtgatgaraaagacattatcacgaggaaaaatcagaagaattggcttggaagagaacaatctgcagcacaaggaagggccccagaggaggtgcatgtgttctccttgtcacgtggctcagggccagtgacacgaccttcgtgaggaagagctgcagatgtgcatccaaacccactgcatcttctttacagtttgttgtgtgtaaataatagatatgacttcctttaccagcttgtgcatcaaaagaggtcacacagcttttactttttttaaatgaagcacttgtacct

SEQ ID NO: 405477 - DNA, 561 bp, Homo sapiens
gtgtttcatcatctatcattacattataaagaaggctggtgtcactgtagagaaagaagctgctatagagaacagtgatgcagccacaggacagagagaggcagagagtagggcctcctgcagccattttcatcaacaagtccatgaggcaccatcacctcacagaacattctggaggaaagacatctcctggagaaatctcttgaaaaagactcaggacttcaagactgcactttggggcaagtacataaaaagagaccgaagaattatctgtgatgagaaagacattatcacgaggaaaaatcagaagaattggcttggaagagaacaatctgcagcacaaggaagggcsccagaggaggtgcatgtgttctccttgtcacgtggctcagggccagtgacacgaccttcgtgaggaagagctgcagatgtgcatccaaacccactgcatcttctttacagtttgttgtgtgtaaataatagatatgacttcctttaccagcttgtgcatcaaaagaggtcacacagcttttactttttttaaatgaagcacttgtacct

SEQ ID NO: 405478 - DNA, 499 bp, Homo sapiens
tctcgtgctgtgtttttcagctccatcaggtcatttatgttcttctctacactgattattctagtttagcaatttgtctaaccttttttcaaagttctcagcttccttccattgggttagaacaagctcctttagctcagaggagtttgttattactcgccttctgaagcctacttctgttagttaatcaaacttattctccattcaattttgttcctttgctggtgaggagttgtgatcctttggaggagaagagacattctggtttttggaattttcagcctttttgtgctggtttctccccatctttgtggatttatctacctttggtctttgatgttggtgaccytcagatggggtctttgagtggatatgctattcctttctgtttgttagttttccttctcacagtcagtcccctctgcttcaggtctgttggagtttgctggaggtccactctagaccctgtttgcctgggtatcactaacagaggctgcag

SEQ ID NO: 405479 - DNA, 493 bp, Homo sapiens
gcagtgaacagttctgtctcactggtgttccagatgcccctggggtatgaagaaaaactcctgcagctagcttggtgtctgtccaaacagccacccagttttgtgcttgaaacccagggccctgstggtgtaggcactggaaggaatcacctggtctgtgggttgcaaagaccatgggaaaagcatagtatctgggccagaatgcactgttcctcatggaatggtccctcacagcttcccttggctaggggagggagttccctgaccccctgtgcttcccagatgaggcaacgccccaccctgcttctgcttgccctctgtgggctgcacccactgtctaaccagtcccaatgagacgagccaggtatctcagttggaaatgcagaaatcaccctccttctgtgttgatctcactgggagctacagacctggagctcttcttactcagccatcttgccagccaccccagtctctgcttctatattttatatct

SEQ ID NO: 405480 - DNA, 571 bp, Homo sapiens
aatagcccatttccatcaataaattaaatgagttcctgtgaaggtttccaacagctgatatttagatacatcagttttacttgagcccttttagtccattttcatcaaccctcagcggaagttaactggaatgaagtgtacatgactgaatctaaagtttttactgaaacaagctttttatggaattatttcaccgggatgtctatccatgatacttgtttgtgctctctgctcccctatgtacactaaaacagacccagtaggtctcctgtcatctcagcacraggtaccagtgcctttggttcatgcatttgtttctctggtgtacctgctgtaggctgatattcactgatattgcatctaatgatcatcacacttttggaaattcatgaacttgtaataatcggccctagccttaacatcactttcctttgtgatttatgtggacaatatgtgatccaggaaaaattaaaagatacaaaattgtacctatattttgccagaaataagtcataaagtaaactacaatcgcatacacttatacacgctcacacagcctctctcatacaca

SEQ ID NO: 405481 - DNA, 539 bp, Homo sapiens
gcaagagcaaaaatagaagtaaagagatggcacagagaggagagaaattcaaaaagggaatttaaggcatggagagaaagggcattgaaatttgaattcctcttcagggttaagttcatcatccaatattagaaaggagctcaaatgcttgaggaaatacaatattctagtggaccagaaggaaaaggtggaaataaaagaaatggtaaattccttcacgtcagaggcagtagtttaatctctacaatctttaaccaaagagtagcaacacgaaacacatagtaggctcacaataattgtcaaataaaaggattagtggaactactttttagagctgcattgcttaaagatttttctgaagcacattgtgcaagctaagtggtctgtagacaaarggctttgtggtcaagtaagttcactagtgctgtccaatgtcacttacaagatgcatgaggcccaagggcatattaaagcctcagagaaatccagcagtagagaaatttttagatgtattaaccctatttctctcaactcatatg

SEQ ID NO: 405482 - DNA, 605 bp, Homo sapiens
gggcttaactgggattgagtaaagatcatggtacaatagtctaggatcagtggacaaagcaatgagaaagctttgatgcacaagaagtactggagagtaaacagcaacttaaggctatgtattctgcaatgctcatttaagtggatttttgcagaatggccctggtataaacaataatattattttcatctccttaggcaagagtctcctagaatggtaaagacatgttgatgaaaacagtggaatagtaaaattagtaaagacaaacaaataatacaatcatgttaatatagacaacaagtacatgagtataaacaattttagttctcactaccaaagtggtattgtatggaagaaagaacagaaatccagacctagatttgaaaaaacacttcccacatattgcctttgtaagcttggccaagttacttaacctctctgaaaaccatcacacaatgtaatmttgagatgctttgtaaaaataataagaacaaataaatgcaatccattagaccctaggaaaggaagaaaataacctaaaccaggagtattttgaggcaatggtggaatacacaggtggatctaatttcacattctggtgatga

SEQ ID NO: 405483 - DNA, 575 bp, Homo sapiens
gaattattccataaaaagttgattgttctgtttcaaattagttaacataggattatggggaatgctttatttgaatgagacaatggtaaaaagaagacctttcttggtatagagaagcattaattacaatcatcttattggacagttttataaatcactcaaaagaaacttcagagtgaagtcttcctatttgcagacagcgctcagcttccaggcatctaaataacaagctgcctggcatcaattaaatctsaagagactgtggcatgaaaattgacaaatgagtttaactatcatgaataaaagagcaaaataataaaacagtggcttttgagaggatgggctccaatgaaaaaacagaagagaacctgttgtgacattattgttattgcctgtttgcgcatgaatattgttgttgctgttcatattgtcctctcttcaattgagttatatacattgttgttttgacaggtgtcaagacattttaagatgttgtcaatttgccaaggaaatgaaagattgttgtgaatatggcaagatgtgaaaacaatggaggactaggtttggtattagtg

SEQ ID NO: 405484 - DNA, 575 bp, Homo sapiens
gaattattccataaaaagttgattgttctgtttcaaattagttaacataggattatggggaatgctttatttgaatgagacaatggtaaaaagaagacctttcttggtatagagaagcattaattacaatcatcttattggacagttttataaatcactcaaaagaaacttcagagtgaagtcttcctatttgcagacagcgctcagcttccaggcatctaaataacaagctgcctggcatcaattaaatctgaagagactgtggcatgaaaattgacaaatgagtttaactatcatgaataaaagagcaaaataataaaacagtggcttttgagaggatgggctccaatgaaaaaacagaaragaacctgttgtgacattattgttattgcctgtttgcgcatgaatattgttgttgctgttcatattgtcctctcttcaattgagttatatacattgttgttttgacaggtgtcaagacattttaagatgttgtcaatttgccaaggaaatgaaagattgttgtgaatatggcaagatgtgaaaacaatggaggactaggtttggtattagtg

SEQ ID NO: 405485 - DNA, 510 bp, Homo sapiens
cctgttaaaatctaaaaggtaaatctgaatttagtgaaattttaataaaccaaatcattagatgacacaggaaaaagagtagtagaaatttaaatgtcactcaaacatttagtcacttagagaccaaacttattgaaaactcataagacagagcaamccaaaaaaaaaaaaaaaagttacaatgtcctttcctaccaagtttgcagacaagtagcagaattgtttgatctgatttttatttcattttatttctcctgtccatcatctggcagagatgctaaagaacaatgaacaattacatgttcaaaaagcaagcagaaaacgaagaatgaggaataaaagacctgtttaatcttaaaattagataagtaatatttgaataattgtgctttgactagaataatagcatagcttctgcccatgacggacccttgataaatgtttgcttgagcgaataaaagaactgacaggattctttaattgcaaaaatgtcattaaattaatattaat

SEQ ID NO: 405486 - DNA, 510 bp, Homo sapiens
cctgttaaaatctaaaaggtaaatctgaatttagtgaaattttaataaaccaaatcattagatgacacaggaaaaagagtagtagaaatttaaatgtcactcaaacatttagtcacttagagaccaaacttattgaaaactcataagacagagcaaaccaaaaaaaaaaaaaaaagttacaatgtcctttcctaccaagtttgcagacaagtagcagaattgtttgatctgatttttatttcattttatttctcctgtccatcatctggcagagatgctaaagaacaatgaacaattacatgttcaaaaagcaagcagaaaacgaagaatgaggaataaaagacctgtttaatcttaaaattagataagtaatatttgaataattgtgctttgactagaataatagcatagcttctgcccatgacggacccttgataaatgtttgcttgagygaataaaagaactgacaggattctttaattgcaaaaatgtcattaaattaatattaat

SEQ ID NO: 405487 - DNA, 543 bp, Homo sapiens
acacaaagttaaattttagtatcattaarcactgtttgattttatattaatttgatttcactgaactctatgtttgggtacttgtggacaaatcatggttgtataaaatttgtgttcgtgtttaactttgaatatcaactgttgcaatgaagtgcatttgaatgtttcctttaatacctgggcacaataaaagttaaataggtactcctccaactcctactctgaagtgcaaattagcacttcctttttcaggtacaatatggtgctaaataaagtttgtcttgaatgtgtgtttcccctttttcaggtacaatattgtgctaaataaagtttgtcttgaatgtgtgtttcccctttttgaaaagctaaaagatttttaaagtgtttgtttggaatgtgtcaagagtagttttgatgtgatatatctaaggtcacatgcagaatcactgaaatattaaatgccaaatggtttgcaaataaacatgcagataattatttttcttccctaaatttcaagttggcactagccagcactcttgccaa

SEQ ID NO: 405488 - DNA, 543 bp, Homo sapiens
acacaaagttaaattttagtatcattaaacactgtttgattttatattaatttgatttcactgaactctatgtttgggtacttgtggacaaatcatggttgtataaaatttgtgttcgtgtttaactttgaatatcaactgttgcaatgaagtgcatttgaatgtttcctttaatacctgggcacaataaaagttaaataggtactcctccaactcctactctgaagtgcaaattagcacttcctttttcaggtacaatatggtgctaaataaagtttgtcttgaatgtgtgtttcccctttttcaggtacaatattgtgctaaataaagtttgtcttgaatgtgtgtttcccctttttgaaaagctaaaagatttttaaagtgtttgtttggaatgtgtcaagagtagttytgatgtgatatatctaaggtcacatgcagaatcactgaaatattaaatgccaaatggtttgcaaataaacatgcagataattatttttcttccctaaatttcaagttggcactagccagcactcttgccaa

SEQ ID NO: 405489 - DNA, 598 bp, Homo sapiens
cagctcttttacacattttgtacataaataagaaaagccactggaaaattatgagcaagtgaatatttgtcttcaaagcaaaaaatgagaaaaacaaaattgatattgatttctaagacagattggaatgaaccaggtatgaccatgttagagaaataaaaatgtccattaggctgagcatggagaataaagcttttcattttcctcagaaaacattgctccagactctctcaaggggaagaggttgggaatattaaattggaattttgaggggagaaataagggaataaaaacagtrgagcaccacacaatcatgggacattaaataagagggaacagagaaattagatggctagtacaaagaaatgcccatcatccttcactttatgaagaaaggaaagcctccaatccaaaggtaatgggctagcttccactgtgatgttctcactgattttaccaatatgatgcatagttagcacatgtgtaagcatcatttctgttaaccacataatgtaagattttatctaaagatctctaaatctaaattatttccccagaaatattcacacacacataaagaaagctatctcctaaaaaa

SEQ ID NO: 405490 - DNA, 604 bp, Homo sapiens
agccacgcctcatcttcgcctggctgttgctgctgggaactggggcaagtgttgctacttttctcacatttcagaagctagaaattaagcctttcgggtaaaattttagaattttggccaggcacggtggctcacacctgtaactccagcactttgagaggcctgaggtgggcagctcacttgcggccagcgtggccaacatggtgagaccctatctctaccaaaaatacaaaaatcaaccagtctyataacctggtctcaaaataaaacaaataaaaatattcagaatttaagtgtgggttttttttttaaagcaactgtaggagccaagcaaaatccatgtcaagctaaatgcagcccactagctgcttgcttgccagcttactacctctgcctggtgctcattagatttataaaaattatttggatagattggaagttttgttatattagacaattgcaataatttataaaaataaactaaatatgttaaaagtataaatgaagtttaaaatataaagtatttttaaaacgcattgtttaaactttagtaaatgtataaataatacaaaaatatttataaactgaatttaagatgaagaaa

SEQ ID NO: 405491 - DNA, 604 bp, Homo sapiens
agccacgcctcatcttcgcctggctgttgctgctgggaactggggcaagtgttgctacttttctcacatttcagaagctagaaattaagcctttcgggtaaaattttagaattttggccaggcacggtggctcacacctgtaactccagcactttgagaggcctgaggtgggcagctcacttgcggccagcgtggccaacatggtgagaccctatctctaccaaaaatacaaaaatcaaccagtctcataacctggtctcaaaataaaacaaataaaaatattcagaatttaagtgtgggttttttttttaaagcaactgtaggagccaagcaaaatccatgtcaagctaaatgcagcccactagctgcttgcttgccagcttactacctctgcctggtgctcattagatttataaaaattatttggatagattggaagttttgttatattagacaattgcaataatttataaaaataaactaaatatgttaaaagtataaatgaagtttaaaatataaagtatttttaaaacgcattgtttaaactttagtaaatgtataaatartacaaaaatatttataaactgaatttaagatgaagaaa

SEQ ID NO: 405492 - DNA, 474 bp, Homo sapiens
cactttttttttttttttttttttttttgagacagagtatcactctgtcgcccaggctggagtgcggtgacacaatcttggctcattgcatccccctcctgggttcaagcaattctcctgcctgagcctctcaaaaagctgggactatagtcacgtgccaccaaccacacccagctaatctttttatgtttttagtagagacagggtttcaccaggttggccaggctagtcttgaattcctgacctcaagtgatctgcctaccttggcctccaaagtgctgggattacaggagtgacccaccacacccggctgacactgggctcttaatctcctcagatatctacttacccatttgcaagtccctgctccagacagcamactgcctctccagcttcccagacagcttttattccttgtgagaaaccagcagtttcagatgtcactcctaaaattcagtctgagctttttcaggc

SEQ ID NO: 405493 - DNA, 375 bp, Homo sapiens
tccacatgttttccttccgggcaaaacaaaagctttcacyatgtcttttctacatctcccagggcctccacaactcctgtgatccaagaccttctcgaaatgccaaagttacctattgttaaatattttcaaagcagtgtaggcagtcctgccaaccccgtcctggctgtctccaagagcgctggccaacagtgccaagggtccttgccagtttcctggagaaggggggtgttacagttaagtggggagggatcttaaagggccacagccaatattagggcttcaggctgccacatcttctgtcattagtggggacagttggtgtctcctccctttgttcctcacccaagcagttattgtctccctgtctgatag

SEQ ID NO: 405494 - DNA, 375 bp, Homo sapiens
tccacatgttttccttccgggcaaaacaaaagctttcactatgtcttttctacatctcccagggcctccacaactcctgtgatccaagaccttctcgaaatgccaaagttacctattgttaaatattttcaaagcagtgtaggcagtcctgccaaccccgtcctggctgtctccaagagcsctggccaacagtgccaagggtccttgccagtttcctggagaaggggggtgttacagttaagtggggagggatcttaaagggccacagccaatattagggcttcaggctgccacatcttctgtcattagtggggacagttggtgtctcctccctttgttcctcacccaagcagttattgtctccctgtctgatag

SEQ ID NO: 405495 - DNA, 538 bp, Homo sapiens
tgtatgcattaaatatgcacagctttactttctgagtgtcaattaaacctcaataaaatagtttaaaaataaataaagataaaaactacaggatgcagtacaaagaacaacaaaaaagaacctggacgtgtgtggctagctcccttccttttttcttctgctttgcatagcacagagctcatgacttcctgtcagcccttatgctggtggtccatgaatctgcctgaagctggagtgcagcaatacagagtcatatgtccaaacagagggactacatttttcttacatgagctttatttgttacagaagtgatattttagccaatatctgccttactcctttgcattatatttcaactgattcagaatgtataatgttttttaatcatcataatctggtcttctgayagtaaaagtaacataaaaatgcggttatatgctttgatcttcagtgaaataatcctggtgtgagcccctattctaacacctcttactgagaacattttggaaagttgctgaatgcctttgagcttcagcct

SEQ ID NO: 405496 - DNA, 431 bp, Homo sapiens
gtattgcattgtattcgttccttttcatactgaaataaagaactacctgagactgggtaatttataaaggaaagaggtttaattgactcacagttctgcatggctggggaggcctcaggaaacttacaattgtggcagaaggtgaaggggaagcaaggcatgtcttacatggtggcaggagagaaagrgagtgaagggggaactgccacacacttttaaaccatcagatctcatgaaaattcattcattatcacaagaacagtatgggagaaactgcccccataatccaatcacctcgccactaagtccctccctcaacacatgggcattacaatttgagatgagatttgggtggggacacggagccaaaccatctcatgcattgttgttttaatttgctttttgcatataacaagtagtactgagcatat

SEQ ID NO: 405497 - DNA, 431 bp, Homo sapiens
gtattgcattgtattcgttccttttcatactgaaataaagaactacctgagactgggtaatttataaaggaaagaggtttaattgactcacagttctgcatggctggggaggcctcaggaaacttacaattgtggcagaaggtgaaggggaagcaaggcatgtcttacatggtggcaggagagaaagagagtgaagggggaactgccacacacttttaaaccatcagatctcatgaaaattcattcattatcacaagaacagtatgggagaaactgcccccataatccaatcacctcgccacyaagtccctccctcaacacatgggcattacaatttgagatgagatttgggtggggacacggagccaaaccatctcatgcattgttgttttaatttgctttttgcatataacaagtagtactgagcatat

SEQ ID NO: 405498 - DNA, 620 bp, Homo sapiens
ggtaattattcttttgctgttgtggttattttgttgtcttgcatcagattttttctagagaaactattgtatatattaattttatatgcagccacctgtaatatttactgtaaaaagtgaatttgacatggtatttattttaataaatcacttaaaatattgtttttttatttttttaaagaaatgtaagcatttaactcaaaagttagttagaaataacaattagataccaccagacacctgttagaatgaccaaaattcaaaacactaacaacaccaaatgttggcaagggcaaccagcactctcattcactgctggcaggactttaaaatgctacagtcactttggaagagagtttggaagtttcttacatataacaggcttttgccataacatctgacaattgcactcrcaaatatttaccagaatgagttgaaaacatatgtccacacaaactcctgcacactgacatgtatagcagctttactaataattgctaaaatttgtaagcaaccaaaatgtccttcagtaggtgaatggatagactgtggtacattcagacagtagaacattattcatccctttaaaaaatgagctatcaagccatgtaaagataagg

SEQ ID NO: 405499 - DNA, 645 bp, Homo sapiens
aatggaatagcttgttccacccaatttaacacagctttatatccattcagtggcaagctctctaacaaaaaattgcatggtgttttacaattgatcaaatcttctatgtattwtttcattttatgactttaacccttaacagtctctatgaatgagccattatctccaacacctttattcacacttgcacaaatgcgccaagtttagagtgctgttaagtgacagagttggattaatcggaaaatctggaattcagctcacattctgacacatgcttggctgtctgatcatagaaaaaccactggcttctcagttacagttttcttatatgtaaaatggacataattatgatttaaccatcccatacaattataagaggattaaacaatgcaatataagatataaagcaatttctcaatgcatgatgcttcttgtctgtaattttactttgtgctccacagtctactgtaaagtctgttattctttttatactactctctgttcaatccactttgatcatcctaggaaaggaatgtaaaaagctatattaagaaaataaatacatatgtgttatatatatttaatatagttctataaagatatatgtatataaataatagtattcatattagtatcagcacaata

SEQ ID NO: 405500 - DNA, 645 bp, Homo sapiens
aatggaatagcttgttccacccaatttaacacagctttatatccattcagtggcaagctctctaacaaaaaattgcatggtgttttacaattgatcaaatcttctatgtattttttcattttatgactttaacccttaacagtctctatgaatgagccattatctccaacacctttattcacacttgcacaaatgcgccaagtttagagtgctgttaagtgacagagttggattaatcrgaaaatctggaattcagctcacattctgacacatgcttggctgtctgatcatagaaaaaccactggcttctcagttacagttttcttatatgtaaaatggacataattatgatttaaccatcccatacaattataagaggattaaacaatgcaatataagatataaagcaatttctcaatgcatgatgcttcttgtctgtaattttactttgtgctccacagtctactgtaaagtctgttattctttttatactactctctgttcaatccactttgatcatcctaggaaaggaatgtaaaaagctatattaagaaaataaatacatatgtgttatatatatttaatatagttctataaagatatatgtatataaataatagtattcatattagtatcagcacaata

SEQ ID NO: 405501 - DNA, 557 bp, Homo sapiens
attatgtgattagtttccatttccagcatgacctaataaaatgctttggcagcatgtagttgccaaatatgtgttttacgaatgaatgaatgaatgaatgaatgaattttaagcatctatctgatattttaaatatctatttgatttccagaaatataaatgacaacttagtagcttgttgtctcgtaagacagacagacaagttttcctaggggtatgccgtacactgagaaaagaggaggatgtggaatcagaagttctgagtctaaaatctcacctccacagtgccaggctccaaggcattctgcaagacttctatcctccttcagcctgttccccattccccacaagactagaaaataaggtgatgtttcattgcattgtgaaaattaatgaaaatacctgatatctcatcagaaaaaataaaggactttctccataaatgttaattaccacttctgytctgggaaatcacaaactaagagataaggaggaaaaaaaaaatcctccagttcagacgactgatgatatatgaccacaaggtgacagcattgagt

SEQ ID NO: 405502 - DNA, 656 bp, Homo sapiens
atttttctggcataaaggaggaagagtgtcaattctgaatgtctaaaaatgtatattatccagtgtgaacacacaacagatagttgctaaaaactataagatatgagcgttataatctcaggggcgttgcgctgtgtctccacatttttattgctttctaaggcttagaaaatcattcgcgttgacatgttgttgttaatgttgatatgcaatggaaatggggaagtttttgttctctttgcctggggaagtttttttctctttgcctagagaagtttatcagaggattatcaggcttttacagagaggaaagaaaagtttccaattctttttctggggggcatttcaatttttctagtgcagaagaaagactcttcccataaagattgattactgaacagtaggacagttaccccgctgcctctgggaagcagagcaatctcaaaagttcagatacagctctcaaagcctggccgtccttccttccaaacttctggggcttcccaagagtagaccttccgtttgtccctcagaaactmtctaccctaaaattcaactctcctcataagaatttcactctcttctagaccctgttgcccttcctgctgggatcttgccgcccctcactttgtcctttggtcttggttgaaagtcat

SEQ ID NO: 405503 - DNA, 656 bp, Homo sapiens
atttttctggcataaaggaggaagagtgtcaattctgaatgtctaaaaatgtatattatccagtgtgaacacacaacagatagttgctaaaaactataagatatgagcgttataatctcaggggcgttgcgctgtgtctccacatttttattgctttctaaggcttagaaaatcattcgcgttgacatgttgttgttaatgttgatatgcaatggaaatggggaagtttttgttctctttgcctggggaagtttttttctctttgcctagagaagtttatcagaggattatcaggcttttacagagaggaaagaaaagtttccaattctttttctggggggcatttcaatttttctagtgcagaagaaagactcttcccataaagattgattactgaacagtaggacagttaccccgctgcctctgggaagcagagcaatctcaaaagttcagatacagctctcaaagcctggccgtccttccttccaaacttctggggcttcccaagagtagaccttccgtttgtccctcagaaactctctaccctaaaattcaactctcctcataagaatttmactctcttctagaccctgttgcccttcctgctgggatcttgccgcccctcactttgtcctttggtcttggttgaaagtcat

SEQ ID NO: 405504 - DNA, 645 bp, Homo sapiens
aatggaatagcttgttccacccaatttaacacagctttatatccattcagtggcaagctctctaacaaaaaattgcatggtgttttacaattgatcaaatcttctatgtattttttcattttatgactttaacccttaacagtctctatgaatgagccattatctccaacacctttattcacacttgcacaaatgcgccaagtttagagtgctgttaagtgacagagttggattaatcggaaaatctggaattcagctcacattctgacacatgcttggctgtctgatcatagaaaaaccactggcttctcagttacagttttcttatatgtaaaatggacataattatgatttaaccatcccatacaattataagaggattaaacaatgcaatataagatataaagcaatttctcaatgcatgatgcttcttgtctgtaattttactttgtgctccacagtctactgtaaagtctgttattctttttatactactctctgttcaatccactttgatcatcctaggaaaggaatgtaaaaagctatattaagaaaataaatacatatgtgytatatatatttaatatagttctataaagatatatgtatataaataatagtattcatattagtatcagcacaata

SEQ ID NO: 405505 - DNA, 645 bp, Homo sapiens
aatggaatagcttgttccacccaatttaacacagctttatatccattcagtggcaagctctctaacaaaaaattgcatggtgttttacaattgatcaaatcttctatgtattttttcattttatgactttaacccttaacagtctctatgaatgagccattatctccaacacctttattcacacttgcacaaatgcgccaagtttagagtgctgttaagtgacagagttggattaatcggaaaatctggaattcagctcacattctgacacatgcttggctgtctgatcatagaaaaaccactggcttctcagttacagttttcttatatgtaaaatggacataattatgatttaaccatcccatacaattataagaggattaaacaatgcaatataagatataaagcaatttctcaatgcatgatgcttcttgtctgtaattttactttgtgctccacagtctactgtaaagtctgttattctttttatactactctctgttcaatccactttgatcatcctaggaaaggaatgtaaaaagctatattaagaaaataaatacatatgtgttatatatatttwatatagttctataaagatatatgtatataaataatagtattcatattagtatcagcacaata

SEQ ID NO: 405506 - DNA, 539 bp, Homo sapiens
gttgactgagagtgcttttggtaggtagaagaaggagcatgaaaagatgtccatatcctaatccctaaacctatacatatgttcatttacatggaaaaggagacttggaagatgtgataaagttaagaatcctgagatgatccagaggggatgatcctaaattatttacatgtatccactgagatgactagggtccttacaagtgaaagagggaagcagaagaggcagaggcagattaagaagtgacgacagcaccagaagtccaagagatgtagcctcaagtcaaggaatgtgggccactcctagaagttagaaaatcaaggaatagattwtcctctagaggatccagaccacagctctgttaatattttatttttatcctgcatgacctatttcagacttctgacctccaaaattgtgagatactaaatgcatgttgttttaagccactgtttgtggcaatgtgtcactgcagcaatagggaagtaatacagtgctgtttccagcctgcagaaatgcctcttggccagtttcattgt

SEQ ID NO: 405507 - DNA, 565 bp, Homo sapiens
ttcatttacatggaaaaggagacttggaagatgtgataaagttaagaatcctgagatgatccagaggggatgatcctaaattatttacatgtatccactgagatgactagggtccttacaagtgaaagagggaagcagaagaggcagaggcagattaagaagtgacgacagcaccagaagtccaagagatgtagcctcaagtcaaggaatgtgggccactcctagaagttagaaaatcaaggaatagattttcctctagaggatccagaccacagctctgttaatatyttatttttatcctgcatgacctatttcagacttctgacctccaaaattgtgagatactaaatgcatgttgttttaagccactgtttgtggcaatgtgtcactgcagcaatagggaagtaatacagtgctgtttccagcctgcagaaatgcctcttggccagtttcattgtcacaggagttgtactaacatgcttcccctatatgctagtttgaagcaaaatgcatcaaaactttcctggccttttgtaacctaggacactgttgtcctttgcttctg

SEQ ID NO: 405508 - DNA, 565 bp, Homo sapiens
ttcatttacatggaaaaggagacttggaagatgtgataaagttaagaatcctgagatgatccagaggggatgatcctaaattatttacatgtatccactgagatgactagggtccttacaagtgaaagagggaagcagaagaggcagaggcagattaagaagtgacgacagcaccagaagtccaagagatgtagcctcaagtcaaggaatgtgggccactcctagaagttagaaaatcaaggaatagattttcctctagaggatccagaccacagctctgttaatattttatttttatcctgcatgacctatttcagacttctgacctccaaaattgtgagatactaaatgcatgttgttttaagccactgtttgtggcaatgtgtcactgcagcaatagggaagtaatacagtgctgtttccagcctgcaraaatgcctcttggccagtttcattgtcacaggagttgtactaacatgcttcccctatatgctagtttgaagcaaaatgcatcaaaactttcctggccttttgtaacctaggacactgttgtcctttgcttctg

SEQ ID NO: 405509 - DNA, 643 bp, Homo sapiens
aactcttgtgcttttataaaaggttcttaaagtgaatttatctacaccaaaatttgggaaccactaatagaatttatttatatagtttataatgtttggaagtattatcaacattataaggcaattgtgaggattgcaagaaataaagtatttggcatagtttctgccatgggtaagttcttgataaatgttagtaacacaaaaaagtgttttgcacatttcttgggcaggaattgcatcttatatttcygatttccaagtcaaggtagacgggaccatggtatctgttcaatacattcttattgatcaaagctgcttttctatttcagagtttatgctgtcttttcttttttggttctttcttctcatgtctatttttggactggaaacatctcagggaaatgagaactgcaccttgaccaaagctgctttggtcactgtgaaatgtttcatttggagtatcttaagcagtgttttctgagataagtagagtggctattattagtctggtttcatgtatgaaaatagagatcagaaaacaaaaggtgaccttgtacagatactttcttggttaaaattaaaaaacaaacagacaaaaaagactagaactcaatatttcattagaatcttttccacttcacta

SEQ ID NO: 405510 - DNA, 643 bp, Homo sapiens
aactcttgtgcttttataaaaggttcttaaagtgaatttatctacaccaaaatttgggaaccactaatagaatttatttatatagtttataatgtttggaagtattatcaacattataaggcaattgtgaggattgcaagaaataaagtatttggcatagtttctgccatgggtaagttcttgataaatgttagtaacacaaaaaagtgttttgcacatttcttgggcaggaattgcatcttatatttctgatttccaagtcaaggtagacgggaccatggtatctgttcaatacattcttattgatcaaagctgcttttctatttcagagtttatgctgycttttcttttttggttctttcttctcatgtctatttttggactggaaacatctcagggaaatgagaactgcaccttgaccaaagctgctttggtcactgtgaaatgtttcatttggagtatcttaagcagtgttttctgagataagtagagtggctattattagtctggtttcatgtatgaaaatagagatcagaaaacaaaaggtgaccttgtacagatactttcttggttaaaattaaaaaacaaacagacaaaaaagactagaactcaatatttcattagaatcttttccacttcacta

SEQ ID NO: 405511 - DNA, 643 bp, Homo sapiens
aactcttgtgcttttataaaaggttcttaaagtgaatttatctacaccaaaatttgggaaccactaatagaatttatttatatagtttataatgtttggaagtattatcaacattataaggcaattgtgaggattgcaagaaataaagtatttggcatagtttctgccatgggtaagttcttgataaatgttagtaacacaaaaaagtgttttgcacatttcttgggcaggaattgcatcttatatttctgatttccaagtcaaggtagacgggaccatggtatctgttcaatacattcttattgatcaaagctgcttttctatttcagagtttatgctgtcttttcttttttgsttctttcttctcatgtctatttttggactggaaacatctcagggaaatgagaactgcaccttgaccaaagctgctttggtcactgtgaaatgtttcatttggagtatcttaagcagtgttttctgagataagtagagtggctattattagtctggtttcatgtatgaaaatagagatcagaaaacaaaaggtgaccttgtacagatactttcttggttaaaattaaaaaacaaacagacaaaaaagactagaactcaatatttcattagaatcttttccacttcacta

SEQ ID NO: 405512 - DNA, 549 bp, Homo sapiens
cagtgcaggtggcaagcactgcacagaactgcctttcccaacagtcaatcctctaactcatgcctggcccctgaaatagcagacaaagcacatccaatctgggaggataactgtttacactgaatctggaggcagagctgggtcagatgggaaccatgaacaaaccttatggatgctgtggatgagattttctttttttgcagagtacctctgtcattttgagatagtgccttaccagggtcaccaggagaaccagtcccaggaggatgttcagttctcactggagaatagtcttcaaccggaagcctcaaactcaatgaaagagtctaaaacaagagtctaagagaaactgcagacatatagctgacaatcattctgcctgagcttagatcgcctccagttgggtttctgccttcctccaattgttaatgcacacacgtctatgtcaccartaatataaatgccctcttctttcaccagcaaacaactgagggctatctggttgcccatcaccacctcggctagtgagtttggtgagttctgttggcc

SEQ ID NO: 405513 - DNA, 558 bp, Homo sapiens
tttatcagggatgtatttttccatacyagaagggcacaaaacacaactgaattgtattttgtgtacgaattaaatacaaacttacctgaattctggaaggaaaagaacaagacacagttataaaaagtttcatgcaaagtaataattaatcttattttatatttcttgtctgcaatatgaaactagaatacattgaataagtagatgcaattttgagtaaaaggattctttaaaaataatcaaaattacaaaatcaagaaataattttagaagcttggtggtatatattgaaatgtttattcataggttgtaaatttaaatgcaaataatagtaatgtaatatgaaaatgaaataaatgtacatatattaaaatattaaatgtatttgatactgtctaaatactttttaatttaaaatgcagttaataaaattgaaataatttgtttttaacttcctaactgtacattatatcaatgattaagttggattcatagggataattttttcctggactttgataacaggcaaataaagactgaaaagcatttttaaagcaa

SEQ ID NO: 405514 - DNA, 566 bp, Homo sapiens
aaaaactggttgcctagtttcaaaatcactactgtaagaaggatagataaacaaaaggcaagataaaatgcagagtctataatatcaagaaaaatatgttattataaaatgttgctgtggttatttccctgtggtagtagaggggagatgtcatgtgggaattttgtgtcccttgtatctttttatattactcaaattcttagtgcttagcattaataattgtaataataatgraacattctgtttaaaaacttggaaaaaatggaaaaaaagtaatttatgttttgaacaaactctatgacatgacttaattcacttacaagattatcctcatagaaagtattacttaatgccatggaagatcgtactctgtacttcaccattgcccatggaaaattcattgtaagccccatagcatttcttatatttacttatggtactgttttacagaatgagcatcatacctaatcaacaccaaataatacatattctagatttgttagaaaaaaggtaaaactttaaagcattaaaaagatccttcaatatattcacataccacaacaact

SEQ ID NO: 405515 - DNA, 589 bp, Homo sapiens
tgtaagaaggatagataaacaaaaggcaagataaaatgcagagtctataatatcaagaaaaatatgttattataaaatgttgctgtggttatttccctgtggtagtagaggggagatgtcatgtgggaattttgtgtcccttgtatctttttatattactcaaattcttagtgcttagcattaataattgtaataataatgaaacattctgtttaaaaacttggaaaaaatggaaaaaaagtaatttatgttttgaacaaactytatgacatgacttaattcacttacaagattatcctcatagaaagtattacttaatgccatggaagatcgtactctgtacttcaccattgcccatggaaaattcattgtaagccccatagcatttcttatatttacttatggtactgttttacagaatgagcatcatacctaatcaacaccaaataatacatattctagatttgttagaaaaaaggtaaaactttaaagcattaaaaagatccttcaatatattcacataccacaacaacttgaggaagatacatatttacatataaattcaaattccaaggaatatgttgagaat

SEQ ID NO: 405516 - DNA, 627 bp, Homo sapiens
ggataaggtactgtgcttaagacattgtattagtttgttcaagctaccataatgaagtaccgtagactggatggwttaagcaacagaaatttattttctcataattttgggatcaagctagcatcaaggttggtttcttctgaggcctccctccttgtcttatagactgtcatcttctacctctgtcttcacagaggtggtcctgcctctgactatgcctgcatcttaatctcttcttatgaagacaccaggcatattggaatggggctacccctatgacctcattttaacctacttagctatttaaagactttgtcccaaatacagtcccattctgaggttctggggtttgggaattcaatgtgtgaattttgaagaaacacagttcacttcataacattgatgtggattattttatattattatttataaatttcatataactaattacattttaggatgagcgctgagcatcaaatatgttaaatgtctttcccaaagagctgaaaaatgacataactagaatttaaaggtctgtctgggaaacttcaaagctcatagtaactatttcagtgttttgttcaccctctgtcatatcttatttcaaggtgctccctctgaatatac

SEQ ID NO: 405517 - DNA, 627 bp, Homo sapiens
ggataaggtactgtgcttaagacattgtattagtttgttcaagctaccataatgaagtaccgtagactggatggtttaagcaacagaaatttattttctcataattttsggatcaagctagcatcaaggttggtttcttctgaggcctccctccttgtcttatagactgtcatcttctacctctgtcttcacagaggtggtcctgcctctgactatgcctgcatcttaatctcttcttatgaagacaccaggcatattggaatggggctacccctatgacctcattttaacctacttagctatttaaagactttgtcccaaatacagtcccattctgaggttctggggtttgggaattcaatgtgtgaattttgaagaaacacagttcacttcataacattgatgtggattattttatattattatttataaatttcatataactaattacattttaggatgagcgctgagcatcaaatatgttaaatgtctttcccaaagagctgaaaaatgacataactagaatttaaaggtctgtctgggaaacttcaaagctcatagtaactatttcagtgttttgttcaccctctgtcatatcttatttcaaggtgctccctctgaatatac

SEQ ID NO: 405518 - DNA, 627 bp, Homo sapiens
ggataaggtactgtgcttaagacattgtattagtttgttcaagctaccataatgaagtaccgtagactggatggtttaagcaacagaaatttattttctcataattttgggatcaagctagcatcaaggttggtttcttctgaggcctcyctccttgtcttatagactgtcatcttctacctctgtcttcacagaggtggtcctgcctctgactatgcctgcatcttaatctcttcttatgaagacaccaggcatattggaatggggctacccctatgacctcattttaacctacttagctatttaaagactttgtcccaaatacagtcccattctgaggttctggggtttgggaattcaatgtgtgaattttgaagaaacacagttcacttcataacattgatgtggattattttatattattatttataaatttcatataactaattacattttaggatgagcgctgagcatcaaatatgttaaatgtctttcccaaagagctgaaaaatgacataactagaatttaaaggtctgtctgggaaacttcaaagctcatagtaactatttcagtgttttgttcaccctctgtcatatcttatttcaaggtgctccctctgaatatac

SEQ ID NO: 405519 - DNA, 627 bp, Homo sapiens
ggataaggtactgtgcttaagacattgtattagtttgttcaagctaccataatgaagtaccgtagactggatggtttaagcaacagaaatttattttctcataattttgggatcaagctagcatcaaggttggtttcttctgaggcctccctccttgtcttatagactgtcatcttctacctctgtcttcacagaggtggtcctgcctctgactatgcctgcatcttaatctcttcttatgaagacaccaggcatattggaatggggctacccctatgacctcattttaacctacttagctatttaaagactttgtcccaaatacagtcccattctgaggttctggggtttgggaattcaatgtgtgaattttgaagaaacacagttcacttcrtaacattgatgtggattattttatattattatttataaatttcatataactaattacattttaggatgagcgctgagcatcaaatatgttaaatgtctttcccaaagagctgaaaaatgacataactagaatttaaaggtctgtctgggaaacttcaaagctcatagtaactatttcagtgttttgttcaccctctgtcatatcttatttcaaggtgctccctctgaatatac

SEQ ID NO: 405520 - DNA, 508 bp, Homo sapiens
tggggggttaggggagggatagcattaggagaaatacctaatgtagatgggaggttgatgggtgcagcaaaccaccatggcacatgtatayacctatgtaacaaacctccacgttctgcacatgtaccccagaacttaaagtataatcataataagaaaaaagactggcctcttatcacagcacaatttacatgtagggcatgtctttctcttggctacgtctttcttcattcccattatcagattctcgctcattctttctctgctaccattattctattccttgcctacctcacatgttctcttaaataagggactttatatctgctatttttatctgtttggaatcaccttctttaaaatatttatatggcttgctctatcattttgttcacgtttctctttaaatatcaccccatggtggaattcattgatgattgtaagaacccatgctacacagctcatcattttcttatcttgatttgctctatttgtcttcctaaaatta

SEQ ID NO: 405521 - DNA, 508 bp, Homo sapiens
tggggggttaggggagggatagcattaggagaaatacctaatgtagatgggaggttgatgggtgcagcaaaccaccatggcacatgtatacacctatgtaacaaacctccacgttctgcacatgtaccccagaacttaaagtataatcataataagaaaaaagactggcctcttatcacagcacaatttacatgtagggcatgtctttctcttggctacgtctttcttcattcccattatcagattctcgctcattctttctctgctaccattattctattccttgcctacctcacatgttctcttaaataagggactttatatctgctatttttatctgtttggaatcaccttctttaaaatatttatatggcttgctctatcattttgttcacgwttctctttaaatatcaccccatggtggaattcattgatgattgtaagaacccatgctacacagctcatcattttcttatcttgatttgctctatttgtcttcctaaaatta

SEQ ID NO: 405522 - DNA, 590 bp, Homo sapiens
attatcttaccacataaatacattttgtctaaaatgtatcaaacactccaacaggccacttttgctaagttatcacagggacttgagggaattggaagttagtctcaactcgccaccctgctctgggtaacaataaacaagttataacaastattttgtcttcaatttccccgaaatgaaggtctcagacttgctgaccctcaaattcatctttaagaactagccagaaaatgacaatagagctgataaaatctgtgtttctgcagtttttattcagacttcaaatatattattgtgggataatacagaatttcctgatgccaggaaattaatgtgtctgtgactttatggggagagaaaagtggatggtttgaggctggtacttttcctggaatctgtcctataagtctcatctcttggctgattttgatctgcattctttctgtctaataaactatacctgtgaatgtaataactttcagcaaaatctgtgaatctttctaggaaattatagaacctgggatagtttggggaaccatcagaacttgcagttggtgtcagaagtgagagcggtctcgtgtagactctgt

SEQ ID NO: 405523 - DNA, 620 bp, Homo sapiens
caccctgctctgggtaacaataaacaagttataacaagtattttgtcttcaatttccccgaaatgaaggtctcagacttgctgaccctcaaattcatctttaagaactagccagaaaatgacaatagagctgataaaatctgtgtttctgcagtttttattcagacttcaaatatattattgtgggataatacagaatttcctgatgccaggaaattaatgtgtctgtgactttatggggagagaaaagtggatggtttgaggctggtacttttcctggaatctgtcctataagtctcatctcttggctgattttgatctgcattctttctgtctaataaactatacctgtgaatgtaataactttcagcaaaatctgtgaatctttctaggaaattatagaacctgggatagtttgrggaaccatcagaacttgcagttggtgtcagaagtgagagcggtctcgtgtagactctgttgcttaactttgcagttggctacaactcctgcagggcttcaaagctctgcctcaggggactaactatattagaacacagcttggagaattctatacctaatggcatcataagagaaaaaatacatacacacacaatggagagc

SEQ ID NO: 405524 - DNA, 549 bp, Homo sapiens
ctgaccaaacactaagagaacaattggctactctggtccagggaggactcctaaggacccaaacataaaaataaaatcacacttatccttggatgtctggaaggacgatgtgcctgatagctttattctgtcacaagtgattggcaaaggaaatggcaagtgactcataagtttctggcttaatgtgagataaaaactgttaacccctgaactgtgataatactctcgagccacacacacatccaataactaagatgtcaattgaaagacaagtgttgatgaagatgtgtagaaattggaacacttatgcactgctggtgggaatgtaaaattgtgcagctrcttggaaaacagtttagtagtttctcaaaatgttaaacatagagttaccatcaggtccagcagttccattcctaggtatatatctacccagtagaaatgaaaacataccttctacaaaaaattacatatgaatattcatagcaacattattcacaatagccaacaagtggaaataactcaaatgtccatcagtgatgtatggttaca

SEQ ID NO: 405525 - DNA, 571 bp, Homo sapiens
aatatgtataaaattggaagaaagttcaagaaaatattaataattttcttcaagtacaggattctgggatgtttttaaartaagttcctttatgaatttatttttcaagtttcacaaactggtcatatatttattagataatcagaataaaaattaaagtacggcaatatctttggaatagtctatggcaaccttgggaactttgaagaggacattggtcatcagcacaggtgcattctagtcacctaaccatctaatccctagacttgtgtttggctaatgttatctctaaatctttatgaaaaagaaaagttatatcctatggccccattttggccttctggttggaggctaatgtgaagatctgatttatccttacacctcggaatctagaactgtgcttgacatattatagatatcaagacattactatttattgtacacaagatctggtcaaaacatttgttcttgtcacaaatagtgtacggttaatctcagaattttggccatatttttcttggggtttttccctatcacatattaagtgtatctatttttgtcctattgtatg

SEQ ID NO: 405526 - DNA, 571 bp, Homo sapiens
aatatgtataaaattggaagaaagttcaagaaaatattaataattttcttcaagtacaggattctgggatgtttttaaaataagttcctttatgaatttatttttcaagtttcacaaactggtcatatatttattagataatcagaataaaaattaaagtacggcaatatctttggaatagtctatggcaaccttgggaactttgaagaggacattggtcatcagcacaggtrcattctagtcacctaaccatctaatccctagacttgtgtttggctaatgttatctctaaatctttatgaaaaagaaaagttatatcctatggccccattttggccttctggttggaggctaatgtgaagatctgatttatccttacacctcggaatctagaactgtgcttgacatattatagatatcaagacattactatttattgtacacaagatctggtcaaaacatttgttcttgtcacaaatagtgtacggttaatctcagaattttggccatatttttcttggggtttttccctatcacatattaagtgtatctatttttgtcctattgtatg

SEQ ID NO: 405527 - DNA, 571 bp, Homo sapiens
aatatgtataaaattggaagaaagttcaagaaaatattaataattttcttcaagtacaggattctgggatgtttttaaaataagttcctttatgaatttatttttcaagtttcacaaactggtcatatatttattagataatcagaataaaaattaaagtacggcaatatctttggaatagtctatggcaaccttgggaactttgaagaggacattggtcatcagcacaggtgcattctagtcacctaaccatctaatccctagacttgtgtttggctaatsttatctctaaatctttatgaaaaagaaaagttatatcctatggccccattttggccttctggttggaggctaatgtgaagatctgatttatccttacacctcggaatctagaactgtgcttgacatattatagatatcaagacattactatttattgtacacaagatctggtcaaaacatttgttcttgtcacaaatagtgtacggttaatctcagaattttggccatatttttcttggggtttttccctatcacatattaagtgtatctatttttgtcctattgtatg

SEQ ID NO: 405528 - DNA, 571 bp, Homo sapiens
aatatgtataaaattggaagaaagttcaagaaaatattaataattttcttcaagtacaggattctgggatgtttttaaaataagttcctttatgaatttatttttcaagtttcacaaactggtcatatatttattagataatcagaataaaaattaaagtacggcaatatctttggaatagtctatggcaaccttgggaactttgaagaggacattggtcatcagcacaggtgcattctagtcacctaaccatctaatccctagacttgtgtttggctaatgttatctctaaatctttatgaaaaagaaaagttatatcctatggccccattttggccttctggttggaggctaatgtgaagatctgatttatccttacacctcggaatctagaactgtgcttgacatattatagatatcaagacattactatttattgtacacaagatctggtcaaaacatttgttcttgtcacaaatagtgtacggttaatctcagaattttkgccatatttttcttggggtttttccctatcacatattaagtgtatctatttttgtcctattgtatg

SEQ ID NO: 405529 - DNA, 563 bp, Homo sapiens
gtttgataaaagatgatacatacctaggcatttcctgataaaatttatgcacttcagggataaagatgaaaaggtagatgaatagacagagagatagttggaaatgtagactccagaaacaaagacacccccacttccagaaacaaagggcaatttagctatataaaaaaaatcaagaaaccagtttggtaattggacaatgtaaaggaaagagtagaaaatagaagatagtaaaataatatctacaaatatttatggaaaagtaatgtctcactaaccatattccatcaccccaataggggaaaggaaatgatacttgcagctactaaaatattcagagcctatcacctactaataccacggaagaaattactaaagcaaggactataatcaaacaacaaattattcagragagagacctcaaaactgaaatgaataaagatgaaagagaacaagggtgattagtattttctctctgcttctgtctttatcattggtaactggtagaaagacttcggttgaattcatttttcctaaacatctctgataataaaaatcaggga

SEQ ID NO: 405530 - DNA, 572 bp, Homo sapiens
gcaaaaaggatggatacagaaagaagtgaagaatttgagtcactttttaaaatcagttgaccatattgcccaagccttctgttagggaggtagagaaggtcaacagagagaaagaagaaagrgaaagaatgcaagaaagcaaagcatatagaaaaagcacagcacattatataatcttatttatttatttttaattaaaaacattttagagatggtgtcttgctgtgttgcccaggctggcctcaaattcttgagataaatcagttttcctttcttagcctcctgaatatctgtgactataggcatgctccactgtaccctgcctatttatttatgtaaaactatccctatgtatatatatgcatgcatgcataaggaaaaaactttaaaccccgattttaagaagaaatataaagtaaaatatttcaaaccagggtagtttctatatggaataggattgtgagtgggactgtaatatagaggggctagagaatgaatgagtttggaatgccagatacatcagagaagaacaacttagttctaactgggggtttcgtagaataatgttatgg

SEQ ID NO: 405531 - DNA, 534 bp, Homo sapiens
caatcataaatcagtagaaggaaaaatgagatcaaaatgcattatacaacaaaaattatataaggctcattaatctgtgacccttgattactggtaatgagtcagtggaaagaaagataacatggctataataaagcaaattggtggaaagttttttatagttctaaacatcccccactcatttcataaagttaaatgactactgttgctttggtctggcaaaatattgtatattacttctccggagaaaagggcctatggtcttggggccaggaagtattaataaggttggaggtagaaaagggaaaacaaggagatttagttagtatttgtggtctggctgttgagcatcctggtgtgcttttcttacttagaaaccaatgttcccaccaccattgccagaaccttcactctccaagtaggattttagtgaaatttctgggcagtctcaccagcccgagagaaaaggcacaaaggtatcaacattcaaagttttacaactaacargccctattagatatcttctggatgagg

SEQ ID NO: 405532 - DNA, 592 bp, Homo sapiens
gaaatctagtgtgaaaccccgagccacagtcgggccacagtggggccaccatgattgcaggagagaggccagacccctccccactcataatcctctcaccgccatgccacgaggcactgctgcaaagcctgcagctctgagctgggcaaaaagattgagacactaaggctctgggagggtaaaagagaagcctgaggtacaagccttggcccccacacagttctcrgttgcacagggaaggtccccaaattgtatcactgaaagaatgacaagccctcacatccccacagcctagtgtggatggatgcaggggcagggagtgcaaggaagctgggaaagggagaggcgtgtgggcagagcaggcacacagcccctctgaggaggtgagccctgagccactcgccccgtgcagagctcggctagacagagaaaaggatgggtgacaggcacaccccgcggagcaggaggggctgctttacagaatcacctcctgtgcttcttatgggcccaggcctgcctcccctgaactgcctggattccttcctcctcagtcagtcaaaaccttcccttctttatcctagagaccttccgc

SEQ ID NO: 405533 - DNA, 435 bp, Homo sapiens
atgggtgtgtcaaaaggacaggaaggtgggaagcttgctgagtgtgactttctgagtggcacggtcggaggacaggatggtgtggacagggctgcatcatcacacacacacccatgccaggagcaagggcagtgctcggcagtgatggcatgctgtatacaagtaccaaacaggcccaagtgacctcatccacagggactgttgtaaagcctccacagtcatttcaagtagaatagctacctgcctaaggagttgaacccctcttgctaatgcttttgaatagcgagagggtcagacacacagcaaagtttgggrcaggtcactttgcctcccagtcccctgcttggttagccaggatagatgcccatgtttgtgagcatggactttggagttaaagctaatatctaaagatcctgaatcctaggctgtcagact

SEQ ID NO: 405534 - DNA, 559 bp, Homo sapiens
actagtaatatttcttgttctgaagtctattttgtctaatattaatgtggccactccagcttacttttaaataaggcttgcataatatatctttccccattattttagttttatcctaactgtataataagagacagaatatagttttgtctttaaaaaaaatccaatttgacaattgcactttttaatttgtgtatgcattagtstgctagggctgccataacaaaatatcatggactgggcggtctaaccaacagaaatgtatttgctcacagttctagaggctgggactccaagatgaaggtgagagtatggctgggagtccaagatgaaggtgacagtagggttggttcctgctgaagcctctctctttggcctgcagatggctgcctcctccctgtgtcttcatgtggccttttctgtgtgtgtgcgtatctctggtatctctcttcttataagaacactagtcataatggattgggctctattcttatcatctcgttcaactttaactacctctttaaaagttctatgtccaaatagagtcacattctagggt

SEQ ID NO: 405535 - DNA, 633 bp, Homo sapiens
tagttttcctttaatttttctcagcaatgttttatagttttttaatgtagatatctttaatgtctttaatgttatattttttcccaagtattttgtattttggatgttactattctcctattttttgttgctattatataataatataattttttaatattaaccttgtatcttgtgaccttactaaatttaagtattagttctagtagttgttttgtagatttcctacmatcaaaataccaaaataggaccttcttgtttctgatctttatgcctttaattttcttgttgcattggctaggaccttcacaacagtggtaaatagaactataacagtgggcattcttgccttgattctgattgtaaagggaagaaaatgcactttccatcattaaatattatgttagctgtaaatttttcacagataccctcctgaggatgttacctactatttctagttttctaacagtttttatcataaattatgtctttgtagctttttactgtggtagattgcaggtggatttttaaaaatataaatcaacctaacattcctgaaataaacccaacttatgatgtggtatctttcttcttcttcttttttttacattattggatttgatttgctaaaat

SEQ ID NO: 405536 - DNA, 633 bp, Homo sapiens
tagttttcctttaatttttctcagcaatgttttatagttttttaatgtagatatctttaatgtctttaatgttatattttttcccaagtattttgtattttggatgttactattctcctattttttgttgctattatataataatataattttttaatattaaccttgtatcttgtgaccttactaaatttaagtattagttctagtagttgttttgtagatttcctaccatcaaaataccaaaataggaccttcttgtttctgatctttatgcctttaattttcttgttgcattggctaggaccttcacaacagtggtaaatagaactataacagtgggcattcttgccttgattctgattgtaaagggaagaaaatgcactttccatcattaaatattatgttagctgtaaatttttcacagataccctcctgaggatgttacctactatttctagttttctaasagtttttatcataaattatgtctttgtagctttttactgtggtagattgcaggtggatttttaaaaatataaatcaacctaacattcctgaaataaacccaacttatgatgtggtatctttcttcttcttcttttttttacattattggatttgatttgctaaaat

SEQ ID NO: 405537 - DNA, 596 bp, Homo sapiens
cagaacacactcaagaatagctgatatgtaatatttaatctgctgacactcaggagattttattgaatacctactatgtgccaggcctagcgctaggtgctggcatatcaagatactgctaagacatagttgtatggctcagcagtakctaagacatatctcccattaaggagccctcatcatttttccgttaattcaaataatgttcacatacttatcactgttgctgctctgtcatttgttcttgtgttcactgacatccactgtctattctctgagaaccttaccgacatgacccaattcccctttgatctgcacacttcctgcagtatgcagccagggctaggagagttgttggatcaggctagggttagtcactgccaaggcctgaattgtaccgtccccctcccccaacaaattcatatgaaaccctaacccccaacatgattgtacctagagataaggtctttaagaggcaattaagcttaaaagagatcataaaagtgaggactaatctgatagaactgtggtcttataagaagaggatgagggaaagatctcttccccaccctccaccacatactggcactctgatc

SEQ ID NO: 405538 - DNA, 604 bp, Homo sapiens
cccgagcatgcacagagaattggtagacccatgattttcacaactcttcattatcgagtgccatcgccttttgtcttgaattgacaatcaatttctrtcactgttttcttactcttgaatgatatcttgacatttcagctttatcactatttaatttgttgcgggccctctttttaaccctattttgagtggtgagacatactgaatattttgtgccattattctataagaactcaattgaagaaatgtacatgtgtattaggttaaactaaacagagctgtttgtatttaaccatttcttaccttaggttaaaccctatgaaactgactatattcaaccatttttgacctacaaaaatggcagttctgtatggtccaatctaatagttcaaatgtaaatgtaaattattcatatcttgtttgtcagacagttgtatgcacaattctctccaaatatgcttgcacaatgactggtgatattctgtctatgaatttgtgctatctaaataacttgccacatgctattacaaggtaattgtaagaaaattgctaagttatgttaagtttacatgtatttttctaggattcaaaattttgattatga

SEQ ID NO: 405539 - DNA, 596 bp, Homo sapiens
agggagactgctgtgtcccacttcccactactttgatttcacaggtcattcagagatagcgttcaagattcacatagcttctcaggggattctgagacccagccagggccaaggagcagcttcagagaagttgaccgatttgttccaggtcacacaagaaacaggctctgaatcaggtgtctgcctccatagtgtcttgttcttcactctgaccacaccagcaggcagcatcttctcaactttatgttttcagatcctgtgagatggacttggcctttgagggctctgaaacattattagtgcagaaggaagttgggagggttaattttatataccatcctaactgcatcacggagcgcccagatacttggctaaacattacttctgggcatgtccatgagggtgcttccacatgactttaacatttgagttgggggatttagcaaarcagattcccttcccagggtgggtgggcaccatccagtctattcagggcctaaacagaaaaaaagataaacggaaaatttgccctttctctgcctgactccttgagctgagacactggtcttttcctgtccttggacagggaattacat

SEQ ID NO: 405540 - DNA, 608 bp, Homo sapiens
tcaggcacatgtagatagggtccttcattcatccattcactcatgtacttgttcatccaaattccagcagagtccctgctaggcacttaagtcagtggggggaaagtgcagcaggtggaaagaatcttcatttaaattctggatccttccctctctaatcatgtcaccttggcatatcatattacctgtctgaacatcagttttctataaagttaggagaaaacaaagcagataaagtatgagaagacacatggaaagctctggaaagtactacacaaaggtaagtcttgtcaactgtgataagaaagacaaagaaatatgacatctaaaaagaagtgccagaatgaaaaatacccctgtccccartccccccagtagagctcaggtaagcttttggatgaggagagtagtaatgggaaaagcagattcggcccctggctgcctctattttgggttcctggcattattctttataagtaatttcacttctgttggcctcagtttctccttgcccccaaaagacatcacaagttgagttgttgtgagattcagataattagaatctctcaatcctttctaaagagaagtgttataaattcttcaacact

SEQ ID NO: 405541 - DNA, 592 bp, Homo sapiens
caaaaaactgttggaactgataaacaaattcattaaagttgcagaatacaaaatcaacatgccaacatctgaagcatttgtctatgcccacagtgaacaatatgaaaaagaagtcaagaaaggaatcttatttacaacagctaaacaagccaaccaataaaattaagtacccaggaattaacttaaccaaagaagtgaaagatctytacgatgaaaactgtaaaacattgatgtaagcagttgaagaggacacaagaaatggaaaaatattccatgtttgtagattgaaaggattaatattaaattgaaatgtccattctacagattcaatgcaatccttattaataccaatgatgctcttcataaaaatagaaaaaaaaatcctaaaattgatatggaaccacaaaatagccaaagccatcctgacaaaaagaacaaaattggaggaatcacactacttgacttcaaattatactatagagctatagtaaccaaaacagcatggtatgggcaggcatagaaacagacacatagaccaattaatggaacagaatggagaacccagaaacaagtccacacatctacagtgaac

SEQ ID NO: 405542 - DNA, 592 bp, Homo sapiens
caaaaaactgttggaactgataaacaaattcattaaagttgcagaatacaaaatcaacatgccaacatctgaagcatttgtctatgcccacagtgaacaatatgaaaaagaagtcaagaaaggaatcttatttacaacagctaaacaagccaaccaataaaattaagtacccaggaattaacttaaccaaagaagtgaaagatctttacgatgaaaactgtaaaacattgatgtaagcagttgaagaggacacaagaaatggaaaaatattccatgtttrtagattgaaaggattaatattaaattgaaatgtccattctacagattcaatgcaatccttattaataccaatgatgctcttcataaaaatagaaaaaaaaatcctaaaattgatatggaaccacaaaatagccaaagccatcctgacaaaaagaacaaaattggaggaatcacactacttgacttcaaattatactatagagctatagtaaccaaaacagcatggtatgggcaggcatagaaacagacacatagaccaattaatggaacagaatggagaacccagaaacaagtccacacatctacagtgaac

SEQ ID NO: 405543 - DNA, 538 bp, Homo sapiens
tcctcttcaattttttgaaataatttctgtaggagtgttatcagcttttctttatatgtctagtagaatttggatgtgaaaccttctggaaaggggcttcttytagttagtagatattttattagtaattcaatttcagaacttgttattggtcttttcagggtttaaatttcttcctggttcaatcttgcgaggtcatatgtttccagaaaattatccatttcttccagattttctagtttgtgtgcatacggtattcataatagtctttgagggtgttttgtatttctgtggggtcagtggtaatgtcttctttgtcatttctgattatatttatttggatcttctgtcttcttaaaattagtttagtgatctatcaatcttaattattcttttgaagaaccaacttttagtttcattgatcttttgtatgctttttttgcatctcaattttattcagtttagctcttctgctaggtttggggttggtttgctcttccccccgccgccaccccaatttcctaggtgtgatgttagg

SEQ ID NO: 405544 - DNA, 538 bp, Homo sapiens
ttaagacacatacaaattagcaataaggtatggaacttacttgatcctgtatcaaactaatcaacttttaaaaataaattttgagacaatcagggtaatttgaacactgataagatactttatgatattaaagaaatataatttatttaggttcatattgatattgttgctatgattttaagtctttatattatagaaatacaactttagaaatacaactatagaaatatttatagatgaaatgtcatattgagtgaaatttgttttcaaataatatgaaacaggaagggaagattgaccatgaattggaagctgtgcacaagggaattccttatgtaattgtttacttttggatatggttgaaatttttcataagaagaaattacaaagaaaacagaagagtaaaattgtttgatgtrcctatttgtaagcctatttttgcttcaatgtaatgaatgaatgttaatatcctggatgaatgaaaagagtagcagaggagatttgggagacttggttggtaggctattgattaacacac

SEQ ID NO: 405545 - DNA, 513 bp, Homo sapiens
tgtgataacataagcagactgggttcttgtgaaccagtaatgaaaattgcttcatcagacttcttgatctctataatttttcagggtccaaaaatgaaatgtgatttatagttctataaatttcattgcttcagagttttggttctctaatctcagctgtgaaaggagagctcagaagttccttcacagattttcttttaaccaaagaaatgaatgcataaataaaccccagctaaaactttcatgtgtttaatgtcctagaagagcaaagtgattggctcagaattaaagggaaatktaatggtttttgatacgttttgcaagatgaataatgaaaagattgtgtaaaatagtgtatggtgtgatgaaaaagaatccccaaagtagtatatccaatgtcaacattttcccatgggctttgtattaagcccagagaaatcctttgtgtatgctttgtaatttttaactggaaagaaaaagtgaaagagaaatatgttacttgggccactaact

SEQ ID NO: 405546 - DNA, 551 bp, Homo sapiens
tctataaccccaaacccatagaaaattgttcttttcatatttgtggctgtacagatgaacatttattttttctattttaaatctgaattaaatgtgtactgcaaattatggtatctttcaacttaatttcaatttttttcattgtaaaaaatgagtaactgaaatgtagttagagtcaaatgtgctaactcaaattcttcatttgaaacagtataatttaaaatgtcaccccagcactcaactctttccttgtgcgccaggtatcttctgtttgcctccyatgcccacattctgcccagttattcatcctagtttctgccttgggagactgaccttgtgcaccccaaggaacaaaggcttcctgttggattgatgtattgggatatcctggccctagattggaagagaagtgcgagtgaggtcagggtgttcacttaatctcctttactgcactttgagggctgctgtgttcctgcacctaacaatgctgctgtgcttctccaggtgaccttctctctaatattctcttctgagtttcctcttcttattaa

SEQ ID NO: 405547 - DNA, 629 bp, Homo sapiens
atggataaacaaattgtggtatatttatataaagaaattttcttcagtcatacgtaggtactaactcaacacgataygacatatataaatagcaaaagaaaccagtcacaaaagagtatgcatcgtataattccatctatataaaatttcagaactataaatctattttgtaaaggagcaggtaggaacattctggggtgatagaaacagcccataactttttacttgggtgaatacaattattgaaaatgtttagattttattgtatgtaaattatatctcaataaggctgtaaaataaaaaataaaattaaataaaaaaattatttccccaaatttacacgcgacaccattacagagttaactagttctctgagatatagccctaagatggtttatttttgctccctcattaatttttgttcttcacagatgatataaaataatagaaaaacttaaaaaaaattcctagcaagaggtaatgtagttttgaattttatttcttttacaattatgaacattcttatttccttatttgatgaaaacaatcaattttattatctcgtaactgaaataatttgatttctttaaaaaggaactcatttttatagagttctacaacagcaagtt

SEQ ID NO: 405548 - DNA, 505 bp, Homo sapiens
tagtaaatatgttaatttatttttatacttttaaaaatatggacaattatttttacttaaaatgaagacatataactgatacagaatcaagtgaaaatggtggtgctaatactatgtccagaatactaaaggaaaaaagatgctggaaggaggcatggcacatatttcataaycattggccattgcaatttgctgtaggaaagcaaaacaaacaaaccaaagtatactattgtggtgtaaaaaatttaaagacaataaagtgggaaatattacatgtcaacaagtagatagtaactttgatgtgaagttttctcttgatatcaaaaaagaaaaaatctacaaaatcaaccacatgaaatcagaattaatgtctaacaaaaatattaaacaatttttaacaggaactgagagtgtaactttggccagatgaaaatggcttagatttttgcagacaaatgcaatacaacatttttttagatagagagatggtaaataaaattgtaat

SEQ ID NO: 405549 - DNA, 458 bp, Homo sapiens
actgtggcaaacctgaaatcattgctacattaaaaaaaagctgctacacagtgccaattaatttygatatatagttacaatattaactgatcatctgattttgaaagaaaacttaaaaatgttatttttgcaaaatctgattcttttaaatgttggatcaaactttttagacatcaagcctaaacaaaacaaaacaaaaatcccaacaaatggtgacactggtggactgccagtttgcaacctctctgtgtagcagacactataggctgtaccatgcaatgtcctcttttgcagacccctgagggtggtctctctctgttaagttactaggaaaaggaatatttttcatgactccctactgtgttcccaatctcgtagacaccatgattaaagaaaataaggtttccattttctccttggctgctagagggcacagaagcaaatttgtggctcattcc

SEQ ID NO: 405550 - DNA, 607 bp, Homo sapiens
ttttggtacacatgtggggtgcaggtatgggggagcttgctctaggctcagcaataggtctcgttcttttttctcttcagttaccctgtgactaagtggctcctggcacgagggaaggagctagcagctatggtagggggaacaactgtccttggaataacttcacagtccccaatgggaggcagaaaagatgacactaagatccggtgcagtcacgtcccttctccttgggagacaaagaaatggtggaagcccaggctaaggtatagatagcatcatacagtaatgggctatgatatcatccctgtggtagcaattttcttgatgaagtasaaagtgtgggctgttcgttcagagagaggtaggtagggttgacatttgagaaaagcaacaaaagcctgaaatggaaaatctccaaaaaaaaaaaaaaagttagacaaataaaaaacaaaagcatggggcaggggctgggacttctcctagaggtctgactgataactttccttgcctcccattctagctttactctgttccctgcgctatcactcttcagtcatcattatctctcagggagtgaacagagcattcagaatctcaggatgactcc

SEQ ID NO: 405551 - DNA, 607 bp, Homo sapiens
ttttggtacacatgtggggtgcaggtatgggggagcttgctctaggctcagcaataggtctcgttcttttttctcttcagttaccctgtgactaagtggctcctggcacgagggaaggagctagcagctatggtagggggaacaactgtccttggaataacttcacagtccccaatgggaggcagaaaagatgacactaagatccggtgcagtcacgtcccttctccttgggagacaaagaaatggtggaagcccaggctaaggtatagatagcatcatacagtaatgggctatgatatcatccctgtggtagcaattttcttgatgaagtacaaagtgtgggctgttcgttcagagagaggtaggtagggttgayatttgagaaaagcaacaaaagcctgaaatggaaaatctccaaaaaaaaaaaaaaagttagacaaataaaaaacaaaagcatggggcaggggctgggacttctcctagaggtctgactgataactttccttgcctcccattctagctttactctgttccctgcgctatcactcttcagtcatcattatctctcagggagtgaacagagcattcagaatctcaggatgactcc

SEQ ID NO: 405552 - DNA, 534 bp, Homo sapiens
aaaacaaaagcatggggcaggggctgggacttctcctagaggtctgactgataactttccttgcctcccattctagctttactctgttccctgcgctatcactcttcagtcatcattatctctcagggagtgaacagagcattcagaatctcaggatgactccgtatgtttagctgttctgagggtagactgcagggacttttccagcttgctaaatataactgctgtttctatcttctatacataattagagtcactgatccaggccaacaaaaatattgatgaatagaattcaaagtaaagctctagcaaacctttggagagtaacattcctggtccatgatctcccaggctgttatttctctacagagtgaactgtattccctttatagcttcctcatagctctaraacttaaaagtcgctttgtcccagactgaatagctgaatcagtgacaacagatacagggttataaagacaagaaaaaaaaaaaaggtgcttttcctagagaatgtaggaaatgtttcagtgttcc

SEQ ID NO: 405553 - DNA, 608 bp, Homo sapiens
taagtatagggtatagaagtgtagaatagagaagacaaagaaaagcaaaagaactgaatagctagaatgtattaatgcagggcatcaggcatgtggagccagctaaaaagtgagagatcaaacaagattcttagagcaagagaacatcagtaggaactagccacatttatttcacggactcaatgatactgagtttctactactacagggtactgtgtttgatgcacataaaaattattaacatgtattcctgcttatcattatyggaggcaggggttgtgaagtcagcatggtccccaccgccacgcccccaccccaggccaaactctaaaggtatttacctgggttttctttcgaaaaaggaagaggtcttattttttttttttatgggagctgagggcagtggataaatttggaaccagacagttgaagtattaccataagcatcagaaaaagtgaataggtttttaaaataatagggaatagagatagaaagcaatcaacaaggcttgttttagaattaaaactctacaaagtaaaagatgtagcctgaatgacccttgaaatcacatgtataatttatagcacctgattccctccaagtcatg

SEQ ID NO: 405554 - DNA, 601 bp, Homo sapiens
tctgtatttcccaagttctttcaaagataacccaataaaataaagaactaacagcatcatgatacatacaaaggggctatggtgtatgtgtggcaggctggggagtaaggatggagaaggtattttgaggcaaagaagaaagaacaaaggaaaatgaargtattagaagataaaagcttgcacttcacagaagatattattttgctgccatgtatctaagcacaattgaggcagattagttgtaaaatcacctcatttacttttcccagcttttttcagccactttcactaaatcaaccaaccaaaccttttctgtgcccttatgtcccttgtctctgaacttcatcaactaaatatttgttatgcattattttattcagcattcacagtatctgtgggtttgggtatgctacttctttcttcattttatagagaaggagatgatagagtaaccatccatagttactgtgttcattggaaatgttttgtctccaagtagcagaaagcccaacttacagtgtctgtgttcggggttggaagttggggagaggttcctcctaatgagatgcttggaggcagaccaccgcctcaggggttagac

SEQ ID NO: 405555 - DNA, 601 bp, Homo sapiens
tctgtatttcccaagttctttcaaagataacccaataaaataaagaactaacagcatcatgatacatacaaaggggctatggtgtatgtgtggcaggctggggagtaaggatggagaaggtattttgaggcaaagaagaaagaacaaaggaaaatgaaagtattagaagataaaagcttgcacttcacagaagatattattttgctgccatgtatctaagcacaattgaggcagattagttgtaaaatcacctcatttacttttcccagcttttttcagccactttcactaaatcaaccaaccaaaccttttctgtgcccttatgtcccttgtctctgaacttcatcaactaaatatttgttatgcattattttattcagcattcacagtatctgtgggtttgggtatgctacttctttcttcattttatagagaaggagatgatagagtaaccrtccatagttactgtgttcattggaaatgttttgtctccaagtagcagaaagcccaacttacagtgtctgtgttcggggttggaagttggggagaggttcctcctaatgagatgcttggaggcagaccaccgcctcaggggttagac

SEQ ID NO: 405556 - DNA, 595 bp, Homo sapiens
agaggccaataatcttagaataaaacaaggttgaatttagaacaaaaagcattaaacaagaaacataaagacaattgtgtgataagatgtatcattcacaaggaagatctaatagtcattaagtgtttctgtatcaacgtagcctgaaaagttaagcaaaaactaccaaaaagataaggaaaaatagaaagactttaattataggaggcttaacagacaaaatagacccaaaagatgacatagatggcctaaataacataagtaagtagtaaagttacatatatcaatctatccctgaaaactaaaaatatgtcatccttttagaygtccatgaaacgtttcccagaactgactatactttagaccacacagaaaacctaaataaactccccaaatcagaaatcacactgatattgtcctctaatcactatgagtcaaaaaggaatccatgtgaatgtatagaatatttaaaattaatgataatgattataaccacattacatatcctatgggctcaactaaagcatttgctcaaaagaaaatttgtatacgtaagtacttaaattaatgaacaaaaaataaaggaaatcagtgc

SEQ ID NO: 405557 - DNA, 595 bp, Homo sapiens
agaggccaataatcttagaataaaacaaggttgaatttagaacaaaaagcattaaacaagaaacataaagacaattgtgtgataagatgtatcattcacaaggaagatctaatagtcattaagtgtttctgtatcaacgtagcctgaaaagttaagcaaaaactaccaaaaagataaggaaaaatagaaagactttaattataggaggcttaacagacaaaatagacccaaaagatgacatagatggcctaaataacataagtaagtagtaaagttacatatatcaatctatccctgaaaactaaaaatatgtcatccttttagatgtccatraaacgtttcccagaactgactatactttagaccacacagaaaacctaaataaactccccaaatcagaaatcacactgatattgtcctctaatcactatgagtcaaaaaggaatccatgtgaatgtatagaatatttaaaattaatgataatgattataaccacattacatatcctatgggctcaactaaagcatttgctcaaaagaaaatttgtatacgtaagtacttaaattaatgaacaaaaaataaaggaaatcagtgc

SEQ ID NO: 405558 - DNA, 639 bp, Homo sapiens
taacacaatatacagaggagctaaaaataggaatttaaaatcaagaggacattccacactagctaaaaccaattacacatcgcaaagaaaccaaacactgatactaaggccactcaccctattatccctgtwgagagaggctttttagagaaaaagatcctaaagtgaagtgtaaaaggcatgaaatgacttgatgattcatatcatttcatctagatttagagaactgagggaggttcaaagactccaagctttctggctccaactggctttttcctttctagctcattctctctataataatttaaaggtaaatattgcacccccttttggctagtgccaaataggaatacatgtatattttgagagccggacttacatttattactcatggccaagtgctctgtatgagaatcctgcatttttatctgagcagatgcttacttagtatttgctcaaatatatttgaacaaattttcatactaactaatttataattaattaagcaggactgtgttgagcatttgctgtgggcaaggcagagttctgaggatgactagatgatttgtcaaagatcctgccttctctgagcataccgatttttagtggactatttaagacaagtatactgataattct

SEQ ID NO: 405559 - DNA, 511 bp, Homo sapiens
tatccttgtcctcccagtatcccttcatacagcctcatacggcctccaaaacggcccttagagaagaaccttgtcacttctgtgttcaaaactctccactgtcttgccacctcactcagcatgaactccagagaacttataatgacccaccacacccaacatrgctccttgttgcaacctatcccagttcatcccccacccctctcctcctcacttacagggagaagcagcctccagcctctgagcacctttgcacacaccatgttctttctctcgaacacgctcttccctatatattcatagcccacgctctcccttcatgccttcggggtcctgtttaaatgtcactttatccgaaagggtttctcttataagtctagcatcctaccccagccctgtctggccccatcactctctattgcctaacttggctttactattcttcataacacgcttaccactggacctggggctagtgttgcttgctgaagttgtctgcttattagcagat

SEQ ID NO: 405560 - DNA, 583 bp, Homo sapiens
cataccaactaaaatgctcccttctttaaaaatactgtatttgaaggccaaattacaacttacgattttgcttgtgcttatgaacaatttgtagaatgactggcattgggaaggggcctcaaagccttaaaatcattattgcccaaaacactaggggttttggtgaacatctttattcaattttttcatcattttaatattgtagtcttaatttagatgtctccagattaagaaaatgttccaagccccatgcagtggtgcttgcctggagtcccagctactcaggaggttgaggggagaggattgctggagcccagtagttcaagtccagcctgggcaacayggtgagatcttgtgtctaaaacaaattttaaaaaactgcacagtatgcaatattaaaatgaaaagaaggaatgaaggtgctcaccaaatctcctattatcaaaataaagtgagaagtttcactatatgtaactctttatgtccatttgattgaacacacacattcctatattaatgcacatacaacatcttcatattttaaatcactttacaaacacctgcaagaatcaagttctttgaa

SEQ ID NO: 405561 - DNA, 565 bp, Homo sapiens
tggtttttggctgggcgtggtggctcatgcctgtaatcctgacactttaggagtctgaggcaggcagatcacttgagcccaggagttcaagaccagcctgggcaacatgatgaaaacccatttctacaaaattaataccaaaaaaattagccaggcatggtgatgcatgcctgtagccccagttacccaggaggctgaggtaggaggatcacctgagcccagggaagttgagtctgcagagggctgtgattgcatcactgcactcttgcctgggtgacagcatgaggccctgtctcaaaaataaaataaaaaataaacacagtgaatgtttttttaaaaatctaatttataatgggcccaaaacaagccaagggccacttcacatatcacaagactaaccctgaggttgcaaaactcatatgccagagaatatcatcttcatttgcagtgataaaacgtaaatataaaggctaagcccracccaggagcctaatgtcattagtaagacataatcctattaaattcatcaaacgcaccttcagttatggctcttttgctaaatatg

SEQ ID NO: 405562 - DNA, 592 bp, Homo sapiens
agccacacaacatatagtacttcaaagcttagctttctgaaagccaatactctgtctaatgttaggggataagaatgaatgccagattcatagtccagatttaaaactaggagggtcaagaaagacactgttttctagaatcaggagtgagaagtggcatgattagagtggtctttcatttgttttaagatgacataaagtaaggaataaatgtaaacccttatacttatggcatagatatatagttagaacaacacacaatttgagagataagtgactcagtagcccaaatagaagatactttgcaattaagtcaactgaaaaattgtaatataatatggcagcaaaagaaaaaggtgaatttgatctcaggatgcattaacagaaacatgrtgacctgagtgagaggtggagttccttcatctgcttccagttcacactgaggaataccgagttcccttctggcactagacttaggaggacatccacaagctgtggtgattatcaaagccagtgacctagatcctgtgaaagcattttagcagcagggtataggctggcaggagagtgattaaatcttcttcccgaatat

SEQ ID NO: 405563 - DNA, 592 bp, Homo sapiens
agccacacaacatatagtacttcaaagcttagctttctgaaagccaatactctgtctaatgttaggggataagaatgaatgccagattcatagtccagatttaaaactaggagggtcaagaaagacactgttttctagaatcaggagtgagaagtggcatgattagagtggtctttcatttgttttaagatgacataaagtaaggaataaatgtaaacccttatacttatggcatagatatatagttagaacaacacacaatttgagagataagtgactcagtagcccaaatagaagatactttgcaattaagtcaactgaaaaattgtaatataatatggcagcaaaagaaaaaggtgaatttgatctcaggatgcattaacagaaacatggtgacctgagtgagaggtggagttccttcatctgcttccagttcacactgaggaataccgagttcccttcyggcactagacttaggaggacatccacaagctgtggtgattatcaaagccagtgacctagatcctgtgaaagcattttagcagcagggtataggctggcaggagagtgattaaatcttcttcccgaatat

SEQ ID NO: 405564 - DNA, 349 bp, Homo sapiens
acttggccagcacagctcaggctggtgttgaggtggttcctaagaccagtcaagccccaggacagaagacaaatctcatgcttacctctagttgctggcactagagtasagaattacatagagaaaaaacccaggtcactgagacccatgggtaccaaacttaaagttgaaacgcattaatacatggccaccctgttactgtggcaagagaagctgtatctacatgggacagtaatcagcccacacttcagcctttccaccagctcagcagcctccatcagactttctagccatttgagaaatagccagtttcccatcacaaaccagcagataccagcagatactccaa

SEQ ID NO: 405565 - DNA, 522 bp, Homo sapiens
ctgtaatgatttgttttaatctcctccttcattctgtgaaggtagaggccatgtctgtcttgtttactgtctaactgccatacctcctagtactgtttccagcacataggaggtactcaaaaatactctggaataattgggtggttgctaaaaatgaagtctattttcttcttggcaattttcatgtatatatgtatgtctaatgtgtgtgtgtgtcagaggtggtatgggtgtatcccactggaaccaaagyggggagcgctggggctttcttacctgcttgcccagatgtagggcagaaagggaagagaaagtggtacatttcaaaagctgtcagcagtcaaacataaatggagtcaaatgctttattacacgcacttcttttttgataaatattttaatatctatctgtttcctcaattgacctaatgtactacaatgacaaataccatttccctgattatttctgagtatcaacactacttgcagtgtgtggcataaactagatactcaataatgtca

SEQ ID NO: 405566 - DNA, 454 bp, Homo sapiens
gcacatactatcatcactataatattaggaacaaattataaatayggtgatgataaattttaaatgaaattattttcatcagacatcttaacacctagaagtcatacttcatttaatatatatacttatatatagataatatatatacattatatatatataaagaacaatgcctatcactatatttgaagttaatgaaaaaatacaaaataaatgctcattaggtttagcccttaatgtcactaaacagatggctctaactgctgttcccactttaatgacagcataatctggaatctaaaggtcataccaggtataggtcacctctggacactctctacatcttaaaagtaagtcagccatttcttctaactttcctttccaagggacagattaacaagaatctatttcatttaatatggcttcttaaagacagctttagcagaacaaaagt

SEQ ID NO: 405567 - DNA, 620 bp, Homo sapiens
aggaagcaaagccagagtggtactttttcctgaagtctttggtggagagtaataaaacactttatctccaggtataagatggatgggaagcaggctgtaatatttcatgatttatataaaaaagcaaatcaagaattgacaggcaaaagattggtgttatctacatagattatcaaaatctctcatccaggagagtctcttcaataaatggtgctgagaaaactagatatccatatgcaaaagaataaaactagacccctgtctcttgccaaatacaaaaatcaaatsaaaatagattaaagacttaaatctaagacctcaaaccatgaaactactaaaagaaaacattgggaaaactctccaggacattggtctaggcaaagacttcttgagcaacaccccacaggcacaggcaaccaaagcaaaaatcaacaaatgggagcaccttaaattaaaacgcttctgcacagcaaaggaaacaatcaacaaagtgaagggaaaacccatacagtgggagaaaatatttacaagctacccatcagacaagggattactaaccaaaatatataaggagctcaagcaactctatgggaaaaaatataatctgattaaaaattgga

SEQ ID NO: 405568 - DNA, 583 bp, Homo sapiens
aggtccttcctgtcactgcttattgataccacattggtagctgcagacatatggtcttccacaccagttaggtaatgctatccactgatcgagacccccctgttgatccagatctttgtgcacccaccacattgagcttccagagttttgmttatcttttatcgaatgaccaaggttcactggactcccagcgttgcaattcttagtgttcacataatttattcccacagataaccattgtccatggctcaaccaacctaaaaaattagagctctttaggcatttgctcctgtggatcaagagccactgactattttattttccttgggatctataccacaggtatttagttagaaaattttattttttcccatttgaaacacatcttcatgagggctcataactagatcgtatataggagttattaaaagtcatctctaaaagtgatttcttacatagaaatttaaaaaatcacatctaataatatcctaaaaataagataaatcacaataaatatgattttaatatatataagtatataaaactttaatatctaaaaatataaatatatatttataatgta

SEQ ID NO: 405569 - DNA, 567 bp, Homo sapiens
tttaaagaatttacatatattctatgttccaaacacactgtctactgcatttgggcttctgtgtacattgrgaagacacttttcaagtaagaagacaaagactttgaaaggagacctattcctctaactattgatcttaaaaaatgtacatttcttacagtataaacccattatgtttttattttgaatattttagtgtgataatatacaagtaacataaaatttatcattttaatcattttcaaatgtacagttctgtagcattaagtacattcacaatgttgagcgaccatcaccattaccatttccaaaactttttcatcaccccacatagcaactctatacccattaagtaataactctcctattcatcttcctcccaggctcttgtacccaatattttatgtctctatgaatttgcatattctatatattttatttaattatacaatatttgtccttttgtgcctgatttatttcacttagcatatttcatgttttcaaggtttattaatggtgcagcacatatcagaactaatttctttttatttcagaataatattccat

SEQ ID NO: 405570 - DNA, 567 bp, Homo sapiens
tttaaagaatttacatatattctatgttccaaacacactgtctactgcatttgggcttctgtgtacattgggaagacacttttcaagtaagaagacaaagactttgaaaggagacctattcctctaactattgatcttaaaaaatgtacatttcttacagtataaacccattatgtttttattttgaatattttagtgtgataatatacaagtaacataaaatttatcattttaatcattttcaaatgtacagttctgtagcattaagtacattcacaatgttgagcgaccatcaccattaccatttccaaaactttttcatcaccccacatagcaactctatacccattaagtaataactctcctattcatcttcctcccaggctcttgtacccaatattttatgtctctatgaatttgcatattctatatattttatttaattatacaatatttgtccttttgtgcctgatttatttcacttagcatatttcatgttttcaaggtttattaatggtgcagcayatatcagaactaatttctttttatttcagaataatattccat

SEQ ID NO: 405571 - DNA, 526 bp, Homo sapiens
tgtaatacctttctgccaagacacccacactctctcacaatgcccagtcatttttccctgggttgtgtgtaggatgggtcattaatattttgacctattcaatactaagccacatatgctacggtaacacctccaaattcggcctgtctcccaggctgtcaactttagatcaagctttgtctcttgaccatctttgttccctaggggaataatttctaaactaattacaccacaaatttaatatattacctcagcgcacaccaagagctgccagatgaggtaaagtgcagaaacagtttctgaagagtttcatcaggatctactaccgtatacctgacacttttcttagtattagaagcttaatatggcagtggttgtctytgtgacagtttggacaccagaatcactgttatttactactccaaaataagcttgaatgcctctttccttctccttgagaattattctagttagtcttgaaactttgatgtagttgatcttcaagacaagtattgccataaatgtc

SEQ ID NO: 405572 - DNA, 579 bp, Homo sapiens
tttgagtcataatctcatttggacagaccttaatctctttgcttccacaagatatcacactggtccattacattgatgacattatgctgattggatccagtgagcaagaagtagcaaacacactggacttaatggtgagacatttgcaagccagaagatgggaaataaatctgactgaacttcagggactttctacctcagtaaaatttctaggggtccaatggtgyggggcctgtcaagatattccttttaaggtgaaggacaagttgctacatctggcccctcctacaatcaagaaagaggcacaacgcttagtgcgcctatttggattttggaggcaatacattcctcatttgggtgtgttactctggcccatttatagagtgacctgaatttggattttggaggcagtacattccttttttgggtgtgttacactggcccatttaccgagtgacccaaaaggctgccagttttgagtggggtccagaagaggagaaggctctgcaacagttccaggcttctgtgcaagctgctctgtcacttgggccatatgacccagcagacacaatggcactt

SEQ ID NO: 405573 - DNA, 557 bp, Homo sapiens
aactgggttatgggcagaggttggaacagtttggagggctcagaagaagacaggaagatgtaggaaagtctggagcttcctagagacttgttgaatggctttgaccagaatgctgatagtgacatgcacaatgaagtccaggctgaggtggcatcaaatgaagatgagaaatttattgggaactggagcaagggtgactcttgctatgctttagcaaagagactggtggtattttgctcctgacctagacatctgtgaactttgaacttgagagagatgatttaggatatcaggcggaagaagtttctgtttttgttgggaaggcataattggttttgaaatgtgaaaagacatgagatttgggaggagccaggggtggaatgatgtggtttggttctgtgtgcctacccaaatttcatctcaaattgtaatccccacgtgttgagggagggaggtgattgtatcatgggagcagtttcctccattctgttctcatgatagtartgagtacttatgagatctgatggttttataagtgtttggtggttcctacttca

SEQ ID NO: 405574 - DNA, 571 bp, Homo sapiens
gaccagttctgtagttatagattgcctcgggcattcagctgctggggccccaggcttttcctccccttctgaggttttccctgtaagtgacttgcctgtcactctcaagtctaatttaaaaatagtgtgcatttaaattttgagaatgatttcttaggttattttctcatgaagtttgaccaagtttcaaaataccaaagtcccaataagtgtgawttttttgaaaaaaaataaaaatcacagagtgttaaggtccaagggagaaatggatttatctagaaatcactagggaaaacattgctattcaatggtattcacaaaggttcaacccttttttgttttttgtcataattatagtcattataaagagaataactataaaaatttccttagcatgtaggcatgaaatggtgaatcctccactgtaagtatacagtgctttaagaaagtgcctacattatttattcataattgtgttaaatttgaatacaaactgaattcattcatgtattaaaagttataaacatgttaaaactactcataacaaaacacatcagatatgtcaagaatc

SEQ ID NO: 405575 - DNA, 571 bp, Homo sapiens
gaccagttctgtagttatagattgcctcgggcattcagctgctggggccccaggcttttcctccccttctgaggttttccctgtaagtgacttgcctgtcactctcaagtctaatttaaaaatagtgtgcatttaaattttgagaatgatttcttaggttattttctcatgaagtttgaccaagtttcaaaataccaaagtcccaataagtgtgatttttttgaaaaaaaataaaaatcacagagtgttaaggtccaagggagaaatggatttatctagaaatcactagggaaaacattgctattcaatggtattcacaaaggttcaacycttttttgttttttgtcataattatagtcattataaagagaataactataaaaatttccttagcatgtaggcatgaaatggtgaatcctccactgtaagtatacagtgctttaagaaagtgcctacattatttattcataattgtgttaaatttgaatacaaactgaattcattcatgtattaaaagttataaacatgttaaaactactcataacaaaacacatcagatatgtcaagaatc

SEQ ID NO: 405576 - DNA, 636 bp, Homo sapiens
ctcttcttctttgtgggaacaggtcaaagtcggttttcatattcaattgtgcttccaggtgatggaattttcagcaaatgctatgtataactaacagttaaaaatgcatttgtactctaaaattctttatagcacctcaatctacaaacaattttgccaatgcagtttaaaaaataaaattaagaaactgatatgaacatttttctgtgtgtaataaagcaacatccaatgttaatatcataggtaatcattttgtctttgtatttatttcagaaaaaataaaactcatagttatctctgaatcttattacaatcagtttgttgctaaggattactttttcttgctgtaggatacatcagactttcacttttcttctccattcctttatccaaaactacaaatgtgatgtctcagaaaaccataattgcaaacataataatgtatcttcaggctactaatgtggtgaaatattagccctcatgkgctcactttgagttttcattatttatgagtggtgggaataaatggcaggtataatatgggaagtaggtccacctagagaacacaaatgtctcaggagtcatatccaatggaaaggtgagaagaaatcaaagatatatttttattgttttagc

SEQ ID NO: 405577 - DNA, 506 bp, Homo sapiens
aaatattgtattataatgattaattactcttcctttttccctactcttcctgcagttattcagacagggtttcatatactctgtcctacctcctttccccaatttgcccatagggaggatagctatacattccaatgagcctttggaattctctgtttatccttttgccccagtacctccctttcactcttacaagttagacaatgaatcatagtcatcctatctatagtgactcaagagtttgttctttcaattctatttatattctcgtcaaattaaactattttaacagcagagaaagataaggaagctatctgtaccagattaaatcccttgaaacataggtctgcatatgtaagttccagatgcaaaaattaccattyactttccattggttatacaataaagttcaatataagaatgtccttaatctgattttaacctctgaatacaccatactctctcctatctaatctatttactgttctccccacttacttttcatc

SEQ ID NO: 405578 - DNA, 472 bp, Homo sapiens
gcatatctgtcttgtgccagttttcaaagggaatgcttccaggttttgcccattcagtataatattggctgtgggtttgtcataaatcgctcttattactttgagatacgttccgtcaatacacagtttattgagagtttttagcatgaaggggtgttgaattttatcaaaggccttttctgcatctattgagataatcatgtggtttttatyattggttctgtttatataatagattactttttttgatttgtgtatgttgaaccagccttgcattccagggatgaagctgtcttgattgtggtggataagctttttgctgtgctgctggattcgatttgccagtattttctggagtattttcacgtcaacgttcatcaagaatattggcctgaaattttctttttttttttgttgtatctctgccaggtttttgtatcaggataatgctggtcttataaacggagttagg

SEQ ID NO: 405579 - DNA, 416 bp, Homo sapiens
tgatacatgtacctccagcaaagacccasaacgtccaagaagttgctacatctgaactgtcttctaaatacctttaggaaactgttgctatggatgttataacaaacatgtcctctcaaggatgacctttaatcctgatagtggtagatgtgcttatcgaaatggctctattaccttcactgggcctattggctcctctgttctattagtatatcattcatcaaagttttctaccactattaacttccccacagcctattcccttatcccacagtttatgtatgcaattgtggaaagcattacaaaacagctgctttagctggaagaattcatattcttctattcaccattcagatgaagggaagagaaaactaatactacatgaatcctggaaaaatagttctacagcgacatat

SEQ ID NO: 405580 - DNA, 498 bp, Homo sapiens
tggagcaacattctctagtcaawatttcttcaattctaatcatgaaaattatttgttgagagggcgaagcagcaaaattcaaacaggttagattgttatgttgccacacagaggacaactgcccaaaaggacaactgtcctgacctatagcacactttgcatgaaccaaaaataaattatagatgctaagccaccgagattttgtggttgtttgttacctagtctgtcttgactgatataaaatactactttatttttcatgcataactaatctggcattcttgacttaaaagagaagtagcacattcctcattttaatggactatcactgtgcttgtaccaaaaagatgaaaacttgagcaataatatttattgctgttaaagttcactttctattattcagtattctaatacttgtttccagatatttaagaacatataataaactgagctcattattttaccaacttaacacaataataccaataatcacaaaac

SEQ ID NO: 405581 - DNA, 591 bp, Homo sapiens
ttacaacttgaataacttatcatttttataaaactacttcagatgctgaaaaaatctttagcttttcttctaattacatgacatgctattgttagttttatttaggttaatacttttctttctgtatttttgtaaactaaggtggtataatttagttcctgcttttctgttaaactgtaaattatgcagagatgtgttatgctgattaatagatacaagactcaaaagaattactaataactrttttattcacatagtttacacagagtattaaatattattattgtggagttttcactttctacctacctaatatttgctatattgaaaaacactaaaagatgttatttcaaaattaattttaagaaaatgtgaacattcctttttaacacagaaatctacatttgattgttttaatgaaatctatctctttcaaatttctcattcatatcctgaattgtttttctaatttctttgtattgtttttctgcattctcttgtatctcatgagattctttagtatcattatcttaaattctttttggagggatttcatgctttttcttttcattggaatctgttgctggagaa

SEQ ID NO: 405582 - DNA, 591 bp, Homo sapiens
ttacaacttgaataacttatcatttttataaaactacttcagatgctgaaaaaatctttagcttttcttctaattacatgacatgctattgttagttttatttaggttaatacttttctttctgtatttttgtaaactaaggtggtataatttagttcctgcttttctgttaaactgtaaattatgcagagatgtgttatgctgattaatagatacaagactcaaaagaattactaataactawtttattcacatagtttacacagagtattaaatattattattgtggagttttcactttctacctacctaatatttgctatattgaaaaacactaaaagatgttatttcaaaattaattttaagaaaatgtgaacattcctttttaacacagaaatctacatttgattgttttaatgaaatctatctctttcaaatttctcattcatatcctgaattgtttttctaatttctttgtattgtttttctgcattctcttgtatctcatgagattctttagtatcattatcttaaattctttttggagggatttcatgctttttcttttcattggaatctgttgctggagaa

SEQ ID NO: 405583 - DNA, 493 bp, Homo sapiens
aatcatgtcctttgcagcaacatggatgcaactggaggcattatcataagtgaaataatgcagaaacagaaaatgaaatattctatgttctcttataaagtaggagcagctaaaccctgggtatacacagatgtaaatatgggaacarcacacactggtggctccaaaaggaaagagggaaagagaggggcaagggctgaaaaacttgttaggtactatattcactctctgggtgacagggtcaatagaagccgaaacctcagcattaggcaatatacccttgtaacaaacctgtacatgcattcccctagtctcaaatgaaaattaaaaataaatattttctaaaaaaaaaaacaacaaaatgcagctacagcttcatgagttaattgttaaataagatgacatgcccaaaatggcaggtggtatatcatgtgaaccttttcatgattatagcaataatacaaatttttttgttagacagctattaataact

SEQ ID NO: 405584 - DNA, 665 bp, Homo sapiens
actgttaaagggtatcaataattataagttttgccatctattttaaagttaagtcagcattttgttgttctttgatatttttaaatgtcaaataaacacatgcttcttgttaaaaaataaatcagttcagtaggacgtaaagtaaaagagctaaatcctccattcyactcctttgaaggaaccattgctgatgatagattggtttacatttttgcaggtatcttctaaacaaaaacaaatacattcatacacacagatttttctacaaattaagaatataaacacatcattctatgacttgcttttttctcgacaacatatgactatcctttcatgacagtgttcataggtttcttttaacaaatatttgagtactctacacacattgtgacacaaaacaaaatctggagcttacattagatagggcgatcaagaaagtaggaggggatatttgaacagaggcttgaataaatatatgagcatgctgtcccaggaaattgatttatcattaggacatatagattcattccatatttctactatttcaaggaactgagtgatcagtcctatgtcaaatgaatgctgtgtacttctgtgtactttatgagtttttccatcataaagatttctaaaagtacaatagatacacatttaaaatgttgaca

SEQ ID NO: 405585 - DNA, 665 bp, Homo sapiens
actgttaaagggtatcaataattataagttttgccatctattttaaagttaagtcagcattttgttgttctttgatatttttaaatgtcaaataaacacatgcttcttgttaaaaaataaatcagttcagtaggacgtaaagtaaaagagctaaatcctccattctactcctttgaaggaaccattgctgatgatagattggtttacatttttgcaggtatcttctaaacaaaaacaaatacattcatacacacagatttttctacaaattaagaatataaacacatcattctatgacttgcttttttctcgacaacatatgactatcctttcatgacagtgttcataggtttcttttaacaaatatttgagtactctacacacattgtgamacaaaacaaaatctggagcttacattagatagggcgatcaagaaagtaggaggggatatttgaacagaggcttgaataaatatatgagcatgctgtcccaggaaattgatttatcattaggacatatagattcattccatatttctactatttcaaggaactgagtgatcagtcctatgtcaaatgaatgctgtgtacttctgtgtactttatgagtttttccatcataaagatttctaaaagtacaatagatacacatttaaaatgttgaca

SEQ ID NO: 405586 - DNA, 510 bp, Homo sapiens
tggcatctttgtcaaaattagattaactttctttctcttttcaagatggttgactagaaacatcagataccagtttccttcaggaaaaaaaaaaagttatcaaggggaaagtgccggagcctatgaaaaactcacaggaagaaactggggcacagacaaagaaggaagcacgaggctggcagggattggctgggaaccaaaggacttgttacttcatcaaaagggtaggtgtgtgtggtatcgtctcccgttgcccctgcagtagaccaccagtgtctgaactaagagtgctcctctttccttgaaaacccaaacaytgctgtgagtgtcaatttagggacttcttaagagcattacaccagactaccagctcacgcaaagtcacttgccctcccgctagatccaagctgtggtggtgagtgctatactttgagtacacagactgggggactgtgtccaactcaggaaacctcagcccttgtgtcaccatatcaccagagacactgcaga

SEQ ID NO: 405587 - DNA, 573 bp, Homo sapiens
gttttgtagaactcgtaaataaaaccaagtgcttcctttcaggagttctatatttgattactgtttgaatttactctgtggggttactggactatttmatttttttttatttcttatgtcgattttagccatttatatttttctggaaattattcacggtggggaggaggctttcaagatggctaactagaggcaccagcactcaccacctccacaaagaaggaccagaatatcaagtagataatcacatattgaatacagcatttaagagagaacattagaattcagagagaagtgacagggaacctctgagacacagaaggagagggaagaaaagttgccagccagccaggattgacaaagagccaagagaaactccccagtgcagggaaaaggttaaagtgagaggtttataagcagtctgctctcccatgatggactcctacagtcctagtcacaggagagcccctcagtccttatggaccctgagactagtatagggacttctcggagtccatgcagtggcactgttccagacaggtagtttgcgctgcatcccacatcccccaagac

SEQ ID NO: 405588 - DNA, 552 bp, Homo sapiens
tttcaggtccacagtttatttttgtttttttttcaagagacagggtcttgctatgttgcccaggctagtcttgaactcctgagctcaagcaatcctcccttctcagcctcccaaagtgctaggatcagaggcttgagccatcatgcctggctttataattttttgaaaatagtttctctttgttgatattcttattttgttcatgcattgtcttcctgatttctgtgcagttctgtgttctcttgtaggtcttgatcatctttatgagagttattataaattcttttttaggaagcttacagatctgcatttcttyaaggcaaatttctggagcttaattttgttcctttggtcaggccatggtcccgtttctttgtatgccttgtcgtcttttgttgggatttgagcatttgaagaaacagccacctttctcaatctttatgaactacttttacttaggggaaaactgtgaccagtcaggctggctagaggttctaagacctctcagatttttcctggggatgcgttttctttggggttgtatgtttactt

SEQ ID NO: 405589 - DNA, 623 bp, Homo sapiens
aaatgaaaacttaatcacacccaatactatttgccaatggataccaaatgccacttcttaaccctaaaattgtttggtgatttataagtcagtgtctaaaaatggactgaatctcttaacccctgacattttggagatttattttaatctttgatcttctgtgattaggatagtgagaaatatctgattccatcctaataatgttgaatcagggtgccatatagacaagccaatgcattacagaggatatgaaatcttatagaaaaaaaaagtatgtgttctatattttatacatttaaatgtgggtttgaaatgagaattcagaattatacagaagtttcacctcttaatacctcttaatattcattttaagtaagaataagctactrtgggaaaattgattttagaaaataccaagatattatttaacatgctaggaatttttaccatgtctagttcctttttgtcgtctctatcaggtttatataaatcttgaaacacatttacaataaaatataatagttataaaataaatcttgttttatggtggtcagtttcgatcaatatttttgtttgttttctaattttggaagttgtattgattcttctgctatgctggtgga

SEQ ID NO: 405590 - DNA, 578 bp, Homo sapiens
tcaactgcattatgagttaaagtgtgaaagacttttgtcaaatgtttgaaacttttttttatgaattggccagttaaactcttatattggatattaattaattaacatatatcaatcaataaggatatcaattgtagttagcatttggttaacamtatgttttaataactttatacattaatctatttggggcttaacaagagtctcataaagtggatgttattattactctatttttcagacacaaagatggagagactcagagatacctgaatctaaggaatcttgactctagaatttgttctcctaatccagagtttggactgagtggagaaatagttcatcgctaatttcataccagaaacttgggattgtaaggagaaggctaagcacttccaacattattgagagggaagtattttaactttaaaaaattatagaattgtcaaaatacaataaagcttaaacatccatcatagttttatttgttctataatacaaaattcacttttttcatcaaaatgaaaaactgattattgtaccatcaaagtcattcctgactcttcaacatacatttg

SEQ ID NO: 405591 - DNA, 581 bp, Homo sapiens
ggcctgtgtgcaccacttttttaaaggcataagttaaagatatcaactgcattatgagttaaagtgtgaaagacttttgtcaaatgtttgaaacttttttttatgaattggccagttaaactcttatattggatattaattaattaacatatatcaatcaataaggatatcaattgtagttagcatttggttaacaatatgttttaataactttatacattaatctatttggggcttaacaagagtctcataaagtggatgttattattactctatttttcagayacaaagatggagagactcagagatacctgaatctaaggaatcttgactctagaatttgttctcctaatccagagtttggactgagtggagaaatagttcatcgctaatttcataccagaaacttgggattgtaaggagaaggctaagcacttccaacattattgagagggaagtattttaactttaaaaaattatagaattgtcaaaatacaataaagcttaaacatccatcatagttttatttgttctataatacaaaattcacttttttcatcaaaatgaaaaactgattattg

SEQ ID NO: 405592 - DNA, 599 bp, Homo sapiens
gggagaattaatatctaagctccttacatgccgcaccagaaaataaatttcagtaacattttcaacatatgaatcttgccatattagtcaaaaccaaaagaaatgtcctattgcttttagaatataatattagaactttcttatttctgaagtgttttgtttttttcttgttcctgggcttgaagagaggacaggttagtgaataatttattatctgagaaatacacatgattatctgtttccatggagttttatcattctctacacattcataaatgtgaatgactattcaagtaaacagtgtttggcaaagcatttcaacaagcttgctctccatcctacaattcaaattgacagcaattaaatcttgccaaagaaggacttgctttttaaaagcaaaaatgagcatatcatgaaaaccagtgttttgaggtcagttactactctgaaaaatggtggtactcaactagtttatttcaatgtcaacaatttagccataagaagcatggatgttaattgtgttaaaatgcaattaattgtaatattaggcaactaattcttaagggcytaggacagaatgatgaaaaagatgaaaataa

SEQ ID NO: 405593 - DNA, 578 bp, Homo sapiens
cagctaggctcctgagtctggtggggacttggagaacctttgtgtctagctaggggattgtaaatacaccaatcagcaccctgtatctagctcaaggtttgtaaacacaccratcagcaacctgtgtctagctcagggtttgtggatgcaccaattggcactctgtatctagctaatctagtggggagaaaggagaaaaccagtgagtgacttcagccatcaacattgcctgcaacatcctggctaaccaggaggtcctgagtctgtccacgtaatcagttcactaatattacaaagagcattcaagaaaaccagaacactaaggtgatctataaccaagaaatctcacagagtctatgtcattcctttgctgcccccatcagagctggtgcagatactcaccactaggaaaacttgaggagaggtcatattactggatccctagcagacattccacagcaccagcatggagtgtggcagctccactggatggctagacccagaagagcaatagtgatcactgtggtctggctctcaggaactcctacttttagggaaatggggagagcaccacatca

SEQ ID NO: 405594 - DNA, 551 bp, Homo sapiens
aatttctgggtcctaaaagcctctattattggacaatattgcatagctagagaaggaaaagaattcactcaccccataggatgacttagttgtctgggacagaaactgtataatggtaccacaaaaacagtcacttggtggagttcaaatcacacagagaggaatccatttagtaaattcccaaagttgcaaaccgtgtggacccacccrgagtcccatagagactggacagcccccactggattatactggatatgtgggcatagagcttatgccgaattacctgaccagtgggcaggtagttgtgttattggcactattaaaccatgtttcttcctactgcccataaaaacaggcgaactcctgggctttcctgtttatgcttcccgcaaaaagagaagcatagctataggaaattggaaagatgatgaatggccccctgagagaatcatacaatattatgggcctgctacttgggcacaagatggcttgtggggataccggacccccatttacatgatcaaccgaatcatatggttacaagctgcctt

SEQ ID NO: 405595 - DNA, 611 bp, Homo sapiens
ggggccctatctttggcctccttaaacagaataattgtcakccaggaattttgtattcagcaaaactaggttttaaaaatgaaggggaaataaaaccattttaagacaagcatatgctgagggaatttgccactaccaagctagcactacaaggaaagctaaaaggagttcaaaatcttaaaacaaaagtttgatatgcaccacaatagaacctcttgaaagcataaaaaaatcacagggcctatgaaacaatagcacagaaaccgttaaaaaaaatctagggaacagctaacatgatggatagaacagtacctcacatcgcaatattaatgttgatttcaaatggcctaaatactccacttcaaagacacagatggcagaatgggtgaaacatcacaaagcaaatgtctgctgtctttaagagactcaccgaacacttaaggattcatataaactcaaagtaaagttgtggataaagatattccaagcaaatagaaatcaaaagagagcagaaatagctattcttatatcagacaaaacacactttaaagcaacaacagtaaagaaaaagacaaaggaagtcattatataatgaggtatttaatgagaaa

SEQ ID NO: 405596 - DNA, 611 bp, Homo sapiens
ggggccctatctttggcctccttaaacagaataattgtcatccaggaattttgtattcagcaaaactaggttttaaaaatgaaggggaaataaaaccattttaagacaagcatatgctgagggaatttgccactaccaagctagcactacaaggaaagctaaaaggagttcaaaatcttaaaacaaaagtttgatatgcaccacaatagaacctcttgaaagcataaaaaaatcacagggcctatraaacaatagcacagaaaccgttaaaaaaaatctagggaacagctaacatgatggatagaacagtacctcacatcgcaatattaatgttgatttcaaatggcctaaatactccacttcaaagacacagatggcagaatgggtgaaacatcacaaagcaaatgtctgctgtctttaagagactcaccgaacacttaaggattcatataaactcaaagtaaagttgtggataaagatattccaagcaaatagaaatcaaaagagagcagaaatagctattcttatatcagacaaaacacactttaaagcaacaacagtaaagaaaaagacaaaggaagtcattatataatgaggtatttaatgagaaa

SEQ ID NO: 405597 - DNA, 560 bp, Homo sapiens
attagaacagatagacttaacagatatttacagaacattctatccaataagtgcagaatacacattcttctcatcagcacatagtacattcttcaagacagaccacatagtaggtcacaagacaagtgtcaataaatttaagaaaatcacagttatatcaattatcttctcagaccacagtggaataaaactagaaatcaattccaaaaggaaccctcaaaactataaaaatacatgaaaataaaataatctattcctgaatgattttgcagttaacaatgaaatcaaaatagaaattaaaattatttgatataaattataatagtgacagaagttatcctctaggatacagcagaagcagtgctaagargaaagttcatagtgtttactgcctacatcaaaaagtctgaaacagcacaaattgacaacttaacatcacatctcaagaaactagagaaacaggaacaaactaaacacaaagccagcagaagaaataacaaagatcagaggataactaaatgaaaatgaaacaaaagtacaaaaataaatgcaacaaaaag

SEQ ID NO: 405598 - DNA, 564 bp, Homo sapiens
ctgggaaaaaagtcaagctgcgggcactgataagggaactagcacagggggttgtgcctggagacatggccgcagctgctcagatagcaggacctccagcctattcagacaaaaattttcacaaacctccrgctcactcagataaaagaacaaggcctgacatagaaaggtttttgtcctttgtataatcagcgagcttccaggaaaaagtttcttctccttttgtgagcatgaacatagtgggctctggtcgattccggtgggcacttttctttccttttttagattgtgagcccaggctctatgaatcatcacttcagcccatgattggtcccaagccaaggtccagggctaagctttcagattggtcccaggccaaggccctggggcaagctgagtcacgtgttctccaagatagcccacagactaagcacattcctttcccttcccagtccataaaaaccctggactctagcctcatagggagcaacccatttgggcccccttctccactggtggagagctttcttcttttgcttttcaaattttcactccaacctcacc

SEQ ID NO: 405599 - DNA, 608 bp, Homo sapiens
agttttctactcaaaatggaaacattgttcaggtaaaaawtaaggaagggcagaagagcactggcaactctggggaaagactcacctagaagaagcaaaagaagaatatagcctatgcattcctagttattgcttccaaatttcacaaacgagtcatgcatggttcccagaaacagtgattaaaggtccagcatggagagagggctagaatgtgcttaagtaaaaatgcttccttatgaaaactccagggtcaggaaatatgtttctcttgtaatattattaatcgttttatttccagggtttagttcatgggcctgatacacagtcaatccttaatgatttctgaaagaataaacaatggttaaatgtataaccaactgcaagagggatgaaaaatataaacaactgcaatgaaagtaacaactgtcaaccaagaagatactttcagaacatgcttttaaagtatatgtaattttttaaaaagtagattagtactgggcatacatttacaatgaattgctgttttcctactatgtcttatgataaaaaaagaagtagcttagaggtagcagataacctgttttgacaagaaaataataagtgtgttg

SEQ ID NO: 405600 - DNA, 608 bp, Homo sapiens
agttttctactcaaaatggaaacattgttcaggtaaaaaataaggaagggcagaagagcactggcaactctggggaaagactcacctagaagaagcaaaagaagaatatagcctatgcattcctagttattgcttccaaatttcacaaacgagtcatgcatggttcccagaaacagtgattaaaggtccagcatggagagagggctagaatgtgcttaagtaaaaatgcttccttatgaaaactccagggtcaggaaatatgtttctcttgtaatattattaatcgttttatttccagggtttagttcatgggcctgatacacagtcaatccttaatgatttctgaaagaataaacaatggttaaatgtataaccaactgcaagagggatgaaaaatataaacaactgcaatgaaagtaacaactgtcaaccaagaagatactttcagaacatgcttttaaagtatatgtaattttttaaaaagtagattagtactgggcatacatttacaatgaattgctgttttcctactatgtcttatgataaaaaaagaagtagcttagaggtagcagataacytgttttgacaagaaaataataagtgtgttg

SEQ ID NO: 405601 - DNA, 480 bp, Homo sapiens
ttttacatgttgttcattcaggctgatagctggactccctttttatattttttctttcacatcccttgaaactcaggtctgagcttcccattttagttttgctcatcctgtaatatttactggaaatagtaattcgagttaaaggtgaattcctctgctaggatttaaatcttttcctttcattgtagtgtatcttagagggacgcattgtgattaatccttacttttagcctcagcttctagttaataatataaattatttggttggaaatctaggttctataatattgcatttttatatctattgaaactataaaatgtgtgacaaagtattttgagaattttatttcaatagaaataaaattgaaatttcaatagaaataaarttgaaatctatttcaatagatatttactgaacattttctttgtgtaggatatatcaagctgggtacttggacaaatacaactgtttactagcaa

SEQ ID NO: 405602 - DNA, 542 bp, Homo sapiens
tcataacaagccatttcattggattgagcttgtgagagtttctggaactgacatttgtgactaacatrgtttgactgtgtccccacccaaatctcaccatgaattgtaatatatcccttgtgtcgagggcagggccaggtgaagataattgaatcgtgggggctgtttcccccatactgttctcatggtagtgaataagtctcaggaggtccgatgattttataaatgggagttcccctgcacaagctcgcttttgtctaccaccatttaagatgtgcccttgcttctcttttgccttctgccatgattgtgaggcctctccagccatgtagaactgtgagtccattaaaactctttagtttaataaatcacccagtctctagtatgtgtttattagcagcatgagaacagattaatacagtgaccaagtgttttctttccccaatgacccctcaactatattttaattggaaatggcaggaatgactccaaatcaacttttactttttcccattttgattaatatctttccctgaaagcat

SEQ ID NO: 405603 - DNA, 620 bp, Homo sapiens
tctccaaagaaaacactatggaaagattttcctacaaaagtatattttttattctttgttttaataatgtctttacagtattctagtatatctccttttatcaactgggattcaaaagtagaggaagctaagtgcataggatggcctgtggttattttagtaggcaaaagcttgtgagttccaaagggagtagctctcaattaccaaaggaaaaccttaggccagggagggtgtaaaatttccatacattcttccaactttgtgtgtgtgtgtgtgtgtgtgtgtgtgtgtgtgtgtgtgwgacagagtctcactctgttgcccaggctggagtgcagtagaattctgtttgtttgttctacccagtcagaggattagggattgtagatataatgaaaatgccacaatattggtcaagctgaatgtacctgttttattatatagtcagtaaagtgagttccccagtcactacaaagttcaaggggagctccccaagtggggataatttttcttgaaaaattttgtctatggttgaagcagcagcttgtctataaggaaagacttccatgcaatgggaaaacatacacatcataaccattacatatatatacacacagaag

SEQ ID NO: 405604 - DNA, 566 bp, Homo sapiens
aatcattattcaatttcagaatttctgctgactgaatctaggaaattcagctaagccatcacaggcttagttgtgtggcctctcattattctaaacaagtttaataaattgtttaatgaaatatacacacagaagaatacatataatatatgtataataaaattgccactgattccaaggaatagaacatggccagcaccccaaggaaccccaatatatccctcccaattaatagccttccctttagagataatcactttcctgtctatatatgtatatatgttttcctgaacactgtggagttgagttttgcctgtttggcgaactttatgtgaatggagtattatgtattcctctgcatcttatttctttccttcaatatcatatttgtgagattcatacatattgtcttgtgtagttgtaatttgtccattgttgttactgtatagtatttcagtatattaatayactcaatttactcattcatattaatatactcaatttactcattcttttcttgataaagcttagttttttttttcctccagtttggaattaccagggac

SEQ ID NO: 405605 - DNA, 534 bp, Homo sapiens
agacaaataccacatgatgtcactgatattttaaaaagttgttctcaaagaattagagagcgaaatgatagttgccagaaggctggagtggttggtggggaagtaggtagagttttggggaaaaaattttaaaaaatcaatgtacaataaaagtggcattttatataataaaaaaaggagtgaaatattttatacatgtttggaaaactactaataaaaataagtttagacaatctgtttcacaccttaaacaaaaataaattccagatagagtaaagctttmaatgctaaagacgaaactataatcatatcagaagaatctcattgtgtattttaatcccagaatacagaagaatttattaattatgatacagaacccagaagctacagataaaatagcaaccaatttaactacataaaaatgtaaaatgtctatatgataaaaagagaggccaaagatatttgtaacatttacgtaaatatatagtggtctcttagatcaataataaacaactcttagaaataaatatggac

SEQ ID NO: 405606 - DNA, 641 bp, Homo sapiens
ggttgtttctactttttgttcttgtgaatactactgttatgaacattcatgtagaagtatttgtttgaatatctattttcaattctcttggctatatacctaggaatggaattgcttgatcgtatggtaactctatgtttaactttttgaggaactgatagactgtttttcaaagtggctgcaacattttacatttctaccagtagtgtatgagagttctgatttctccatatccttggtaacacttgttattatctttttttattacaaccatcctagtgtgtgtgaagtggtatttctttcyggcttagatttgcatttccctgatggctaatgatgttgagcatcttttcatctgcttaatggctagttgtataacttctttaaagaattgtcattcatatcctttggccattttaatgcgtgatttgtctttttactcttgagtttaacttgagttaggatggtgtgatcagggccccagtattctcattctactgtgcttggtgttgaacctctatctttagagtccaggctggatggaagaagtgactatccaacctctaggctgtattgaccaaaaaatttgcctcttaaacttggagttagaggggctgagaaatgctggcagattgctcctc

SEQ ID NO: 405607 - DNA, 593 bp, Homo sapiens
gtttgaccatgatgtgagattcttataaaccttttataaccctttacaaagttttgttcaagacatgtcagtgcctcaagaaaaccttgttgtgtttttattccaatgttcaatttatggaaaaaaaaaaaacaataatacccttatgaatttattcaatatgttcacacacagatttctttttaaacgtttaatttttacaaaccttccataacttgtttgaacatttagctttatctaatctaatttaaaacaatctttcaaccctctatactaggcaaaaatttacattcccatgcctacttatattttttaactaaagacacgtttttcttttcttacataccttgcatgtaaatattttccatagtctccactacatgttttaatgttagctcttagcaatttttaattttggtgaaatacscagtaagttattttggttacatacttaggtgcagataagatctgactatttccaacatagctaggaatgtgatatatgtcctcaggctttatcaaactgtagagcagaaaagtcgaacaattttcaaaagtcaaaagcagtttatgaccttaaagcatttagccaa

SEQ ID NO: 405608 - DNA, 596 bp, Homo sapiens
gaatactccagtctcagttgaagcttcagatgacagcagacttcactgacagctcaattgcaacctcatgaggcgtactgagccagaaccacccaactaaggtgttcataggttcctgacccacagaaacagtgagatgataaatgtttgctgttttaactggctaagttttgtggtaatttttaatacmgaatgagatcacgagtgaaatggtgatagcaggcattcttgtctttttatctcggaaaagaaagtctaaatattttactgctaattgtaataatttttgtagtttgatttgtttgttttgtagacttttttaagattaaagtttccttcttttactagctttcttaaaggtgttttaaaaaatcatggaagggtgacaaatttcatcagattttttgccatatattgagatgtttatatgatttatctcatgaaaccaattacattggatttactttcaaatacaaaccaatcttgcatttcttaaactgaatattgtcataatttataattatttcatgttactgtgtcacataaactgtaatgtggtcctcatgatacccacctcctagtgttcataccattat

SEQ ID NO: 405609 - DNA, 596 bp, Homo sapiens
gaatactccagtctcagttgaagcttcagatgacagcagacttcactgacagctcaattgcaacctcatgaggcgtactgagccagaaccacccaactaaggtgttcataggttcctgacccacagaaacagtgagatgataaatgtttgctgttttaactggctaagttttgtggtaatttttaataccgaatgagatcacgagtgaaatggtgatagcaggcattcttgtctttttatctcggaaaagaaagtctaaatattttactgctaattgtaataayttttgtagtttgatttgtttgttttgtagacttttttaagattaaagtttccttcttttactagctttcttaaaggtgttttaaaaaatcatggaagggtgacaaatttcatcagattttttgccatatattgagatgtttatatgatttatctcatgaaaccaattacattggatttactttcaaatacaaaccaatcttgcatttcttaaactgaatattgtcataatttataattatttcatgttactgtgtcacataaactgtaatgtggtcctcatgatacccacctcctagtgttcataccattat

SEQ ID NO: 405610 - DNA, 559 bp, Homo sapiens
catctggcagcagactttttagtagaaatcttacaggacaggagagagtggcacgacatattcagtgtgctgaaagaaaaatcttttaacctagaataatatatctggcaaaaatatcctccaaatgtgtaggagaaataaagacattcacagacaaaagctgagagcttttataaacaccagacctgtcctacaagaataattttgaaaactatacaaatacatgcaaattaaactatatgttcttgaatgaccagtgggtcaataaagaaattaagaaagaaattgaagaattttttgaaacaaataataatggacacacatcatacaaaaacctataggatagagcaaaaacagtattaagagggaattttatagctataaatgcctaaatcaaaaaagatggaaaacttcaaataaacaacmtaacaatgcacctcaaagaactagagaagccacaacaaaccaaaccaaaaatcagttgaataaataaataataaagatcagagcagatataaatgacattgaaatgaagaatacaaaatatcaatggaacaaa

SEQ ID NO: 405611 - DNA, 591 bp, Homo sapiens
cacaaaacagggtaagccctaaaattggtacagaatcattataaacgcctacatcgtttgaatctctataatcaccaaatagaagaattgatagttgaaacaatggtcctaagatattccaaatactgaaatgatgttaaaataaaagaataatctacactyatcataaatattattgttgtgcttctttttgtactcctagtctgtggaaattgataatccaaatatgggagtaaataatagtaacaataataatgataattactttctatgaaggtagggaccatgtgtaatttgttcatcacaatatatcgagtaccaaaattggtagcttccttatgaaagctactagataagtgttttcaaataactagttattctttataatactcaaagctggcaattttttgagcctatggtatgagccagaaattatgctaggtacttcatattcattatggtaatctttacgacaacttttatagtatgcaacatttttatcctcatttctcagatgagaaatctaaagcccagaatattcacataacttgcctaagaaaacacaactaataagtggaagagttggactgc

SEQ ID NO: 405612 - DNA, 591 bp, Homo sapiens
cacaaaacagggtaagccctaaaattggtacagaatcattataaacgcctacatcgtttgaatctctataatcaccaaatagaagaattgatagttgaaacaatggtcctaagatattccaaatactgaaatgatgttaaaataaaagaataatctacactcatcataaatattattgttgtgcttctttttgtactcctagtctgtggaaattgataatccaaatatgggwgtaaataatagtaacaataataatgataattactttctatgaaggtagggaccatgtgtaatttgttcatcacaatatatcgagtaccaaaattggtagcttccttatgaaagctactagataagtgttttcaaataactagttattctttataatactcaaagctggcaattttttgagcctatggtatgagccagaaattatgctaggtacttcatattcattatggtaatctttacgacaacttttatagtatgcaacatttttatcctcatttctcagatgagaaatctaaagcccagaatattcacataacttgcctaagaaaacacaactaataagtggaagagttggactgc

SEQ ID NO: 405613 - DNA, 520 bp, Homo sapiens
aagagtgtgggataatggtggaagaagtgtaaagtcggatccggcagaatttattgatattggcccagtaagcagaaattctgaatttaacaccgaagctcagggagttagaaagggctcaaaaatttgtttggttggttgggtgaaatatggattaaaagatggttcaccatgagtgagtagagatggccaattccccttggtttaaggtagaggacagaattcaaacacttagggagattggaatgctagagtggatttgtcacttgaaacctactcacccaaattgggaaagtccagaaaacataactttcgccagtactttgagaaataggtttgtgaggggagcctcagcatccttgaagatcttcatgactgtaggccasaccttacagtgggaatcacagtcactcaattggaaagcttaaatttaatgagaataactgaatcctgtagtggcaggggccaagtggcagcactcaactgccaaaggtaaggtgggtgttaccttaaaggacaa

SEQ ID NO: 405614 - DNA, 563 bp, Homo sapiens
ttcataacatgatgttttgatatatgtgcacattgtggaatgactgtcaacataattcacatatgcattatctcatgccgttattttttatggtgagaacatataaaatctactttcttagcaactgtcaattgtacaayatattaactgtagtcatcatgatgtacaataggatcttttgacttattccttctaactaacattttgtgtattttgacaaacatctcctcaatctccccaccatccttggcctctagtaaccaccatttcactcagtgtttctatgaactaaatatttatctactttaaagggtgttctttatagtggatcacagaataatcatttggattcattatgtgaatgatcaaatttgattattatgacaaccacaaattttgaaaaattatgcaagggacaaactttaaaatatttatctcattttattttttattatttcaacttttatttcagattcagagagtacttgtgcaaatatgtttgctgggtatattgtgtgttgctgaggtttggggtacaattgatccagtcacccaggtagtga

SEQ ID NO: 405615 - DNA, 417 bp, Homo sapiens
taaaaaattatgtataattgtgatcaatatggatgtttttaaatatgttcaactatttatactattttccttctcaaagaatcatcagaatgctgaacacataaaataaacattggataaattaaaaataatttttcattctaaacaatctaatttaagtatagttcctatttagacttaaccataacactttgaaaaacttgaaagaattcactgattttttataaaatttaaaattaatacatattacacaatttgtaatatrtatttttactttgaacatgagggcattttaaatggagcttctttgaaatataattcacatataaaaatttcagaaaattttaaggacctttttctttttactaatgctttgattaggatttcagtctgcatacaaatttgtcaagattttag

SEQ ID NO: 405616 - DNA, 417 bp, Homo sapiens
taaaaaattatgtataattgtgatcaatatggatgtttttaaatatgttcaactatttatactattttccttctcaaagaatcatcagaatgctgaacacataaaataaacattggataaattaaaaataatttttcattctaaacaatctaatttaagtatagttcctatttagacttaaccataacactttgaaaaacttgaaagaattcactgattttttataaaatttaaaattaatacatattacacaatttgtaatatatatttttactttgaacatgagggcattttaaatkgagcttctttgaaatataattcacatataaaaatttcagaaaattttaaggacctttttctttttactaatgctttgattaggatttcagtctgcatacaaatttgtcaagattttag

SEQ ID NO: 405617 - DNA, 604 bp, Homo sapiens
aaagttgaaagtcttcccactgagggctagaacaagttaaggatgcccattttcaccacttctacttaacatagtactggaagtcctacccagagcaatcaagcaagaggaagaaataaagggcatccaagctggaaaagaggaagacaaattatctctgtttgctgatgatttaagcatatacttagataaacctaagaattccaccaaaagactcttctatttgatgaatgaattcataaaatcttaggttacaaaatgaatgtacacaaattagtactactgcatagcaccaacaatgatcaagctgagaatcaaatcaagaactcaatttcttttacaatagcagcagaaaaaaaattgaaatacacttaaccaaataagtgaaagatctccataaggagagctacaaaaaytgctgaaataaattagagatgatataaacaaatggaaatacatcccatgctcatggataggaagaatcatatttgtgaaaatgaccttactgctaaaagcaatctacagattcaatgcacttcctatcaaaatactgacatcatttttcatagaattagagaaagcaattctaaattcttatgaaacc

SEQ ID NO: 405618 - DNA, 498 bp, Homo sapiens
tagcagtttttttctccaaattaaagtataaatatttaatttttacttttaatttttaaacgttactcaataktatgtttataaaatgacttctggaaaaacatgtctattttctatcatttatcatgtcataattgagagaagcaaggacccaaattcatttaattataacacataaaactgaataaatatagatgacagatatgtgttctttgtttttacatatctgttgtaaaccatattactcagattatctcacttctttcaacttttctaataaaagcaattaccatacctatgtggaatgtattttaatagtaattcattttaataaaagttatatatttttaggaggtcaaaatagaaatttcaatttatgaaatgttgactttttaatcttattgacatattttctggaggcaaattgtagaactatttgaatagcaacagaaatttccagtggagagacagtcagatacgaaacttccgtgagaaaac

SEQ ID NO: 405619 - DNA, 498 bp, Homo sapiens
tagcagtttttttctccaaattaaagtataaatatttaatttttacttttaatttttaaacgttactcaatagtatgtttataaaatgacttctggaaaaacatgtctattttctatcatttatcatgtcataattgagagaagcaagracccaaattcatttaattataacacataaaactgaataaatatagatgacagatatgtgttctttgtttttacatatctgttgtaaaccatattactcagattatctcacttctttcaacttttctaataaaagcaattaccatacctatgtggaatgtattttaatagtaattcattttaataaaagttatatatttttaggaggtcaaaatagaaatttcaatttatgaaatgttgactttttaatcttattgacatattttctggaggcaaattgtagaactatttgaatagcaacagaaatttccagtggagagacagtcagatacgaaacttccgtgagaaaac

SEQ ID NO: 405620 - DNA, 435 bp, Homo sapiens
ctcaatagtatgtttataaaatgacttctggaaaaacatgtctattttctatcatttatcatgtcataattgagagaagcaaggacccaaattcatttaattataacacataaaactgaataaayatagatgacagatatgtgttctttgtttttacatatctgttgtaaaccatattactcagattatctcacttctttcaacttttctaataaaagcaattaccatacctatgtggaatgtattttaatagtaattcattttaataaaagttatatatttttaggaggtcaaaatagaaatttcaatttatgaaatgttgactttttaatcttattgacatattttctggaggcaaattgtagaactatttgaatagcaacagaaatttccagtggagagacagtcagatacgaaacttccgtgagaaaactg

SEQ ID NO: 405621 - DNA, 498 bp, Homo sapiens
tagcagtttttttctccaaattaaagtataaatatttaatttttacttttaatttttaaacgttactcaatagtatgtttataaaatgacttctggaaaaacatgtctattttctatcatttatcatgtcataattgagagaagcaaggacccaaattcatttaattataacacataaaactgaataaatatagatgacagatatgtgttctttgtttttacatatctgttgtaaaccatattactcagattatctcacttctttcaacttttctaataaaagcaattaccatacctatgtggaatgtattttaatagtaattcattttaataaaagttatatatttttaggaggtcaaaatagmaatttcaatttatgaaatgttgactttttaatcttattgacatattttctggaggcaaattgtagaactatttgaatagcaacagaaatttccagtggagagacagtcagatacgaaacttccgtgagaaaac

SEQ ID NO: 405622 - DNA, 604 bp, Homo sapiens
ttccgggtagtaggaaagaatacaagtgaataacattagtccagaagttttaataatattctttgctggttgaaattcatgtttaatatgatgtaaattacttgataagcaaattaagaactatgctactacagactccaaataagacgcaagaaaaatgagaggaaatacattaaaggaaaatcttaaaaaaacagctgcacagaagataaattatttttccaggagttttaaacatagttgcttttgtttgtttgctttgctgttttttcttaattgttttagtaagctcaggctgctatataaaaataagataggcgctggtctgaacaatagacatttatttcttatagttcttgaacctggcaagtctgaggagggtcatcttctgggctttcaaagggctgcctttttcctatgtacgtacatagtgaatagaaagcgttagctctctggtctctwcctgtaagagcactaatcccatcatgaagaccccatccttatgggctcatctaaacctaattacttccaaaggtcccacctccaaatgctaacacattgagagttaaggcttcaatatattaattttggggaaacaagacac

SEQ ID NO: 405623 - DNA, 443 bp, Homo sapiens
tgtgtgttctgactgctccrccaacttagacaattagttttagatcttttatttagacgatgagaaaatttaaactataaataggccaggtctggtggcttatgcctggaatcccagcattttgggaggctgaggtgggaggctcactggaggccaggagttcaaaaccagcctgagcaacatagggagacctcagctctacaactgaaaaaaaaatagccaggtgtggtcatggtggcaccggtctgtattccagccacttgggaggctgaggcaggaggtttgcttgagtccaggagtttgaggttgcggtgagctacacaatgagctatggtggcactactacactccagcctgggccatagagtaaggccctgtctctaactggaagtccaaagagggatctacttccaagactattaatttaatagatcaataaatta

SEQ ID NO: 405624 - DNA, 443 bp, Homo sapiens
tgtgtgttctgactgctccaccaacttagacaattagttttagatcttttatttagacgatgagaaaatttaaactataaataggccaggtctsgtggcttatgcctggaatcccagcattttgggaggctgaggtgggaggctcactggaggccaggagttcaaaaccagcctgagcaacatagggagacctcagctctacaactgaaaaaaaaatagccaggtgtggtcatggtggcaccggtctgtattccagccacttgggaggctgaggcaggaggtttgcttgagtccaggagtttgaggttgcggtgagctacacaatgagctatggtggcactactacactccagcctgggccatagagtaaggccctgtctctaactggaagtccaaagagggatctacttccaagactattaatttaatagatcaataaatta

SEQ ID NO: 405625 - DNA, 443 bp, Homo sapiens
tgtgtgttctgactgctccaccaacttagacaattagttttagatcttttatttagacgatgagaaaatttaaactataaataggccaggtctggtggcttatgcctggaatcccagcattttgggaggctgaggtgggaggctcactggaggccaggagttcaaaaccagcctgagcaacatagggagacctcagctctacaaytgaaaaaaaaatagccaggtgtggtcatggtggcaccggtctgtattccagccacttgggaggctgaggcaggaggtttgcttgagtccaggagtttgaggttgcggtgagctacacaatgagctatggtggcactactacactccagcctgggccatagagtaaggccctgtctctaactggaagtccaaagagggatctacttccaagactattaatttaatagatcaataaatta

SEQ ID NO: 405626 - DNA, 443 bp, Homo sapiens
tgtgtgttctgactgctccaccaacttagacaattagttttagatcttttatttagacgatgagaaaatttaaactataaataggccaggtctggtggcttatgcctggaatcccagcattttgggaggctgaggtgggaggctcactggaggccaggagttcaaaaccagcctgagcaacatagggagacctcagctctacaactgaaaaaaaaatagccaggtgtggtcatggtggcacckgtctgtattccagccacttgggaggctgaggcaggaggtttgcttgagtccaggagtttgaggttgcggtgagctacacaatgagctatggtggcactactacactccagcctgggccatagagtaaggccctgtctctaactggaagtccaaagagggatctacttccaagactattaatttaatagatcaataaatta

SEQ ID NO: 405627 - DNA, 537 bp, Homo sapiens
tggtggcaccggtctgtattccagccacttgggaggctgaggcaggaggtttgcttgagtccaggagtttgaggttgcggtgagctacacaatgagctatggtggcactactacactccagcctgggccatagagtaaggccctgtctctaactggaagtccaaagagggatctacttccaagactattaatttaatagatcaataaattaatcaagaatatgatttttttctcatctttctctgtagtcatattttatacagactttttgtttaagtaatctctctttatgggcagacaatgatttcagaaacaccacaaattattctcaaaragaaaagatgaggattttttttttttagaaaatgtaactcttttcagtagctcttggcagacctaccctcacattttcttgactaaaaacagtcattaaaaaaagtcagtcacaaacaggtgaatttaaattatcatggtttacctatgcttaacaagctttatcctcagaggtaaggatagggttactttcctgaattttag

SEQ ID NO: 405628 - DNA, 537 bp, Homo sapiens
tggtggcaccggtctgtattccagccacttgggaggctgaggcaggaggtttgcttgagtccaggagtttgaggttgcggtgagctacacaatgagctatggtggcactactacactccagcctgggccatagagtaaggccctgtctctaactggaagtccaaagagggatctacttccaagactattaatttaatagatcaataaattaatcaagaatatgatttttttctcatctttctctgtagtcatattttatacagactttttgtttaagtaatctctctttatgggcagacaatgatttcagaaacaccacaaattattctcaaagagaaaagatgaggattttttttttttagaaaatgtaactcttttcagtagctcttggcagacctaccctcacattttcttgactaaaaacagtcattaaaaaaagtcagtcacaaacaggtgaatttaaattatcatggtttacctatrcttaacaagctttatcctcagaggtaaggatagggttactttcctgaattttag

SEQ ID NO: 405629 - DNA, 632 bp, Homo sapiens
aatgcccatatgattgacctcagctccatgacatttaagcacractttcttcctacacccagagtaaaaacagatgttcacataagtcacgttgataacataaccttttctggtcgaactgggagagtatggcccaagacttcaggaaaacaagaacacttttatcaagcaaaatactccaagggctcagagatgaactcctagtctaaggtctagtcctgcagagggacccctctttggaatgtatagtatttgagcaattcaggccagtcaagttaaaccttttcacccatgcctaaatgctatttaataaatgtaaataacaacgatgagatagtttattaaacatttttattgaaatccacaaatagtatatagttaattaattttaacaaagtgattgtacatatttcacaataaaattcccttaaattaccatctgctccatctgcaagtaattattattctgattgctaataacatagactttttttaacctatttttgaacttttataatagaattaaacaatatatattcttttctggatggcttctgttactcagaaatgtatttaggagagtcatcaaagctctcttgggtataccatttatccttcttgcttgataatac

SEQ ID NO: 405630 - DNA, 632 bp, Homo sapiens
aatgcccatatgattgacctcagctccatgacatttaagcacgactttcttcctacacccagagtaaaaacagatgttcacataagtcacgttgataacataaccttttctggtcgaactgggagagtatggcccaagacttcaggaaaacaagaacacttttatcaagcaaaatactccaagggctcagagatgaactcctagtctaaggtctagtcctgcagagggacccctctttggaatgtatagtatttgagcaattcaggccagtcaagttaaaccttttcacccatgcctaaatgctatttaataaatgtaaataacaacgatgagatagtttattaaacatttttattgaaatmcacaaatagtatatagttaattaattttaacaaagtgattgtacatatttcacaataaaattcccttaaattaccatctgctccatctgcaagtaattattattctgattgctaataacatagactttttttaacctatttttgaacttttataatagaattaaacaatatatattcttttctggatggcttctgttactcagaaatgtatttaggagagtcatcaaagctctcttgggtataccatttatccttcttgcttgataatac

SEQ ID NO: 405631 - DNA, 613 bp, Homo sapiens
aactttctcaacaaattttactcagacttctgctctacgctaagaactagctctggaaattaattcacagaaagaacatggttaggggccatcctgagggatttacctcactagggatatatatttacatttcaagagaagatgagacccagtagatgcatcccagaagttacaaagctggagactctagtgttatctttcccctagagagatttatttttatccaagtggttagagtaagaactcagacttttttccgttttgtgactatggagacacactcagaagggggtcagagcaactgggtcactcttccacaaaaatgctcaggttcttttttccagagttctttgcctacagcagatccccttacatgtaggacatctggttctcaccacatcaccaccacggtaagaattagtggaaaggagagctaggttaagggcagctgtttctttccttctctgcagcctctggtaccaagtactgcatgacatgtgtctcacaacattcctgcctctgcacctctgtgctacgacactggatgaatctatggagtgagcaatagaaagtctctgwactgccagaaacaacttcattttacatggaagtg

SEQ ID NO: 405632 - DNA, 617 bp, Homo sapiens
cactacctgacagggagataaatgactaaaggcaaatgggagtcaaaacaggtgtggcttttcttatttttarttaagcatcttacatagcaaattttgcaaaactcgtatgaccccgagaaagacccatacacatgaaaggtcttaaagatttaactttcttagctttaacgtaagctttccactggattttccattacactcattccataaagaaatgaaataatcatatatctcattatataattatactaaattgatctcgacacattttcttagcaatatataccaacattgtttccaatattgtttattacaaatgatgctacagttgaaatctttatatctgaacgcttgtgtgtgtgtgtgtacctattctgtgtataacactgattttatttatttgtataggcctggaagtggaaatactgtgacataaaatagaggcacagcaaattattcaagatgtcgacaaacagcattgtttccaagtttttgttcccttacaatccttgccattggcaatctctcagaatcccgtgttgcttaacatttggtagcttagtaaatattttaaatctcagagattttacctaactgataccagggtttttaaa

SEQ ID NO: 405633 - DNA, 617 bp, Homo sapiens
cactacctgacagggagataaatgactaaaggcaaatgggagtcaaaacaggtgtggcttttcttatttttaattaagcatcttacatagcaaattttgcaaaactcgtatgaccccgagaaagacccatacacatgaaaggtcttaaagatttaactttcttagctttaacgtaagctttccactggattttccattacactcattccataaagaaatgaaataatcatrtatctcattatataattatactaaattgatctcgacacattttcttagcaatatataccaacattgtttccaatattgtttattacaaatgatgctacagttgaaatctttatatctgaacgcttgtgtgtgtgtgtgtacctattctgtgtataacactgattttatttatttgtataggcctggaagtggaaatactgtgacataaaatagaggcacagcaaattattcaagatgtcgacaaacagcattgtttccaagtttttgttcccttacaatccttgccattggcaatctctcagaatcccgtgttgcttaacatttggtagcttagtaaatattttaaatctcagagattttacctaactgataccagggtttttaaa

SEQ ID NO: 405634 - DNA, 617 bp, Homo sapiens
cactacctgacagggagataaatgactaaaggcaaatgggagtcaaaacaggtgtggcttttcttatttttaattaagcatcttacatagcaaattttgcaaaactcgtatgaccccgagaaagacccatacacatgaaaggtcttaaagatttaactttcttagctttaacgtaagctttccactggattttccattacactcattccataaagaaatgaaataatcatatatctcattatataattatactaaattgatctcgacacattttcttagcaatatataccaacattgtttccaatattgtttattacaaatgatgctacagttgaaatctttatatctgaacgcttgtgtgtgtgtgtgtacctattctgtgtataacactgattttatttatttgtataggcctggaagtggaaatactgtgacataaaatagaggcacagcaaattattcaagatgtygacaaacagcattgtttccaagtttttgttcccttacaatccttgccattggcaatctctcagaatcccgtgttgcttaacatttggtagcttagtaaatattttaaatctcagagattttacctaactgataccagggtttttaaa

SEQ ID NO: 405635 - DNA, 604 bp, Homo sapiens
aaagttgaaagtcttcccactgagggctagaacaagttaaggatgcccattttcaccacttctacttaacatagtactggaagtcctacccagagcaatcaagcaagaggaagaaataaagggcatccaagctggaaaagaggaagacaaattatctctgtttgctgatgatttaagcatatacttagataaacctaagaattccaccaaaagactcttctatttgatgaatgaattcataaaatcttaggttacaaaatgaatgtacacaaattagtactactgcatagcaccaacaatgatcaagctgagaatcaaatcaagaactcaatttcttttacaatagcagcagaaaaaaaattgaaatacacttaaccaaataagtgaaagatctccataaggagagctacaaaaactgctgaaataaattagagatgatataaacaaatggaaatacatcccatgctcatggataggaagaatcatatttgtgaaaatgaccttactgctaaaagcaatctacagattcaatgcamttcctatcaaaatactgacatcatttttcatagaattagagaaagcaattctaaattcttatgaaacc

SEQ ID NO: 405636 - DNA, 610 bp, Homo sapiens
aagaataaagtgctagtgacaaattcccagttgtgttttcctttcttaatatttgagagccacagcmaatgttgcataccctttgatgttaagcagaaacttttgtctagacattgacttcaggctttaaaatatgtagtatctcccccagattaaaggtaactagtccctgatttctattaaaatataatctttagaagcttaaaatcatagctctcagacaaatataaaatgaataggttttaaagatattaacttgaattaataaataacaaatagatgttttaaatgacacaaagggaatctgagaaactgggacatttagaagcaatttagcaaaataacattaagattgcttggttaaataaataaatatagattgatatataacagtgtcataaatctgtgaggttatctgttctactaaggagatatatttgtatctttacaggaaaaaaaagttcatggtgcaaaatccctttactaaatctggtacctttaattattattgtatagcacttaagtataggaacttgaatatagccaatatattcctaaagatctaaattactctccaaataaaatgctttttgtacataattttttctat

SEQ ID NO: 405637 - DNA, 635 bp, Homo sapiens
gtaagtgaaaatgcatttataagtataggcaaatttttaggcaagacacctcataaagatcactttagaaattagatcaagtaaaaataagtcacaaaaagaaacgtgaattagtcatcttaaacattgttttaggcagtaaaacaacattgaaaaaagaggatcttgtaaagcctgatacttgattcctataggataactgaatcaaatcagatgttttagaggtaatggtcacctgattgttttctcttgagttttttcatataatagktgcagtggttcttgcaatgaggaatttttttatggaaatgtgaaataaagtacagaaattcctaatgaaaacctgtcttttaagtggatctctaaattctaagaaagtgcttatattatcttagttatttagctattagcctgtcaatcattaggaaagtaagagcaatttacaaagcatctaccactgtgctagtacttgctcacatgttctcatccacctaagggaatattcaaagcatcttaatagttgctactaattcatataatttaattaatagaatagcaaatacattctcatcttatttcacatttttaacatacacaagatatagctattttatagtgattaggtttagtaaaaa

SEQ ID NO: 405638 - DNA, 635 bp, Homo sapiens
gtaagtgaaaatgcatttataagtataggcaaatttttaggcaagacacctcataaagatcactttagaaattagatcaagtaaaaataagtcacaaaaagaaacgtgaattagtcatcttaaacattgttttaggcagtaaaacaacattgaaaaaagaggatcttgtaaagcctgatacttgattcctataggataactgaatcaaatcagatgttttagaggtaatggtcacctgattgttttctcttgagttttttcatataataggtgcagyggttcttgcaatgaggaatttttttatggaaatgtgaaataaagtacagaaattcctaatgaaaacctgtcttttaagtggatctctaaattctaagaaagtgcttatattatcttagttatttagctattagcctgtcaatcattaggaaagtaagagcaatttacaaagcatctaccactgtgctagtacttgctcacatgttctcatccacctaagggaatattcaaagcatcttaatagttgctactaattcatataatttaattaatagaatagcaaatacattctcatcttatttcacatttttaacatacacaagatatagctattttatagtgattaggtttagtaaaaa

SEQ ID NO: 405639 - DNA, 635 bp, Homo sapiens
gtaagtgaaaatgcatttataagtataggcaaatttttaggcaagacacctcataaagatcactttagaaattagatcaagtaaaaataagtcacaaaaagaaacgtgaattagtcatcttaaacattgttttaggcagtaaaacaacattgaaaaaagaggatcttgtaaagcctgatacttgattcctataggataactgaatcaaatcagatgttttagaggtaatggtcacctgattgttttctcttgagttttttcatataataggtgcagtggttcttgcaatgaggaatttttttatggaaatgtgaaataaagtacagaaattcctaatgaaaacctgtcttttaagtggatctctaaattctaagaaagtgcttatattatcttagttatttagctattagcctgtcaatcattaggaaagtaagagcaatttrcaaagcatctaccactgtgctagtacttgctcacatgttctcatccacctaagggaatattcaaagcatcttaatagttgctactaattcatataatttaattaatagaatagcaaatacattctcatcttatttcacatttttaacatacacaagatatagctattttatagtgattaggtttagtaaaaa

SEQ ID NO: 405640 - DNA, 635 bp, Homo sapiens
gtaagtgaaaatgcatttataagtataggcaaatttttaggcaagacacctcataaagatcactttagaaattagatcaagtaaaaataagtcacaaaaagaaacgtgaattagtcatcttaaacattgttttaggcagtaaaacaacattgaaaaaagaggatcttgtaaagcctgatacttgattcctataggataactgaatcaaatcagatgttttagaggtaatggtcacctgattgttttctcttgagttttttcatataataggtgcagtggttcttgcaatgaggaatttttttatggaaatgtgaaataaagtacagaaattcctaatgaaaacctgtcttttaagtggatctctaaattctaagaaagtgcttatattatcttagttatttagctattagcctgtcaatcattaggaaagtaagagcaatttacaaagcatctaccactgtgctagtacttgctcacatgttctcatccacctaagggaatattcaaagcatcttaatagttgctactaattcatataatttaattaatagaatagcaaatacattctcatcttatttcacatttttaacatacacaagwtatagctattttatagtgattaggtttagtaaaaa

SEQ ID NO: 405641 - DNA, 322 bp, Homo sapiens
cttgtttctattgtttattaacatatccaaggaacacgtagaatgaattggcagaatataatcatattatcaaataattattagtttagtcagtttcataaacctagataatcaaatgaaaatacataataatataattatgtcataatttttatcaaaattttaaaattaatgaattaaatccagctaccaaagataggggtttgtgaaaagtagatacaatactagagtggaggttgtaatgaaaactcagaatgggctatagtattaaaaaaatartaaagacctccagtatttttttttctcaaaatggcagattaga

SEQ ID NO: 405642 - DNA, 554 bp, Homo sapiens
gatcctatctcacaggggacctcacagaagtcagccaggtaactcaggcagtggtcacaggttgagagaagctctcaactgagattcatgatataatctcgagtggagacaaacccccttggtcagaaccatggggcagatgggaaatgtgctgcagccataggtgcaagagctgggtgcccctgcttcatgggccaactaggagaggcgtgacctggaagccatggttgcagtctcttctgggaagtcttatggccttgggcagtgttgagttctgagtgttgactgcttggaaccaagctgctgcgagtgggacactgcaggtgcaagacctgctttgccaagtgtgtgggagctgagtggggctaactgctgcctgctgctccctawtcctcatacagatgcttctctgcagcagaggcagctgtggtactccctgcaacattactcctacagccagaggaccactatctgatccccactggggacagtgcttttgcccacacatggcagacaaaagagagctagaatgtgaacttgcctgattcagcccc

SEQ ID NO: 405643 - DNA, 537 bp, Homo sapiens
ttaccaatctgctggttttcactcagggacacctcccctactggcctgaaatctgaattattcaaccaggtaaagaaaacactgggagaaaaaaaaaggcaaaaacgtgcacaccacttgggaactagataagcttcatgagacctctgccattgctaccccacaggaaacagtgaacctccacacacacactgagcataatgttaccacaactagcatctgagaaagccaacatacaaasattttaaataaccagggaacttatacagtcttcacccctgaaagcacccagagctgaattaggttacaataaactataaacattaaagtcacatcctcaaagtgaaaaaaaaaaaagtgaaaaatcacagtcaaatcaaaaaataaattcaaaaataattagaagatatagtctcaaaagtaattagaagatatactctatccaaatgagaagaaaccagaaaaataattctggcaataggacaaaatagggttctataacacctcaaaaagaacacactaagtccccagcaatgg

SEQ ID NO: 405644 - DNA, 610 bp, Homo sapiens
cattaaagtcacatcctcaaagtgaaaaaaaaaaaagtgaaaaatcacagtcaaatcaaaaaataaattcaaaaataattagaagatatagtctcaaaagtaattagaagatatactctatccaaatgagaagaaaccagaaaaataattcyggcaataggacaaaatagggttctataacacctcaaaaagaacacactaagtccccagcaatggatcccaaccaagatgaaatctttgaaatgccagaaaaataattcaaagaaataagcaaagtctcttagaaataggtgactatgtaaaatggccaaatatagcaattgctgttcctgagggagaagaaacagcaaaactttttgaatacttatttgagggcataattgaagaaaactttgctagccttgctagatatttagatgtccaaatacaagaaactcaatgagctctggggaggttcactgcaaaactgacattacaaagccatatagtaatcaagctatctaaagtcaacatgaagaaatgaattctaagaacagtgagacaaaagcaacaagtaacctataaaggaaaacctattagactaacagcagacttctcagcagaaatctta

SEQ ID NO: 405645 - DNA, 610 bp, Homo sapiens
cattaaagtcacatcctcaaagtgaaaaaaaaaaaagtgaaaaatcacagtcaaatcaaaaaataaattcaaaaataattagaagatatagtctcaaaagtaattagaagatatactctatccaaatgagaagaaaccagaaaaataattctggcaataggacaaaatagggttctataacacctcaaaaagaacacactaagtccccagcaatggatcccaaccaagatgaaatctttgaaatgccagaaaaataattcaaagaaataagcaaagtctcttagaaataggtgactatgtaaaatggccaaatatagcaattgctgttcctragggagaagaaacagcaaaactttttgaatacttatttgagggcataattgaagaaaactttgctagccttgctagatatttagatgtccaaatacaagaaactcaatgagctctggggaggttcactgcaaaactgacattacaaagccatatagtaatcaagctatctaaagtcaacatgaagaaatgaattctaagaacagtgagacaaaagcaacaagtaacctataaaggaaaacctattagactaacagcagacttctcagcagaaatctta

SEQ ID NO: 405646 - DNA, 583 bp, Homo sapiens
agccatatagtaatcaagctatctaaagtcaacatgaagaaatgaattctaagaacagtgagacaaaagcaacaagtaacctataaaggaaaacctattrgactaacagcagacttctcagcagaaatcttacaggccagaagttcactgtatctttaggcttatctttaatatccttagacaaaataactattagtcaaaaattttgtatccagcaaaactgagtctcataaatgaaagagaaataatgtcttcctcagacaagcaaatgctgagggaatctgtccctatcagaccagtcctacaagaaatgctaaatcttgaaacaaaatgttgagctgcatcagaacctaacatacaaagattctcatagactcaaggtaagggggtggagaaggatattcaatgcaaatggaaaccaaaagcaagcaggtgtagttatatcagataaagtagactttaaagcaacaatagtaaaaaaaaaaaccaaagaaagtcattacataataattaaataattaattcaacaaaatataataattctacataagtatgcacataacactggagctcctacatttat

SEQ ID NO: 405647 - DNA, 578 bp, Homo sapiens
aaactttgctagccttgctagatatttagatgtccaaatacaagaaactcaatgagctctggggaggttcactgcaaaactgacattacaaagccatatagtaatcaagctatctaaagtcaacatgaagaaatgaattctaagaacagtgagacaaaagcaacaagtaacctataaaggaaaacctattagactaacagcagacttctcagcagaaatcttacaggccagaagttcactgtatctttaggcttatctttaatatccttagacaaaataactattagtcaaaaattttgtatccagcaaaactgagtctcataaatgaaagagaaataatgtcttcctcagacaagcaaatgctgagggaatctgtccctatcagaccagtcctacaagaaatgctaaatcttgaaacaaaatgttgagctgcatcagaacctaacatacaaagattctcatagactcaaggtaagggggtggagaargatattcaatgcaaatggaaaccaaaagcaagcaggtgtagttatatcagataaagtagactttaaagcaacaatagtaaaaaaaaaaac

SEQ ID NO: 405648 - DNA, 308 bp, Homo sapiens
atatcatgtggatctttgttgttcccaattaggattgaaaataacttctggccaaattagtagtgtagagacttatggaatggagtcaatttaaaaccggatttttttgagttaatggtaagaaagagtttgttgcaataaaattctttgaaattttagatatgaaattggtacaaaaacttawtacaaattcatctacctgattttttgtggcaatgtcataaataaaagaaatatggtctcatctttcctaaatattttgctcatgctctttgacaataccgtaaaatgtacttaaactacataag

SEQ ID NO: 405649 - DNA, 308 bp, Homo sapiens
atatcatgtggatctttgttgttcccaattaggattgaaaataacttctggccaaattagtagtgtagagacttatggaatggagtcaatttaaaaccggatttttttgagttaatggtaagaaagagtttgttgcaataaaattctttgaaattttagatatgaaattggtacaaaaacttaatacaaattcatctacctgattttttgtggcaatgtcataaataawagaaatatggtctcatctttcctaaatattttgctcatgctctttgacaataccgtaaaatgtacttaaactacataag

SEQ ID NO: 405650 - DNA, 308 bp, Homo sapiens
atatcatgtggatctttgttgttcccaattaggattgaaaataacttctggccaaattagtagtgtagagacttatggaatggagtcaatttaaaaccggatttttttgagttaatggtaagaaagagtttgttgcaataaaattctttgaaattttagatatgaaattggtacaaaaacttaatacaaattcatctacctgattttttgtggcaatgtcataaataaaagaaatatggtctcatctttcctaaatattttgctcatgctctttgamaataccgtaaaatgtacttaaactacataag

SEQ ID NO: 405651 - DNA, 308 bp, Homo sapiens
atatcatgtggatctttgttgttcccaattaggattgaaaataacttctggccaaattagtagtgtagagacttatggaatggagtcaatttaaaaccggatttttttgagttaatggtaagaaagagtttgttgcaataaaattctttgaaattttagatatgaaattggtacaaaaacttaatacaaattcatctacctgattttttgtggcaatgtcataaataaaagaaatatggtctcatctttcctaaatattttgctcatgctctttgacaatacygtaaaatgtacttaaactacataag

SEQ ID NO: 405652 - DNA, 496 bp, Homo sapiens
aaaccggatttttttgagttaatggtaagaaagagtttgttgcaataaaattctttgaaattttagatatgaaattggtacaaaaacttaatacaaattcatctacctgattttttgtggcaatgtcataaataaaagaaatatggtctcatctttcctaaatattttgctcatgctctttgacaataccgtaaaatgtacttaaactacataagaatcttccagtaaaataaaatgcaacatttcactcagaagtaaaacatttttaaaatagtgtccaacaattgcttcaagagggtgacaacttatgaacaccctgttctaagtgtttccaccctaattggtttctttctttttttttttttttgagacaaaaccttgctctgttacccaagctggagtgcagtggtgtgacctcggctcactgcaacctccgcctcctgggtccarcggattctcctgcctcagccaaccaagtagctgggattagaagcaa

SEQ ID NO: 405653 - DNA, 574 bp, Homo sapiens
tgttggccaggctggtctcgaactcctgacttcaagtgattggactcccaaagtgctggaattacagrcataagccaccatgcctggcctcccctaattcgcttctttaaacctctctacatcatcacaagatgggtgttactatgatcactattttacaggtgagcatatgaggaacagagaggttaaggaggaacagggtgatctgctacaactcttcagcagggcattctgggcaggactgtctaacttgtgagaggcaaggggactatttatagcctatgtattcccgttaaagtaacaaacatatatcaagaataaatattacagtatatttctagcaaccatctagaaataggaaatagtatcagtaccatattgtcagatgacagtaggattaaataaaaccggagtaactaagtaactgaccctttattccctgcatttaaaagaaaagtatgtcttggagttgaattaagtaacctgggatagatctctaaaaatctgtaagtgaaacaggggtcacatattaacatgttatactagaaacagtgtctaagaaaggaatttggca

SEQ ID NO: 405654 - DNA, 574 bp, Homo sapiens
tgttggccaggctggtctcgaactcctgacttcaagtgattggactcccaaagtgctggaattacagacataagccaccatgcctggcctcccctaattygcttctttaaacctctctacatcatcacaagatgggtgttactatgatcactattttacaggtgagcatatgaggaacagagaggttaaggaggaacagggtgatctgctacaactcttcagcagggcattctgggcaggactgtctaacttgtgagaggcaaggggactatttatagcctatgtattcccgttaaagtaacaaacatatatcaagaataaatattacagtatatttctagcaaccatctagaaataggaaatagtatcagtaccatattgtcagatgacagtaggattaaataaaaccggagtaactaagtaactgaccctttattccctgcatttaaaagaaaagtatgtcttggagttgaattaagtaacctgggatagatctctaaaaatctgtaagtgaaacaggggtcacatattaacatgttatactagaaacagtgtctaagaaaggaatttggca

SEQ ID NO: 405655 - DNA, 553 bp, Homo sapiens
tgtgaatatgttagttgcatggcaaaggaaaattgaaattgtagactaaactaaggttgttcgtcagttgatattaagataggaaagttattctggattatcctgatgggaccaaaataatcagaaggacatttacaagtggaaggaggcagaagaagttagagtgatgagatgggaactcacaaactgccattgctggccctttaaaacaatttaaatcttgttttatgacacataattattgtacatatttatgggatacagtgtgatgtttcaacacgtgtatgtatagtttaaatattgaatcaggatattcaacatattcttcacttcatacatctttgatatctttacggtgagagaattcaaaaatcctctcttctagctattttgaaatatacaatacaatattgctaaccatagtcaccctgactccattcctcattttaaaaatggaggaagggacagtgatyaaaggaatgcaagcagcctctgggctgtggaaaaccaaaggaaacaaactcttcccacagaccccccccaagaaaaaacc

SEQ ID NO: 405656 - DNA, 588 bp, Homo sapiens
aaggttatcattttggagtttcacttgattgggttttgttttgttttgtttttttcatagaaatatttgatatatgtggtcaccactcacaactcttgcttcagtgagcatggatgacaggcagccccagctactgtttttctggttgtatgactatctttgcactcagaccatattttctctggctgttcctggccaatgactgagcatgctcggagtattgatgaaggccatttttaagatttgtgataaccttccaacagaagactttggactggagactcctattgtccgggccaaaacttcctaaactgtgtttcaggctgtgactctttcattctcatccttcttccttctccccctcctttgacagaagccaggcttgcatcactgaagactccctgcacttagatctgctttttcttcttaatctttawctaacgttcctctcataaccttttgagtgacttataattgcatagtatcagcttcttggaaaacctgacttgataaactatcctatttgaaatacagatatatatgcatttaacaatttttgacattattagcacattgaatattaaatag

SEQ ID NO: 405657 - DNA, 588 bp, Homo sapiens
aaggttatcattttggagtttcacttgattgggttttgttttgttttgtttttttcatagaaatatttgatatatgtggtcaccactcacaactcttgcttcagtgagcatggatgacaggcagccccagctactgtttttctggttgtatgactatctttgcactcagaccatattttctctggctgttcctggccaatgactgagcatgctcggagtattgatgaaggccatttttaagatttgtgataaccttccaacagaagactttggactggagactcctattgtccgggccaaaacttcctaaactgtgtttcaggctgtgactctttcattctcatccttcttccttctccccctcctttgacagaagccaggcttgcatcactgaagactccctgcacttagatctgctttttcttcttaatctttatctaacgttcctctcataaccttttgagtgacttataattgcatagtatcagcttcttggaaaacctgacttgataaactatcctatttgaaatacagatatataygcatttaacaatttttgacattattagcacattgaatattaaatag

SEQ ID NO: 405658 - DNA, 420 bp, Homo sapiens
cttcctctgcctttcttaaagtgattggttaaaaygttttagcacttagcagtttcttcctagttttgcagatatggccctgaaatggcttatgagtaaggcaaatagaggatgttcttactgggctagtgcttttatttctctctttcgcttgttctattttttaagtgaaaatggcattagcatcttatttgtcaggctttcattttcgtgtttgagaattccacttgtagataaccaatagctataacctgttcaggtctttaaaaatatagcttattgaatgagcagtcacacacaagaaattccgttcttcccatagtccatcatgctttacccgtattcagcttctcacttctgtatctaaaaacactagattttatcattctactttaaagtttctttctttttttttttttt

SEQ ID NO: 405659 - DNA, 420 bp, Homo sapiens
cttcctctgcctttcttaaagtgattggttaaaatgttttagcacttagcagtttcttcctagttttgcagatatggccctgaamtggcttatgagtaaggcaaatagaggatgttcttactgggctagtgcttttatttctctctttcgcttgttctattttttaagtgaaaatggcattagcatcttatttgtcaggctttcattttcgtgtttgagaattccacttgtagataaccaatagctataacctgttcaggtctttaaaaatatagcttattgaatgagcagtcacacacaagaaattccgttcttcccatagtccatcatgctttacccgtattcagcttctcacttctgtatctaaaaacactagattttatcattctactttaaagtttctttctttttttttttttt

SEQ ID NO: 405660 - DNA, 420 bp, Homo sapiens
cttcctctgcctttcttaaagtgattggttaaaatgttttagcacttagcagtttcttcctagttttgcagatatggccctgaaatggcttatgagtaaggcaaatagaggatgttcttactgggctagtgcttttatttctctctttcgcttgttctattttttaagtgaaaatggcattagcatcttatttgtcaggctttcattttcgtgtttgagaattccacttgtagataaccaatagctataacctgttcaggtctttaaaaatatagcttattgaatgagcagtcacacacaagaaattccgttcttcccatagtccatcatgctttacccgtattcarcttctcacttctgtatctaaaaacactagattttatcattctactttaaagtttctttctttttttttttttt

SEQ ID NO: 405661 - DNA, 610 bp, Homo sapiens
tgtccctggttctctggtttttggccctagcgtgattaggacagaagcacagtggcctggagtgtgacagccctatagagtatttgtttgggaattggttagtttgtatttgtaaagcccatcttcatgmgaagttcaggggagacttcgtagccagaagctgaggcaaggtgactccagcatactatccatcttcaagaacaagatgtgtctgaattgctgtatgttataaagtttcgatgtctaatagagcaaatctttcatcctgttggttctctttgatttaatttgcttttttttctctctaagtactgttctcggaataagccaatctgatatgtgtgtcactattccaaggaatgagtagatcacactttatttttctgcttcttgtgaacattaattagttcagttttctgaaattttcaatgctattgtgattttttaaaattaacaatgctactttgcttattgtgtacttgtcaccagaaatgcaagagctaagatgtctctggaaatggaattcctgggtcacagggttggcacatgatcaacattattagataatgttaaattgttgtacaatgtaatcacattaatttgtatgcca

SEQ ID NO: 405662 - DNA, 607 bp, Homo sapiens
atttatattcttgatgagatgtatagagtgagaatgagatacattgtctttttattataaacaatcttgctttagtagctactgaagtttacttttgaaattgtatttcttaaatatttctgttaattatagaaaattgattttgtattctattttatatccattaactttgctcatttagtaattctaataatcctaggcattctycacaatgcattgtaagataatgtatacatttcataggatgacaatttttaggtacacttaatggtatgggactatagattattggaattttctttggtttaaaattggcaaactatttttaaggggaagttgttaacaatcactttctacaatatgtgactctctcttcaaagagtaaatcagagacaaatcttttttttcaaatttctttttttgaaaatcaataataatgaccctattttttagtttgaatggattctcattaatttaaaatgcaaatattttggactaaatgtttgtgtccctcccaccccaaatttaaattttgaagccctaatccccagtattatggttttggagatgtgggcctttggaggtcaaaaggttgagatgaaaccat

SEQ ID NO: 405663 - DNA, 615 bp, Homo sapiens
actttgctcatttagtaattctaataatcctaggcattctccacaatgcattgtaagataatgtatacatttcataggatgacaatttttaggtacacttaatggkatgggactatagattattggaattttctttggtttaaaattggcaaactatttttaaggggaagttgttaacaatcactttctacaatatgtgactctctcttcaaagagtaaatcagagacaaatcttttttttcaaatttctttttttgaaaatcaataataatgaccctattttttagtttgaatggattctcattaatttaaaatgcaaatattttggactaaatgtttgtgtccctcccaccccaaatttaaattttgaagccctaatccccagtattatggttttggagatgtgggcctttggaggtcaaaaggttgagatgaaaccatgaggatggagtcctcatgatggaattagtgaatttattataaaagacacagaagagcactttcttgtatacttcctttgtctctgtctctctgtgtgtttctctatctctcttccctttgggaacacaacaaaaggtatctgtgtgacaagcatgaagaataccctcagcagaa

SEQ ID NO: 405664 - DNA, 607 bp, Homo sapiens
atttatattcttgatgagatgtatagagtgagaatgagatacattgtctttttattataaacaatcttgctttagtagctactgaagtttacttttgaaattgtatttcttaaatatttctgttaattatagaaaattgattttgtattctattttatatccattaactttgctcatttagtaattctaataatcctaggcattctccacaatgcattgtaagataatgtatacatttcataggatgacaatttttaggtacacttaatggtatgggactatagattattggrattttctttggtttaaaattggcaaactatttttaaggggaagttgttaacaatcactttctacaatatgtgactctctcttcaaagagtaaatcagagacaaatcttttttttcaaatttctttttttgaaaatcaataataatgaccctattttttagtttgaatggattctcattaatttaaaatgcaaatattttggactaaatgtttgtgtccctcccaccccaaatttaaattttgaagccctaatccccagtattatggttttggagatgtgggcctttggaggtcaaaaggttgagatgaaaccat

SEQ ID NO: 405665 - DNA, 615 bp, Homo sapiens
actttgctcatttagtaattctaataatcctaggcattctccacaatgcattgtaagataatgtatacatttcataggatgacaatttttaggtacacttaatggtatgggactatagattattggaattttctttggtttaaaattggyaaactatttttaaggggaagttgttaacaatcactttctacaatatgtgactctctcttcaaagagtaaatcagagacaaatcttttttttcaaatttctttttttgaaaatcaataataatgaccctattttttagtttgaatggattctcattaatttaaaatgcaaatattttggactaaatgtttgtgtccctcccaccccaaatttaaattttgaagccctaatccccagtattatggttttggagatgtgggcctttggaggtcaaaaggttgagatgaaaccatgaggatggagtcctcatgatggaattagtgaatttattataaaagacacagaagagcactttcttgtatacttcctttgtctctgtctctctgtgtgtttctctatctctcttccctttgggaacacaacaaaaggtatctgtgtgacaagcatgaagaataccctcagcagaa

SEQ ID NO: 405666 - DNA, 607 bp, Homo sapiens
atttatattcttgatgagatgtatagagtgagaatgagatacattgtctttttattataaacaatcttgctttagtagctactgaagtttacttttgaaattgtatttcttaaatatttctgttaattatagaaaattgattttgtattctattttatatccattaactttgctcatttagtaattctaataatcctaggcattctccacaatgcattgtaagataatgtatacatttcataggatgacaatttttaggtacacttaatggtatgggactatagattattggaattttctttggtttaaaattggcaaactatttttaaggggaagttgttaacaatcactttctacaatatgtgactctctcttcaaagagtaaatcagagacaaatcttttttttcaaatttctttttttgaaaatcaataataatgaccctattttttagtttgaatggattstcattaatttaaaatgcaaatattttggactaaatgtttgtgtccctcccaccccaaatttaaattttgaagccctaatccccagtattatggttttggagatgtgggcctttggaggtcaaaaggttgagatgaaaccat

SEQ ID NO: 405667 - DNA, 498 bp, Homo sapiens
gttatgcatcctcaagtttttgtttaaactctctgaataagtacctcattccattttgcyggggcaaagtgagtggatggggaaagtaggccaagggcattatgtgaatgggtcacttcaaagggaaaaacatatctgaaacatggtagaagcaccccataactactttttcatgcctttggcctattggacttaaccattatagcaatgatgactcaaaaactacactaaagcagtgttaagaggaacattgacggtgctaaatgcattcatcagggggacaaaaaggtctcaagttaatgacctaacatagcaactaggggaattagaaaaaaagcaacagaaaagacccaaccccaaagctagtagaagaaaaaaaataactgaagtcagagaactgaaaaaaaattgttatctaaaagtccacacaaaagatgaagccaagagtttttttaataaacaatactgatagatcattagctagattagcaaagaaaa

SEQ ID NO: 405668 - DNA, 498 bp, Homo sapiens
gttatgcatcctcaagtttttgtttaaactctctgaataagtacctcattccattttgccggggcaaagtgagtggatggggaaagyaggccaagggcattatgtgaatgggtcacttcaaagggaaaaacatatctgaaacatggtagaagcaccccataactactttttcatgcctttggcctattggacttaaccattatagcaatgatgactcaaaaactacactaaagcagtgttaagaggaacattgacggtgctaaatgcattcatcagggggacaaaaaggtctcaagttaatgacctaacatagcaactaggggaattagaaaaaaagcaacagaaaagacccaaccccaaagctagtagaagaaaaaaaataactgaagtcagagaactgaaaaaaaattgttatctaaaagtccacacaaaagatgaagccaagagtttttttaataaacaatactgatagatcattagctagattagcaaagaaaa

SEQ ID NO: 405669 - DNA, 618 bp, Homo sapiens
tcagagaactgaaaaaaaattgttatctaaaagtccacacaaaagatgaagccaagagtttttttaataaacaatactgatagatcattagctagattagcaaagaaaaagagaagatccaaataagtataatcagaaattataaagattatatyaaaattgatcccatgaaaatacaaaagatatgcagagactattatgagcacctctctgcacacaaatctagaggaaatgaataaattcctggaaacacacaatctcccaagattgaatcaggaagaaagtgaaaacctgaacggaccaataggaagtttggaaatggaattagtaataaaaacctacgaaaaaaaataaaataaaagccctgtaacagatggattcacagctgagttctatcagaggggcaagggagaaatgataccaatcctactgaaatgtctccaaaaaatcaaggaggaggggcttctatctaactcatactacaaagccagcattaccctgttaccaaatctggcatagaccacggaaaaagaaaaaagaaaactacagatcaatatctctgatgaaaatacaagcaaaaattgtcaaaccaaatccagcagcacatcaaaaagttca

SEQ ID NO: 405670 - DNA, 618 bp, Homo sapiens
tcagagaactgaaaaaaaattgttatctaaaagtccacacaaaagatgaagccaagagtttttttaataaacaatactgatagatcattagctagattagcaaagaaaaagagaagatccaaataagtataatcagaaattataaagattatattaaaattgatcccatgaaaatacaaaagatatgcagagactattatgagcacctctctgcacacaaatctagaggaaatgaataaattcctggaaacacacaatctcccaagattgaatcaggaagaaagtgaaaacctgaacggaccaataggaagtttggaaatggaattagtaataaaaacctacgaaaaaaaataaaataaaagcccygtaacagatggattcacagctgagttctatcagaggggcaagggagaaatgataccaatcctactgaaatgtctccaaaaaatcaaggaggaggggcttctatctaactcatactacaaagccagcattaccctgttaccaaatctggcatagaccacggaaaaagaaaaaagaaaactacagatcaatatctctgatgaaaatacaagcaaaaattgtcaaaccaaatccagcagcacatcaaaaagttca

SEQ ID NO: 405671 - DNA, 618 bp, Homo sapiens
tcagagaactgaaaaaaaattgttatctaaaagtccacacaaaagatgaagccaagagtttttttaataaacaatactgatagatcattagctagattagcaaagaaaaagagaagatccaaataagtataatcagaaattataaagattatattaaaattgatcccatgaaaatacaaaagatatgcagagactattatgagcacctctctgcacacaaatctagaggaaatgaataaattcctggaaacacacaatctcccaagattgaatcaggaagaaagtgaaaacctgaacggaccaataggaagtttggaaatggaattagtaataaaaacctacgaaaaaaaataaaataaaagccctgtaacagatggattcacagctgagttctatcagaggggcaagggagaaatgataccaatcctactgaaatgtctccaaaaaatcaaggaggaggggcttctatctaactcatactacaaagccagcattaccctgttaccaaatctggcatagaccacggaaaaagaaaaragaaaactacagatcaatatctctgatgaaaatacaagcaaaaattgtcaaaccaaatccagcagcacatcaaaaagttca

SEQ ID NO: 405672 - DNA, 604 bp, Homo sapiens
tgttatatgtacatgtatattataataactaatacctataaactatttacaattatatgtattataataactaataaatataaactacttattgtcaaaactgtttttaactattaaaagataaagcacacagatatgttttctttactaggtattcccagaagcactcataaaactcggggttttcayatagcagtgattacagacttgctatttttattattcccattttatagattaagagcacaagacccatattagtgttatttagccatgtcatagagccaattcccagatattttttccacttgttttgtcatgaagaatgagaagtagaatcagcatcaagtttgtgctaaacaagtacaataataagaagcacagcaaatgctgactagactgtaagaatatttttgcttttaggccacccgaaaaagataagatatatgaggtgatcaaagtgaataattatataaacaagaggaattagaatatgaataagccaggaaaaataggaataggccaagaaaacacacacacccatttcttatttaaacctaaagggagacaaattcattcaatctatacatatttattttgctac

SEQ ID NO: 405673 - DNA, 604 bp, Homo sapiens
tgttatatgtacatgtatattataataactaatacctataaactatttacaattatatgtattataataactaataaatataaactacttattgtcaaaactgtttttaactattaaaagataaagcacacagatatgttttctttactaggtattcccagaagcactcataaaactcggggttttcacatagcagtgattacagacttgmtatttttattattcccattttatagattaagagcacaagacccatattagtgttatttagccatgtcatagagccaattcccagatattttttccacttgttttgtcatgaagaatgagaagtagaatcagcatcaagtttgtgctaaacaagtacaataataagaagcacagcaaatgctgactagactgtaagaatatttttgcttttaggccacccgaaaaagataagatatatgaggtgatcaaagtgaataattatataaacaagaggaattagaatatgaataagccaggaaaaataggaataggccaagaaaacacacacacccatttcttatttaaacctaaagggagacaaattcattcaatctatacatatttattttgctac

SEQ ID NO: 405674 - DNA, 548 bp, Homo sapiens
gcatttttatgaaccaaaatcattgcagctaataaccaaatcaagaacacaatccaatttacaatagccacaaagaaaatgaaatacctaggaattcatccaaccaagggggtcaaagaccactacaaggagaagtacaagacactgttgaaagaaatcagagatgacacataaatggaaaaatatccatgctcatggattggaagaatcaatattgttaaaatggatatactgcctaaagcaatttacagattcaatgctattcctatcaaaataccaatgtcattttttaaataattagaatgaaacctattataaaattcatctggaaccacaaaagagcttgaatagccaaagcaatcctaagcaaaaagaaaagccagaggtatcacattgccagacttcaaactgtactataaggctacagtgatcaaaacagcatggtactgatacaaaaacagacacacagaccagtggaagagaatacagyacccagaactaaatttgcccacttacaactatgtgacctttgaagaagctgacaaaaa

SEQ ID NO: 405675 - DNA, 563 bp, Homo sapiens
gtaggggttgtgggctgaagaactacctgttgggtactgtgttactgcctgggtggtaggatcactgggactccaagcctcagcatcacacaattactcatgtaacagtctttcattaacctataataaaagttgaaattaattaaaaaaacaaaacaactacactgtttcattkctctagatttctttttgtctccatttaattatggagagacttgcagagacagaaatgactgtcatgtgttcttatacacataaagccctagaaacaggagccacagcacatcatgcactggggccatatggggaagtaccagagtcagtgaaggcaaaaggagcaagactaaagcatgagccagagcctttaatatggttttccttggaaggaatgagtgagacagtgtaagcagctgagcaggtttaagactgggtagtgtgagtactttttgtgtaatttagtccctagtgttccagcacctgattctggggtgacgaaagcagagggataatgtcccagaccacaggagccatataataagagtcaagtgagggtgtggattctg

SEQ ID NO: 405676 - DNA, 578 bp, Homo sapiens
cgtcataacctgaaagatttgttctcttgacttgagttggacarctggggttttatttctgaagcattttataggaactactcattgttcttgtttttgtcatagtagtcatgatgctggccaattgcattcaactcagtcttaacttcctttttatagcagccctctcaccagaagatcgcccttactacaaaactgcaaaaagttcaagaacatctcataatatggttgacaatagagacaactaaacagtctctaagtcgtgaagatttgaatctctaaacttccctgaattggcttggtcaatgcctcacaagctagttaatgacaaaatgggaggaggggtagccagaccatatataagaatagagttctgacccacatctttgtagcaaccagcctgggaagccaaaccacagcctctgcatcaaccagccccaaatgaataggatttagttaatgattgccaggttccctatttttgcccccgctgccaactcaggacccatcagagaaagtcaagtatgctttctgactgatcacataagatgctccatttccccttatttatttagtcc

SEQ ID NO: 405677 - DNA, 621 bp, Homo sapiens
ttctcttcttgccaaattattttaaaaatatatctcagagtgtaattttatacctacatacttaaggatacatctctagaaaatgcagatatttagtaatacatttttacacagttaatttatttttcttcaggatctcaattcaaatattgtttgttattaaaaaactgtctctagcatatgttttactatatatttaagaatataatttggaaaaaaaagtctgacacatagtccatgttcaatttacctcttcaactaatctactaaaaggaaaaaaatgacaccaatacttcttactcttccctgaagttatgttatgatatttttagattttggaatcctgtaaagtgtgcccattattggtttcaagtacatgtttcctaactcatttcaatctcttctataatcaagtgcaagagaaaatataaaataggccctatgattgtagaaataaaagtggaaaaaactagcctagagttcayaaaagtagacatataaaaatcttgaaatgataaaggccataatcaattaattgaaactaaaattattcctttgagttatttttgggtattcttccaattttagtttttttgtttgtttgtttgatgttgcaaatat

SEQ ID NO: 405678 - DNA, 509 bp, Homo sapiens
agggacatttgggagagcataacaaataagggatcaaatacgtgctgagataaatrcatttttgttacatgagtcaggagttaaagaaataaatgaaagatgagagattaggatataaagtatatagggtgccagttcatataacactttacattaaaggaatttgagcttttgtttgaaacaatggaagctattgggagttttaaggggattgatatgaaggaggtaaaataggagtctatagcactaatctaaagtggtaagtgaatggaagtcaaagctatttagtggagtaggttgaaccaaaattgatgactaagtaggtggtatctaaaggaaaggaaaagtttgagtcttgggtatctggcatgcatagtatactaacagtgatatacacagttactttcaggctcactgaatgagttagtggtcaatgaaatacagaacaaagtcatgcaattcactttcaagttgtgttcttgaaacttcccatggcacccatgaagatt

SEQ ID NO: 405679 - DNA, 509 bp, Homo sapiens
agggacatttgggagagcataacaaataagggatcaaatacgtgctgagataaatamatttttgttacatgagtcaggagttaaagaaataaatgaaagatgagagattaggatataaagtatatagggtgccagttcatataacactttacattaaaggaatttgagcttttgtttgaaacaatggaagctattgggagttttaaggggattgatatgaaggaggtaaaataggagtctatagcactaatctaaagtggtaagtgaatggaagtcaaagctatttagtggagtaggttgaaccaaaattgatgactaagtaggtggtatctaaaggaaaggaaaagtttgagtcttgggtatctggcatgcatagtatactaacagtgatatacacagttactttcaggctcactgaatgagttagtggtcaatgaaatacagaacaaagtcatgcaattcactttcaagttgtgttcttgaaacttcccatggcacccatgaagatt

SEQ ID NO: 405680 - DNA, 509 bp, Homo sapiens
agggacatttgggagagcataacaaataagggatcaaatacgtgctgagataaatacatttttgttacatgagtcaggagttaaagaaataaatgaaagatgagagattaggatataaagtatatagggtgccagttcatataacactttacattaaaggaatttgagcttttgkttgaaacaatggaagctattgggagttttaaggggattgatatgaaggaggtaaaataggagtctatagcactaatctaaagtggtaagtgaatggaagtcaaagctatttagtggagtaggttgaaccaaaattgatgactaagtaggtggtatctaaaggaaaggaaaagtttgagtcttgggtatctggcatgcatagtatactaacagtgatatacacagttactttcaggctcactgaatgagttagtggtcaatgaaatacagaacaaagtcatgcaattcactttcaagttgtgttcttgaaacttcccatggcacccatgaagatt

SEQ ID NO: 405681 - DNA, 555 bp, Homo sapiens
agaagctagtattattattagcttgattttgctggtgagaacattgagatgtagagattcagagtagctagtgtttggtataactatgatttaaatttagttctgtcttattataatattaaacaagtatgtgacttygtagtgtaatgagtctcattcaaaacatacagcagttgcagcctaacatcttgttactttaggtggtgacataatgtattgactcatattgagcacttctaagtgtaagttttaagtagctttttttctttagaaaggtgctgaagataattcaaatacttttttgcatattattttgtgtccctgtagattgctaggactatgagggcagggccatatatattgtgttcatctctctatattcattttctaatgctggtccaagaaacaggttgagatgctaagtagggaggccgtagaaaacatcattgaaaagatagcatttatgcaaaaatttaaaggtggtgagggattaaacatgtagatatctgaaggaagggaacccaggcagagggaaaagacggtgcaaaagcccaa

SEQ ID NO: 405682 - DNA, 461 bp, Homo sapiens
agatttctccttgttcctgcctttcatctttctacatgtgtctcctattgtttgagcctaactggaagccagctttcagaaaatctgagctacataatccacagtgttcatcccctctgtcttatgaactgaactgggcagagtgaggaatgggtctcaggaaaaatagacccaytatcatcacgacattcaggtggaagtgtaaaaaatgcaattggatttatgcgtgtggaatttgggatagagatatggcatggaaatataaatttgggagtcattagcatttacactgcatgtaaaaccacgagattggatgagataaccaaggaaagaagtacagagaaagatgatggtggggggaaataaaatactgaggcctggagcattccaacattgagtctgaggaatagaagaaaacactaaaagagagagagagagagggagacagagagagagagaag

SEQ ID NO: 405683 - DNA, 461 bp, Homo sapiens
agatttctccttgttcctgcctttcatctttctacatgtgtctcctattgtttgagcctaactggaagccagctttcagaaaatctgagctacataatccacagtgttcatcccctctgtcttatgaactgaactgggcagagtgaggaatgggtctcaggaaaaatagacccattatcatcacracattcaggtggaagtgtaaaaaatgcaattggatttatgcgtgtggaatttgggatagagatatggcatggaaatataaatttgggagtcattagcatttacactgcatgtaaaaccacgagattggatgagataaccaaggaaagaagtacagagaaagatgatggtggggggaaataaaatactgaggcctggagcattccaacattgagtctgaggaatagaagaaaacactaaaagagagagagagagagggagacagagagagagagaag

SEQ ID NO: 405684 - DNA, 461 bp, Homo sapiens
agatttctccttgttcctgcctttcatctttctacatgtgtctcctattgtttgagcctaactggaagccagctttcagaaaatctgagctacataatccacagtgttcatcccctctgtcttatgaactgaactgggcagagtgaggaatgggtctcaggaaaaatagacccattatcatcacgacattcaggtggaagtgtaaaaaatgcaattggatttatgmgtgtggaatttgggatagagatatggcatggaaatataaatttgggagtcattagcatttacactgcatgtaaaaccacgagattggatgagataaccaaggaaagaagtacagagaaagatgatggtggggggaaataaaatactgaggcctggagcattccaacattgagtctgaggaatagaagaaaacactaaaagagagagagagagagggagacagagagagagagaag

SEQ ID NO: 405685 - DNA, 461 bp, Homo sapiens
agatttctccttgttcctgcctttcatctttctacatgtgtctcctattgtttgagcctaactggaagccagctttcagaaaatctgagctacataatccacagtgttcatcccctctgtcttatgaactgaactgggcagagtgaggaatgggtctcaggaaaaatagacccattatcatcacgacattcaggtggaagtgtaaaaaatgcaattggatttatgcgtgtggaatttgggatagagatatggcatggaaatataaatttgggagtcattrgcatttacactgcatgtaaaaccacgagattggatgagataaccaaggaaagaagtacagagaaagatgatggtggggggaaataaaatactgaggcctggagcattccaacattgagtctgaggaatagaagaaaacactaaaagagagagagagagagggagacagagagagagagaag

SEQ ID NO: 405686 - DNA, 260 bp, Homo sapiens
taataaagcacatttatgaaacagtaaattgcttttcataaaggtggattatttgatgtatcttgaagaagaaataacaactgtgaatcaaatatttatttatgaaattggcagagagtaaatgattaaagttttaatgatcagattgtcattttagagtaattatcattatacaacagcgaagaaaagttkgaagaagttaaattatagaaaaaggatgctattgttttaaattaatgcactggtctagctgtgatttc

SEQ ID NO: 405687 - DNA, 570 bp, Homo sapiens
caaactatggtatgtaagtwcatatgtaaatatgtatctatctatctatttatctatctaatctatcctatctatctatctatcatctatctatccatctatctatctatctccttttctttcatttatgtctggatctgtaccaaacaccaggcagaggagttaggagaagtaactgaaaaacccatgggtgacatcaccaactaaaacaggtgacaaataatcagcatgaaacccagaatacaagagtaattgtcctaatcattggcagcatagggccagtaccagctggagttaatggcaaagataaaatgaagataaaaggaagtattgtaagatcttaatatcaataaactacaacaagaaatcatcaataatgctcactcgcaaaagaaaaatacttaccctgaagaaaaacaattggaacaaaatcaaaattaatcagagaatcagataatctgagacaagtaagataaattttagaaaataatttttagaaaaaaataatttgaaggtacataaaatcaaatagaagtggtacaaactatagtaagagatatagagtataaa

SEQ ID NO: 405688 - DNA, 521 bp, Homo sapiens
tggctgtacatttttggtatgaggtagtggaatctttgaggcaggttaagggaaataagtcttaccattgaaatctgggggccatagactacagtctgggagtacgggtctagggagtacatggacaaagggaaattgggtrcaaatcccattgactgactcctgctagcatacttgtaaaagctaaccttttaataggttagtttttaataggaggagatgatagtgggagaaaaagctgcgagattacattttattcactggaaaaccttcttatccctccctggtttcttggagaaatttcatgtatccttagaaatgactcaaaatattgattattggacaaactatttatgtaaccggagtccaaggacaggtgatgagtgaaaactatattttattaaagaacagagtattcactaacagaagactggtgaattaacattggcatggattcttcaaattaatgatggaggacatgttgcaattctattattatctgatgcaaaggactattcatg

SEQ ID NO: 405689 - DNA, 647 bp, Homo sapiens
catgataggaatgatacaagtgtaaatgttgacaggctttatattttccagagagaaaacaccttagttaatgctattgatacaaataataagagatagagtgaatgggataagctaatgattctctgtcttacaagacttatataaccttgagggccaaatatatatattcagagaacagtaacaaacatacaggtttagttactatacatgggattatatggagaaaaagcatttatatcatgtgcacaacagggagaaattaaaaatcagaagagaaaatagaaaggcagctcacttgaattaatttacttttgaagaaaatataaatagsatttaaaaagtaagccttgatagaatttttaataagaaaataaaagcacattatcaacttttgaatcagaggagaggagtactgtagcccccaccaatcccttaaagaatcatagaaaatttgctttatttattgtggctgaaagagttcaaatccaattatgaggatagtgatatagaacagaacatacttgaacagggggctgggtttactgccttaattaaagccgtagaatctgaaaacaattaaataaagaactgaggtctggatctgaggccatatatataatttgaacaaagttacctggggtggt

SEQ ID NO: 405690 - DNA, 647 bp, Homo sapiens
catgataggaatgatacaagtgtaaatgttgacaggctttatattttccagagagaaaacaccttagttaatgctattgatacaaataataagagatagagtgaatgggataagctaatgattctctgtcttacaagacttatataaccttgagggccaaatatatatattcagagaacagtaacaaacatacaggtttagttactatacatgggattatatggagaaaaagcatttatatcatgtgcacaacagggagaaattaaaaatcagaagagaaaatagaaaggcagctcacttgaattaatttacttttgaagaaaatataaataggatttaaaaagtaagccttgatagaatttttaataagaaartaaaagcacattatcaacttttgaatcagaggagaggagtactgtagcccccaccaatcccttaaagaatcatagaaaatttgctttatttattgtggctgaaagagttcaaatccaattatgaggatagtgatatagaacagaacatacttgaacagggggctgggtttactgccttaattaaagccgtagaatctgaaaacaattaaataaagaactgaggtctggatctgaggccatatatataatttgaacaaagttacctggggtggt

SEQ ID NO: 405691 - DNA, 647 bp, Homo sapiens
catgataggaatgatacaagtgtaaatgttgacaggctttatattttccagagagaaaacaccttagttaatgctattgatacaaataataagagatagagtgaatgggataagctaatgattctctgtcttacaagacttatataaccttgagggccaaatatatatattcagagaacagtaacaaacatacaggtttagttactatacatgggattatatggagaaaaagcatttatatcatgtgcacaacagggagaaattaaaaatcagaagagaaaatagaaaggcagctcacttgaattaatttacttttgaagaaaatataaataggatttaaaaagtaagccttgatagaatttttaataagaaaataaaagcacattatcaacttttgaatcagaggagaggagtactgtagcccccaccaatcccttaaagaatcatagaaaatttgctttatttattgtggctgaaagagttcaaatccaattatgaggatagtgatatagaacagaayatacttgaacagggggctgggtttactgccttaattaaagccgtagaatctgaaaacaattaaataaagaactgaggtctggatctgaggccatatatataatttgaacaaagttacctggggtggt

SEQ ID NO: 405692 - DNA, 647 bp, Homo sapiens
catgataggaatgatacaagtgtaaatgttgacaggctttatattttccagagagaaaacaccttagttaatgctattgatacaaataataagagatagagtgaatgggataagctaatgattctctgtcttacaagacttatataaccttgagggccaaatatatatattcagagaacagtaacaaacatacaggtttagttactatacatgggattatatggagaaaaagcatttatatcatgtgcacaacagggagaaattaaaaatcagaagagaaaatagaaaggcagctcacttgaattaatttacttttgaagaaaatataaataggatttaaaaagtaagccttgatagaatttttaataagaaaataaaagcacattatcaacttttgaatcagaggagaggagtactgtagcccccaccaatcccttaaagaatcatagaaaatttgctttatttattgtggctgaaagagttcaaatccaattatgaggatagtgatatagaacagaacatacttgaacagggggctgrgtttactgccttaattaaagccgtagaatctgaaaacaattaaataaagaactgaggtctggatctgaggccatatatataatttgaacaaagttacctggggtggt

SEQ ID NO: 405693 - DNA, 478 bp, Homo sapiens
tgggtgacatcaccaactaaaacaggtgacaaataatcagcatraaacccagaatacaagagtaattgtcctaatcattggcagcatagggccagtaccagctggagttaatggcaaagataaaatgaagataaaaggaagtattgtaagatcttaatatcaataaactacaacaagaaatcatcaataatgctcactcgcaaaagaaaaatacttaccctgaagaaaaacaattggaacaaaatcaaaattaatcagagaatcagataatctgagacaagtaagataaattttagaaaataatttttagaaaaaaataatttgaaggtacataaaatcaaatagaagtggtacaaactatagtaagagatatagagtataaaaataagagtaaaaaacagaaattgagagattaaaaatatctaaaaattttctaaacataaaacttaggcaaagaatagtaatacccatgtaatgg

SEQ ID NO: 405694 - DNA, 659 bp, Homo sapiens
gccttaattaaagccgtagaatctgaaaacaattaaataaagaactgaggtctggatctgaggccatatatataatttgaacaaagttacctggggtggtattcaaagtttcttatcattggtaggatgtagagcagaatttacagtaggccttatggaaggtaggaaagagtctcatacatgctctaagtgaaatctggagtgcatgaagagaacatcagggaggaaaccaaggtaaagatgaagttacaggttgaaatgtgtggttggagagaatattacctgcttgtgctacctttacataaatacaaaattgcaattgtcattcartatgaatgggacattgtcgtctttgtgtttccacagaggatgaagactgagctcactcttcaccaaattttaatcagctatgccaaatgggatcctttggaattgctcaagctctccacagtagtaaatattaagcaatgcagaattccaagggcgcaataagagactactgttgtaattaagaaaatggttcagaaggaagttcccctccccacattaacttcctttttgtagttctaactggtcaataagtaggtagcccctggacatttacagtagagtatcaaggtggttcatttgcatgcttcatctgtacctgatatgatgaa

SEQ ID NO: 405695 - DNA, 659 bp, Homo sapiens
gccttaattaaagccgtagaatctgaaaacaattaaataaagaactgaggtctggatctgaggccatatatataatttgaacaaagttacctggggtggtattcaaagtttcttatcattggtaggatgtagagcagaatttacagtaggccttatggaaggtaggaaagagtctcatacatgctctaagtgaaatctggagtgcatgaagagaacatcagggaggaaaccaaggtaaagatgaagttacaggttgaaatgtgtggttggagagaatattacctgcttgtgctacctttacataaatacaaaattgcaattgtcattcaatatgaatgggacattgtcgtctttgtgtttccacagaggatgaagactgagctcactcttcaccaaattttaatcagctmtgccaaatgggatcctttggaattgctcaagctctccacagtagtaaatattaagcaatgcagaattccaagggcgcaataagagactactgttgtaattaagaaaatggttcagaaggaagttcccctccccacattaacttcctttttgtagttctaactggtcaataagtaggtagcccctggacatttacagtagagtatcaaggtggttcatttgcatgcttcatctgtacctgatatgatgaa

SEQ ID NO: 405696 - DNA, 570 bp, Homo sapiens
caaactatggtatgtaagttcatatgtaaatatgtatctatctatctatttatctatctaatctatcctatctatctatctatcatctatctatccatctatctatctatctccttttctttcatttatgtctggatctgtaccaaacaccaggcagaggagttaggagaagtaactgaaaaacccatgggtgacatcaccaactaaaacaggtgacaaataatcagcatgaaacccagaatacaagagtaattgtcctaatcaytggcagcatagggccagtaccagctggagttaatggcaaagataaaatgaagataaaaggaagtattgtaagatcttaatatcaataaactacaacaagaaatcatcaataatgctcactcgcaaaagaaaaatacttaccctgaagaaaaacaattggaacaaaatcaaaattaatcagagaatcagataatctgagacaagtaagataaattttagaaaataatttttagaaaaaaataatttgaaggtacataaaatcaaatagaagtggtacaaactatagtaagagatatagagtataaa

SEQ ID NO: 405697 - DNA, 659 bp, Homo sapiens
gccttaattaaagccgtagaatctgaaaacaattaaataaagaactgaggtctggatctgaggccatatatataatttgaacaaagttacctggggtggtattcaaagtttcttatcattggtaggatgtagagcagaatttacagtaggccttatggaaggtaggaaagagtctcatacatgctctaagtgaaatctggagtgcatgaagagaacatcagggaggaaaccaaggtaaagatgaagttacaggttgaaatgtgtggttggagagaatattacctgcttgtgctacctttacataaatacaaaattgcaattgtcattcaatatgaatgggacattgtcgtctttgtgtttccacagaggatgaagactgagctcactcttcaccaaattttaatcagctatgccaaatgggatcctttggaattgctcaagctctccacagtagtaaatattaagcaatgcagaattccaagggcgcaataagagactactgttgtaattaagaaaatggttcagaaggaagttcccctccccacattaacttcctttttgtagttctaactggtcaataagtaggtagcccctggacatttacagtagagtatcaaggtggttcatttgcrtgcttcatctgtacctgatatgatgaa

SEQ ID NO: 405698 - DNA, 541 bp, Homo sapiens
ccaccaataagcaataaactcagagactgtcaagactgttctaagaatcttgtctacccatactcacaaaataactggaaagagttcagaacgtgaatacagcattgtagtactttcctagggctgctggaacaaattaccacagactgggtagcttaaaacaactgaaatttattatttcacagttctggaggctagaagtctgaagccaaggagtcaatagggtcacgcttccttgaaaagccacagaaaaaaatcttttcttgcccctgcctaggttctactctctcctacaaatttttggagctttattacttatagatttattactccaatttctgctttcattttcaatctcttctccatgtgtcctctcttcttataaaaacacctccagtcattggaattaggaccctccttaatctagtaggagctcatcttaactaattrtatgtgcaaatttctaaagaaggtcaccttctgagattctgaatgaataataatttcagaagagcactacttaactcactgcaggtactga

SEQ ID NO: 405699 - DNA, 478 bp, Homo sapiens
tgggtgacatcaccaactaaaacaggtgacaaataatcagcatgaaacccagaatacaagagtaattgtcctaatcattggcagcatagggccagtaccagctggagttaatggcaaagataaaatgaagataaaaggaagtattgtaagatcttaatatcaataaactacaacaagaaatcatcaataatgctcactcscaaaagaaaaatacttaccctgaagaaaaacaattggaacaaaatcaaaattaatcagagaatcagataatctgagacaagtaagataaattttagaaaataatttttagaaaaaaataatttgaaggtacataaaatcaaatagaagtggtacaaactatagtaagagatatagagtataaaaataagagtaaaaaacagaaattgagagattaaaaatatctaaaaattttctaaacataaaacttaggcaaagaatagtaatacccatgtaatgg

SEQ ID NO: 405700 - DNA, 570 bp, Homo sapiens
caaactatggtatgtaagttcatatgtaaatatgtatctatctatctatttatctatctaatctatcctatctatctatctatcatctatctatccatctatctatctatctccttttctttcatttatgtctggatctgtaccaaacaccaggcagaggagttaggagaagtaactgaaaaacccatgggtgacatcaccaactaaaacaggtgacaaataatcagcatgaaacccagaatacaagagtaattgtcctaatcattggcagcatagggccagtaccagctggagttaatggcaaagataaaatgaagataaaaggaagtattgtaagatcttaatatcaataaactacaacaagaaatcatcaataatgctcactcgcaaaagaaaaatacttaccctgaagaaaaayaattggaacaaaatcaaaattaatcagagaatcagataatctgagacaagtaagataaattttagaaaataatttttagaaaaaaataatttgaaggtacataaaatcaaatagaagtggtacaaactatagtaagagatatagagtataaa

SEQ ID NO: 405701 - DNA, 570 bp, Homo sapiens
caaactatggtatgtaagttcatatgtaaatatgtatctatctatctatttatctatctaatctatcctatctatctatctatcatctatctatccatctatctatctatctccttttctttcatttatgtctggatctgtaccaaacaccaggcagaggagttaggagaagtaactgaaaaacccatgggtgacatcaccaactaaaacaggtgacaaataatcagcatgaaacccagaatacaagagtaattgtcctaatcattggcagcatagggccagtaccagctggagttaatggcaaagataaaatgaagataaaaggaagtattgtaagatcttaatatcaataaactacaacaagaaatcatcaataatgctcactcgcaaaagaaaaatacttaccctgaagaaaaacaattggaacaaaatcaaaattaatcagagaatcagataatctgagacaagtaagataawttttagaaaataatttttagaaaaaaataatttgaaggtacataaaatcaaatagaagtggtacaaactatagtaagagatatagagtataaa

SEQ ID NO: 405702 - DNA, 526 bp, Homo sapiens
ataaagaacaatcctttgacatatgtaggccatggggtgtggatgggctctttgacataatgacccctgaaaattagtgtttgtaccaacctggaatatacctaaaatacagttcatagaaacaaatttttttcagaaaatttgatttgagaagaaaaaatatgtattcaattaaatactcccataggcccatggaaaatgatgcaaataattgaggttgatggaggwaaaaggtaattgagtttgtgaatgaacatcaagagacttgtaaaggaagatgttaatgagtaacatgctttgtggagggaattcctactctctgttggatggttcaaatcaaggtcagagtattagttggcttaagtgaaacactgcagaaaatggtgtaagccaataatgataatacaccagcaatatttggcactaagatgttgaccaaggccagagcagattgggaaggaaagggtctttgattctttctgattactgagatgccctgccaggatccacagaaggaaggaagccc

SEQ ID NO: 405703 - DNA, 604 bp, Homo sapiens
gcttaagtgaaacactgcagaaaatggtgtaagccaataatgataatacaccagcaatatttggcactaagatgttgaccaaggccagagcagattgggaaggaaagggtctttgattctttctgattactgagatgccctgccaggatccacagaaggaaggaagcccattttgcttatataaacatactaatgacagctcctgacaaacaatttgtttttttgctrgcaggagagtgattatctatcacagaaatgcttttagcagaatgtacttggtcgtttagaattgcttatggttaacaaagtagaaggttgtggatttatggggctccctggaaaatgtcacatataccacatatgtaactatctgcataaaaattaagatatttgataattgagccaggtatctccatgtaaataaattgtcggcatacctctctagaagtctcatctatctgcctgggcaagggagtatctaatgacagaaccaaggatctaaagaatcagattaagagatctaaataattctctgatttgcccatgcctaatgattacctgagttcgtgaaattactagtaaagctttatattttgtaagatct

SEQ ID NO: 405704 - DNA, 604 bp, Homo sapiens
gcttaagtgaaacactgcagaaaatggtgtaagccaataatgataatacaccagcaatatttggcactaagatgttgaccaaggccagagcagattgggaaggaaagggtctttgattctttctgattactgagatgccctgccaggatccacagaaggaaggaagcccattttgcttatataaacatactaatgacagctcctgacaaacaatttgtttttttgctggcaggagagtgattatctatcacagaaatgcttttagcagaatgtacttggtcgtttagaattgcttatggttaacaaagtagaaggttgtggatttatggggctccctggaaaatgtcacatataccacatatgtaactatctgcataaaaattaagatatttgataattgagccaggtatctccatgtaaataaattgtcggcatacctctctagaagtctcatctatctgcctgggcaagggagtayctaatgacagaaccaaggatctaaagaatcagattaagagatctaaataattctctgatttgcccatgcctaatgattacctgagttcgtgaaattactagtaaagctttatattttgtaagatct

SEQ ID NO: 405705 - DNA, 552 bp, Homo sapiens
aatcatgtccatataatggaattaatcctgaaactctgaaaagttttaatattctggggtcagggtagatgagaaggagtctccatatgacttataaacatgtaaggagaaatagtaaaattgttgtaaaattaaaagaagaacagaaattcataaaataagctataacaatcaggttaaacaacaaaaacaaaaagcaaagcgtctatcagtaacatgattgaatagaagagccgagagagagttgtcagtggtaaaggaataaatattatctcatttgatagagtgattgtattagtccattttaacactgctgataaagacatacccaygactggacaacttacaaaagaaaatggtttattggacatacagttccacatggctggggaggactcacaatcatggcaaaaaggagcaagacacatcttatgtgggtggcagcaggcaaaaaaagagcttgtgcagagaaaatcctgtttttaacaccactagatcttgtgagacccattcactattatgagaacagcatgggaaagacctgcccccatg

SEQ ID NO: 405706 - DNA, 552 bp, Homo sapiens
aatcatgtccatataatggaattaatcctgaaactctgaaaagttttaatattctggggtcagggtagatgagaaggagtctccatatgacttataaacatgtaaggagaaatagtaaaattgttgtaaaattaaaagaagaacagaaattcataaaataagctataacaatcaggttaaacaacaaaaacaaaaagcaaagcgtctatcagtaacatgattgaatagaagagccgagagagagttgtcagtggtaaaggaataaatattatctcatttgatagagtgattgtattagtccattttaacactgctgataaagacatacccatgactggacaacttacaaaagaaaawggtttattggacatacagttccacatggctggggaggactcacaatcatggcaaaaaggagcaagacacatcttatgtgggtggcagcaggcaaaaaaagagcttgtgcagagaaaatcctgtttttaacaccactagatcttgtgagacccattcactattatgagaacagcatgggaaagacctgcccccatg

SEQ ID NO: 405707 - DNA, 535 bp, Homo sapiens
tccaaacttggccacattttcctgtcttcttctgagtcctccaaactgttccaacctctgcttgttacmcagttccaatgtcgcttccatatttttggatatgtttccaccagcaccccactctactggtaacaatttactgtattagttcattttcatgctgctgataaaaacatacctgcaactgggcaatttacgaaagaaagtggtttgttggacttacagttccacatggctggagaggcatcataatcatggtggaaggcaaggagtaagctacatcttacatggatggcagcaggcaaaaaagagattgtgtggagaaactcccatttttaacaccatcagatctcgtgagatccattcactatcatgggaacagcatgggacatacgtgccctcatgattcagacatctcccactggatccttcccataacacgtggaaattatgggagctacaagatgagatttgggtgaagacacagaaccaacccatatcagtgattatttaagattttttgcagaagcctaac

SEQ ID NO: 405708 - DNA, 535 bp, Homo sapiens
tccaaacttggccacattttcctgtcttcttctgagtcctccaaactgttccaacctctgcttgttacccagttccaatgtcgyttccatatttttggatatgtttccaccagcaccccactctactggtaacaatttactgtattagttcattttcatgctgctgataaaaacatacctgcaactgggcaatttacgaaagaaagtggtttgttggacttacagttccacatggctggagaggcatcataatcatggtggaaggcaaggagtaagctacatcttacatggatggcagcaggcaaaaaagagattgtgtggagaaactcccatttttaacaccatcagatctcgtgagatccattcactatcatgggaacagcatgggacatacgtgccctcatgattcagacatctcccactggatccttcccataacacgtggaaattatgggagctacaagatgagatttgggtgaagacacagaaccaacccatatcagtgattatttaagattttttgcagaagcctaac

SEQ ID NO: 405709 - DNA, 535 bp, Homo sapiens
tccaaacttggccacattttcctgtcttcttctgagtcctccaaactgttccaacctctgcttgttacccagttccaatgtcgcttccatatttttggatatgtttccaccagcaccccactctactggtaacaatttactgtattagttcattttcatgctgctgataaaaacatacctgcaactgggcaatttacgaaagaaagtggtttgttggacttacagttccacatggctggagaggcatcataatcrtggtggaaggcaaggagtaagctacatcttacatggatggcagcaggcaaaaaagagattgtgtggagaaactcccatttttaacaccatcagatctcgtgagatccattcactatcatgggaacagcatgggacatacgtgccctcatgattcagacatctcccactggatccttcccataacacgtggaaattatgggagctacaagatgagatttgggtgaagacacagaaccaacccatatcagtgattatttaagattttttgcagaagcctaac

SEQ ID NO: 405710 - DNA, 568 bp, Homo sapiens
gcaatttacgaaagaaagtggtttgttggacttacagttccacatggctggagaggcatcataatcatggtggaaggcaaggagtaagctacatcttacatggatggcagcaggcaaaaaagagattgtgtggagaaactcccatttttaacaccatcagatctcstgagatccattcactatcatgggaacagcatgggacatacgtgccctcatgattcagacatctcccactggatccttcccataacacgtggaaattatgggagctacaagatgagatttgggtgaagacacagaaccaacccatatcagtgattatttaagattttttgcagaagcctaactgttcaaggaaggtgtgtgatggcaaagaataaaagctacagataatgacatggcatcagcttgattggatccatattttgtgggatctacagcacattcaatttggcggtcagggtttggggctctttaagcaagaatacaaaactacaaactcaaaactggaaactcaaatgcaaatgaggtggccggaaatgtaagcctcataacttaggataagaga

SEQ ID NO: 405711 - DNA, 568 bp, Homo sapiens
gcaatttacgaaagaaagtggtttgttggacttacagttccacatggctggagaggcatcataatcatggtggaaggcaaggagtaagctacatcttacatggatggcagcaggcaaaaaagagattgtgtggagaaactcccatttttaacaccatcagatctcgtgagatccattcactatcaygggaacagcatgggacatacgtgccctcatgattcagacatctcccactggatccttcccataacacgtggaaattatgggagctacaagatgagatttgggtgaagacacagaaccaacccatatcagtgattatttaagattttttgcagaagcctaactgttcaaggaaggtgtgtgatggcaaagaataaaagctacagataatgacatggcatcagcttgattggatccatattttgtgggatctacagcacattcaatttggcggtcagggtttggggctctttaagcaagaatacaaaactacaaactcaaaactggaaactcaaatgcaaatgaggtggccggaaatgtaagcctcataacttaggataagaga

SEQ ID NO: 405712 - DNA, 568 bp, Homo sapiens
gcaatttacgaaagaaagtggtttgttggacttacagttccacatggctggagaggcatcataatcatggtggaaggcaaggagtaagctacatcttacatggatggcagcaggcaaaaaagagattgtgtggagaaactcccatttttaacaccatcagatctcgtgagatccattcactatcatrggaacagcatgggacatacgtgccctcatgattcagacatctcccactggatccttcccataacacgtggaaattatgggagctacaagatgagatttgggtgaagacacagaaccaacccatatcagtgattatttaagattttttgcagaagcctaactgttcaaggaaggtgtgtgatggcaaagaataaaagctacagataatgacatggcatcagcttgattggatccatattttgtgggatctacagcacattcaatttggcggtcagggtttggggctctttaagcaagaatacaaaactacaaactcaaaactggaaactcaaatgcaaatgaggtggccggaaatgtaagcctcataacttaggataagaga

SEQ ID NO: 405713 - DNA, 568 bp, Homo sapiens
gcaatttacgaaagaaagtggtttgttggacttacagttccacatggctggagaggcatcataatcatggtggaaggcaaggagtaagctacatcttacatggatggcagcaggcaaaaaagagattgtgtggagaaactcccatttttaacaccatcagatctcgtgagatccattcactatcatgggaacagcatgggacatacgtgccctcatgattcagwcatctcccactggatccttcccataacacgtggaaattatgggagctacaagatgagatttgggtgaagacacagaaccaacccatatcagtgattatttaagattttttgcagaagcctaactgttcaaggaaggtgtgtgatggcaaagaataaaagctacagataatgacatggcatcagcttgattggatccatattttgtgggatctacagcacattcaatttggcggtcagggtttggggctctttaagcaagaatacaaaactacaaactcaaaactggaaactcaaatgcaaatgaggtggccggaaatgtaagcctcataacttaggataagaga

SEQ ID NO: 405714 - DNA, 587 bp, Homo sapiens
tacaggaaatgaaaccagtaaaaaaaaaatagagggaacaaggtttattgacatctatgaggcattttctttcccctaatattacatactctagattttatttctgcacaaaaaatattctctatgtctagcctaaagaactatgtcttattcatatttatactcttcatagatcaaaagtgtgcttaaaatactgtacatttaatgagttatttttgaatgtaagcaactttgaattcatctttgcatttttaatcttatgtttctattaaatgtattattaaattctactaacactttcctcaaaataattctcaatattttggtttttaattttttactgcctttgcattctcctggcagagacccatttcacctctcctatagattatttcataaagattttatcrtctgtatcatatatatttacaatattaaaagttatctgtagcacgctctcattgttgcttatagattaggtttgcttctctatgtactactctggtaggcagtggttaaatatactgctttaagccttttcacagtaccttctataatatcatcatgcacaattttaggcacacagc

SEQ ID NO: 405715 - DNA, 594 bp, Homo sapiens
tttaaagttgttagcataaggagcaatgaaaactaaatttctcctgggagttactcatttttctgggttgtaaatgaatgccatattattttttgatgtttaatgtaaaatattattgactgtaataatccaatatgatctaggatattcagtcttacacaacatagggatacagtataggttgatgtacatccaaaattataacacactttgttcaaacacaatgcacattacattttcctgtagctcaaatctgtgttatctgtattattaagagatataaagagaggattcaaaataatagctgaagaattctcactaattttatgaatctagtagatcaaaatgttactctaacattaataatttcataatacagactgtgaggcttatataaatctgtttcaaaaaatgtatagcattctttagctttcatgttgtaaaacattcagaatataatccaaaataaagttgtaataaattatcgcattttaatgagtattttaacataaaaygtgagtttgggattattataaatccaaagacacataaactcagtttctaaaagatatgattgaggggaaatcatgattt

SEQ ID NO: 405716 - DNA, 573 bp, Homo sapiens
ctccattctatatttggataatagtctctgactttgtcttcttgcatttattcttttcccctaaagtgattcttcaaagartaatgtcaaagagaaccagagccagagggtaattaaagcagtaaagaaagattttattcagaaattattacaacacaggaaaagagactttagtagagaaatgagctcaattccaaatacaagcacacatggaaatttatagcaaaagagcagtgtgaaggggtcagtggatggaaaattattaagaggagacgtcaaaagtaggggaactcttgctaaaccaaattaacaggattcttgctgaaggcagctcagggtgatcagatatcaagattctctctatatggacttaaggattcttgttaaaagtgagctatggagactaggcaaggggcctaggtgaagatctagttgagaggagagctcaaaaatctgactaaagtttggtgaaggagagagtctttgtcagtatttgtgttaattttttttaattactaaaagtgaggcttatttgcattcttcaaggacttaccaattaataagctatgttaa

SEQ ID NO: 405717 - DNA, 616 bp, Homo sapiens
attgtctctcctaataagcatcttagctagacaactgctgaccatctttcagtattgtatattactgtatattgtatattggtgcatccagaagttttatataaatggaatcatataaggtgcactattttttggctggcatttttgctttacagcaaaattcttttgaaattcattcatgttgttgcatgtgtcagtagtcraacctttttattgctgagcagaattttgctgtatgtatatatcaccaattacttgttaatgaatatgtgggtcatgaccactttttagctattaaagagaaaatgcctatgaatatttatatacaacaatttctttttcatttttcgagggggaaatatctagaagataaatgactagattaagtggtaagcgtaggtttacttttttaagaagctgtcaatctatctatttttcaaagtggttgtcaatcaaaagtatattaaagtttcagttcctccattttgttgcatatacctggtagggtcaatattttttttcactttggacattgtaataactatcagtagtatttctttgtggttttcaattctttaatgactacagatgttaaaattttttgatatacttattt

SEQ ID NO: 405718 - DNA, 489 bp, Homo sapiens
tctcctaataagcatcttagctagacaactgctgaccatctttcagtattgtatattactgtatattgtatattggtgcatccagaagttttatataaatggaatcatataaggtgcactattttttggctggcatttttgctttacagcaaaattcttttgaaattcattcatgttgttgcatgtgtcagtagtcgaacctttttattgctgagcagaattttgctgtaygtatatatcaccaattacttgttaatgaatatgtgggtcatgaccactttttagctattaaagagaaaatgcctatgaatatttatatacaacaatttctttttcatttttcgagggggaaatatctagaagataaatgactagattaagtggtaagcgtaggtttacttttttaagaagctgtcaatctatctatttttcaaagtggttgtcaatcaaaagtatattaaagtttcagttcctccattttgttgcata

SEQ ID NO: 405719 - DNA, 496 bp, Homo sapiens
aatcaaatttgtttttctattgcttataaatacccaactgttttacatttcttgctttgaaaastcttccatttcttcaaagctgatactttccctgatgaattgacttgctatttaaaaaaaaagattttaactatatgtgtaaatctgtttttgtattttctattctgttctgttgatctatttagtctttcttgaggacaatatcacacagtcttgactatttcaaaatcatgaacatggtatatctccccaaattttatcttttatttgagatatctggaaagcatataggtctagaagttgaaatttgttctacctatattagttagtcttcaagtagaaatgatgatggaaaagattgcagtgatcaaaattacctagggagaatgtatagcatgaaagagtaataagcagttcatgcagatctctgatttagcttacacacctagaggaagattaaatgaagatcaatttgcaagtgaatttaaaattt

SEQ ID NO: 405720 - DNA, 496 bp, Homo sapiens
aatcaaatttgtttttctattgcttataaatacccaactgttttacatttcttgctttgaaaactcttccatttcttcaaagctgatactttccctgatgaattgacttgctatttaaaaaaaaagattttaactatatgtgtaaatctgtttttgtattttctattytgttctgttgatctatttagtctttcttgaggacaatatcacacagtcttgactatttcaaaatcatgaacatggtatatctccccaaattttatcttttatttgagatatctggaaagcatataggtctagaagttgaaatttgttctacctatattagttagtcttcaagtagaaatgatgatggaaaagattgcagtgatcaaaattacctagggagaatgtatagcatgaaagagtaataagcagttcatgcagatctctgatttagcttacacacctagaggaagattaaatgaagatcaatttgcaagtgaatttaaaattt

SEQ ID NO: 405721 - DNA, 496 bp, Homo sapiens
aatcaaatttgtttttctattgcttataaatacccaactgttttacatttcttgctttgaaaactcttccatttcttcaaagctgatactttccctgatgaattgacttgctatttaaaaaaaaagattttaactatatgtgtaaatctgtttttgtattttctattctgttctgttgatctatttagtctttcttgaggacaatatcacacagtcttgactatttcaaaatcatgaacatggtatatctccccaaattttatcttttatttgagatatctggaaagcatataggtctagaagttgaaatttgttctacctatattagttagtcttcaagtagaaatgatgatggaaaagattgcagtgatcaaaattacctagggagratgtatagcatgaaagagtaataagcagttcatgcagatctctgatttagcttacacacctagaggaagattaaatgaagatcaatttgcaagtgaatttaaaattt

SEQ ID NO: 405722 - DNA, 496 bp, Homo sapiens
aatcaaatttgtttttctattgcttataaatacccaactgttttacatttcttgctttgaaaactcttccatttcttcaaagctgatactttccctgatgaattgacttgctatttaaaaaaaaagattttaactatatgtgtaaatctgtttttgtattttctattctgttctgttgatctatttagtctttcttgaggacaatatcacacagtcttgactatttcaaaatcatgaacatggtatatctccccaaattttatcttttatttgagatatctggaaagcatataggtctagaagttgaaatttgttctacctatattagttagtcttcaagtagaaatgatgatggaaaagattgcagtgatcaaaattacctagggagaatgtatagcatgaaagagtaayaagcagttcatgcagatctctgatttagcttacacacctagaggaagattaaatgaagatcaatttgcaagtgaatttaaaattt

SEQ ID NO: 405723 - DNA, 521 bp, Homo sapiens
atttagtctttcttgaggacaatatcacacagtcttgactatttcaaaatcatgaacatggtatatctccccaaattttatcttttatttgagatatctggaaagcatataggtctagaagttgaaatttgttctacctatattagttagtcttcaagtagaaatgatgatggaaaagattgcagtgatcaaaattacctagggagaatgtatagcatgaaagagtaataagcagttcatgcagatctctgatttagcttacacacctagaggaagattaaatgaagatcaatttgcaagtgaatttaaamttttgtgacaaaattttaggagcaaaattaggacaccgtggtgttacagaatctaaagaactattttgagctgcttttgaaaaataaacataaaagttaccaatctgtatgactgacttttgcaacactttctcattgaaaacacatattctacaaaaaaaacattatttttgtaaccttatcatttgggactcactttatctagcagat

SEQ ID NO: 405724 - DNA, 537 bp, Homo sapiens
aaagtggatatgaaggcatgactgcaagctacaaattgakcctatttttagtaacttgctctagctgagatgttatatgttcagatttgttgacacgaagctttattgagaagcattacttattcccaataactcaaggaggagcctgttttgggaggaaaaaccacatcaagtatgttttgttgaatcaagaggattttatttttagaaaactactaatgattttttctgaaaatgtgactattttgaaatctaagaaaaatcaaatatttgatacttaacgtaatttgcaacttgacataaaactactcagtttagttggtcataatatactcattcctaacttattccactttacaaaaaaagtaaaagaaaagcataaataaataaataaggaaagagaaacaaacaaacaaaaaacattggaaactgacgaggtaacaatttatagaatcaaggattaatttccaccaattatggcatgaataaaactaatcaactaaaatatattttaaaaatcaagaagatagtaggaaa

SEQ ID NO: 405725 - DNA, 537 bp, Homo sapiens
aaagtggatatgaaggcatgactgcaagctacaaattgatcctatttttagtaacttgctctagctgagatgttatatgttcagatttgttgacacgaagctttattgagaagcattacttattcccaataactcaaggaggagcctgttttgggaggaaaaaccacatcaagtatgttttgttgaatcaagaggattttatttttagaaaactactaatgattttttctgaaaatgtgactattttgaaatctaagaaaaatcaaatatttgatacttaacgtaatttgcaacttgacataaaactactcagtttagttggtcataatatactcattcctaacttattccactttacaaaaaaagtaaaagaaaagcataaataaataaataaggaaagagaaacaaacaaacaaaaaacattggaaactgaygaggtaacaatttatagaatcaaggattaatttccaccaattatggcatgaataaaactaatcaactaaaatatattttaaaaatcaagaagatagtaggaaa

SEQ ID NO: 405726 - DNA, 507 bp, Homo sapiens
ataaaactactcagtttagttggtcataatatactcattcctaacttattccactttacaaaaaaagtaaaagaaaagcataaataaataaataaggaaagagaaacaaacaaacaaaaaacattggaaactgacgaggtaacaatttatagaatcaaggattaatttccaccaattatggcatgaataaaactaatcaactaaaatatattttaaaaatcaagaagatagtaggaaaacagctccctgaggacccctggaacagtaattaggcaggcactctttgcctgttggacattaccattttctttaatgtttgtatgaaacgatgccaatttatctttaagcaatttatctttaagttgctaargtgatgcaaacggctgtcatgtaacaatcaccaagagaggacccattctagttcacaaactgccctgatgctttttataaaaaacaatccacttcaggataatgtgttgttcctggtttctatgtctctttaacttc

SEQ ID NO: 405727 - DNA, 507 bp, Homo sapiens
ataaaactactcagtttagttggtcataatatactcattcctaacttattccactttacaaaaaaagtaaaagaaaagcataaataaataaataaggaaagagaaacaaacaaacaaaaaacattggaaactgacgaggtaacaatttatagaatcaaggattaatttccaccaattatggcatgaataaaactaatcaactaaaatatattttaaaaatcaagaagatagtaggaaaacagctccctgaggacccctggaacagtaattaggcaggcactctttgcctgttggacattaccattttctttaatgtttgtatgaaacgatgccaatttatctttaagcaatttatctttaagttgctaaagtgatgcaaacrgctgtcatgtaacaatcaccaagagaggacccattctagttcacaaactgccctgatgctttttataaaaaacaatccacttcaggataatgtgttgttcctggtttctatgtctctttaacttc

SEQ ID NO: 405728 - DNA, 494 bp, Homo sapiens
agagaggacccattctagttcacaaactgccctgatgctttttataaaaaacaatccacttcaggataatgtgttgttcctggtttctatgtctctttaacttmtttaaatcagaagcattccatagtccttcttcaaccttcatagcatcctaaacattttttgaaggtaatattccaatggattctatttttagaatgtctcccaatttcgatttgtctggtgttttctcataatgaggtgtcaagacatgcattattggcaataaaatcaccaacatgatgctatgctcttcttatcatatttcttcaggttatatatgaaattaatttttcccatcagtggtgattttaattttgatcatttgaaaggtaatgtcttccagatttctctattgcagaggtactcctcattttctttatattaatataacatgacataaaatgatattttttacatatagactatctattgtatacatgtatatacacatg

SEQ ID NO: 405729 - DNA, 494 bp, Homo sapiens
agagaggacccattctagttcacaaactgccctgatgctttttataaaaaacaatccacttcaggataatgtgttgttcctggtttctatgtctctttaacttctttaaatcagaagcattccatagtccttcttcaaccttcatagcatcctaaacattttttgaaggtaatattccaatggattctatttttagaatgtctcccaatttcgatttgtctggtgttttctcataatgagrtgtcaagacatgcattattggcaataaaatcaccaacatgatgctatgctcttcttatcatatttcttcaggttatatatgaaattaatttttcccatcagtggtgattttaattttgatcatttgaaaggtaatgtcttccagatttctctattgcagaggtactcctcattttctttatattaatataacatgacataaaatgatattttttacatatagactatctattgtatacatgtatatacacatg

SEQ ID NO: 405730 - DNA, 544 bp, Homo sapiens
agacatgcattattggcaataaaatcaccaacatgatgctatgctcttcttatcatatttcttcaggttatatatgaaattaatttttcccatcagyggtgattttaattttgatcatttgaaaggtaatgtcttccagatttctctattgcagaggtactcctcattttctttatattaatataacatgacataaaatgatattttttacatatagactatctattgtatacatgtatatacacatgtaattaatctaaaattaagtgttttgcggagagatactttgagagtgtgaaaatatcccatttcttctccaacatttacccactaggtttagcatccattgatgcctcaacactcaatcaaatacaatgtgaaaattttcaaatgataattttttaacatacaatatcaacccttttccttttattggttggcactctgtgggaaaataatagtgtttccttcttttattcattcattaattcgtggatttatctcacgtggacccatggattcctatttctttcagtggcccatg

SEQ ID NO: 405731 - DNA, 544 bp, Homo sapiens
agacatgcattattggcaataaaatcaccaacatgatgctatgctcttcttatcatatttcttcaggttatatatgaaattaatttttcccatcagtggtgattttaattktgatcatttgaaaggtaatgtcttccagatttctctattgcagaggtactcctcattttctttatattaatataacatgacataaaatgatattttttacatatagactatctattgtatacatgtatatacacatgtaattaatctaaaattaagtgttttgcggagagatactttgagagtgtgaaaatatcccatttcttctccaacatttacccactaggtttagcatccattgatgcctcaacactcaatcaaatacaatgtgaaaattttcaaatgataattttttaacatacaatatcaacccttttccttttattggttggcactctgtgggaaaataatagtgtttccttcttttattcattcattaattcgtggatttatctcacgtggacccatggattcctatttctttcagtggcccatg

SEQ ID NO: 405732 - DNA, 544 bp, Homo sapiens
agacatgcattattggcaataaaatcaccaacatgatgctatgctcttcttatcatatttcttcaggttatatatgaaattaatttttcccatcagtggtgattttaattttgatcatttgaaaggtaatgtcttccagatttctctattgcagaggtactcctcattttctttatattaatataacatgacataaaatgatattttttacatatagactatctattgtatacatgtatatacacatgtaattaatctaaaattaagtgttttgcggagagatactttgagagtgtgaaaatatcccatttcttctccaacatttacccactaggtttagcatccattgatgcctcaacactcaatcaaatacaatgtgaaaattttcaaatgataattttttaacatacaatatcaacccttttccttttattggttggcactctgtgggaaaataatagtgtttccttcttttattcattcattaattcrtggatttatctcacgtggacccatggattcctatttctttcagtggcccatg

SEQ ID NO: 405733 - DNA, 568 bp, Homo sapiens
atattaaatataagtagtctaaaactactatttaaagtaagaattttaagactaaatttaaaaagtaatgttaaatcaatataaagacaaaggttggtcagaaaaaataggttgaagatagctgtacttcaccatgatacagtaagaggaactaaactaaattctttacaaaacaaacaaacaaaaaacaaaaamacacacacacaaataaaaactaactgcagacaaaatataatcaacagtgattttttaaccattgacaagaagctgaggatgctgatccctgataaaagaaaaaataaaatcttattccaagctttctctcagtttccagaagacacagtgaaaggataatccaaagaaaggataactctccctgtatattgagaaattgaagattggggcttagaaaggaaaatttagctagaattgcagagctaaatagaagagagagaacatttgcacagagatggtgatacggtatggctttgtccccacccacatctcatcttgaattcccatgtgttgtgggagggaccaggtgggagataattgaatcatggtggca

SEQ ID NO: 405734 - DNA, 263 bp, Homo sapiens
gtacttcaccatgatacagtaagaggaactaaactaaattctttacaaaacaaacaaacaaaaaacaaaaaaacacacacacaaataaaaactaactgcagacaaaatataatcaacagtgattttttaaccattgacaagaagctgaggatgctgatccctgayaaaagaaaaaataaaatcttattccaagctttctctcagtttccagaagacacagtgaaaggataatccaaagaaaggataactctccctgtatattg

SEQ ID NO: 405735 - DNA, 263 bp, Homo sapiens
gtacttcaccatgatacagtaagaggaactaaactaaattctttacaaaacaaacaaacaaaaaacaaaaaaacacacacacaaataaaaactaactgcagacaaaatataatcaacagtgattttttaaccattgacaagaagctgaggatgctgatccctgataaaagaaaaaataaaatcttattccaagctttctctcagtttccagaaracacagtgaaaggataatccaaagaaaggataactctccctgtatattg

SEQ ID NO: 405736 - DNA, 568 bp, Homo sapiens
atattaaatataagtagtctaaaactactatttaaagtaagaattttaagactaaatttaaaaagtaatgttaaatcaatataaagacaaaggttggtcagaaaaaataggttgaagatagctgtacttcaccatgatacagtaagaggaactaaactaaattctttacaaaacaaacaaacaaaaaacaaaaaaacacacacacaaataaaaactaactgcagacaaaatataatcaacagtgattttttaaccattgacaagaagctgaggatgctgatccctgataaaagaaaaaataaaatcttattccaagctttctctcagtttccagaagacacagtgaaaggataatccaaagaaaggataactctccctgtatattgagaaattgaagattggggcttagaaaggaaaatttagctagaattgcagagctaaatagaagagagagarcatttgcacagagatggtgatacggtatggctttgtccccacccacatctcatcttgaattcccatgtgttgtgggagggaccaggtgggagataattgaatcatggtggca

SEQ ID NO: 405737 - DNA, 527 bp, Homo sapiens
aagaaaggataactctccctgtatattgagaaattgaagattggggcttagaaaggaaaatttagctagaattgcagagctaaatagaagagagagaacatttgcacagagatggtgatayggtatggctttgtccccacccacatctcatcttgaattcccatgtgttgtgggagggaccaggtgggagataattgaatcatggtggcaggccatcccatcctcatgatagtgaataagtcccacaagatcttacggttaaataagagggagtttttctgaacaagctctctctttgcctgccgccatccatgtaagatgtgacttgctcttcctggccatctgccatgattgtgaggtttccccagccatgtggaaccataagtccattaaacctctttcttttgtaaatttcccaggctggggtatgtctttatcagtaggataaaaatggatgaatacaggaatataggaagtgtctgctttttcctggcttttatctttgcctgtaacattccaccccagag

SEQ ID NO: 405738 - DNA, 527 bp, Homo sapiens
aagaaaggataactctccctgtatattgagaaattgaagattggggcttagaaaggaaaatttagctagaattgcagagctaaatagaagagagagaacatttgcacagagatggtgatacggtatggctttgtccccacccacatctcatcttgaattcccatgtgttgtgggagggaccaggtgggagataattgaatcatggtggcaggccatcccatcctcatgatagtgaataagtcccacaagatcttacggttaaataagagggagtttttctgaacaagctctctctttgcctgccgccatccatgtaagatgtgacttgctcttcctggccatctgccatgattgtgaggtttccccagccatgtggaaccataagtccattaaacctctttcttttgtaaatttcccaggctggggtatgtctttatcagtaggataaaaayggatgaatacaggaatataggaagtgtctgctttttcctggcttttatctttgcctgtaacattccaccccagag

SEQ ID NO: 405739 - DNA, 291 bp, Homo sapiens
tagtaggaataaaaataatgggattataatagtttgcttctacttctgggatgaatgtagtagttgtataagacacatactcttattaaaatgacaagaaaaagctggataaattataaaagccayatattttttaaagcatgagggaactgtagaaacaatgatgaatagatgaactaagagtacagacatacctgagtgttcgaaatgggccaaagagcatgatgcattcatagcgtctactagtcaattctggcacaaattaggaagtagaaggcatgttcaatggag

SEQ ID NO: 405740 - DNA, 291 bp, Homo sapiens
tagtaggaataaaaataatgggattataatagtttgcttctacttctgggatgaatgtagtagttgtataagacacatactcttattaaaatgacaagaaaaagctggataaattataaaagccatatatyttttaaagcatgagggaactgtagaaacaatgatgaatagatgaactaagagtacagacatacctgagtgttcgaaatgggccaaagagcatgatgcattcatagcgtctactagtcaattctggcacaaattaggaagtagaaggcatgttcaatggag

SEQ ID NO: 405741 - DNA, 291 bp, Homo sapiens
tagtaggaataaaaataatgggattataatagtttgcttctacttctgggatgaatgtagtagttgtataagacacatactcttattaaaatgacaagaaaaagctggataaattataaaagccatatattttttaaagcatgagggaactgtagaaacaatgatgaatagatgaactaagagtacagacatacctgagtgttcgaaatgggccaaagagcatgatgcattcatagcrtctactagtcaattctggcacaaattaggaagtagaaggcatgttcaatggag

SEQ ID NO: 405742 - DNA, 608 bp, Homo sapiens
agaaagaaaataaattattgaagaaaagtttcaagatacaaaggatagagttamacgttaatatgtgtctaaactttaccaggaaaagagagacaaaggcaataactaaggaaataatagagaatgtttttagtactgattgaagacagatataagcagatttaagaaggtcaacaaattctgagtggagtaagaaaagtacaatgaagaaaacaaaagacaaagccaaaattctgtaaagcagcctgaaaataaggcttattaccattaaataacaacatttcagtctatagaaacttacatcctaggagagggaatactttaaataaaaaagtaatggatgaaaagagaaaaattccatcaagtgggataactgttatccataaagaagtagcaggtgagatggggagtaaaaaaacaaacatatataaatcctcttattttatatattatagctcaattttattcccatctttgataatccaaaaattatacactgatcaatatatctgttctaaatgttaagattccaacaggtagatcatgtctctcaaaatgtgttgcacattgcctcaactggaggttcatgatgcatattaaaataagaa

SEQ ID NO: 405743 - DNA, 608 bp, Homo sapiens
agaaagaaaataaattattgaagaaaagtttcaagatacaaaggatagagttaaacgttaatatgtgtctaaactttaccaggaaaagagagacaaaggcaataactaaggaaataatagagaatgtttttagtactgattgaagacagatataagcagatttaagaaggtcaacaaattctgagtggagtaagaaaagtacaatgaagaaaacaaaagrcaaagccaaaattctgtaaagcagcctgaaaataaggcttattaccattaaataacaacatttcagtctatagaaacttacatcctaggagagggaatactttaaataaaaaagtaatggatgaaaagagaaaaattccatcaagtgggataactgttatccataaagaagtagcaggtgagatggggagtaaaaaaacaaacatatataaatcctcttattttatatattatagctcaattttattcccatctttgataatccaaaaattatacactgatcaatatatctgttctaaatgttaagattccaacaggtagatcatgtctctcaaaatgtgttgcacattgcctcaactggaggttcatgatgcatattaaaataagaa

SEQ ID NO: 405744 - DNA, 514 bp, Homo sapiens
aggcttattaccattaaataacaacatttcagtctatagaaacttacatcctaggagagggaatactttaaataaaaaagtaatggatgaaaagagaaaaattccatcaagtgggataactgttatccataaagaagtagcaggtgagatggggagtaaaaaaacaaacatatataaatcctcttattttatatattatagctcaattttattcccatctttgataatccaaaaattatacactgatcaatatatctgttctaaatgttaagattccaacaggtagatcatgtctctcaaaatgtgttgcacattgcctcaactggwggttcatgatgcatattaaaataagaaaggcttagagaattcttacagcaaggaaaacaatgtaagtttatttaatttagtgttttagctatatatttaataattattttgggtaggcagttgtttaaagacaatagaaattacttggaatttaaagcaagcaaaaatgaatgcgttggaaaagcac

SEQ ID NO: 405745 - DNA, 552 bp, Homo sapiens
aaagcacaacgcagctcttagaattgaaaaaaaaagtaggtgaaccagcctcaggcagtaatcagagagcaagtcagaaccartatcagaaaaaggaagttctgcttttcatgtggctattgtcctgtcagtcatgaccgctggccactgccagcaaagcatgcacaggcattttctggaatgctgctgggctctgctttagcttgtcacttcccactttaccattggattcaaaaaatctatccatctgacaggaataatttcagactctctgcctacttcttaccttgcaaggttaaaaatgcaaggaatgagtggctattcttgggtctctggtttacattttagcctccagttggtgggaagagaaaaatctactcacaaacagcttcaaaacggaaaggtcctatattggcattcctacataaaagaaagtactggggggcttgacaaatggacatttgtcttcaaagaacacattttctcctttagacaaagtttgcacttatatagcacaattaacctacttcttatcaatcaataaaatgaaga

SEQ ID NO: 405746 - DNA, 493 bp, Homo sapiens
gattcaaaaaatctatccatctgacaggaataatttcagactctctgcctacttcttaccttgcaaggttaaaaatgcaaggaatgagtggctattcttgggtctctggtttacattttagcctccagttggtgggaagagaaaaatctactcacaaacagcttcaaaacggaaaggtcctatattggcattcctacataaaagaaagtactggggggcttgacaaatggacatttgycttcaaagaacacattttctcctttagacaaagtttgcacttatatagcacaattaacctacttcttatcaatcaataaaatgaagagacaattacagaacaggataaggtgtttgcaaactatgtattcaacaaggtttgatatccagaatatataaggaactcaaaaaactcaatagcaaaagaaaaagttgactaaaaaatggacaaaagaagacatacaaatggccaaaaaatatataaagaaatgctcaa

SEQ ID NO: 405747 - DNA, 517 bp, Homo sapiens
agaaccagtatcagaaaaaggaagttctgcttttcatgtggctattgtcctgtcagtcatgaccgctggccactgccagcaaagcatgcacaggcattttctggaatgctgctgggctctgctttagcttgtcacttcccactttaccattggattcaaaaaatctatccatctgacaggaataatttcagactctctgcctacttcttaccttgcaaggttaaaaatgcaaggaatgagtggctattcttgggtctctggtttacattttagcctccagttggtgggaagagaaaaatctactcacaaacagcttcaaaacggaaaggtcctatattggcattcctacataaaagaaagtactggggggcttgacaaatggacatttgtcttcaaagaacacatwttctcctttagacaaagtttgcacttatatagcacaattaacctacttcttatcaatcaataaaatgaagagacaattacagaacaggataaggtgtttgcaaactatgta

SEQ ID NO: 405748 - DNA, 596 bp, Homo sapiens
agtttgctgtttttgcattaattcgacaagcattttggataagcagttcttaaccggtaaaatgtgttgttgcatactaataatgaatcactaaaacataataataaattctattcacaatagaataatcacaagcatataattcttaggaataaaggcaacaaaatatgcgtagttcttttatctagaagctaaaaaatattattgagaaattttaagaaaaaatagaaaacgtagatctatacatgttcttattgatatgttatttatattaagatatccatccaccttatattgatctacaaatgtatttcaactctgatgaaaatcacatcagattttactgcaaaataaaaataaacaatgtgatgtcaagatgtatataaatatgcagaaatacaaaggaacataggtaacttarccaatcttggaaaagaatataatcaaagaagtaacattaaattattttaagatttttaaagctgcatgttaaaaaatggagcatccataaatatgtttatgtttaacatagatgatgaactgattttctatgaagacaaaggacaatagaaaacacatatttttacaacatatct

SEQ ID NO: 405749 - DNA, 543 bp, Homo sapiens
attttctcctttagacaaagtttgcacttatatagcacaattaacctacttcttatcaatcaataaaaygaagagacaattacagaacaggataaggtgtttgcaaactatgtattcaacaaggtttgatatccagaatatataaggaactcaaaaaactcaatagcaaaagaaaaagttgactaaaaaatggacaaaagaagacatacaaatggccaaaaaatatataaagaaatgctcaacatcattaagcctcagataaatgcaagacaaaaccgcaatgagctattaccttatcccagtttaaatgatggatattatcaagaagacaaaatataacaaatggaaacgataatgtggagaaagaggaatgttatacactgttggtgggaatttaaaatagtatagctgttatgaaaagcagtatggagtttccacaaaaaataaaaaagagaactactatattacccagcaatcccactactgggtacgtaatcaaaaaaaatgaaattagtatgtcaaagagacatctgcacccaggga

SEQ ID NO: 405750 - DNA, 512 bp, Homo sapiens
gtggctattcttgggtctctggtttacattttagcctccagttggtgggaagagaaaaatctactcacaaacagcttcaaaacggaaaggtcctatattggcattcctacataaaagaaagtactggggggcttgacaaatggacatttgtcttcaaagaacacattttctcctttagacaaagtttgcacttatatagcacaattaacctacttcttatcaatcaataaaatgaagagacaattacagaacaggataaggtgtttgcaaactatgtattcaacaaggtttratatccagaatatataaggaactcaaaaaactcaatagcaaaagaaaaagttgactaaaaaatggacaaaagaagacatacaaatggccaaaaaatatataaagaaatgctcaacatcattaagcctcagataaatgcaagacaaaaccgcaatgagctattaccttatcccagtttaaatgatggatattatcaagaagacaaaatataacaaatggaa

SEQ ID NO: 405751 - DNA, 581 bp, Homo sapiens
tatcaatcaataaaatgaagagacaattacagaacaggataaggtgtttgcaaactatgtattcaacaaggtttgatatccagaatatataaggaactcaaaaaactcaatagcaaaagaaaawgttgactaaaaaatggacaaaagaagacatacaaatggccaaaaaatatataaagaaatgctcaacatcattaagcctcagataaatgcaagacaaaaccgcaatgagctattaccttatcccagtttaaatgatggatattatcaagaagacaaaatataacaaatggaaacgataatgtggagaaagaggaatgttatacactgttggtgggaatttaaaatagtatagctgttatgaaaagcagtatggagtttccacaaaaaataaaaaagagaactactatattacccagcaatcccactactgggtacgtaatcaaaaaaaatgaaattagtatgtcaaagagacatctgcacccagggatattgaagcatcattcaaaatagccgtgatatggaatctgcctaaatgctcatctaacaacaaatggataaagaaaatgtggtgtataaat

SEQ ID NO: 405752 - DNA, 543 bp, Homo sapiens
attttctcctttagacaaagtttgcacttatatagcacaattaacctacttcttatcaatcaataaaatgaagagacaattacagaacaggataaggtgtttgcaaactatgtattcaacaaggtttgatatccagaatatataaggaactcaaaaaactcaatagcaaaagaaaaagttgaytaaaaaatggacaaaagaagacatacaaatggccaaaaaatatataaagaaatgctcaacatcattaagcctcagataaatgcaagacaaaaccgcaatgagctattaccttatcccagtttaaatgatggatattatcaagaagacaaaatataacaaatggaaacgataatgtggagaaagaggaatgttatacactgttggtgggaatttaaaatagtatagctgttatgaaaagcagtatggagtttccacaaaaaataaaaaagagaactactatattacccagcaatcccactactgggtacgtaatcaaaaaaaatgaaattagtatgtcaaagagacatctgcacccaggga

SEQ ID NO: 405753 - DNA, 543 bp, Homo sapiens
attttctcctttagacaaagtttgcacttatatagcacaattaacctacttcttatcaatcaataaaatgaagagacaattacagaacaggataaggtgtttgcaaactatgtattcaacaaggtttgatatccagaatatataaggaactcaaaaaactcaatagcaaaagaaaaagttgactaaaaaatggacaaaagaagacatacaaatggccaaamaatatataaagaaatgctcaacatcattaagcctcagataaatgcaagacaaaaccgcaatgagctattaccttatcccagtttaaatgatggatattatcaagaagacaaaatataacaaatggaaacgataatgtggagaaagaggaatgttatacactgttggtgggaatttaaaatagtatagctgttatgaaaagcagtatggagtttccacaaaaaataaaaaagagaactactatattacccagcaatcccactactgggtacgtaatcaaaaaaaatgaaattagtatgtcaaagagacatctgcacccaggga

SEQ ID NO: 405754 - DNA, 512 bp, Homo sapiens
gtggctattcttgggtctctggtttacattttagcctccagttggtgggaagagaaaaatctactcacaaacagcttcaaaacggaaaggtcctatattggcattcctacataaaagaaagtactggggggcttgacaaatggacatttgtcttcaaagaacacattttctcctttagacaaagtttgcacttatatagcacaattaacctacttcttatcaatcaataaaatgaagagacaattacagaacaggataaggtgtttgcaaactatgtattcaacaaggtttgatatccagaatatataaggaactcaaaaaactcaatagcaaaagaaaaagttgactaaaaaatggacaaaagaagacatacaaatggccaaaaaatatataaagaaatgctcaacatcattaagcctcagataaatgcaagacaaaaccgcaatgagctattaccttaycccagtttaaatgatggatattatcaagaagacaaaatataacaaatggaa

SEQ ID NO: 405755 - DNA, 543 bp, Homo sapiens
attttctcctttagacaaagtttgcacttatatagcacaattaacctacttcttatcaatcaataaaatgaagagacaattacagaacaggataaggtgtttgcaaactatgtattcaacaaggtttgatatccagaatatataaggaactcaaaaaactcaatagcaaaagaaaaagttgactaaaaaatggacaaaagaagacatacaaatggccaaaaaatatataaagaaatgctcaacatcattaagcctcagataaatgcaagacaaaaccgcaatgagctattaccttatcccagtttaaatgatggatattatcaagaagacaaaatataacaaatggaaacgataatgtggagaaagaggaatgttatacactgttggtgggaatttaaaatagtatagctgttatgaaaagcagtatggagtttccacaaaaaataaaaaagagaactaytatattacccagcaatcccactactgggtacgtaatcaaaaaaaatgaaattagtatgtcaaagagacatctgcacccaggga

SEQ ID NO: 405756 - DNA, 486 bp, Homo sapiens
tgttatgaaaagcagtatggagtttccacaaaaaataaaaaagagaactactatattacccagcaatcccactactgggtacgtaatcaaaaaaaatgaaattagtatgwcaaagagacatctgcacccagggatattgaagcatcattcaaaatagccgtgatatggaatctgcctaaatgctcatctaacaacaaatggataaagaaaatgtggtgtataaatgtatatctatctatctatctatctatctatctatctatctatcatctatttatcatctatctatccacccctccagaacaatattcagccataaaatgctgttatttttagcaatgtggatgaagttggaggacactttgttaagtgaaataagccaggcacagaaagacaagcactgcatgatcaaattcatatctggagttttaaggatatggagaaagatgttaggttttttccttgtgtgaacaatatttaaaatta

SEQ ID NO: 405757 - DNA, 486 bp, Homo sapiens
tgttatgaaaagcagtatggagtttccacaaaaaataaaaaagagaactactatattacccagcaatcccactactgggtacgtaatcaaaaaaaatgaaattagtatgtcaaagagacatctgcacccagggatattgaagcatcattcaaaatagccgtgatatggaatctgcctaaatrctcatctaacaacaaatggataaagaaaatgtggtgtataaatgtatatctatctatctatctatctatctatctatctatctatcatctatttatcatctatctatccacccctccagaacaatattcagccataaaatgctgttatttttagcaatgtggatgaagttggaggacactttgttaagtgaaataagccaggcacagaaagacaagcactgcatgatcaaattcatatctggagttttaaggatatggagaaagatgttaggttttttccttgtgtgaacaatatttaaaatta

SEQ ID NO: 405758 - DNA, 486 bp, Homo sapiens
tgttatgaaaagcagtatggagtttccacaaaaaataaaaaagagaactactatattacccagcaatcccactactgggtacgtaatcaaaaaaaatgaaattagtatgtcaaagagacatctgcacccagggatattgaagcatcattcaaaatagccgtgatatggaatctgcctaaatgctcatctaacaacaaatggataaagaaaatgtggtgtataaatgtatatctatctatctatctatctatctatctatctatctatcatctatttatcatctatctatccacccctccagaacaatattcagccataaaatgctgttatttttagcaatgtggatgaagttggaggacaytttgttaagtgaaataagccaggcacagaaagacaagcactgcatgatcaaattcatatctggagttttaaggatatggagaaagatgttaggttttttccttgtgtgaacaatatttaaaatta

SEQ ID NO: 405759 - DNA, 606 bp, Homo sapiens
gaggtcacactccatggggagatggtcacataaagcttcttagaaaatggtaagaacttttgtttatttaattggcagccatgaagggttttaaacagaaaagcaatcgcctctttaaagaattagcagtaacagtttgactgatctgtgaaaatagaccatagcatagcaaaagagaaaacagggaaattagtgaggaaactatcgtgtaaactattcctgaagctgttstaaactataaactatgtaaattataaattgaaattgttctatgcaaacaatatatatttgaaccctgtatattagaggcaaaagtccatgatattggcaatgttttggcctgaactatgggaggaacagagttggaattactcacctgggtttaaatttgggaggagcaaatttgggattagaggataggaaagatcaatagttttatttttaacaggcttaattttaaatagacacttaatcatataatatattttaaataaattattaatcataaaataatgtcaggctaattttaatactcacctatcaattataaataaataaaatgataagaaaatacataaaatccgcaatagttgttgtaattagaca

SEQ ID NO: 405760 - DNA, 606 bp, Homo sapiens
gaggtcacactccatggggagatggtcacataaagcttcttagaaaatggtaagaacttttgtttatttaattggcagccatgaagggttttaaacagaaaagcaatcgcctctttaaagaattagcagtaacagtttgactgatctgtgaaaatagaccatagcatagcaaaagagaaaacagggaaattagtgaggaaactatcgtgtaaactattcctgaagctgttgtaaactataaactatgtaaattataaattgaaattgttctatgcaaacaatatatatttgaaccctgtatattagaggcaaaagtccatgatattggcaatgttttggcctgaactatgggaggaacagagttggaattactcacctgggtttaaatttggraggagcaaatttgggattagaggataggaaagatcaatagttttatttttaacaggcttaattttaaatagacacttaatcatataatatattttaaataaattattaatcataaaataatgtcaggctaattttaatactcacctatcaattataaataaataaaatgataagaaaatacataaaatccgcaatagttgttgtaattagaca

SEQ ID NO: 405761 - DNA, 606 bp, Homo sapiens
gaggtcacactccatggggagatggtcacataaagcttcttagaaaatggtaagaacttttgtttatttaattggcagccatgaagggttttaaacagaaaagcaatcgcctctttaaagaattagcagtaacagtttgactgatctgtgaaaatagaccatagcatagcaaaagagaaaacagggaaattagtgaggaaactatcgtgtaaactattcctgaagctgttgtaaactataaactatgtaaattataaattgaaattgttctatgcaaacaatatatatttgaaccctgtatattagaggcaaaagtccatgatattggcaatgttttggcctgaactatgggaggaacagagttggaattactcacctgggtttaaatttgggaggagcaaatttgggattagaggataggaaagatcaatagttttatttttaacaggcttaattttaaatagacacttaatcatataatatattttaaataaattattaatcataaaataatgtcaggctaattttaatactcacctatcaattataaataaataaaatgataagaaaatacataaaawccgcaatagttgttgtaattagaca

SEQ ID NO: 405762 - DNA, 573 bp, Homo sapiens
atcatgcttagcctaacgtcaatgtttatcccatatcatttacaaatttgcgatgaatccaatttgagatgctcataaacataaatatgaaacataaatataaaaactaatactatraagcatataagagaacaatcttgcatcttagggaggcaaaatattacatctttagggaggcaaaaatatttcagacaaaacaaacagaaaatgtagccataaaggaaaaaattatataaatagggcttcctcaaaataagattttctattcatcaagagaaagcattgaaaaaaattaaaaggcaggacacagaatcagaggaattatttttaatacatacaaatgacttagaagatcttaataagtagtactattcagtaataaaatgtctaacagcctctccccaaataggcatgggtcttgaatatcttacaaaggaagatatgcaatgtcacatgaacaggcactggacatcattattcattaggaatatgcaaatatacatgacaatgacagccattgcacattcactagaaattatttaaagaaattttaaaatactgacaataccaaaa

SEQ ID NO: 405763 - DNA, 573 bp, Homo sapiens
atcatgcttagcctaacgtcaatgtttatcccatatcatttacaaatttgcgatgaatccaatttgagatgctcataaacataaatatgaaacataaatataaaaactaatactataaagcatataagagaacaatcttgcatcttagggaggcaaaatattacatctttagggaggcaaaaatatttcagacaaaacaaacagaaaatgtagccataaaggaaaaaattatataaatagggcttcctcaaaataagattttctaytcatcaagagaaagcattgaaaaaaattaaaaggcaggacacagaatcagaggaattatttttaatacatacaaatgacttagaagatcttaataagtagtactattcagtaataaaatgtctaacagcctctccccaaataggcatgggtcttgaatatcttacaaaggaagatatgcaatgtcacatgaacaggcactggacatcattattcattaggaatatgcaaatatacatgacaatgacagccattgcacattcactagaaattatttaaagaaattttaaaatactgacaataccaaaa

SEQ ID NO: 405764 - DNA, 456 bp, Homo sapiens
tctggtgacattcctgtgttattttaatttgtattttctttaccacccatgaatcttaacagatttttctatgaaagttcagcactttgattcattcttctgtggactgactgcctgtgcctatccacttccctggctctcttgcttggtgtgtgcatgtggcttakttttagcaaatagaatatttgctgtccctgagccttagtcttaaatccttatacaagcactttttcttgttatcttacctgtttgtctgacttgggtgatgattcttagagtaattttggttgccaaatgttaaagttagtagaactactataagcctctgagtggctaaatggtagttatttctgtggcctgaatactcttatgagatattcagagagattgagagggaagaattatttttgaagacatggaatttttattttctattccttagaacagtttagttta

SEQ ID NO: 405765 - DNA, 540 bp, Homo sapiens
tgaagaaggaagtttttgagtggttatcacattagagaaatttttattgtaatcaacctttgataatttctgacatgattaatatttatcttcttttctagatgttcttaagtatcaaaaagcaataaagataaaatacaggacatcaaakatatcacatacattcatatatctcaagaaatgaaagcaatgaaagagctgtgatatgatccatattttttgtttattgacaactaatgcaaaattccaaacaataatgaagcaactacagattggggaaaatagtaaatcagaaagagcaattgagagagcctttttagaaaaaagttttctcctttggaattatgttacattttgagtaattattatgatattcaaccattaatttatacatttgtttttaatttaacatatattttgagtactaaatatatcaggcactattataggtgcttgtgctaattaacaaccagttttctagaatgtgtaaagtgccatagaaaatacctcttgggttctatgctcactacctggatgatg

SEQ ID NO: 405766 - DNA, 540 bp, Homo sapiens
tgaagaaggaagtttttgagtggttatcacattagagaaatttttattgtaatcaacctttgataatttctgacatgattaatatttatcttcttttctagatgttcttaagtatcaaaaagcaataaagataaaatacaggacatcaaatatatcacatacattcatatatctcaagaaatgaaagcaatgaaagagctgtgatatgatccatattttttgtttattgacaactaatgcaaaattccaaacaataatgaagcaactacagattggggaaaatagtaaatcagaaagagcaattgagagagcctttttagaaaaaagttttctcctttggaattatgttacattttgagtaattattatgatattcaaccattaatttatacatttgtttttaatttaacatatattttgagtactaaatatatcaggcactattataggtgcttgtgctaattaacaaccagttttctagaatgtgtaaagtgccatagaaaatacctcttgggttctatgctsactacctggatgatg

SEQ ID NO: 405767 - DNA, 576 bp, Homo sapiens
  misc_feature (1)...(576): n = A,T,C or G
nnnnnnnnnnnnnnnnnnnnnnnnnnnnnnnnnnncactaaataaatttcaatattcattataaataataaattcaagcatttaaaatattatttatatattcttaatttttgttgtttgttttaattacacatgtcaatcctgttatggaatgacatcaacatccccttggcaagaggatatttttaaatttccacatgtacattttaagagtttgatacaaccctatttatcyatgattttctctttcctataattagtaattttcactgtagaagactcacttataaaagtgtatattattatcatatttggatgataaactaaaattttgaaatatttagaagcattgttatgaactcattaaaattatcagaatcaattcatataaaatgatatttaatattttcttatacataaattagtgacattaattgttttatacttttaatttaatttgattatgaaaactttctatgtgtttttgaatttgtgtaaccttagacagattgctaaacccatttcatcatgcattaatagaataggattagataatctctaagggtccttggctct

SEQ ID NO: 405768 - DNA, 576 bp, Homo sapiens
  misc_feature (1)...(576): n = A,T,C or G
nnnnnnnnnnnnnnnnnnnnnnnnnnnnnnnnnnncactaaataaatttcaatattcattataaataataaattcaagcatttaaaatattatttatatattcttaatttttgttgtttgttttaattacacatgtcaatcctgttatggaatgacatcaacatccccttggcaagaggatatttttaaatttccacatgtacattttaagagtttgatacaaccctatttatctatgattttctctttcctataattagtaattttcactgtagaagactcacttataaaagtgtataktattatcatatttggatgataaactaaaattttgaaatatttagaagcattgttatgaactcattaaaattatcagaatcaattcatataaaatgatatttaatattttcttatacataaattagtgacattaattgttttatacttttaatttaatttgattatgaaaactttctatgtgtttttgaatttgtgtaaccttagacagattgctaaacccatttcatcatgcattaatagaataggattagataatctctaagggtccttggctct

SEQ ID NO: 405769 - DNA, 576 bp, Homo sapiens
  misc_feature (1)...(576): n = A,T,C or G
nnnnnnnnnnnnnnnnnnnnnnnnnnnnnnnnnnncactaaataaatttcaatattcattataaataataaattcaagcatttaaaatattatttatatattcttaatttttgttgtttgttttaattacacatgtcaatcctgttatggaatgacatcaacatccccttggcaagaggatatttttaaatttccacatgtacattttaagagtttgatacaaccctatttatctatgattttctctttcctataattagtaattttcactgtagaagactcacttataaaagtgtatattattatcatatttggatgataaactaaaattttgaaatatttagaagcattgttatgaactcattaaaattatcagaatcamttcatataaaatgatatttaatattttcttatacataaattagtgacattaattgttttatacttttaatttaatttgattatgaaaactttctatgtgtttttgaatttgtgtaaccttagacagattgctaaacccatttcatcatgcattaatagaataggattagataatctctaagggtccttggctct

SEQ ID NO: 405770 - DNA, 617 bp, Homo sapiens
taattgttttatacttttaatttaatttgattatgaaaactttctatgtgtttttgaatttgtgtaaccttagacagattgctaaacccatttcatcatgcattaatagaataggattagataatctctaagggtccttggctctaagattatatgattgtaattaatggcactgcagatcttgtagagggacattaaaatggacccatacctgaagttacttttcaattgaattagtacttagggagttgagacagtagaaacaaggaaggcaaaacagtctttcataacagatcataataaatttgctaatattatagaaaggtcattggaaagtgtttgtccttttttttttaataggaccttcccattttcacttacagttttgaatacatttatayatttccttcttcaaacgtcatttaaattaaaagtgtttctattttctccagatggagtttcaatgctcataaacatttacattaggagagaatatagtacctattatctaacttaagttgaaaaagaatgaaactgtaaaatatatttaccaaaataactaaagatttatttatcttcagtaggcctcaattagtttacctttaaaaagcattcat

SEQ ID NO: 405771 - DNA, 607 bp, Homo sapiens
agaataggattagataatctctaagggtccttggctctaagattatatgattgtaattaatggcactgcagatcttgtagagggacattaaaatggacccatacctgaagttacttttcaattgaattagtacttagggagttgagacagtagaaacaaggaaggcaaaacagtctttcataacagatcataataaatttgctaatattatagaaaggtcattggaaagtgtttgtccttttttttttaataggaccttcccattttcacttacagttttgaatacatttatacatttccttcttcaarcgtcatttaaattaaaagtgtttctattttctccagatggagtttcaatgctcataaacatttacattaggagagaatatagtacctattatctaacttaagttgaaaaagaatgaaactgtaaaatatatttaccaaaataactaaagatttatttatcttcagtaggcctcaattagtttacctttaaaaagcattcattgatacaaattgtaaaaatccatgtaacagacatcaatcaaatgtgatttttctccagtttattattttctgccaggggaaataaaatgcaataatc

SEQ ID NO: 405772 - DNA, 617 bp, Homo sapiens
taattgttttatacttttaatttaatttgattatgaaaactttctatgtgtttttgaatttgtgtaaccttagacagattgctaaacccatttcatcatgcattaatagaataggattagataatctctaagggtccttggctctaagattatatgattgtaattaatggcactgcagatcttgtagagggacattaaaatggacccatacctgaagttacttttcaattgaattagtacttagggagttgagacagtagaaacaaggaaggcaaaacagtctttcataacagatcataataaatttgctaatattatagaaaggtcattggaaagtgtttgtccttttttttttaataggaccttcccattttcacttacagttttgaatacatttatacatttccttcttcaaaygtcatttaaattaaaagtgtttctattttctccagatggagtttcaatgctcataaacatttacattaggagagaatatagtacctattatctaacttaagttgaaaaagaatgaaactgtaaaatatatttaccaaaataactaaagatttatttatcttcagtaggcctcaattagtttacctttaaaaagcattcat

SEQ ID NO: 405773 - DNA, 617 bp, Homo sapiens
taattgttttatacttttaatttaatttgattatgaaaactttctatgtgtttttgaatttgtgtaaccttagacagattgctaaacccatttcatcatgcattaatagaataggattagataatctctaagggtccttggctctaagattatatgattgtaattaatggcactgcagatcttgtagagggacattaaaatggacccatacctgaagttacttttcaattgaattagtacttagggagttgagacagtagaaacaaggaaggcaaaacagtctttcataacagatcataataaatttgctaatattatagaaaggtcattggaaagtgtttgtccttttttttttaataggaccttcccattttcacttacagttttgaatacatttatacatttccttcttcaaacgtcatttaaattaaaagtgtytctattttctccagatggagtttcaatgctcataaacatttacattaggagagaatatagtacctattatctaacttaagttgaaaaagaatgaaactgtaaaatatatttaccaaaataactaaagatttatttatcttcagtaggcctcaattagtttacctttaaaaagcattcat

SEQ ID NO: 405774 - DNA, 607 bp, Homo sapiens
agaataggattagataatctctaagggtccttggctctaagattatatgattgtaattaatggcactgcagatcttgtagagggacattaaaatggacccatacctgaagttacttttcaattgaattagtacttagggagttgagacagtagaaacaaggaaggcaaaacagtctttcataacagatcataataaatttgctaatattatagaaaggtcattggaaagtgtttgtccttttttttttaataggaccttcccattttcacttacagttttgaatacatttatacatttccttcttcaaacgtcatttaaattaaaagtgtttctattttctccagatggagtttcaatgctcataaacatttacattargagagaatatagtacctattatctaacttaagttgaaaaagaatgaaactgtaaaatatatttaccaaaataactaaagatttatttatcttcagtaggcctcaattagtttacctttaaaaagcattcattgatacaaattgtaaaaatccatgtaacagacatcaatcaaatgtgatttttctccagtttattattttctgccaggggaaataaaatgcaataatc

SEQ ID NO: 405775 - DNA, 617 bp, Homo sapiens
taattgttttatacttttaatttaatttgattatgaaaactttctatgtgtttttgaatttgtgtaaccttagacagattgctaaacccatttcatcatgcattaatagaataggattagataatctctaagggtccttggctctaagattatatgattgtaattaatggcactgcagatcttgtagagggacattaaaatggacccatacctgaagttacttttcaattgaattagtacttagggagttgagacagtagaaacaaggaaggcaaaacagtctttcataacagatcataataaatttgctaatattatagaaaggtcattggaaagtgtttgtccttttttttttaataggaccttcccattttcacttacagttttgaatacatttatacatttccttcttcaaacgtcatttaaattaaaagtgtttctattttctccagatggagtttcaatgctcataaacatttacattaggagagaatrtagtacctattatctaacttaagttgaaaaagaatgaaactgtaaaatatatttaccaaaataactaaagatttatttatcttcagtaggcctcaattagtttacctttaaaaagcattcat

SEQ ID NO: 405776 - DNA, 607 bp, Homo sapiens
agaataggattagataatctctaagggtccttggctctaagattatatgattgtaattaatggcactgcagatcttgtagagggacattaaaatggacccatacctgaagttacttttcaattgaattagtacttagggagttgagacagtagaaacaaggaaggcaaaacagtctttcataacagatcataataaatttgctaatattatagaaaggtcattggaaagtgtttgtccttttttttttaataggaccttcccattttcacttacagttttgaatacatttatacatttccttcttcaaacgtcatttaaattaaaagtgtttctattttctccagatggagtttcaatgctcataaacatttacattaggagagaatatagtacctattatctaacttaagttgaaaaagaatgaaactgtaaaatatatttaccaaaataactaaagatttatttatcttcagtaggcctsaattagtttacctttaaaaagcattcattgatacaaattgtaaaaatccatgtaacagacatcaatcaaatgtgatttttctccagtttattattttctgccaggggaaataaaatgcaataatc

SEQ ID NO: 405777 - DNA, 579 bp, Homo sapiens
aatattgttttctatatcaaaaatggctagatagccttagaaaaaatggcatatacattatttacctaaaagttgtagtaatctgggtagaagcttaaagtgacctatcctgtcatatagttgtcattaactaggatattaattattcttaaaaggatgcaaaatttttccaagggatgtgcatctgcagacagttttaagggactattgtcaagaactgtgaaggatctgagcttacaagttagcctgcttcagttttatggatgttggcagaagacacataactgtttkgtcagagacagaaagacttccattatttgcagtacagcacagagttgcacgagcttcatctttgctctggttcctgttttccctcaagtttactggagatgatgacaaggagttcaagttgatgctacacacagtttgtgtcacagatgaagaactccaagtaaaggaaacttaaatctttaataaatgagcagtaagcacacttgtctgatgttttctgtggaggaaacactatcttcattttacttgaaaataaacaaatctgttctctcatccataaataaacaa

SEQ ID NO: 405778 - DNA, 579 bp, Homo sapiens
aatattgttttctatatcaaaaatggctagatagccttagaaaaaatggcatatacattatttacctaaaagttgtagtaatctgggtagaagcttaaagtgacctatcctgtcatatagttgtcattaactaggatattaattattcttaaaaggatgcaaaatttttccaagggatgtgcatctgcagacagttttaagggactattgtcaagaactgtgaaggatctgagcttacaagttagcctgcttcagttttatggatgttggcagaagacacataactgtttggtcagagacagaaagacttccattatttgcagyacagcacagagttgcacgagcttcatctttgctctggttcctgttttccctcaagtttactggagatgatgacaaggagttcaagttgatgctacacacagtttgtgtcacagatgaagaactccaagtaaaggaaacttaaatctttaataaatgagcagtaagcacacttgtctgatgttttctgtggaggaaacactatcttcattttacttgaaaataaacaaatctgttctctcatccataaataaacaa

SEQ ID NO: 405779 - DNA, 579 bp, Homo sapiens
aatattgttttctatatcaaaaatggctagatagccttagaaaaaatggcatatacattatttacctaaaagttgtagtaatctgggtagaagcttaaagtgacctatcctgtcatatagttgtcattaactaggatattaattattcttaaaaggatgcaaaatttttccaagggatgtgcatctgcagacagttttaagggactattgtcaagaactgtgaaggatctgagcttacaagttagcctgcttcagttttatggatgttggcagaagacacataactgtttggtcagagacagaaagacttccattatttgcagtacagcacagagttgcacgagcttcatctttgctctggttcctgttttccctcaagtttackggagatgatgacaaggagttcaagttgatgctacacacagtttgtgtcacagatgaagaactccaagtaaaggaaacttaaatctttaataaatgagcagtaagcacacttgtctgatgttttctgtggaggaaacactatcttcattttacttgaaaataaacaaatctgttctctcatccataaataaacaa

SEQ ID NO: 405780 - DNA, 513 bp, Homo sapiens
tttgctctggttcctgttttccctcaagtttactggagatgatgacaaggagttcaagttgatgctacacacagtttgtgtcayagatgaagaactccaagtaaaggaaacttaaatctttaataaatgagcagtaagcacacttgtctgatgttttctgtggaggaaacactatcttcattttacttgaaaataaacaaatctgttctctcatccataaataaacaatatcttgatcttccagggctatccactatataaagatctttaaaaaggaaaacctgtaataaatgtgaaactagtgcctttctatttgcaagatgcacagaaatgcatgagaccaattgaaaattgcctgtgaacaaacacgcttccagatttttagcttgctcttttctaaacatgaaaattctcagaaagtacgtgttctcaaaattcatgccatttcttttttcccaagttcctttatcacgaccatcttatttttcacattaccaaatgatgcacttccct

SEQ ID NO: 405781 - DNA, 591 bp, Homo sapiens
gaactccaagtaaaggaaacttaaatctttaataaatgagcagtaagcacacttgtctgatgttttctgtggaggaaacactatcttcattttacttgaaaataaacaaatctgttctctcatccataaayaaacaatatcttgatcttccagggctatccactatataaagatctttaaaaaggaaaacctgtaataaatgtgaaactagtgcctttctatttgcaagatgcacagaaatgcatgagaccaattgaaaattgcctgtgaacaaacacgcttccagatttttagcttgctcttttctaaacatgaaaattctcagaaagtacgtgttctcaaaattcatgccatttcttttttcccaagttcctttatcacgaccatcttatttttcacattaccaaatgatgcacttccctaaactatccaaaattttccatggtgttatagtttctaaggtactgagaagaaactcataggtgaagcatatttataaattgtttacaacataatattgaatacatattttctccttttccctgtcactagtaactttttctctgcttgattaattcagatcacatattt

SEQ ID NO: 405782 - DNA, 591 bp, Homo sapiens
gaactccaagtaaaggaaacttaaatctttaataaatgagcagtaagcacacttgtctgatgttttctgtggaggaaacactatcttcattttacttgaaaataaacaaatctgttctctcatccataaataaacaatatcttgatcttccagggctatccrctatataaagatctttaaaaaggaaaacctgtaataaatgtgaaactagtgcctttctatttgcaagatgcacagaaatgcatgagaccaattgaaaattgcctgtgaacaaacacgcttccagatttttagcttgctcttttctaaacatgaaaattctcagaaagtacgtgttctcaaaattcatgccatttcttttttcccaagttcctttatcacgaccatcttatttttcacattaccaaatgatgcacttccctaaactatccaaaattttccatggtgttatagtttctaaggtactgagaagaaactcataggtgaagcatatttataaattgtttacaacataatattgaatacatattttctccttttccctgtcactagtaactttttctctgcttgattaattcagatcacatattt

SEQ ID NO: 405783 - DNA, 591 bp, Homo sapiens
gaactccaagtaaaggaaacttaaatctttaataaatgagcagtaagcacacttgtctgatgttttctgtggaggaaacactatcttcattttacttgaaaataaacaaatctgttctctcatccataaataaacaatatcttgatcttccagggctatccactatataaagatctttaaaaaggaaaacctgtaataaatgtgaarctagtgcctttctatttgcaagatgcacagaaatgcatgagaccaattgaaaattgcctgtgaacaaacacgcttccagatttttagcttgctcttttctaaacatgaaaattctcagaaagtacgtgttctcaaaattcatgccatttcttttttcccaagttcctttatcacgaccatcttatttttcacattaccaaatgatgcacttccctaaactatccaaaattttccatggtgttatagtttctaaggtactgagaagaaactcataggtgaagcatatttataaattgtttacaacataatattgaatacatattttctccttttccctgtcactagtaactttttctctgcttgattaattcagatcacatattt

SEQ ID NO: 405784 - DNA, 513 bp, Homo sapiens
tttgctctggttcctgttttccctcaagtttactggagatgatgacaaggagttcaagttgatgctacacacagtttgtgtcacagatgaagaactccaagtaaaggaaacttaaatctttaataaatgagcagtaagcacacttgtctgatgttttctgtggaggaaacactatcttcattttacttgaaaataaacaaatctgttctctcatccataaataaacaatatcttgatcttccagggctatccactatataaagatctttaaaaaggaaaacctgtaataaatgtgaaactagtgcctttctatttgcaagatgcacagaaatgcatgagaccaattgaaaattgcctgtgaacaaayacgcttccagatttttagcttgctcttttctaaacatgaaaattctcagaaagtacgtgttctcaaaattcatgccatttcttttttcccaagttcctttatcacgaccatcttatttttcacattaccaaatgatgcacttccct

SEQ ID NO: 405785 - DNA, 591 bp, Homo sapiens
gaactccaagtaaaggaaacttaaatctttaataaatgagcagtaagcacacttgtctgatgttttctgtggaggaaacactatcttcattttacttgaaaataaacaaatctgttctctcatccataaataaacaatatcttgatcttccagggctatccactatataaagatctttaaaaaggaaaacctgtaataaatgtgaaactagtgcctttctatttgcaagatgcacagaaatgcatgagaccaattgaaaattgcctgtgaacaaacacgcttccagatttttagcttgctcttttctaaacatgaaaattctcagaaagtacgtgttctcaaaattcatgccatttcttttttcccaagttcctttatcacgaccatcttatttttcacattaccaaatratgcacttccctaaactatccaaaattttccatggtgttatagtttctaaggtactgagaagaaactcataggtgaagcatatttataaattgtttacaacataatattgaatacatattttctccttttccctgtcactagtaactttttctctgcttgattaattcagatcacatattt

SEQ ID NO: 405786 - DNA, 571 bp, Homo sapiens
agataattgccacttactggctccttcttaagatgagtaagctagagacagatactcatgatttgctcaagacttcagaacttatctgtggcagagcagagatgagaattaaatttgctagccaccatttcttggaatttaaacacattgttatgccacctcttastatatgtaattaatgacatgcagttcacagaattatgttatttaaattatattggacagaaataaaaaagtacggttgacacttgaacaacatgagcttgacctgtgtgcatcccttatatagagattattttaattaaaaaaatcagcatctgcattgaaatgtggatcaaaatacagtagccacaggatgaaaaacccgcagatatggaggactgactttttgtatactctggttccacaggattacttgaatatgtgctgattttggtatcctctggggtcctggaccctgtctcttgaggatatcaagggaccactgtatttttacttaaaatgacaagagtagagaatatatgcagatatatcccgaggaacatcttttaggtatatgcttttctatttt

SEQ ID NO: 405787 - DNA, 571 bp, Homo sapiens
agataattgccacttactggctccttcttaagatgagtaagctagagacagatactcatgatttgctcaagacttcagaacttatctgtggcagagcagagatgagaattaaatttgctagccaccatttcttggaatttaaacacattgttatgccacctcttagtatatgtaattaatgacatgcagttcacagaattatgttatttaaattatattggacagaaataaaaaagtacggttgacacttgaacaacatgagcttgacctgtgtgcatcccttatataragattattttaattaaaaaaatcagcatctgcattgaaatgtggatcaaaatacagtagccacaggatgaaaaacccgcagatatggaggactgactttttgtatactctggttccacaggattacttgaatatgtgctgattttggtatcctctggggtcctggaccctgtctcttgaggatatcaagggaccactgtatttttacttaaaatgacaagagtagagaatatatgcagatatatcccgaggaacatcttttaggtatatgcttttctatttt

SEQ ID NO: 405788 - DNA, 571 bp, Homo sapiens
agataattgccacttactggctccttcttaagatgagtaagctagagacagatactcatgatttgctcaagacttcagaacttatctgtggcagagcagagatgagaattaaatttgctagccaccatttcttggaatttaaacacattgttatgccacctcttagtatatgtaattaatgacatgcagttcacagaattatgttatttaaattatattggacagaaataaaaaagtacggttgacacttgaacaacatgagcttgacctgtgtgcatcccttatatagagattmttttaattaaaaaaatcagcatctgcattgaaatgtggatcaaaatacagtagccacaggatgaaaaacccgcagatatggaggactgactttttgtatactctggttccacaggattacttgaatatgtgctgattttggtatcctctggggtcctggaccctgtctcttgaggatatcaagggaccactgtatttttacttaaaatgacaagagtagagaatatatgcagatatatcccgaggaacatcttttaggtatatgcttttctatttt

SEQ ID NO: 405789 - DNA, 511 bp, Homo sapiens
acatgagcttgacctgtgtgcatcccttatatagagattattttaattaaaaaaatcagcatctgcattgaaatgtggatcaaaatacagtagccacaggatgaaaaacccgcagatatggaggactgactttttgtatactctggttccacaggattacttgaatatgtgctgattttggtatcctctggggtcctggaccctgtctcttgaggatatcaagggaccactgtatttttacttaaaatgacaagagtagagaatatatgcagatatatcccgaggaacatcttttaggtatatgcttttctattttaattcctcttaaaaaaacacacacatcttagaacttacaatgtattgatacaaaaatrtggccattatttatgtaggaaaagtttatatactcctccggagggtaggaaatgagattgcagtgcacatggggttctgccactcacagtgtaggatgtttcaccatgtcttcctgaaatgatttgcaaatagtcaa

SEQ ID NO: 405790 - DNA, 609 bp, Homo sapiens
taaattaatattttggattgttctacagtattgtatcctgaactggaacttttattactgatttattaattgaaatatgaaatatgatatgcacatgtgaaagacacagatcttgagcatatagcattaaacatttttagaacgtaaaatactaatgtcatcacaacctacatgaatatgaattgagtattactagaatccaggagtctctattgtgaacctccaatcattactataggcaaccactgttcttacttttatctttataaattacatttgcttgacattgaacttcatagaaattgaaccatacaatagatattaatttcaatctggttcaaaaaaacacaaccaacagcgtgggtgtcagtgtgatattctgtgctgcttctcagctgaatcaatggtgctgacagctgcaatagcaacarcagtgtcttcagaagttttactgagagtttggagtccagagtttctgcctaacggcagctgcgctcaaatagggccaatggtcagtctggaatcatgggacccagaatgcaccaccttctcctactcatttttcacagttaaggatggaagtggcttccttcatttgctcatcatctg

SEQ ID NO: 405791 - DNA, 609 bp, Homo sapiens
taaattaatattttggattgttctacagtattgtatcctgaactggaacttttattactgatttattaattgaaatatgaaatatgatatgcacatgtgaaagacacagatcttgagcatatagcattaaacatttttagaacgtaaaatactaatgtcatcacaacctacatgaatatgaattgagtattactagaatccaggagtctctattgtgaacctccaatcattactataggcaaccactgttcttacttttatctttataaattacatttgcttgacattgaacttcatagaaattgaaccatacaatagatattaatttcaatctggttcaaaaaaacacaaccaacagcgtgggtgtcagtgtgatattctgtgctgcttctcagctgaatcaatggtgctgacagctgcaatagcaacaacagtgtcttcagaagttttactgagagtttggagtccagagtttctgcctaayggcagctgcgctcaaatagggccaatggtcagtctggaatcatgggacccagaatgcaccaccttctcctactcatttttcacagttaaggatggaagtggcttccttcatttgctcatcatctg

SEQ ID NO: 405792 - DNA, 609 bp, Homo sapiens
taaattaatattttggattgttctacagtattgtatcctgaactggaacttttattactgatttattaattgaaatatgaaatatgatatgcacatgtgaaagacacagatcttgagcatatagcattaaacatttttagaacgtaaaatactaatgtcatcacaacctacatgaatatgaattgagtattactagaatccaggagtctctattgtgaacctccaatcattactataggcaaccactgttcttacttttatctttataaattacatttgcttgacattgaacttcatagaaattgaaccatacaatagatattaatttcaatctggttcaaaaaaacacaaccaacagcgtgggtgtcagtgtgatattctgtgctgcttctcagctgaatcaatggtgctgacagctgcaatagcaacaacagtgtcttcagaagttttactgagagtttggagtccagagtttctgcctaacggcagctgcgctcaaatagggccaatggtcagtctggaatcatgggacccagaatgcaccaccttcycctactcatttttcacagttaaggatggaagtggcttccttcatttgctcatcatctg

SEQ ID NO: 405793 - DNA, 599 bp, Homo sapiens
tgaaacatctaaatgtcaaattttggtgtgtacttcctattaatttctaagcagggacacctggcaarcagaaataactctgaggacatgtgggattttgaatttttggacacctctgtaaagttatttggcaagcaataataaagctaccacttatttatcaagtgtttactaatgtactaagcattgccatatatggtttattacttctatcctatttagtattcaaatcaatatgatgtctatttttgttctgttttaaaaataaagaagctaacatgtccaagccacatatttagtaagtattggaactacatcaaaacaagaaagaaacatttcaatggtttatcctactgtctacttcctaaaggaaaattataaatttacagtaactgatccaaatacatttccagagttactttggctttcacagtgttggccagcacaatgtgttttttgtttgtttgtttgcttgcttccttgtttttaaattgagaacattcccatagttgactatttcaatatttaattctccaatcttgtatttttggtttatcttgataaacatcaaataaggtggaggcagtttacactgaata

SEQ ID NO: 405794 - DNA, 590 bp, Homo sapiens
aagacacaataaaattttaaatatgttatttacacaatgatttatgactcaggcagctccaaaccataaaagtggcttaagagcaccactgagggatcacagggggaggcttttagaggacaggcacagaagaaaactaaagatagtatttgactatttatagttgtacagttatttgtaccttatttggtaccaaagttgtacgttattaggtctatcccactggaaagtcttcagttgtatgattatgtgtgttggctacttctgattggttgaacttaagttctgtttttctttaatatagaaattgataagaatagctcaagtttcccttatatctgtagatcaaacaaggtttagatcacttatgatgcctaactggttttgtctgctcagaaattcttcasgcctggactccattttaatttactttaatgattgttactttaaatttggattaaacagtggattcatatgtactgagtgaaaaaaaatggaaatagatgttataaaatttatttgaaatcattcagccaggatgttttaaacagcataaattagcagaattaccaaaaacacattttgaaaaa

SEQ ID NO: 405795 - DNA, 549 bp, Homo sapiens
tgggatttaccatgttggtcaggctggtctccaactcctgctctagtgatctgcccgcctctgcctccygaagtgtttggattacaggtgtgagctactgcacccggcaacaaggacatttttatacaagctgatagggctgtgaattcctggttgtatgagacatgaattcctggttgctccactccacctttccagtgagttaagtgggcccttagtctgtgcctctccatattgatttatttcccttaatgcacatatgttaaggaacgaaattttccactatgggcatgtttaggcaagctcccttagcaagtacgcttatccgcacaaaatatttggtataaacacctggggggtgggtaagaggttctccaggggaccctttcctgactgtctccctaaagcaagttggctgactcctttcattcctcccttcaggagtggagaccccaaattctgttggggaaagtgtacaacgactgctcttaactgcttcctgctgacaaggggtgctgttttgggaaagtggcagttaaggctcctcct

SEQ ID NO: 405796 - DNA, 549 bp, Homo sapiens
tgggatttaccatgttggtcaggctggtctccaactcctgctctagtgatctgcccgcctctgcctcctgaagtgttyggattacaggtgtgagctactgcacccggcaacaaggacatttttatacaagctgatagggctgtgaattcctggttgtatgagacatgaattcctggttgctccactccacctttccagtgagttaagtgggcccttagtctgtgcctctccatattgatttatttcccttaatgcacatatgttaaggaacgaaattttccactatgggcatgtttaggcaagctcccttagcaagtacgcttatccgcacaaaatatttggtataaacacctggggggtgggtaagaggttctccaggggaccctttcctgactgtctccctaaagcaagttggctgactcctttcattcctcccttcaggagtggagaccccaaattctgttggggaaagtgtacaacgactgctcttaactgcttcctgctgacaaggggtgctgttttgggaaagtggcagttaaggctcctcct

SEQ ID NO: 405797 - DNA, 549 bp, Homo sapiens
tgggatttaccatgttggtcaggctggtctccaactcctgctctagtgatctgcccgcctctgcctcctgaagtgtttggattacaggtgtgagctactgcacccggcaacaaggacatttttatacaagctgatagggctgtgaattcctggttgtatgagacatgaattcctggttgctccactccacctttccagtgagttawgtgggcccttagtctgtgcctctccatattgatttatttcccttaatgcacatatgttaaggaacgaaattttccactatgggcatgtttaggcaagctcccttagcaagtacgcttatccgcacaaaatatttggtataaacacctggggggtgggtaagaggttctccaggggaccctttcctgactgtctccctaaagcaagttggctgactcctttcattcctcccttcaggagtggagaccccaaattctgttggggaaagtgtacaacgactgctcttaactgcttcctgctgacaaggggtgctgttttgggaaagtggcagttaaggctcctcct

SEQ ID NO: 405798 - DNA, 549 bp, Homo sapiens
tgggatttaccatgttggtcaggctggtctccaactcctgctctagtgatctgcccgcctctgcctcctgaagtgtttggattacaggtgtgagctactgcacccggcaacaaggacatttttatacaagctgatagggctgtgaattcctggttgtatgagacatgaattcctggttgctccactccacctttccagtgagttaagtgggcccttagtctgtgcctctccatattgatttatttccyttaatgcacatatgttaaggaacgaaattttccactatgggcatgtttaggcaagctcccttagcaagtacgcttatccgcacaaaatatttggtataaacacctggggggtgggtaagaggttctccaggggaccctttcctgactgtctccctaaagcaagttggctgactcctttcattcctcccttcaggagtggagaccccaaattctgttggggaaagtgtacaacgactgctcttaactgcttcctgctgacaaggggtgctgttttgggaaagtggcagttaaggctcctcct

SEQ ID NO: 405799 - DNA, 575 bp, Homo sapiens
tcttattgcactgatgaaaataactgaattgccataaattaaatattctcacaaatagtttccaaattctgcaaagccaggcagagagaaacaaacatccttcaaattttgttcacaggtgtatagtttactcaattattaaaggctttaaatagttcaaaataagtattcttgactcagaaaaacaaagcaaggatcaccaaagttttaagcaaaaaggttaaaaataatacttgttttctattagttcaatccattctgttctcttattctgcttgatattcatgaacatttcagttctttatgagtactgtatttttttcaatgtcataatctccagagctaatggaatcttgcatttgagaacacttgtcaaaatcctgtagctgattataaatcatcttttgagtaggatcaaaakaagacatttgtctgtgaatgatgaaatgtccagggtagttactgtcaagaatacaattgacaaagaaatttagttatttctagggtttacaataactaaacataataaccttaattatgattgatagcatatattcagacattagaattttaga

SEQ ID NO: 405800 - DNA, 600 bp, Homo sapiens
tgaaagatgcccaacatttgtttttaaaaagttatcacccaaacaagaattgtttggaaccagatgctaaaatcgagagtggtctgtttatttcagttsagagtgttataaaaatgttaataaggtatttttatgtctattacccagctatatttgactttttaatgtgctttttgttataattggctgttgtttctataggctggcattattggcattagatcactgaagagtaaataaagtgagcaagaatactctcttgtcaccagattactgaggtgtactggaagtaggttgaatggttttacagatgaattacagtgaaaactttgaaacactaataatctcttcggtgttgagaaataacctactaatcattaacttaataattatcagctcaaccaggaaactacaccacctaaaaggtagttaattttatcactcctagacatctacaggagaccatgattctccattatgtgaatgccttgctgcccatgtgatgcctgcccccatcaattctaagaagcttcagtcatttagtacttaatatgtaatttttaaaaattacataagtaacaccttctccttatagagaac

SEQ ID NO: 405801 - DNA, 600 bp, Homo sapiens
tgaaagatgcccaacatttgtttttaaaaagttatcacccaaacaagaattgtttggaaccagatgctaaaatcgagagtggtctgtttatttcagttcagagtgttataaaaatgttaataaggtatttttatgtctattacccagctatatttgactttttaatgtgctttttgttataattggctgttgtttctataggctggcattattggcattagatcactgaagagkaaataaagtgagcaagaatactctcttgtcaccagattactgaggtgtactggaagtaggttgaatggttttacagatgaattacagtgaaaactttgaaacactaataatctcttcggtgttgagaaataacctactaatcattaacttaataattatcagctcaaccaggaaactacaccacctaaaaggtagttaattttatcactcctagacatctacaggagaccatgattctccattatgtgaatgccttgctgcccatgtgatgcctgcccccatcaattctaagaagcttcagtcatttagtacttaatatgtaatttttaaaaattacataagtaacaccttctccttatagagaac

SEQ ID NO: 405802 - DNA, 600 bp, Homo sapiens
tgaaagatgcccaacatttgtttttaaaaagttatcacccaaacaagaattgtttggaaccagatgctaaaatcgagagtggtctgtttatttcagttcagagtgttataaaaatgttaataaggtatttttatgtctattacccagctatatttgactttttaatgtgctttttgttataattggctgttgtttctataggctggcattattggcattagatcactgaagagtaaataaagtgmgcaagaatactctcttgtcaccagattactgaggtgtactggaagtaggttgaatggttttacagatgaattacagtgaaaactttgaaacactaataatctcttcggtgttgagaaataacctactaatcattaacttaataattatcagctcaaccaggaaactacaccacctaaaaggtagttaattttatcactcctagacatctacaggagaccatgattctccattatgtgaatgccttgctgcccatgtgatgcctgcccccatcaattctaagaagcttcagtcatttagtacttaatatgtaatttttaaaaattacataagtaacaccttctccttatagagaac

SEQ ID NO: 405803 - DNA, 600 bp, Homo sapiens
tgaaagatgcccaacatttgtttttaaaaagttatcacccaaacaagaattgtttggaaccagatgctaaaatcgagagtggtctgtttatttcagttcagagtgttataaaaatgttaataaggtatttttatgtctattacccagctatatttgactttttaatgtgctttttgttataattggctgttgtttctataggctggcattattggcattagatcactgaagagtaaataaagtgagcaagaatactctcttgtcaccagattactgaggtgtactggargtaggttgaatggttttacagatgaattacagtgaaaactttgaaacactaataatctcttcggtgttgagaaataacctactaatcattaacttaataattatcagctcaaccaggaaactacaccacctaaaaggtagttaattttatcactcctagacatctacaggagaccatgattctccattatgtgaatgccttgctgcccatgtgatgcctgcccccatcaattctaagaagcttcagtcatttagtacttaatatgtaatttttaaaaattacataagtaacaccttctccttatagagaac

SEQ ID NO: 405804 - DNA, 657 bp, Homo sapiens
aacactaataatctcttcggtgttgagaaataacctactaatcattaacttaataattatcagctcaaccaggaaactacaccacctaaaaggtagttaattttatcactcctagacatctacaggagaccatgattctccattatgtgaatgccttgctgcccatgtgatgcctgcccccatcaattctaagaagcttcagtcatttagtacttaatatgtaatttttaaaaattacataagtaayaccttctccttatagagaactgaaactttcagaaacagttaaagcctaatttgaatattgccaaagccctgtctcttcttcagagacaaccagtgtttccagtttggtgtgtattttccccaaatacagtgaatgtgtgtataaacacgtgtagatttacctgtcctagatatgagcatttgctttgtgagtctgctttaagtcaagttctaaactatggctcagtttaaaacttctctttttctatttaataatataccttagaagtcatgccatgatattaagatgaataataatgaaattattaatattagtcaaatttaattagttgcttattacgtagtgggtacttggtgtgatatatggattatctcatttaatcatcatgacatgctaataaattggcaatg

SEQ ID NO: 405805 - DNA, 614 bp, Homo sapiens
attttgaatttttggacacctctgtaaagttatttggcaagcaataataaagctaccacttatttatcaagtgtttactaatgtactaagcattgccatatatggtttattacttctatcctatttagtattcaaatcaatatgatgtctatttttgttctgttttaaaaataaagaagctaacatgtccaagccacatatttagtaagtattggaactacatcaaaacaagaaagaaacatttcaatggtttatcctactgtctacttcctaaaggaaaattataaatttacagtaactgatccaaatacatttccagagttactttggctttcacagtgttggccagcacaatgtgttttttgtttgtttgtttgcttgcttccttgtttttwaattgagaacattcccatagttgactatttcaatatttaattctccaatcttgtatttttggtttatcttgataaacatcaaataaggtggaggcagtttacactgaatagacttaagaagctgatcttcacaagaaagttcagatgcttcattttaccacaatttctccactgcttagttttattacacctagtccatatcacgcatttgggttactt

SEQ ID NO: 405806 - DNA, 657 bp, Homo sapiens
aacactaataatctcttcggtgttgagaaataacctactaatcattaacttaataattatcagctcaaccaggaaactacaccacctaaaaggtagttaattttatcactcctagacatctacaggagaccatgattctccattatgtgaatgccttgctgcccatgtgatgcctgcccccatcaattctaagaagcttcagtcatttagtacttaatatgtaatttttaaaaattacataagtaacaccttctccttatagagaactgaaactttcagaaacagttaaagcctaatttgaatattgccaaagccctgtctcttcttcagagacaaccagtgtttccagtttggtgtgtattttccccaaayacagtgaatgtgtgtataaacacgtgtagatttacctgtcctagatatgagcatttgctttgtgagtctgctttaagtcaagttctaaactatggctcagtttaaaacttctctttttctatttaataatataccttagaagtcatgccatgatattaagatgaataataatgaaattattaatattagtcaaatttaattagttgcttattacgtagtgggtacttggtgtgatatatggattatctcatttaatcatcatgacatgctaataaattggcaatg

SEQ ID NO: 405807 - DNA, 605 bp, Homo sapiens
tcggattggaaagttgcttgttctatataacaagatttactctttccatacattctaggataaattcatcatctctctaaaaatttcctaatttttgtcattcagaaaaatagccaattcctgtccttcattaaattttaatgaataatcagtcaattataaaactcttgaaaaattcatattaaaaaggaaacatttatattattaaaaaataataattacaaaatgcccatataaatattatttagggccaggcacactggctcacacctgtaatcccagaactttgggaggctgaggtgggcaaatcacttgagcccagggtttgagaccggcctgggcaacatgacaaaaccctgtctctacaaaaaatttaaatattaatcagatgcggtggtgtgcgcctataatcccagctactcaggatgttgaggtgggagtgatggggtgggagtgawagggaagggaggcagggaaattctgggcaaaagagggcaggtccctggcaacggctccaccctcaagcctggaaccaaagcccaaagtgagaacatacattcctgttttcccactcaaatgttgccttttacaaaattacccatgac

SEQ ID NO: 405808 - DNA, 275 bp, Homo sapiens
gactatttcaatatttaattctccaatcttgtatttttggtttatcttgataaacatcaaataaggtggaggcagtttacactgaatagacttaagaagctgatcttcacaagaaagttcagatgcttcattttaccacaatttctccactgcttagttttattacacctagtccatatcacgcatttgggttacttgcctggmtcatctatgacagaaaagaaggaaaggagaaaggaagcaaaagagaataaagaacctaaataagtgctatt

SEQ ID NO: 405809 - DNA, 554 bp, Homo sapiens
cattgcaatcagctgttgccatgtaccttttgcatttrgtggtcagggtcttcggaatcgtatgaatctgatatcaaatcccagttgtattgctgactagctgtgaaaaaagattttaaacttattattttcagtttactcatttattaagtaccaatattaatattgaaactagagaaatagattaaatggcatacttgtatagtaattgttacataggaaaactctcaataaatcaatgctgttattattaccattaatattccctagatgtgaagattgtcttcagaggaaacatactggaaaaaaaaaaatgagttttacagaagtttttcagcagaagttgattggttttacacacacatacacacatacatgcacacatattttcacacatataaatatgtatattttacatatatatatgcacacgcatttgtttctatttaaaatgaaaaaagtatgttagtcatgtgtgcccaattttctgatacactaaaaaatggaaatatcttggcagacactattgataggctatgcaaatgtaaacttct

SEQ ID NO: 405810 - DNA, 554 bp, Homo sapiens
cattgcaatcagctgttgccatgtaccttttgcatttggtggtcagggtcttcggaatygtatgaatctgatatcaaatcccagttgtattgctgactagctgtgaaaaaagattttaaacttattattttcagtttactcatttattaagtaccaatattaatattgaaactagagaaatagattaaatggcatacttgtatagtaattgttacataggaaaactctcaataaatcaatgctgttattattaccattaatattccctagatgtgaagattgtcttcagaggaaacatactggaaaaaaaaaaatgagttttacagaagtttttcagcagaagttgattggttttacacacacatacacacatacatgcacacatattttcacacatataaatatgtatattttacatatatatatgcacacgcatttgtttctatttaaaatgaaaaaagtatgttagtcatgtgtgcccaattttctgatacactaaaaaatggaaatatcttggcagacactattgataggctatgcaaatgtaaacttct

SEQ ID NO: 405811 - DNA, 554 bp, Homo sapiens
cattgcaatcagctgttgccatgtaccttttgcatttggtggtcagggtcttcggaatcgtatgaatctgatatcaaatccyagttgtattgctgactagctgtgaaaaaagattttaaacttattattttcagtttactcatttattaagtaccaatattaatattgaaactagagaaatagattaaatggcatacttgtatagtaattgttacataggaaaactctcaataaatcaatgctgttattattaccattaatattccctagatgtgaagattgtcttcagaggaaacatactggaaaaaaaaaaatgagttttacagaagtttttcagcagaagttgattggttttacacacacatacacacatacatgcacacatattttcacacatataaatatgtatattttacatatatatatgcacacgcatttgtttctatttaaaatgaaaaaagtatgttagtcatgtgtgcccaattttctgatacactaaaaaatggaaatatcttggcagacactattgataggctatgcaaatgtaaacttct

SEQ ID NO: 405812 - DNA, 604 bp, Homo sapiens
aaagttgaaagtcttcccactgagggctagaacaagttaaggatgcccattttcaccacttctacttaacatagtactggaagtcctacccagagcaatcaagcaagaggaagaaataaagggcatccaagctggaaaagaggaagacaaattatctctgtttgctgatgatttaagcatatacttagataarcctaagaattccaccaaaagactcttctatttgatgaatgaattcataaaatcttaggttacaaaatgaatgtacacaaattagtactactgcatagcaccaacaatgatcaagctgagaatcaaatcaagaactcaatttcttttacaatagcagcagaaaaaaaattgaaatacacttaaccaaataagtgaaagatctccataaggagagctacaaaaactgctgaaataaattagagatgatataaacaaatggaaatacatcccatgctcatggataggaagaatcatatttgtgaaaatgaccttactgctaaaagcaatctacagattcaatgcacttcctatcaaaatactgacatcatttttcatagaattagagaaagcaattctaaattcttatgaaacc

SEQ ID NO: 405813 - DNA, 662 bp, Homo sapiens
attacattatatcaaatgaaaaaaggtgatttttttatgtcatttaatttgtcccacaatattgactttttactcttctccatgtcctgatactcataatattcctcatttttctccattaaactccatctttcagggacacttctaatacattattttatactaaattgtaaactagaattaatttttgaagtattgccacttgcagggggatgtatatttaatttacggaattataaatctagacaataatgtacattgttaggattttctatcagaattattttaattaataaatgttacctttaaatttttttaaatcatccttttttaagcatttattcagttgggactttcagttcatgtactttcctctaaattaaaatcagatatcatttgtagaattttatgcratgactaagatggttttttgggagatgatattcattaccaaattttctgaaaatatgtagtatttgcattatatcatgatttcttatattacaatagggttttaaaaaaatttcaataacattaaaattatttctaaatacatcttaatttaaagtagttaattttaaaatatttagtcatttacttatagaatttaatttaaattaccgaggtgtgtgcatgagatcaaataattattctacatttgc

SEQ ID NO: 405814 - DNA, 662 bp, Homo sapiens
attacattatatcaaatgaaaaaaggtgatttttttatgtcatttaatttgtcccacaatattgactttttactcttctccatgtcctgatactcataatattcctcatttttctccattaaactccatctttcagggacacttctaatacattattttatactaaattgtaaactagaattaatttttgaagtattgccacttgcagggggatgtatatttaatttacggaattataaatctagacaataatgtacattgttaggattttctatcagaattattttaattaataaatgttacctttaaatttttttaaatcatccttttttaagcatttattcagttgggactttcagttcatgtactttcctctaaattaaaatcagatatcatttgtagaattttatgcgatgactaagatggttttttgggagwtgatattcattaccaaattttctgaaaatatgtagtatttgcattatatcatgatttcttatattacaatagggttttaaaaaaatttcaataacattaaaattatttctaaatacatcttaatttaaagtagttaattttaaaatatttagtcatttacttatagaatttaatttaaattaccgaggtgtgtgcatgagatcaaataattattctacatttgc

SEQ ID NO: 405815 - DNA, 662 bp, Homo sapiens
attacattatatcaaatgaaaaaaggtgatttttttatgtcatttaatttgtcccacaatattgactttttactcttctccatgtcctgatactcataatattcctcatttttctccattaaactccatctttcagggacacttctaatacattattttatactaaattgtaaactagaattaatttttgaagtattgccacttgcagggggatgtatatttaatttacggaattataaatctagacaataatgtacattgttaggattttctatcagaattattttaattaataaatgttacctttaaatttttttaaatcatccttttttaagcatttattcagttgggactttcagttcatgtactttcctctaaattaaaatcagatatcatttgtagaattttatgcgatgactaagatggttttttgggagatgatattcattaccaaattttctgaaaatatgtagtatttgcattatatcatgatttcttatattacaatagggttttaaaaaaatttcaataacattaaaattatttctaaatacatcttaatttaaagtagttaattttaaaatatttagtcattwacttatagaatttaatttaaattaccgaggtgtgtgcatgagatcaaataattattctacatttgc

SEQ ID NO: 405816 - DNA, 477 bp, Homo sapiens
ccctaaaaagaatgaaataatgtcatttgcagcaactccaactggagctggaggccattattcyaagtgaagtaactcaggaatggaaaaccaaatatcatatattctcacttttaagtggtagctaagccatgggtatgcatacagagtggtataatggacattggagaccactaatggggagagtaggaggtgggtgagggataaaacactacatattgggtacaatgtacactacttgggtgacaagggcaccaaaatctcagactttaccactctgtaaccaaaaaccacttgttccccaaaagctattgtgttatgtatgtatattacatatgtctaagtatagccatagatatccaggattttttttatccttaaaaaaccatatgatttaagagaacttaaagttattaaaaatatattattattttaattctccatctcccctggtagtgtgctatgcaaataataatg

SEQ ID NO: 405817 - DNA, 477 bp, Homo sapiens
ccctaaaaagaatgaaataatgtcatttgcagcaactccaactggagctggaggccattattctaagtgaagtaactcaggaatggaaaaccaaatatcatatattctcacttttaagtggtagctaagccatgggtatgcatacagagtggtataatggacattggagaccactaakggggagagtaggaggtgggtgagggataaaacactacatattgggtacaatgtacactacttgggtgacaagggcaccaaaatctcagactttaccactctgtaaccaaaaaccacttgttccccaaaagctattgtgttatgtatgtatattacatatgtctaagtatagccatagatatccaggattttttttatccttaaaaaaccatatgatttaagagaacttaaagttattaaaaatatattattattttaattctccatctcccctggtagtgtgctatgcaaataataatg

SEQ ID NO: 405818 - DNA, 617 bp, Homo sapiens
gcatgtatatgtttattgcagtacaattcacaattacaaagatacagaaccaacctaagtgctcctcaaccaatgagtggataaagaaatgtggtaaacatacaccatgacatactactcagccctaaaaagaatgaaataatgtcatttgcagcaactccaactggagctggaggccattattctaagtgaagtaactcaggaatggaaaaccaaatatcatatattctcacttttaagtggtagctaagccatgggtatgcatacagagtggtataatggacattggagaccactaatggggagagtaggaggtgggtgagggataaaacactacatattgggtacaatgtacactacttgggtgacaagggcaccaaaatctcagactttaccactctgtaaccaaaaaccacttgttccccaaaagytattgtgttatgtatgtatattacatatgtctaagtatagccatagatatccaggattttttttatccttaaaaaaccatatgatttaagagaacttaaagttattaaaaatatattattattttaattctccatctcccctggtagtgtgctatgcaaataataatgaggagatattaaaggtcc

SEQ ID NO: 405819 - DNA, 477 bp, Homo sapiens
ccctaaaaagaatgaaataatgtcatttgcagcaactccaactggagctggaggccattattctaagtgaagtaactcaggaatggaaaaccaaatatcatatattctcacttttaagtggtagctaagccatgggtatgcatacagagtggtataatggacattggagaccactaatggggagagtaggaggtgggtgagggataaaacactacatattgggtacaatgtacactacttgggtgacaagggcaccaaaatctcagactttaccactctgtaaccaaaaaccacttgttccccaaaagctattgtgttatrtatgtatattacatatgtctaagtatagccatagatatccaggattttttttatccttaaaaaaccatatgatttaagagaacttaaagttattaaaaatatattattattttaattctccatctcccctggtagtgtgctatgcaaataataatg

SEQ ID NO: 405820 - DNA, 429 bp, Homo sapiens
tggccacaggtacacatgtgagacaaatgggagagtggcaactcccaaccccctcccctcccgtctggggcacatagccaagggccccacttggctaggtggccagcatttcctgctcactcttccctctccccatgcacccacagtgtctttcctcccctggctgagccagaaaggaggagacagcaattaaaatgttctctccctatwggaggaactcatttgcataagaataaaaggtttctcctccaggcatcttccccaccctgcacttaagctgttttattttatttttttttcttttctccactttgtaaggagttaacttttatgagaggttttttgttggtttttgtttttgttttttcttattaggccaggaccccaattcccaagacagccttttctctcccttgtttaaggaagacc

SEQ ID NO: 405821 - DNA, 618 bp, Homo sapiens
tgttttttgtccttaggagcttgaccttgtaaccacttgataatactttcttttggcctctgccattttacaatggtggccygggtttaatcccggcttagggaatgagtatattttggccaatatctgtgtgacttctaccatttgctgattctcttcccctctataaacaactttagcttcctttcttaaatcttcctttgtctgaaccaactttaaagatcttagattctgtaaaaactgcttagcacctctttgaaaataacttttacacttacagttaagtcataaccttagttgaggcttgttggtttcacctgtgaggttatttttaataaagttcaaaagccagaaatattggctgctcggcatggctaaagttgggtaatagatatgaaacgattttcttagagcacagctgaattaaaagtggatatccaagttataggtatatttaaaggcctttaaatttttctctgcatggatcttgtttttctggaaaaaggttctttctctgttgaatgattttttttttcccattttgtcttgtcattcagtgcatacatgagaggctctaagataacttctgatagcccggggctcctgggaaaaaacaaa

SEQ ID NO: 405822 - DNA, 593 bp, Homo sapiens
atgagtatattttggccaatatctgtgtgacttytaccatttgctgattctcttcccctctataaacaactttagcttcctttcttaaatcttcctttgtctgaaccaactttaaagatcttagattctgtaaaaactgcttagcacctctttgaaaataacttttacacttacagttaagtcataaccttagttgaggcttgttggtttcacctgtgaggttatttttaataaagttcaaaagccagaaatattggctgctcggcatggctaaagttgggtaatagatatgaaacgattttcttagagcacagctgaattaaaagtggatatccaagttataggtatatttaaaggcctttaaatttttctctgcatggatcttgtttttctggaaaaaggttctttctctgttgaatgattttttttttcccattttgtcttgtcattcagtgcatacatgagaggctctaagataacttctgatagcccggggctcctgggaaaaaacaaagaaggtgccgcagaccccattttggggaaaaaacaccctctgttttcctcacgaaaccccaggaattaaaagtggatag

SEQ ID NO: 405823 - DNA, 618 bp, Homo sapiens
tgttttttgtccttaggagcttgaccttgtaaccacttgataatactttcttttggcctctgccattttacaatggtggcccgggtttaatcccggcttagggaatgagtatattttggccaatatctgtgtgacttctaccatttgctgattctcttcccctctataaacaactttagcttcctttcttaaatcttcctttgtctgaaccaactttaaagatcttagattctgtaaaaactgcttagcacctctttgaaaataacttttacacttacagttaagtcataaccttagttgaggcttgttggtttcacctgtgaggttatttttaataaagttcaaaagccagaaatattggctgctcggcatggctaaagttgggtaatagatatgaaacgattttcttagagcacagctgaattmaaagtggatatccaagttataggtatatttaaaggcctttaaatttttctctgcatggatcttgtttttctggaaaaaggttctttctctgttgaatgattttttttttcccattttgtcttgtcattcagtgcatacatgagaggctctaagataacttctgatagcccggggctcctgggaaaaaacaaa

SEQ ID NO: 405824 - DNA, 239 bp, Homo sapiens
cctttggttagagtgatttttatcacccctagtttgaaagggccagtggcaaagcaagtttactaactttaggataaagtagactcatcaggaaaagagcaaccacctaagcttaagggacaaagccaatcacccstgggaagccagtgttaaaaatacttgatcttgctctctgctttcctgagaatacaaatcattcactttaactcattgaattcactcagcagtcagaagaaaag

SEQ ID NO: 405825 - DNA, 527 bp, Homo sapiens
gaattcactcagcagtcagaagaaaaggaagcctcttgttggaattcatactaagaagatcagaaagtgtagtggaaaagagaggactaraactgcaggtgcaagtagaagtcagtgaccaaaaagaagtgtatttgtattgttcatttgacctcatttattttagtatgcaagcgtatgcttaaaaatatttcagccttctttttactatatatgcaattcgtcattatttattgagagattatatattcatcattacttcaatgatctcatttttagctttcctcttctttattaatggatgcagtaacttctggcattcccctgagaatattaattctacttatttggaagtactctttttattgctctctgctgtctttcttttgtatttgatacatctttcatttgctttatgttattttaatcttaccctatgcacttacaatgatggcacttctccgaatgactgttgattttcttcctttctttctttttttcatgttgtctacatttttttttcaagg

SEQ ID NO: 405826 - DNA, 527 bp, Homo sapiens
gaattcactcagcagtcagaagaaaaggaagcctcttgttggaattcatactaagaagatcagaaagtgtagtggaaaagagaggactaaaactgcaggtgcaagtagaagtcagtgwccaaaaagaagtgtatttgtattgttcatttgacctcatttattttagtatgcaagcgtatgcttaaaaatatttcagccttctttttactatatatgcaattcgtcattatttattgagagattatatattcatcattacttcaatgatctcatttttagctttcctcttctttattaatggatgcagtaacttctggcattcccctgagaatattaattctacttatttggaagtactctttttattgctctctgctgtctttcttttgtatttgatacatctttcatttgctttatgttattttaatcttaccctatgcacttacaatgatggcacttctccgaatgactgttgattttcttcctttctttctttttttcatgttgtctacatttttttttcaagg

SEQ ID NO: 405827 - DNA, 527 bp, Homo sapiens
gaattcactcagcagtcagaagaaaaggaagcctcttgttggaattcatactaagaagatcagaaagtgtagtggaaaagagaggactaaaactgcaggtgcaagtagaagtcagtgaccaaaaagawgtgtatttgtattgttcatttgacctcatttattttagtatgcaagcgtatgcttaaaaatatttcagccttctttttactatatatgcaattcgtcattatttattgagagattatatattcatcattacttcaatgatctcatttttagctttcctcttctttattaatggatgcagtaacttctggcattcccctgagaatattaattctacttatttggaagtactctttttattgctctctgctgtctttcttttgtatttgatacatctttcatttgctttatgttattttaatcttaccctatgcacttacaatgatggcacttctccgaatgactgttgattttcttcctttctttctttttttcatgttgtctacatttttttttcaagg

SEQ ID NO: 405828 - DNA, 566 bp, Homo sapiens
tattcatcattacttcaatgatctcatttttagctttcctcttctttattaatggatgcagtaacttctggcattcccctgagaatattaattctacttatttggaagtactctttttattgctctctgctgtctttcttttgtatttgatacatctttcatttgctttatgttattttaatcttaccctatgcacttacaatgatggcacttctccgaatgactgttgattttcttcctttctttctttttttcatgttgtctacatttttttttcaaggtgagtttctgctagactgttattactgagcaatcctttggtggagaaggaggttcatgctgctacaggccacaatttgcctcatttgcagtcagatcaggctttttgtcagagagaggacatgcccattaggcaatatgtattcagatayttccaactgatcgctgccttttctttctgattcaaattcccattctcaatatatttacctaatgtatgcctccattttgcctttttaagcaagactaaaaaatcaatacccttgaaaaaaattgattaatttggc

SEQ ID NO: 405829 - DNA, 438 bp, Homo sapiens
aattaaacttaaacaatagaaccttttattttgagatgcaaaagcatgaatcaaagacatctgtaaagcttaaacgtattcagattgtaaagctaacccatgtaaaccaaactaggccaggaattagactatattagcgccccagactcccccaagtgtcccttcctaaaagaagctcctctcaccytaagttttatgtataatttttttgctgtgcttcaaaaaggtatagcatgtatgcatctctgaacaacataccttagtgttttttggcctgctttgataattactatgaaatcctctttctgtattattttgtgccacactccttttgttcaacatatgtttatgagtgacagccctgttgttgcaagcagttgtaatttatttattttcactgctctataatatttgattgtttatatagatgagaatttt

SEQ ID NO: 405830 - DNA, 499 bp, Homo sapiens
gaacaacataccttagtgttttttggcctgctttgataattactatgaaatcctctttctgtattattttgtgccacactccttttgttcaacatatgtttatgagtgacagccctgttgttgcaagcrgttgtaatttatttattttcactgctctataatatttgattgtttatatagatgagaattttctattttattccttatatacatttgtgttattttaaagtttggttgcttaggagcaaagtcaatatgaaaatacttggacatatgctctcagaattatatgcataagtttatctacaacatataactatccaaggaattttaggagcaaacatatgtggatacttatttaatcacagactaactttttttcaaatcagttgtatcaatttatacttcttcctgtggtacctaagatttcataaaattatactttcaatccatgggtttagcaaaataattcaaagtttaataatatcaaattgacatc

SEQ ID NO: 405831 - DNA, 499 bp, Homo sapiens
gaacaacataccttagtgttttttggcctgctttgataattactatgaaatcctctttctgtattattttgtgccacactccttttgttcaacatatgtttatgagtgacagccctgttgttgcaagcagttgtaatttatttattttcactgctctataatatttgattgtttatatagatgagaattttctattttattccttatatacatttgtgttattttaaagtttggktgcttaggagcaaagtcaatatgaaaatacttggacatatgctctcagaattatatgcataagtttatctacaacatataactatccaaggaattttaggagcaaacatatgtggatacttatttaatcacagactaactttttttcaaatcagttgtatcaatttatacttcttcctgtggtacctaagatttcataaaattatactttcaatccatgggtttagcaaaataattcaaagtttaataatatcaaattgacatc

SEQ ID NO: 405832 - DNA, 614 bp, Homo sapiens
acttcttcctgtggtacctaagatttcataaaattatactttcaatccatgggtttagcaaaataattcaaagtttaataatatcaaattgacatctrtaatttaagaccactttagatgaaaatttttgatatctattaaattttacaatgtgaataacttataagcacaattttccttaactcatcatctgtcttatgaaatactaacatatgtgcaataaaatgcaacaggatgtcaattacagctttttaaaaatagtcaaaagcccattaaatagattaaatgtccaccaatagagaaatggctaagtaaatatgacatatctaagagttaaagaaatgataaagattaacgtgtgttgaatcactaagatttccaatacatattaaattgaaaaataaaaacacattattgtggttaaaaatacacaaagtattagattatcaaatcagactcacatgcatcggagatcttatgcaaacttaactaataattttatggataaaaattattgtgaggtacaggtggagcaaggtaaggtcagatagcactgtgagaatccctgggtcctttcctcccacatcaggtatgctttgaacaaggataataga

SEQ ID NO: 405833 - DNA, 614 bp, Homo sapiens
acttcttcctgtggtacctaagatttcataaaattatactttcaatccatgggtttagcaaaataattcaaagtttaataatatcaaattgacatctgtaatttaagaccactttagatgaaaatttttgatatctattaaattttacaatgtgaataacttataagcacaattttccttaactcatcatctgtcttatgaaatactaacatatgtgcaataaaatgcaayaggatgtcaattacagctttttaaaaatagtcaaaagcccattaaatagattaaatgtccaccaatagagaaatggctaagtaaatatgacatatctaagagttaaagaaatgataaagattaacgtgtgttgaatcactaagatttccaatacatattaaattgaaaaataaaaacacattattgtggttaaaaatacacaaagtattagattatcaaatcagactcacatgcatcggagatcttatgcaaacttaactaataattttatggataaaaattattgtgaggtacaggtggagcaaggtaaggtcagatagcactgtgagaatccctgggtcctttcctcccacatcaggtatgctttgaacaaggataataga

SEQ ID NO: 405834 - DNA, 417 bp, Homo sapiens
taaaaaattatgtataattgtgatcaatatggatgtttttaartatgttcaactatttatactattttccttctcaaagaatcatcagaatgctgaacacataaaataaacattggataaattaaaaataatttttcattctaaacaatctaatttaagtatagttcctatttagacttaaccataacactttgaaaaacttgaaagaattcactgattttttataaaatttaaaattaatacatattacacaatttgtaatatatatttttactttgaacatgagggcattttaaatggagcttctttgaaatataattcacatataaaaatttcagaaaattttaaggacctttttctttttactaatgctttgattaggatttcagtctgcatacaaatttgtcaagattttag

SEQ ID NO: 405835 - DNA, 417 bp, Homo sapiens
taaaaaattatgtataattgtgatcaatatggatgtttttaaatatgttcaactatttatactattttccttctcaaagaatcatcagaatgctgaacacataaaataaacattgrataaattaaaaataatttttcattctaaacaatctaatttaagtatagttcctatttagacttaaccataacactttgaaaaacttgaaagaattcactgattttttataaaatttaaaattaatacatattacacaatttgtaatatatatttttactttgaacatgagggcattttaaatggagcttctttgaaatataattcacatataaaaatttcagaaaattttaaggacctttttctttttactaatgctttgattaggatttcagtctgcatacaaatttgtcaagattttag

SEQ ID NO: 405836 - DNA, 643 bp, Homo sapiens
ttacttagtttgtcttgtccaactaatggttagttgaatgccatgcacataacacatccctctgagtacttattgaataaatgtagaatgtcattctggaataaattgaggcaagaaactagaggaatagcagtgtgaaaagtgagattaatttatttggtatagagtcagtaaatttaagtgggccatttgaaacaacaagcttaaaagaaaaccaaataagcattttcaatgcatagaaatgcaaccatttttctccttctgtactttatccattcaaacattgcttgaaaaaaaatataactttcagtcttgcttttttatctccaccaaactcagataattttggtcgttgatgacctttctaagctaattcctattttagaatgctatggacgaatgaatctcaaaacttcttttaaccaatttattttattccatttcctaaggaatagaaactttttacctccaacccaggggagctatgaaacaaactccccatttatttccaatccaaacacatttgataaaacaggcagaggaattttttatcagatctgtattttaaattttcatgactgttgtycaagagtttccattcttgttcataaatatgtagaggcttaaaattcttttctgaaaa

SEQ ID NO: 405837 - DNA, 643 bp, Homo sapiens
ttacttagtttgtcttgtccaactaatggttagttgaatgccatgcacataacacatccctctgagtacttattgaataaatgtagaatgtcattctggaataaattgaggcaagaaactagaggaatagcagtgtgaaaagtgagattaatttatttggtatagagtcagtaaatttaagtgggccatttgaaacaacaagcttaaaagaaaaccaaataagcattttcaatgcatagaaatgcaaccatttttctccttctgtactttatccattcaaacattgcttgaaaaaaaatataactttcagtcttgcttttttatctccaccaaactcagataattttggtcgttgatgacctttctaagctaattcctattttagaatgctatggacgaatgaatctcaaaacttcttttaaccaatttattttattccatttcctaaggaatagaaactttttacctccaacccaggggagctatgaaacaaactccccatttatttccaatccaaacacatttgataaaacaggcagaggaattttttatcagatctgtattttaaattttcatgactgttgttcaagagtttccattcttgytcataaatatgtagaggcttaaaattcttttctgaaaa

SEQ ID NO: 405838 - DNA, 612 bp, Homo sapiens
ctctcctttaataataagagtgcattataatgcactctgcttgaaccaaatgtctagattttggagagctcttaaaaacaaacaaacaaaaaaatgctatctcagtagtttagaaatgatgttttaggatctccctcttctctgctatgagtgtgtatgcatgtgtgtgcacgcatgtgtgcatatatatatatatatatatatatatatatatawgaaaaatccaatttaagtgttcctaaaacttcagatctagagaagaactgccttgtaatgtcattttgcagggatgacagttccctggtctgtattaatggcaaatccctaaaactaattacacctagttgcaggtgtaaccttttctgtttacaactggtgacgacaaatatgccttacactacattctcttccaaaggaacaaaacggcggtcatttctaaggcatttggcacagcagtcaaccagggacagcaagggtgccctttgctttcccctttatcaaaatatattcattccagttttcaaattgctgtttttgagtcctaaatctctacccacactaatttctgtgggtcagactttgaccctgattggaacaaaatctggagtcaga

SEQ ID NO: 405839 - DNA, 632 bp, Homo sapiens
ttgggactatcctagttgaataattgaagatgtgtgcaaaaatatactcacaaggatattgaacctgagctgtttataataacaaaatagctacttacaattatgtgcatttacaattgtcatatatacttatacatatttaactatcataattataatagcaaattaaaaaataggtaagggatggatagatttgaaaatagcccagatgtctgtctaaacacaaaatactctgccataattattatttttgagattatatgtgtaattttaaagtaactttctgagcataawacaaaacccagaaaacatacatgatttttactacatactaatttaaaatatttttggtgtagcaaacaaacacaaaaacaaaacaggataaacaaagtcaagagacaaactgaggaaaatgcttgcaacacatatatttcaaaagatacacaaagaactcctacagattgattgaagaaggagaaagaggagaagaggctgctaataggaaaatatacaaggagcataaacagataattcatagaaatccagtggccaataatcaaatgaaaagatgcctggatttcctaataatcaatgaaaaccaaatgaatgccataattagatattttgcagca

SEQ ID NO: 405840 - DNA, 510 bp, Homo sapiens
ctggctagttgacttgatatcccccaggtagctttcctacaataaccctgtgggggcttgactcaacacttctactcctaagtgagaaacagaaatgaaaacatatttcctcaccaaaacttgtacctgaatgttcataggagtattattcataatwgctacaaagtggaaacaacccaaatacctattaaccgatgaataaattaaaaatggtatatacagtggaatattagccagtaatgaaaagatatgcagtattaatacatgctacaacactgctgaatctgaaaacacagcccaaaagaagccagtcaccaaaaatcacattttatgtgagtccatttatacgaaatgtccagaataggcaaatccatagagaaagaaggcagattaatagatgtctagcacagagggacttgagggtaagtggggaatggctgtggaatttctcgttggggtgatgaacatattctaaaattgattgttgtgatgggctcacaattccgtgaa

SEQ ID NO: 405841 - DNA, 572 bp, Homo sapiens
  misc_feature (1)...(572): n = A,T,C or G
cctcagtttcctcatctgtaacataggaaccttgatacagctgtctactttataggactgttgtgaatataaaatgagatcatcaatgtaaaattctgcaaattatcagtggcaatattaggagtggtatacagaggaagaggtggtttctacagagatctggaaagsaggtggcctttggtctagggcttcagggaggttgtggttaattccatggtctctggagtcagactactcagggttctaatcctggagtggccccttatttgctttgggaatttgggcaagttacttctcatctggctcattttctttcactgctcaataggggaaattaaaagcacctactttatagggatgtggtgagaactgagtgagaagttggattgttgtgctggtntagtagatagtaagccctccatcaagggcagctgttactcaggtcctcctttttaagagtgacctgggccaagcacttttcgaatggctaaaaagataaggatcaaaacaaccttctaaacaccacagtgccctgtgaaaaaattgtcagcctcttaataatagttcattgt

SEQ ID NO: 405842 - DNA, 577 bp, Homo sapiens
ttctatttggagtatggatactccacatgtttcactcatttatctttgttccccatcaggctcataccttctttactctacctcctagttttactaaaaagctttccaaagatgaagttctaagataaagaataaaattctggaattatctaagctccagtaacactgaagacatgaaaatccacagaatcatagctctcagtgggttgataaatagcacttttatcctcaccttgggtttctggtgtgttatggtaatgtaacatgccacctttctatatttactgtctctgcctccttttatttatagagaaagacaaaaccagacatctatattttttgttttgtgtggttttggggggcagatgaatctataggcatataaatgtgttattttctagataatgtagtaagtgcagtctaataaagtttttctaaaggcagtgtgactacctccataaagtaaatttaaagataaaagcrctttggaagtttgtttttagttgttgaaaaaaataatgggtgcaacaaataaaatgttagaacaaatttatataaaataaaaaccacacctgtg

SEQ ID NO: 405843 - DNA, 612 bp, Homo sapiens
acagacatttcattctagaagaaaaagaatgatctttctcatgctgttttgcaaaagacctaaacaaaagaaacagcataaaagtttttaacgttcctttgagtttggaagaagaggtataagggcttgtattgaatacttttcaaataaactagcgaataacatgtacttgctaataacatcttaagtttgaaagctccagacagaaagatgacctttctacacatctttttcccaagaacttttgccatagtccttcctgtgggagcctgggggaaataagtacaatttccttaatgctccttataattgccagaacttactttccaaagccctactttccgaaagcatatttgtctctctttttttttaatcttcaccgggtattgaagaacagaaattttccccaagatggccaactactaaaagggcttaactactgaccaagccacagaacaattgctaagccagaactccctgccctacttagttaccaggctgtctacctcaaactagagccttggttaaagacatgaaaagccaggagaatggtcagtgttacwggatttgagaaagttgctgattgaagggatgagcaaaaatgaggaatga

SEQ ID NO: 405844 - DNA, 516 bp, Homo sapiens
aataaagaatccccttgggcagggaagggaaagcatcaggatacatagctaatgcatgtggggcataatacctargtgataggttgataggtgcagcaaaccaccgtggtacacgtttacctatgtaacaaatctgcatgtcttgcacatgtatcccagaacttaatttaatttaatttaaaaaaaaaaagaatccccttaatgaccaaagtgctttctcaagtatcaatattcccaagattatataagctctgacaattacgctgtattagtttattagggctgccataacaaaataccacagactgggtggctgaaacagaaatgtatcatttcacatatctggaggctggaagtccaagatcaaggtatagacaaagttggtttcctctgaggtctctttccttggcttgcagacggccaccttcttgttgtgtcctgacatggtctctgtctgtgttatttgtattttaatctctttgtattagataccagtcatattggattaggacacac

SEQ ID NO: 405845 - DNA, 544 bp, Homo sapiens
attaagagagcagactggagtaggactaccttgactccaatctactgctcattagctgtgtgctttggggcaagtgacttaacctctctgttgctctgttttcctatatgtaaacaacaatagtaacctaactcagaggcagtgagatgaaatgatgctgtacatgtaaaacatttacaacagtgtctgtcctgatataattgttcaaatatccaccattttattgtctataaccaataggattaaatgatatactttctaaaatcccttttgactctaaagccaagatagcaatgttgctcttctgttttatgacactcaaagttgctacctggcaatcgcatggtaacattagtagacattatatcaccttaggagtaaatttatttcatcccatttgcaattacctagttttttatactatagagcaccaaatggattgagttattctatccaacacattctcaggacatcctgaaatgcttttgtatcagttctttagtataatacctatggtattwtacttcagaggctataccactca

SEQ ID NO: 405846 - DNA, 595 bp, Homo sapiens
gaccattcaagctaagatagttaggcttaactcgatggcagcagagagtcattaaatgtgtccctgggagtgatataattggaattttctttattaaaggtacctaatgatcagaaggatgaattggaagaaaagaacctaagctagggagtttcaacttcaccaaaaaagtcatgttttctcaatattgaaggggattcctttcataaygttgaaatttgcaaatagttaaaggcacttgttcccaaacttcagcataatcaaaaccacctggaagtcttgttcgaacacatattgccacaattacagttagagacttcatcaccccctcagtgactgataaaatcactagacagaaaattagcgaagatataggagaacagaagaacactatgaaccaagaggatctaaatgatatttctatcaacagcagcaggatcacattcttttcagaaggctgtggaacataggccaaggtggaccaacatgctgggtcataacacaaacctcaacaaattcataaaaattgaaatgatatatgttctatgacaatcatgaaatcaaattggaaactaacaatagaaagacaacagct

SEQ ID NO: 405847 - DNA, 595 bp, Homo sapiens
gaccattcaagctaagatagttaggcttaactcgatggcagcagagagtcattaaatgtgtccctgggagtgatataattggaattttctttattaaaggtacctaatgatcagaaggatgaattggaagaaaagaacctaagctagggagtttcaacttcaccaaaaaagtcatgttttctcaatattgaaggggattcctttcataatgttgaaatttgcaaatagttaaaggcacttgttcccaaacttcagcataatcaaaaccacctggaagtcttgttcgaacacatattgccacaattacagttagagacttcatcaccccctcagtgactgataaaatcactagacagaaaattagcgaagatataggagaacagaagaacactatgaaccaagaggatctaaatgatatttctatcaacagcagcaggawcacattcttttcagaaggctgtggaacataggccaaggtggaccaacatgctgggtcataacacaaacctcaacaaattcataaaaattgaaatgatatatgttctatgacaatcatgaaatcaaattggaaactaacaatagaaagacaacagct

SEQ ID NO: 405848 - DNA, 429 bp, Homo sapiens
atgcaaataaagcagtgctgagaaggaaacatgtttgtattagaaaatagaaaagtctcgaatcaataatctaagttcctaccttaaaaaaacagaaaaagttctccactctcactgctccacttgactagcctaaaacaaaacaaaacacagaaaagggtcaaaataaacccaaaccaagcagaaggaaggaaacaataaagaaaagacaagaaaccawtgaaattgaaaacaggaaaacaatagagcaaatcaataaacaaacagctgtttcttttttttaaaaaaaaagcaataaagttgattaacttctagcaagactaacaaggacaaagggaagacacaaatcacctatctcaggaataaaataagagatttcagtatagttcctgcagagggtttcaatacagataaaaaggggatactaca

SEQ ID NO: 405849 - DNA, 429 bp, Homo sapiens
atgcaaataaagcagtgctgagaaggaaacatgtttgtattagaaaatagaaaagtctcgaatcaataatctaagttcctaccttaaaaaaacagaaaaagttctccactctcactgctccacttgactagcctaaaacaaaacaaaacacagaaaagggtcaaaataaacccaaaccaagcagaaggaaggaaacaataaagaaaagacaagaaaccattgaaaytgaaaacaggaaaacaatagagcaaatcaataaacaaacagctgtttcttttttttaaaaaaaaagcaataaagttgattaacttctagcaagactaacaaggacaaagggaagacacaaatcacctatctcaggaataaaataagagatttcagtatagttcctgcagagggtttcaatacagataaaaaggggatactaca

SEQ ID NO: 405850 - DNA, 429 bp, Homo sapiens
atgcaaataaagcagtgctgagaaggaaacatgtttgtattagaaaatagaaaagtctcgaatcaataatctaagttcctaccttaaaaaaacagaaaaagttctccactctcactgctccacttgactagcctaaaacaaaacaaaacacagaaaagggtcaaaataaacccaaaccaagcagaaggaaggaaacaataaagaaaagacaagaaaccattgaaattgaaaacaggaaaacaatagagcaaatcaataaacaaacagctgtttcttttttttwaaaaaaaagcaataaagttgattaacttctagcaagactaacaaggacaaagggaagacacaaatcacctatctcaggaataaaataagagatttcagtatagttcctgcagagggtttcaatacagataaaaaggggatactaca

SEQ ID NO: 405851 - DNA, 589 bp, Homo sapiens
ctgctccacttgactagcctaaaacaaaacaaaacacagaaaagggtcaaaataaacccaaaccaagcagaaggaaggaaacaataaagaaaagacaagaaaccattgaaattgaaaacaggaaaacaatagagcaaatcaataaacaaacagctgtttcttttttttawaaaaaaagcaataaagttgattaacttctagcaagactaacaaggacaaagggaagacacaaatcacctatctcaggaataaaataagagatttcagtatagttcctgcagagggtttcaatacagataaaaaggggatactacaaacaactttacattcataatttgacaacttagaagaaatagaccaaatcctggaaaataacaaactaccaaatctcaaccaagatgaaataaaaatctgaattgtcctataaccattaaaggaatagcatgtgtaatttaagagtttccagaaaagaaattcctgggcctggatagtttcattggagaattctaccttacattttaaaaattagcattaattttatatcatctttttcagagaatagaaaaggagggaacacctcattttatga

SEQ ID NO: 405852 - DNA, 486 bp, Homo sapiens
tagcaagactaacaaggacaaagggaagacacaaatcacctatctcaggaataaaataagagatttcagtatagttcctgcagagggtttcaatacagatwaaaaggggatactacaaacaactttacattcataatttgacaacttagaagaaatagaccaaatcctggaaaataacaaactaccaaatctcaaccaagatgaaataaaaatctgaattgtcctataaccattaaaggaatagcatgtgtaatttaagagtttccagaaaagaaattcctgggcctggatagtttcattggagaattctaccttacattttaaaaattagcattaattttatatcatctttttcagagaatagaaaaggagggaacacctcattttatgagaccaacattaccctaatacaaaaagcaaacaaatagcacaaaaaaaagcaacctatggataaaaatctctcatgaacttagacataaaatcaac

SEQ ID NO: 405853 - DNA, 607 bp, Homo sapiens
ttgttaaaatccaatttgatcctaaaaaagatgaccaggcagatagcactgaccttcatgaatcactgtgagggagtctgaccacaatcgcatctctcttggccactgcagtaaatgtgtgcaaacaaaactactgttttagccattctaaaaaaatatgcacatagggacttataaacagcatatttttactcattaagtcatttttaaaataggctgtgaatgacaacttaaaagtgcttaagaaaatactattcattctgcaaaagagttactatggcctagaatgcaaactggtcatttggractattttaaaagtagaagccagaggaggccctcctccctctaagataagcccaatctcctcagacttggcccatccactccaaagctgggctgggccatcattctttggggcttttgcagcatggacatgagcaagattttttatttgaacaaggcagaaaatcaaacttaaaataaatttaaagagtgtgctttttgttccagattttattttaaaacatttattcaggcatctctatgatttcaagcctctcagcccaaaggcattaaactgtactgaagcttaatggcctgaaaagt

SEQ ID NO: 405854 - DNA, 567 bp, Homo sapiens
gtaagtatatggaccatttcaaaatgttttaaaaacatatacacagtagtttcctcatgcatcccataactagtcaccaaacaaaagtgacagacgacaataagatggattaggaaaagcatatttatttgatcttcattgttggcacttgtaaagagcagatttaattaggaacatgaagagttccaagaaggtctgagcaggctctggagggkatgccgggacactgcagagcccagcaggagctggtggtgctggcccttctctctccttgacacgcacatctttaaagactgctttaagcttattagtcaagatagggaaatgtttgggtcacaaatatagtgagtacctgttgctgatactgagaaggttaactaaggtttctaaattaccttcaaaaccaattttccctttatttattgagtctttctgtctttcacacattgttttccagtttgtctctagttcccttgggttgctttctctcattctaaaaacatctctgtcttgaatacaaaatatgttttatcccagagagattccagcttaacaccataccccaca

SEQ ID NO: 405855 - DNA, 612 bp, Homo sapiens
tggctgacatgtattcttaaaagatattttcatgcacattgtgaaagtatccatttcttttaaaaatatggttctcagctgggtgcagtgactcacgcctgtaatcccagcactttggcaggctgaggcgggtggatcacttgaggccaggagttagaaaccaacctggccaacatggtgaaaccctgtctctactaaaaaatacaaaaattagccgggcatggtggtacacacctgtaatcccagctactcaggaggctgaggcatgagaattgcttgaacctgggaggcagaggttgcagtgagctgaaatcaagccactgcactccagcctgggcracagagcgagactccatttcaataaataaatttaattaatttaattaaaataaaataaaatatggttcccaaaataatgttatttggtatgagtcccagttcatatgtttttatagactcttctcccattccagtccaacaaaatatgtactatttgtaaccattcatatccaaatggctcttaatgagcttaagacctctattcttcaaagcctgttgttttatcaaagaaagagaagtataagagctaaaaagaaaaagaaaatagaaata

SEQ ID NO: 405856 - DNA, 578 bp, Homo sapiens
ttgcaattcggtaaaggtgaccagyagtttggtcaagaccaaaatcagcctactatagccaagtgacctcttagaacaattatatgaatttcacagaccagtaagaagccaccactaagcagaggcactcctgtgcacaacctgcccctttaaaaacacatattgccttcatgtgataagtgtgtaggcctttgataatggtaattctcctactcagatgctggcccaagaatgggacatgttcgccctatcacttctgtttccccatgtaattaagaactgaccacttgtagatgtggacccttatttggaaaaagggctcatgctctagaggacatgtcagacttctttatagatatcaacctctttgcattatttaacatttttgtatttcaagcctcttttcaaaataaattataagctaacatacttgttcatcgggcatgtttgtggaccctagacacgcatcagtattagtttcttacttccccttcaattcactggataatagatcttagtgctgaaatgcttctttcaattaaacttgcagtagatctaaagattcggattgtaagctc

SEQ ID NO: 405857 - DNA, 578 bp, Homo sapiens
ttgcaattcggtaaaggtgaccagcagtttggtcaagaccaaaatcagcctactatagccaagtgacctcttagaacaattatatgaatttcacagaccagtaagaagccaccactaagcagaggcactcctgtgcacaacctgcccctttaaaaacacatattgccttcatgtgataagtgtgtaggcctttgataatggtaattctcctactcagatgctggcccaagaatgggacatgttcgccctatcacttctgtttccccatgtaattaagaactgaccacttgtagatgtggacccttatttggaaaaagggctcatgctctagaggacatgtcagacttctttatagatatcaacctctttgcattatttaacatttttgtatttcaagcctcttttcaaaataaattataagctaacatacttgttcatcggscatgtttgtggaccctagacacgcatcagtattagtttcttacttccccttcaattcactggataatagatcttagtgctgaaatgcttctttcaattaaacttgcagtagatctaaagattcggattgtaagctc

SEQ ID NO: 405858 - DNA, 552 bp, Homo sapiens
cttaatgtattgagaaagaaagaaaaaatggtgcagtgtttgcatgtaatctatgtacatccgtatattttaaatcatctttggattacttatagtacccaatacacacaatctaaatgatatgcagtagtgtgatctcagctcactgcaacctccacctcccgggcttaagccattctaccacctcagcctcccgtgtagctaggactatagccaagcaccaccatgcctggctaatttttgtattttttgtagagatgaggttttgccacattgttcaggctggttgtgaattcctgagttcaaacagtccgcccacctcagcctcccaaagtgctgggattacaggcatgagccaccatgcttggccyatattgttatttctaatcttttaaaatattttggatctgaggttggttgaacctacgagtatgggacctgtgggtgaagagggccaactgtgttttctattgtaaaagttaaatgctacttactcacattactctcatttctacttttaggcctactgaacttgacgcactggtatttggc

SEQ ID NO: 405859 - DNA, 190 bp, Homo sapiens
ccagtgttgggggagggaacgggtggsaggtgattggatcatgggagcaaatttcccccttgcctttcttgtgacagtgaatgggttctcaagagatctgcttgtttaaaagtgtgtagcacctcccccttccctttgtctctcctgtctgccatggaaagatgctcttgcttcccctctgccttttgcc

SEQ ID NO: 405860 - DNA, 557 bp, Homo sapiens
ttctttggatgctttcttggtcctcagaggcccttcaggagctcattccttttcaacagctgctaattgatgaagaaatatttgcctgttcagtctatgccagaataaaatggccaagggaggagctagcragggcaagacaggaggactgggttgctggctgtgggctcacagagggagggaagtaagaggggagtgcaagtcaatcctcccattgttctcagatggggcagtgggtgggagagactggaaatcactacgacagattgcagagaccaggccatgctcttccccagtacttccttacctttgcctgcttctgcatttccactttgaggagaaacatgttcttaagtgaatggcagtcaccctaaggatggcacctggatgattttacttctttcttcctgttgctaaatttagtgaaaaaactcctttggaatgggggacagggaaagggagatggatgtccgaaccagtcaaccaggtccccaaagggaaaaaagcatatggataaggaacagagaaagtcttgtactctctgtgatcatcagaac

SEQ ID NO: 405861 - DNA, 583 bp, Homo sapiens
gagatatgttaaatgaggttcttcagtctagacaactgaaggaaaaaaaaagattgccttaccttttataattcactcaatatagttttgagttagtgaatataaggaattttggctttttctgtttctatgaactgtttttctttaaattacaccttcaggctttatatgagtgatgtgacattcttttctcttatacattttttcccttctcacctgcaacacatacactattcctctacttcatggattgctaacatgyggattgtccttataatgacagaaatttagaaaaaaaaagaatttctgaaatcacatagttcaacttcctcgttgtttccaaatgggtaaaaccaaagcacagataatgtgttatgcttttggagccacatggggactgaagagctgcattcttagaagctatttcctctgaagaaattctcttctgaaaatgttcattaaaaaaacaggaatccccgttttataacaatgggaaaggaatttagggcttacatgttgcatctattggctaattgtgaaaatggactgggtagggataagttaggaatagaatcaacgagac

SEQ ID NO: 405862 - DNA, 583 bp, Homo sapiens
gagatatgttaaatgaggttcttcagtctagacaactgaaggaaaaaaaaagattgccttaccttttataattcactcaatatagttttgagttagtgaatataaggaattttggctttttctgtttctatgaactgtttttctttaaattacaccttcaggctttatatgagtgatgtgacattcttttctcttatacattttttcccttctcacctgcaacacatacactattcctctacttcatggattgctaacatgtggattgtccttataatgacagaaatttagaaaaaaaaagaatttctgaaatcacatagttcaacttcctcgttgtttccaaatgggtaaaaccaaagcacagataatgtgttatgcttttggagccacatggggactgaagagctgcattcttagaagctatttcctctgaagaaattctcttctgaraatgttcattaaaaaaacaggaatccccgttttataacaatgggaaaggaatttagggcttacatgttgcatctattggctaattgtgaaaatggactgggtagggataagttaggaatagaatcaacgagac

SEQ ID NO: 405863 - DNA, 572 bp, Homo sapiens
tttccatacaaacaccttgaatctcaggtgttcttaagattcaaaacacagaaagtaggctggtcaggactggtgtacaaataagaaaaacgggtattctgtgttattttctaattatctgatacttttttttttttttttttttgagacagcatctcactccgttttccargctggagtgccgtggtgcgatctctgctcactgcaacctccgcctctagggttcaagtgattctcccgcttcagcctcctgagtagctgggattacaggcgcccaccaccatgcctggctaatttttggtatttttagtagaaacaggattttgccatgttaggctgatctcgaactcttgacctcaggtgatccacccactttggcttcccaaagtgctgggattacaggaacgagctaccacacctggcctgattctttttcagaaagcatatagcagtaattctcaatgcatggtccccagaccagtagcatcagcgtcacccagagattcgttagaaatgcaaatcacctggccctgccccaaacgtactgaatcaaatacactgggggtagagtt

SEQ ID NO: 405864 - DNA, 657 bp, Homo sapiens
taatttttggtatttttagtagaaacaggattttgccatgttaggctgatctcgaactcttgacctcaggtgatccacccactttggcytcccaaagtgctgggattacaggaacgagctaccacacctggcctgattctttttcagaaagcatatagcagtaattctcaatgcatggtccccagaccagtagcatcagcgtcacccagagattcgttagaaatgcaaatcacctggccctgccccaaacgtactgaatcaaatacactgggggtagagttcagtgatgtgtgtttttcataaactcatcaggtagttctgatgcgtgctgaagttcaagaagaactactggcatggagtattatttcctttgaagctctgatctttcatctcctgttgcctcagcacgtttaaagttgagaggctagtggcaagtgaaaaatgatgaagattaatgtttttccttcctggtctagggttgcttagctaatgacttagtccatgtggctaataggtattacaatgaatttcaatgagctacatacacacacttttgggcagtcagatgcaatttctagttgacacatcaaatttgtcattaaaaattaaaagcgacatagatatacatctctgaaataaaaggataatttagttgac

SEQ ID NO: 405865 - DNA, 657 bp, Homo sapiens
taatttttggtatttttagtagaaacaggattttgccatgttaggctgatctcgaactcttgacctcaggtgatccacccactttggcttcccaaagtgctgggattacaggaacgagctaccacacctggcctgattctttttcagaaagcatatagcagtaattctcaatgcatggtccccagaccagtagcatcagcgtcacccagagattcgttagaaatgcaaatcacctggccctgccccaaacgtactgaatcaaatacactgggggtagagttcagtgatgtgtgtttttcataaactcwtcaggtagttctgatgcgtgctgaagttcaagaagaactactggcatggagtattatttcctttgaagctctgatctttcatctcctgttgcctcagcacgtttaaagttgagaggctagtggcaagtgaaaaatgatgaagattaatgtttttccttcctggtctagggttgcttagctaatgacttagtccatgtggctaataggtattacaatgaatttcaatgagctacatacacacacttttgggcagtcagatgcaatttctagttgacacatcaaatttgtcattaaaaattaaaagcgacatagatatacatctctgaaataaaaggataatttagttgac

SEQ ID NO: 405866 - DNA, 657 bp, Homo sapiens
taatttttggtatttttagtagaaacaggattttgccatgttaggctgatctcgaactcttgacctcaggtgatccacccactttggcttcccaaagtgctgggattacaggaacgagctaccacacctggcctgattctttttcagaaagcatatagcagtaattctcaatgcatggtccccagaccagtagcatcagcgtcacccagagattcgttagaaatgcaaatcacctggccctgccccaaacgtactgaatcaaatacactgggggtagagttcagtgatgtgtgtttttcataaactcatcaggtagttctgatgcgtgctgaagttcargaagaactactggcatggagtattatttcctttgaagctctgatctttcatctcctgttgcctcagcacgtttaaagttgagaggctagtggcaagtgaaaaatgatgaagattaatgtttttccttcctggtctagggttgcttagctaatgacttagtccatgtggctaataggtattacaatgaatttcaatgagctacatacacacacttttgggcagtcagatgcaatttctagttgacacatcaaatttgtcattaaaaattaaaagcgacatagatatacatctctgaaataaaaggataatttagttgac

SEQ ID NO: 405867 - DNA, 618 bp, Homo sapiens
gtttttccttcctggtctagggttgcttagctaatgacttagtccatgtggctaataggtattacaatgaatttcaatgagctacatacacacacttttgggcagtcagatgcaatttctagttgacacatcaaatttgtcattaaaaattaaaagcgacatagatatacatctctgaaataaaaggataatttagttgaccattacaatatccatatttttaaaatgatggggttatggtccagattccttggctctattctgcctggacttatgtgaagttactctcatgggaaattttaccaccatggtatgacacagaagagtcaatccttttttgagtcataacaatacaaatagcattatcattatacctaatggagctgcctgtggtcaacagatgaaaataatttagctgaacaaacgaaccctcctttttccctgaatgtcttaataacagctaactacaatttgaagtaacatcaacagttagtgggcttatggataactatggattctaccatttaaaaygattgcaccaataaaatattgtgaaggattaatgcaccttctaaatcaatgatcataacacaagttctttagagtttcaaaatgcat

SEQ ID NO: 405868 - DNA, 587 bp, Homo sapiens
aatatgacattttaaatatactttatttctaaaatgatttgtgggctttaaaatttatagaaagaagataatatttcccacatgaaatcaataatttcttcatcacttttctaaatgctaagtggacttcaagtctgaatataaaacatcagtaaaattgaaaaggaaatctcacattatgttccttaattggttgtgcttacctaattcagcagaataattttaaaataagatcaatgccctcaaactttacataaagcattaacacactttagggaatgaggccttattttatacaaataaaactgagattgcaatgaaggcacagctcataaaggttcatttttttaaagttttgcatcatcacacatatattctagtgcttcaccattgyagaatgctaaatagcaagttcatttttcaaaatactgaaaaagaaacagacattggggaagtgtaaaaacatctccttggggttaaaagcaaaatcacatgggaaggagccaatcttaaaagaaacatttgtagtcacataagtttagaaataaaagggatatttactttgaaatgcatcctagcattacgca

SEQ ID NO: 405869 - DNA, 587 bp, Homo sapiens
aatatgacattttaaatatactttatttctaaaatgatttgtgggctttaaaatttatagaaagaagataatatttcccacatgaaatcaataatttcttcatcacttttctaaatgctaagtggacttcaagtctgaatataaaacatcagtaaaattgaaaaggaaatctcacattatgttccttaattggttgtgcttacctaattcagcagaataattttaaaataagatcaatgccctcaaactttacataaagcattaacacactttagggaatgaggccttattttatacaaataaaactgagattgcaatgaaggcacagctcataaaggttcatttttttaaagttttgcatcatcacacatatattctagtgcttcaccattgtagaatgctaaatagcaagttcatttttcaaaatactgaaaaagaaacagacattggrgaagtgtaaaaacatctccttggggttaaaagcaaaatcacatgggaaggagccaatcttaaaagaaacatttgtagtcacataagtttagaaataaaagggatatttactttgaaatgcatcctagcattacgca

SEQ ID NO: 405870 - DNA, 528 bp, Homo sapiens
tagtgagttatagaacaaatgaatgctataaaattcaatgcagaaaatctcaaattgtgtaatataacatagttctcatatttgaatgtatgtgattacagacttttattgtagcaactatgtttgtggtcctgttctagacactggaacatccaaagtgtgtatgagtatgtgtgcatccttagaaaaaagcttgtaattttacaactgatactattcactaattatcatacaagataaaagtaagtgccattggagaaatacaaaggggcatataaaattagaaagagagaaaaagactacttttttttggcaaactcttgaaatcatgatgttttattcagtctgttacatraaactcaaaaaccgaccaggaaaaaatgaagtatgccactgtgcacagtttaggtcactgaaagatccatttatcctttcatgtgacttagttttaggagcatttgtcatatgccaggctttgtgctaggtaaattaccatgaaagtctatgccaaatatctccatttgcccc

SEQ ID NO: 405871 - DNA, 637 bp, Homo sapiens
gcaaccctctcttcttacaatgtaagccctagtaggacaggcagtttgcgtattcatctttgaaatctaagtgcccagtagagtactggatgcaaagcaggtgcttagtgagttatagaacaaatgaatgctataaaattcaatgcagaaaatctcaaattgtgtaatataacatagttctcatatttgaatgtatgtgattacagacttttattgtagcaactatgtttgtggtcctgttctagacactggaacatccaaagtgtgtatgagtatgtgtgcatccttagaaaaaagcttgtaattttacaactgatactattcactaattatcatacaagataaaagtaagtgccattggagaaatacaaaggggcatataaaattagaaagagagaaaaagactacttttttttggcaaactcttgaaatcatgatgttttattcagtctgttacatgaaactcaaaaaccgaccaggaaaaaatgaagtatgccactgtgcacagtttaggtcactgaaagatccatttatcctttcatgtgacttagttttaggagcatttgtcatatgccaggctttgtgctaggtaaattaccatgaaagtytatgccaaatatctccatttgcccctcct

SEQ ID NO: 405872 - DNA, 437 bp, Homo sapiens
atatattttcaaaagaaacaaaagcacttgacatttgtttacatctaaagttacgtataaagtttacctataaataaccactcacactgcagtttactaccatttataagcaccttcatgtattttcgtcacttgagtctcagaacagccctctaaagtcagacagagggccagcaccatggctcacgcctgtaatcctaacactttgggagaccaaggtgaaaactgcttgagcagggagaactgcttgaggtcagcagttcgagaccagcctggccaacgtggtgaaactccgtctctactaaaattacaagaattagccgrgcatggtgaagctgggactacatgcctggctcctgggtgcccgtttgtgacagtcatctcacccaagagcaatggatgtcactgaagtgatttaagcaagagtgcaacatggg

SEQ ID NO: 405873 - DNA, 552 bp, Homo sapiens
tgttcctgcgttttggtttcacctcctccttgtgcctcacctgactgacaccctagaacctacctttccccttggccagggctctcctggagattggctggtttctggccccctccaaagagagacctgaagaccaaattaggaacctaaatatataaatcgcaacagaaagyttggttgtttactgacaatatatatttatactgtaaaatgtgtttatgatttagaacacactagacctattctagctctaaattgcattgctatcttgtagtatgcagttatgcctcgtttcatttcattttccaactgaagtcattttattccctcagtttataaatacctcgaattctttagccgaaaaggcaaggtaacttgatagagcatccccctttgtgaccataacctccagtgcagaacaaattaaacgtgcaaaactgtgagtgccatgtcctacattgttaaagaaaatgatgttgaaaggcagtgaaagtccttatgaagaaattcaaaagagtaaaagaatagacagatgaactggaaatggaagaa

SEQ ID NO: 405874 - DNA, 608 bp, Homo sapiens
ttttctatatcatgtttcatataggtcattaccaattaaaagcattatatgagtagtcattattaaatgtgtgagactgttcattccctcacatagcatactaaaattatggtaggtgagagattccagtaaggtgcttattaatcccgtgttataacgacagtaagcaggaatttttaatcctcaaaagctgctcttctgaagagaagttcaaataaagcagacaatgagctctttgagcttcctgccctctgtcagtgtatgctcacaagggcactactcattcttgaagtattcatgacccaataatgttagtgacaaagggcatgttgtagacacacagatggtgatttcacatgtaggctaatccctatggatttasaataagcaagactatataacaggcaaagcctctcattaaatttttctgaattgctcactaaaactttgttgaataaagaatatgatgttagattatttccatattcaaatccataggaaatggaaatataggctgcctttttgagcaaataactagtcaattgagatatcctgtgttcaaagtgctttggttcaatttcatttttaccctgggatagacaattgac

SEQ ID NO: 405875 - DNA, 519 bp, Homo sapiens
gaaaagtttaattattggagtcttatttatataaagtgctatacaattctttgaacatttgacactggacatgctgaaatagaggcatttgggttccaccctttgtattccattggtgctcttcctgcagatgatcatttccaatcaatggtaggatccattatcctgtacctgttttattctggtggcatggtgtcaaaaatgaccaaatgaagtctcagtttccagtgtatattagtccattctcatgctgctaataaagacatatccaagagtgggtaatttataaaggaaagaggtttaatggactcayagttcagcatggctgtggaggcctcacaatcatggcagaagacaaaggaggggcaaaggcatgtcttacatggtggcaggcaagagagtgtgtgcaggggaactgccgtttataaaaccatcagatctcatgagacttaatcactagcatgatagcaacacaggaaaaacccacccctgtgattcaattacctctcaccaggtcca

SEQ ID NO: 405876 - DNA, 576 bp, Homo sapiens
tatccttttcagacaagcaaatgctaaggaaatttgttaccctagacctgcctctcaagatgtccctaagggagtgctaaacatgaaaatgaaagatcaatacctgccaacacaaaaatacgcttaagtatatcaactataggcactataaagtaactacacaatcaagtctgcataacaaccagctaaagacgcaacaacaggataaaatcgcacatatcaatatcaaccttgaatataaatggactaaatgtcccacttaaaaggcaggaagctgtctttaagagactcatctcacatgcaatgacacccatagtctcaaagtaaagggatggagaaaaatctacctaaaaaatggaaaacaaaaaagagcaggggttgctattgtaacttcagacaaaataggcttttaacaaacaatgatccaaaaaaacccaatatcattatataatgataaagggttcaattcaacaaracttagctatcctacacatatatccacctaacactggagtatctggatttataaagcaatttcttagagacctatgaaaagacatagataaatacacaata

SEQ ID NO: 405877 - DNA, 590 bp, Homo sapiens
tgccttcttactacataagtctaatgttgttatttatttaatgtcaatatttggtaggaaaattaagccttatgttttgttctctgtggggaaatatctagaagataggtatataggtaagtagataataggatgtaggtagggaagtaggtgcagaagaaaagcagaagaaaggagagaggaaagggaagaagtaaagaaagagagaaggagaawtacttttcctcatttctttagttagttaatgtagactttcacttttacaacataattttctatacattctctggacatttttatcttagtatacgactcttttctatggacaacacagaaatggatcactataaacaccccaacattggttgtgaatgtgatggtgatgaatagcaggcccaagcgatcccaattcacttcaacctctcactggaatgccttctgttttttagaagtccaatcagtagtttggagaagtattatttattattagcaaaactatttgctttctatgtcctgtggccaaggttgtggaacataacagaaagttttaagtaatcttggtacttccaactattagctgagtgactttg

SEQ ID NO: 405878 - DNA, 562 bp, Homo sapiens
aatttctctctgcttgatacaatagacctattatcctgaactttcagctgtaaattagcaaccaggaagaaaagtcaggactatcgtctccagaaaaacatgggcgtgcttggataccttgtctatcctattactcttaattccaaagttggggaaatatgaaaacacctttaaataatgcacaacacaatattcaaaagttaatttttaacaacttttattcttaatgtgcctatttatttacagggatattaaagatttaaataaattttgaagcaacacatatattcagctgaagtataacaggttttytaaattacggaattatcatgttctggaggatatttttgtcatgccttgcatctcattgctataaccaacaaaggctttgttatctagctgttacttgtatgcatgccctgcatttcaaacaattttttgtatatgagaaccccttggtttctttaaagtttcctaaatgtttagatttgatttcaaagaccaaaaaaaaaaaaaaagaagagaaaaaagcttacatgttgtttgaagttaccatataata

SEQ ID NO: 405879 - DNA, 432 bp, Homo sapiens
ctaaaaaaataagtcaattgacctgagtttcataaaaggaaagagaagaacacgaacattattgtatctgattaagagttaaaaaggaaagcagtatgacaatcagcaacctctctccaccaagtccctctggggaactacttgtgctattaattaaagtagctggggcaacaggaaatggggctggagttcttaccctgttttatttttcttcaagcacttctgatgttgcaatgtataatagtttctcccaccaaaatataagctccataacggaaagatctttgccctggtcacaaatgcttaattactacctaaaacagttcctagtacgtactagataaatatttgccaaatayacagtgacacaattagaaaagttgagaatattatttaaaagataaattgtaaattaaacatgataaaccgagg

SEQ ID NO: 405880 - DNA, 540 bp, Homo sapiens
aaaggcaatctacaaactggagaactacattattggttagctaataaagtagagttcttaagagagtgtcatgttaatgcatttctcagtcctttctcacactgctataaagaaatacctgagtctaggtaaaaaataaataggtttaattggctcacagttctgcaggctgtacaagaagcatagtggcttctgcttctgggaagtccccaggaagctttcaatcatggcaaaaggcaaagagagaatggggcatctcacatggggggagcaggagcaagagagagtgaggtgggatgtgctgcacagttttaaataaccagatctcatgagaactcaaacactatcacaagaacagcaccaaggggatagttctaaactattcataaaaactccacctgcatgatcaaascacctcctaccaggccccacctccaacattgaggactacagtttgacatgagttttggtggggacacagatccaaaccatatcagtgcataacaaataaaccaagggaataaaatagtccagaggcca

SEQ ID NO: 405881 - DNA, 499 bp, Homo sapiens
aaaatctcagggttaatatatttaggttaatatatttagtaacatatgataattgtacctgatattagaaaagtaactagaattcaccctcagaatagtcaggcaggtaggttatgtaagttgggmgacatgagtgcacggtaacagagtagaaagaatgctgaattgagattcctagaccctgagctgcagccacccgtttgtagctctgacctttcttcagctgtaatactgaacatagccacaatatgcctgcttgggtataaccaaatgtactgaatggaagtataaaagggtgggaggtcacaaggaaggtcatattagaatcacactcaggaaaatacattctctgaagcaagaagaaaagaatcagcttccatgtattactgaggagatgtgtgcttttattggtgcaataaaaaaatcaattaagtaaaacatttttaatccatggaaattcaacaatatccaattgtcagcaggatatagtgtaagaaca

SEQ ID NO: 405882 - DNA, 507 bp, Homo sapiens
acagagtagaaagaatgctgaattgagattcctagaccctgagctgcagccacccgtttgtagctctgacctttcttcagctgtaatactgaacatagccacaatatgcctgcttgggtataaccaaatgtactgaatggaagtataaaagggtgggaggtcacaaggaaggtcatattagaatcacactcaggaaaatacattctctgaagcaagaagaaaagaatcagcttccatgtattactgaggagatgtgtgcttttattggtgcaataaaaaawtcaattaagtaaaacatttttaatccatggaaattcaacaatatccaattgtcagcaggatatagtgtaagaacaatgagaagcattttctggaaaagaagaaattagtgattttcattgaaaaagaaattctattttattggaatgatttaaaaatctcttgccagcatttctctttttaactcttgcagtaacttactatacagaataataaataaaaagcaaa

SEQ ID NO: 405883 - DNA, 565 bp, Homo sapiens
ttatagtgctgctcttgacaagtatgggtaatttaattttaaaaatagatatgaagtaatgttatttttaatattgcctaaaaacaaataaacaaatattaagtcctgggtatgagtctggctgtttgccaggtgctgcagatactgtggtaaatgacgcacacatatttatttctattccttgttctctgggaacataattctaatttttaacaataataatgataattcattgagcattattatatgctaatcactttatacattttcttattcttcacaaccrtctaattaaatgggtactattattttccctaatttccatccatgatgaaacagactaaaaacgtttaaataattgaaatgatatggatagaatcaaccactaaactatactcacttctcattctggtgtgatcagaattaagttagaaatttggagaatagaatctcactatttgttttttacccttaaggtcaaacctaggcatttatggtgacagaaatgggagaccctatcttatgttggatgtgttaaaatacattacataaatccgtgaagtca

SEQ ID NO: 405884 - DNA, 565 bp, Homo sapiens
ttatagtgctgctcttgacaagtatgggtaatttaattttaaaaatagatatgaagtaatgttatttttaatattgcctaaaaacaaataaacaaatattaagtcctgggtatgagtctggctgtttgccaggtgctgcagatactgtggtaaatgacgcacacatatttatttctattccttgttctctgggaacataattctaatttttaacaataataatgataattcattgagcattattatatgctaatcactttatacattttcttattcttcacaaccatctaattaaatgggtactattattttccctaatttccatccatgatgaaacagactaaaaacgtttaaataattgaaatgatatrgatagaatcaaccactaaactatactcacttctcattctggtgtgatcagaattaagttagaaatttggagaatagaatctcactatttgttttttacccttaaggtcaaacctaggcatttatggtgacagaaatgggagaccctatcttatgttggatgtgttaaaatacattacataaatccgtgaagtca

SEQ ID NO: 405885 - DNA, 609 bp, Homo sapiens
atcaatttagcgaattcaggtttataaattaaacatctcttcttcrgcttaactctttggagtgtctccctcagttgattttgagccactaagaaaattcaggcatatgttgtacaaataagaaaataaaagcttttttgtctttacttttctatcaaaagagatgacatttctactgctattgttgccttatctcttctaagaaaatcatatctacatttggcttatgataatttaatctatgtataaaagcagtgagtgcaaacacattcatgcatctttaagtaattgaaataaaatttaattaacatggtttattttcctctgctttgcataattaatgaaaacagagggcattcttaggctcagaaacagttgttagagggagaaaaaaatgtagaactaagatgaaaaagacagcaagaagttaacttaggattaaactttatagcatatttgtaaactacatacttacctgggtaaagttcacaatgttttctttcttagactatcaataaagtgctgctccagtatgctgcaattgtatcaagtgatttcagttcacattgtgataaggaaaatgtggtaagtaaaaaatgtctctacttt

SEQ ID NO: 405886 - DNA, 587 bp, Homo sapiens
gactgtgcgaaattagagtaaatgaatggagtcaatgagaaagagcacgattattcaattgaatgttctaggaggagtttttactattggggaaaaagttaaacaggaatcatttgatatctgtatgtggaaaatcttttggaacttgaaatcaaatcacaaacttaaaaacaaaaaacatttgtaaatccatctgtcaactgggaaaatgttttgtaacagatgttacagagagacggttactatccctaatgtataaagaagtcatayaaataaataaactctaaatgaagaaagaaatagacaattcacaaaaagaaatttaactggttcatgtggaaaatgtgtaacctttccacacctttaaggtatctagcattgcttatcacattagcatatattttaaacaaatacaaccacctaatgctagagattttgtgaaaaatataactactcgagtccactattgatgatgggaagagaaattaaaacaatgattccaggtggaaagcaacttgggtattacatgctttctgcatatttgagtttagtaatttcaattatgaaactattcaaaatatatgtga

SEQ ID NO: 405887 - DNA, 587 bp, Homo sapiens
gactgtgcgaaattagagtaaatgaatggagtcaatgagaaagagcacgattattcaattgaatgttctaggaggagtttttactattggggaaaaagttaaacaggaatcatttgatatctgtatgtggaaaatcttttggaacttgaaatcaaatcacaaacttaaaaacaaaaaacatttgtaaatccatctgtcaactgggaaaatgttttgtaacagatgttacagagagacggttactatccctaatgtataaagaagtcatataaataaataaactctaaatgaagaaagaaatagacaattcacaaaaagaaatttaactggttcatgtggaaaatgtgtaacctttccacacctttaaggtatctagcattgcttatcacattagcatatattttaaacaaatacaaccacctaatgctagagattttgtgaaaaatataactactcgagtccacyattgatgatgggaagagaaattaaaacaatgattccaggtggaaagcaacttgggtattacatgctttctgcatatttgagtttagtaatttcaattatgaaactattcaaaatatatgtga

SEQ ID NO: 405888 - DNA, 616 bp, Homo sapiens
atcaccacctgctggctgagttcttctcagagtctaagataatgttgatcctcaagcaaattccttttatcttgacagctcaactatcctatcttcctgtttatatcatctatactaatattttaattcagtctcagacaccagacaccggccttgttctttgtggacaaaactactatttggtgtcctaggtccagtaaatgggtccatgccatttgtcttgtttctccaggactggagtctgamtctggtcctcctgagccccaaagcgtgtgtcagttctccagttcccctcttccctaacttctgtgatgccaactctttctctaggcacctccatgctaggcctgctgtgcctgctattagactctcttgaccctgtgccctgcccatctgccaaggtattcacctgatatctgattttcaatgactgtcatcagtttgccaaagctgagactccctttatcttgtctgtctgtgagatttgcaccaacttactgtcctaccaaacattaattgtgagattgactacaaaggaattcaagagaaggaagagtacaacttaaaagagttttaactccaagaactaaagattcaatgtctccccggagcccag

SEQ ID NO: 405889 - DNA, 584 bp, Homo sapiens
ctgctgcaggtaggatggttgggctttgagacattccatttacccggaaaagcaaccaaatcaacaatgtttgaaagtaaaagtagaaaagtggcagctatgagacagataatcagtcacccaatctatatgtgcaaactaatagggaggccaatagggaaactttaaaggcgttctagctggactttgagttccaaccccatatctcaagaagactcaggactgacatgagattcccctaaatgtagatttctttcaaagagaaatagcagttacactttgacctgaaaaaatgctgaatgatttaatttttaaattcccccagaacccctgttatatgggcctgaacatgacactacattatatgttgcaaatatatttggcttcatgcagtggcaatactgaggtttctccaaaaacaataaacatgtgaatcaggaccctctagaaatctgcatttcttggtataaggaaaggaatttaactataaattcaaatatagctttggaacttattactttcttatttaatcctagataatacmatttcttatgttcaggactccaggcaaacataagagcatg

SEQ ID NO: 405890 - DNA, 624 bp, Homo sapiens
gtggaggtgccagagggtgcagtggactccatgggggctcttagctttggtggctgaaagctctttttttgtgcgggttgacctcctgccaggaggtggcgctttccagaaagcatcagctgtagtagtgtgragaaggaccattggtgggcgatgccttagaactcccaagattgtactccctttggcttcctgctaccagggtgggtagggaaggatcatcaggtgggggcagggctaggtgtgtctgagctcaagactctccttgggcaggtcttgctgtggctgctgtgggggatgggggtgagagtcccaggtcactgaagttgtatacctaggaggattatagctgcctctgctgagtcatgcaggttgtcagggaagtgggggaaagtcgaccgtcacaggcctcacccagctcccgcacaaactgtagggccggtctcacttccatcatgccccctgcaacatccccaagtctatttctaggcagagggcaagttgggcttgaaaacttgcctgaggctttccatcttccaggttcagcttccacagtagggatgtgtgttcgggaaaggatgttggggaaaccagccccacaccacccagtgggtaccccgagtc

SEQ ID NO: 405891 - DNA, 624 bp, Homo sapiens
gtggaggtgccagagggtgcagtggactccatgggggctcttagctttggtggctgaaagctctttttttgtgcgggttgacctcctgccaggaggtggcgctttccagaaagcatcagctgtagtagtgtggagaaggaccattggtgggcgatgccttagaactcccaagattgtactccctttggcttcctgctaccagggtgggtagggaaggatcatcaggtgggggcagggctaggtgtgtctgagctcaagactctccttgggcaggtcttgctgtggctgctgtgggggatgggggtgagagtcccaggtcactgaagttgtatacctaggaggattatagctgcctctgctgagtcatgcaggttgtcagggaagtgggggaaagtcgaccgtcacaggcctcacccagctcccgcacaaactgtagggccggtctcacttccatcatgccccctgcaacatccccaagtctatttctaggcagagggcaagttgggcttgaaaacttgcctgaggctttccatcttccaggttcagcttccmcagtagggatgtgtgttcgggaaaggatgttggggaaaccagccccacaccacccagtgggtaccccgagtc

SEQ ID NO: 405892 - DNA, 592 bp, Homo sapiens
gaatgtgaaatgggtaaagaaacaaaataaacatgttaaaaggtgttcttgatatttcactttacatcataattttttttcttcatggaacactgatttcccaaagaccagaattggtataaaagttcagcaggttttttacataccttgtagacatcgtacatgagtactggcaaacattgaaatgtagtgaactaaacattcccatgtatttgcacatgcatgcagtagtcaaacaattatagttatgtatttagcttgcagtgtttgtttcaagcactctcttcagtagatcttgtttcagatttaagtcttacaaattctttagccacatcatcactggtcctctgagagagtattctaaggatagtcaaaccagtttcatccatagagatatttttcagaagaggataccatgccccatagcttcccttttctgctatgttctgtagctgaatgactgtcattccgataattcgatcttctctggcaaagcagtaatccttaactgagagatgaagttcataagcccctggycgattttcctttccgagaatgctgtgtggattaaaaatacaaattttgagcaaaa

SEQ ID NO: 405893 - DNA, 527 bp, Homo sapiens
ttacaaggcaacctcatcatctcaaccaagataggaaaaccatcaaataccagttgacaatttgatagacgagtacattgaaacccagagcagctaagtgacttggctaaactcacaaagctcttyagaggttgaactagacatagaccccacacatcctgcctcttagacccttgctcttcccctaagagtcattcccattcatcaaatggctatccttaaccaagcactagacaagacactttgcttagattatctcatttaaattcacaacggcaaggtggttcacatgaaccctttcttatagatgagaaaatgaaactcagtgattttgggatttgtctaaagtcactcagccaggatttgaatcccacactgcctggtgtggtgggtaaagcaagggaattgtgtcgaagtatcagggctacttcagcagctactaaagaaaataagtaacactgaatttgaacaataacatattaagccacagtcctgtgtagagggtgcctctcctgccagcagagaat

SEQ ID NO: 405894 - DNA, 533 bp, Homo sapiens
ttttatttagtgagtagtagtgagcaacataatgagcacatcacaaattcagtcagacaacactaggcttttactttatatccttaggagagcatattttacctgtgtgaaaaactaacagggtgccacaaagtaataattatgctcatttttacatggctacatttacagcacaacttgagacatatacaatttcaacttccttctctttatacatttcaaatgaaatgcagttgttttatatatatatatatatatatatatattatactttaagttctagggtacatgtgcacaacctgcaggtttgttacatatgtatacatgtgtgctgcacccattaactcgtcatttacattaggtatatctcctaatgctatccctcctccctcccccsaccccacaaaaggccctggtgtgtgctgttccccttcttgtgtccaagtgttctcattgttcaattcccacctatgagtgagaacatgcagtgtttggttttttgtccttgcaacagtttgctgagaatgatggtt

SEQ ID NO: 405895 - DNA, 510 bp, Homo sapiens
tggctctggaaaaaggggccatgagggagatactgtggatgaaagatgattattttggcttgtgtttccctttatacaattagatgggttgcaaaggtgggatgcacatctgtggggcctcacaaggtagaaagtgtcccaggtcccacgtgtgactgggcaagctgtttgccttctctgagctttccattcctcaccagtgagggcatgaatacctgtctcttggggttgttgcsactgttaaatgatagcaataagaaagtgttttgcaaactctaaaatctggcataggcgttacttattaatctgtaggattatgtaaaaggaactcagcatttaaggcaggttttctatgaagtatcttaaacctttcctgttttgcaagttatcgaaacatcatgaaaatgttagaagaatgaatactgggaattgaaaagggaaataaatagatatcaggacaaaatggttttataactcaaccctatgacagagaaagctgagtcaaaaatg

SEQ ID NO: 405896 - DNA, 530 bp, Homo sapiens
tggggtttgactcaagatgttcagcttcatttgagtagagttcaaaaccctccatatattatatcatgcaccaactcagtccgttctattccagggaaactcaccgaccaccacctgagcatatcttgctgattgtcccctcagtggtattgctcgaatcatttccctggaatagaatccttgaggatccttcccttcagtgcccatctgcctcatcctcgtcaatctctgtcaaagtccaagctcaaaagtgcaaaagtctcctctaaacttaagacccttgtaaccttcctttgttgcatgaatgtctgycttgtctaacaaatcagaaggcagaacccttgaagacagaagcgatattctttgcttttttatcccccattgactgtaagcattatagttctgcacactcagccaattaatgtttaggatattaatggacaggagacagctttttattaaactcctaagggagcttccaaatcattgtttctttgccaaatgtcaacagtattttttctacagccagc

SEQ ID NO: 405897 - DNA, 584 bp, Homo sapiens
gccaggcttacagagctacgattgccatagacgtaactgctcctggtgatgtcttttctcttacatttgtacttcagggaagaattggtttcaagcckagtcttttttcctcctttgtgtcctggtaagcttttcctctggaaataaactgggctggctgtccctttgatcccattgtgcgattctatctcgttcatcaagctgtggcacctgacctgttacaagggtatagaaaatagtacaatttgagcatttcaaagtgcaggttttctattttaaaaagggatatctgacagccacctttagatccacttgcttatcagggttgcgttttaacaaattttcgtgaaagcataccatttattctccaaaattggaaaaaaaatgaacaatggtgagttcatatcctgttgaatatggcttgaaacatcaaaatctccagcaaagactgatagaaagaaagtatcatcatatcagtggcatcagaaaatggcccaggcctgagcttctgcggtctgcaataaagataaccaccgcagctggggtgagagctcagggttgttttccaacaccgggggaacata

SEQ ID NO: 405898 - DNA, 510 bp, Homo sapiens
tggctctggaaaaaggggccatgagggagatactgtggatgaaagatgattattttggcttgtgtttccctttatacaattagatgggttgcaaaggtgggatgcacatctgtggggcctcacaaggtagaaagtgtcccaggtcccacgtgtgactgggcaagctgtttgccttctctgagctttccattcctcaccagtgagggcatgaatacctgtctcttggggttgttgccactgttaaatgatagcaataagaaagtgttttgcaaactctaaaatctggcataggcgttacttattaatctgtaggattatgtaaaaggaactcagcatttaaggcaggttttctatgaagtaycttaaacctttcctgttttgcaagttatcgaaacatcatgaaaatgttagaagaatgaatactgggaattgaaaagggaaataaatagatatcaggacaaaatggttttataactcaaccctatgacagagaaagctgagtcaaaaatg

SEQ ID NO: 405899 - DNA, 580 bp, Homo sapiens
attggtttttatgcctaaagaggaggaaatccttcccttaactccaatggatcaaagaagtcttcttggaagaggagcattttctcactgctcagaggaaagaaagacagggactttgtttgaactaatctggaaaaaatgatgacscttcactcagttattttaaaatctggccacgaggatatttttgaaacctcgtcataagaatatcatttgtcctatgacacagttgctgtttatccgattatctaagttaatgataataagatatacacaaattaatgttactccttggactcaaaatttgagcctgaaatgaagcgagtgacttcatttctccattttacagaagttggaagctcattttaaaaatctgccacactgtacattaatgaaatggggtgtgtctgggattctctgactctacttcattcaattagttgtctctaacacacttatcttagaaatcttaagatggtgagaaatagcccacgttcctcattcttagcatttacaaagcttcacacatatgttctctccctccaccactgcctcccatgattcagtcacttcatattgt

SEQ ID NO: 405900 - DNA, 645 bp, Homo sapiens
caagctgtgatgaaagtggatatgtcctcccagcaaatattaaatcatactcgagtaagtacagccacggaatcatttccaccatcatctttcctaatggggaacacaatgacttaaagcatcagctgatgtaaagacagattgaactcaccattatatacatgtatatatactaaaaaggtgaaggcaggattagagaagagcttgtggctgttttctttcttctttacttccttcctttgtcctttcrttctttctttttttgttctctgtaatcaccaatatcataacctaagggtgacttaaacttgtcctttctcctagtctcaattccagtcccacagtaaatctgaactctcatggtgatgatggtggtgctaccctttggtgaacacttacatgtcaaacccattgccaagtactttccatacatcctcccatttcccctctcaacaactctctgatgtagtcactattatccccattttacagaggaggaaagtgagaaaaaaaaaaagattaagaaacttgcctaagatcacagagctactatgtgccagaatgcaggcctatgtgaccaaaaacaactgtgccctcactcaccacaccatatgacctccagaatttttgttctaccactgagta

SEQ ID NO: 405901 - DNA, 510 bp, Homo sapiens
tggctctggaaaaaggggccatgagggagatactgtggatgaaagatgattattttggcttgtgtttccctttatacaattagatgggttgcaaaggtgggatgcacatctgtggggcctcacaaggtagaaagtgtcccaggtcccacgtgtgactgggcaagctgtttgccttctctgagctttccattcctcaccagtgagggcatgaatacctgtctcttggggttgttgccactgttaaatgatagcaataagaaagtgttttgcaaactctaaaatctggcataggcgttacttattaatctgtaggattatgtaaaaggaactcagcatttaaggcaggttttctatgaagtatcttaaacctttcctgttttgcaagttatcgaaacatcatgaaaatgttagaagaatgaatactgggaattgaaaagggaaataaatagatatcaggacaaaatggttttayaactcaaccctatgacagagaaagctgagtcaaaaatg

SEQ ID NO: 405902 - DNA, 645 bp, Homo sapiens
caagctgtgatgaaagtggatatgtcctcccagcaaatattaaatcatactcgagtaagtacagccacggaatcatttccaccatcatctttcctaatggggaacacaatgacttaaagcatcagctgatgtaaagacagattgaactcaccattatatacatgtatatatactaaaaaggtgaaggcaggattagagaagagcttgtggctgttttctttcttctttacttccttcctttgtcctttcattctttctttttttgttctctgtaatcaccaatatcataacctaagggtgacttaaacttgtcctttctcctagtctcaattccagtcccacagtaaatctgaactctcatggtgatgatggtggtgctaccctttggtgaacacttacatgtcaaacccattgccaagtactttccatacatcctcccatttcccctctcaacaactctctgatgtagtcactattatccccattttacagaggaggaaagtgagaaaaaaaaaaagattwagaaacttgcctaagatcacagagctactatgtgccagaatgcaggcctatgtgaccaaaaacaactgtgccctcactcaccacaccatatgacctccagaatttttgttctaccactgagta

SEQ ID NO: 405903 - DNA, 625 bp, Homo sapiens
tcttgttgaggcattgggctctgcccttacattggcacctgcgtcccaatatctatggtctgcatcctcagcccctatcacaggccttacccctgtgtaactttcctgttatccctactcaggcaggaacataggtccatctccttcaactgctcacatcagagcagctttcacacaaaaacaagtctttccctggcacctttataaacaagcacctgcagatgagctggtctcaaggaaaagtgattccaggggctgccaacccagggaagcgcccacaggtgatcctgtgaatgcagaaacacttatccatcagtgattgggtggccagccagtggggatgatcaagacgatgagaacaccaccatttggatcaatgtkgccagaaagcgacggtcagaatgaggggaacattgctcagtttggacaatgggccccccttgaagagtaactaaccacaaataggaattaggttggttattaagatgcccaagagtccattgaattgacattttgctggctgcagccaatacacatcgccccccaaaacaaaatgcactctgttctttttaaccaatttagatctttcaagacttctatgaagtgttggttggcttaatggaca

SEQ ID NO: 405904 - DNA, 563 bp, Homo sapiens
cactctggcatggcaaattttcaaaaatacctaatgcatatttagaattgtaagaaatacatcaaagttgctaatagtctctctggtttctacatcaagccacatctacaatgttgtgttcaatttgggacacctcaccctacaagaaacattagcaagttacggtgcatctggaggagaaagaacatccagaataaaaaggcttcctcaacaaggataaattaaaagaccytccctccaaccccagcaccaccccatggagcccaagttttgctccaccagacccagtttgctctacctgagaagaaacctttgcagacctctggaatttttaagtcctacccatgcctcccctcgccagtcttgtttccattatccttggcatgcacaacttagacatatggtacaaatcctaaggaagagtagggagaaataggaaagacattcaatgattgtaggaatttactatacttacgaaaaaaatgtaattaattgaatgtaaagttttgtttacttgactttggaaaaaataattgtaattaaatgttccctatattataatt

SEQ ID NO: 405905 - DNA, 563 bp, Homo sapiens
cactctggcatggcaaattttcaaaaatacctaatgcatatttagaattgtaagaaatacatcaaagttgctaatagtctctctggtttctacatcaagccacatctacaatgttgtgttcaatttgggacacctcaccctacaagaaacattagcaagttacggtgcatctggaggagaaagaacatccagaataaaaaggcttcctcaacaaggataaattaaaagaccttccctccaaccccagcaccaccccatggagcccaagttttgctccaccagacccagtttgctctacctgagaagaaacctttgcagacctctggaatttttaagtcctacccatgcctcccctcgccagtcttgtttccattatccttggcatgcacaacttagacatatggtacaaatcctaaggaagagtagggagaaataggaargacattcaatgattgtaggaatttactatacttacgaaaaaaatgtaattaattgaatgtaaagttttgtttacttgactttggaaaaaataattgtaattaaatgttccctatattataatt

SEQ ID NO: 405906 - DNA, 572 bp, Homo sapiens
tcaacatacaaaaatcagttgtattttaatacattaagaatgaactatccaaaaaagaaatcaagaaaaccattttatttacaatagctaccacaaaatacttagaaataaatttacccaaggaggtgaaagatctctacactgaaaactataaaacattgataaatgaaattaaagaagacataataagtagagagacatcccatgttcatggattggaagaattaatattgttaaaatgcacatactacccaaagctatctttagtaaagcaatccctatcaaagctccaaagttcctatgaygtattacgcagaaatagaaaaaacaaaaatttttatggaagcacaaaagacccagatacacaaagcaatcttgaggaaaaaaacaaagctggaggcatcacactacctgatttaaaaaacctactacaaagctataggaatcaaaacagcatggtactggcatgaagacagacacacagatgaacagaaaacaatacagagctcagaaataaatctacatatttatgatcaattgatttccaacaaaggtaacaaaaacacacaatg

SEQ ID NO: 405907 - DNA, 567 bp, Homo sapiens
ggcaacatagcgaaacctcatttctaaaaaaacttaaaataattaaccaagtgtggtggcatgtgcctgtagtcccagctacttgagatgctgaggcaggaagatcacttgagcccaggtgttcaaagctgcagtgagctgtgatagtgccactgcactccagcccaggtgacagtgagaccctgcctcaaaaaaarttttttttaagtcaaaagatatcaaatgttggtgagaatgtggagaaaagggaatccttgcacactattagtgggaatataaattagtatatctattatggaaaacagtgcagcacttctaaaaaaaattaaaaatagaactaccatgtgatcaagcaaccccatatttgggtagatagccaaaggaattgaaatctgtatgtcaaagagatagctgcacttccatgtttgttgcagcactattcacaatagccaagacatgaaatcaacctaagtgtccattatcacatgaatggataaagaaaatgtggcatgtatgcacagtggaaaactatttagcctcaaaaaagaaggaaatcctgtcatttgg

SEQ ID NO: 405908 - DNA, 526 bp, Homo sapiens
agtcttaaaacaaggaagttcaagtttaaggtgatttttgctcctgtctaatccaacaatcaggaaagatttctcaaacaaaaattaacatacacactctcatatatacaaaaatgtaaatcactgatacagcacccactgcagtagaatatgtgcaaagtgtatgtgctgaagcacaagtatcaacacagagtaaggactctgtaagtaaaaggtattgttgctacctttttagtagatgtatctactcccctcacacctgccctcctcaatttttaattttgtacctactcttagagctgcactatccagtagggtagccastagccacaaataggtatttgaattcatattaactagttaaatacaattaaaaagtcagatcataagtcacactggccacattttagggtgctcaacagttccatatagatggcagtcacactgtcagacagtgtagacacgatttattttggaaagttccatttgatgctgctggtttacagaattatttctggtatgttca

SEQ ID NO: 405909 - DNA, 390 bp, Homo sapiens
aaatggtcatactgtccaaagcaacatacagattcaatgctcttcctatcaaactacaaatactatttactacttaactagaaaaaaactgttctaaaattcatatgaaaccaaaatgagcccaaatagccaaagcaatcctaagccaaaataacaaagctagaggcatcatattaccygacttcaaattatactgtaaggctacagtaaccaaaacagcatggtactggtatgaaacagacacatagagtaatggaacagaatagagaagccagaaagaaagctacacaccttcagccatctgatcttcaacaaaattgacaaaaataagcgatggagaaaggactcaataaatggtgctggaataactggctatccatatgcagaaga

SEQ ID NO: 405910 - DNA, 553 bp, Homo sapiens
tctgggttactgtgatagttgtgacagataggtttaaagaattaaagatcaaattcgtgaagagaaaaaggaagtctataaatatctggtcttattgtaattgagatggttaaccataaagcaatgaagggaaacccatagaaaacatttagttcacaagtagaaagaatagttaaaacttacaacagtacaggcaaggaacttaagatgataaatatttttagtgccagttctaataactctgtttaattgtaaaccaaaaacctagatgccatcacacatgagctgtgaatattagtggcccaatttatctgggtcacatgaccatgagcagacagtggaaaagggaaaattggcatctaaaatttatttccttcctgggttacaaaacagaamtactagccaggttgtaacctaactaaattggtcagtaaaaccaatcacagttttatagagtctacactaaagctgggaaagacactacaactcagcagaaaatttaccaacatgccagagttaaataagaaaaagaacttgcatgattcctactagc

SEQ ID NO: 405911 - DNA, 513 bp, Homo sapiens
aagaacttgcatgattcctactagcaacagctaaccttaataaaattggacgtggcagttgagatgcccaggccactgggctagatattaccatgagcacttgggcagtttccacacagggctaaagtagggagtagctgcaggagtgggccccatactcctctggtccttggccttttcaagaccctagcagcattacccaggcaatggaaaattgagtccagttaattcaattgaatccaaggtcttggacaccacagatgtgctgattctgtcaatctycattcaattttttgcctttatatttctcctgggtgtccacccattttccaaatggagatcctcctgtctattttttacacagtgtttctggcacctcagcctcttcttgcagcactccttccccattctggccctaaccatcacctatctttcataggtcagaagatatgatctatgtctcatctgaagatgtcacttatctgtatccctctaaatagtaaagtagataaa

SEQ ID NO: 405912 - DNA, 585 bp, Homo sapiens
cacactgttgggagaagactggaggcacagagggctttgctcatctgaatcaactgtttactataaagaaaataaatttattttctcacagctctgggggctgggaagtccaagatcaaggcactggcatctggtgagggttttcttgctgcatcctcacagggcagaagagcagaagagagcaaagccactcctgcaggctgtttttatagcagcattaatcctttcatgagggcagagtcctcatgacctaggcatgtcccattctgccccagcccccaacactgttacattcaggattatgtttccaacacataaatttaagggaacacattcagaacattacacctggtaaaatgttgaaatggtatactctaccaggcccctctgtgcatatcattaaatgttttttaaaacctgtgctcaaactttctaagggcaaatagtctaagtgatgatacaatagataaaatagacctgtcatttgtggcycccaatgattctgttaacctcattttggtagttttacgcatgattcattaagcttctcccaagaagaatctgaaaacctccatttcaaacatc

SEQ ID NO: 405913 - DNA, 532 bp, Homo sapiens
acaacgctgcaagtatgattgtcaggttgtttatccacggcagatcagaagccaaaaatcagtcaaggaggaaaatattctactagaaaagcattggcattaacagcacaacaaggccatggccaacaagttgaacatgacaaaaagacagaaagacaacgagaataggatatagaaactcaaaacatatcattctgggtcttttttcatttcagggaaaacaatagaaaacmtttcaatagttcttaatgatattttattaataaatagtaaaatacagtatcattcaaactagtaaatgcagtatcattcaaactaataaacttaatggataagatttaaatcatgttcaaaatatccccatgagaaatttcttgtagcatgagtgcctgggaatttttgcttttcttaaagatgtggtataatttttcctttctgacaaaaatgatagacctgacctttttttctgtcactttgactaccagtaagcttagaaccaaatttcagccttcctacaaaagccacaaagggc

SEQ ID NO: 405914 - DNA, 582 bp, Homo sapiens
cttccaattagtgtaagttccatgaagtcagtgactatctgtttcattttgttgctttatctcaagttcctaaaatagtatctgacaagcagtgaacacacagccaatatttgttggttgaatggacaagaggatgaatacgcggaagtgattgaccaagaaggatattttttctttctgccactttggaatgaaatgagatattttgaaacttataactttaagccctttcaggtctttgaataaaaatcaatttgtaaaaattaagtgcattatatcaatcaaaccatgagacaaaacctgtcctatccaaaatctcgtgggttgccatatagtactccctttcaccctctggagtcacacagtcagactaatctctcttgtactaaatcactcaaaaattcacmtcccctgggcaggcttctttcctggtcatcattctatatttgactgagggtcaaatccatatagaaatcctacatataccaacttgtctaaaattaaactttgcttttcccccaggccaattctctgaatattctattacccaggatagtagcccattggctctttttctctatg

SEQ ID NO: 405915 - DNA, 622 bp, Homo sapiens
gttcggatggcctttgtaaacataatccaaacactataacaaaaggaaaggtttgataactattggctacagtaaattctttaaaaatctatctgagaaacaaaatgccataaaatgataaaagaaaaactcgggaaaatatctgcaacttacaacacaaaaaacttattctcttattacatgaagatccctataaatcagtaagataaagaccaacaactcaaaataaaaacggacgaaaaatatgaatagacaattcatcaaaaaagaaagacaaatggcttataacatgccaaatctaattaataaaaagaaaattgcaaattaattgagttttgcaaatgttacaactgttatgtttaccarttgttaacattgtgttatgtaagcttgttagaaagctatatagatgtataaataaaatctgtatagatatataaatatatatgtgtgtatatataatacaagagcctataaaatactatattacacatttagttgtcatatctatttagtctcctttaatctaggaataatttctcagccttttaaattttttttgacatttttaaatagccaaggctaatttccttatagagtgtctcacaaaaaccaagctggt

SEQ ID NO: 405916 - DNA, 628 bp, Homo sapiens
aatgaattggcataaagttccccaaggtcacctggctggtcatattgtacatgccattgctgctgaaacaagtacatctctctgttgccaccactaattcagccgccgtcatcatggttcctgacaacgctgccatcgctgctgctacagggttgtcaaagccctgcttcatcttctggcctccaaaagggaaaattgttcttctcagttttatgatgtcatccttcaaagaacatggggcaagccctagaggacgtttgaggaaaatacccacggaccctgaattgtgccttgaagttattcaagtgttttgctgttcactgggtggccaggcagtgtggccaagctaaaaaggcagttaatgccatcctggggaacagaccagtgcatgactggaagtcactgagaacagacaacatgatcaccaggctcaaatcatatctcatttacttacagcaagaggagagtgtgtagaagatccagcccyttgcaatgcatcagttccctgtggccagcagagccactctgcagctgtctcaggcagcatggctgcatgcacctcactgtatgctacagtagaagggtcccaacccctcccctgtggagtctgaaatacaaatacagaaat

SEQ ID NO: 405917 - DNA, 628 bp, Homo sapiens
aatgaattggcataaagttccccaaggtcacctggctggtcatattgtacatgccattgctgctgaaacaagtacatctctctgttgccaccactaattcagccgccgtcatcatggttcctgacaacgctgccatcgctgctgctacagggttgtcaaagccctgcttcatcttctggcctccaaaagggaaaattgttcttctcagttttatgatgtcatccttcaaagaacatggggcaagccctagaggacgtttgaggaaaatacccacggaccctgaattgtgccttgaagttattcaagtgttttgctgttcactgggtggccaggcagtgtggccaagctaaaaaggcagttaatgccatcctggggaacagaccagtgcatgactggaagtcactgagaacagacaacatgatcaccaggctcaaatcatatctcatttacttacagcaagaggagagtgtgtagaagatccagccctttgcaatgcatcagttycctgtggccagcagagccactctgcagctgtctcaggcagcatggctgcatgcacctcactgtatgctacagtagaagggtcccaacccctcccctgtggagtctgaaatacaaatacagaaat

SEQ ID NO: 405918 - DNA, 524 bp, Homo sapiens
gacattacataatggtaatgagttcaattcaacaagaagatctaactattctaaatatatacgcacccaacacaggaacacctagattcataaaccaagttcttagaaacccttgagagacttagagtctcaaataataatagtgggggactttaacaccccactgtcaatattagtcagacaattatcaaagatattgaggacctgagctgagcactcgatcaaatggccctgatgtctacaaaactctccacacaaaataacagaatatacattctcctcattgccacatagcacatactctaaagtttttttgttttgtttttcaatttttttttattatattttaagttttagggtacatgtgcacracatgcaggatagttacatatgtatacatgtgccatgttggtgtgctgcacccattaactcatcatttaacattaggtatatctcctaatgctatccctcccctctacccccaccccacaacaggccctagtgtgtgatgttccccttcctgt

SEQ ID NO: 405919 - DNA, 527 bp, Homo sapiens
tataacaatagcaattccattacactggccagggatgcaatacattctaatgaagattaaggaaatggcagaaaggaaggagaggtttagaggaggcgcccctgggccaagtataggcagcaagagagggcacagagcatgagagaaaatgctgaatggacaaaggaaagagaataggcacagggtggaccatggacccattatctgtttctcacgttcatttccagttttccacaattcttcagttcttattatggggtcttacctgggmagcctttgagggtgtgtttttttctctctgttctacttcctcaagacatctttttacctctacacacgagttttcatcacgaagttcactcttttccccacctccactatctccaataaactctcaatgtaaagttaaactgattgggctgtgggtcagttgcattacatttaaataagcacagagaacatcaaaaacttcaggaaacacagtgcagatatctgcagctaccctttgataaacccagcagctgcgg

SEQ ID NO: 405920 - DNA, 527 bp, Homo sapiens
tataacaatagcaattccattacactggccagggatgcaatacattctaatgaagattaaggaaatggcagaaaggaaggagaggtttagaggaggcgcccctgggccaagtataggcagcaagagagggcacagagcatgagagaaaatgctgaatggacaaaggaaagagaataggcacagggtggaccatggacccattatctgtttctcacgttcatttccagttttccacaattcttcagttcttattatggggtcttacctgggaagcctttgagggtgtgtttttttctctctgktctacttcctcaagacatctttttacctctacacacgagttttcatcacgaagttcactcttttccccacctccactatctccaataaactctcaatgtaaagttaaactgattgggctgtgggtcagttgcattacatttaaataagcacagagaacatcaaaaacttcaggaaacacagtgcagatatctgcagctaccctttgataaacccagcagctgcgg

SEQ ID NO: 405921 - DNA, 527 bp, Homo sapiens
tataacaatagcaattccattacactggccagggatgcaatacattctaatgaagattaaggaaatggcagaaaggaaggagaggtttagaggaggcgcccctgggccaagtataggcagcaagagagggcacagagcatgagagaaaatgctgaatggacaaaggaaagagaataggcacagggtggaccatggacccattatctgtttctcacgttcatttccagttttccacaattcttcagttcttattatggggtcttacctgggaagcctttgagggtgtgtttttttctctctgttctacttcctcaagacatctttttacctctacacaygagttttcatcacgaagttcactcttttccccacctccactatctccaataaactctcaatgtaaagttaaactgattgggctgtgggtcagttgcattacatttaaataagcacagagaacatcaaaaacttcaggaaacacagtgcagatatctgcagctaccctttgataaacccagcagctgcgg

SEQ ID NO: 405922 - DNA, 605 bp, Homo sapiens
tgtgatatcccatcatattcaccggttctgcctgcacacaaggggaaggattatacagggcatgtgcaccaaaggktggaatcttcagggccattttggaattctgcctacacaagtgatgcaagttctcatgctcttctaaattcccagattttatttaaaataaacagtttatttacatcctgactcagaacccttaaaccctagggttttaaatttttttttttaatcaggaatatttccagaccactttgtcatttcacagatgcgtggagaggaggctgagccatcattggctgtgcttacattttagagccatttttctgatgagggagtgtggtggatctgctgtcattcataagatagaaaagaagagaaaatgattgctttgaattgtggaaatatgattatttaaaacaccaacttccttatatattctgatcacttttttataattgaaccacatttgcttggctttgaaacttcacaagcatggtagccaaaagtgtgtaataatttgtagacaaaaccatgaagagtgaaaccaactacttgtatttttggtataaagcaatcaaaccaagacagcattaataaccaaataa

SEQ ID NO: 405923 - DNA, 561 bp, Homo sapiens
gtggaaatatgattatttaaaacaccaacttccttatatattctgatcacttttttataattgaaccacatttgcttggctttgaaacttcacaagcatggtagccaaaagtgtgtaataatttgtagacaaaaccatgaagagtgaaaccaactacttgtatttttggtataaagcaatcaaaccaagacagcattaataaccaaataatgtttaaacttaatactccccaacaaagtatattttatgctttcttaaaggatgtctgtgagatagaagcagtcatacaaatggccaaataaaactatttttaaagattttgttatttaaaaatgaagtaaatttcctatcttaaaaatcaacatagatctcttacaaggtgaggtcatattgattgcagactttttaggaccctaaggaggaattattttccatagacactgtgcatattttctttggatttcatgagaaaagattaagtattacaacmtgcacttaaagttttctttcagaatctttgctgttctaccgaggcccagggaagaaagcagtaggggcagc

SEQ ID NO: 405924 - DNA, 627 bp, Homo sapiens
tcatttttgagcagggcctattacatttaccccattttcaacttagaaaatatcttcccagaacagaacagtctgggaattgggtggaaacaacacctagcaaactgtctcagctcattactggattagttagacctcagggatctgaggccagattttgtcttagttttggaacacagcaaacataacccaagcacaaacaaccctcttgctactcgttgagctctgtgctaatatgcaaaagccctgcctgagtcacagatggaaaatgcttctacacaccctcagtttggattttcatttacccaatgcaatgggttaacctgttttgcacacagcaactgtcaaataagacraggagttcagctcaggagaagagaataatgctcaaaattcttgactccccttcaacagcctccaacaattgtttcccagcactgcatggaggcagctcaccacctttggcaaagcctagactgtgatgcttgtcatgaaggcctatacaatacacccagctctgctttgtgacatagtccccgtgagggcctggggagaatgttaccatatttagctttcccaggaggtgtggaagagttcccagctgtcctgcttaagatgttggtttaa

SEQ ID NO: 405925 - DNA, 521 bp, Homo sapiens
taccatatttagctttcccaggaggtgtggaagagttcccagctgtcctgcttaagatgttggtttaaaccaaatccttcatctgcctttgctcatgaagctaaacacccacagtagaactgggaaaagagtaccttargcctcagtttatttgtagagaggaaaaggttcacacaaaaaagagaaaaagagatgctctccctttttaatttgagtgccagtcctggatccccagttggcaaagccttttatagtcatttctgccccagaattctgcatctgcaagatcagagcttattagtattatctcttactcttcctcccaacattgccactagagactgtaaaaggttcagactatacacactgaaaggcaaatggctcttgtttagctatcatagtgcagggttttgcttgcactaaaagacatatattcctctagccataccaataatattaaacactcacttcaccccaaaatcctctagaacctcagtagaacatggagaatatattagaaa

SEQ ID NO: 405926 - DNA, 565 bp, Homo sapiens
tttttttttcaggtttgtcaaagatcagatggttgtagatatgcggcattatttctgagggctctgttctgcttgagttttttattattgtccttttccttcctcttactccattttaagtttttttcttccctcattgggctagctggaacctataagaaaatgataaatagaagaattaataggtgtatttttgacttatatgtttgacatctcattatgaagtatgatgtttgctgtagttttgttttttcttttattattgaaaagcaatatatgtgcattgtggaaagttaggctatatagatacctaaatatttttaaaaatgctatgtttctatcactcagagattacagttaacacctkagagagttacagtatatacatatatatttactttttaatgaaaggagatcatactgtacatgtagtagtataaaggttgcatgctataaactgcttttcatgctgtaggtgttttattccccgtttccccatatttatgaagagttttcatcctaaatgggaattcaattttttaataccttaaaatgacacaacttg

SEQ ID NO: 405927 - DNA, 520 bp, Homo sapiens
tcatcagtgtgggcagcagttatttcacattttaaataaacctgaaatagcaaacataatctggttagcatatgtgaattttgtacaaaaatagtttctgtgcatggccccttcatcaatttctttttaaaaaaacacatgcatcatatgatctttggaagagggaactggctggatatcactagcataacacagtggttctcaaaccagaaacatctgtggaactttaggtaaaactayacctgccacatgcaaaagactgaagttggacccttaccttacagtaccatatacaaaaatttactcaaaatggatcaaatagctaaacataacagctaaaagtataaaactcttagaagaaaatatagggtaaagattaatgacatttagttcggcaatgatttcttggatattacaccaaaatggaagtcaacaaaagaaaaaatagatccgttacatcaaatattaaaatttctgtataccaaaagacatagtcaacagagtaaaaggcaacctactg

SEQ ID NO: 405928 - DNA, 632 bp, Homo sapiens
tttcctagtttttctttcatagaagcgtattcaaacttttattcctcagccccgtctaccctttttctctctctctaccccaaaccatggtaaggagaacccagatcttaggaacagtggttctggatttgatttgatttcttttaaaagagggattgacagactttagaaaattcttaccttcagtggatggaaggtgggtgttacactgttggctggaaagaggcatgagacagctctctagtgtgatggctctatatttttatctgggtgatttctgcacaagagtatacaaatttaaaacatcactgagcttagctatacactcaatatatcctataaaataatgtcagatgatatgctttagaagttataaccatcagaaaacatttatccgtygagtagcaacgttaaaaggaagattgctatcagttcattaatatgtggaaaaggaaaaaaaagcaaatcaaataaagtttcgtttctttttctttccatgtttacttcctacagttggatacttgcattgtcaacttggcagcgtgaagagattgacgtttttagtggttaagaaggacaagtcagaaatcagtccaacagattgaaactctgtgttcatttttgtgtttgaa

SEQ ID NO: 405929 - DNA, 632 bp, Homo sapiens
tttcctagtttttctttcatagaagcgtattcaaacttttattcctcagccccgtctaccctttttctctctctctaccccaaaccatggtaaggagaacccagatcttaggaacagtggttctggatttgatttgatttcttttaaaagagggattgacagactttagaaaattcttaccttcagtggatggaaggtgggtgttacactgttggctggaaagaggcatgagacagctctctagtgtgatggctctatatttttatctgggtgatttctgcacaagagtatacaaatttaaaacatcactgagcttagctatacactcaatatatcctataaaataatgtcagatgatatgctttagaagttataaccatcagaaaacatttatccgtcgagtagcaacgttaaaaggaagattgctatcagttcattaatatgtggaaaaggaaaaaaaagyaaatcaaataaagtttcgtttctttttctttccatgtttacttcctacagttggatacttgcattgtcaacttggcagcgtgaagagattgacgtttttagtggttaagaaggacaagtcagaaatcagtccaacagattgaaactctgtgttcatttttgtgtttgaa

SEQ ID NO: 405930 - DNA, 572 bp, Homo sapiens
tagcgcaaaataagacatataaatggccaacaggtttataaaaaattctcaacagcactaatcatcagcaaatacaaattaaaaccacaatgagatatcttaccaataaaataaaaataacatctttattattgaaaagacaaaaaataatgcattttgtcaaaaatgcagagaaaaaagaactcaaacaccatgggaatgtaaactagtagagaccctatgaaaaacaatatgaagattttttaaaaactaaaaatagaactaccatatgatacagcaatcctattatttatccaaagaaagggaaatcagcatatcaaaagagtaattgtactctcatatttattgtactctcatactatttcaatagcaaagatatgaaatcaatttaagtgtcaatcaacagacgaataaagtaaatgtggtatatacacacaaaatggaatattattcagccaaaaaaaatgaaatcttgtcataagcagcaacatggatagarctggacatcattatgttaagtgaaataagccatacacataaagacaaatctctcatattctcactcacagatg

SEQ ID NO: 405931 - DNA, 609 bp, Homo sapiens
tacactgggtgatcagaaaaggccttgcaaagaaggtctctgacagagacatggaaagcgtgacagtgagctaatcagccatcttggtaaagcattmcacacagagggaacaggaaatcaagatttgcagtggatatacaacacagcaaggaggccactgtggctggaacacagtgagaggcagagggcagtaggagacaaggtcagcaaggtggcttattgatcaagtcaggtacaccgatggctacagaactctgaaaggcagatctcttgcctcaaaagttagagcaaactctgaggaataatttatattccagtcacttactaagcagaacaccttataggggagaggaagtaaactcccaggcacttctggctttctatacctgcattctgagcatcagcaaatagctgtttctgaataagaattgcaggcagaggctgttggaagtaagagcacaccaaagctaggcaaagggcacacagaaacagcaaaatatagcaaaatgaatccgaggggaactgggtggagcactaacagtttccactacagacaaggtttccttgctttctggtgtgacaagaggtttctcacttaaagaatgcatg

SEQ ID NO: 405932 - DNA, 609 bp, Homo sapiens
tacactgggtgatcagaaaaggccttgcaaagaaggtctctgacagagacatggaaagcgtgacagtgagctaatcagccatcttggtaaagcattccacasagagggaacaggaaatcaagatttgcagtggatatacaacacagcaaggaggccactgtggctggaacacagtgagaggcagagggcagtaggagacaaggtcagcaaggtggcttattgatcaagtcaggtacaccgatggctacagaactctgaaaggcagatctcttgcctcaaaagttagagcaaactctgaggaataatttatattccagtcacttactaagcagaacaccttataggggagaggaagtaaactcccaggcacttctggctttctatacctgcattctgagcatcagcaaatagctgtttctgaataagaattgcaggcagaggctgttggaagtaagagcacaccaaagctaggcaaagggcacacagaaacagcaaaatatagcaaaatgaatccgaggggaactgggtggagcactaacagtttccactacagacaaggtttccttgctttctggtgtgacaagaggtttctcacttaaagaatgcatg

SEQ ID NO: 405933 - DNA, 612 bp, Homo sapiens
aatgattagaccatttttaccacagtcttactcagttattggttggatccatcctgaaaaaatgatagctcaaaaatgtaaaggagtaaatagctggagggtgtcagctaactatactcctcatagctgggtgagaaatcttttcttgaaggagtatctgagttgtgcatctctattcctgccacaacaactcaggatgccatgcactaccttcaattctagatactggatagattgtagcttggatctcgattttgggaaaaggggaaaatgcagttgtttttgcatctggacccagtgtgctgtctatagaagtaggcaagctctataaatgaggacttcrtttctcctattctggaaaggaggcatgcaatatgggatgaactgtaggaacctatttcaaagccaagagcagctgatcagcatctattttaagagattattgtcgaaacatatttatagagtagattttttccattgaaccgtggatgccacctaattataggcttttgttttagaaaatctatctctgaaatggaaacatttgagtattgttcctaaagacctgaactgttgtgtactataataaaacagaaacccccaaatttgtct

SEQ ID NO: 405934 - DNA, 612 bp, Homo sapiens
aatgattagaccatttttaccacagtcttactcagttattggttggatccatcctgaaaaaatgatagctcaaaaatgtaaaggagtaaatagctggagggtgtcagctaactatactcctcatagctgggtgagaaatcttttcttgaaggagtatctgagttgtgcatctctattcctgccacaacaactcaggatgccatgcactaccttcaattctagatactggatagattgtagcttggatctcgattttgggaaaaggggaaaatgcagttgtttttgcatctggacccagtgtgctgtctatagaagtaggcaagctctataaatgaggacttcatttctcctattctggaaagraggcatgcaatatgggatgaactgtaggaacctatttcaaagccaagagcagctgatcagcatctattttaagagattattgtcgaaacatatttatagagtagattttttccattgaaccgtggatgccacctaattataggcttttgttttagaaaatctatctctgaaatggaaacatttgagtattgttcctaaagacctgaactgttgtgtactataataaaacagaaacccccaaatttgtct

SEQ ID NO: 405935 - DNA, 612 bp, Homo sapiens
aatgattagaccatttttaccacagtcttactcagttattggttggatccatcctgaaaaaatgatagctcaaaaatgtaaaggagtaaatagctggagggtgtcagctaactatactcctcatagctgggtgagaaatcttttcttgaaggagtatctgagttgtgcatctctattcctgccacaacaactcaggatgccatgcactaccttcaattctagatactggatagattgtagcttggatctcgattttgggaaaaggggaaaatgcagttgtttttgcatctggacccagtgtgctgtctatagaagtaggcaagctctataaatgaggacttcatttctcctattctggaaaggaggcatgcaatatgggatgaactgtaggaacctatttcaaagccaagagcagctgatcagcatctattttaagagattattgtygaaacatatttatagagtagattttttccattgaaccgtggatgccacctaattataggcttttgttttagaaaatctatctctgaaatggaaacatttgagtattgttcctaaagacctgaactgttgtgtactataataaaacagaaacccccaaatttgtct

SEQ ID NO: 405936 - DNA, 574 bp, Homo sapiens
aaaaaaaaaaaaaagacattcatgattcatggaaggaggttaaaatatcaacatgaacaagaagttgactccaactctcatggaagactttgaagggtttaagtcttcagtggaggaagtgactratgatgtggtggaaatagcaagaaaactcaaattagaagcggagcctgaagctattaatgggttgttgtaatctcatgataaaacttgaaaagatgaggagttgaatgaacaaagtggttttttgaaatggaatttactctcggtgaagatgatgtgtacagtctttaaatgacaacaaagaatttaggatattacctaaacttagttgataaagcagtagtggtgtttgagagggccgaccccaattttgaaagaaattcttctatgggtaaaatattaatattatcaaatagcactgcaagccacagagaaatctcagatgaaagagtcaatcaccgtggcaagctttattgttgttctattttaagaagttgctacagggctgggcatggtggctcaggcttgtaatctcaacattttgagaaactgaggaaggaagatcacttga

SEQ ID NO: 405937 - DNA, 574 bp, Homo sapiens
aaaaaaaaaaaaaagacattcatgattcatggaaggaggttaaaatatcaacatgaacaagaagttgactccaactctcatggaagactttgaagggtttaagtcttcagtggaggaagtgactgatgatgtggtggaaatagcaagaaaactcaaattagaagcggagcctgaagctattaatgggttgttgtaatcwcatgataaaacttgaaaagatgaggagttgaatgaacaaagtggttttttgaaatggaatttactctcggtgaagatgatgtgtacagtctttaaatgacaacaaagaatttaggatattacctaaacttagttgataaagcagtagtggtgtttgagagggccgaccccaattttgaaagaaattcttctatgggtaaaatattaatattatcaaatagcactgcaagccacagagaaatctcagatgaaagagtcaatcaccgtggcaagctttattgttgttctattttaagaagttgctacagggctgggcatggtggctcaggcttgtaatctcaacattttgagaaactgaggaaggaagatcacttga

SEQ ID NO: 405938 - DNA, 610 bp, Homo sapiens
aggtttgtttacaccagcatcaccacaaacacatgagtaatgcattgtgctatgacattatggctgtgacatcactgggtgatagaaataattaggtgatagaaaattttcaacttgattataatcttatagaaatgcaatatatgtggttcatcactgagcaaaacatcattacctggttcatgactgtagaagataaccaaataggaaaggaggaagttaaattatctgtttgcagatgatatagtattatatatggaaaaccctaaatactctacaaaaaaactgttaaactaatcaacaaatccaataaagttgcaggatacaaaattaacwtacaaaaacctgtagcatttccatacattaacaatgaactaactgaaaaagaaatcaagacaacaatcccatttaaaatagcatcaaaaatactttaaaataaaagtaaccagagatgaaaaatatttacactgaaaactacaaaaattgatgaaagaaattggagaagtcacaaataatggaaaaatatcctgtgttcatgggttggaagaattttactaaaatgtccctactacctgagatgacttacagattgaatacaatccgtatcaaa

SEQ ID NO: 405939 - DNA, 521 bp, Homo sapiens
acaatacagacagttcaacagtattcgagtcctactgtcatagtctttgctgaggttattgtggtgacttaggaccatagtttgctggaaagcagtctgatttaaagaggtattcattttcatagttagcctggtaccacaagtcatggtaaccttggacccactaaaagaaacatagaaattagacactttggtaggccaaagtgggtggatcaggaggtcaggagatcgagaccatcctggctaacacagtgaaaccccgtctctactaaaaatacaaaaaaattagccaggcatggtggcaggcacctgtagtcccagctactcaggaggctgaggcaggagaatggcatgaacctgggaggtgagcttgcagtgagctgagatcctaccactgcactccagcctgggygacagagcgagactccatctcaaataaataagaaaagtctggaagagctaagatcaccatttggaatgcccacaaaccaaccactattagttttcacaaacatatcatg

SEQ ID NO: 405940 - DNA, 622 bp, Homo sapiens
atgaatgtatttaacaccactgaactatatacttagaagtagttaaaatggtaaatcttatgttaatggtaaattttatgttatgtgcattttaccacaagtaaaaaactggaaaacaaaccataaataggagaaacttccttatcctgattaacatattggtgatcaaatgttgaaagctttgatgttgtagaaagcattttaatttttctcttaatttcatagtccagtcaggaaaaagaaaaccattctaggtattttgatagggcaattaaatgcagggaaatgattacatgggcgacagaatagttaagccaaagaggggatagtggactttaccagagattagcracagctggacctccgtaggctggagggatgtaggaagaaggtactattaccagagaccagatgctgagttgttcagatagaagatagaaccatgacagcacgggaatcacagagggaggggctgtgcctttcaggagctgcaaaccaaaaagagacttagctgctgtcagacattgctctaaactggggtgacaaaaacatttcctgccccctttctaatcttcctccggtacctcttcttggtcccactcaactagaaaccagaggacaa

SEQ ID NO: 405941 - DNA, 570 bp, Homo sapiens
tcgttttctattgctgcttaacaaatcaccacagattttcttcttaaaacaacacgaagttattatctctgtttctttgggtcagragaccagcaggatctagctgggtcctctgctcagggtctcgtaaggtagaaatcaaggtgtcagcgggcagcatctgcatctttaggcttgactaagggaagattcacttctcacctccctcgggttgttgacagaattcatttcgatgtggccatatgactgaggtctctgattacatgctaactgttggtgtgggaccacttcagctcctagaggcctctcttgtctcttggccatgttgccctcctcacagcatggccatttaccacaggccagcagaataagcatttttctgatgcctcctcaccttctcttacaggactccccttgctatagactgaatgttttagtcccccacaaaatgcatatgttgaaacctaatcaccaatgtaatggtattaggaggcaggacctttagtaaccaaattaggtcatgagagtggcatcttcatgaatgggattagttccctcataaaaggtacc

SEQ ID NO: 405942 - DNA, 475 bp, Homo sapiens
ctttggtacatcataagtgcttaaacattggatgttatctagtctaagtcttgtttctttaattgtaaaagtttttattgggatatgcaagcagaagatcaagttaatattttatgcaaaatattttatataaaatactttttaaaaatttattttggcaccggctaagaatttgttagtcataaaaaaaggaaggtgtattttttagcttaaagaacgtaaggttttgttttaagacttgtatccaagttgaatgcaaatratgattctttatggtcagaaggatttgtgtcaaagaatcaagaatagctcaaaattattttatctttcaaaaggagataacagtaatattaacatattagacacagactcattgaataaagtgttagcgatgcaatacttgttcctttcttcaattttatcagtttgcaaaattcatgaggttaataagtattaaaaatctcattactctacc

SEQ ID NO: 405943 - DNA, 572 bp, Homo sapiens
aaagaaaactggggaaaatcctacatataaatttgagtcaccttaatagaatatgaaatatttgttcatcaggtttgagttagaaaagacaagcatagaggatatattgcttccctacaaacgtctttttgactcctaaggaactcctagtttttggggagcaggtaggggttcatctatgatttyggggaggttaggctcttacccagctgataaattatgatttatagggaaacactggtcttttctttcagaaggagaagccatcctcagcaaagccttaggagcaataggtcttttgctccttccccattcctctgtctggaactcaaatgggatgcttggagaccaaactgaaaagcttgtggacaaaatccaacattttaaagatggatgagtaaaattcctgggtcataacatcaatgttgaacctaagctctagaatttttattgggtgaggaaaaaaaaactctattttaaaatccacctccacattggattttctgtaagcaggaagcatttctagggaatatagtagctgacaggcattcgcagtcttaggccacaattta

SEQ ID NO: 405944 - DNA, 587 bp, Homo sapiens
ctatttttaagttttcgaggcacctccatgctgttttccgtaatagctgcatgagtgtacattcctactgaaagtgtacaaaagttcccttttctttatatcctcaccaacatttttatatttttgataatagccatttataacaggtgtgaagttgtatctcattgtggttttaatttgcatttccctaatgattagagatgctgagtattttttcatatacccttgaaaaaactctatttacattctttgtcctttgcctttttttttttyccccaacaatttcaacttttatttcagtttcaggggacccatatgcaggtttgtcacctgggttatagtgcgtgattgctgaggtttggggtatgattgatcctgccacccaggtactgagcatagtacccaattgttagtttttgtacccttactgatcccgtctcccccaagtagtccccagtgtctattattgccatctttatgtccactagaatccattgtttagctcccacttataagtgaaaaaatgtagtatttggttttctgttcctgtgataattttcttaagattatggcctccagccacatct

SEQ ID NO: 405945 - DNA, 576 bp, Homo sapiens
gttccaatttcattgctctgcatatagatatccagttttctcagcacccttattgaagagactgtccttttcccattgtgttcttggtacttttgttgcaaatcagttgattgtaagtaagtgggtttatttctgggctctctgttctgttctattggttgatatgtctatttttatgccaatattatgctgttttaattactatggctttgtaatatagtttgaaatcagatagtttaatgcctactgctttgtttctgctcaagattgttttcgctatttgggatcttttgtggttccatacaaattttaggattttttttttttctatttctttgaaaaatgtcactgggattttgctagaaattgcattgaatctgtagattgctttgggtggtagggacattttgacaacattcttttaatccgtgaagatggaatacctttccatttacaatcatgcactatataatgatgttttggtcaatgatggaccatatatatgacagtggtcycatagattataatggagctgaaaaatttttattgcctagtgacatgtagccatggtaacac

SEQ ID NO: 405946 - DNA, 567 bp, Homo sapiens
gataattctctcagatgttgtccaagaccattaaggtggtacctctatgagtctgcaagaacaacaatgttactggggcttggggtgccccctaaagcagatataacttagatcacaacacccaagtccttttaaatatctggaaagccttcccaggaaggacaggtacaaataagcccagacagcgaagactacagtaaatacctaacttttcaatgcccagacatcgaagaacatctactagcatgaagaccattcagaaaarcgacctcagcaaataaagtaggtaaggcaccagggaacaatcctggagaaacaggtaggtgaactttcagaggcagaattcaaaatagctgtgttgaggaaactcaaatacattcaagattacacaagaaattcagaatcctatcctataaatttaacagagagattgaaataagaatcaagcagaaattctggagctgataaatgcaatcagcatactgaaaaatgcatcagagtcttttaatagcagaactgatcaagcagaagaattagtgagcttgaagacaggctatttgaaaatac

SEQ ID NO: 405947 - DNA, 616 bp, Homo sapiens
agctgagggcagggggaagggtaaaggagcctgtcataattgaaacgtgacagactgtcatcattttatagcgatttactggattttcttgaataaacattcatacacttgctgtattctggaaatttttagacattttacttttcttaataattttcatcattactagtttttctgagaaacgatctacagagtttctcacaccaccattgaagaaatcttgccaagttcatttctgttcctgaatccatttattttataatctcatgtccccctaaccccctataacagtttcctgattcttttcttttgaatcaggaaaacagaatgtgcctatattggactgactttctgattcaggcacttctggaatacttggagagctgtgtgagggaaggtcttccaggactgtacttgccagaggaagtgaggaaggccgctaaggaagactcactgaagggaggattgaacaactcctcttcagtcatagggtaggtggaggrtgtctgtgacttggatttgagagtgtgaaacaaagttgggagaaagaaaatctctgtggatacaagagggtggaaagtatgttttgtaagttggaaaagaccatccctgtaag

SEQ ID NO: 405948 - DNA, 497 bp, Homo sapiens
tgatattttccccccaacaaaacaatgctcctttgtcagcataaagcagttaagaccagtcatcatccctatcctaatggaagttagatgaacctcctcagaggtgggatkaatggcagcagtggcccatctggagtggctgctgccatgataccagctgcagtcagggaggcatggctggggctgcacactccatggacccagcaggagctgcaaacaagcagaagccccatccccttctaagttggaggggcaggagccctgccctccaggatgcagctacagctgcccagctgcagctgtagacccaggcatctctgcactcttgggagcctgggaattccccctgtcaccacagactcagaaatgtctgctcccgctgcctggcctctcccaactcctggtgccaactctgattttggagtaaagtggctgagcctgggtgctgtcacgacttggccaggtgtgtgcacactcagggcagtgctgacatacaa

SEQ ID NO: 405949 - DNA, 583 bp, Homo sapiens
aagaaatgcagtctggctgagaccgtgtttgaagtcttgtgagactatgagtaaaagactcagataaactctgcccggactcatgacttacagaatttgtttaaaataaaaaaaarcagttgggattttgataacagtatgttgaaaatgatcaatttggggaattttgccatcttaacaatattaagtcttccaatccatgaacatggaatgtctttccaattatttatatttttaatttctttcaatgaagttttgtagttttcagtgtacaggtattgaactattttgctatttttggagatattttattctttttgatgctattgtaaatggaattgatttgcttcatttttagattattgccggtgcatagaaatacaattgattttatactttgaccttgtatcctgcaatctttctaaatttgtttattcattctattagtgttttattgaattcctaaaattgtgttacatacaaaattgtcatctgcaaatatagttttacatcttccttttaggtctggctgtctttcattcttttttcttgccttatatgcctagctaggaactatagtaca

SEQ ID NO: 405950 - DNA, 567 bp, Homo sapiens
tttccggctgctgtacattgttgccagcatttggtgttgtcagtattttggattttggtcattctaatagttgtgtagtggtatctcattgttttaatttgcaattccctaattaaatataatgttgaacatttaaaaacatgctttgtgccatctttatatcttttttggtgagatacgtattcagagtttttgtctactttttaatagggttgatttcttactgagttttaaaagtcctttatatattttggatataagttcaatttaagatacatgttttgcaaaattctctcccagtatggtcttgtcttctgattctcttaacagtatcttacagaaaacggcagacattcatatttttaatagtttatttcatggattggttttttgtattgtatctataaactcattgccaaggagaaggtcatctagattttctcttgttttatcttctargaattttatgttttgtgttttgcatttaggtctaccatccattttgagttaatttttgtgaaaggtatgaggtttgtatctagattcacttatttattttatttgtaa

SEQ ID NO: 405951 - DNA, 488 bp, Homo sapiens
ggagtaggtcttcagtattatctctcatttatggttttgaggtctccaggaaaattctctctccactatctcaatatttccttttctaatgttgtcagtaggttttgttaacatgcagtttttctggcattcttttattctttccacatttaagttcctccacaatcttatgcgacaactctacagcatgctttgttcttcacatgctctggcatcaactctttgattcagagaagtatagagacacactggtgtagtcaataccttttctttatgccttcatccctgctaaatgatgccctcatttgggctgtcctcttccttccctccttccgctctgcytaagaaaattcagcctgtggagatgatccagctcacatcaagttcatccagagtagtgcagtctttgattacttgatggttcttctgcttctgaacccaaatatttactgtctagagttgtctttttatgtgtataagtctttatt

SEQ ID NO: 405952 - DNA, 534 bp, Homo sapiens
tctttgactacacttttagctatctaagactaaagatttttatcagagaagaatgaaagaatcattgcatgccttgattgtgctgtcattggacrgaaatttataaagcacacttaaagtcacaaaagcagtgaaggaggaagtgaaaaatccttgatgaacaggttgtggttagcagtagttttctcctcaaaagcagtccatctataataccaagaattcaaatcaaattttatgtttaattcttccttttatgccccaggtacatttttgtaattaaacagtcaaatatttaagttatttttaaatttccaaatggcaatctataagacagaaaaaaatccccacagacaacagaggacagattttataaagtgtatattgaaagtctggaaggttttacatgtttagtccatgaacacaaataagtattgtatatatggaactattttgactgtgaatagctgcagtttgaagaccttctttaagttctgtaatgaaccaaacagtggcatggatcattcactggtcatt

SEQ ID NO: 405953 - DNA, 542 bp, Homo sapiens
tctgcaacaggatctgtaccaagccctggactcattcagaaataaatgattggggggtttggttgtaaattgaggaaacaagtctttgggcttactgcctcctcatcctgagctgggcagatccccatcctctcttgaagtccatgaaagcatatctaccttctgacaygcagaaatggccctgcaaatggaatctaactggagctgaatgagtattcttgcctcagttaatgtattttcatacttagccagttccaaagcaacaatgtgcacaacttagacatgcttattggccaggtgcttaccacctatttggcaaatgctgtttatgaagtttttaagaaacaaatattgatccaaaatttcccttgcgtttaatattctgtcattctgcaaggccagtattaagtttgatgtacacatacaattacctgtctatctaaacagtttcaactgccctaattcttgggcaccacaccgtgattaaatgtatacaagcaacaagttcttgatttgggcagctagaaaaccactgtggcata

SEQ ID NO: 405954 - DNA, 536 bp, Homo sapiens
gtcctaaagagatagccagtaatttaacttattcttgcacaactttatgtatttacaagctgatggcttctcatttggatatcgtcctataactttctgagagcaatggattataattaaagtatttttatcgtcacaaaaatagatttagatgatgtcagtgatttagtatcttaaacaagatagcttgtaatttggaatccacccttttagtttgtgagacatcactggaatgtcaatattcctctgacagtaaagagtggcagcactaagacatagcaaatttggcagtaaatatattgtcttcaaattttgaaaatacatccaaatatctctttcattccccttacaggtacmttaagtgctgtcagtgtacaacacaattctaaatgttcaaatattgaaagaaaggctgtgaatttaaagaaatactgtgtggagcagagagaatgtatattttgtcaattatgatggtggcatgacaaagggacctcatttgaaatgtattataccatagaaacatcttaaggtttggg

SEQ ID NO: 405955 - DNA, 615 bp, Homo sapiens
caaacagcattgaagggtaacctggcagatcaaaccagcacttattgctgggaaaagtcaggcaaggtagggtgtgtacaataaaacctaaaaatgagtttggataggaggggatccaatcaatcaatcacaaataggtttttcatgctggggcatacagatatatccctrtttttaagggcttacttctagctatgagagttagataaatcagatgaaagaaccacaggtttgatgatagaagggaagacaaaattccaggtgagagaaggcttaagtaaagatagacaggaaaggaatatgtttcaccagggaatgaggaaataattctcacttgtcaaggattcaatgtggaaaattgtgagctagtagactgaaaatgttagtttatgccagactgtgatgagatttgaattcaaggctttgggttttatttggccagcaaaacgttttccatggaatgtggtgggttaaaagtgatatttgaggaaaatcagtatgacatcagtcaacaagttaaagtgcactttcatataaaactgagagtggtcaggaagcctgggaaaattttgcatgtgtttgatgtctaaagatttatccacgtaactgccttgt

SEQ ID NO: 405956 - DNA, 615 bp, Homo sapiens
caaacagcattgaagggtaacctggcagatcaaaccagcacttattgctgggaaaagtcaggcaaggtagggtgtgtacaataaaacctaaaaatgagtttggataggaggggatccaatcaatcaatcacaaataggtttttcatgctggggcatacagatatatccctgtttttaagggcttacttctagctatgagagttagataaatcagatgaaagaaccacaggtttgatgatagaagggaagacaaaattccaggtgagagarggcttaagtaaagatagacaggaaaggaatatgtttcaccagggaatgaggaaataattctcacttgtcaaggattcaatgtggaaaattgtgagctagtagactgaaaatgttagtttatgccagactgtgatgagatttgaattcaaggctttgggttttatttggccagcaaaacgttttccatggaatgtggtgggttaaaagtgatatttgaggaaaatcagtatgacatcagtcaacaagttaaagtgcactttcatataaaactgagagtggtcaggaagcctgggaaaattttgcatgtgtttgatgtctaaagatttatccacgtaactgccttgt

SEQ ID NO: 405957 - DNA, 615 bp, Homo sapiens
caaacagcattgaagggtaacctggcagatcaaaccagcacttattgctgggaaaagtcaggcaaggtagggtgtgtacaataaaacctaaaaatgagtttggataggaggggatccaatcaatcaatcacaaataggtttttcatgctggggcatacagatatatccctgtttttaagggcttacttctagctatgagagttagataaatcagatgaaagaaccacaggtttgatgatagaagggaagacaaaattccaggtgagagaaggcttaagtaaagatagacaggaaaggaatatgtttcaccagggaatgaggaaataattctcacttgtcaaggattcaatgtggaaaattgtgagctagtagactgaaaatgttagtttatgccagactgtgatgagatttgaattcaaggctttgggttttatttggccagcaaaacgttttccatggaatgtgrtgggttaaaagtgatatttgaggaaaatcagtatgacatcagtcaacaagttaaagtgcactttcatataaaactgagagtggtcaggaagcctgggaaaattttgcatgtgtttgatgtctaaagatttatccacgtaactgccttgt

SEQ ID NO: 405958 - DNA, 590 bp, Homo sapiens
gttttacttttcttggataccttttatacctctgctctcctctccatgttaattctcttaatctgttccatgccctctcttaagtctgtcatttttgtaaaaagaggagaattctcagtgctatgtttrgtctcttttattccttccccaaatcctctttatctctgctgtctcattctctttaatttagattttcattacacgtgtaaggctggccagatcacgtgttctgttttagccatgcattcagatgtatttggtgggatgcagaagcattagctgggatacagtggaggattatttcagtgttattggtaccaagtaaaactgaggtttcaaaaagaagtgtgtctatttaagtgtaaaattcactaaccatctctcataaaagcatataatgggaggagatacaaatatatattttctgttttcatggtggagaatttttgttttaatgtttttacattacaaaggataaagtttaagtatttccaatttactcaaactattgtatgtatgcaaatttgtaagatacacccacctgcctactttctttatctccgtttcttttttccttccttctcattttc

SEQ ID NO: 405959 - DNA, 590 bp, Homo sapiens
gttttacttttcttggataccttttatacctctgctctcctctccatgttaattctcttaatctgttccatgccctctcttaagtctgtcatttttgtaaaaagaggagaattctcagtgctatgtttagtctcttttattccttccccaaatcctctttatctctgctgtctcattctctttaatttagattttcattacacgtgtaaggctggccagatcacgtgttctgttttagccatgcattcagatgtatttggtgggatgcagaagcattagctgggatacagtggaggattatttcagtgttattggtaccaagtaaaactgaggtttcaaaaagaagtgtgtctatttaagtgtaaaattcactaaccatctctcataaaagcatataatgggaggagatacaaatatatattttctgttttcatggtggakaatttttgttttaatgtttttacattacaaaggataaagtttaagtatttccaatttactcaaactattgtatgtatgcaaatttgtaagatacacccacctgcctactttctttatctccgtttcttttttccttccttctcattttc

SEQ ID NO: 405960 - DNA, 435 bp, Homo sapiens
actttatttggagattttacaattgttagatctgtaatacacatttatgatttgcagcatctaaaataaaacagctgtgtgtgttgggggaggctgcaaggagggtacaccatgtgttgaggaatgagtctgaaccacatttatacttrgtgaaacttgttgggatagttgcacattcattcttggtgaaactttttgagcctgttcaggactcagtggagattcctgcttgctttagagatataagaagaggcacgtgctcagtgaaccaagaaggaaacccctccctacattccatcggtcacttgtttcatctcctaaataactctcaagtacaaaggaaataaaatccttttgattttatttttcctccagcttctaccctggttcaggtcatcatcatggtgacctctcggttagacctctggaagaact

SEQ ID NO: 405961 - DNA, 522 bp, Homo sapiens
tattaggcatgtccacatccataattaataacattgggttaagcatttccatttaatacatatagagacagacagagtttgcacagtatctttcctttggttcttatctaatgactgactctcttccatgtacctttaaaaccactaaaataaatggtctacttgggaggttgatatactagccaagctataggtctaaacwtcaaatgcaatttaatctatgcagcattcctttttcatagtgaatctttaaagctcaattttttgcattgattgatcatcctgggaaacagaaaaacctcaactcacagcttcaagaacttgaaaagccctaatccagtgcctatatccatcacctctgaggacaacaggaaaattgaaaaggaagaaatttcctacagactcatgataaacttattgatagtagtaatgatatacattttttaaaaaattatcaaattgtgtattttttaaattattaaactcccatggcctcaatattctactctgccaaatgatggg

SEQ ID NO: 405962 - DNA, 522 bp, Homo sapiens
tattaggcatgtccacatccataattaataacattgggttaagcatttccatttaatacatatagagacagacagagtttgcacagtatctttcctttggttcttatctaatgactgactctcttccatgtacctttaaaaccactaaaataaatggtctacttgggaggttgatatactagccaagctataggtctaaacttcaaatgcaatttaatctatgcagcattcctttttcatagtgaatctttaaagctcaattttttgcattgattgatcatcctgggaaacagaaaaacctcaactcacagcttcaagaacttgaaaagccctaatccagtgcctatatccatcacctctgaggacaacaggaaaattgaaaaggaagaaatttcctacagactcatgataaacttattgatagtagtaatgatatacatttttwaaaaaattatcaaattgtgtattttttaaattattaaactcccatggcctcaatattctactctgccaaatgatggg

SEQ ID NO: 405963 - DNA, 574 bp, Homo sapiens
tcccacatctctataacattaaaagatcaacttcttaaaacatatgtaacattttctttccttgccccaagatgcttttaaaggttttataaactacccttctttggacatttttgtcatcaatttgctacttttctgttcaaaatgaataacagcttcccataggcaatgatactattatcctctctgcatatgtaaactacctcgccttcaggacacaaaattcagtcccaaatcactgtcttcagcctcattgatattgtccctctcctaaagactcctatggcttgaatatgtgtcccctccaaaactcacgttgaaattttatccccaatatggcaatattgagtagtggggcttttaagaggtgattgggtcatgagggctgtcccctcatggatgtgttaatccatctgtggattaatgggtcatcatgggagtgggggtggtagcygtataaaaagaggaagagagacctgagctagcacacccagccctctcatcatgtgatgccctgcaccacctcacctcaggactctgtagagagacctccgcagcaaaaaggccctcacca

SEQ ID NO: 405964 - DNA, 446 bp, Homo sapiens
taacaactttacagaaaataatctaatgatccaatcaaaaaatgggcaaaagacttgaatagacatttctcaaaagaagacatacaaatggcaaacaggcatatgaaaaagtgttcaatatcacagrtcatcggagaaatgcctgaatagacatttctcaaaagaagacatacaaatggcaaacaggtatatgaaaaagtgctcaatatcacagatcatcggagaaatgggagaaatgccaatcaaaactacaatgagatatcatctcactccatttaaaatggcttataaccaaaagacaggcaataacaaatgcctgtgaggatgtggagaaaagggaacccttgtacacagttggtgggaatgtaaattagtacaaccactatagagaacagtttggaggttcctcaaaaactaaagattgagctaccataagatctagcaat

SEQ ID NO: 405965 - DNA, 513 bp, Homo sapiens
tttaatttctccaagtagttttaaaataaggtcaagtcaaaaatactattctgtacatatgtactagataacaactgatgtattgccagagaaagcttatagcccaaatgtgaaagagtggagtttcttaaacctgaacatatrtaagaattacctgggataatttttaaatgcagattctgatttagtaggtttgggatgaaatctaagattccttatttctaataagctcccaggtgatgcagatgctgctggtcagacaactagcaacaggatggagactcaatcattaatgattatcaagcaaacaaggagcaccttaatctcctttaccccatcacctctgtttaccaaccagtagagacctctctaagtatatagtaaattctgtgtaatataaattatctgagcaacatacattgttcaaaggtacccaagtaagtccttggaaaccaggtgatgttgtaggaatttgaaagtctgatagctcagcaaccatgcctggggtgccca

SEQ ID NO: 405966 - DNA, 537 bp, Homo sapiens
taatctatcattgatgggcattttgattgattccatgtcttttttattatgttctcacattcttaaaattaaagttgggactagttgatctccaaagtgcccacatactaaacgctgaatggtttcaaaagaaaagtgagttaatggcagacaataacctcagatctcagttcctaccttgttctcaccagtccagtttgtkttctgccatttgctcatatatttcactgtcactacgtacttatgaaatttgtaagtcaataaatggtgaagaaaagaaaaacaagaaaagtcatccacattttagaagggcaaaattgtgagtaaggagctgagtggttgaatccgaatattttcattaattccaaacaaaggcaatggaaagtgggaaggaggggaattgcagttctataagctatagttgctccataggagaaagggaagagccagcagtaatcaggactttttaaaagaactgtccaagttcaatgacaatatcatctagctctctgactctaggcatctgccaagaatcat

SEQ ID NO: 405967 - DNA, 537 bp, Homo sapiens
taatctatcattgatgggcattttgattgattccatgtcttttttattatgttctcacattcttaaaattaaagttgggactagttgatctccaaagtgcccacatactaaacgctgaatggtttcaaaagaaaagtgagttaatggcagacaataacctcagatctcagttcctaccttgttctcaccagtccagtttgtgttctgccatttgctcatatatttcactgtcactacgtacttatgaaatttgtaagtcaataaatggtgaagaaaagaaaaacaagaaaagtcatccacattttagaagggcaaaattgtgagtaaggagctgagtggttgaatccgaatattttcattaattccaaacaaaggcaatggaaagtgrgaaggaggggaattgcagttctataagctatagttgctccataggagaaagggaagagccagcagtaatcaggactttttaaaagaactgtccaagttcaatgacaatatcatctagctctctgactctaggcatctgccaagaatcat

SEQ ID NO: 405968 - DNA, 537 bp, Homo sapiens
taatctatcattgatgggcattttgattgattccatgtcttttttattatgttctcacattcttaaaattaaagttgggactagttgatctccaaagtgcccacatactaaacgctgaatggtttcaaaagaaaagtgagttaatggcagacaataacctcagatctcagttcctaccttgttctcaccagtccagtttgtgttctgccatttgctcatatatttcactgtcactacgtacttatgaaatttgtaagtcaataaatggtgaagaaaagaaaaacaagaaaagtcatccacattttagaagggcaaaattgtgagtaaggagctgagtggttgaatccgaatattttcattaattccaaacaaaggcaatggaaagtgggaaggaggggaattgcagttctataagctatagttgctccataggagaaagggaagasccagcagtaatcaggactttttaaaagaactgtccaagttcaatgacaatatcatctagctctctgactctaggcatctgccaagaatcat

SEQ ID NO: 405969 - DNA, 610 bp, Homo sapiens
tgactgctaggcagagcaccatggctataaaacagaccactgagctaggcaataaaagagagagagggagagagagagaataagaggtctaatgtcttgtttatgtcccctttatagcatstttgagaggctctgcagtcccacagctggctttagttcatatgcttttctgattaaggcaatacgtaccaaagcaatctaatattaacgtgcaatttagaaaaaaatagaagggtgaaaaaaaggaggaaatctccacaaacagtgtaactaaacaataaacagaatacaagacttgcttaattctttattaaatacatgctttattttaagtccctaaaacatttgtatctcattttaaacacccagttctaccatattgtgtttagtgacactaatccttctttatggcctaaccctttgagaatcacgattatgtccccagtaatcagtagtaacaagttttattataacaatcctgatcacagatttataaaaaccttaaagaaaaaacatggaaatagaaatggctaggataatatccaatatgagaaagatctttatttaacatgaagtataaagcttggctgatgaaatgtctctaagaata

SEQ ID NO: 405970 - DNA, 507 bp, Homo sapiens
atcatcatatatgttcttggtcacaagcaacttgatcgtaaataatattaattttccttatgatctgattctttcagggccaatcaggttgtgcagaatgaattaatgtgaattgaaattttcctaaaactttgaatcccaacttaggtcttcctggtatactattgtgaggatttcagyagagtacaactaggacagaatatggtctggtctgatcattcagtattgaattgacctaggaaatactctagaagatacttggaacccaggtatcacgcggcctgttttccattcagattcaccatcatcagttagcgtaggagaaaaagggcagaaggaagaacaagaaagtaaacagctgctaccattaagaggaaatctccatacagtctgagatctcccaggctcaaaacacatgagatttaaaacaaaaaaaaattcttttaaagttttatttttagttaatacacaataattgtacatatttatggggcacaatgtgatgtt

SEQ ID NO: 405971 - DNA, 507 bp, Homo sapiens
atcatcatatatgttcttggtcacaagcaacttgatcgtaaataatattaattttccttatgatctgattctttcagggccaatcaggttgtgcagaatgaattaatgtgaattgaaattttcctaaaactttgaatcccaacttaggtcttcctggtatactattgtgaggatttcagcagagtacaactaggacagaatatggtctggtctgatcattcagtattgaattgwcctaggaaatactctagaagatacttggaacccaggtatcacgcggcctgttttccattcagattcaccatcatcagttagcgtaggagaaaaagggcagaaggaagaacaagaaagtaaacagctgctaccattaagaggaaatctccatacagtctgagatctcccaggctcaaaacacatgagatttaaaacaaaaaaaaattcttttaaagttttatttttagttaatacacaataattgtacatatttatggggcacaatgtgatgtt

SEQ ID NO: 405972 - DNA, 470 bp, Homo sapiens
ttgtatttttctccacctacacatgggcctgttttctttgattctcccaggtctatcccagctgctccttagaatcattcacccactcaactcttggcaacttctacattgctgtcccttaatcttggaacagccttccaatcaatgtgttttgagccacctcctaacttcagaaagaaaattcctcaaactccatctgtttagagaccatctagtttcaatgatcagtctcctcaccattttgagaactcttctaacatgttgaaatgtaaatactaattgttttcacataaaaattagcaagcactttagcgtttaatccaaacacccccaagctacactttgaatgaaaatcttcaatttcccccaactttcccaytttaaaaatgggattgttttatgctgaagttaagaaatgaatctccattgcagtctgtgcatcaatgcatgagtgaaggaatgtttgcatt

SEQ ID NO: 405973 - DNA, 423 bp, Homo sapiens
gttactataaaggaaaaagagtcaataactaacaccagtaaaacaagtaatgaagcttttaaagataaaaaagaaatctctcatacctccaccattctaaacacaacagatttcctttgagcctatcctttttactgacagtagccagaaaacaactgtgaatgaagggctttccagatcaattcttaaatcaaaaagtgttggaaaactcagatttaaaaaagagagaaacattaggagcttgtgtcctggtcaagaaatgaccaatgaactccttgataagcttcacgccctcacctgtaacatggacttaataatagtacccaccgttcatctgtaacatggctgtaataatgrcacctactcgttgctgttagcattgaaggagccaacgtatgcaagccaatcacttaacaaatgtcc

SEQ ID NO: 405974 - DNA, 526 bp, Homo sapiens
tacctctctgaattgtacagaaactgcatgtaaaaagagaagagacataattgaggaaattactttcaattgtttctcattcatccctaagccatttgttgcagcctgaccattttaattcttattcttctgtgtaaattagaagctttgtaaccaacagagagtctcagatctgggattaagactcattgatccatttgctaaaagccagcctatcttattagtacrttggaacttaaataaacaagaataggaatccttgccataaagctgcattgtgacaaaaaccaacattgtcccagtgttcccaacgcttcaatatcatgtattagattttcaaaataagtgataaaatccctaataactatattttaagagggttgcttttattgtatttcaaatgtaatgtaaatttgaaacacatggattctcttcccaagaagattatttttaaagcactataattaggtttagttataaccaaactcattaacttatgatattgctattctaataaaattttgct

SEQ ID NO: 405975 - DNA, 525 bp, Homo sapiens
gtggctgcgaagtccaaaagcaaggggctagcatctggagagggccttcttgcagcatcatcccatggtaaaatgtgtgtgttgaggggaggtgggggtcaagggagcacaagagagcaagagggggccaaactttcttttgtaacaaacccactcctatactaatgacattaatccatttatgaggaaagatccatatggcctaatcacctcttagagttttcacctctcaatattgctgcatgggagattaagtttctaacacatgaactttggggaacacagtcaaaccataacacttaccaaggtctcctgtcaccaacttttgtagcaatagtacagtwacacagcattgatattttaaaaattaagtcattgcgtgagccacactagcctgtgtaaattagttgctctcaggaataagttcctaaattcacaaaaagatcttctcttaaattataagttttcaaatagattttataagttaaaagaagaatgtacaaaggggacttcccttttgattca

SEQ ID NO: 405976 - DNA, 594 bp, Homo sapiens
agcatttttctccctctttacagcagcatgccttttgaatctgaacattcttctgtgtttgccccatttcagtattgcttactaacatttaatatattttgcttttttttttattttgctgacaaagttgcattgatgaaagctgacttgcaaggtagatagccctgtgtgtatataacaagactgaaaccccataatacacagtggaaaccctaaaataacatattttacatttctgcagtaactgttatttgggttcagatttcattcttttcctttcttgaacgttgtgcaagaagcctaactttgtagcatagtttgtataaaggctttcagtcttgaatatgtttgtatagtgattgcctttagtgctttgatcatgcttttttwagttctttgtttttcagtgttctagttatgattctttagaaatagactagcattctttttacttgtatgtttattgagggcatgccatttatatggagtttttaattttatgtttaattgcatgaaattgttaaaagcatgtgaattgatacttgccaacatacctattcaaaacacccagcaatcataactttatcgtttgga

SEQ ID NO: 405977 - DNA, 595 bp, Homo sapiens
gttattttttaattactaatgatcaccttgttcaaaagaatgtttttcatttccaatatatgacaattctcccttggtttttgaaagaaccttcatattgttttatattaaataatacttaatttcatatgattatgtctcgagggctgtaattttactgaatggttacaggtctcatttttctctctgcrtacatctctttaagcccattgctgccttttacttttaaaaaaatatgttcaaacattgtcccttcagccattctcccttgtatcttagcaacttatgtttttccccttaaaatcctttaactaagtattacaatataagcatgaaaataaaacacatgattcacattatatcatggcatatctgctagtgcctaatttatatcacagcagtgagggtttgaagatggaattaactgatctataagatgaagttctgtgtcttaatgttctaataggtcctgatttacagcacatcatcaaaatgataaaagaatttcatacaaaacattgcattctgctatattaagagaatattcctgacaaattgacctggttgtaaaatagaatacgtgctatatgttgtc

SEQ ID NO: 405978 - DNA, 595 bp, Homo sapiens
gttattttttaattactaatgatcaccttgttcaaaagaatgtttttcatttccaatatatgacaattctcccttggtttttgaaagaaccttcatattgttttatattaaataatacttaatttcatatgattatgtctcgagggctgtaattttactgaatggttacaggtctcatttttctctctgcgtacatctctttaagcccattgctgccttttacttttaaaaaaatatgttcaaacattgtcccttcagccattctcccttgtatcttagcaacttatgtttttccccttaaaatcctttaactaagtattacaatataagcatgaaaataaaacacatgattcacattatatcatggcatatctgctagtgcctaatttatatcacagcagtgagggtttgaagatggaattaactgatctataagatgaagttctgtgtcttaatgttcwaataggtcctgatttacagcacatcatcaaaatgataaaagaatttcatacaaaacattgcattctgctatattaagagaatattcctgacaaattgacctggttgtaaaatagaatacgtgctatatgttgtc

SEQ ID NO: 405979 - DNA, 494 bp, Homo sapiens
tctttttatattattgttgggcagctgaataatagtttcagtctgtatctatatgagaaaatttaggtggggagaaaamcaacaaaaaagggaatagagtaatgctgtatttgaattatctatgttagtcccttgcactgttgagcagcttgatgattcaactctcagcagccttttagtctgtgaattctgccaccttggcccctagaaatcaaaaaggaagcaaacccagtcagaatgttttcttcacctatggattttcctgctagtatgctctaatttttctggcttcattaaaactctgtctgtgtagaccttaatttggctcaaatgttagcactcttcatcatcgatcttataggtaaatatggaggtggctttcaatgttggtcttactgtggtaacactatcctatctcaccagagcccagctaaccagagctgcattcagaggaggttttgctagtcaccttgactaactattctcaaggaaag

SEQ ID NO: 405980 - DNA, 596 bp, Homo sapiens
ctatctgctactattttacgtaaacttatctttgttcttctttttagaattgacatcataaaagtagatgcataaatggaagcattggtctttttatattattgttgggcagctgaataatagtttcagtctgtatctatatgagaaaatttaggtggggagaaaaacamcaaaaaagggaatagagtaatgctgtatttgaattatctatgttagtcccttgcactgttgagcagcttgatgattcaactctcagcagccttttagtctgtgaattctgccaccttggcccctagaaatcaaaaaggaagcaaacccagtcagaatgttttcttcacctatggattttcctgctagtatgctctaatttttctggcttcattaaaactctgtctgtgtagaccttaatttggctcaaatgttagcactcttcatcatcgatcttataggtaaatatggaggtggctttcaatgttggtcttactgtggtaacactatcctatctcaccagagcccagctaaccagagctgcattcagaggaggttttgctagtcaccttgactaactattctcaaggaaagacaatggttttagt

SEQ ID NO: 405981 - DNA, 645 bp, Homo sapiens
caaggccaggttgcagaatatactatacactcaataaacattgagtgaatgcataaatcatggaataactctatgactgggtcttgaattgatcttgataaagaactgtcttgccaaattgttcttgctgaagaatcttctcgtcactttttctcttcagaaactggaatcttgcctcttacgtgtagtctgattaactacattcattttctcgaaaggttcctatgtggctagccacccatgggtgacctggttgcattatgagtaaacagtaaacawcatcatcagtcatcagaatctctacaattttcttctatttaagattcccatgactatctatgtctggggaaatcttaacactctttggagaaatgccaagactactgggctcaactggctctgaactcggaagataccaatttccagccatctgcattaatttccttttgtaacttgtatgtgagtgttcctttggcattgatcctatcccattggatgaaactagtttccagcctctcccagtgaatgctgatcgctaccttctcttccaaacataaaatattgagcatgcagtaccatctgccttatctattgtctagatcaataaatccataaggataagatatatttctgtaaagctacagg

SEQ ID NO: 405982 - DNA, 645 bp, Homo sapiens
caaggccaggttgcagaatatactatacactcaataaacattgagtgaatgcataaatcatggaataactctatgactgggtcttgaattgatcttgataaagaactgtcttgccaaattgttcttgctgaagaatcttctcgtcactttttctcttcagaaactggaatcttgcctcttacgtgtagtctgattaactacattcattttctcgaaaggttcctatgtggctagccacccatgggtgacctggttgcattatgagtaaacagtaaacaacatcatcagtcatcagaatctctacaattttcttctatttaagattcccatgactatctatgtctggggaaatcttaacactctttggagaaatgccaagactactgggctcaactggctctgaactcrgaagataccaatttccagccatctgcattaatttccttttgtaacttgtatgtgagtgttcctttggcattgatcctatcccattggatgaaactagtttccagcctctcccagtgaatgctgatcgctaccttctcttccaaacataaaatattgagcatgcagtaccatctgccttatctattgtctagatcaataaatccataaggataagatatatttctgtaaagctacagg

SEQ ID NO: 405983 - DNA, 584 bp, Homo sapiens
caacaccagctttgtgccgaactgctcaactgctcttgctgacagagttgtttgaagtatccaatagaaagtaaccctgcaaaattaagacactcatcccagactacccttaaataggggaagcttgctcccacatgcccacacttgctgttgctgcagctgcaggagacctgggacagagaactgttgtttgcccctatctagtgaccattcctagcatgaggatctgagagtaataaaaaactttaaaactttcrcactgtggctatgtcatagaagtcatgcctgcaatccttcccttgaagggactcatgcaggtagatctcttgctcttctgttcggacctttggtggctgccagggacagtagttaccaactaagttaatagaaactagaagagtttcattcaaaacaatcatctctttgaatattgcctgtctgccttccttccttcctttctgctttcttccttcccttctggcttttttccttcctttttaattttttctgatttttcacggtagaattctaattacacatgtattgaaacgcctcagtctaccctgtctacttttccttttata

SEQ ID NO: 405984 - DNA, 644 bp, Homo sapiens
tgatgttactgtgcagttttattcatgatttactaattattttcttgcagagagaacagtgtttaccatactggactttcattgttttccatccctgctatcatgccacactatgggcattccgtaagaattacagtgttaacaraattcaataaagaggtataaaagaagacaaagacaaaagaccaaatctaaagtgaaaatttgcatccttattttaaatatgctgtacataaaaccaaataaaaaaataaatacatattttcagtagtaattagctatgggcaattatggttaagtgttgttttgtttttaatagaaggtaaggtaagagaaaaggaataaatgagggaattaaatggagttttaagataaataacatagacaaggaaggacataaattttgtatctgcagcccagaaagctgagtttttgctttaaaaatgtgcaaacttaaaattagaaaaattgctctagacaattggaaggcactggaataaacattctttgggtccaattttaactgaccaataagcatagagtctgcctttcatggtagtcttctttgaagtctatttttgggttgttttccatatatttatttgattttatttatttatatttatttttaaagctagagtgag

SEQ ID NO: 405985 - DNA, 644 bp, Homo sapiens
tgatgttactgtgcagttttattcatgatttactaattattttcttgcagagagaacagtgtttaccatactggactttcattgttttccatccctgctatcatgccacactatgggcattccgtaagaattacagtgttaacaaaattcaataaagaggtataaaagaagacaaagacaaaagaccaaatctaaagtgaaaatttgcatccttattttaaatatgctgtacataaaaccaaataaaaaaataaatacatattytcagtagtaattagctatgggcaattatggttaagtgttgttttgtttttaatagaaggtaaggtaagagaaaaggaataaatgagggaattaaatggagttttaagataaataacatagacaaggaaggacataaattttgtatctgcagcccagaaagctgagtttttgctttaaaaatgtgcaaacttaaaattagaaaaattgctctagacaattggaaggcactggaataaacattctttgggtccaattttaactgaccaataagcatagagtctgcctttcatggtagtcttctttgaagtctatttttgggttgttttccatatatttatttgattttatttatttatatttatttttaaagctagagtgag

SEQ ID NO: 405986 - DNA, 644 bp, Homo sapiens
tgatgttactgtgcagttttattcatgatttactaattattttcttgcagagagaacagtgtttaccatactggactttcattgttttccatccctgctatcatgccacactatgggcattccgtaagaattacagtgttaacaaaattcaataaagaggtataaaagaagacaaagacaaaagaccaaatctaaagtgaaaatttgcatccttattttaaatatgctgtacataaaaccaaataaaaaaataaatacatattttcagtagtaattagctatgggcaattatggttaagtgttgttttgtttttaatagaaggtaaggtaagagaaaaggaataaatgagggaattaaatggagttttaagataaataacatagacaaggaaggacataaatttygtatctgcagcccagaaagctgagtttttgctttaaaaatgtgcaaacttaaaattagaaaaattgctctagacaattggaaggcactggaataaacattctttgggtccaattttaactgaccaataagcatagagtctgcctttcatggtagtcttctttgaagtctatttttgggttgttttccatatatttatttgattttatttatttatatttatttttaaagctagagtgag

SEQ ID NO: 405987 - DNA, 606 bp, Homo sapiens
accccaaaatgggacccacaaagatctcatccaagcagaatatacctggattttaagtattttcttcactctgaattcttagtggagagtgagatagaggatacagaaaagaaagaactgtgaatactgtaagcttttcaagtctttcctccctttctggtggatttcagttatttaaatccacgtttttagggtaatctgcactgcaggtaagtaactcattcatccccttaatgcaagtaagaatatggattcactgggcttaattctgcaactcgtgatgaggaggttgtgaggggctacaaaccagagactaaagagtcttgtacatttaattttaaaagtaccccacaaaagagttggttagagaggtgtggtcataaaaggctgcagggaggcagactrtgcccagaaaaaggaggctgcttcatctggatgtgtcgagaagagtcctcaaagcctgtttttatgattaccaccaacgcatgcagtcctacacagattaattttgagaccaactcctgagaagaagtgccttttagaagaaatcctcttgttgctcctttattccccactgtcatcaaatatgtggacttatattcacat

SEQ ID NO: 405988 - DNA, 629 bp, Homo sapiens
ttttataggagttaaaatcaacagagttggccatgaaaaatatacaggtccacttgagtgccatgccactggtcaggggaaggaagagttttggaaatagggtactagtactgatgcctaatatttaataaacgaagacaggaaactttgaattggatttattaagatactacttattatttcggtaattttagtgaattggtggttgtggaagccagattacaagggctttaaaagaagagttagaagcaatgagtatagtcttctcataactatattcatttacttaacaaaattttattaaattcttatgaaatagacaccatgctacatgcagtaggtgaattgaaatcacatgatttccaccctgtaatttattagcctaaaaaagtagtcaagaactctcactatattttcaagattatttctgcctataataaccctatgaggtaaatttttttcatttttatatagttatgaagagcaaaagaggataaataatttgcctaacctcactcgctagtcagtccaaaactgagatctgaacttaaacaaacgaaaagctttgcygtgctggaacccagtgaaagagacaggtgcaacaggtccatcacttacccagtgatggc

SEQ ID NO: 405989 - DNA, 666 bp, Homo sapiens
aacaacggccccttctgaatggccttgttagtagaaataataaatgggacttcatttgtaaaacagaatgtgaacggatgtgttctcggaaattggatctttaagtataatgaagtcagccaaagaaatgtagaactctaaaatacatcattatttaaaaattggattctgttgggccatggaacaattttctctcacttcacaatgaattagctgttaacaaaatttaacaaatgagaacataaagttattgaattttcaaataattacaaaatgtttttcaatatataattaaaaaggctttttagtataaagttgttgatgttttgccactgaagaaagacaagagcacaaactaaggaagcattatccagaattacactgttcagagtaaaaaacagatacaaatgatggttacactattggtgaaaaggctacaaaaccaatagcaaattaaaaagaaatattataccagaaaaaataataagytactgataaaatttatttatgaaatgatactgttggatctcaaagataaaaatatgtcaggaaaatattaaaacatgtctatattggcatgtgggggtgtgggggttatgcctgtgtgcacgcacatgtgtgtctgttgtctgtgtatgtgtatgccaagacagttaatactacaat

SEQ ID NO: 405990 - DNA, 570 bp, Homo sapiens
attggcagccctcacagggatagtctcttgacaaatcaagttgttgtctgaggcatgaagtgttagattatgattgagccagcgtgacactatgattcatggttgctctattactgaggggaagccggatttctattttataacgagtatgaatttctagtgagacaaatgaatccttttgttcaacttcaagagttcatcttcagtatctcagaacagaattattttacagactcaaacatgtgaagacrcagaggggtatgaaataatgatgcataaagctttctgtcctgaaacacaccctttggaattctaagaagggcctacagtgagctgagccattcaaataacaaatgataaagttgaatctctccagtgtagaatgtaatgttttaatggatattgttttagcattcagtgtttcacatcatggtcactaacccacactatcgctactgtggtgatatgagtattataaattttattaaagaaaattttctccttagcaagtattcacaaacctctggctgtatattaataattgccaatctttttctgatatggatataa

SEQ ID NO: 405991 - DNA, 633 bp, Homo sapiens
atagaaattctagagttgaaaattaccataatagaaataaaaaatataagatgtgctcaatagcagatttgaagtggcaggaaaaaaatcagtgagcttgaagacaggtcaattaagatgatctagtctaaaaacaaaaaaagaagaaaaaaaacgtgaatacttcagacctgtgggacccatcaagtgtaactatatatacataaagcacgttaaaaaataagagaaaaagagagagacataaaaaattgtgaagaaataatgaccaaaacctttacaactttttgggaagatcttaataggcatatccaagaagctcaaggaactccaaaagataaattcaaagagactgacacctagatgcatcataatgaaamtgccaaaagccagagacaaagaacgtaccttgaaatagcaaaataaaaataactaattttgtgccagtctttcccaataaaattagcaactcacttctcatcagaaatggattcgagaagttcgtaggttgatacattgagtgatgaaagattgtcaaccaataattgtacatctgttacaactattcatcaaaacaaagttaaaattaagacatttatagataaaagcaaaagcaagataatttgtcattagcag

SEQ ID NO: 405992 - DNA, 532 bp, Homo sapiens
aaaaataactaattttgtgccagtctttcccaataaaattagcaactcacttctcatcagaaatggattcgagaagttcgtaggttgatacattgagtgatgaaagattgtcaaccaataattgtayatctgttacaactattcatcaaaacaaagttaaaattaagacatttatagataaaagcaaaagcaagataatttgtcattagcagacctcccctataagaaataataaaatctttcaggctgaaatgaagggctattaataattcaaacccgcaagaagaaataacactggtaaaagtaaatacacatttaatttttgtaacatatttcttctcctaccttactgaaaatacaagtgcattaagcaatagctataaaacagttataaaccatccagccttttaatgtgtaaatatttaatttgcataaaatgatagtacaaaaaagaaggaacagagctatagtcaaagtttctacataccattgaaattaagttggtactgttttacgaaaagttgttacttgt

SEQ ID NO: 405993 - DNA, 561 bp, Homo sapiens
ccatttgacatgtttttcaattttagcagttttaacagttgtgtagtgatatcttattgtggcattcacttgcattttcttatttagtgatgatgttgcacatcttttcatttgcttatttcttatccatatatcttctttrttgttggatcttttcaaatcttttgcctatttattttttgggtgtcttatatttctgttactgagttttgatagcttgctgtgcactgtggataaaatcctttatcacaggccaggcgcggtggctcatgcctgtaatcccaacactttgggaggtcaaggcgggaggatcacttgaggtcagacattcgagaccagcctagccaacatagtgaaacaccatctttactaaaaatacaaaaaattagccgggtgtggtggcgggtgcctgtaatcccagctacttgggagcctgaggcaggagaaatcgcttgaacccaggaggcagaggttgcagtgagccaagattgcgccactacactccagcctggcaacagagcaagactctgcctcaaaaaaaaaaaaaaaaatcctttgtca

SEQ ID NO: 405994 - DNA, 597 bp, Homo sapiens
gaataatatgtgtgtgaattacatctcaattaggctatttttaaaaatgtaaatgcattaaacaatttaatcaagagacagtttgtcagactatattaaaaacaagatccaacaacatgctgcctacaggagatacatgttagctacaaaagatatgaataggttcaaagtagtggtatgaaataataccatgtaaatagtaccctatttcatagacttaaatgtaaggacttctttakagttctaaaagtgaggactgaagaaaaaaatggagatgaaatttcatggttaactgatagctctacggtcatagaactaatgctgatgcgttacttagtgagaatgcaaagcacttctttactgacttttaaaagcacttgaaaattatggccctagtgacagacaacatacatatttgtaatccccaaaatgtcacatacaaaagggctatttataaatgttccataaggggaagactcatattctagccactctattattccctactgggttgtctttgggtcaatcttttagtagacttttcccatataaaaattttagtgaaatcatttgggaagtgtttcatgaaggtgtcat

SEQ ID NO: 405995 - DNA, 463 bp, Homo sapiens
acagcttgcgtataagtagaatggatattgatattcatttgcagttttgtttccttttgtcataatgtctaaagagatcttgactgccataacattgcttaaactctctgtttcttgttgttattacactgcctaaagagatgtgaactgtctgcatatcctgtgtaatatcacattgacccattatgtcaatgacagaaaactcactgggtaggataagcaactgattgctaatatactagagaccgacgtaagacacatgatctccagaggttggaagataaaccctatgaaatttcaggttcttacagcttcagtgaaacatatagccctgtggtaagcagtgtgctaacatatttccaacaaaataaaaggcaaagtgctctatctagcattctttaccataaataargaagcacagtgctggaaaggccttattgggctctgcaggcaatatgtttta

SEQ ID NO: 405996 - DNA, 563 bp, Homo sapiens
tttcagttactctcaaaatatatcacttgcctcttataacatttcccttatagaagtaatttacaagttgaaattaaaaatgaactcttggttataatggatttcacagtggggtgaaattctagtagctggaccataggaaataagtggactgtttctctgttttcacacctagttcagacactttctrtaagatgcagatgcacaggccaggtagatctctacctacttgtttaatctgggggattccaataaacccttaagcccctgacagtttcttccaaaagcctgcgtatgtgcctgaaatcctatctttattactttacttctggtttttgcttgttaaaatgcacatgttcctgaggagaataatccatgaaactgtaatccatcaaagcaacatagtgtgaatcagcctgtcagttccattccaaagcgacagcttgggaagaacaggtttattttcctatgttgttttagcaacctcatttttcacatctttttccactaaccagattagaccctctgtgtaggcataggctttggtttagccttttatctga

SEQ ID NO: 405997 - DNA, 601 bp, Homo sapiens
aaagagttaataaattttgaattcaaattttacagttggttttcttgttatacaccacatatatatattttcctgaagaaagagtagttatatttctggataagttatcctggtttattcttgttaaaaaactataatagaagggttttataggcaaacattgaatagcaatcttgttattgggttaccattgggatacaagagatgtttccaaggggacggaaagattggatagttttaatrcaattaatttccagaactcaaattctttttgcactatttcctaaaatgtatcttcctgagtctgtgcatatgttgttctggctttatgacaccaattcaaattgcatgtttgtaatcttccttcttctactttacattagaaaggcaaacatttacccattcaaactcttacctgctcaggggtacaaaaaactgtcaggaacaattggcaataattgatgcatctactgaaaaagtgaatgactctaaactggctcaaaagttgtttttgcatgtaggtgcttgtaattatctgttttcaataaaataagggagcttcaaattaattttttaagtaatgaataattcatattaattc

SEQ ID NO: 405998 - DNA, 582 bp, Homo sapiens
tacagcatattttagtttgcaaatttaatgaaattccgtacttcaactttggaaaactgtaatgccacatgatcctgaagcagctttgtcatctgggataaatacccaggattcattgtctcgtgccaagaaaatttaggacatgtacacccacgaggacttttagaagtggagatttaatatgtaaaagaaagagaaaggagacagctctctctctagtgagagagagggacttctgaaaggaaagactggctatcagcgaagtttgtcagattttataggcaggcttgaggaggtggtgcatgatttatgtagagcccacagwttggtttgatcaggtgggacgtttacatagtgcacaggaaggctggccaccccaccctaatcttattatgcaaatataatttccagttgactggcaccatcttatctgctcttcactgtacacatggctgacaaagggaagggaagatgaagcctccagtatgaacatatctagtctcaggcagttctctcctgctggcattcaccattgtaagcctccagcttgcttgtctgtatccacagctcgattttacaggc

SEQ ID NO: 405999 - DNA, 529 bp, Homo sapiens
tctcttgatactttctatacaaagggcaatactacagccaaatttcctagcaaagatccttttttaaaaaaaatttctgaaaatgtatgctgcctagatggcattttatttaacaaaattaaaaaccacttgtatacattcctaaaagcaagaaataccaattcttatgttaactgggggatattttgaaatacatgttaatattcaatttatatattttattttgcatatgaaaaagtaataattaagccaaaaaattatcttcaagggttttaataatctcaactaaaattttataaatatataaaattaagcttttggatagtattttttarattccttatcatttcatgccattccctgactagtatattttcattatatagttacatctgtaattccagcaaaatatattgtttttatcttttgtttgtattagaatactgaaaataccctggtaaactattgtctgtgaccgtatatgtcactttttttttttctggtgtccgtccaaaaattttgtaaaatt

SEQ ID NO: 406000 - DNA, 610 bp, Homo sapiens
gggctcaatatgagggggggtctcctcccttaattgtattggagtctatttctctctttaattcaaatagtgtttgttttatatatctgartgctctagtgttgggtgcatatatatttaaaaattttatatcatctttctgacttgacccctttattattatatagtgatattttttatctcttcttacagtatttgtcctgaaatttattttgtttgctataaatataacaacttgtattcttttttggtttccatcgacatggaatatatttttccttccctttgtttaagttcatgtgtgtctttacaagtgaagtgttcttcttattgacaacaagttaatgagtcttgtttttcatccattcagccactatatgtcttctgattggagagtttaatccatttacattgagtgttattattgatgagtaagaacttactactgccattttgctattcattttctgtttttttgtggtgttctatttcttctttattttattactgtcttcctcttagtgaagattgttttctctggtgatgtaatttagtttcttgctttttatttttgtgtacccattgtatttatatgtttgtttgttttatg

SEQ ID NO: 406001 - DNA, 600 bp, Homo sapiens
aataataaaaaaatatagttcagggaataagagaaagcagccaaaaataatttcttccagtccgagaacaagaatttgaggagtgacacacacccttaatattagagttagactaggttgcatgaagaattaattttttgatgtttcccagcccttccttgtgaaagtcaggcctttggggctctggtgtccaaatgctttagatcaaatccaagtctcactcaaaaataagcaatgggatgccaacttccttaaatctcttggtttctattttcatttttataaagtaaatgtaagaatgcaaagtatttcaaatattatatttttttttataatttactgaaaagcactttgtggattttcaagcctataataaacacttgatacaayttaattatgggtagtttttgtaactctggaaataaaatctacctcactttttgtccttttttttaatgatagtcccataaatattttaattacaaatgtgtatttaatactgcaaatgtatatttaacctatgcatttaataaaattagataagcaatctatatttgcatattttaaaataagtaacatttagcaaacaatagaaaaagc

SEQ ID NO: 406002 - DNA, 512 bp, Homo sapiens
ccagctcctttttgtatctctttttgtaatttgtacagttagatacaattatcacagtgatcctgaggtgacatacatcctcagcttacgaagataacaagattaagagattaaagtaagacaggtgtaacaaattataaaagtattaattttgggaactgatatgtgtccatattaaaatgaaatcttcacaatttatgttcctctgacacagttccagccggtccctccgttcagggtccctgacttcccacaacatctctccmtttctttttatataaatgtgccatggcgatgaaggcttgttcgttctcttgattttgatgcaggattctttgactgatccgtcacactaaaaacaagccgattaaacagagaaacataattccaaaatttgctacagtggagcccccaatagacttaatccaagtcatggggtttagtccagaaagactttctgccacctgatctaaggcctcagctccaggcacaatggataaatgagcttgaga

SEQ ID NO: 406003 - DNA, 512 bp, Homo sapiens
ccagctcctttttgtatctctttttgtaatttgtacagttagatacaattatcacagtgatcctgaggtgacatacatcctcagcttacgaagataacaagattaagagattaaagtaagacaggtgtaacaaattataaaagtattaattttgggaactgatatgtgtccatattaaaatgaaatcttcacaatttatgttcctctgacacagttccagccggtccctccgttcagggtccctgacttcccacaacatctctccctttctttttatataaatgtgccatggcgatgaaggcttgttcgttctcytgattttgatgcaggattctttgactgatccgtcacactaaaaacaagccgattaaacagagaaacataattccaaaatttgctacagtggagcccccaatagacttaatccaagtcatggggtttagtccagaaagactttctgccacctgatctaaggcctcagctccaggcacaatggataaatgagcttgaga

SEQ ID NO: 406004 - DNA, 512 bp, Homo sapiens
ccagctcctttttgtatctctttttgtaatttgtacagttagatacaattatcacagtgatcctgaggtgacatacatcctcagcttacgaagataacaagattaagagattaaagtaagacaggtgtaacaaattataaaagtattaattttgggaactgatatgtgtccatattaaaatgaaatcttcacaatttatgttcctctgacacagttccagccggtccctccgttcagggtccctgacttcccacaacatctctccctttctttttatataaatgtgccatggcgatgaaggcttgttcgttctcttgattttgatgcaggattctttgactgatccgtcacactaaaaacaagccgattaaacagagaaacataattccaaaatttgctacagtggagcccccaatagacttaatccaagtcatggggtttmgtccagaaagactttctgccacctgatctaaggcctcagctccaggcacaatggataaatgagcttgaga

SEQ ID NO: 406005 - DNA, 448 bp, Homo sapiens
tgtataaatgacagttaatgcattggacagtttgattgttcatccaaatctgatatttcccactaacagcatgtaaggaggcttaacacaactctgtatakgaataattaggttggaggtaaacaaagcagaatgtctgaatctacattgatactgagggagaggagtggttgtggccacacctgatgttctccgctgtaaagaagcaatctaaggcgccccaggatgccaaagaagtagagggacatacctggattgagaagcattattataatgccaattgcagtcccataaaggaagatgggcatcaaaaagaggaaaagggccgaaaggggatttatcatggggttcagaatcatggatgcgagaggcggtagtggggagaacagacagaaaagtttccgcttcccatactggaagtctggacatgacaatagccaatttccaa

SEQ ID NO: 406006 - DNA, 594 bp, Homo sapiens
caagcaattcttctgcctcagcctcctgagtagctgggattataggtgcatgctaccacacccagctaattttgtacttttagtagagayggggttttgccatgttggccaggctggtttcaaactcctgacctctggtgatccgtccaccttggccccccaaagtgctgggattacaggtgtgagccactgtgcctaacccagccttttctttttaagcacagagtgccttttaaacattaatatattaactttacatttacaggtatattactatataccttttttatacaaagccataagatgccaagcataataatgcagataagctgcccataaaaactagtagcatatagaattcaaattgaaaggtgacatttctagaaaagatatctttttatttctctgaaaaattataatttagtaattctatactagtggaatgccatattggtatattttcttaacagagtggtttcctatcattacaagaaaacacccatattaaatcacctttttgttggtataatgatagctttgaacagtgctttacaatttcaaagagtatcttcatacattactccttctattttt

SEQ ID NO: 406007 - DNA, 407 bp, Homo sapiens
ctttggtaacatcaatcagcttatgtaaaatattttcttttctactttgaaatacaaaatttaacttatttttctcataaatgttttatataccaacagtgtgtagtgaaaaaaaaagtacattgtccatatgctctgtttgcaactggctaaagtcaggactgtctaatacatggacaggggtagacaaaattaggaaacagtaagttttatttatttttctagtatgtagatgacataaaatttaaargatattaaatttaagaaaatgtttttatttttttcttctacagatgaatggttgaatatatttaaagtctttaaatcagaagcctcaaatgcaatttggtgaattctaattaaattgaaatataatgaccatactataaatataagatctatgacag

SEQ ID NO: 406008 - DNA, 442 bp, Homo sapiens
attagtgaactaaacaaaaatctcatcgtaaaaagtaaaactttggttaattaaaactaaagatagaagaaagtgctaattttatttttttctcaatcagaaagggtagcatattcaaaaaataaacttttaatcatacaaaagaatacaattccatacactgatggttcaggatagacaccagatatcataagtcttataacatcaaatagtataaagaaaaaaataatggaaacttaatagtataactcattgctttctaaacagcmtaattactctgtaattatgcttttatgtaattatgtttaatatgtaattactctgttttggtgttataactttgagagatataattaaagagatattttcatatatactgaactttggggtatatcttatgaatggaaaagtgttttaaaaccattttttagcaaacataagt

SEQ ID NO: 406009 - DNA, 612 bp, Homo sapiens
cacactttgcatgatttcatttaacatttgttgaggtttgtattctagcccagcatttggccaattctggtaaatattctggtggtcttgaaaaaaactacattctacatttgtttggtgtaatgttctgtacatatctaccaggtcaactggattaattttattcctcaaaagtgttatattcttaatgaatttttgtctctttgcttcctcaattccagaaaaagaaagtgttttttcaatattattttaggtttatatccttctccttgatacctatgtcaatttctgaatggtatatttgagactatattaataggtgcataaaattttaaggcctttttactgttatcaaatatttttctttattactatttttttgtttaaagtcaactaacctaaaactcactgaagttagtatttttttaagtctaccataggggcttagatacagatatagamcttactcttttacaaatagtcttccctagtagcttctcagcaatataatctctaacagattaccaaattctctctcactctaccgaaagcatcagagcaacctgttaatcctttgtggatttcataagtatttttagactatgtgggtgt

SEQ ID NO: 406010 - DNA, 612 bp, Homo sapiens
cacactttgcatgatttcatttaacatttgttgaggtttgtattctagcccagcatttggccaattctggtaaatattctggtggtcttgaaaaaaactacattctacatttgtttggtgtaatgttctgtacatatctaccaggtcaactggattaattttattcctcaaaagtgttatattcttaatgaatttttgtctctttgcttcctcaattccagaaaaagaaagtgttttttcaatattattttaggtttatatccttctccttgatacctatgtcaatttctgaatggtatatttgagactatattaataggtgcataaaattttaaggcctttttactgttatcaaatatttttctttattactatttttttgtttaaagtcaactaacctaaaactcactgaagttagtatttttttaagtctaccataggggcttagatacagatatagaacttactcttttacaaatagtcttccctagtagcttctcagcaatataatctctaacagattaccaaattctctctcactctaccraaagcatcagagcaacctgttaatcctttgtggatttcataagtatttttagactatgtgggtgt

SEQ ID NO: 406011 - DNA, 585 bp, Homo sapiens
acctatgtcaatttctgaatggtatatttgagactatattaataggtgcataaaattttaaggcctttttactgttatcaaatatttttctttattactatttttttgtttaaagtcaactaacctaaaactcactgaagttagtatttttttaagtctaccataggggcttagatacagatatagaacttactcttttacaaatagtcttccctagtagcttctcagcaatataatctctaacagattaccaaattctctctcactctaccgaaagcatcagagcaacctgttaatcctttgtggatttcataagtatttttagactatgtgggtgttagtgggccttacatttattaactttaaaaaccatcatgaaacatccacaaattctagtatttactgaaagtatttgcttgcctgaaaattttcccccaatgagaaatggaaaaagtatctgatgttagtatagctattatctttttgttggttgaacacttaaatactttaaaaatatgtttgcttttcmtattcctgtataatgtatttaagatgtttctcttgagaacaaaatatcattgaatt

SEQ ID NO: 406012 - DNA, 567 bp, Homo sapiens
ctacttgaatgaatttggaatatgattccacattaatgccagcacttctataaatatcccccaaataactatgcagatgatcctgtcactctttctggtgtaataacataatagctaaaatattgtttttgagtagaaaaaaaatactaagtatttttgagtagcaaaaaatactaagtatttttgagtagcaaaaaatactatgtataaattgtgtcatttatttcttacaatgactctatgaggggcatactattactatctccatttaatacaagagcaaactgaggttcatagaagttaaatagattgcctaattagtttatactttattgttcagctttgtatatgacattccccttccagactgaaaaccaaaagrtaaattattcaatagttagatgatcattgatggtttatattggcagttctaatgtcacattatatacataaatgcatatgccttttctacacaagaaaaatcatatggatatattttagataaacgtatgtaaaaatgtatttttgaccatatattgaagtaacattgatcattcggtaccaatt

SEQ ID NO: 406013 - DNA, 567 bp, Homo sapiens
ctacttgaatgaatttggaatatgattccacattaatgccagcacttctataaatatcccccaaataactatgcagatgatcctgtcactctttctggtgtaataacataatagctaaaatattgtttttgagtagaaaaaaaatactaagtatttttgagtagcaaaaaatactaagtatttttgagtagcaaaaaatactatgtataaattgtgtcatttatttcttacaatgactctatgaggggcatactattactatctccatttaatacaagagcaaactgaggttcatagaagttaaatagattgcctaattagtttatactttattgttcagctttgtatatgacattccccttccagactgaaaaccaaaagataaattattcaatagttwgatgatcattgatggtttatattggcagttctaatgtcacattatatacataaatgcatatgccttttctacacaagaaaaatcatatggatatattttagataaacgtatgtaaaaatgtatttttgaccatatattgaagtaacattgatcattcggtaccaatt

SEQ ID NO: 406014 - DNA, 404 bp, Homo sapiens
caacatcagtcactgccaatcatatttatttatttattcatttttatttttggagatgaggtctcactctgtctcccaggctgtagtacagtggtgcaatcatagctcactgcagcctcaaactcctgggctcaagcagtcctctcacctcagccttccaagtaactggaagtaccaatgcacaccaccacacccagctaatgccaattatgtttctttggctctcaacaggcctataacttgttattctgtgtgataaaccccataagttgaaactgtgctaccaaatatggataaatctgcagttgcaatgagattagaaagttaaaatatgttgctawaatataaaagtctaatatatttggaggcagcattacattttacaaaacatggaatttttaata

SEQ ID NO: 406015 - DNA, 609 bp, Homo sapiens
taatgccaattatgtttctttggctctcaacaggcctataacttgttattctgtgtgataaaccccataagttgaaactgtgctaccaaatatggataaatctgcagttgcaatgagattagaaagttaaaatatgttgctataatataaaagtctaatatatttggaggcagcattacattttacaaaacatggaatttttaataagtaacatctacatatttattcacacgtatacatatattatttcatgagaaaacataggtatttaggatttaaatagtttatgcatttgatttctttgttagtctattcagataattcaagaggcttactttatatgagaattaaataagcaattaaacgacagcctaccgtaacctttaagagagctcaacaaaattggctttataaaagattaatacatacaattaaaatgtttctttcatacatgcaaaaaattaaaatatctattacaatatgttttctgttcagaatttaaaaggacaaaaactatggggaaaactgaaactactgagacctaataatgggcagacacacatacaacrtcataaatattgaaagtggcatttcaaatcaaggggcaaa

SEQ ID NO: 406016 - DNA, 567 bp, Homo sapiens
cctaagccaaaggaacaaagctggaggcatcatgctacctgacttcaaactatactacaaggctacagtaaccaaaacagcatggtactggtactaaaacagagatatagatcaatggaacagaacagagccctcagaaataacgccgcatatctacaactatctgatctttgacaaacttgggaaatgtgaatttttaatgtaagtttccaatttttctattattattaattggcttgattttttttctttttctttttttttaatttattttttaaaaataaaaggaagtggctggggaccccggttggsaggcctgcccagctgaggagaaatggaatccagaaccactttaaaaagcagtctgctcaaattttgggagagcacctgtgctgtgctgggtccacttcagcccctgattgtctcatacactccaaagccaaaaggtggcacaactgagttacccaaactgcaaagatggcagccaactcttccctctggagcttgtcccaggggatttcagatctctgtcggctgggtagctcaggcagaggtcccggtttggag

SEQ ID NO: 406017 - DNA, 431 bp, Homo sapiens
caatatttatccagcagcaatttgtggagcaatatactttgtgtggagaacttttctaaatgttgggtataaaagaatgatcaaagaagaccaaaagccctgtttttgtggaactcatgttctggtaaagtggataatccaaacatacattatgtaagtaaatttcataatatattaraacttttagggaagaaatatatgatgcttaattttatgtgtcaacttgattggaccacgggtgcccaactttggccaaatattattctagatgtgtctatatggggtgtttctagcagaagtttacatttgaatctgtagactgagtaaaatagattgccctctccaatgtggatggatcacatccaataaattaacgacttttatcaaccaaaataactaagtaagagagaactcctcctacctgactgcct

SEQ ID NO: 406018 - DNA, 590 bp, Homo sapiens
aattttccattaaaaaaatctgaatacaggtatattacctcagaaaattcaaagccagaaattaactacgagcttaaactgatgaaaaagagatgttctgagggattaactgtcttacataagatacagatatgtcctacttatttataaagctaatcaaattattccctttttatcttttaaaataagttataaaaaatcctcrtagcattttagattgttgtatacacatgatacacatggaacttgtggttattaatttgcaaaagaaaaaattgattttcaatttcaatatttaattcattttattcgtgagagctttacatattgatatatttattatgatatgtacaattagagaatagtcgctaactcagaaataacttttatattaggaagactctaaatactaaatatatgaaatttaaagtattttttttccattagctccagtttttatgtgattacccccatctttggttgaataacctctaatgactttttttctgtgtgattatttatacttctaggaaaattgtttttatttaaacttgtgttcctttaaaatctgtcatgtatttttcttacta

SEQ ID NO: 406019 - DNA, 590 bp, Homo sapiens
aattttccattaaaaaaatctgaatacaggtatattacctcagaaaattcaaagccagaaattaactacgagcttaaactgatgaaaaagagatgttctgagggattaactgtcttacataagatacagatatgtcctacttatttataaagctaatcaaattattccctttttatcttttaaaataagttataaaaaatcctcgtagcattttagattgttgtatacacatgatacacatggaacttgtggttattaatttgcaaaagaaaaaattgattttcaatttcaatatttaattcattttattcgtgagagctttacatattgatatatttattatgatatgtacaattagagaatagtcgctaactcagaaataacttttatattaggaagactctaaatactaaatatatraaatttaaagtattttttttccattagctccagtttttatgtgattacccccatctttggttgaataacctctaatgactttttttctgtgtgattatttatacttctaggaaaattgtttttatttaaacttgtgttcctttaaaatctgtcatgtatttttcttacta

SEQ ID NO: 406020 - DNA, 547 bp, Homo sapiens
ttcagtaggattggtacaattattctttgagtgtctggtagaattcagctgtgaatctatctggtcttgggcttttttgttgttgtyggcaattttaaaattactgattcagtctcactacttgctattggtctgtccaagttttctgtttcttcctcatctaatctaggtgggttgtatatttccaggaaattgtcaatctcctctagattttctagtttgtgtgcataaaagtgtccatagtggtatcaaatgatcttttgtatttctgttgtgttggttgtaatgtctctagtttcattttaaattgagcttatttctatcttatctcttcttggttaatctagcaattgtctattttgtttatttttttcaaaaaaaacaagttttttatttcattgattgtatcctctttttggaatttcatttcattctgctctgatctttgttatttcttttcttcttctagctttgggtttattttgttcttgttcctccactttcttgagttgtgacattaggttgtcaatttgtactctgtcagact

SEQ ID NO: 406021 - DNA, 547 bp, Homo sapiens
ttcagtaggattggtacaattattctttgagtgtctggtagaattcagctgtgaatctatctggtcttgggcttttttgttgttgtcggcaattttaaaattactgattcagtctcactacttgctattggtctgtccaagttttctgtttcttcctcatctaatctaggtgggttgtatatttccaggaaattgtcaatctcctctagattttctagtttgtgtgcataaaagtgtccatagtggtatcaaatgatcttttgtatttctgttgtgttggttgtaatgtctctagtttcattttaaattgagcttatttctatcttatctcttcttggttaatctagcaattgtctattttgtttatttttttcaaaaaaaacaagttttttatttcattkattgtatcctctttttggaatttcatttcattctgctctgatctttgttatttcttttcttcttctagctttgggtttattttgttcttgttcctccactttcttgagttgtgacattaggttgtcaatttgtactctgtcagact

SEQ ID NO: 406022 - DNA, 581 bp, Homo sapiens
actttcacaaggtaatgtcatcagttaaggcaaggactggccatttacacttcttttgtggtggaatgtcatcagtcaaggtggggcagggcatattcacttcttttgtgattcttgagttacttcaggccacctgggagtatacgtgcaagtcacaggggatgcratggcttggcttgggctcagaggcctgacacatagtatactgaaaattcagaggtcttaaatgttcctctttgtagcgactgtcctattgtgacattatgctttctcttagtctaattccttcttttgtgctctgagggatttaaattgaagtctgaaataggtgaaccaaacattcaaataaaatccttcatttgaaaatactggcacactgaaaaaaacctggcacacactgatatacgtgaagcttcagtttggagttttcattttacaatttgttttgagtattattattagcaattttttggatatcacaaaagcagattatctactgcagcactttgattaagaacatccagaagcaaagcttgtagtcacctctgtatatatgtcatttcatattctttttgttacaa

SEQ ID NO: 406023 - DNA, 586 bp, Homo sapiens
tgtcattattaaacctttttgagttatccaaaattgaatataaaatcactttctgacaaaaattcactactctccattgcaacttttattagagatatgattctactgacactaccatgttraaaatcatcctttctctaactataatttcacaaattgttagtcctcattctatacttaaaagcattcaaatctctttgcttgtcctttcattgtggatcttttctatagagatcaaactgataatgataaattctatgttcttttttttttctttctcttagaaaatactattccagacttaatattgtctggatctttagagatggtttggagggcctatacttctgctgcagcaattattttatatacaatgtgagaattatttttgtttaatttgcacatacatagtttgtctttgcccttgcatatagcttacataggtgcttctcaaaaccctttctgagatataaataacgggcaagggtgaggtttcattcacagccacttggtcaagttccaatgtcaaataggcattaatccaatgaaggctgtgcaacacatcctttgcttgccacattgcagg

SEQ ID NO: 406024 - DNA, 586 bp, Homo sapiens
tgtcattattaaacctttttgagttatccaaaattgaatataaaatcactttctgacaaaaattcactactctccattgcaacttttattagagatatgattctactgacactaccatgttaaaaatcatcctttctctaactataatttcacaaattgttagtcctcattctatacttaaaagcattcaaatctctttgcttgtcctttcattgtggatcttttctatagagatcaaactgataatgataaattctatgttcttttttttttctttctcwtagaaaatactattccagacttaatattgtctggatctttagagatggtttggagggcctatacttctgctgcagcaattattttatatacaatgtgagaattatttttgtttaatttgcacatacatagtttgtctttgcccttgcatatagcttacataggtgcttctcaaaaccctttctgagatataaataacgggcaagggtgaggtttcattcacagccacttggtcaagttccaatgtcaaataggcattaatccaatgaaggctgtgcaacacatcctttgcttgccacattgcagg

SEQ ID NO: 406025 - DNA, 605 bp, Homo sapiens
atataaattgtcaaaaatagcatttaacacatttttatccaagaacacttatttccttgaaaatttgagtttggcatatataactttcaaccaactcatatttactaaacattcaatttcaaaaatgttaatagatattatatcttatactttatttaacaagcactttcattttacccccagaaaaatcctgtgtgcaacatgctacaagtgtcatagttatatgtcaccaaacaggtttataatataggacaatttgaaacagattattcaaaaattttgtttacttttaattgacaaatgaaaattgggtacaatgtgatactttgatacccattgtatctgtgataatttgatactgtgataattaaatcaatctaatatatctaacatctcacatacttaccattttttttgtgatgagaacatttaaaatctactctgtcagcaattttccagtatacagtacattattaactatcatcaccatgctgtacastagatctccagaacgtatttctcctatataactgaaactgcttaccctttgatgaacaactccacattaccgccctcttcctacccacgccagcccttggtaacca

SEQ ID NO: 406026 - DNA, 595 bp, Homo sapiens
cctagtccctcactcctgttctatgggctaccttactaactaaattaccttcttccaagtcattgtcccaggatctttctttgtttttcctctttttttyttgaatctaagggaagactatccaatacaaaatacaattttaagaactttggatctgtaattttaaatctgtcacagaaaactctaggacatattcactttataagtgaatgctgcagattgtaaacaaattttcccaaagaataggaaaagaggaaacattttcaaactctttatttttgtgtatttatttatttgagacagggtcttgctctgttgcctaggtaagagtggagtggtgcaatcatggctcactgcctcaacctcccgggcccagatgattctcccacatcagcctcccaagtagctgcggaccacaggcatgcaccaccatgcccagctaattttttatattttgtagagagaggatctcactgtgttgcccatgcttgtctagaactcctgagctcaagcaatccttccactttggcctctgaaattgttgaaattacaggcatgagccaccaggaccagtcaaatgttcaaatttgttata

SEQ ID NO: 406027 - DNA, 601 bp, Homo sapiens
aattcatcagtgttttagaatcagctttttcrggcataaattaaagcatgggtatttactttttaactcccttacctttatcattaaccaggattttttgaaaaatctttttgaatttttgctttatgctctaaaaatttattacatttattatatatgttcataaatctgtattggtataataatgtaattagatatgacacaatcaaaaaacataaacagtgcctgaaagattttgctatttaaacttaataaactctatccttaaatgtgtgtgtttgattataatgactatgtttgtgtgttttaacatttaatatgctgacttatctttcatcaaaggcatattttactttacagttttctttattcttttgctaaaattgaggaaaaataattatattctactgtatattattaaattattttatgttaagagaatgatattgatgtttacaagactttaccaaactattaaatattcacaaatcaatcaactgagaatatttcccccacatgaattctatgtatttattttattatacataagaatatttctgatcaataatattgggcatatgttgtgggaaatgaaagtgca

SEQ ID NO: 406028 - DNA, 453 bp, Homo sapiens
gacttggaattttgggttaatgctggaatgagttaagactttggggaactgttggaagggcatgattgtgttttgaaatgtgagggtatgagatttgtgaagggccatggacagaatgatagggkttggctctgtgtccccatacaaatctcaccttgaatcttaataatccccatgttgcaagggcaggaccacgtggagataactgaatcgtgggggtggtttccaccatgttgttctcatgatcataatgagttctcacaagatctgatggttttataaggggcttccctctctgctcaccactcactctgtcctcctgccctgtgaagagatgccttcctctatgattgttaagtttcctgaggcctcctctgcaatgcagagctgtgagtaaattaaacctctttcttcataaattacctagttttgggtatttcttcatagcagttt

SEQ ID NO: 406029 - DNA, 502 bp, Homo sapiens
taaaacttccagtgtttacttgagaaaagttaatatttattgattcttcagcatgtgccaaaggcttttgaatactttgcatgctttatctcatttaaacccctaacaacctattgggatagatgttattagttatcttttacagaagaggaaactgtggctcaaatgttgtttaacttgctcaaggtcatgtatctagtaagcagttaagtcactgttaaaattcaggcactatgactgcagagtctgtcttcctaacaaatgtgccatgctacctaaagaatcatggcatttcctgtcattaactgctatgataatgggcacttttgttattccaataagcttaggcaataaatatactgagcgtcacataggcaaggcartatttaataagatcaatgaaattgttatgtaataaatcagaatgaaaatttatatttcattatatatactagaaaggcatatgtaattgaaacttgattagctataatatatacagtga

SEQ ID NO: 406030 - DNA, 393 bp, Homo sapiens
ttttctaatgattaacttcatcatcattaagtaaggcacacaaagcttttgattttcttgcattggagaaataagtaaaatattatgccattctacaaatcttcttgataaatgttaaaaagaaagaaaatagttttattattaaataagcactaaacccagttgtgattgcctcacaggcaatccactaaagagactgcaagacagaaagaaatctcacatttttgtgtgccaggaagatataattcattaaatacagcttagttgttttatccaaagaaaagcaaagcttctcacatctccaaaacaagcaagaagttacaacttggagycaggcattgaggccaaaattccacagatatagggggaaaaggccctttccaccctgaggtc

SEQ ID NO: 406031 - DNA, 611 bp, Homo sapiens
aggagccaagtttcattcttctgcatgtggctaggcagttatcccagtactatttattgaataggatgtcctttccccattgcttatttttgtcaaatttgttgaagattagatgattgtagctgtgcagctttatttctgggttctctattctgttctattggtctgtgtgyctgtgtctactaaactatttttgtttgtttgttttttgagacggattctcgctctgtcacccaggctggagtgcagtggcagcatctcggctcactgcaagctccgcctcccgggttcacgccattctcctgcctcagcttcctgaggagctgggactacaggtgccagccaccacacctggctaattttttgtatttgtagtagagatggggtttcaccgtgttagccaggatgttctcgatcgcctgacccgatgatccgcccgcctcggcctcccgaaatgctgggattacaggcgtgagccatcgcgcctggccaactaattttatatatgtgtccatgtgtgtatggatacgtgtatacatattattcccagaggtgttaataggtataaggttttaaaaagttccatcatcaaaatgtttataatatactgc

SEQ ID NO: 406032 - DNA, 611 bp, Homo sapiens
aggagccaagtttcattcttctgcatgtggctaggcagttatcccagtactatttattgaataggatgtcctttccccattgcttatttttgtcaaatttgttgaagattagatgattgtagctgtgcagctttatttctgggttctctattctgttctattggtctgtgtgcctgtgtctactaaactatttttgtttgtttgttttttgagwcggattctcgctctgtcacccaggctggagtgcagtggcagcatctcggctcactgcaagctccgcctcccgggttcacgccattctcctgcctcagcttcctgaggagctgggactacaggtgccagccaccacacctggctaattttttgtatttgtagtagagatggggtttcaccgtgttagccaggatgttctcgatcgcctgacccgatgatccgcccgcctcggcctcccgaaatgctgggattacaggcgtgagccatcgcgcctggccaactaattttatatatgtgtccatgtgtgtatggatacgtgtatacatattattcccagaggtgttaataggtataaggttttaaaaagttccatcatcaaaatgtttataatatactgc

SEQ ID NO: 406033 - DNA, 611 bp, Homo sapiens
aggagccaagtttcattcttctgcatgtggctaggcagttatcccagtactatttattgaataggatgtcctttccccattgcttatttttgtcaaatttgttgaagattagatgattgtagctgtgcagctttatttctgggttctctattctgttctattggtctgtgtgcctgtgtctactaaactatttttgtttgtttgttttttgagacrgattctcgctctgtcacccaggctggagtgcagtggcagcatctcggctcactgcaagctccgcctcccgggttcacgccattctcctgcctcagcttcctgaggagctgggactacaggtgccagccaccacacctggctaattttttgtatttgtagtagagatggggtttcaccgtgttagccaggatgttctcgatcgcctgacccgatgatccgcccgcctcggcctcccgaaatgctgggattacaggcgtgagccatcgcgcctggccaactaattttatatatgtgtccatgtgtgtatggatacgtgtatacatattattcccagaggtgttaataggtataaggttttaaaaagttccatcatcaaaatgtttataatatactgc

SEQ ID NO: 406034 - DNA, 518 bp, Homo sapiens
cacactttgcaataaatggtgttgggatagatggctagtcacatgcagaaaaatgaaactgggccctaacttttactatatacaaaaattcactcaagatgtattaaagatttaaatctaagacctaaaattacaagaatcccagaagaaaacctaggaaacaccatcctggacattgtctttgggaaagaatttatgactaagtcctcaaaagcaatgagaacaaatataaaaattgacaagtgagacctaataaaaccaaggaaattctgtacagcaraagaaactatcaatacagtaaaaaaacaacctacagaataggagaaatattgtattaggccattctaacattgctataaacaaatacttgacacaataatttacaaagaaaagaggtttaattggtcatggttcttcaagctttacagggagcataatgctgacatagccgtagcttccgagatggcttcagaaagcttgcaatcatagcagaaggcaaaaggggaacaagtgtatca

SEQ ID NO: 406035 - DNA, 518 bp, Homo sapiens
cacactttgcaataaatggtgttgggatagatggctagtcacatgcagaaaaatgaaactgggccctaacttttactatatacaaaaattcactcaagatgtattaaagatttaaatctaagacctaaaattacaagaatcccagaagaaaacctaggaaacaccatcctggacattgtctttgggaaagaatttatgactaagtcctcaaaagcaatgagaacaaatataaaaattgacaagtgagacctaataaaaccaaggaaattctgtacagcagaagaaactatcaatacagtaaaaaaacaacctacagaataggagaaatattgtattaggccattctaacattgctataaacaaatacytgacacaataatttacaaagaaaagaggtttaattggtcatggttcttcaagctttacagggagcataatgctgacatagccgtagcttccgagatggcttcagaaagcttgcaatcatagcagaaggcaaaaggggaacaagtgtatca

SEQ ID NO: 406036 - DNA, 627 bp, Homo sapiens
aaatgctgagacagtaacatgagtttaaggagcacaaagaaggtagctgctgtggaaactgccatgcagtggcaagagctagtgttcaacaggcaggtgtgtgaggctgactcccttccccctaaccctgctctgcccccaccctcaaaactcctccagggagcctttacagaattgcaggcccaagccccattagcaggcaacagtctctggccaacctaagtcctccctgcaagccagtaaacctcacaccctgccctctatgagcctctagcttcaaaccccaagaagagtgttgggaaggaagtgtgagatctgagtagaactggcttcaggtgggataaggcagaaaaggccttcctgagacatcaaytcacgcttggacaatagcttggcagatgggagaccttgggccctgtatcttttccctgccagtggtgagagattgctgacttgagaaccacttgttaaacatttagggatttggggtgggttaactgatggcagcttgatatcaggcatagtcgatgtatttatgccatggaattagcaaatgctctaaatcagggcttcctccttccacacccccagagggccagttgaccagcacacagctgcctacgttca

SEQ ID NO: 406037 - DNA, 655 bp, Homo sapiens
cagcttctaagggtaagcagcaagggcaccgggagagtatcagggcagtgccaatgatgagcaaaaagaaatataggggctgggggccatggggacaattcccccaaattttaacacgcaccactttaaggccgagatgctgtcatgttagccaattttgtttgcagtcagaggcttgttggagcctccagagggtccttggcagcccagggcctccctgtgtcgctctttctgggcataagtcttttccagcgaccctcctcccttctcacccttccctcccttctccctcccagctctagattctaccctccccatttcttcctctactcttattcagctaaaaccagaagtaaagctagcacaaactcatatgamtttaggaggtgcctgccatgagctgtggtatttatagtgtgtgtttttactgaaattacaccctcccaaggccatgtggcaggcaagctacagagagttctcatccagagtcctctcgggggcatcctgtccactcatccttagcctcctgtgtgctactgttgaaggacagagaaggagcagagacagggagcaagacgcccctttttcgtgatcaacctagcaaaacttcatcctaagcaaagtcttcctccagagggtattaatctccagaaaa

SEQ ID NO: 406038 - DNA, 437 bp, Homo sapiens
ctcaattgctgggtcatatgataagcacatgtttagtgttttaggaaactgccaaactattttccagagtgtctgtaccattttatattcccaccctgcatatatcctacttaatatcttccttttcacttgtcatgttttgctttgctttttaataaacttgctactttaaaataatttcacatttaatagcaaagtttcaagaatagtacatggaatatccttcaccaagattaaccaaatgtcattttgccaccgttgctgtagcatttcctgactctttctctgtctcttgctatacccaccacctatctatccatctagttctgtttttgagtcgtttgaaggtaagttgcaaacaacatgcctttttaccaygaaattcttcattgtgtatttcttaagaacctctagaataatggcttgtaattatttaa

SEQ ID NO: 406039 - DNA, 595 bp, Homo sapiens
ggctttacaatatgtagtttgatcacttggtttacaactaaatatattgtgaacattttgtcttctacaacagttaaaagaattgaatagcttggaggaaacacaatttattaagcaatcttgttggggacattgaggtataattttttttctaaggaggcttcattctttttataatgcctttgggaaaaaaaggggagttcttgtcttatatagctttctatagatgatggaaacttgcccttccatttagcctttttacttgcttctctaccaccacctaatcaccaatcaagtaacccattttgtttttcaacctctctcttctatttgcttcctctttcctacccagtctccctgcacacacgcaratggacttccattccttcagcactctggttcctccccttaaagatgttttctttccttttaaagagactattttaattgattttgatcaactctactcaaaactgtattctaaggtccacattagaattagtctccaataatctgaacatataattcaatcatttaaaagaacatattaagaagaccttggtagaattacatgtatcaagaaacaccaggcctt

SEQ ID NO: 406040 - DNA, 526 bp, Homo sapiens
  misc_feature (1)...(526): n = A,T,C or G
aactggagggctttcggccttggacgttttgaccttgagctggagactcagcctttccggggattctccttcttcaacaacaaaccccagtcggggcggggagacctttcaggtgggacgcccaccagcatgacaatggcccacacgcgggragaggagtcttgtaaaactgtggttaactagccctaatatctctatcattagttgcaggctaaaatgatcagaggtactcttttgggaaaaaaaaagaaaaaagaaaaatcagtttctctaatcaagttggtgattccaggttggaggggtggtggaaagtaattgctttaattaggaaaacctgaaaatgtatgggtctcaaggcattcgatattttattttatttcaggaagttttacttcctgaaatttgctcccacctttgttttcccagaagggtgttttgagccccgtanctcccctggggatacccgggtggccaagaaaggggtgctctccgcctgaggagctaggtgtgtgtgtgtggggaagac

SEQ ID NO: 406041 - DNA, 526 bp, Homo sapiens
  misc_feature (1)...(526): n = A,T,C or G
aactggagggctttcggccttggacgttttgaccttgagctggagactcagcctttccggggattctccttcttcaacaacaaaccccagtcggggcggggagacctttcaggtgggacgcccaccagcatgacaatggcccacacgcgggaagaggagtcttgtaaaactgtggttaactagccctaatatctctatcattagttgcaggctaaaatgatcagakgtactcttttgggaaaaaaaaagaaaaaagaaaaatcagtttctctaatcaagttggtgattccaggttggaggggtggtggaaagtaattgctttaattaggaaaacctgaaaatgtatgggtctcaaggcattcgatattttattttatttcaggaagttttacttcctgaaatttgctcccacctttgttttcccagaagggtgttttgagccccgtanctcccctggggatacccgggtggccaagaaaggggtgctctccgcctgaggagctaggtgtgtgtgtgtggggaagac

SEQ ID NO: 406042 - DNA, 526 bp, Homo sapiens
  misc_feature (1)...(526): n = A,T,C or G
aactggagggctttcggccttggacgttttgaccttgagctggagactcagcctttccggggattctccttcttcaacaacaaaccccagtcggggcggggagacctttcaggtgggacgcccaccagcatgacaatggcccacacgcgggaagaggagtcttgtaaaactgtggttaactagccctaatatctctatcattagttgcaggctaaaatgatcagaggtactcttttgggaaaaaaaaagaaaaaagaaaaatcagtttctctaaycaagttggtgattccaggttggaggggtggtggaaagtaattgctttaattaggaaaacctgaaaatgtatgggtctcaaggcattcgatattttattttatttcaggaagttttacttcctgaaatttgctcccacctttgttttcccagaagggtgttttgagccccgtanctcccctggggatacccgggtggccaagaaaggggtgctctccgcctgaggagctaggtgtgtgtgtgtggggaagac

SEQ ID NO: 406043 - DNA, 499 bp, Homo sapiens
aaggcgataatatctataaatctgtgctccagcattgccctgtcctggaatgggcctgattcaaatcccatattgtttccacaggcatttgcagagagagtggaccactgacggaacactgcatttgctggtcgccaccctgctgtgcctcagttaccacatatttagggcatcgactgtgtttctgggagacgatgctctgatggcttcttyctgtttcttctcatgcagcttccaccatctgtggaaaacaagatctgcttcttttcccctgaagcaccatgtctgcagggatggtgaccctgttagcggtgggttttcccgtttatacaatagatgaactatatggaattgcactgggagcatttccgaatcagcccgatttaaaatattgagtttgacaagtttttgccccttttaaaaatgtttattttctccccagtgttgaaggaagtggttaagggagatgtgaggattctaatctatgaaatttgaattt

SEQ ID NO: 406044 - DNA, 516 bp, Homo sapiens
tgtgtccccttcaagcagatgcattttcacagctaaaaagtcattgtaaccccaggtggttttgtatttgaggaatttatgtgtgatgcctcagcatcctcttgtctcctcattcctgtatcaaatattcctgtttcctgtattcctgtttctttacccatctgtcactcacaccatctgtatcttatattttcataacaacttgccatagyttggaaaggacaggttttgcatgtctgtgtacttgtggacatcaagtgcttgatttaacgcccttcccttatgagtgcagcaggatctgaagataaaatagtgatccctgttcttgggcctagtggaaggtgaggaaggttattcttgtctgtcacatatattcatatgccgggcagtgtggcaaggggaaaacatcaccagcccaaagcatctgagaagtcaaatgcttgctctatgtctccaaggacagatgactgtgcccaaaagggcgtgattcctcctacgtgatagtgccaaaccctt

SEQ ID NO: 406045 - DNA, 516 bp, Homo sapiens
tgtgtccccttcaagcagatgcattttcacagctaaaaagtcattgtaaccccaggtggttttgtatttgaggaatttatgtgtgatgcctcagcatcctcttgtctcctcattcctgtatcaaatattcctgtttcctgtattcctgtttctttacccatctgtcactcacaccatctgtatcttatattttcataacaacttgccatagcttggaaaggacaggttttgcatgtctgtgtacttgtggacatcaagtgcttgatttaacrcccttcccttatgagtgcagcaggatctgaagataaaatagtgatccctgttcttgggcctagtggaaggtgaggaaggttattcttgtctgtcacatatattcatatgccgggcagtgtggcaaggggaaaacatcaccagcccaaagcatctgagaagtcaaatgcttgctctatgtctccaaggacagatgactgtgcccaaaagggcgtgattcctcctacgtgatagtgccaaaccctt

SEQ ID NO: 406046 - DNA, 458 bp, Homo sapiens
gatctggggatgattcaagtgcattacatttattgtgcactttatttctattattattacactgtaatatataatgaaataattatacaactcaacataatgtaaaatcagtgatagccctgagcttgttttcctgcaactagatggtcccatctgggggtgatgggagacagtgacagatcagcagccattagattctcataaggagtgtgcaaccaagacccctcatgtagatttcccactcctatgagaatctaatgctgctactgatctgacaggaggcagttggtaatgccagtgatggggagtggctgtaaatacagatgaagcttcactcacttgcctgctgctcacctcctgctatgtgtcccatttcstaacaggccacagacaaataccaactcgtggccccagggttagggacccctgttattgagggtctcctgtatgacaagtca

SEQ ID NO: 406047 - DNA, 563 bp, Homo sapiens
tcaatccctcacagactgccaggtaagtcaaaaagcacaaccagaattttttaagaacaagatctgtattgccaccccttccagcagcaggaggctgccctaggaatatgggtcacctttcttgtggctgtggctgagctggggatagtagacacttaagtaaaaatgccacaacactctgttgcaaaaatttagcagcttccttcttcattaagcactcacctggctgttctgtttttgattagattccagaattcagaaaaaaaagttgattctgataatttttgctacttggtaattgcctcactgaagggaccaattcttggagctccctactctcccattttcatgtcactcccttaacatatattcacattcctaagtgatcacacctgcagagtattcctttccacaggatgtcctgtcaggtcaccaccagggaaacctttagcaatygagctgtaacatttttccacgaattacctgagcctttctcaccacagagagtggcattctccttgcctgccagagggtgagtgagccagttccaaatccccagctca

SEQ ID NO: 406048 - DNA, 452 bp, Homo sapiens
tccagcaagcctttgtctccttgcagtcagctcctcttctgctgatcctgcccgttgccttcttgcaatgtattttcatactttctataataaatctgcctttctttacctacaaatgttttggtaaattcttttaccccctcaccaccagcccagatagtcaccactcacctgtgacagggatttactatgaaatgggttcatgtgattaaagaggccaaaaagtcccacagtctgcaagctggagaaccagaaacccaggggtgtaattcagtctgagtctgaaggcctgagaactggaggtgtggggccacacatgtaagtcccagagttcaaaggccagagagctctggcatttgagagcaagagggcaggagaagatggatgtctcagctccagaagggtggattcgcctttcctccaccatttkattctgtctgcccacccacatg

SEQ ID NO: 406049 - DNA, 580 bp, Homo sapiens
tcctcacaaacacttgttattttctgcttttgttttcctttaacatagccatacgtatgggtatgaagtgatatcttgtagtcattttgatttgcatttctagaaaatgctattttatgaagcacattcacactttcaaggcaatatcacaaacaatatttatacatcatagcaccgattaaataaggaaaacaaactagacaataattttttaaayttggataattagaacaataaaagaaatggaagttagattatttgtgagctcactgaagactacagccaagaactttaatctcaagaaagaattggaaagcccttcaaaatcctaagaaatgctattatgtggtctaaactgactttgatgacggatcttgccactgacaagtagtgtgggagaagctggaagatgagatactagaaaaaaatgtcctccttattaatcaggaaaaattagaatcaagtaaatattttaaagaaaagagaaatgagtaagatctgtggattttttaaaataggtaatttttcaaaaagaaaattagatagaattacacatttgtaagacccataaaatattggt

SEQ ID NO: 406050 - DNA, 663 bp, Homo sapiens
aatttttatatttttagtagagtggtttcaccatgttggccaggctggtcttgaatacccgacctcaggtgatccacccacctcggtctcccaaagtgctgggattacaggtgtgagccaccttgcccagcccagagatttctttatttatggtgaccatcttttagaaaycaagaaaaaaagataccatgatcttcaagtagtagcatccttcagggataagaagttggaatatctgtagttaagtctgtcctcaaagtgctgggtggaatggtgaccatacctttgtcatcttggttatgtgcatcttctaattgtctatatttggtgatgtggtcttttgggctgtacattcatgagggtttcttgctttccagtcaatcccaggccacatcgtaacagagatgaagcccttgctgtgcatttcacagctagtgatgttgagctgtcaagagttgcatggagtaaattggattccagaacctacacttgcagactccaagttgtagactccttcactttctgttgagcaaagctcagccatcccattttagttggccatttatttggtcatctgtttttaattgaccacattggctaatagttattttctatttaagtatcaaagatttaactttgaatttcctacctcctccctgttaa

SEQ ID NO: 406051 - DNA, 663 bp, Homo sapiens
aatttttatatttttagtagagtggtttcaccatgttggccaggctggtcttgaatacccgacctcaggtgatccacccacctcggtctcccaaagtgctgggattacaggtgtgagccaccttgcccagcccagagatttctttatttatggtgaccatcttttagaaaccaagaaaaaargataccatgatcttcaagtagtagcatccttcagggataagaagttggaatatctgtagttaagtctgtcctcaaagtgctgggtggaatggtgaccatacctttgtcatcttggttatgtgcatcttctaattgtctatatttggtgatgtggtcttttgggctgtacattcatgagggtttcttgctttccagtcaatcccaggccacatcgtaacagagatgaagcccttgctgtgcatttcacagctagtgatgttgagctgtcaagagttgcatggagtaaattggattccagaacctacacttgcagactccaagttgtagactccttcactttctgttgagcaaagctcagccatcccattttagttggccatttatttggtcatctgtttttaattgaccacattggctaatagttattttctatttaagtatcaaagatttaactttgaatttcctacctcctccctgttaa

SEQ ID NO: 406052 - DNA, 583 bp, Homo sapiens
atattttatttaggaactctgtgtttattttctttttgttttaaacctataaacrtgcagtatgcttattagaaatgtaatgtattgctcttatacattagtccattgataaatctagtttagcttatgttgtctttttttttcttttccttgagacggagtttcgctcttgttgccccagctggagtgcaatggcacaatctcggctcactgcaacctctgcctccctggttcaagtgattctcctgcctcagcctcccaagtagctagggttacagtcacgtgccaccagctgattttgtatttttttttttagtagagaaggggtttcaccatgttgaccaggctggtctcaaactcctgacctcaggtgctctgcctgcctcggcttcccaaagtgctgggattacaggcatgagccacagtaaccagcctgatgtctttttgatggatcaaaattttataattctcagtcattattcagttgtgttatcttaaaatgaaaatgacagtgatcattattgcttctctttttcctggggtgcaaggagtgaaggtctggagctgcatggagctccattct

SEQ ID NO: 406053 - DNA, 663 bp, Homo sapiens
aatttttatatttttagtagagtggtttcaccatgttggccaggctggtcttgaatacccgacctcaggtgatccacccacctcggtctcccaaagtgctgggattacaggtgtgagccaccttgcccagcccagagatttctttatttatggtgaccatcttttagaaaccaagaaaaaaagataccatgatcttcaagtagtagcatccttcagggataagaagttggaatatctgtagttaagtctgtcctcaaartgctgggtggaatggtgaccatacctttgtcatcttggttatgtgcatcttctaattgtctatatttggtgatgtggtcttttgggctgtacattcatgagggtttcttgctttccagtcaatcccaggccacatcgtaacagagatgaagcccttgctgtgcatttcacagctagtgatgttgagctgtcaagagttgcatggagtaaattggattccagaacctacacttgcagactccaagttgtagactccttcactttctgttgagcaaagctcagccatcccattttagttggccatttatttggtcatctgtttttaattgaccacattggctaatagttattttctatttaagtatcaaagatttaactttgaatttcctacctcctccctgttaa

SEQ ID NO: 406054 - DNA, 558 bp, Homo sapiens
ttaaattttagggtgctctgacctaggaggaagtccatttagatggttgggaggccttagaattttatttttggtttacaaaatagacactatcagattttttaaaatccattaaagccaaaggtatcctattgaaactaaaaatttcacacaatttagttttatactcaaactttttcaaacactttgattacatgatcatgtaggttaatayaaacacattaacttttgatgctcttttaaggttatttaaaaagtaagtactcatctaagcccaaataaagaaaacaaccatcatcacctccatttgagaggattgaaagatgaattgctgtctaaataattagaaaagtagtatttttgaaaatttatatgaaacaatcagttttaatttgagtcaaagggaaagtaacattctgagaaggggatgggccacaggaatatacttaccacataaatgtttaagagcagagtgtgaggttgccatggactgaatgtttatttcctctaaaaattcttatgtagtagccctaatctccaaagtctgaagatggggcc

SEQ ID NO: 406055 - DNA, 558 bp, Homo sapiens
ttaaattttagggtgctctgacctaggaggaagtccatttagatggttgggaggccttagaattttatttttggtttacaaaatagacactatcagattttttaaaatccattaaagccaaaggtatcctattgaaactaaaaatttcacacaatttagttttatactcaaactttttcaaacactttgattacatgatcatgtaggttaatacaaacacattaacttttgatgctcttttaaggttatttaaaaagtaagtactcatctaagcccaaataaagaaaacaaccatcatcacctccatttgagaggattgaaagatgaattgctgtctaaataattagaaaagtagtatttttgaaaatttatatgaaacaatcagttttaatttgagtcaaagggaaagtaacattctgagaaggggakgggccacaggaatatacttaccacataaatgtttaagagcagagtgtgaggttgccatggactgaatgtttatttcctctaaaaattcttatgtagtagccctaatctccaaagtctgaagatggggcc

SEQ ID NO: 406056 - DNA, 544 bp, Homo sapiens
agacctatgcttggtgctagagccatggggcactggtaacatttacagggtactgggggaatacagacaactaaacagaaaatcacagttattacatgcaagtttagagaaatcagtaaatgtctcccagagaaagtaataatatmccactaaactgggacctgaacatgtggttatagatctgccaggaaaagagatgtgtggaggagaaaaaacaaaataaacaaggttacctcgtcaatgaaaaagcattcaaatcaattacttgacattaagatagaagagtcatttagctgaatttttttaatagtctggcttcagtttggcaacaactatgtagaggcacatgggtaagcattagggaatacagtggtctacagtgaagggtactacactccaacaagagtatacattatggtaaaaagatatatccataaacaaatgtacagagtgacatcagcagtaagaaatgcattttacaggatccggggttgtccagaacatggagtcttttctggagacacagtttagttcacccgcacag

SEQ ID NO: 406057 - DNA, 540 bp, Homo sapiens
caactttgtcaaccctcaattagtttgtgcgatgatttagagtcctttgtaacactggtagrtagtatcactagcatcttccctctgactatgtctttgagtcatggatcatctgctttttaatagcacagaatccttaagtcatggagctaagagtaatttctcagattcagtgtatttgggcagtggggtccaaatgtcaatctaagtatatgccattgttttttcagtcatatttctgttttgaactgtatttgttgttgagatatggtcattattttaaataagtaaaatccactgaagtctttaatgccaaaaaagtgtttagttttcataaacgttttatgtgggtttgaaaagaatatactgattgctgtgttctatgtatgaccatttgatcaagattttaattgggttgttcaaatttttatatctttactatcattttaatctttgttttgtctattaatgtgccaaatgggtgaatattctccccattttcctagttgatttgaaaatttctttatgaggtactattaa

SEQ ID NO: 406058 - DNA, 576 bp, Homo sapiens
tcttggtgaagtgagagagtgtccttcctgccagtgggcttcctgactcacagactgaatcccaggttccacccaggaagaggaggggccaggatcaacctggctgcaaacagcgcaaacttctgtggctccaccccagtgtgcattcctcccagtgcgtagtctggctaaagttttgccagggagacttttccatctggctgtctcaatatctgccgtgaacaggatttttttcagccccacctgaaccccaggcatttttcctgcctttaggtgttttcttccagtgcatatgctgatcaatacacagttgaagaatcaaggtacaccctctgcagatgtcaaggactctctctgtgtggcacttttttttttttttgtcctctttattgtgacgtgtagctgctttgtctctccatcctgaatttgaaaaactattagatggaggctagagttcaagttagataactagacttaaatataaagttaggcattataaacaaagatartatatttaaagctatgggatggcatgacattagcaggggagttagtgttgacagagaggactaagac

SEQ ID NO: 406059 - DNA, 446 bp, Homo sapiens
gacagaaacctgattggatgagttcaggaaagattagcaagagagaaattrgagacagttaatagagtaactcttttgaatggttttgttgtaagagagcttagaaatgggacagtagttggagaggtctgagagaaatagtagcatgttgatatgctaatgcaaagggtgagtaagagggaacaaatcatgttggaggtaatgaggatatagagctatggggaagaatgctagttttttaatcaatgagagaaagtagaatgcagtgccaaaatagaggctcagcatttggaaatgaacactttatagaaaggggagatgttgaaaattttttctcataatgttggtttgatagtttcctccactctgctttctctgttcttttttgaactattaggcaaacatatctcctttgttgatcttttaacttcttattttttcctcct

SEQ ID NO: 406060 - DNA, 446 bp, Homo sapiens
gacagaaacctgattggatgagttcaggaaagattagcaagagagaaattagagacagttaatagagtaactcttttgaatggttttgttgtaagagagcttagaaatgggacagtagttggagaggtctgagagaaatagtagcatgttgatatgctaatgcaaagggtgagtaagagggaacaaatcatgttggaggtaatgaggatatagagctatggggaagaatgctagttttttaatcaatgagagaaagtagaatgcagtgccaaaatagaggctcagcatttggaaatgaacactttatagaaaggggagatgttgaaaattttttctcataatgttggtttgatartttcctccactctgctttctctgttcttttttgaactattaggcaaacatatctcctttgttgatcttttaacttcttattttttcctcct

SEQ ID NO: 406061 - DNA, 563 bp, Homo sapiens
tatacctaatataaatcacaagttaatgggtgcagcacaccaacatggcacatggatgaatgttttctaaatttttctttctttttttgagacgggatctcatgctgtctcccaggctgaaatgcagtcatgcgatcttggctcmctgaaacctctgcctcccaggcgcaagccgtcctttcacctcagactcctgagtagctgacactacaggcatgcaccaccacacctggctaatttttgtatttttttagagacagggttttgtcatgttgcccaggctggtctcaaactcatgagcctcaacgatctgcctgccttggcctcccaaagtgctggtattacagatgtgagcactacaccaggccctctaaatgtttgttaggtccgtttgttctaaagtgttgttcaagttctatgttcccttattaattttctctctggatgatctgacaattgttgaaaatgggtgttgatgccctctactattattgtatgcagtccatctctcccttcacatgatttaatatttgttttatgtacatagatgctctgatgttggg

SEQ ID NO: 406062 - DNA, 575 bp, Homo sapiens
tggctgatgccccactgtttgtttaatcagtgagcccttacaatttctattccactttcagtatttgtgttcatcttgccaacattttattggcatcaatctacatgactccttaaacttgaattgctttaatgttatttctttgtctctagtttaaaagaaatacaaggcagaaacacttagaagttctcctcaatttcctgcttggataatgagtttcttcacctagggaaataytcatttagaaaacttaagaatagaagaaagagaactgtgatcgaggaacaataagaaataaaacttcaaagattattttgatgcctgctattttattactatctaattagaatttctattatggatgttatttgaattttatccaacactttctggttcctctattactatacaaatcttattttacatcttcaacttgctaataaaaataaattacagatgtattaaacttaaaatagtgtactcagtgtccttagttcacttgtagtagtgtactaaggcgtcctttccaagctatatgactttgtttttgttttcttgtctgattatttagtcac

SEQ ID NO: 406063 - DNA, 575 bp, Homo sapiens
tggctgatgccccactgtttgtttaatcagtgagcccttacaatttctattccactttcagtatttgtgttcatcttgccaacattttattggcatcaatctacatgactccttaaacttgaattgctttaatgttatttctttgtctctagtttaaaagaaatacaaggcagaaacacttagaagttctcctcaatttcctgcttggataatgagtttcttcacctagggaaatattcatttagaaaacttaagaatagaagaaagagaactgtgatcraggaacaataagaaataaaacttcaaagattattttgatgcctgctattttattactatctaattagaatttctattatggatgttatttgaattttatccaacactttctggttcctctattactatacaaatcttattttacatcttcaacttgctaataaaaataaattacagatgtattaaacttaaaatagtgtactcagtgtccttagttcacttgtagtagtgtactaaggcgtcctttccaagctatatgactttgtttttgttttcttgtctgattatttagtcac

SEQ ID NO: 406064 - DNA, 460 bp, Homo sapiens
ctaatttactaccataattctgttttgtaattgctcttaaaaactcaaatttttagtgtgcactaactaacttggagattcacacctttccttcctaacttctctcttaatccttcctataaagttctttatttttattttatttttagtattcctaagtctactttgtcagtttatagatatatctcatgtttggtatgatcagaaacatatagtgtgatacccggaattgatcatattgatcatctggtctattttccagatcaagaaactgataatggatgttatcttgcccaaactgacagagttatataatgaagaaatagagtaaaatcaagccttctatttctaatctaaagcttgttctaccacactacattaatttttttcccaaccattaatagattatagcrgatagtcaatctgctatatcaattattcaattaattacttcatgcat

SEQ ID NO: 406065 - DNA, 612 bp, Homo sapiens
ttgtttacctactcaggcttcagcaatggcggatgcccgtcccccagcctcgctgccaccttgcagttckatctcagactgctgtgctagcagtgagcaaggctccatgggtgtgggacactccgagccaggtgcaggatataatctcctggtgtgccatttgctaagaccattggaaaagcacaggattagagtgggagtgtctcgatttcccaggtactgtcatggcttcccttggctaggaaagggaattccccaacctcttgcgcttcccaggtgaggcaatgccctgccctgcttcgacttacactccatgggctgcacccgctgtccaacaagccccagtgagatgaacccagtacctcagttggaaatgcagaaatcacccatcttctgcatctctcacgctgggagctgtagactggagctgttcctatttggccaacttggcgggagtttccaacaaaaattatataatgggcactctttaaattcctcttgcctttcttcccaccaataatcattaaataaaagatattggagagtgacaaaaccaaagaagtaagtaccatcatgtgtttattgagaggcaatggtggcatgtttgggagg

SEQ ID NO: 406066 - DNA, 585 bp, Homo sapiens
acactccgagccaggtgcaggatataatctcctggtgtgccatttgctaagaccattggaaaagcacaggattagagtgggagtgtctcgatttyccaggtactgtcatggcttcccttggctaggaaagggaattccccaacctcttgcgcttcccaggtgaggcaatgccctgccctgcttcgacttacactccatgggctgcacccgctgtccaacaagccccagtgagatgaacccagtacctcagttggaaatgcagaaatcacccatcttctgcatctctcacgctgggagctgtagactggagctgttcctatttggccaacttggcgggagtttccaacaaaaattatataatgggcactctttaaattcctcttgcctttcttcccaccaataatcattaaataaaagatattggagagtgacaaaaccaaagaagtaagtaccatcatgtgtttattgagaggcaatggtggcatgtttgggaggtttagagaactgtctggtatttgcttctcatttccatatgcccagagctccaatcttcttagattaacattaagttaaagatgaaaagaa

SEQ ID NO: 406067 - DNA, 585 bp, Homo sapiens
acactccgagccaggtgcaggatataatctcctggtgtgccatttgctaagaccattggaaaagcacaggattagagtgggagtgtctcgatttcccaggtactgtcatggcttcccttggctaggaaagggaattccccaacctcttgcgcttcccaggtgaggcaatgccctgccctgcttcgacttacactccatgggctgcacccgctgtccaacaagccccagtgagatgaacccagtacctcagttggaaatgcagaaatcacccatcttctgcatctctcacgctgggagctgtagactggagctgttcctatttggccaacttggcgggagtttccaacaaaaattatataatgggcactctttaaattcctcttgcctttcttcccaccaataatcattaaataaaagatattggagagtgacaaaaccaaagaagtaagtaccatcatgtgtttattgagaggcaatggtggcatgtttgggaggkttagagaactgtctggtatttgcttctcatttccatatgcccagagctccaatcttcttagattaacattaagttaaagatgaaaagaa

SEQ ID NO: 406068 - DNA, 513 bp, Homo sapiens
gtaatgcttatatttcctctgcgtaaatgcatagagtgaggggagagaggtcttaaaataatgccaaggataaacctgctgttgaaagaatggtcagaggaggaaataaataaaaataggagacagagcaacaatacacaggaaatgccagaggaattagggccacagaaactaaggaagaagagtgtaaggaacatggctgtgctgtggccaagtgggcataggccaaggtaaacatcctgtgtgactcaacgagtttagagtgcaagtgtrtaacttcactttttatcacatccatgtagccataatatgagaaggccatcccttgaccctacaccactattgtctgttaaaggaataattgccctgctgacactgtacaggtgtgtttgtgcccagagagagaaagagtcaagccgctgaccctgaagggagagccagccacacaactgtgtgtggaagcagccggagcaagcagctaagacagagcagacaatgtaggagagctgctga

SEQ ID NO: 406069 - DNA, 628 bp, Homo sapiens
agcaatgataagtgtgttcacttgtttaacaatcatagcattcaaatcaagataaacacctctttggaatcaggtacacagcaataaattgacgattatggcaaagtcttagtaatgaaataagtagaaacagatgtcagtttgtcccctatattataatagagaccactctgagggtcagattggtgtcactgcatgcatgcaaagactgtgacagaattctttcccccaaataataagtggaagattcttgatgtctactcagggttgaagtttatatactctgttaggaggacaaaagataacttcagtgaaygctaggcctaaataccaactcactcagttgctggatctagaaaataactgaggcatgaatgccctgagccactaatgtaagacctgcgtctggagcagggcctcagaagactggtgaagacagtcacaaacctaacagacagggaagggtaaacataaagaaagtaaaacaaatgggtaagtggacagcctcattctcaagacaaaactaaaattccaaatcacataaagaaatctgataaggcaacgaaatcaaaaatttaaagctgacaacattcaggtaataaaaagttatttaaaaaaattttatgcc

SEQ ID NO: 406070 - DNA, 593 bp, Homo sapiens
gttgtttatttggggtttttttccctttcatgtggacatttattcatatgaacttccctcttagaactactttggctgcatctcataagttttgatagttgtgttttcattttcatttgtctcaatatgtctttaatttccctttttattycttctttgtctctttggttgctcaagagtgtgttgcttagtttccacatgtgaattttctagttatcctcttgttattagtttctagttttataccattgtggtcagaaaaaatacttgatacaatttcagtcttcttaaattgcggaaaacctgtggcataacttattatctgaactggagtattttctctgtgcacttgagttaaatgtgtattttgctgctgttggatagaatgttttatatatgtctgtttcattggttcatttggtctatagtgttattggggtctgttacattcttattgatcttctgtctggatgatgtatccgttgttgaatgtggggtattcaagtccctactatgactgtattgttgtctatttcttcatatatgttaaaattggctgtatatattttgatgctctaacactgggtgcagat

SEQ ID NO: 406071 - DNA, 593 bp, Homo sapiens
gttgtttatttggggtttttttccctttcatgtggacatttattcatatgaacttccctcttagaactactttggctgcatctcataagttttgatagttgtgttttcattttcatttgtctcaatatgtctttaatttccctttttatttcttctttgtctctttggttgctcaagagtgtgttgcttagtttccacatgtgaattttctagttatcctcttgttattagtttctagttttataccattgtggtcagaaaaaatacttgatacaatttcagtcttcttaaattgcggaaaacctgtggcataacttattatctgaactggagtattttctctgtgcacttgagttaaatgtgtattttgctgctgttggatagaatgttttatatatgtctgtttcattggttcatttggtctatagtgttattggggtctgttacattcttattgatcttctgtctggatgatstatccgttgttgaatgtggggtattcaagtccctactatgactgtattgttgtctatttcttcatatatgttaaaattggctgtatatattttgatgctctaacactgggtgcagat

SEQ ID NO: 406072 - DNA, 480 bp, Homo sapiens
caattaaatgttctaggccagataggaatagatgtagacaggcatttactacctcttaaaattattattttaagtaaaaagccaacaaacaaaaactaaaggcaaaaactgacttatccttaacttctatgcattcagctacagtaatmttggtattagtacagacttatagcaatgagctgtacaaaaacataagcactgttctgaaaaagacatttaaaacaatatgtctatctctacaactcatatctgggagtattatacccaggaggctttgtcacaaagtatcattatcctgccagtaaatattttcttttaattctacaggaagcagaaaattcttgatggttgggttgaatgcaaaagtgccacagaatagcttagatggaaaaatctcttcttttgcgagctgtttaggcatctttgtacccctccttgatttggaccttgacctaattctattcctcaaaaccagccttt

SEQ ID NO: 406073 - DNA, 480 bp, Homo sapiens
caattaaatgttctaggccagataggaatagatgtagacaggcatttactacctcttaaaattattattttaagtaaaaagccaacaaacaaaaactaaaggcaaaaactgacttatccttaacttctatgcattcagctacagtaatcttggtattagtacagacttatagcaatgagctgtacaaaaacataagcactgttctgaaaaagacatttaaaacaatatgtctatctctacaactcatatctgggagtattatacccaggaggctttgtcacaaagtatcattatcctgccagtaaatattttcttttaattctacaggaagcagaaaattcttkatggttgggttgaatgcaaaagtgccacagaatagcttagatggaaaaatctcttcttttgcgagctgtttaggcatctttgtacccctccttgatttggaccttgacctaattctattcctcaaaaccagccttt

SEQ ID NO: 406074 - DNA, 466 bp, Homo sapiens
ttaatcagagcagcagccttccgaacaagagtttgttcaccttggaactgccatttacgtgctaaacagctcttgttacaggagagctgctatcaggcgctgtagaatttagcagctctttgcatagttagagacagtccttgttagggacaaactgcctcaggaaagcttcttggtgctgcccacccctccccctaatactctgcaactcttctccatgctgcccacccttcccccaagcctctttacattcctaagcccttatctaggtgctgcagtgaagccagcagacttcacctatcaggcctttctgcgataagcaaactccaattayaaaccaacctgatcgcacagggggaggtcttgggaagcataaacaaagtttacctacaccctcctgtaagttcctgttcgtctagctgctactataaatgtctcaaggtgatatgaggcaaaattaaccagc

SEQ ID NO: 406075 - DNA, 591 bp, Homo sapiens
cattcacataaaaattattcattatattggaataaagtttttaaaagatgtgtgaaaccggcagaaatattaccaaaatttttgaggaagaaaaaacttaataaatggagagatatgcaatgctcatggactgaaagactcaatgtcacataacactgaattttctccaaatcaaactctgaaatcaatgtaatttcaattaaaataccaataagactttacatggacatataatgaatgattcatgtaaagttcataatgttaaacatttatatggaaataaaaggtccaatagagacaagactactttgaagaaagtcaaggtttatatttaagctattttgtgttctcataaggacagagaaaaagatcattagaacaaaacagagagccaagaaataggctcatgccaagcacaaatattgattttatgttgcttaatgatctattgggaaaaagaaaactttaaaatttggaagaaaatgtaggaatatagcttcaagtctgtaaatcacaacagcaaagagttcttagacaagtcataaaawatatatatatacgtcctaaattaaaatatttatatattaaacc

SEQ ID NO: 406076 - DNA, 591 bp, Homo sapiens
cattcacataaaaattattcattatattggaataaagtttttaaaagatgtgtgaaaccggcagaaatattaccaaaatttttgaggaagaaaaaacttaataaatggagagatatgcaatgctcatggactgaaagactcaatgtcacataacactgaattttctccaaatcaaactctgaaatcaatgtaatttcaattaaaataccaataagactttacatggacatataatgaatgattcatgtaaagttcataatgttaaacatttatatggaaataaaaggtccaatagagacaagactactttgaagaaagtcaaggtttatatttaagctattttgtgttctcataaggacagagaaaaagatcattagaacaaaacagagagccaagaaataggctcatgccaagcacaaatattgattttatgttgcttaatgatctattgggaaaaagaaaactttaaaatttggaagaaaatgtaggaatatagcttcaagtctgtaaatcacaacagcaaagagttcttagacaagtcataaaaaatatatatataygtcctaaattaaaatatttatatattaaacc

SEQ ID NO: 406077 - DNA, 528 bp, Homo sapiens
gagggtactgcaggagaccagggcatatctcagtccttatctcaactacataagacagacattcccagagtggccatttgtagacctccccccaggaatgcattccttccccagggtattaatattaatattccttgctaggaaaagaatttagcgatatcttccctacttgcayatccatttataggctctctgaaagaagaaaaatatggctctttttgcccgaccctgcaggcagtcagaccttatggttgtcttcccctgttccctaaaaatcactgttattctgttctttttcaagtgcactggtttcatattgttcaaacacacgttttataatcaatttgtacagttaacacaattatcacagtggtcctgtggtgacgtacatcctccacttatgaagataacaggattaagagattaaagtaaagacaggcataagaagttataaaagtattatttgggaactgataaatgtccatgaaatcttcacaatttatgttcctctgccatggcttcagccag

SEQ ID NO: 406078 - DNA, 528 bp, Homo sapiens
gagggtactgcaggagaccagggcatatctcagtccttatctcaactacataagacagacattcccagagtggccatttgtagacctccccccaggaatgcattccttccccagggtattaatattaatattccttgctaggaaaagaatttagcgatatcttccctacttgcacatccatttataggctctctgaaagaagaaaaatatggctctttttgcccgaccctgcaggcagtcagaccttatggttgtcttcccctgttccctaaaaatcactgttattctgttctttttcaagtgcactggtttcatattgttcaaacacacgttttataatcaatttgtacagttaacacaattatcacagtggtcctgtkgtgacgtacatcctccacttatgaagataacaggattaagagattaaagtaaagacaggcataagaagttataaaagtattatttgggaactgataaatgtccatgaaatcttcacaatttatgttcctctgccatggcttcagccag

SEQ ID NO: 406079 - DNA, 581 bp, Homo sapiens
tgttcaactttatgaacatccctgagatttaaatataaggaatagcttaagaatgaagcaaactctacaaaaaatgcaaatatatatatttaatttgaaaaactagatggcaataatagtacattttgacactgaatactaaatgataacttggttgagtggccacataaagtctaaataagtaagatttttgtgttggttgctatgttgtattagraatataacatcaagggcatagaaaggtttattcaggcaagcagactttctcatttgaggcatcaaacaaaatcctttacccagttgctgtgctttatgaaatgagtaaattagataagaacataggcccaaactatataatgaaatgattggcagccaacactgaagaataattctaaattattttctgcatacaaaaagcatttgctgagcttgacaatagtgactggcttttgctgtgttgcatatgagacagctgaaggacactaatgtgaaaggagacagaaagattaaagcagaatatttggaaaaatcactgttagaaaatctccttgaagtttctattgtttttatattattaccaa

SEQ ID NO: 406080 - DNA, 581 bp, Homo sapiens
tgttcaactttatgaacatccctgagatttaaatataaggaatagcttaagaatgaagcaaactctacaaaaaatgcaaatatatatatttaatttgaaaaactagatggcaataatagtacattttgacactgaatactaaatgataacttggttgagtggccacataaagtctaaataagtaagatttttgtgttggttgctatgttgtattaggaatataacatcaagggcatagaaaggtttattcaggcaagcagactttctcatttgagkcatcaaacaaaatcctttacccagttgctgtgctttatgaaatgagtaaattagataagaacataggcccaaactatataatgaaatgattggcagccaacactgaagaataattctaaattattttctgcatacaaaaagcatttgctgagcttgacaatagtgactggcttttgctgtgttgcatatgagacagctgaaggacactaatgtgaaaggagacagaaagattaaagcagaatatttggaaaaatcactgttagaaaatctccttgaagtttctattgtttttatattattaccaa

SEQ ID NO: 406081 - DNA, 532 bp, Homo sapiens
gggggtggggaatagaggaatctgaatacaatgttaggaaaagaggtgaggtttgagctttttacgcttaccaaaaggaacattagtttgaacgcctatcacatggcataaaaagagcattttcaaaatctgggcatggccatgagagtgctgtagacacgtgagctaggcaggacaaaagattcagaaccactatattayattaatgcataaaaagctttgaaatggtggaaagctgggagaagacggtagatcccagctctagaccacttacatctgtgtgagttagaacaagcatcacaaatcattgctatcacagatgacagcaattgtcatcatcatcaccttcattatctcatcatctcatcatcatcatctctactgctaatacagttaatacttattgagaacttatggaatgggtattattttaaatgcctttcagctgcacacaaactgtttatagtatgtattgttttatccctaatttgataagaggaaactaaggcacagggaggttaagtgatttgcc

SEQ ID NO: 406082 - DNA, 609 bp, Homo sapiens
cattcctgctgccttcaaggtgctaagaggcatcagaatagtccagagttccacagtatacattttccagcatcattcaccatacttggacaaggttaagtccattcagggacccaatacacatctattaaacttggactgaagtggtcagtttcctcattatctccaccagcaacttttggctggaatctcttttgaagttcttagttgggtccttccagtcttgattgtgtccctcctgctactttcctaataacagtagcatctttgatgtctctccctaggcactgagtacactgaacagtgtacagaatgaggatcaagtgtcctgwgttgggacctctgttctgctattgactctctatgtgattctgggcaagtcacttttcttctctgaactttagatccttaggtgacagtagcttctacaaaccctggctttacagttatcacagatactcatacattttcctggagccaggctatttatggatgttgttttagcaaagtctttccttgaaaggaggagtctttttgtagttgctctggctactaacagctttattgcctatggatggccagccactgtcacagtttatcacccttgct

SEQ ID NO: 406083 - DNA, 490 bp, Homo sapiens
ctgtcccagggaaggacatgatcttgggcaaggtagctctctgaagctgaggcacaccctaaaggagttctcatttcctccagagctgggcagcaagtccctccttgaagggagatctgggtgatgcatctctggtccaccacaatccacagcctccttagctctacttcatatattttkggggagcagctcttcctggatacctggatctctctctgatggaaaacttagaagagggagtttagtaggatgaactacagtctctgtcgctgcagttgttcttggggctggaattgatattcattgtctccctcctccactgttcattctagattcctctcaatctcatgaccagatcttctaggctcagtggcttgaaccagatcctgaggggtctgagaccttggtagccatgcccttctcaggaaggattgttatgtctgctcatttaactcataattgggcaagggaagaccaaaagatgcccaga

SEQ ID NO: 406084 - DNA, 490 bp, Homo sapiens
ctgtcccagggaaggacatgatcttgggcaaggtagctctctgaagctgaggcacaccctaaaggagttctcatttcctccagagctgggcagcaagtccctccttgaagggagatctgggtgatgcatctctggtccaccacaatccacagcctccttagctctacttcatatattttgggggagcagctcytcctggatacctggatctctctctgatggaaaacttagaagagggagtttagtaggatgaactacagtctctgtcgctgcagttgttcttggggctggaattgatattcattgtctccctcctccactgttcattctagattcctctcaatctcatgaccagatcttctaggctcagtggcttgaaccagatcctgaggggtctgagaccttggtagccatgcccttctcaggaaggattgttatgtctgctcatttaactcataattgggcaagggaagaccaaaagatgcccaga

SEQ ID NO: 406085 - DNA, 543 bp, Homo sapiens
ctatcattgaatctcaccccctccccaaggmtccaaggtaagaagagttcaaagatgaggtaaaagcacaaatctcagtgatgaaaatccttgcattttagtggtttaagttttaggccttgtgaaatgtcccagtgttaaaacaaaataacctgcttaagatcttgaagtaatgagtgtttttagctcccctttctcctggcagaggttgtcccttaaagacagggatattaaaggttcataatctcttattctaaaagttggggcaggtaggtttcagaattccaaagcatttgaattttggaaatgtaacatatatgtttccatgcagtagagcttagggaagcaccttatgatcaaatacaccgctatttctgtagcaaaatatgaatattcacactaagtaggttaaataaagatatttatgaatagtcacatgtcagttcgggtcaggttttgatgtcaaatgaattacagaaaattacaggaaatattctggttttcagagatgtttggatatcagaattatggatgagaggttat

SEQ ID NO: 406086 - DNA, 543 bp, Homo sapiens
aatatccatatgatggaacttgaggtgaaatctggcttttgatggattagaaggcaggtcctcatttcatctcttgcttctgttgctacctggaatgtgacacattcttgattacagcacaataaacgggcttggattcagaggaaatagcgccatctactgcaacaccactcaaatactagttcactgtgctttccccacaagcctttcacttcattgttctagctcagactagcttgtgagaattaacaagatttgggttggaggttggagggaagggaaccatggccacaggccaacacttaactgtattaaaaatcccaagtctttagtgagaattatttgttattaacattgtaatgctattaagcagggataattgatggaagccattttacgaggcactcaaatgcaagtgtcaatttcttggcatttatatgagaaatgacatcatcagcccaattctctgatgaggagtgcaggaggatrtaaaagccagtagagacagttatgagcccttgggtccttaacagcagctgctac

SEQ ID NO: 406087 - DNA, 460 bp, Homo sapiens
tctatttgtgtctccatttcctcaccaactgctctttcagcaactcaatgccatccwgattcagcttccaccactgcacttaaacctaactgaggtgtatttgtgccattgtatgtgtggtgcatcacacctgcctggtttatggtgaaagcgccatgagtgttagcatagaaacaaaacctctctggccaatctcctcctaattggtaaaccaagtgggcactttccaatttttccttcaattgacttttctccaccagcagtgcttcctcagacatcttctcccacactggcttccaagtcctttccctctcctgaagtttctcctacctctgactccatgcctttaatcttcatctcttggctatgtactcttgctggggacttcagcaactctcataagagcaattaccatctatatgatcataaatgtaacatggtgcagtgatgacttacagtc

SEQ ID NO: 406088 - DNA, 584 bp, Homo sapiens
tgagggcaggtttggacattaataaaaggaagggatatggttcatcatccctcccgggtgctgcacatcactttcagtctttaagtcaagacatcaatgagacaaaggatgtgcctttggctgaaaggatacttcaataggtctatcaccacastgagacaagaatttttctgtgttgtatgaggtttggggttttttctgttttttgtttttgttgttgttttgagaaaaggtctcgctctgtcatccaggctggtgtgcaatggtgcgaccttggctcactgcaatctccacttcccacattcaagtgattctcctgcctcagcctccctagtagctgagactacaggcatgcgccaccctgcctggctaatttttgtatttttagtagagattgagtttcaccatgttgcccaagctggtcttgaattcctggcctcaagtgatccacctgccttggcctcccaaaatgctgaggttacaggcataagccactgtgcccaaccgaggtttgttttaaatctggattttacaatgttaaaaaaaaaaaaatccacaaaccatgtagactttctgaaaattat

SEQ ID NO: 406089 - DNA, 628 bp, Homo sapiens
acatcatggaaaatggagtatccaccctctcaagcatttgtccttgttttacaaacagtccaattacactcttttagttatttttaaaagtacaattattattgactctagtcactctgttgtgctatcaaatagtaggtcttattcattctttttatgctttttgtactgattaaccatccccacctccctcccaatgcccccttactaccctttctagcctctggtaaccattcttctactctctgtatccatgrattcaattgttttgatatttggatccaacaagtaagtgagaacaagtgatgtttgtctttctgtccctggcttattttacttaacatagtggtctccagttccatccatgttgttgcaaatgataggatcttattcttttttgatggctgaatagtactctattatgtatatatacctcattttctttatccattcatctgttgatggacacttaggttgcttccaaatcttattgtgagcagtgctgcaacaaacatgggagtgcagatatctcttcttgtgcacttcctattcaagaactggaatgagctgtttccctaaagagcactggtttcttgtagtgagaaatactattttgagaccgcaacct

SEQ ID NO: 406090 - DNA, 628 bp, Homo sapiens
acatcatggaaaatggagtatccaccctctcaagcatttgtccttgttttacaaacagtccaattacactcttttagttatttttaaaagtacaattattattgactctagtcactctgttgtgctatcaaatagtaggtcttattcattctttttatgctttttgtactgattaaccatccccacctccctcccaatgcccccttactaccctttctagcctctggtaaccattcttctactctctgtatccatggrttcaattgttttgatatttggatccaacaagtaagtgagaacaagtgatgtttgtctttctgtccctggcttattttacttaacatagtggtctccagttccatccatgttgttgcaaatgataggatcttattcttttttgatggctgaatagtactctattatgtatatatacctcattttctttatccattcatctgttgatggacacttaggttgcttccaaatcttattgtgagcagtgctgcaacaaacatgggagtgcagatatctcttcttgtgcacttcctattcaagaactggaatgagctgtttccctaaagagcactggtttcttgtagtgagaaatactattttgagaccgcaacct

SEQ ID NO: 406091 - DNA, 493 bp, Homo sapiens
agtccgtgcagcactaacgtattggcacctgcctcctcttcggccaccccccagatgaggcagctgtgactgtgtcaagggaagccacgactctgaccatagtcttctctcagcttccactgccgtctccacaggtgggcttcactttcgtggaatccttgggctgccgagttacaccttaggaatcctctaattttctttccaccttttgcaygcacgccaggagatttcttttcttcatctgtccagtgaggttaccgtttttacttcacaggattgttgtgaagaccgaattgccaagtgcagttcctggcgcggagtaggcaggtcttataaatattggttcagtctgaagtttatcctggttgtttcccttctgataattttttaagcactttttatttgctgggtgttttcacatacttgatggccatctgacagatgagcaaggaggctcagaagctcagcttaagatttaaaaaaaagcaggggg

SEQ ID NO: 406092 - DNA, 450 bp, Homo sapiens
tttgaattcttttatgactgttgataaaaattgctcaatccctttttttttggagctaaaatcactatttttaatcatggtaagcatgattaaacaaagtacacatggcataaaatgtaccattttaaccattttcaagtgtacagttcagtagcattaagtttgcttcaagtttacattgttttgcaaccatcaccattatccatttccagaacatttatcattttctaaaactgaaacttttacccattaaacaataacttcctgttcttccctctcccacagcccctggcaaccaccaatctactttctgtctctatgaatttgactactctagctaactcatataagtggaaccattcaatatttatacttttgtgactggcttattttcatttaacatgatgtcttcaaggtttayacatgttgtggcatatgtcagaatttcct

SEQ ID NO: 406093 - DNA, 625 bp, Homo sapiens
gtttgtgcaagttgtacacttgttaaggtggcaccatttatactgttttcacaatggagttgcatatttaatatgacaattttctaggaaatatcaagcaaatgtcttgttctgacaaaaatcatgaaaattttcaataggcagaagtagagggttttggagatttgctttttttctattttcctaaaggcatcatatgggctaccagtacccatgaccactatgttctaagagacagaggggtctcatagataaaagtagtggttatgatacagattgtctaactagagttgtttgttagggaaatgctttaaaatattttatgctgaggktcaacagagttgatagagtacagagcatattttccagtagtgatggatttccttctctcctcccactattgaaaggtacaagaagtgcagataacccaatttcatctgtacatgcaggggtttgaacctaagcccgcgttacactagatcctattgctcacctatgcaccacaaatgataaaccaccttgatgagtagaggaagcagatcaactaagtacaataacttgtaccgataaatgtatttagaaaaccaaatagtaaacatgcaaatgacatcctgggacaatatag

SEQ ID NO: 406094 - DNA, 625 bp, Homo sapiens
gtttgtgcaagttgtacacttgttaaggtggcaccatttatactgttttcacaatggagttgcatatttaatatgacaattttctaggaaatatcaagcaaatgtcttgttctgacaaaaatcatgaaaattttcaataggcagaagtagagggttttggagatttgctttttttctattttcctaaaggcatcatatgggctaccagtacccatgaccactatgttctaagagacagaggggtctcatagataaaagtagtggttatgatacagattgtctaactagagttgtttgttagggaaatgctttaaaatattttatgctgagggtcaacagagttgatagagtacagagcatattttccagtagtgatggatttccttctctcctcccactattgaaaggtacaagaagtgcagataacccaatttcatctrtacatgcaggggtttgaacctaagcccgcgttacactagatcctattgctcacctatgcaccacaaatgataaaccaccttgatgagtagaggaagcagatcaactaagtacaataacttgtaccgataaatgtatttagaaaaccaaatagtaaacatgcaaatgacatcctgggacaatatag

SEQ ID NO: 406095 - DNA, 623 bp, Homo sapiens
aatctaccctacacagattagtaagagagtatatctaagaacatgcacttataagtgggagctgaacaatgacagcagatggacatagggagtggaacaacacaccctgagacctgtgggggtggtcaggggtagggagaccatcaggaaaaatagtttatgcatgttgggcctaatacctagttgataggttgataggtgcagcaaatcaccatggcacacgtttacatatgtaacaaacctgcacatcctgtgcatgtaccccagaacttaaaataaaattaaaaaataaaaaataaaacaaaccaaaaaagaaaggccatccaaggaattaagtacagacaatattactattattatattctacctttacatttctttcttctcactctacaatcagaataagaaacgatgataatattatattttaaaatcattaatattattaatagtcctaaaagtaagagcaagttagatcattgcatataatcacattatcaggtagtatttgtgtgtttcctcaaaaaacagttgcccaggcatagttattkccagtttctcagtctatacaaaaagataagatgcaattatggaaatgcctgtcttgggaagagggaggagag

SEQ ID NO: 406096 - DNA, 645 bp, Homo sapiens
acagcaaagttacattatagtctctaatcaatattttaaaagatgcatttcatgctttaaagaaaatgatactataataatcaactatgaaaaatactattttctctaacagatttcttattacactgaataatctaacctcatctcatttgtaaatgaattaaattaaatactgaaattgaataaattatttataagaccttctgggatacaggcacaattcttccagctacaaactgagctactcaataggatatataatatttttagaacttagaagctgcattctattttagataaaatcctctttttaggacttaaaaaaaaactttatgaaagtatgccctcttactccaaacatttttatayagcatatgaacaattggttctttataatttagatatgtcttcctagccaatattttcagttttagaagctgtatgtttgaagaaacacaaacaaaaatttgtttccagagttaataacactgtattaagttaatacatgtattaaaatgtgttatgcacagtgtataacatattacatggtatgccatggaatactatgcaacaataaaaaggaataaactattgatacacacaacaacttagatggatctcaggggaactatgctgaatgaaaaa

SEQ ID NO: 406097 - DNA, 567 bp, Homo sapiens
attttcaaattaaaatatttgaagaaaacaaatgcaatatcctataatttgtataacataaattccattttttccctagataatggcaaaggccgcatgactattaaaactttagataagtatgtacatatacacacaaagtagccttttttattttaatgtgggagaaataagctaagaagagtaatgcyatctattcttctattagatagggttttatataatacatgcttacaaaaggatcatgttgtcaagggtacctcgtcttctctttaaaacaaaactaatttcaaaggttgcttaatcaaatcacaatgaagtttcatacttttcaatttaacaaaatatcacagaaaagcatgcatcatagaaaatcatatcttcctagataatgaatttccaacaggtaattttggagagtctctatttataagctaagaatgatgatttgaatatttaaagatatgcactgctgacaaataggagtgtatttatggagtacaagttttagttatctaaggtttctaaatccccaggagctcaagaatgaagaaaccatgcactgat

SEQ ID NO: 406098 - DNA, 589 bp, Homo sapiens
tttgtcaacaagagatacgaagtgaatwttttttctttcaaagtggtctataaacaagcactatttaaagctttgtggctgtctttagtaaaatcacagagcacattttcagtttgatttacttataaagcttcatcagagttgtttgatatgttatttatgtaaacattgtaattaatgagtcattaccttattaataaattacctaaactaggataatcatcatggtcattatgatcctggggcagacaaccaaaaaagttaaattttggtgaaaaaggaggccaaatgcatacagtatttttaggacattcttattcagttttaaacattttttcctcatgtcaaaagtattttgctagcatgttatgtgaaattctaatcattattaagatacacattatagtgatgcattttgtaacttttaagctgttattatttagattgatctattttcctctttaacagaaaatgttgacagtgatattattataaatttgatgatgaccagtaccttagggctgttttatagataactgtatcagctgataagcaactggtgggtcatttggtggaaaaggtacaagta

SEQ ID NO: 406099 - DNA, 470 bp, Homo sapiens
cctattagttaagggaagaacacaaaagagatctttggaaagactttgtactcaaaggaggctggattttaattctttgagggaaagaatgtctcattcatttgtatacctcttccactgtcaccaaacatttggtccctggcacttagtaggcacmatgctaatagaatggaaaacaaataggcaatgggcctcatcttgattcttcatgctgttcatctgtgctccttttcaattctcttgtgttcctgtattgtcagagcacatctttgctcagcagtagctgacatgccagggtattctcagagatgctagaaactggctacataaaaggttgcagggtacagagtaccctacaggacattgcttaccatctaaattgatgacttttcccttgttgaagaagaaaatcagagatcacataaaaaatctgttgatgttgagacttctaaacacagttatgcaatttt

SEQ ID NO: 406100 - DNA, 593 bp, Homo sapiens
tgtgtagaataagacattagaaatagattatgtaataaatgattacaactgtgtacttagcagaaatttcaaaagccaggtctgaggaaccacacaataggaaaatatttgtttcctgagattagagagaatctccctcttgggaaggaaagaagtggtggataaaatatcttgttcaggttcatggatgttttaagttggtgattttgcttgttctataaaaaaaaacatctgtaaatttacagatgtactaaaaaagtctagcagrggcctcaaatacttgcctgaattttcacataatttttaggaggtctttcatgaaaatttccctgggtttcctcatcctggcaagtgttcaagaaaaaagctgtcatcaaactgaggcatcataacctgtcggatagtgttgcttggaattagaaagtctaaaagagagtaaaagtctaattttgaactattcatatttctattcaatttgtgttaattttattcctttccttcctgaaaaatctgtgccttaaaaaaataattttcagtggtaaagatattgggaccctgaagaaagggagccaagaagaggtgcaactgttttt

SEQ ID NO: 406101 - DNA, 610 bp, Homo sapiens
cacaataggaaaatatttgtttcctgagattagagagaatctccctcttgggaaggaaagaagtggtggataaaatatcttgttcaggttcatggatgttttaagttggtgattttgcttgttctataaaaaaaaacatctgtaaatttacagatgtactaaaaaagtctagcaggggcctcaaatacttgcctgaattttcacataatttttaggaggtctttcatgaaaatttccctgggtttcctcatcctggcaagtgttcaagaaaaaagctgtcatcaaactgaggcatcataacctgtcggatagtgttgcttggaattagaaagtctaaaagagagtaaaagtctaattttgaactattcatatttctattcaatttgtgttaattttattcctttccttcctgaaaaatctgtgccttaaaaaaataattttcagtggtaaagatattgggaccctgaagaaagggagccaagaagagrtgcaactgtttttagtttagttctttggtgctttagcacttacggcaatttcatcattgaatttgctgtcatttcaaaattttgtctttttattaatcttaatattaatattgaatatttta

SEQ ID NO: 406102 - DNA, 533 bp, Homo sapiens
ttggtatgtccaggaacttaagtcacaggagcaataaattctagcaccctgtttcctctaaacaaaggggcctgcaaaggactattggtatttacgaggactgcagaggcttgagtaagcattttcacagcagccctgtaaggttctaatgcacagcagtactactctatagccagcttattaaaccttaatggcactcttttagtgttgtacaccaggacggtagataactcacccacagcgtggcttctggaagctgccacagcactgcaaccattctgcaggttaccacccttcaacttgaaattcctagatactggtttcttcattaaaatcaggagtcagcaaaccaaggtgcttggccaaatctgacccactgcctctttttgcaytgctattagtaaaggaggttttttacattttaaaacagttgacaagaaatcaaaaaagaataatattttgtgacatatgacaactatataaaattgacatttcactgtccataattaagttatattggcaagccaccacac

SEQ ID NO: 406103 - DNA, 581 bp, Homo sapiens
tataggttcctaattactaaaatttcatataggcatattaaaaattcagaaaaagtgaacatcttaggagaagttaatggaatcaagtaatgagtttctacctataatatgtaaccacttctagatttaaaaattaattacaataattactaatattgagaagtaaggcacagccctcaatgttacatatgcatgtaagggtgcaaagacaaagatgccaggaaaagaaaaagaaaatatggactatatatcataaattaagacttctggtgggaggggcagacaacagaattggcaaatgtgttataactagctaaagagattggagaattagacagatttttaatcacatctttgagaaagagamtgcatatgctctttataaatgaaagaaggcaagaaacatgacatgtcacagaaatggtttaggcacaggtcccatattctcaatcaggtcgaaacaaaaaatgtccagaagaatttagataattcccaaataatgaaagctttatggaaatagttaaggatgatattcaagacagcaacataggtcaacagatacaaagttacggttagatagg

SEQ ID NO: 406104 - DNA, 577 bp, Homo sapiens
attctcaactttcaactgttatagagaayaatagaaaattttaacaaacagctacctaagaaaagatatatctctcaggtagatttttaaatatttttaaaattaacagataaaattgtatgtgtttaacacatacaacatattcttttgaagtatatatacattgcagaatgactaaatctagccaatttacatgttacctcacatagttatcatttttgtgatgaaaacacttcacatccactgtcttagcatttttcaagaacacaatgtattgttaactgcagtcaccatgtacaatagatctcttgaacttacttctcctatctaactgaaatttggtagtctttgaccaatatctcccaaactccaccaacaccacctcactcctaccccctagtaatcacaattctactctctacttctgagatcaacttttttcgaatcaacatatgagtgagatcatgtagtattcttctttttgtgcatagctatttcaattcacataatgtcccccagtttttccacattgttgcaattgacagaatttccatctttattatggctggatagtagt

SEQ ID NO: 406105 - DNA, 514 bp, Homo sapiens
gtaaccacaaatggataggagactaaaaattgacattgttgtcttccaaatgttcatataatttccattttaatgcttttgttttttagatatatttaaaggtatgttctcttctttacactgcccagagatcacattgtctgaatattagcaagtcttatttccctaagatggaaagtgcaacagagggaagatgactaaaaatagcacgtctctcaagatgtttgctttctaycacctgactctaggatgcagtcttcattagggtacaaatgtattataatggaatggtctgatttctgtttccatattttatgattctcatagtctaccacttgttgaatttaaaagtacattttaaacagatgaaaataagtgttagttgcttgctgataagaagatattaatttcccatatgttgcagcacgcttaattcattttagaggtgatattcaaaaatattacttagtatgtattaaatttttatctttaataacctaggaagtttgctagc

SEQ ID NO: 406106 - DNA, 514 bp, Homo sapiens
gtaaccacaaatggataggagactaaaaattgacattgttgtcttccaaatgttcatataatttccattttaatgcttttgttttttagatatatttaaaggtatgttctcttctttacactgcccagagatcacattgtctgaatattagcaagtcttatttccctaagatggaaagtgcaacagagggaagatgactaaaaatagcacgtctctcaagatgtttgctttctatcacctgactctaggatgcagtcttcattagggtacaaatgtattataatggaatggtctgatttctgtttccatattttatgaytctcatagtctaccacttgttgaatttaaaagtacattttaaacagatgaaaataagtgttagttgcttgctgataagaagatattaatttcccatatgttgcagcacgcttaattcattttagaggtgatattcaaaaatattacttagtatgtattaaatttttatctttaataacctaggaagtttgctagc

SEQ ID NO: 406107 - DNA, 618 bp, Homo sapiens
gccatttaaaaaaaagttctttaatttttaaatgtggttctcactgctaactgtaatttagctcactatagatgcaataggactgaagtaattaatcacatgtagaatttgaaaaactcaactaggtacatcttttttccactactgaacatcttacttcctttcgatttaatattggctattagcaaatgccacagaacatatgagttactcccttgatataatccaccctctgagctcaggctcaggaacttcgtcatttaaattggctatcaacagctaggacatgtatgttttactaaacactttatagcagaatacatctgttgctactctgtttgttatattaagattaagcacaatgatgttgacagtattaatacatttaaaagcctgtcacgttccatggtgttcaygagtcctggggactgcaggattgaaataaaaagtgactagaggcaaaattaagaattatggaatgtgtagaaggtgaagaacacagaggtagactctgaaatgagtactgctacccaggaggatattaacctcttgcctgcctggcttttcccataatattgtgaagccacattttactgaaaagagccgcatgcttcatga

SEQ ID NO: 406108 - DNA, 624 bp, Homo sapiens
  misc_feature (1)...(624): n = A,T,C or G
ttttcttcccaccttatgaaatatctttgcaatacctgttttttaaagatcaaatgaacacagttctggagcctagacgagtagctgtctaaccttactctgcgtaatagggctaaaatttcaactctatttctctgctgatgctctatgggatttggagcccccaaagcctgattttattcctaattaacagtaatkaacagatgacatacttttcctttgaacacctctgtcgggaaaatgtccaatcagcaagagctacaagcaatagacaaattccctttctctgacctcatttacatgcttaagtacacagagactccccctgcctttagtttggggtgcggggggaaagaagtaggtcaagacattgaggctttatgcattacctttagaatgtggtgaaggctgaaagtcatggctccaaccagagtttccagagcaatgtgggttactttcatattcatcacacataaggccaataccctcctagcagtattagtttagttctacatttaggcacaactcacaaaacagcaaagatgcctataattgtacccattaagagacttataatagaaaatactatgtgctatgtcatcacactnnnnnnnnnnnnnnnnn

SEQ ID NO: 406109 - DNA, 542 bp, Homo sapiens
aagaaggtagcaggtcagtaaagcaagtcagtcagtaaagtatttattagamaagttatttatttatttttaacttgatgcggatggtattaagaatggaaatatgaaagagaaattcaaaaatgaaatctgggccaggcacggtggctcacgcctgtaatcccaacactttgggtggccaagacgggcggatcacctgaggtcaggagtttgagacaagcctggccaacatggtgaaaccccatctctactaaaaatataaaaatttgacagccatagtggcgcgtatctatgatcccagctacttgggaggctgaggcaggagaatagcttgaacccgggaggcagagtttgcagtgagctgagatcacaccattgcactccagccttgacaacagagtgcgacgccatctcaaaaaaaaaaaaagaaaggaaagaaatgacatgtgtttggatgggtcatgatagttgagaaaaagctggatttcagagctatgtcacacctttttatcatcatcaggatctagcatggtgctttatac

SEQ ID NO: 406110 - DNA, 542 bp, Homo sapiens
aagaaggtagcaggtcagtaaagcaagtcagtcagtaaagtatttattagaaaagttatttatttatttttaacttgatgcggatggtattaagaatggaaatatgaaagagaaattcaaaaatgaaatctgggccaggcacggtggctcacgcctgtaatcccaacactttgggtggccaagacgggcggatcacctgaggtcaggagtttgagacaagcctggccaacatggtgaaaccccatctctactaaaaatataaaaatttgacagccatagtggcgcgtatctatgatcccagctacttgggaggctgaggcaggagaatwgcttgaacccgggaggcagagtttgcagtgagctgagatcacaccattgcactccagccttgacaacagagtgcgacgccatctcaaaaaaaaaaaaagaaaggaaagaaatgacatgtgtttggatgggtcatgatagttgagaaaaagctggatttcagagctatgtcacacctttttatcatcatcaggatctagcatggtgctttatac

SEQ ID NO: 406111 - DNA, 610 bp, Homo sapiens
aaattgcacatgccaaattcctggaaatgaagttcattcacaaagtgttaaagttgtgggttctttcattcttgttcattttakaatagctttaagctcacttacaaggatatctttagaccaaaaggtttcttatgtacttatcttgcatcctcttcccacccaatctcaaatactaaaggggatgataatagtgtctaaaatgccttgttaacaaagttatgtactgggagttaaataaaaccaaaataaagaaaccaaaataaagcattttgtagagaaaccaaaataaagcattttgtagagaactcaacttgatactttctttgaaataacattttgaattaaagaaatacacaatgacaaaaagaagttttctctttcacatagaggatattaatccaatctttgtgcctatattgaaaatgattttttgaaactagaatttttttagttcaatattatggtaactgctaagtctgattattcatgacatttgcaaaaactatgggtaatgacctgtagctaggcctttttcttgcctaactaaagacacagagatcattcagggcttttcctgctgttctcccattctctccattcaaagaag

SEQ ID NO: 406112 - DNA, 570 bp, Homo sapiens
aatgtgaatataaaattatcttaaaattttagttttttttatataaaaggaggggattaagataacttgcattgacatctgttatgtcatggaaattttgtgaagtactccttctcctggaagtagtttgttagggatggaaattgcatcataggaatcaggataattgagattccagctcctggrcacccagagagaaacagttgatttcatctcagcctgaagaacttctatagcattctttgtagtataagtgacctgatgaaaagtttgcatagtttcctttgatgcaaaaatttatatttttcttcattattggcatatatttttgctaaataaacaactcagggttgatggtttttcctctcagtactttagagatgttccattgtctgctcacttctattatttctgaagacaggtcagttatgattcaaatcactgttgccatgtataaattatgtgccaattttctttgactgccttcaagattttctcatcttttgttttcagaaatacgactatggcatgtgggcatggcttctttcctttgtatttatactgcttggt

SEQ ID NO: 406113 - DNA, 613 bp, Homo sapiens
gttttggtagattctttttattatgtttaaaattcttccccttaattcctaatttgaatgagtgttaaatgtatcaaaacttattttttccctaattaattcagctgttggtatgttctttttccctcctttaatgttttaacatactgaactacaaaggcaggtttcttgttttcctttaaagactgctagatttgattgctataattttatgtaggttttttgcatctatgaacaaaagtgaaatgggtgttgtagtgcttctctacttcttttcctttctgattttgatatcagcatcattctgtcctgtatgaaagaagccgaaatagtttttccttttttgattcttttcttggaagctttttataattagagattttcctgccctttgattaaaattgtgaaactgtctgagtctagtgttcttttattcaaggggattctttttgtctatgcatttagcttctttaatgattagatgtactatttctagaatagtttttggttatttctaaaataatttttkgttctagaaaagtgttcatatcatgtatgttttaaaatacattagcataaactgagtctatggtggtatgtttgaaatcttgac

SEQ ID NO: 406114 - DNA, 585 bp, Homo sapiens
ttacttaaacaaagaactatcttttccacctctatctctaaaatcatcagcatttttgcccaccatcaactctcatgtgcacctagaactgacattaaaaatctattaaagtcaattttttgtatttgagtatatttttatatttttatatcaatgtttttgcatatttatatccactcatgacctttcatgggttcaactttttaaatcagttatttaaataataattactattatttttctgctcaaatgatcacaattgaccaagggaaatattgcatgctcttttcccttccttcccttccctttctttctttttagggtttcccctraagtacactccctcaattcccttctacctgaatccctgtgtcagcttctgtttctaggaaatccaaccaatgacacatcagtattaggtatggggtagaagcagaccctaagggtggtattcaggaggtgactcaccgctggccagctgtcaagaataccttattgctactaataggttgaacactgataattcaagatacgttaaagcagtaaaattgttaacacttttcaactgtggttgagtgcaatggg

SEQ ID NO: 406115 - DNA, 639 bp, Homo sapiens
gggtgtagtttggccaccacatggcctacaaatgtaatttatgacggggctttgggccgcagggtatcagttttgcctccagaagggactggagattacaggtatcagcctgacctcaaaaggtcagccatgcaggcagtatgtgatcaagccctagtaaaaactctggttaccaaaggtttgtgtgagcttccctggccagccatgtgtgtctcacattgtggctggaaggatttaacaccatccatgacttcatgcagggaggatgaccagaagctccacatttggatccctcctggactctacatgtctcttcccttggatttattaatccctgtattaaaccatagctgtgaatataacaactttctatgagttccacgaatccttctagtgaattatcaagtatgagggtatttggggaacccccacattgcaactggtgtcataagtgagggcagtcttgtgtagacactgctccttctgactgtacagttggataaactctcacacctggcttgggtcttatctctactacccctggtgccatgactaggaccatctgggtaaagtgcagtccactagtrcatatgattggagctgggagggaggggagctagagggatggactgtcaaaaa

SEQ ID NO: 406116 - DNA, 514 bp, Homo sapiens
aataagaatttttgatccctattgggttatgtgattaagctaaaacagcaacaacaacaacaacaaaagaaatacaggaaacagaaaaggaagatagattatattatagaaaaaataatgtttacaaaaaatactgtagaaattatataaagagaacagggaatggcaaccggccaagcattatgttgacttggaatgtacctaccaagtgctgcatattgcatgtcatgaggatagaggtaaaactgagaaggaaatgaaataataagctaatgaagtaaaaactaatatcttaaaaaatagggcgtctcttaagtactggtaagaaatacaaatatatgatatataaaaacaaatgctcttttgtgtcattttgaataartttttaccataagcatcttttatctattacccaacaacaaacttgaaaatatatgccttgaaattgaaaatctacagaatttgacaataacagcaaatgttctcctaacaataagtacctaacactctaccc

SEQ ID NO: 406117 - DNA, 613 bp, Homo sapiens
  misc_feature (1)...(613): n = A,T,C or G
tctgtatataaccctatcataagttgaggaacatctatataaatattgagagaagacttagagactctccacccaccccacccccagccatgatcgctgatgacagcttaaactgctgtgtgacaagagcctttggtctagggaaatgaaggatattastgattttagtgttaaaccttcacattgtgtaagccttgaaaaatatgtacattatgcaagaatgaccttaggagagggataaccttccttgtatcttctgaacattctacccgaaggcaaagatggaggtataatgatagatataacttctctgcataaggaataaattatatgagccaagttaaataatgtataaatgtggttgctacaaatgaagtcaagattatgcctattctaaacatntncaaatagtttataggggaaatgaaaactcattcattagaaaaaaggaaagaaaacgtactgtataatgtttttaatctcacagaattgactatactgaagaaagttatctgaagaggtatataacagaatcattgaagctgggaatgattcccacatctgtcagtccttggctaaatcatttaaattctcaagccagattttatgccta

SEQ ID NO: 406118 - DNA, 594 bp, Homo sapiens
atctaccccatgaagtaattttgtaatatttttgcaccttataaacagtctttgacctaggaattggtaatgagaattgttataggtgactgctttcagtcagttctcatggttattattatgctttatagctctacccaaatacagtgtccattccgaagatccgcagtttgaggcacttgattcatccagggatgattagattatattggttgatgctaatcaaattcacaagatactgttttcatgaaccagaacatcaacttcttcatttataactttctcatttctaccctgagcggagaatacctaccycttaaatgttgatgttctatcattctaaatgcttctttcaaataaaaaaaagattttagtaatccttcttatttaacataggtgaaaaacttctaaacaaaatgtgagaaaaagaaagcaacaatatgtatttttaatccaccagaacagaagggattttattctaggaatgtaatcaagattcaataataggaaatatttttctatttgtagaaaattatttgtatttcttaatataaataaatcacttaaaacgtcacaatcatctcaacagatgcc

SEQ ID NO: 406119 - DNA, 614 bp, Homo sapiens
actcaaaatttattccttccctctttcctttgctccctccctccatccacccatccctccatgcatacatgcgtacatgaacttcctcatgtattcactcatcgaataactatgcagtaagcagttactatgtgcttggctctgtaagggtgcaatagatagatgtggctccttcccttgagcttcattccagtgaatcaacaaaattaatcagatgmtttcgctattggtgataagtgttaggaaaaggaaaatacggaatgcttagagggcatataaaagggagcacctcacttgaatttgggggttgagaatggcttctgtacgaggaattagcctaagtgggatgaaaccagggaaagatgacgactgggggtagtgaatattccaacaagagggaaaaagaatcaaacgcccagaaacacaaaaatgaaattcatttgcggagtaggaagtagctcactggctaggacatagactaaggagggtagcaagtgagctcattatgaaatgtgaactttaggctcacagcttctgctttctcatttcccacagtggccactaaagattttaagcagaagagtgatgcaaacagagaaccattttagaaaatg

SEQ ID NO: 406120 - DNA, 614 bp, Homo sapiens
actcaaaatttattccttccctctttcctttgctccctccctccatccacccatccctccatgcatacatgcgtacatgaacttcctcatgtattcactcatcgaataactatgcagtaagcagttactatgtgcttggctctgtaagggtgcaatagatagatgtggctccttcccttgagcttcattccagtgaatcaacaaaattaatcagatgatttcgctattggtgataagtgttaggaaaaggaaaatacggaatgcttagagggcatataaaagggagcacmtcacttgaatttgggggttgagaatggcttctgtacgaggaattagcctaagtgggatgaaaccagggaaagatgacgactgggggtagtgaatattccaacaagagggaaaaagaatcaaacgcccagaaacacaaaaatgaaattcatttgcggagtaggaagtagctcactggctaggacatagactaaggagggtagcaagtgagctcattatgaaatgtgaactttaggctcacagcttctgctttctcatttcccacagtggccactaaagattttaagcagaagagtgatgcaaacagagaaccattttagaaaatg

SEQ ID NO: 406121 - DNA, 662 bp, Homo sapiens
cccaggtttactaacctcatcaaaaccaatattatccattcaaaggataacataatcaggtgtggtctgattgtttcaaagaagaataaatgaccaagatgaagcctagaaaagaagtcagagaaaggtcaactgtcaggatgttttcagtatgcctagagaaagtcctaaaatattccaattctcattggcaaccctgcttttcccaatagttagatgaatacttcacatcagcccccartcccaaggtcataccaatgtcctatgcattgagtcaggcccacagaacctatatagccgtagactcacacagtcatgaaccaaaggactctacctgagaggtagaatatgtgagagaccgatcctccacacattctacctcatctccccaaaagttacaaactatcatcattttatgccacagtgtgactaccacatgtttgttgatttttactgttttactcagagtggtgagcattaaagccctttaaattaaaaagacttgagtatttacttgggggaatagcaagaaagtcaaaggtttcactgctgtttctcagctggcataagaagagaggtactggatgaagaaagagggtgaggcagctctaacaggagaaggaaagttagctcagcccttggtcacacaccggggaccgaac

SEQ ID NO: 406122 - DNA, 543 bp, Homo sapiens
caggccactgcgtgtgcagacagcccaccccaagggaagaatcaggggagaagggatgcaagacccgagaagcatgctaacatataaaacaccaagtcaaaggtcaaacagtgcacttggtctctcaagccaccmgcttccaaatgtattttgtttttaattccagctccaaagctttttaataagctttcactcctactctaaagcttgccttgctctctccctctgctttatgccccatggttgaattttttcttctgaagagacagtaattgaggttgctgcaaacccatacgaattcaccacctctaaaactaagatgcaaaaatgacacctgccacctctgagctccaggttccagagggtaaaagaaaatggaggttgaagagcccagtcagaggactatagtcctccggtcgtgagtgttcagaaggtctactgcccagtgtttttgctgagtcatttgaggttttagtcagcatagaataataaaacctattttcaaccccactaggactagggccactactattcctggctggc

SEQ ID NO: 406123 - DNA, 543 bp, Homo sapiens
caggccactgcgtgtgcagacagcccaccccaagggaagaatcaggggagaagggatgcaagacccgagaagcatgctaacatataaaacaccaagtcaaaggtcaaacagtgcacttggtctctcaagccaccagcttccaaatgtattttgwttttaattccagctccaaagctttttaataagctttcactcctactctaaagcttgccttgctctctccctctgctttatgccccatggttgaattttttcttctgaagagacagtaattgaggttgctgcaaacccatacgaattcaccacctctaaaactaagatgcaaaaatgacacctgccacctctgagctccaggttccagagggtaaaagaaaatggaggttgaagagcccagtcagaggactatagtcctccggtcgtgagtgttcagaaggtctactgcccagtgtttttgctgagtcatttgaggttttagtcagcatagaataataaaacctattttcaaccccactaggactagggccactactattcctggctggc

SEQ ID NO: 406124 - DNA, 543 bp, Homo sapiens
caggccactgcgtgtgcagacagcccaccccaagggaagaatcaggggagaagggatgcaagacccgagaagcatgctaacatataaaacaccaagtcaaaggtcaaacagtgcacttggtctctcaagccaccagcttccaaatgtattttgtttttaattccagctccaaagctttttaataagctttcactcctactctaaagcttgccttgctctctccctctgcyttatgccccatggttgaattttttcttctgaagagacagtaattgaggttgctgcaaacccatacgaattcaccacctctaaaactaagatgcaaaaatgacacctgccacctctgagctccaggttccagagggtaaaagaaaatggaggttgaagagcccagtcagaggactatagtcctccggtcgtgagtgttcagaaggtctactgcccagtgtttttgctgagtcatttgaggttttagtcagcatagaataataaaacctattttcaaccccactaggactagggccactactattcctggctggc

SEQ ID NO: 406125 - DNA, 520 bp, Homo sapiens
aatgttacatttatccattcctttgtttttaactcaaaaaatactcattgtacaggcaagttttccgtctcacttttccactattccttccttcatggctcttcctcatttgaacttctacttaaaagatttgtgtcacacatgtagcctgatatataatccakccaacaagaggaaggaaaaggaattaagtgttccaagggctgacaaggctctttgcaaacattatctcatttactcttaacagcaatcctgtgaggtacttattatcacccccattttactcaagggggaagaaaattgaggctcagagaggttaatgaatctgccagagatcacagagcttcttttttttttttttttaaatagagatgggattacaccatattgtccaggctggtctcaaacacctggactcaagtgatccacctgcctcagcctcccaaagtgctaggattacatgtgtgagccaccacacctgacctctaagagatcacagagcttctgaatgatgaagcca

SEQ ID NO: 406126 - DNA, 597 bp, Homo sapiens
aaggcagttaattttcttgtagggaccctgtgggtgtcttctgggtgaccctagcttggattcccagattccagggcttccgaggctctggagagcacttttgaaattctagaccaaaacagatgggtttgggacccagactccaccaggaattctgggtgggaaaataagtagaaaatgttagagacaaaaaaggagcataagcatagcctggaggggcggaagaaagctgaagcaagctctgaaaacccagaggatacagaatatgcagacactggaaggagagaggctgcttggtkcaggtcatgggggttctctgcttagacctccatcagccaagcacttgcaccttgtggagaggcagctatggagcatgcagggctagggatcctggacatgagaaggttgggtcaggtggattctttaggcagattcaggctgagttgatgtgaggttggtttgaggttttctaaaagagagctcttcccatctggaagagactgcttacgattgctatgtgtgcattaggtactttatgtaaattatctcatttaattctcataactatactataattagcccctttttacagatgag

SEQ ID NO: 406127 - DNA, 636 bp, Homo sapiens
gtcagactggacctcagctctgaggtctaggctcctcgttcacccatatctgcatctaggagtgtttctaaagctcccttcaggcaccaactgccaacccccactgctctcagatctctagtgctacctgcaycatcatccctgaagccctggagaaagcgggagcacagaaggacagtagctgccacagtcccaggtggctgagatcctctctggggtactggattggctctatctgctggacagtggggttccgggccatgcagcggagagatgtttcccaggagttgggccttgatagggaggaataaggttgaggagaaaaggatatccagataaacgccaccttgcccatggtcacctaaccgcgtccaggtccccagtgaaacctcagtaataaagccagcatatatgataaccaaggcaggatacatagaaagaagctccagaagttctctccatccctaggaaattgctaggtggcttctcatcaggggattttcctggatccctctgtgggttttatccacactacacagggaacaaactcattatatacttggcatttcttaggaaaatgtgagggcaagagaaatgtagtttgagcccagagctatttgagaccggggctagaat

SEQ ID NO: 406128 - DNA, 636 bp, Homo sapiens
gtcagactggacctcagctctgaggtctaggctcctcgttcacccatatctgcatctaggagtgtttctaaagctcccttcaggcaccaactgccaacccccactgctctcagatctctagtgctacctgcatcatcatccctgaagccctggagaaagcgggagcacagaaggacagtagctgccacagtcccaggtggctgagatcctctctggggtactggattggctctatctgctggacagtggggttccgggccatgcagcggagagatgtttcccaggagttgggccttgatagggaggaataaggttgaggagaaaaggatatccagataaacgccaccttgcccatggtcacctaaccgcgtccaggtccccagtgaaacctcagtaataaagccagcatatatgataaccaaggcaggatacatagaaagaagctccagaagttctctccatccctaggaaattgctaggtggcttctcatcaggggattttcctggatccctctgtgggttttatccacacyacacagggaacaaactcattatatacttggcatttcttaggaaaatgtgagggcaagagaaatgtagtttgagcccagagctatttgagaccggggctagaat

SEQ ID NO: 406129 - DNA, 504 bp, Homo sapiens
gggcgcaccacctgtcttagaaaatgaaacaggtcagtgttaattttcaccattggaaagtgactgacatttctgacatgattgatggtagcagtcaatggggttatcagttcctcctctaaaccatagcsttggttgagcccactgcccccaggtaagctgagatttcttcttagagaaatatagccatggcattagtacagacttagggcttaaaattgaacaacgtggatcattccaagaaccaccaggccacatgttagcttttatgaggtgtatataatatgcatataatctttcaatgaaaaacttaatttcatgaatttgcttttttagtcacagattcagctttcctcagttgctccttgtctgggttttcctaacatttttatctttcttcattgccatcctgtttgtgtcgattcatctggtgcctgtgcagtcttggggctcaccctccctccgagctcctgagctatgagatctgcttcagcccctacccta

SEQ ID NO: 406130 - DNA, 547 bp, Homo sapiens
aaagcaaatgcaacaaaaacaaagatagatggaacttaaactaaaatgcttctgcacagcaaaagaaacaatcagtagagtaaacagacaacctacaaagtaggagaaaatcttcacaatctgtacttctaacaaaggacttatatccagaatctataaggaactcaaacaaatcagcaagaaaaatcaaacaatcccatcaaaaagtgggctaaggacatgaatagacaattctcaaaagaagatatacaaatggccaacaaacataagaaaaaaaatgctcagcattacaaattatcagggtaatgcaaatcaaaactactatgcgttactaccttactcctgcaagaatggcataatcaaaaaattaaaaaaaaatagatgttggcrtagatgtagtgaaaagggaacacttttacattgttggtgggaatgtaaactagtaaaaccattgtggaaaacagtgtggagattctttaaataactagaagtagaactaccatttgatccagcaatgccactactaggtatctaccccagatgaaag

SEQ ID NO: 406131 - DNA, 547 bp, Homo sapiens
aaagcaaatgcaacaaaaacaaagatagatggaacttaaactaaaatgcttctgcacagcaaaagaaacaatcagtagagtaaacagacaacctacaaagtaggagaaaatcttcacaatctgtacttctaacaaaggacttatatccagaatctataaggaactcaaacaaatcagcaagaaaaatcaaacaatcccatcaaaaagtgggctaaggacatgaatagacaattctcaaaagaagatatacaaatggccaacaaacataagaaaaaaaatgctcagcattacaaattatcagggtaatgcaaatcaaaactactatgcgttactaccttactcctgcaagaatggcataatcaaaaaattaaaaaaaaatagatgttggcatagatgtagtgaaaagggaacacttttacattgttggtgggaatgtaaactagyaaaaccattgtggaaaacagtgtggagattctttaaataactagaagtagaactaccatttgatccagcaatgccactactaggtatctaccccagatgaaag

SEQ ID NO: 406132 - DNA, 630 bp, Homo sapiens
cttctttaccttgtagttttgttagcagtggtgaatctgtatgggtcttcagcaaactcaatgcttgcctcctcagaagaaagaatttgaccaaggagcataaggcagagggagagatcgaggcaagttttagagcagatctgaaattttattaaaaaattttagagcaggaatgaaaggaagcagagtacacttgtaaggggcccaagcgggtgacttgagagaytcaagtgtgcagtttgacctttgacttagggttttatatgttggcatacttctggggtcttgtgtctcttctctcctgattcttttctcgggttgggctgtccacatgtgcagtggcctgtcagcacttaggaagggctgtatgtgcagtgtaattattggagttgtatgtatgctcacttgaggcattcttccctcaccagtcaagtgttcctagaaggtcatataccagttaaactctgccatttttccttttagtacacatgctggagcccactcacccaattcctgagaccttatcaggaagcaggtgatcactagcttcaggtgttttctatctacctggagacggcctttttctggtgccagctgtgaccaattattatcttagcgagacagtttaac

SEQ ID NO: 406133 - DNA, 630 bp, Homo sapiens
cttctttaccttgtagttttgttagcagtggtgaatctgtatgggtcttcagcaaactcaatgcttgcctcctcagaagaaagaatttgaccaaggagcataaggcagagggagagatcgaggcaagttttagagcagatctgaaattttattaaaaaattttagagcaggaatgaaaggaagcagagtacacttgtaaggggcccaagcgggtgacttgagagactcaagtgtgcagtttgacctttgacttagggttttatatgttggcatacttctggggtcttgtgtctcttctctcctgattcttttctcgggttgggctgtccacatgtgcagtggcctgtcagcacttaggaagggctgtatgtgcagtgtaattattggagttgtatgyatgctcacttgaggcattcttccctcaccagtcaagtgttcctagaaggtcatataccagttaaactctgccatttttccttttagtacacatgctggagcccactcacccaattcctgagaccttatcaggaagcaggtgatcactagcttcaggtgttttctatctacctggagacggcctttttctggtgccagctgtgaccaattattatcttagcgagacagtttaac

SEQ ID NO: 406134 - DNA, 630 bp, Homo sapiens
cttctttaccttgtagttttgttagcagtggtgaatctgtatgggtcttcagcaaactcaatgcttgcctcctcagaagaaagaatttgaccaaggagcataaggcagagggagagatcgaggcaagttttagagcagatctgaaattttattaaaaaattttagagcaggaatgaaaggaagcagagtacacttgtaaggggcccaagcgggtgacttgagagactcaagtgtgcagtttgacctttgacttagggttttatatgttggcatacttctggggtcttgtgtctcttctctcctgattcttttctcgggttgggctgtccacatgtgcagtggcctgtcagcacttaggaagggctgtatgtgcagtgtaattattggagttgtatgtatgctcacttgaggcattcttccctcaccagtcaagtgttcctagaaggtcatataccagttaaactctgccattttkccttttagtacacatgctggagcccactcacccaattcctgagaccttatcaggaagcaggtgatcactagcttcaggtgttttctatctacctggagacggcctttttctggtgccagctgtgaccaattattatcttagcgagacagtttaac

SEQ ID NO: 406135 - DNA, 579 bp, Homo sapiens
gcttcttttagaacacttagaacaaatttctatctatatcatcgatatctatatctatacctctctcttcatttccctctcctccctcctctcccctcccttcttccctccctagagccaaatccacagatcttttcaagataatccctctgtttttctgctgagatggctgagggccagtgcccttaaatttcctataggtcctctgtattgattgagcagatttattaggaacacttttaatctcttggaaggatactctatgtggctgaacactctgaccctttggttttccaaggtgtcagcgaagagcccagcctcttctttataacatgttttcagaacaatcttttacttttggcatctcttgccacctggrtaggccaagaatttcccaaatcagcaggtcttgaaaccttatcatttcttttctcaatttgtctcctcctgtattttactaaaagcagcaggaagaaaccaggcagcacactcaacactttgcttggagatctcctcagctaaatattcaaattcattgtttttgaattctgttttccacacaactgcaggtcgtaagtt

SEQ ID NO: 406136 - DNA, 555 bp, Homo sapiens
ttgctcctaagtgagcaccagtgaggaaattttcagaatggaaaagggtgggaatgttgaaattactattctgggaattctttgagaaagacatgaggctgttggcraactgtgaaatgtttgatattccatgtgaattactatgcttaagattcaaccattgattcgacagttcacagggaatttgaattgcttagcacaaattaactttatctcttttcattaactttatctcttgctctgacttttcagtaacagacaacaaaagagttgaaggaggcagaggctctattgatgtcagaattcttgcacttgatttgaggaaagtagtaaatgcaaaggaagaaaaccttattgatactttcattttggccacaggaatatatccttttccacttaaagaaatctagctatggaggaggaaggggaaataattcccttaacaataaatagaacaaaaaatttaaccaataaatagaacaaaaagtagaacaagtaggacatagcagagagggtgtaagtagagatatttgcaaatctcaaagaagtcttgtg

SEQ ID NO: 406137 - DNA, 604 bp, Homo sapiens
atgcaaatagaaaacaagtatatgaaaaagtgctcaacatcattgatcatcagagaaatgcaaatcaaagctacaatgagatgccactttactcaagttaagatggcttttttccaaatgacaggcaataacaactgctggtgagaatgtggagaaaagggaacccctgtacactgttggtgggaatgtaaattagtataactactatggagaatatagtatagagtttcctcaaaaaaaatctaaaaatagaactaccatatgatccagcaatcccactgctagatatttactcaaaagaaaggaaatccatatattgaagagatatctgcactcctttgtttattgctgcagtatttacaatagctaagatttggaagcaatccaagtgtccatcaaatggtgaatggataaagaaaatatggtagagatatacayaatggagtattactcagccataaaaaaagaatgagatcctgtcatttgcaacaacatggatggaactgcaggccattattttaagtgaaataatagaggcaccaaaagataaacttcacatgttcttgctcatttgtgggagctaaaaattaaaacaattgaaccc

SEQ ID NO: 406138 - DNA, 515 bp, Homo sapiens
agatagaatgattaagatcaagttcttggtaacacaatggggtgattacagtcaacaataatttattatacatttaaaaataactaaaagggtataattggaatgtttgtaatgcaaagaaatgataaatgcttgaggtgaatttataaatacgttttccctaatgtgattattacatattatatgtctgtatcaagatatctcatgtatcccataaatatatgtacctactatgtacctattaaaaaaagaacaaagagtatattagttgcttttagacagaacagtaaaaaaataactgattagttaacatccagttctttatgctaccatttttgtctaaggattaaagtagagggaactctattatcattcttattgaagagttaaactggcctatttgagaaattgactgttattgttccgtcctgatttccaggaaggatcacccatgctaaagctccatatcaccaaacctaaacaaagttgttccwcatcaccaaacctaagctaag

SEQ ID NO: 406139 - DNA, 516 bp, Homo sapiens
tctggcaaccactgtttactttctatctctatgaatttgatgactctaggaacttagtggaatcacataacatttgtgtgttttttttgagtctgttttatttcacttagcataatgtctttgattcatccatattatatcatgtatcaaaatagtcctcctttttcaggctgaataatattccattgtatgtatatacacatgttaaaaaatccttttatctatcaatggacactctggttgcgtctaccttttggctattggaaataatgctgctatgaacatgagtgtacgaacatccgtttgagactctgctttcagttcttttggacatatacccatgaatagaattgctggatcatatggtagttctacatttaaatttttgaagaattgccatacyatttttcagagtggctacaccgttttacattcccaccagcaatgcacaaggatcccaatttctccatatctgacaactctgtttttattttcttttttaacgatagccattct

SEQ ID NO: 406140 - DNA, 553 bp, Homo sapiens
gaagtattgcaggcagggaaggcaaatctctatccacagtaaggtctacttcaaaataagaacaaaatattgctctttccaaaatggaagccttctaatgcattcaacctgccactaggtggctggctgatcacctcagggaatggtgtcataccggggaccatgttgctttctgctgctggcagattgggcactcagcagtggccctagctaggttggtcttggagagtggaagtccatgttgctgagcccatgcrtaacctccatccctaccaccatggtccctttgttcatgagtcctttgggcgatggcaggggtggctggggaaagaggctgcctggtgtccacagaacgagtcagtctgtccacttgattattaaaatcctcttctccggaggttgctcagcatgctgaggtgagcattcatatgggacacaaatatcttcacattttctgctcatccagagaggtctatccacatatttcttccccacatttctttgtcacttatttttaatcaccttcatttcaagtccccgaccattgatctaa

SEQ ID NO: 406141 - DNA, 534 bp, Homo sapiens
taaagatatttttgtttacctaagactgtgttctctcgcaagttttataacttagtccttacatttaggcctacaatttattttgtgttactttggtctgtggtgtgtgggggtrtgtgaggaaaggatataatgtgaggtaacagtgcgagttcttttattttgtgcatgaatatcctgctgttctttagaaaattaccttttaaacaatatctagtctaatccttgaatgtggactagttctccattttttaagatgatcttaaattttgctctgtgaaaaaactgttttatagttttcagaggtttgtcttaatcttctgttaactttttttctaaatacttcattttctgatgacatgcaaatgtaattgcttccttaattgcatcatcattgcttgtatgcagacattcaactgctttttgtgcattgatattgtattctgtgatcttccaaacttattagttatagaagtttttaaaattgtagattccttagggttgtctacctatacaatcatgttatttgcaaca

SEQ ID NO: 406142 - DNA, 534 bp, Homo sapiens
taaagatatttttgtttacctaagactgtgttctctcgcaagttttataacttagtccttacatttaggcctacaatttattttgtgttactttggtctgtggtgtgtgggggtgtgtgaggaaaggatataatgtgaggtaacagtgcgagttcttttattttgtgcrtgaatatcctgctgttctttagaaaattaccttttaaacaatatctagtctaatccttgaatgtggactagttctccattttttaagatgatcttaaattttgctctgtgaaaaaactgttttatagttttcagaggtttgtcttaatcttctgttaactttttttctaaatacttcattttctgatgacatgcaaatgtaattgcttccttaattgcatcatcattgcttgtatgcagacattcaactgctttttgtgcattgatattgtattctgtgatcttccaaacttattagttatagaagtttttaaaattgtagattccttagggttgtctacctatacaatcatgttatttgcaaca

SEQ ID NO: 406143 - DNA, 575 bp, Homo sapiens
attattttattttatttaattaatttctttttttggagacagagtcttgctctgctgtcaaggytggagtgcagtggcacgatctcagctaactgcagcctccacctcctgggttcaagacaattctcctgcctcatcctcctgagtagctgggcctacaggtgcgtgctaccatgtctggctaattttttgtattttttttttttttttttttagtagagacggggtttcaccatgttggccaggttggtctcgatctcctgaccttgtgatctgcccgcctcagcctcccaaagtacaggattacaggtgtgagccaccatgcctggccttgagaccactttaaaagtggtctttactttacttcctttaaattagtgtattgccttatcggtaaaatcatgaattttgctctccttccccattcagagcctgaatcacaatcatgttttgttttctagtgagattgttacaggatcaaggtcaaatgaatgtcagaaaaaaataagacttcaataaatggaatttgtagaatcttgtagcaaggggtgatcagatagggtttaaagaaaata

SEQ ID NO: 406144 - DNA, 575 bp, Homo sapiens
attattttattttatttaattaatttctttttttggagacagagtcttgctctgctgtcaaggttggagtgcagtggcacgatctcagctaactgcagcctccacctcctgggttcaagacaattctcctgcctcatcctcctgagtagctgggcctacaggtgcgtgctaccatgtctggctaattttttgtattttttttttttttttttttagtagagacggggtttcaccatgttggccaggttggtctcgatctcctgaccttgtgatcygcccgcctcagcctcccaaagtacaggattacaggtgtgagccaccatgcctggccttgagaccactttaaaagtggtctttactttacttcctttaaattagtgtattgccttatcggtaaaatcatgaattttgctctccttccccattcagagcctgaatcacaatcatgttttgttttctagtgagattgttacaggatcaaggtcaaatgaatgtcagaaaaaaataagacttcaataaatggaatttgtagaatcttgtagcaaggggtgatcagatagggtttaaagaaaata

SEQ ID NO: 406145 - DNA, 575 bp, Homo sapiens
attattttattttatttaattaatttctttttttggagacagagtcttgctctgctgtcaaggttggagtgcagtggcacgatctcagctaactgcagcctccacctcctgggttcaagacaattctcctgcctcatcctcctgagtagctgggcctacaggtgcgtgctaccatgtctggctaattttttgtattttttttttttttttttttagtagagacggggtttcaccatgttggccaggttggtctcgatctcctgaccttgtgatctgcccgcctcagcctcccaaagtacaggattacaggtgtgagccaccatgcctggccttgagaccactttaaaagtggtctttactttacttcctttaaattagtktattgccttatcggtaaaatcatgaattttgctctccttccccattcagagcctgaatcacaatcatgttttgttttctagtgagattgttacaggatcaaggtcaaatgaatgtcagaaaaaaataagacttcaataaatggaatttgtagaatcttgtagcaaggggtgatcagatagggtttaaagaaaata

SEQ ID NO: 406146 - DNA, 582 bp, Homo sapiens
ttttcctttgttctcttgcctctttgcccccaattcctgtcccctttgcatacagatcagttcagctttctccagccckacatccaaacttaggcactgcaagtcgtttgtgcatctgaagacccttacagggcaatgctaaaccatgggctgccacgggtgtgttggcacatgcctgtaacccagctacttgggagactgaggcaggagaatctcttgaatctgggaggcagaggttgcagtgagccgagattgagccattgcactccagcctgggcaacaagagcgaaactctgtctcaaaaaattaaaaaataaaaaataaaaacaatgggctgccaacttcaggacccagtccccacctcccccttcaggaggaacagggcaaaatggagatttgtccccacacctcagccccactcggatcacagagatagagcatttttactttcaaaaatcgcgttttctctctattacagtagtaaagtgtgatactatatattcatgatgagaaaaagataggcaaagaataatataccgtcaactaagaatgataaaaggaaatagtgagattttcatttca

SEQ ID NO: 406147 - DNA, 582 bp, Homo sapiens
ttttcctttgttctcttgcctctttgcccccaattcctgtcccctttgcatacagatcagttcagctttctccagcccgacatccaaacttaggcactgcaagtcgtttgtgcatctgaagacccttacagggcaatgctaaaccatgggctgccacgggtgtgktggcacatgcctgtaacccagctacttgggagactgaggcaggagaatctcttgaatctgggaggcagaggttgcagtgagccgagattgagccattgcactccagcctgggcaacaagagcgaaactctgtctcaaaaaattaaaaaataaaaaataaaaacaatgggctgccaacttcaggacccagtccccacctcccccttcaggaggaacagggcaaaatggagatttgtccccacacctcagccccactcggatcacagagatagagcatttttactttcaaaaatcgcgttttctctctattacagtagtaaagtgtgatactatatattcatgatgagaaaaagataggcaaagaataatataccgtcaactaagaatgataaaaggaaatagtgagattttcatttca

SEQ ID NO: 406148 - DNA, 594 bp, Homo sapiens
gccccactcggatcacagagatagagcatttttactttcaaaaatcgcgttttctctctattacagtagtaaagtgtgatactatatattcatgatgagaaraagataggcaaagaataatataccgtcaactaagaatgataaaaggaaatagtgagattttcatttcaaatgcaaagttcaataaaacagcattaaatcagcccatgatcttacacacaaaaacttaagattgtggcttttttgcataaaaagtagaaaacattagtctagactcttttgttctgagtttcagaaagttaacttgaacaaacttgaataaaaatggggagcgaattggtttatggaaccaaccataaccaatgagatgagtaggggagagctttctcgaggacaactggacaaagataatcaaagttttcaaagtgctctttccatccatgagtttcgattctctctccctgtttgcttcactttctcctccttcatgtgggctcattccactatcagggcacttagccttaggcaacactgggcttgaatcctctagcatcacagctcacaggaggaaagggtatcctggattcagctaga

SEQ ID NO: 406149 - DNA, 569 bp, Homo sapiens
gaaccctccaggcatatgatgaatatgttcatgaatcaaaatccatgttcttcaacctacgaacattgttttgaataacaggagtatcctaatgaagaaacaagcaggaaattatattcaaagaaagttgcctcaagctgcaccttcaatgaatttaaaaaawttttttaaaaattgagtggagtgaaattacaaagtgacatttacctatattgttattccaaatagatgtgaattatattttgatttctggatttttaatgtcacatggttaatgtaacgggatcatgaattacatctggatgtcctggtgttttcagaaacaagttatgtatatgagggagtgagtaaggggaaaaaatcaagaaagtctaagaggaggaggtaaacaaatcttttcatgaatggtacaaagctagaaatgaaaatgatacctcatgtgtacatatagtgcaatgcgtatctttttgaggaaaagaaccacaaaacctcttgagagtgtaatttttatttagagaaaaaaagtagaagttcttatattttcgtcagtcattaaacaggatttataa

SEQ ID NO: 406150 - DNA, 614 bp, Homo sapiens
tttcatttgaatttctctgatgattagtgatgttgaacattttttcatatatttgttggccatttgtatgtcttcttttgagaaatatctattcacatctttagcccatttttaaaataagatttgtattagtctggttccacattgctaataaagaaatacctgagactgggtaatttgcaaagaaaagaggtttaattggctcatggttctgcaatgaatactatccagttgtattcgtacactttcaygttgctgataaagacagatctgtaactgggcaatttacaaaagaaagaggtttaatggacttacagttccaggtgactggggaggccttacaatcatgtcagaaggtgaaaggcacgtctcacatggtggcagccaagagaagagaatgaggaagaagtgaaagcaaaaaccccttataaaaccatcagagctcatgagacttattcactagcagcagtatgggggaaatcgccctcgtgattcattatctcccactgggtccctcccacaacatgtggaaattataggagtacaattcaagaagagatttgggtgggaacatagccaaaccatatcaccagccataaaacagaaatggtgcc

SEQ ID NO: 406151 - DNA, 482 bp, Homo sapiens
gcataagcctttggacttccctgctgcacatttttttttttttttttttttttttttgctgttagcactcttcaaataccctaatagtttttttccttgatacaaatttacaattractttgaattttatatgtatagcatttcagtagaccaagaataaccaagtgagtcctgaagaaaatgaacaaggccaaaggacctaccctaacagatatcaagattcattatgcagctatatcaattatgattatgtgcttttggtgcaagcctggatgaactgatgaaattgaacaaagtctcagatattgacccttttatatatggaaaattttgttgatgacagagccagcagtataataaatggctttgggacaactggttatttataaaggaaaaaactaatttgatatatgatcaaatatgatactgatgatgtaagtatatgacctggagcaagaaacaatcacaaaacaaatacaaat

SEQ ID NO: 406152 - DNA, 564 bp, Homo sapiens
ttaaatccaaatgtgtcaataattacaataattttaaattaaaacattgaaacgttctatgaataaaaaaagacagtcacactggatttgtaaacaaaaaaaaatctaactataggtgatttacaagctatgtcagtaaattataaaaatccagaaagacagaaaacaagttgatgaaaagagatacaccacacatacactaacaaaaatcaccatagtatgtcaatgtaagacacaataggatttaaggcaaatraccttaccagagattcagaaggttcctttcatgaaatgaaaaagttgagtttgccagaaatatggaatttttatacatatgcaccaataacataagcagcatttaaaaagaagacaaaactacaagaagaaatagataaatccaaaataataggaggagaattcaacatgcctctcttagtaaatgtcagaactaacaaaaaattaaaggaaatcaaaaaataaatactactttaaatagcacaatttaatgcatgtttctacagtcctaacgtgatacacatccataaaccaaattctgcttaattt

SEQ ID NO: 406153 - DNA, 632 bp, Homo sapiens
agactgcattaaaaaatatgatcaaattacattcttcctataagaaactcaccttacctataaagacacatatagactaaaagtaaaggggtagaaaatatattccatgcaaatrgaaaccaaaggggaacacaagtagctatggttaaatcagataacacagactttagatcaaaaaaagtaatacaagacaaagaaagacattatataatgataaagagatcaattcagcaaaggatacaacaatcctaaatacatgggcacccaacatcaaaacacctagcaatacaataatagaggaggacgtcaacatcacagtcatagcactagacagatcatttaacaaagaaacactgaacttaaactggattttagaccaaatggacttaatagacatttacagaacactctaccaagcaattacagaatatacattagtttgataagcagatagaatattctccaaggtagaccatgttaaagcaaagccataaaacaagttttaacaaattttcaaaaatcgaaatcatatcaagtgtcttctcagactacagtggaataaaactagaaatcaataccaagagaaacttcagaaatgataaaaatacatggaaatttaaacagtaggcttc

SEQ ID NO: 406154 - DNA, 500 bp, Homo sapiens
aagtcatatcaagtatattttccaatgacaataatttgaaactagaaatcaatgacaggagaaaaactggaaaaattcacaaatatgtagaaattaacacactcctaaacaaatgatgagtcaaaaaagaaatccaaagggaaatcagaaagtatcttcagacaaacaaaaatggaaatrcaacatactaaaactcatgaaatgcagcaaaagcagttctaagtgggaagtttattgcaatagatgtctacttaaaaaagaaataatgatctcaaataaataacctaatgtgatacaccaaagaacgagaaaaataacaaattaagccaatagttcatagaaggaagaaaattacaaagagcagaaataggccgggcatggtggctcatgcctgtaatcccagcactttgggaggccgaggcaggcagatcacatggtcagatcaagaccatcctggctaacacggtgaaaccccatctctactaaaaatacaaaaaatt

SEQ ID NO: 406155 - DNA, 539 bp, Homo sapiens
ggttttggagccagacagatgtgggttgtagtcccagctctgtcacttagtcccagctgggtgacctttggtgagtgaccatctctgagcctcggttttctcctctatgaaatgggwtgatggtagcacctttctcatagtggtgttgtgaaaagtggttgataatttatgacaggttgtaaagctcacaggacggtgcacggagttggcccttgggaggtgggagctgttattacctttgtggctccgtcatttttttttttttgagacggagtctcgctctgttgcccagattggagtgcagtggcacgatctcagctcactacaacctccacctcctgggtttaagcaattctcctgcctcagcctcccaagtagttgggattacaggcaggtgccaccatgcctggctaacttttgtattttttagtagagacggggtttcaccatgttggccaggctggtctcgaactcctgacctcaagtaatttgcctgcctcggcctcccaaagaagttgggattatgggcgtgagccact

SEQ ID NO: 406156 - DNA, 561 bp, Homo sapiens
ttattagaagtcttttctgtactattgatataatcatgtggtttttgtttttagttctgtttatttgatgaatcacatttattaatttgtttgtgtatgttraaccaaacttgcatctcaaggataaagcctacttgttcatggtaaataagctttttgatgtgctgcttgatttggtttcccagtattttgttgagaatttttgcattgatgtttataaaaaatatttgtctgaagttttctttttctgttacatctctgccaagttttgatatcaggatgatgatggcctcatagaatgagttagcaagttccttccttccctcaatattctggagtagttctagcaggaatggtgtcagctcttctttgtacaggtggtagaatttagctgtgaatccatctgattttgagccttttctggttggtaggctatttattcctgactttgtgagctcattattggtctgttcagggatttaatttcttcctggttcagtcttggcagggtgtatatatccaggaatttatccatttcttctcaatttttcatttatgtgc

SEQ ID NO: 406157 - DNA, 517 bp, Homo sapiens
tatttccagtactcttctagtggagctttagggttttctatgtaacattcatgaagagagatagattaagttcttcttttgctatttggatgtctgctatttctttctttgcctgactgctctggctagcacttccagtactatgctgactaggagtggtgagaatggcacccttgttttcttctagttctcaaggttccaagttttgcctgttcagtctaatattggctgtgggtttgttatagatggctcttattattttaaggtatgttctcttgatgcctggtttcttgagggtttttatatagaaaggatgttggattttatcaaatcattttctacatctaatgtgataatcttatrttttttgttaatcctatttatgtcgtgaatcacacttaatgatttgcttatgttacgacagccttccagtccaggaatgaaggctactttactgtggtgaattaactctttggtatgctcttgaattccatttactagtgttttgttgatgatt

SEQ ID NO: 406158 - DNA, 590 bp, Homo sapiens
atataaaaagctgtaaatatttatagctgatttctcaattgtgcacatatggagaaatctaggaggtctctgcaaaaaatagaagccaaggaaaattcgagaaccggctttgactttgaagaagtttcttaagccacacaccttggtttgctaaagttagaagcattatagacttaaggtacgtaaacacaacatccacctgcgtcattggctgaccaccaaactctgaagccatactatgaattctcctgcatctcccaagaaaagtaaaaaagaaaaaaactgatcagatataatcacaactgcacaccctaacacaatctcatgttagtatacctgttcatcaaatctttgccctcaagtcaccataatgtctgagacagataaaactgaataactatgagaagaaaatgagaccaaaagttaaaatttcgatattaattgctatgaattgaattaattgattttaattaacsgttctacaaaacccttcaggcaggcaggagagtctacctgagttggttgttgaaatatttattggatttaaaaatgcagagttgatgtggaataaacatttttggaagaggaat

SEQ ID NO: 406159 - DNA, 634 bp, Homo sapiens
ttattaaccttacctgttaacaaatacggatttcagtttgtaaaggtaggaattaatattcatggagataatagaaatttatcaagtggaagagaaatattatttaaaaattaaagatacttaagattacatagttgatatattaagagacgtaaatgtgaaatatctctgagctgtttattcaaagctactcagtgatattggaaatgaatatgagtaggtaagaaaagatttgggaggtgtatgttactactattcttaaaaatctaacatttgtaatttccattcagtaactacagatgtttccatatttttatttaacccaatgtttattttgggtttcgaagcattatatgaaagtttaagtaatttctaaatacatatttgagaaatgtgaatttggaatgtacatatctttaaaatcataaaaagtgataatttagtttcagatatcaaataatttaaagttttctaaatttkacatcagagtaaagtctcagggaaaaaatatattagtagttttgaaatacctaagtaatagtcatcctacattatcagcatcatgccctctcctctccaaaatctgctccatcttacttaatactgccaccaaaaattttggagttagctgagg

SEQ ID NO: 406160 - DNA, 511 bp, Homo sapiens
gtaatcactacaatgtttttcacccacaattttcaaaagactattaaattatcacagcccaaattcaacwtattagatccctcttgccctctccatagcactgccctagacctgaatattaaccacctctccactaggctacaggctgattttaggagtatttctactttctagtaccatccactgccaagtaatcatataccagaatcttctctttaagggacaaatgtatgcatattatttgtctccttaaatccatttgataagccactgtcagctacagaataaaactggcatttctttgcaaggcataaaatactcccatagcctctagaatctgcctgtcttctagtttcattttccacaatactcatcttcctcttgctatattctccagccacgccaaataaccccttttttcaccatctgatctcacaccttcataaccttaaacaggaaaccatcacttcctgaaattatttttagtcttatatttggctggtaaactata

SEQ ID NO: 406161 - DNA, 552 bp, Homo sapiens
aaaacatttgaagtgcactttagtagtcacaactagaaaaaccatagttttttatctactattcacataaaaaatatgctaggtgatgcaaagtcggagaaggtataatacaaatgctgatcatttattctcaggaggaacttgaactctagttgagtggttcctgatcttttttcccctcctctctgatacctatcttcagatgagtcacatttaataagcagacttacagtttgattctctaagtcatttttcctcaaattacttaatccatatagttttaataaacatgaaaatattgcttccaaattgttgatatgctttgcctttcaatctgctctataatgttatagaaaataactgctccattatagtttttccagacttatttgtcattttyaccaaaatctttccatcaaactaaaaaatgtaaatattgttctatctgcagaaaaaaatccaatgcttgttttatcataaagaggacaattgataattcttgccaattttatattgaacatattaagaattaatatagtagagttgactata

SEQ ID NO: 406162 - DNA, 578 bp, Homo sapiens
taaatatgaagcatttctgtaattatctctactgtacagatggaaaatttgaaactcagagaacttgagaaacaggccaatgttcgcttatcccactgctggcagaattaatctctacctgatcccagatccaagcaagagtatcagagtctctctctctctctctctctctstgtgtgtgcgtgtgtgtgtgtgtgtgtgtgtgtgtgtgtgtgtgtgtgtatgactatgattcagttctatctgaggtcagaagcacccacaattaaaattgaagtgttaaatcgtgagctatcatcttaagccatagagttgagggctaaaacttgagccataattacattcccactagcaaaatgccaaaggtggatattacacttcgatcagatggtggccatgtgaaagacagaactagcctggggtcaatcaaagcttccctgggtaagcaacatgtaagctaaaagctggagttaaggaggagagagatgaaaatttagggtaaaaaggaaagcatctgtaaaatttgtgttgttatagaaatcatgggggacatgaagaaatggagaaagatcactggt

SEQ ID NO: 406163 - DNA, 579 bp, Homo sapiens
catttctcattacttagagaaaaaaataaacttataaaaaagaagattcctagcatactattagaaataaatcaacaaactcaattaagttctcaagacatacaaagtataatcaatctaccagtaatgatataacactatttcatgacggtaatttatttctcataataataaaaatcccagtgaacatatatatgctgcatggtcaagttggttagggagatatttttaaaatatgaaaattaaaaattcatataaatgaagataaaatggcatttcaaattctcagacccttaacactatttctgcagaacaactgattggacactgatgacyctgagattctacctctcttgataagtgtcctgtaatttagtaacacaagacctccctgaaatttacacagctatgatatgttttattttttccatagtattattacctactcaaaaaatagtacttcacagaaagacatacgttttaatttacatattgtaaaattagcatgcaatgtatatacacatgtatcaagtattcaaacaattttataatactccgtacagtatatgatatgataat

SEQ ID NO: 406164 - DNA, 564 bp, Homo sapiens
ttttcaaaagaagacatttatgcagccaacagacacatggaaaaatgctcatcatcactggccttcacactttttaaatttagctaaagtgattctccatagaagccacaagaattcattcatttagtccactgagcatgcaccamttttagtcattaatgaatgcataaaaggcagttacatttgaatgaaatattaatctggaaattatccacagctaaaacaaaaactaatttctagttacataagggaagaaatttagaaagaaaaagaaaattattttacatcaaggaaacatgtgaagagaaccatgatctgtaaatttattctaagcttcactgtgccacaccattatcttgtctttactgaaaggcagacattcagtttacagtaggacatggactggctgcgaagttaggactttcattttcacttagtgagctattttgggagagatcagacaatcagtgctctgattttataaaccagaaataaatccattccaaaagagccaccaaagccaaagttattctttgctatccttcaattagtaaaggttttggg

SEQ ID NO: 406165 - DNA, 561 bp, Homo sapiens
atggtttgcccagtgtccccacgctaaatttcatcttgaattgtagctcccataatccccacgtgtcatgggagggaccargtggagataattgaatcatgaggtggtgtccccatcctgttctcgtgatagtgagttagttctcacgagagctgatggttttatcaagggcttcccccttctctgggcacttagtctctctcctatcaccatgtggaacttgttcatacagattgaccttgattttatcatgactgtgatggccacataatcacatttctctcaaagctcaaataatttaaagttccaacagctttaagtttaaactatttaattttacattttcttattgttgagttttgagagcttttcgtgtattttgaatacaagtttcttatgagatgtttgttttgcaaatattttgtccagtctgtcttgtcttttcatccttgaatacagtttttaattaaaatattattagatgcttcatatatcacaataaaaaatggctttagtttgtgttaaaatgcaggtatacagaggtagatctagctgcaatcc

SEQ ID NO: 406166 - DNA, 394 bp, Homo sapiens
ttgcaaacactatttatacaggggactctgggactggtgtcaggtcttactgacatttttgcattatggctttctatccaaaaggaagtaaaagttttgagggctattgaacagtaaatgttcctcatgtaccayattacaaaacacagacctaagttaaagaatttgatgtcaacttgctgtgaaaatgcagtgttcaattgcccaaaaaacttcaacttctacacctgtaggaagacatttctagtgcttgaacaatgaactgcgcaaaacaggcagtaacagatactggtgaaatatgtttaaggatatatttgacactgcttttgagctatgcacgtttatctctttgttccaattgtctggactactttgattttatgttatcttcaga

SEQ ID NO: 406167 - DNA, 567 bp, Homo sapiens
tgttctgttcttgatcatatcattaatgctgacttgcatccatatccaccttccagaccagaagaaggtgaagaaggaaattcatgatccagagcttgctcatataattcttgcatataccattggcccaaattgagtacatggacacatctacactaaaaaaagactaagaaatayatcttgctaagttatcatcttgtaactaaaacttagaggttctattattaaagggaaaaaaagaatatgaatgcaagagaacaattagtacttaaagccaaaaatggtagttgtgaagaaaaatgagaatattgaattaaaaattgctatttgctatgcaaatgctctgtttttttcttaaagtatgatatttctcatagttgaaatactcttttcctgatctattttcactgtgcgatgttcctgctaaggaaactacagtggttttgttttaatatttcctaattcgacaaatataaggccttctgagtagcattctagttccccaataactacttctccacttgtctatcctcatctatgaaacaattttactaagctctaaggaac

SEQ ID NO: 406168 - DNA, 560 bp, Homo sapiens
tatataatttgccaattctcacataatcactttttactatgctaatatgcatgtacattgaataatttaaaaacatttcaaatttgcatcctatctgccaacttgactataagctcctcaaggacaggaataaagtgcttctttagaacacaccattaatatacaaaacaatgcaaatattccttgttaaaaaacygtccctcccatgaaagttacattaaatttgtgcagaatatcacagtgtttggatatgagagtaagtactcttcctagatctgccatttaacttatagtgtgagatcttgaacgaataacctgatattttgtgctgcaattgctgttactctaatgataaagtctaaagctctgccagcagagaagttccttaaggctaagtttggtggcagtagcatacaggttattcagttttaacatttagaatgcttaacggtatcctgtttctgtgtaaaagtttatattatttataagtatttaacatgcattttgtcattatattagaaagcattggcatgagtatcaactaactcctagtgatagtg

SEQ ID NO: 406169 - DNA, 389 bp, Homo sapiens
tcttttcaaaataactagaaatagatttaaatattttgaatgtatttctgggcacttaggaatatatggacaatttgcaaagaccaccatgtataccctttctctaccacatatgcccagtggaaacaacaacaaaaacaaaaaacaacaataatttaaaaaaatacccatgatctaaaaacctgatcttaaaagtcacagttgggaccaagtgagagagccaggatgaattgtttcattgagaacaaataccaataacaattctttggcagacattgtaagcattggacctacaacaaagaacagttataatttatgaaamattcattacatgatgattttagagggatctgcagtagtccaaagtcgatagtgtcccccaaatcagt

SEQ ID NO: 406170 - DNA, 581 bp, Homo sapiens
atgttaaaattcaaatggaaccaaaaaagagcccaaatagccaaggtaatcctaagccaaaaggwcaaggctggaggcatttcactactgaacttcaagctatactacagatctacagtaaccaaatcaacatagcactggtacaagaacaaacacatagaccaatggaacagattagagaacccagaaataagaccacacacctacaactatctgatcttcaacaaacttgaatagttaacaatataaattgacattatatgatgacagaatcaaaactcttacacatagtcctatcaaagagaataataatgaaataaacttatataaaaataaataaaatatcttttaaaaggcccatgaactaaataaatcaaaacaataaacaaagaaaacacagggtaatctataacaaatgcaagaatatttttgaaacctaattaattaaaaagtatcttattcaatcatttttcttccagattttattgtaaagatctgtttgactatttataagtgtagctgtaaaaaataatttgaagatgttcatgtcagcattacttgtaaaaagaaaccctccccac

SEQ ID NO: 406171 - DNA, 581 bp, Homo sapiens
atgttaaaattcaaatggaaccaaaaaagagcccaaatagccaaggtaatcctaagccaaaaggacaaggctggaggcatttcactactgaacttcaagctatactacagatctacagtaaccaaatcaacatagcactggtacaagaacaaacacatagaccaatggaacagattagagaacccagaaataagaccacacacctacaactatctgatcttcaacaaacttgaatagttaacaatataaattgacattatatgatgacagaatcaaaactcttacacatagtcctatcaaagagaataataatgaaataaacttatataaaaataaataaaatatcttttaaaaggcccatgaactaaataaatcaaaacaataaacaaagaaaacacagggtaatctataacaaatgcaagaatatttttgaaacctaattaattaaaaagtatcttattcaatcatttttcttccagattttattgtaaagatctgtttgactatttataartgtagctgtaaaaaataatttgaagatgttcatgtcagcattacttgtaaaaagaaaccctccccac

SEQ ID NO: 406172 - DNA, 498 bp, Homo sapiens
ccaatggaacagattagagaacccagaaataagaccacacacctacaactatctgatcttcaacaaacttgaatagttaacaatataaattgacattatatgatgacagaatcaaaactcttacacatagtcctatcaaagagaataataatgaaataaacttatataaaaataaataaaatatcttttaaaaggcccatgaactaaataaatcaaaacaataaacaaagaaaacacagggtaatctataacaaatgcaagaatatttttgaaacctaattaattaaaaagtatcttattcaatcatttttcttccagattttattgtaaagatctgtttgactatttataagtgtagctgtaaaaaataatttgaaratgttcatgtcagcattacttgtaaaaagaaaccctccccacaaaaccaacacaaaatacccaggaaaacaaaacatgggaaaaatataaaatttctaacagaggaatattaaactaatt

SEQ ID NO: 406173 - DNA, 574 bp, Homo sapiens
aaaaaatatggaagaaaattgcatattgatcattacctgaatttttgttgtggggaacttttgttgggcacagtttgagaagcttaatacatatgaaaaaaggaaaatacttaaatggaacaaaatgtgagtcctmttattaatagactgtttctatctttacctcactggctgtgaaagctgggacaatgcttttctttatttttttctttctttttctttcttgacaatgcttttttttctttctttctttttttcttttcttttctttcgtgaccataaacatgaatttgattagaccttggtagacttacttgtagaatccagggtgtgggaacacattccaactaaaattacatccttaataaagttggtgataagtattcctagataaggtctaaagagaaagaaaacccattagactatattgagtatttagtagatattagttacatcgtggccctccaataatgattgttcttaccattttcctttaaaaaaaatcacatttgtaccattatctgttgtgtattttaggtggggttccacatcccttttgaaaagaaaggtttta

SEQ ID NO: 406174 - DNA, 578 bp, Homo sapiens
gtgtgacatttaactaaaaactaaaaggtgggatgatataaattagtagagaaagaaagagttagatgttgtaggtagaggaaacagcatatgagaagcttttatgtaagaagtgcagcacattgtacaggacagaaattaagtatatagttagatttcataggaacttgtgggtcmtattaaggatttttattaattgagaggagcaatgagaaatctttgaagaatactaaggaagaaagcagtatatttaaacatgtgttttaagaagatgtttaaaaaaagagtgaggaaaaacttaggagaaggcatgctagacatataggaaaaagataacttaaacacaggtgtggagatgttaaagatactttcctgtcagtttcagccctttttgggtctctcacgtttctagaggagtggccaagacttctgtaaagtttcttttccattaactgtttaaggtttgttatgattctcaaacagctgtatggatggaagaaaatttcaaagtcacaaattagtgccaactgattgaggtgattgaatttcttcttagttctcctgatagttataaaaat

SEQ ID NO: 406175 - DNA, 578 bp, Homo sapiens
gtgtgacatttaactaaaaactaaaaggtgggatgatataaattagtagagaaagaaagagttagatgttgtaggtagaggaaacagcatatgagaagcttttatgtaagaagtgcagcacattgtacaggacagaaattaagtatatagttagatttcataggaacttgtgggtcatattaaggatttttattaattgagaggagcaatgagaaatctttgaagaatactaaggaagaaagcagtatatttaaacatgtgttttaagaagatgtttaaaaaaagagtgaggaaaaacttaggagaaggcatgctagacatataggaaaaagataacttaaacacaggtgtggagatgttaaagatactttcctgtcagtttcagccctttttgggtctctcacstttctagaggagtggccaagacttctgtaaagtttcttttccattaactgtttaaggtttgttatgattctcaaacagctgtatggatggaagaaaatttcaaagtcacaaattagtgccaactgattgaggtgattgaatttcttcttagttctcctgatagttataaaaat

SEQ ID NO: 406176 - DNA, 578 bp, Homo sapiens
gtgtgacatttaactaaaaactaaaaggtgggatgatataaattagtagagaaagaaagagttagatgttgtaggtagaggaaacagcatatgagaagcttttatgtaagaagtgcagcacattgtacaggacagaaattaagtatatagttagatttcataggaacttgtgggtcatattaaggatttttattaattgagaggagcaatgagaaatctttgaagaatactaaggaagaaagcagtatatttaaacatgtgttttaagaagatgtttaaaaaaagagtgaggaaaaacttaggagaaggcatgctagacatataggaaaaagataacttaaacacaggtgtggagatgttaaagatactttcctgtcagtttcagccctttttgggtctctcacgtttctagaggagtggccaagmcttctgtaaagtttcttttccattaactgtttaaggtttgttatgattctcaaacagctgtatggatggaagaaaatttcaaagtcacaaattagtgccaactgattgaggtgattgaatttcttcttagttctcctgatagttataaaaat

SEQ ID NO: 406177 - DNA, 555 bp, Homo sapiens
cattggcaattacaattttacatgagatttggtggggacgtggatccaaactataccaacatctttcttttttcccagtgggaccaatccagatttcagacccccagaagtgtaagacaatgaattcatgttgttttcaaccacgaagtctgttgcaattttttacagcagcaacagaaaactgaygtaatttttaagcttacttttccactcttaagggtgatgctgttaattagtatatacatgtcatttgaatttcataaaccaaaatttttttgcaatttcatgtgtctacagaaatatctcaatgtaagccatgagcaaaacttgattcttctaagaattgagagaggaaaaaaatatctatcttgatatcaggctaactagttttatttttataattgaaatggcgggaaacactcaaatcttcctgagaattctcttgattggataaatcacaggttggttaatttgtcaggctacctttccagagaatcaaggatcttattactatgaatctgttcagcaagaaccattgccagtaatcaaatacca

SEQ ID NO: 406178 - DNA, 601 bp, Homo sapiens
  misc_feature (1)...(601): n = A,T,C or G
nnnnnnnnnnnnnnnnnnnnnnnnnnttactacttttctgtttccctaattcaaataaacctagcaataaacattcttaagctagatgatcgatagagacgttgcgtgataaataatacagaggcttatataaattatggcctaaggaaaatactcttagaaattaatcagttgtactaagaggtaccatatagcccattccagtatgctgtgaaatttactattgaatgcacgttataaatttgtcactgaacaaggagaaatatggaatcaagtccgtggaactatgggctccagtattcaatgtaaaatgaaaattttcaaaaacttttacaacggtctaaacaaagtaatagaaattctatatactcatatgaagtatgtatgttcctacaaataaataaaattctgaaagaacatttacaacccaggaaggagatcatagtaccaaaagttttgtagggcaaaattccaatatttcaatataatgttttaaaawtttttttaattagtttttgcctgatgatgactatcaaagctttctcaaagtattatgttaataacaataatgttaacaatcagtgttagtgatcttgtttct

SEQ ID NO: 406179 - DNA, 622 bp, Homo sapiens
gttgtcattttgtaggctaactagttgtgaccctataaatctgagccaaagggcctgtgcaattggaacgaattgaaaaagtctgatggggttaaatgaaaaagaggcagacaatacctggcagtatgtctcaaaccgtaagtcgcacagaaataacctgagaatctcgttaaaaggcagatcctgtttcataggctgaagtggaatatgagacttagtatttccaacaagtccatggttgatactgatgctattagcccatgaaccaagtttcagctattgaagtgagcattttatcaccaagtttgggtgaacctcaaacagaaacctttctagagttaatttactgagcatcacaattccttggatgatcagaactgtctgacatatttaaatttagtgcaagtcaaatactcatgtttgaccaagatggcctgaaagtttccttcagcttgactaaattttacacaggtatcttcttaaagctgggcctctgacctcctgtttgttagagcatttrctttggaaaacttgtcattgtaaatcctttctcccaccctctgaaatgcatgcaaatattttcccagcctcctgtcagttttacaacccaggaaatgtctct

SEQ ID NO: 406180 - DNA, 540 bp, Homo sapiens
taatgtcagtcatcagactttgaggaactaaagaaactgagccaagtcttgctttgaatgaatgattttatatagactcaccgagaccaacagtctccmgaaattacttcaaaggcaagaagtgatataaagctaataatcctatagtaaatttagacaaatataaattatttgttcatgaatgagaaaattctaggtgttttcaaaagctgactaaaatatctgaaagaattatttaaaagagaatttttggaacaaggtataattgtgccaaggggttctgagtatgattacaacaaacagaaacaaacactcaattaatatatttacctaagcagctaatttcctcctagaaggaaaatggcacttaattaatttggctgaacaagacttctaactgtgaattctcagctatgctgctaatggggtcactaaaagatcagctagaaaagcagaaattattaaagggaagaattggaaaaaaaaacttatgtatgccaaggattttctaattagtaacaattacttgataaagttatt

SEQ ID NO: 406181 - DNA, 540 bp, Homo sapiens
taatgtcagtcatcagactttgaggaactaaagaaactgagccaagtcttgctttgaatgaatgattttatatagactcaccgagaccaacagtctccaraaattacttcaaaggcaagaagtgatataaagctaataatcctatagtaaatttagacaaatataaattatttgttcatgaatgagaaaattctaggtgttttcaaaagctgactaaaatatctgaaagaattatttaaaagagaatttttggaacaaggtataattgtgccaaggggttctgagtatgattacaacaaacagaaacaaacactcaattaatatatttacctaagcagctaatttcctcctagaaggaaaatggcacttaattaatttggctgaacaagacttctaactgtgaattctcagctatgctgctaatggggtcactaaaagatcagctagaaaagcagaaattattaaagggaagaattggaaaaaaaaacttatgtatgccaaggattttctaattagtaacaattacttgataaagttatt

SEQ ID NO: 406182 - DNA, 540 bp, Homo sapiens
taatgtcagtcatcagactttgaggaactaaagaaactgagccaagtcttgctttgaatgaatgattttatatagactcaccgagaccaacagtctccagaaattacttcaaaggcaagaagtgatataaagctaataatcctatagtaaatttagacaaatataaattatttgttcatgaatgagaaaattctaggtgttttcaaaagctgactaaaatatctgaaagaattatttaaaagagaatttttggaacaaggtataattgtgccaaggggttctgagtatgattacaacaaacagaaacaaacactcaattaatatatttacctaagcagctaatttcctcctagaaggaaaatggcacttaattaatttggctgaacaagacttctaactgtgaattctcagctatgctgctaatggggtcactaaaagatcagctagaaaagcagaaattattaaakggaagaattggaaaaaaaaacttatgtatgccaaggattttctaattagtaacaattacttgataaagttatt

SEQ ID NO: 406183 - DNA, 584 bp, Homo sapiens
tgaacagtacagtatggttcttttgtttacatggagctcaaaaagggcctagaggggcaaagggttgggagtggcgggagacggagaagacattaattatattaattacagactttgcagatgaaggaagtattgagcagtaaaaagagaaaagtcttttcagaaatgtagaaaactatgtcagtgaaatgcaaggggtgktgtaagacaagatccgactgatatccagggacttgttatacagatctagcctaagatgaagattaaagatattctttattatccaaaagacaatgggaagcttctctttatattttaaataatgagacataatcatatttgtattttagatatcattgaatctactgcatacagaatggattgaaaaccaagaagagtagattaaaaaaacactagttaagaggtaatttaatttgccaaaaagagatgtattattgcaacttctgcctcctccatggttgtattttatgatgtacctttgtgagttatttttatttataaacttttgttgcaatatattttaggaatatttctttcaaatgatagttatttttcatgtttta

SEQ ID NO: 406184 - DNA, 584 bp, Homo sapiens
tgaacagtacagtatggttcttttgtttacatggagctcaaaaagggcctagaggggcaaagggttgggagtggcgggagacggagaagacattaattatattaattacagactttgcagatgaaggaagtattgagcagtaaaaagagaaaagtcttttcagaaatgtagaaaactatgtcagtgaaatgcaaggggtggtgtaagacaagatccgactgatatccagggacttgttatacagatctagcctaagatgaagattaaagatattctttattatccaaaagacaatgggaagcttctctttatattttaaataatgagacataatcatatttgtattttagatatcattgaatctactgcatacagaatggattgaaaaccaagaagagtagattaaaaaaacactagttaagagrtaatttaatttgccaaaaagagatgtattattgcaacttctgcctcctccatggttgtattttatgatgtacctttgtgagttatttttatttataaacttttgttgcaatatattttaggaatatttctttcaaatgatagttatttttcatgtttta

SEQ ID NO: 406185 - DNA, 606 bp, Homo sapiens
tccttccactggataagcttagatttcagtcaaataaacataagtgtggttttcaagggaaccgtcagacagatgaaatgctgacaattttctgggaatgtgacatttaaggagctgcaatcacattctgtcccctctggtggcttctgaggttttggttttcagggctaccatggagctgggaaaaaatgcaaattaaaatactacagacctcactcttgttaataatattaagctatttttcataaataaatacttgctggattgctgcacgagtttgacaggtttccagagttctaaaaaaggttattctggttattttctcacttttctcattgcttttatgtaggtgaagaattttgaaattatktattccactttttgctgatgtcaccttttcttgttatatagattacatttgatcttatttttgatgtgtaaatttgtgtgaacgtgtatatgcatatataatatttctgttcttatttctacttatattactgtattagtttctcattgctgcagtacaaatttccacaaacttatttgatgtaaaaacaaatctattctcttacaggtctggatatcagacttctaacagcattt

SEQ ID NO: 406186 - DNA, 211 bp, Homo sapiens
tatggaaaacactgcgctttaaagacaggagaaggaatggacgaagatgccctttcctgaagtggasagaaaaggagaacatggagcagaaataaaaccacagggcaaaaagatattcagatttttattgtgctatttgttgtagtccttcatagttccattacacagtctcagacctcattgccacacagaattatgttgggaacatgtg

SEQ ID NO: 406187 - DNA, 575 bp, Homo sapiens
aactggcaacgttctggcaagacaacagctccttcctgggaaatgccttcagctccaacctccagtccgaaagtgtttcaggcaaaaaaataaaaactccggggccgtgcacaggctgtgccagcagacttatgccgccaggtcccttggccagcacaacataggacctggcatctggatggtcctccccaggctcagggatcacagctgaggcagagaccctggcagccacccaagggtctgcccgtgtgcctggcaggctcagatgtcctggcactgagacccagacctaaggaacsagcagagtgaagccacgcggcactaaaagcttcagtgatttctcaaagctcattttaaccaggtttagcaaaagcaacagtttaatcccacagaaataattaaagttcgagggcaggaaaaggaaacaaggctgcttttccccgcattgatgggataatctgcatgtgaaagaccaccgttttgcctaccagaggttttttcctcccccccaccttattaattagttattttatttatttacgtgaagcaccgggaagaaaaaacagaaactcatg

SEQ ID NO: 406188 - DNA, 575 bp, Homo sapiens
aactggcaacgttctggcaagacaacagctccttcctgggaaatgccttcagctccaacctccagtccgaaagtgtttcaggcaaaaaaataaaaactccggggccgtgcacaggctgtgccagcagacttatgccgccaggtcccttggccagcacaacataggacctggcatctggatggtcctccccaggctcagggatcacagctgaggcagagaccctggcagccacccaagggtctgcccgtgtgcctggcaggctcagatgtcctggcactgagacccagacctaaggaacgagcagagtgaagccacgcggcactaaaagcttcagtgatttctcaaagctcattttaaccaggtttagcaaaagcaacagtttaatcccacagaaataattaaagttygagggcaggaaaaggaaacaaggctgcttttccccgcattgatgggataatctgcatgtgaaagaccaccgttttgcctaccagaggttttttcctcccccccaccttattaattagttattttatttatttacgtgaagcaccgggaagaaaaaacagaaactcatg

SEQ ID NO: 406189 - DNA, 570 bp, Homo sapiens
taattgctccaagattatgcagggtggggtttttttcccccttcttttaggttgagcttgttaatttctacagctgtgatgttggcacagttgcagccccgagtcctgttttcacaacttgtaagcaaaattaaaacttccctttttaattaaaattcaaaccaagccagaattaaaatcctatcacaaagcagaggcctgggaaggctccagaaggaacacctgttccaaaggcatgatggacagcctctgagatacgcaccgctgggrgtactgggggtgctagggtgctgggagcaccctctgtggaggggttcttgccgtcagcgacgcctgggccatttcaacatcttcctgcaaggggagtcagctcttgggtggacaaatccggttcaaattctctatttcttatacctgttagtgagaatttaattgcccaagtatgctcttttccccaataataataattatagcaataacagcagcagtattggtaataaggccaaactcttgttcagaagtattaaataaggtacagttcacactacagttcttcacatttggtgacag

SEQ ID NO: 406190 - DNA, 570 bp, Homo sapiens
taattgctccaagattatgcagggtggggtttttttcccccttcttttaggttgagcttgttaatttctacagctgtgatgttggcacagttgcagccccgagtcctgttttcacaacttgtaagcaaaattaaaacttccctttttaattaaaattcaaaccaagccagaattaaaatcctatcacaaagcagaggcctgggaaggctccagaaggaacacctgttccaaaggcatgatggacagcctctgagatacgcaccgctgggagtactgggrgtgctagggtgctgggagcaccctctgtggaggggttcttgccgtcagcgacgcctgggccatttcaacatcttcctgcaaggggagtcagctcttgggtggacaaatccggttcaaattctctatttcttatacctgttagtgagaatttaattgcccaagtatgctcttttccccaataataataattatagcaataacagcagcagtattggtaataaggccaaactcttgttcagaagtattaaataaggtacagttcacactacagttcttcacatttggtgacag

SEQ ID NO: 406191 - DNA, 557 bp, Homo sapiens
cacctggggtcctgggcccagatgtatttgtcagctgagttgacagaagactagatagacggagaagctgagagagtttaagagacacatgcgggtatacacaatcagtaagtgcgcaaccacatcatgaatactcatctgaagatttcaaatactatcctattatcttcactatctgagcaggtagagttacctttccggcatggttcaaccctatgtcattcttctaaagatttgttctatagagtaaattctagttcagatttgtgttttaaaagagtatcactgaatatgatgtgttgggacatttatgtgataatgtatccttatggagctgggggcccatcttagtagaaagggcacaactgtttatatgtatgaagtgtaaagtgaagactaatataatagttagttgtcatttatttctatccatctgggaatctctcgaggttgttttatcttggaattctctgtggctgtacatagacaggtctgctgaaagctctgtgtgtgtggtgtgtgtgtgggtgtgkgtgtgtgtgtgtgtgtgtgtgtgt

SEQ ID NO: 406192 - DNA, 620 bp, Homo sapiens
ttaagccataatttaaatgctcaaatcctaggcggctccagaatttcctccmacacctgaattcatggtggaggggtgagaccctgacaagccttgacagtcttttaggcattcatttatttttcgccagaccagtttggttttgacttaaatcttgggtcttaagtttttctctttttctgtaaccctattgattgaaaagacaatttttttttcttttggttttccactaattctggtatgataaggtgaggccaattttaaataactattttttacatctgcttatcaaccctaaaacctaattctatacccatcttcatctttttttttttttcaagatggagtcttgctctgtcacctaggctagagtgcaatgactcaatgtcggctcactgcaacctccacttcctgggttcaagcaattctcccgcctcagcctcccaactgactgggactacaggtgcacaccaccatgcctgactaattttttttttgtatttttagtagagatggagtttcaccatattggccaggctggtctcgaactgctgacctcaagtgatccgcctgccttggcgtcccaaagtgctaggattacaggtgtgagccaccgcacc

SEQ ID NO: 406193 - DNA, 617 bp, Homo sapiens
cttccactttaaacaaccctgtggttgcattggtcccatgggataactggccctattttaacatcatctgattagcaatcttaattccatctgcaaccttaattcccctttgtcatataacatcacataatcacaaactcctagacatcatggggacaggggtaggggaacatagtattctgcccaccatactactcataggaatgttgtgatgattaggtgagaagactcctgtaatggcttagaacagtgccagtcacataagcaaatgttcagtaattgttctttgtgaccccattatgtcttatcatttaatgagtttgttttatacaggaacaggctattgggagttctgtcttgaggaagcatctgatgctactttgctyactgctagaagtgatgatagaaggacagagatcttagtgagagccaactccttcttgctttctaaagccaaagctcaaggtctgagctctctttggaattaggtgattctccacagaaaacgtgtggtttgggcaaagccaattttatgagtaacaagaatgaaataaactggggaagatccaagcagataacattatcctcacataaaagtggccaatagaaagaagtta

SEQ ID NO: 406194 - DNA, 592 bp, Homo sapiens
ctttttttttttttttttatcttgttacaccaccagtacaatgttgaaagaataaggattagcacatattcttacctctttcatgatctcaggatgaatgcttttactagttttaccattaagtcttatgctgcttttgattttcatacatattctttttaaggttaaagaagtgctcttctgttcctagtgtggtaaaaatggatgtgaatggatgttgaattttgtcgagtgcttgtgcacctattaaaattatataattttttcttcttttttaatgtcatggattacattgtttgattttcaaatgataaaataactttacattcgtggtataaattcaactttgtcataatatattaaacttttayatttcactgcgtttgactttgtgcaattttaagatctttgtgtctgtgtcaagacagatactggtctgaaaatttcctttttgtaatgctgttttcagctttttttattagggtatgctggcctcaaaatgagttgggcagagtttcttctttttatactctctggaaggatttgtgtaagattgttacttcttccttaattgtatggaagaattcaatgg

SEQ ID NO: 406195 - DNA, 600 bp, Homo sapiens
gttcccttgctggttaggagttgtgatcctttggaggagaagaggccttctggtttttggaattttcagcctttttgtgctggtttctccccatctttgtggagttatctacctttggtcttttatgttggtgaccttcggatggggtctttgaggggatgtgctattcctttctgtttgttagttttccttctgacagtcaggccgctcagctgccgccctgctggagtttgctggaggtccactcccgaccctgtttgcctgggtatcactagcagaggctgcagaacagcaaagattgctgcctggtctttcctctggaggcttcgtcccagaggggcacctgccagatgccagccagagctctcctgtatgaggtgtctgtcagcccctactgagaggtgtctcccagtcaggatacatgggggtcagggaccgacttgaggaggcagtctgacccttagcagagctcgaacgcygtactgggaggtctgctgctctcttcagagccatcaggcagggacactaaagtctgctgaagctgcacccatagccgcccccttcgccaggtgctctgtcccagagagatgggagttttat

SEQ ID NO: 406196 - DNA, 600 bp, Homo sapiens
gttcccttgctggttaggagttgtgatcctttggaggagaagaggccttctggtttttggaattttcagcctttttgtgctggtttctccccatctttgtggagttatctacctttggtcttttatgttggtgaccttcggatggggtctttgaggggatgtgctattcctttctgtttgttagttttccttctgacagtcaggccgctcagctgccgccctgctggagtttgctggaggtccactcccgaccctgtttgcctgggtatcactagcagaggctgcagaacagcaaagattgctgcctggtctttcctctggaggcttcgtcccagaggggcacctgccagatgccagccagagctctcctgtatgaggtgtctgtcagcccctactgagaggtgtctcccagtcaggatacatgggggtcagggaccgacttgaggaggcagtctgacccttagcagagctcgaacgctgtactgggaggtctgctgctctcttcagagccatcaggcagggacactaaagtctgctgaagctgcacccatagccgccccctycgccaggtgctctgtcccagagagatgggagttttat

SEQ ID NO: 406197 - DNA, 600 bp, Homo sapiens
gttcccttgctggttaggagttgtgatcctttggaggagaagaggccttctggtttttggaattttcagcctttttgtgctggtttctccccatctttgtggagttatctacctttggtcttttatgttggtgaccttcggatggggtctttgaggggatgtgctattcctttctgtttgttagttttccttctgacagtcaggccgctcagctgccgccctgctggagtttgctggaggtccactcccgaccctgtttgcctgggtatcactagcagaggctgcagaacagcaaagattgctgcctggtctttcctctggaggcttcgtcccagaggggcacctgccagatgccagccagagctctcctgtatgaggtgtctgtcagcccctactgagaggtgtctcccagtcaggatacatgggggtcagggaccgacttgaggaggcagtctgacccttagcagagctcgaacgctgtactgggaggtctgctgctctcttcagagccatcaggcagggacactaaagtctgctgaagctgcacccatagccgcccccttcgccaggtrctctgtcccagagagatgggagttttat

SEQ ID NO: 406198 - DNA, 619 bp, Homo sapiens
cctacgaaaatttcttagaaattcccaagcctcagctctctggacacaacccatcaaccagcaaaatggatccccacccagttacctgtatcaactcaccaaaaggcaggatgggctgtagaccagttacaggtttctttcattctgtgggtagatgtgtgtgtctctagcagcctttttggaaagaatgcttgtattctacagatgtctctgccttggcaattctgttcaactcaaaagtggtaatctatcatcctctgctgagaatttacccagcaagtgcctgaagaaaaaaagccatttagtttttgcttccacacatgaaatggctaactctttttaagtgaggcttggggatttaagagttggatatcagatacctggatttcatggaccagcaaaatgtaaaaaaaaaccaccaccaccaccaccamcaacaacaaaaaagccccaaagttgtgtagtaacacaaagctgcaggttttaattttgctttgtcaatatgttaagaaaaccaaaacagaacaactggtatttattatctcatcatctcatagaaaaatgggcatcttaacactaaaatgtgggaaggtcattataggaataaaggataatcctt

SEQ ID NO: 406199 - DNA, 560 bp, Homo sapiens
cagggggcataaatcataaatgcatttagttgtcttcatcgcctttcttgtcatcctgcctctctgaagtgaarttaagaggcagatgtcttatctgggatcaattccagaccccatttgtgttttaaaaaagaaaaccaggaagggtttcacacaaacctcctgactcaggttgatcaaagtcttggtgcctggaaggccaagtcatcacatacataactgagaggcccagggccatgaaggcatgaggggtggacacctcggctcacactgcccctggagtccagaagggctgaagacaacaggaggtgccacactgcctctaaaacaagccaaaccccctctctggctcaaagacaccaacatccacagatcttcccacacagctagagagaggctagtcagttctggctataaattctacaactaagtcattgaaaacatcagccgcagcaaggacagagagggttccttccagaaagctctggagggttcttctgaagcactttcacattctgaggcctcatgtcccatcaaggtctttttgcgggtgttctgac

SEQ ID NO: 406200 - DNA, 698 bp, Homo sapiens
actgtaaccaccgcctcccagattcaagtgattcttctgcctcagcctcccaagtagctggtattacagacatccgccaccatgcccggctaattttgtattgttggtagagatggggtttcaccatgttggccaggctggtctcgaactcctgacctcaggtgatccacccgccttggcctcccaaaatgctgggattacaggagtgagccaccacaccctgcctggacattttttttcaaatacctcttctctaatccctggcttttcttygccaaatgtagcatcgccctctttgcaagtttgtggacagcattcatgtcccagtcttatcccagaatccaggaaagaatgtgtcagtgagtgctgtatctggaggtttgtcctaattgagggactcagccaagcctcgtgcagaaataacctttgagagtttgtgtcaaagtcacaactccacctgagcaaagtgtgaatacagcctagctggattgaaatacatgtcacacctaactgtactctgtgcatgtggttctgtgtgtggggatgcatggggtttagctgtgtttttgagtcacatgtttctaattgtcaaccctttctcagacggtatttctgcttcaggaggttatttgaatcatcttggctaagcagccttcaaataactctctctcaatttctgcatgtcaatttatgtccca

SEQ ID NO: 406201 - DNA, 570 bp, Homo sapiens
ctaactgtactctgtgcatgtggttctgtgtgtggggatgcatggggtttagctgtgtttttgagtcacatgtttctaattgtcaaccctttctcagacggtatttctgcttcaggaggttatttgaatcatcttggctaagcagccttcaaataactctctctcaatttctgcatgtcaatttatgtcccacttccaaagactcagactgtgaatgacttctctccacagatagggtcaccttagccaggtgctcttttgtctttgtctttaagatccttggtgtgccacttattgattcagcagtggaatcatttttcttctaaaatgctgactggaagggccattttgttaatttagtgtgcctgcttttgtgctcaaatgagtagtttccataaaatgagaaacatggaatgatgaggcctggggcccaggactatccagtctctttgctgacttggtctcagaaagsgggtggagtgcagagaagaatcttttcaaacttggataagaattgccatctttaatatgtgataccaccttgaaaattatattcagattttggcagga

SEQ ID NO: 406202 - DNA, 502 bp, Homo sapiens
gctgtttttattctttttattttttattctagttactctgataggtatagtgatatctaactgtggttttaattttcattcccttcatggctaagaacactgagtatcttttcatgtactttcttgccatctgtatatcctcttcagtaaaatgtctattcatggcttttgcccatttttaaattcaattgtgtttattgttgagttttaagaattacttatatattctctatatatttgtggacatgtggacatctgctttgcaaatatcttctctcaatctgtagcttatcttttcatcctgttaacagagtctttcacatagcaaaaggtttggttcttttttttttcattttaatgagatccattttaacaaattttccttttacaaattatatttttgatgtaaagcctaagaacgctttgcctagccctrcatcttgaagattttctccccacatctattttttttttcagaaaatgtcatggttgtatagtttta

SEQ ID NO: 406203 - DNA, 510 bp, Homo sapiens
ccatttttaaattcaattgtgtttattgttgagttttaagaattacttatatattctctatatatttgtggacatgtggacatctgctttgcaaatatcttctctcaatctgtagcttatcttttcatcctgttaacagagtctttcacatagcaaaaggtttggttcttttttttttcattttaatgagatccattttaacaaattttccttttacaaattatatttttgatgtaaagcctaagaacgctttgcctagccctacatcttgaagattttctccccacatctattttttttttcagaaaatgtcatggttgtatagttttaagtctttgatccgttkgagttaaatgttgtttcagttgtgaggtttgagtcaaggttaatttgttgttttttgtttgtttttgtctgtgaatgatcaattgctccagagccatttgttgaaaagatatccttcctccatcgaattgtttctgcacctttgtctaaaatcagttgggtgta

SEQ ID NO: 406204 - DNA, 660 bp, Homo sapiens
tgctgaaattttgttgaggattcttgcatgtaagttcatgagaaatattgttctttttctgcactgtctttggtttgtcagggaaacgctagccttataaaakgagctggggtgatttccttactcttctatttttctggaagagattgtgtaaaattgatattaattcttctttaaatgtttggtagaattctccagtgaaagcattctccagacctgaaaatggtttttttggcagggagagggtgctttttaattatcaactcaattcctttaatagttataggattagtctagctatctatttcatcttggttgaattttggaagtttgcggctttgagaatttgatcaatttttttctaagtcgttaattcatgagtgtaaagttgtttacaatagtattttattatccttttaatgactgcaggttcagtactggcatctcttgtttcattcctgatattgctgatttgtcttctctctttttattttttttaatttttttaacttgtttttttgagacagagtcttgctctgtcgccaggctggagtgcagtggcaccatctcagcttactgcaatctctgcctcccgggttcaagtgattctcctgcctcaacctaccgagtagctgggactataggcacatgccaccacac

SEQ ID NO: 406205 - DNA, 660 bp, Homo sapiens
tgctgaaattttgttgaggattcttgcatgtaagttcatgagaaatattgttctttttctgcactgtctttggtttgtcagggaaacgctagccttataaaatgagctggggtgatttccttactcttctatttttctggaagagattgtgtaaaattgatattaattcttctttaaatgtttggtagaattctccagtgaaagcattctccagacctgaaaatggtttttttggcagggagagggtgcttttwaattatcaactcaattcctttaatagttataggattagtctagctatctatttcatcttggttgaattttggaagtttgcggctttgagaatttgatcaatttttttctaagtcgttaattcatgagtgtaaagttgtttacaatagtattttattatccttttaatgactgcaggttcagtactggcatctcttgtttcattcctgatattgctgatttgtcttctctctttttattttttttaatttttttaacttgtttttttgagacagagtcttgctctgtcgccaggctggagtgcagtggcaccatctcagcttactgcaatctctgcctcccgggttcaagtgattctcctgcctcaacctaccgagtagctgggactataggcacatgccaccacac

SEQ ID NO: 406206 - DNA, 660 bp, Homo sapiens
tgctgaaattttgttgaggattcttgcatgtaagttcatgagaaatattgttctttttctgcactgtctttggtttgtcagggaaacgctagccttataaaatgagctggggtgatttccttactcttctatttttctggaagagattgtgtaaaattgatattaattcttctttaaatgtttggtagaattctccagtgaaagcattctccagacctgaaaatggtttttttggcagggagagggtgctttttaattatcaactcaattcctttaatagttataggattagtctagctatctatttcatcttggttgaattttggaagtttgcggctttgagaatttgatcaatttttttctaagtcgttaattcatgagtgtaaagttgtttacaatagtattttattatccttttaatgactgcaggttcagtactggcrtctcttgtttcattcctgatattgctgatttgtcttctctctttttattttttttaatttttttaacttgtttttttgagacagagtcttgctctgtcgccaggctggagtgcagtggcaccatctcagcttactgcaatctctgcctcccgggttcaagtgattctcctgcctcaacctaccgagtagctgggactataggcacatgccaccacac

SEQ ID NO: 406207 - DNA, 479 bp, Homo sapiens
aggtggaaacttcaattattagagaacttaaatatgtaagtatatagtgctataaatttctcccctaacaytgctatagctttgttccacctcttttatgtaatctttgttttcattcagatttatatttttttaaatttcttttaagacttcctctttgacccaagtatttttttaatagtatactgtttaatttctaagtgtctggggatttttctgctgtctttctgttatgaatttcctgttctattccattttcatcaaaaattatattctacaattttaaagatttaattttaaggtttctactatgacccaggatgttttatcttgcttaatgttccataggtgcttgagaagaacgtgtattctgctgttatttagatagagtgctctataaatgtcatttcaatctcattggctgatggtgttgttcagctcttctatatccttgctgactttttgtacagtagcctatc

SEQ ID NO: 406208 - DNA, 479 bp, Homo sapiens
aggtggaaacttcaattattagagaacttaaatatgtaagtatatagtgctataaatttctcccctaacactgctatagctttgttccacctcttttatgtaatctttgttttcattcagatttatatttttttaaatttcttttaagacttcctctttgacccaagtatttttttaatagtatactgtttaatttctaagtgtctggggayttttctgctgtctttctgttatgaatttcctgttctattccattttcatcaaaaattatattctacaattttaaagatttaattttaaggtttctactatgacccaggatgttttatcttgcttaatgttccataggtgcttgagaagaacgtgtattctgctgttatttagatagagtgctctataaatgtcatttcaatctcattggctgatggtgttgttcagctcttctatatccttgctgactttttgtacagtagcctatc

SEQ ID NO: 406209 - DNA, 479 bp, Homo sapiens
aggtggaaacttcaattattagagaacttaaatatgtaagtatatagtgctataaatttctcccctaacactgctatagctttgttccacctcttttatgtaatctttgttttcattcagatttatatttttttaaatttcttttaagacttcctctttgacccaagtatttttttaatagtatactgtttaatttctaagtgtctggggatttttctgctgtctttctgttatgaatttcctgttctattccattttcatcaaaaattatattctacaattttaaagatttaattttaaggtttctactatgacccaggatgttttatcttgcttaatgttccataggtgcttgagaagaacgtgtattctgctgttatttagatagagtgctctataaatgtcatttcaatctcattggytgatggtgttgttcagctcttctatatccttgctgactttttgtacagtagcctatc

SEQ ID NO: 406210 - DNA, 548 bp, Homo sapiens
agttttacagttttccttccattgagaatgcctttatttctccttcattcctgatggatattttcactggatatagaatcctgggttggcagttcttttctttcagtatttgaaaaatgctatgctacttacttctggtcttcatgatttcatrtgagaaatctatgtaattcaaattgctgttccatataagcaatgtgtcctttctctctggctgtttctagatttttttcttgtctaattatatttatgatgtgtcttggcatggatttacataggtttattctatttggagtttgcataaccttttgaatatgtatgcttacaccttttacccagtttgggggagtttccagacaatacatctttaaatacctcttcagtcccattctctctctcctctcctatgactttgatgtaattaatgttatatttttttgttattgtccctcaagtccctgagactgttcattttggtccagtctattttctcgctgttgttcaaattgggtaattgctattgatctgtcctgaaattcactgatttt

SEQ ID NO: 406211 - DNA, 516 bp, Homo sapiens
atctgaaactttttgagaaccgatataatgctcaacagtcatacccaaaggaaatgctcattggagcattgcggatttcagattttcagattagggatgctcaacccgtaagtataatgcaaatattccaaaatctgaaaaatcagaaacacttctagtcccaaccattttagataaggaatactcaacctatacttgtttgttgcgttatgtctagggcttctcagttataaaggtgaggacctcattggaatatggttactccataytggcagaataagaagtccagattagtttttatattcaaaagtattccagtcttcaatatccataaactcaaaggcaatttagaataatttcttagcccatttcctctaatgactttttttcattcataaaacttcctatttccaaagatcatactgtcctttgttcctctgggaagcaatctgaaggaaggctttgatcatttaagtgcttgttctgtttaacgttgcaagcaccaggatggaacac

SEQ ID NO: 406212 - DNA, 540 bp, Homo sapiens
ggatcagccacaacctctctggtgcctttgaaacacagagtgcctgggggtgcagacagaggaggataagcactcatgcttcctacttccactcagttgataatagtctgcccagcacgggcctacagtatggcagaagtcagttaaacctcagaccactgaggcacgtgggctggctcctcacatccctccagcctcaygggggatgaacgggccaaggagctgcttggcttccttccaatctccaggctcccaacccaactcagggaacccacatctgacattccactcagggtgggggccgtggctaggggaggaggagcatcgcattcacccctccaggggagagccatcgcctgcatccttggccaggcctttctggacttcaggatccttgtctgcagaacaaaggggtttcagccaagtcaggatgactcaaagtgcatcttgaggaatgctgacagacgttacttaacgcctctgtgcctcatctgtaaaacaaagataacagcaacacaaaggccacaaaaaaaccaaagg

SEQ ID NO: 406213 - DNA, 587 bp, Homo sapiens
aacaaagtatggccaatatgcatgaaaaaagtcaatcaatcaaaatttttcctgaggaagcccagacattagataaaaaaatttaaattagctattttacatatgttcaaagaactaaaggaaatcaggcctagagaagtaaagtatgagaacgatacctcaccataaagactacatgaataatgagatagaaattataaagagaaaccaaatataaattatggagttgaaaagtacaacaacttttaaaaattcactgagaggatcgaacagcagttatgagcaggcagaagaacgaatcagaaaacctgaagataggtccactgagattatcaagtatgaggaataagaagaaaaaaatgaagaaaaataaacagtgcctcagagacccatgtaacaccatcaagtgtaccaacatatatataagaggagttttaaaaggaagggaggakgatgtgaaaataatattagaagaattaatgtccaaaacctccccaaatttggtgaaaagcattgatctacacgtccaagaggtccagtgaactccattaatataaactgaaagagacctacacctagaataaaac

SEQ ID NO: 406214 - DNA, 407 bp, Homo sapiens
cacacagagttcccagtggggctgcctgatggagctgtgagaagagggccatcatcctccagaccccagaatggtagacacactgacagcttgcactgtgcacctggaaaagctgcagacactcaatgctagccrgtgagagcagtcaggagggggtctctatcctgcaaagctacagggccagagctgcccaagactgtgggagcccatctcttgcatcagcatgagaatggactaatacaggtgggatgatactagctttagtgatttaaaatgaactctctaaccctgtcctagccaacatttttattagtagcctgaatgaggacatctgggctgtaggggacccagccattctctctgtagtcgttcctcacagagccctgatttgattcaccttccaccta

SEQ ID NO: 406215 - DNA, 407 bp, Homo sapiens
cacacagagttcccagtggggctgcctgatggagctgtgagaagagggccatcatcctccagaccccagaatggtagacacactgacagcttgcactgtgcacctggaaaagctgcagacactcaatgctagccggtgagagcagtcaggagggggtctctaycctgcaaagctacagggccagagctgcccaagactgtgggagcccatctcttgcatcagcatgagaatggactaatacaggtgggatgatactagctttagtgatttaaaatgaactctctaaccctgtcctagccaacatttttattagtagcctgaatgaggacatctgggctgtaggggacccagccattctctctgtagtcgttcctcacagagccctgatttgattcaccttccaccta

SEQ ID NO: 406216 - DNA, 473 bp, Homo sapiens
ttcttgagatatatacccaagagaaatgagtgcttatgtcagcaaaaagacatgtcttaaaatgtccatggttctactcttaatggccaaacaccataaacaattcaagtgtccatcaacaggtatattcatacaatggacacracaattttaaaaagaatgaagtgaatctcagacaacattgagtaaaagaaggcagacccaaaatacttactgtatggttccatttgtatgaagtcctagaacaggaatacaaacttatggcgatggaagtcagaatggtggttaccgggaaaggaggtaaagactgggatggacacaagggggttgtgggttggcaacattgtggtcttggatggtggttgcaccgtggacattgaggaaagccatcatcctgcttacacggtacattagtgcactcactcacctctgtgctttctgtatggcacaccttgatttaaaaggaagaccac

SEQ ID NO: 406217 - DNA, 473 bp, Homo sapiens
ttcttgagatatatacccaagagaaatgagtgcttatgtcagcaaaaagacatgtcttaaaatgtccatggttctactcttaatggccaaacaccataaacaattcaagtgtccatcaacaggtatattcatacaatggacacaacaattttaaaaagaatgaagtgaatctcagacaacattgagtaaaagaaggcagacccaaaatacttactgtatgrttccatttgtatgaagtcctagaacaggaatacaaacttatggcgatggaagtcagaatggtggttaccgggaaaggaggtaaagactgggatggacacaagggggttgtgggttggcaacattgtggtcttggatggtggttgcaccgtggacattgaggaaagccatcatcctgcttacacggtacattagtgcactcactcacctctgtgctttctgtatggcacaccttgatttaaaaggaagaccac

SEQ ID NO: 406218 - DNA, 601 bp, Homo sapiens
tgttatgcttacagtcacagagtaatggtttcatgactgctctttgtgtaccttctcagtgagtgttakcgggttagtaaaactttataatctcactttggtttcccacttctaagtgctatgcatgtgtcacaaaaaatatttttcaacatgtcaaaaacaatgaaaatgtatgaatgaaatgaaaagtaacaaggaaagaaatcagctatgattttggttatgggggtcatagttccagaaccagttggctataaaacactttatccaataatattgttttatccatatttttaggaatgtttataacgtgaatgttgtttcatcatgagttacaatcatataaaactgaatccacatggtaaatacaagatggtgtgttttcactggtgagatttttattttttttaaatagtgatgtttcttctctcacaagtgatcatgcaccttattttctcccttattcttacttagaagagtatctcattatctccctaatgagagatcttgtgaaatctgtcctccactttcagatgcataaaacaatgagaaattggaccatttccttcaaaagatgtattttaagttctattctttctta

SEQ ID NO: 406219 - DNA, 601 bp, Homo sapiens
tgttatgcttacagtcacagagtaatggtttcatgactgctctttgtgtaccttctcagtgagtgttatcgggttagtaaaactttataatctcactttggtttcccactkctaagtgctatgcatgtgtcacaaaaaatatttttcaacatgtcaaaaacaatgaaaatgtatgaatgaaatgaaaagtaacaaggaaagaaatcagctatgattttggttatgggggtcatagttccagaaccagttggctataaaacactttatccaataatattgttttatccatatttttaggaatgtttataacgtgaatgttgtttcatcatgagttacaatcatataaaactgaatccacatggtaaatacaagatggtgtgttttcactggtgagatttttattttttttaaatagtgatgtttcttctctcacaagtgatcatgcaccttattttctcccttattcttacttagaagagtatctcattatctccctaatgagagatcttgtgaaatctgtcctccactttcagatgcataaaacaatgagaaattggaccatttccttcaaaagatgtattttaagttctattctttctta

SEQ ID NO: 406220 - DNA, 601 bp, Homo sapiens
tgttatgcttacagtcacagagtaatggtttcatgactgctctttgtgtaccttctcagtgagtgttatcgggttagtaaaactttataatctcactttggtttcccacttctaagtgctatgcatgtgtcacaaaaaatatttttcaacatgtcaaaaacaatgaaaatgtatgaatgaaatgaaaagtaacaaggaaagaaatcagctatgattttggttatgggggtcatagttccagaaccagttggctataaaacactttatccaataatattgttttatccatatttttaggaatgtttataacgtgaatgttgtttcatcatgagttacaatcatataaaactgaatccacatggtaaatacaagatggtgtgttttcactggtgagatttttattttttttaaatagtgatgtttcttctctcacaagtgatcaygcaccttattttctcccttattcttacttagaagagtatctcattatctccctaatgagagatcttgtgaaatctgtcctccactttcagatgcataaaacaatgagaaattggaccatttccttcaaaagatgtattttaagttctattctttctta

SEQ ID NO: 406221 - DNA, 523 bp, Homo sapiens
gtttagggaatttaagaagggcaatttcagtaccagggctgggaagtcatttccaccctaggactgaagtggcaaggggagaaggtgcttactagaaagcaaagcatagctctacaaagagggttttgaaaggacttgcacctaaagaaaaatgcagccaacctgtgacccatcagctagggagctgcggtacaagtaccccacgcctcttttctcctggtctcctattttctaccrgtgcctctcattgtctgatccaagtagcgaactgaatgcaaccccttctacttaatcttcccaagtagacagcaagatgagaaataattaagaatggatgtgctgaataggagtggtcgaagtgggaatcctttgaatttagggggaatgcttccaacttttccccattcagtgtgatgttggttgtgggtttgttgtatgtggcttttattattttgaggtatgttttttctatgcctaatttcttgagggtgtttttatcaagaagagatgccggattttatca

SEQ ID NO: 406222 - DNA, 594 bp, Homo sapiens
tcatatggaatttaaaaaaaagagatcaaatagccaaagcaatagtaagcaaaaagaataaagctggatatatcacattacctgacttcagattgtactttaaggctatgtagtaacccacacaacatagtactggtataaaaatagacccaaagatcaattgaacagaataaaaaacccagaacaaaagtgaaatacctacaaccaactgatctttgataaagtttacaaaaatatacactagagaaaggacactctattcaataaaagatgcttggaaaatcaggtagctatatgcagaagcataaaactggaccccatctctcatcatataaaaattaagttaagatgaattaaactctcaaaactatcaatgtaagacttgaaactaaagttcctaggtaaaatttatgaaaacctcttctggacagtggcctaagcaaagaatttatgacttaagtcctcaaaagcaaacactaccaacacaaacatagacaaaytggacttaattaaactaaaaagctttttacagccaaagaaacgattaacagagtatgtaggcaacttacagaatgggagaaatatttgcaaact

SEQ ID NO: 406223 - DNA, 619 bp, Homo sapiens
tcatagatattgcattctcttgttttccatttttcaaatactaatcagtatttggtattttcttctttgtatattgatttgtctatctcactctcactctgtcacaatattgtaggcttcaggaagcaaggacattgtcttgtttaatgttgtattctctgtgactgacatagtgcttagcacattaaatatttgttaagtaratatataagtttggtaattggtgaccaggcttcccataaattcagttgtatcagaattttacaaccgaagtggggaggggatgccctattcaatgaatgatgctgggataactagctgtcaatatgtagaagaatgaacctggaccgctacctttcaaaatatacaaaaattaactcaaaatggaataaagatttaaatataagaccttaaattataaaaaaaaatcctgcaagaaaacttaggaaatactattctggacataaaccttggaaaataatttatgactaagtcctcaaaagcaattgcaacaaaaactaaagagcttctgcacagcaaaagaaactatcaacacactcaaaaagacaccctacagaataggagaaaatattcacaaactatgcatctgacaaaggtc

SEQ ID NO: 406224 - DNA, 398 bp, Homo sapiens
ttgataatgaatcagttatgaagctcttttaggactaatacggaaaaacttataagttatgttgctatcaccaaagaaaagcaaggtgtgctacagtgtacacactgtatgctattatttgtaaaataaggacacatggaaaacacacatatagttttatatatacgcacacataaacatgtgtatatgtgcatatacacatatatatgtgtgtatatatatatwtttaattgctgatgtgcatctgtgactatatatgtgtttatatctaacaacatgccaacaaaattggtgactatagttttgctcttcttagaatagggagttcttgggctgagcaagaaatacaaaaatttttattgtgtccagttttctatgtatttttaatttttgatatc

SEQ ID NO: 406225 - DNA, 592 bp, Homo sapiens
taattcatgtgctctatacaatatctaaagcatgagttttgctgaaaggcatgtatagttagatttttgtagaatgtaagacttgaatcctaaaagatcaagaccttttcctgttgtcttgcacagctttcaattgcccattcacaataaaatgagacacaactcatagaactgttagttgccaagccgtgacatagccaacagaascttaactttgtgcttaacatttccatgttaattaggcaatgtcaaatatcacagacatgtagataagtcatagtaatatctttcacatacatttcaatgaattaaatactctctatctgaatactgatcttacattccatccttcatattgcctcccagtttttagaggagtcatgttcagagaggcctattcatttatatcttctccaaattttcttgttactaagtcaccatgcaacctgagatgcccatcatgaagtggatgctctttgacccatcaagccataaatttaggtgtgtatagcaacactccatcattaaatggaagcagtatatatgtaattcctgaaggcataagtaagttacattaaaaaatggcccaaat

SEQ ID NO: 406226 - DNA, 626 bp, Homo sapiens
agtgtttcctactccccaaaattacccagtgtgagagtttcataaaattaaagtattttggacattatcacattcatttccaacacatagtaaacaaaggagaggttattatgcaatattccagtgttataataataagaaagtaaattgttttcatgaaaacatagtgtcattgaattactttttctttcaaagataatactttaaactaattctaggaacctagaaatactaaccttggacagagaccttgtttttaaaatcaaatgtcatcaaatgcaatcaaatatatggttcattcagygccacttcagggtccagaaaatatcaagtaatgttatttgctcaacaggggactccctaaacatttttgtatcaaagtctgatacttagggagctcttgctttatagaattcaatttcaagttttgttatgcagattcagatttgttctgaagcagcagctgaagattctgcttttgtagatacctaaactagacagacctgactttggaagtagctattgactttctgtatcctaggcagtttcatattgatcttgaggcaactcaattacccgcacctggaagaggcaatgaatttgaatagtgttcatggcttttttat

SEQ ID NO: 406227 - DNA, 635 bp, Homo sapiens
tattaggccattgtaaattcctaagatgtctactatatttccttatttctgggtactgattctgagactttgaaccaaaatatcccaagaagggattatgagtctaagttgtaatcatttacgcaggtgtcttattactcagataaatttgggaactatttcttccttagtggttaataagaaaggtatggacggaaagagaaacgtgcattcaagcattgcttatcaaatcagatttgtcaaatctgatttctccataagatcacttgggaaattctataaaatccagatttgggggccttgttgtagatgtacctgtttaagaaagtttaggaatcataatattttaaaagcttcccaaatcaaatttgtattcaatttgtctgaatatatctgcgggctttttggagagctgagatgaaaaattgctctgataaatcactaaatttgcatcacttagactcctaacagtttttaatttaatttwattttattttattagaatacttacatattgtcattttggatttaatccattttctactctacactgctgtcaactttatctttgtcaactccctatttaataaatatctaggattcctaaagaagtccaaaccagctcaatatttgct

SEQ ID NO: 406228 - DNA, 410 bp, Homo sapiens
attgttggctagataaatcaggattcaatggggggtaattttcaaagctgtcctagggagtttgacttttattccacagtccacagagaacaaaggaaggctgttaagcaagaaagtaacgtgttcacagatatgctttgtaaaagactagtatgttaagatatcccagaggcaggagaggctacagaaagacagatacttgtcaatatattgtaataagctgaatggmaaattactgaatttctaaattaatgtaatcatagggatggaaaggaaagatattctgtgaactttcagaaatgagcaatagagagatgtgatgaacgatagagagagacagtgaaagtgatcagaagattttaaatctaataacaaaggtggtggggctattaacagacagaaatttggcg

SEQ ID NO: 406229 - DNA, 622 bp, Homo sapiens
aatctttcaattgcttgtattttgaatacaagttgccttcattttttaaaaagtttaatgacttgggatttcatttccaccaaataatgaagccggtgcaggactgcaaattgtgtcttggatgttgccatgcactgctgcacttgatagataatttattcagagtcctggaagaaagctttttaaaaataactgacattgaggatgccaataaacattgatgccatgcgcgtgccagctgtgaaatcattagtaggtgaaacaccctaccgtgcaaacagcttcaaactgatttgagggatgtattttagccaaaggcataaatgaattcatgaatttgccctacttactgttctctgtctcagttctgtcttttaaaatttttatttatttatttcttgtattcatttaggttggtggayatagcatctgaataggcagagtgctctatttttttcttgatgaaaagggaattgctattacagtctgttatccaaaaattaccataacaaatctgcccttccaattagctggtgcatggaaagattagttgaaatttggcctggaactttttattaagactaaataggaaaccatgtgtatatattggtattagtttgtg

SEQ ID NO: 406230 - DNA, 621 bp, Homo sapiens
cagactaaaataactcattttgaataatggagaaytttctaatgatatagctggctgaagagagggttttgttctctttttttgtttgtttgctttcccatagctagtaagtttcctgtccctgaaataaatagatgctggatacctacttggtagcaatggtgtactgataatgtaggcttcaaatagcaggaatattctgccagaagaattcaaagatatttttcaaccttttggtttctatcatttttctgcatagaaaatttctccaggctaattctagctttataatatgaggagaggtaaactgaaatatgagagagaaaagtgcaacatagaatttccgacactgtaattgggaatatttagtttcctctttttaaattaaaagtcctttggaacaaaaaacactggaaaagccgctatgaatttgggccttttggttgatttttgcaataatcattcaacatcatctttatttttacttaattatgatatctcttccttctcttcttttgcatgtcttttcaaaagtatccaagtaagcaaataaaaattttaagattatttttgtggaaccacaatatcatcagctaaatgtaaccaatttcacaattcgta

SEQ ID NO: 406231 - DNA, 507 bp, Homo sapiens
aaccagcaacaacattcctttaagaaaaagcataacccacagcaaaatcctaacttactctcttcaattctatgaaggctgagaaaggsagaaagttgcagaaaaaaatgtggttcaggatgtttaagaagctgtctctgtaacataaaagtgcaagttgaagcaacaagtgctgatgtagaagctgtagcaatttagaggatctagctaagaccattgacaaatttgtcagaggtgtttgaaccagagcaactctatcttgaatagggcctgggtaaaataaggctgagacctactgggctttactcccagtcagtgggtctaagtcacaggatgagacaggaggttggcaaaagatacaagtaataaaaaccttgctgataaaacaggttgcagtaaagaagtcagctaaaacacaccaagattgctatgagagtgaccctagtcttcctcactgctatactcacaccagtgccatgacggtttacaaatgccatggcaacatca

SEQ ID NO: 406232 - DNA, 655 bp, Homo sapiens
caattaatgaggcaaactttcttgcctgtttcttattgtaaaaaattgccatagccacccaaacgttcagcaaccaccagtctgattagtccataaccattaatatagaggcaggaccattcaccagccaaaggattatgattccctgaaggctcagatgatcattagcatytcttagcaatatagtatttttaaggaaggcatgtatattgtttcgtaagcaatattgtatacacttgatagactgcaatatagtgttaacataactttatatgccctgggaaaccaaaaaaaaaaaaaaatgcgtgactcgctttattgcaatattcattttattgacatgtctggaaccaaacttgcaagatctccaagatatgaatgtatcgaagtcagggagaagggttattggtggagcaataacagagaggacagaagacaagaggaaggagcaagtctcctttcactcttccagccttccaacctcactccctgcactctacttacagatcttaaaaggtagccagctgacaaagaagaaatgacatttgcagactccaatgctggaatgataatgtaaaatatacaaagatgtatttggactgggaacccagatcttaataattcacataaaattgtaattacacagttatgcctg

SEQ ID NO: 406233 - DNA, 613 bp, Homo sapiens
tccaaatctcaattcttgacttctctgcacccacaggcttaacacaacatggaagctgccaaggcttggggcttgcaccatcttaagtaatggcccaagctgtaccttggccccttgtagccacagctggagttgaagcagctgggayacagggcaccatgtcccgagattgcacagatcaggtgggccctgggcccagcccaggaagtcatttttttcctcttaagcctctaggcctgtgatgggaggggctgctgcgaaggtccctgagataccctggagacatttttcccattttcttggtgattaaccttcagctcctcattacttatgcaaatttctgcagtgggcttgaattttcccctcagaaaatgggtttttcttttctatccaattttccgaaattttatgctctgtttcctcttgaatgctttgccacttagaaatttattccaccagataccctaaatcatctctctcaagttcaaagttctacagatctctagggcaggggcaaaatgccacccagtctcttttgcaaggcataacaagaggcacctttactccagtttccagcaagttcctcatctccatctgagaccacttcattgtg

SEQ ID NO: 406234 - DNA, 247 bp, Homo sapiens
atcacaagaacagcatagggaaaactgcccttatgattcaattacctccacctggcctctcctttgacacgtgggaattatggggattaccattcaaaatgagatttgggtggggacacaaagcctaaccgtatgtgtgtgtgtgtgtgtgtgtgtgtgtgtgtgtgtgtttgtrtatgtgtttaaactatgattcttttggtcattgtagtctataagattttccttttctggcagcaaatgctat

SEQ ID NO: 406235 - DNA, 553 bp, Homo sapiens
tatggactataacttgagagactctgttttgactaatttagtcaatttgtaaaattaaataattgttgttatgtaacatatttccagtatgcagaatttaaactgtataatgctaattacagatcaacataaactaaaatggttccaggcagtgaactatgcatattacacaaaatgtcctatcaaaggacttcttttgtttccctcctgtcaatgataaggtaactctaattgctgaaagcagatgcttattagcatttaaaatgcaygtaaattgaccatcaaaaagaagtgctaaagaatttggtccatagataagtgcctctactaaagtgtagaagtaagtagagactgatagatatctgatcactctgacaagaactgggtgggatggatggcggagaaacaataaaagaaaaacagtaggataatattaaaggctgtttctattatggtaagtgaatcgatatttctgcgtagttaaatttcacatgagtattaacatcaaataagcattgcatttttaaagcactgagaaatcaaagtctacaaa

SEQ ID NO: 406236 - DNA, 553 bp, Homo sapiens
tatggactataacttgagagactctgttttgactaatttagtcaatttgtaaaattaaataattgttgttatgtaacatatttccagtatgcagaatttaaactgtataatgctaattacagatcaacataaactaaaatggttccaggcagtgaactatgcatattacacaaaatgtcctatcaaaggacttcttttgtttccctcctgtcaatgataaggtaactctaattgctgaaagcagatgcttattagcatttaaaatgcacgtaaattgaccatcaaaaagaagtgctaaagaatttggtccatagataagtgcctctactwaagtgtagaagtaagtagagactgatagatatctgatcactctgacaagaactgggtgggatggatggcggagaaacaataaaagaaaaacagtaggataatattaaaggctgtttctattatggtaagtgaatcgatatttctgcgtagttaaatttcacatgagtattaacatcaaataagcattgcatttttaaagcactgagaaatcaaagtctacaaa

SEQ ID NO: 406237 - DNA, 534 bp, Homo sapiens
tcattttcttgttactgatagagttcatctatattcagttgcatttcctttttaatatacattttactatcaaatttcttcaatctcttttcctcctttagaataatcttcccttactttttctcattataatggtcgtaaagtgtaaagyatatcttatgagctcttacaagagcactgagcaagataataaatttctattttttgctcccaaatgttaatacccattttaataaacataagccaaacactgtattttctttaaattatctaacatgttttagtcttctagatgtctaaataacgtctaacattaagggctcctcgttttttaattctaataaagctcttcaagcattaaggagaaaggaactaggtgaagtgctttttatataattaaaacaattatcacatcactttcaaattattcattagtgtgtttcacatctacaacctgtgacctctccaatgacaagatcatgtcatcctaattgaaatcaccagagcaaacctccatgtctgttacatagggag

SEQ ID NO: 406238 - DNA, 534 bp, Homo sapiens
tcattttcttgttactgatagagttcatctatattcagttgcatttcctttttaatatacattttactatcaaatttcttcaatctcttttcctcctttagaataatcttcccttactttttctcattataatggtcgtaaagtgtaaagcatatcttatgagctcttacaagagcactgagcaagataataaatttctattttttgctcccaaatgttaatacccattttaataawcataagccaaacactgtattttctttaaattatctaacatgttttagtcttctagatgtctaaataacgtctaacattaagggctcctcgttttttaattctaataaagctcttcaagcattaaggagaaaggaactaggtgaagtgctttttatataattaaaacaattatcacatcactttcaaattattcattagtgtgtttcacatctacaacctgtgacctctccaatgacaagatcatgtcatcctaattgaaatcaccagagcaaacctccatgtctgttacatagggag

SEQ ID NO: 406239 - DNA, 534 bp, Homo sapiens
aaggtgtcagtaaggccgattccttctggagactttgagaggtaggtctctttctctgtcttttctagaatctagaggctccctgcatttcttagctccttaggccacttcccaataatggcatctcttcaacctctgctgcttagtcacaccttttatttcccccctctgtcttgcccctctcttttaaggacccttgtgattatatcagtccacccagatagtccagaataytcttcattttaagatcctttagataatcacatgtggaaaatcccttttgtgaaatattcacatggtgcagggattattaggtatgccatttatttctggtgtgaaaggggcactattctaccacaccatctgaagttccagacatgtatgttgctatgaaagctgtcttggctcatctggccaattcgagccttcaaaagactgcagctttagccatcatctgagagcgaacacattgcagatcatacacaagaactgttgggctgagtaaaatctacagaaatataaaagttagtatta

SEQ ID NO: 406240 - DNA, 540 bp, Homo sapiens
attatatcactgaactgtaattaaaatggttgagatgacacgttttattttatgtataccttgccataaaatttggaaaaaaatgttgtttggaatgattatcaagataataaagagaatataaaagaattcatgagatcttaaatgtccacatatattaaatctttacaaagaaacctccagtagcatggtgtctgataatggccttaagggagaattgcttattagtgacttaaaggaaatcatgtcatctattgaattactagcattatatcctcttgcacctggattttccttggaggtcaccctcccaaacattaaccagatttgaccctcactgagcttgagagctctgatgagctcatagcccaaggtggtgtagttttaaagactgcattgcaataagaatatatctgtcatagatgaaaatgcaggagcatatttatgtcttcatgtaatacattcattgcttttkatgaacctgagttctccagggagtgaaacaaattcatgtaacgtttctgtgtgttacaatttgta

SEQ ID NO: 406241 - DNA, 583 bp, Homo sapiens
accagtgctgagggcaagttctgtagatgatcataaagcccccagaggtgtgcctaggcatggagctctgaaatctccttggccccaaattctctacacagggattgrgggtggcctaatgtcctaatccaagacagtgggtgctccagatgcctgaaggtctgcctgagtgtaaagcacagagggccccacttcagcacaatatgcacagaaaaggtggggcagttgaggctgctcatctgggaaagtgggtgctccaactgcctggagctctgcctggatatgaagcagacagggccccattggacccagatctctgcacaggaagggtgaggtgtttcaggctgatgatcttggcaagtgggtactccaaatacctggagatcagcctgtgcataaagtagagagtgtcccactgcaccaggatctctgtacaggatgaatgaggtcacccttgggctgctaaatgaagcaagaaagtgctctaaatgcttggaaatctatttggatgtgaagtggagaggatctccttgcaccaggatttttatacaggaagggtagggtggctcaggctgccaatctg

SEQ ID NO: 406242 - DNA, 583 bp, Homo sapiens
accagtgctgagggcaagttctgtagatgatcataaagcccccagaggtgtgcctaggcatggagctctgaaatctccttggccccaaattctctacacagggattgagggtggcctaatgtcctaatccaagacagtgggtgctccagatgcctgaaggtctgcctgagtgtaaagcacagarggccccacttcagcacaatatgcacagaaaaggtggggcagttgaggctgctcatctgggaaagtgggtgctccaactgcctggagctctgcctggatatgaagcagacagggccccattggacccagatctctgcacaggaagggtgaggtgtttcaggctgatgatcttggcaagtgggtactccaaatacctggagatcagcctgtgcataaagtagagagtgtcccactgcaccaggatctctgtacaggatgaatgaggtcacccttgggctgctaaatgaagcaagaaagtgctctaaatgcttggaaatctatttggatgtgaagtggagaggatctccttgcaccaggatttttatacaggaagggtagggtggctcaggctgccaatctg

SEQ ID NO: 406243 - DNA, 583 bp, Homo sapiens
accagtgctgagggcaagttctgtagatgatcataaagcccccagaggtgtgcctaggcatggagctctgaaatctccttggccccaaattctctacacagggattgagggtggcctaatgtcctaatccaagacagtgggtgctccagatgcctgaaggtctgcctgagtgtaaagcacagagggccccacttcagcacaatatgcacagaaaaggtggggcagttgaggctgctcatctgggaaagtgggtgctccaactgcctggagctctgcctggatatgaagcagacagggccccattggacccagatctctgcacaggaagggtgaggtgtttcaggctgatgatcttggcaagtgggtactccaaatacctggagatcagcctgtgcataaagtrgagagtgtcccactgcaccaggatctctgtacaggatgaatgaggtcacccttgggctgctaaatgaagcaagaaagtgctctaaatgcttggaaatctatttggatgtgaagtggagaggatctccttgcaccaggatttttatacaggaagggtagggtggctcaggctgccaatctg

SEQ ID NO: 406244 - DNA, 534 bp, Homo sapiens
tacttagctttcagctacatcaccccaatgtctgtttctatcatcacatgacattctccctctgtgttcttggtgtctcttctcttcttctaacaaggacaccaatcacattaaattagagctcactttaattgaatatcatctcatcttaatttgatttcatctacaaagaccctatttgctaataagatcacactcagaagtactgcagttatgacatatctacttgggggaaacaattgagcccataacagtgtgaatcttgttgaatacatrgagagccagttgtaggactaatattctctaagcagttaaaatcagaatgcatgaagcttccagattgatccacatcctaggtagacattaaaagtctcctgggaatgtctgcaaggtaaaagtcagaatgagttgtgcctggcatgagacttggaagttaactgtgacctcaatttcagggactctaagatgaagaggataatttttttaaaaagtcttttgtttggaaacaataatagattcataggaagtttcaaa

SEQ ID NO: 406245 - DNA, 593 bp, Homo sapiens
ttcaatacagacacaacctaatagcttctctcctgtagctgcataagtatttatatggttgttcacatgttttaaaaacatctccaaagactccatctttacgtgaagtttaaatagtgtgtaaaaaaagagtaagggaagatatataatgtgttttactctcctaaagcataaacttagcaaacacacactgtgcaagaataattcattcttacatctctttcaaaatctatacaataacccatgaacccagagtttttaaatagaaagtggcatytgcccaccaggatacttcatttacatatcaccggctaagtcctgtgtgaatgagggcagtgcaagtgctgagcgtgatttctggatgaaggtgtcacctgtgaaatgacaaaaattgaccctttgtgtgtctacctccctgctgtgagtaactaagcaatactgttacttggctgatttcctaataaactacaggtgggagggtgttgaggttgtgccattacaaatcatcatctgttagatcaaagtgcacaggaaagaacggaagctgtgcagtattaatagctacacttatctctccagtcacttaataattg

SEQ ID NO: 406246 - DNA, 654 bp, Homo sapiens
agtattaatagctacacttatctctccagtcacttaataattggtgactggagaacattggaataattatcattcattttgctgttctgagaacatatattaaatctgcctttgtatttttaacatttgaaaataaaagctagtatattacttccatttttataaatattttctcatattccacagttgctgatatttatcaggtgctttctgtttgacagccamgggacactgatctagacttttgtatccttataattctcacagcaatccttttgtgtagattactttataactataatcaatgctatcattggttatagttgtaatcaaatattgaagacttgcagattaaaaatgtttgctgtttccttcgtgagagtcttaaatggttagattgttctactggatgaagaaatgtttttatggtaataggcaaacagaagattgaggacagggctcagttttggagtgttctggtggttttagagtcttatgtgcaacgatatgttaattgctgaattttccagtgtatattttgattctgccgtaaaacttggactgcatttgactgtgggtgtgtgtttgtattttataaaactaatagaaggcctgagagaaaaaaaaaatgggacaaggaaacattgtgagatc

SEQ ID NO: 406247 - DNA, 588 bp, Homo sapiens
cccttttaatactggcattctgatgaaacattttagtatgaatattgctgctggattataaatgtaaaagttcttgaatttaaaaattataaaatgttaattccaaggctgtataataaaataaagcaacaaccacttaacttatgtatctttttaatttttactacatatttattactatttttgtttggattaactacagcagaaatatgaaccaagggatggatgatagaagtgacaaaagtattttcttttttctttttttttttgagacagagtctcactctgttgcctaggctggagtgcagtggcgtgatctcagctcaccacaacctccacytcctgggttcaattgattctcctgcttagctttccccgagtagctgggactagaggtgcacaccaccacacccagttaatttttgtatttttagtagagatggggttttcctgtgttggccaggcaggttttgaactcctgaccttgggcgatctgcttgcttgccttgccctcccaaagtgctgggattacaggcatgagccaccgcacccagtcacaaaagttttttctgatgtcagctatggtaa

SEQ ID NO: 406248 - DNA, 588 bp, Homo sapiens
cccttttaatactggcattctgatgaaacattttagtatgaatattgctgctggattataaatgtaaaagttcttgaatttaaaaattataaaatgttaattccaaggctgtataataaaataaagcaacaaccacttaacttatgtatctttttaatttttactacatatttattactatttttgtttggattaactacagcagaaatatgaaccaagggatggatgatagaagtgacaaaagtattttcttttttctttttttttttgagacagagtctcactctgttgcctaggctggagtgcagtggcgtgatctcagctcaccacaacctccacctcctgggttcaattgattctcctgcttagctttccccgagtagctgggactagaggtgcacaccaccacacccagttaatttttgtatttttagtagagatgrggttttcctgtgttggccaggcaggttttgaactcctgaccttgggcgatctgcttgcttgccttgccctcccaaagtgctgggattacaggcatgagccaccgcacccagtcacaaaagttttttctgatgtcagctatggtaa

SEQ ID NO: 406249 - DNA, 441 bp, Homo sapiens
tttgcacttgtgttttcctcacatccacatttggggttccctcacatccacacttcgggttcagaaagtgtcgaggttatgaaaaacaagaaaagtctgaggagctgttagaggtggggcagatactaagaagtgtctataaatgaaaacaytgttaattaaatgcaatgtgggatcctaggcaaagtgctggaaaagataaaggacattagtgtaaaattaatgaaatacaaataagagatgaaattcagttaagactatgataccaatgttaatttcctgttcttcataattataccatggttatgtcagatattaacattaggagaagcagggtgagagacagaagaagattttctactatcttgcaactttcttaaaggtttaacagtagttccaaataaaacattaaaaattaaatgatccatgtggcccagagcc

SEQ ID NO: 406250 - DNA, 638 bp, Homo sapiens
tgtctaaaacagaatgggtacatagtgaacatttgtgaattagatgaataaatgaaagaaatatccatttacttaagaaactgtgataattagtgctagggaaaaatcaaggaagtgttgtgtcactttcaaagactgtgcaatatcaagggaaggcttacagcatttgaagtcagataataaagccatattgcaaattaaaatgccctcaaggggtaggcaagtaatttaaatgtgtgaagcagatatgagtaagaaaataaggaatgataggggccttctattaactasacaatcagtattaatcttaaaggtaattaaattatactttctttaaaaatcagcaataatactgtacttttaaatgaaatatgtctgagaatttacttagaaccacaatgtgtcagttcttgacttttgtttaggatatgcagttgcatcattttacaaatcaactaaaaacatcattgaaatcaaatggctaatgaatagcacagattctgcaatatttgtggtaggcactgactgatctgagaaaagacaatagaactaacagttcattttgtccatcaaaccattgccaaatggaaatgtaatctaagcaatctcgaaatgtcttcactggtttaaaacatgtg

SEQ ID NO: 406251 - DNA, 546 bp, Homo sapiens
gtgttttaaggcaggatggaacttattcagaattaaatcagcaattactgacaaaaacaagtgcttatgctttgaatatttaactggataaataagctaatggaaaagattggacagcctcaactgttcactttcattagagtagtagaaaggggatataactgagtctactttaatcaaagagaaagcacaagaactaaggtagaaagaaacagaccagggcattgctagagattagagaccagaaaataaaggacaatgaaagagaggcttttccccaaagttaasgtagcctatggcttggttaccttaataatcccagtttccaccagttttctttctgtaatgattattaataattccctctttaactcacaaaagtatcccagtatgtatgataaattttgtgatcaatttgccacagaaacatatcccatccttccatgctgccatggaaggatgagtgcttggtgataaaacaaatattacaagataggagatgagatattttttatattgaggctttgggtcctctggtagctgcag

SEQ ID NO: 406252 - DNA, 475 bp, Homo sapiens
ctgtaggtgttagttacctatttcttttggtgtttgttagctattgtttagtgatttgctttccttccacatcagtacttattcatctgtatcactcaactagagtataacattgcatcatatgggcacataaatgtttatttaactattccctgtatgaatggatatttagattgcctcaatttatactagttgagtcagtgactattctttaaatatttgttcatgtgcagatataagtacttctyttggtaggtcttaagaacttgatgctttgcttaaaattttaatagttactaccaaaatgactttcaaagtatctgtcttatattaaatcattacaaatcatgtgtatatcaaatatgtttcaccaatatttttattctatatgtaccagtctaaggggtaaaatggtgttttttgttgctttaatttccatttttttgctgacttctgagattaggtctctcatttt

SEQ ID NO: 406253 - DNA, 645 bp, Homo sapiens
cacctgatgctgcttaaattcctcgtggccaaattcaaccagaagccacttgactcagacgtctagaaaatgcagccttgagtaggtcagtatttgtttgatactaatctgtgcaggagaaaagagaggaatccacttgaggtcaaacaagccaagggatggcagaatgttaatgggctttgtaaaattccaactcacttagaagataattgagatcttatttcctaacacttgtcagaatagatctcaacccaagtcttgacttacttcttccttccctatgtaatttcacttttatccagtgtggatttgtagaaagtaaaggtaacaatcccaaacaactcatgtaaatataaaacttgttacttttaagcaggtrgaaaaattgttaaaacttctatgttattcaaccaaaaaaattgctaccagtttctaaatatacacaaatgttttctacaagtacttccccgtctatagttttgcaagttcttacaagaacttgcatcctactactttcaatcataagagaggtttcagaatccattctctgatggttagatgatatatgaatctacaagtaaatgattctgtgggtcatttcttaggcatctataaaactggaacctgacacttaaagtggccata

SEQ ID NO: 406254 - DNA, 624 bp, Homo sapiens
tgttttcttttagaatttaaaactagttcacgaagacagcctgagaataaaggtcatctcactccctccattgtctttgccatgatcatcttttctcctgacaactctgatcttcagccttaacacaaaaacaccatacatgtaaattcatgtgaaaaaacaaatgtcctaagtgttcacctgcattccagttctgcaaagagcaagaacacgaatcttactttgagctaaattgggacaccctgccaaaatatcaataccctatgagatttttatcccatgaaattagggattgttgaagaagaggtccttgaagttaattgacacactgcttcttaaactctaatgtgcatatgaataataaggagaacttgttaaattgcagattctgaatcagtggctctgggctctgtggacaggctcytgatctgcagcctatgctttgaaaagcaaggttccagtctaacaattctctaaattctctcagtgaacagttgaagaaaatgagtcacaggcatttatttagtacaaggcagtgaattcagtgctgcctacatattaaactgaagatataatcagggttagaggaataaatttccctgactctcactgtcctttctagca

SEQ ID NO: 406255 - DNA, 565 bp, Homo sapiens
tgtgtcaggaatgtgaacgacgaggacaaggagctgtaccttgtaaggtgtttcttatggtgaaccttgttgagatgtggagtgagaaaagcactgaattggaaataatggggatgaaggaagggattggaacaccaggcaggaggaaacgggaaggtgctggtaaactgcggaagcactactcctccaggactcagcacatgggcccttactggaagacagggcctaasccgtggctgagattatgacaactgctcaggaattctgacttgagcgtgttgtaaattgtggattataatcacacttcttgtttttcaactggatactgttttctactaaaaagcctgcttttaacaggtgctaaagaactacctcaaagaaaattctgaaacaaaataaaacaaagaggaagaaatcccagaaaaaatgttgatatagtttggatgtgtccctatccaactgtcatactgaaatgtaaatcccaatgttgaaagtagggcttggtgagagctgattggatcatgaggtcagatttctcatggatggtttagcaccattcctcttg

SEQ ID NO: 406256 - DNA, 612 bp, Homo sapiens
ttataatggtaagacaattagaaatctattaagtgttcagtgatgggcaatggctgtacagaacaaaggcttagcatgagaaagttcaatggagtctatgatatacacaatatgaacacaaactgtgtggcaggcactttatctatattaacctatctaattctcacaaccaaccagtgggttggaaactcttattatccttattaaagatacatagattaaaatatatgaagtaccaatggaaaagataggattttggaatgaacctcgaaacataaatagctaaatggaaaagtagggagggagaggggaaggaagatgagtatgatgtgtgamacattactagaaggatggtgaacttggtgaaagaaggataaaacagaagggcagcaaagtgatgagcaagccagagaaagacattatcataaaataagggtggatagatagagtgagattctggaggatctaaaccaggaagaggacattggaattggtgttgaaggcaataggtgagttcttgggcaggaaagttatgacaaatggatccactgggaatcagcaaaggacataaaaaatatttattgagtagttactacattagcaacattgtgc

SEQ ID NO: 406257 - DNA, 554 bp, Homo sapiens
attgggccccatagttcaagatataagattagctatagtcattgttgcaaatgtggatttgtaatggatataaatattaatttgggtaggactggcttatgaaacatgaaaagatacatttctgaaactaaaacacggagaatccatgtctaaattatagtaaattcaccaagacaatattaccaccatgggtacctgttctgtaggtgaaacttactatatcttattttctccttcccgttaatcataattatgtctaggttaggtaacagtaataaaattactatattattgtaaagaatagggaaagactgtaaccctgagtatgaaaagcaaacttggggtgagaaaattgaaaaaatgggcaagtctatgttttgcattttaaaagttraatagttctaattggcaacagcttaacagtggaaactaacatcattaattacaatttagtacgatgattgccattgtattatacaatgtgcaatgagaaaggagaagaaatgtatttaatcttcctgagggagtcaggccctaggtatacacaaaagtga

SEQ ID NO: 406258 - DNA, 564 bp, Homo sapiens
tttgttgagattctaaaatgattatatcaacttgttacactgctccaagatcacagaaagctatatttatcagaagttaccttgatacctaacataataagaggttcattatttmttcatctaaatagataggtaaattaatattccacgaattacaatacttctaaaaacaaactaatgccttttccatttttgctctaaaccatttatgcatttgagtttagcccttaaatattgcagttttgcctatggttacaatcaaatgtgctattttgactatatatatatataaatcaatcatattgtgttaaataaggccacgtataaatttgcttttggctgctcagtttaatcaaaatgaactttagaagtacttagaaattatagaagtgcaaaaataagatctgttaaaatgttatttaatttagaatacctaatcaagagggaaaacacaagcattatcttatttaaatgtagtaatcttttggtgatctcatcagtaatagtttttcacatgtagtactgaaaatttagaaaaggtgtttaagaaatggatttgtcatt

SEQ ID NO: 406259 - DNA, 633 bp, Homo sapiens
ccaatcattcttttgcagtctttgttttttcttcttcattttggattgattgtattactatatcttcaagtcagtatcttcttctgtagcayctaatctgctcctaattatatccaaaaacattgatatctttactgtgccgtgtctcctaatccatgaaaattatgtcttctcatttatttaggtattttatttccgtcctcagcattttataattttcagcatgcaaatcctctagatgttgactatatacttagctaaagttatccttttgaggggagctattgtaaattgtgttttattatttatttatacatatttttaaaatttatttatttatttattttgaggcagagtctcactctgtcacccaagctggaatacagtggcgtgatctcagcttgctgcaacctccacctcccaggttcaagtgattctcctgcgtcagtcaccagagtagctgggattacaggcatgtgccaccaggcccggctaatttttgtatttttggtagagacaggttttgtcatgttggtcaggctagtcttgaactctcccatcttggcctcctgaagtggtgggattacaaatgtgagccaccacgcccagcctaaaaatttgttttctattgtt

SEQ ID NO: 406260 - DNA, 550 bp, Homo sapiens
acacaaattcagctgtttgtgtgtgtgtgtgtgtgtgtgtgtgtgcaatttgttttgttttcttttgttgttccataatttcttgagcccttaggtgttttatagctttattttattttatttgtttcaaattgggggaggttttcagaatatttaatgaaatatatgacaaaaatgggagtctctattactttcatattcattttaaaaacaataacagatttattttccatttatcttaaggtttcataaattgctgtgttattaccatcttgcctgcagtttttgttttttgttttagtaaagagtctatggaaatttgtagatatatgtggcaaaagcaagtttccgyagcagtactaggatagaatgtcaatttgagattatggcttaccaaagtacaggcaaaacaaggttgcatccagtgtagtggctcttgtcctagagtgctgattattaaatggaacaaaacgaaacaaaaaacagggaaaacaaaacaaaagttcccaccaaaataatatggtggagagtttatgagaaaccaccagag

SEQ ID NO: 406261 - DNA, 590 bp, Homo sapiens
caaaacatccatccctaaatttttaaggtatatacacatgtctgatattgctgtcagatatgattaatttagattacttaacatttttaagaagtggatattttacattctgagtgctctttmaaagtcagtactgggcctacataacagcaattctcataatagtgattctcaaaatgtagtccctggaccagcagcatcagcttcaattgggaacttgttagaaatggagaatttctgacctcttcccagatctactgaggcaaaaatgctgggggtggggccaagcaatctgtatttttaaaagtttgctagatcatttggatgcatgtaaagcttgacaactactgatctatggcagcaaggcagagctgtgttttgtttttttaaaaaaagtgttgagttttgttctttttgcttagtattgtcttgtctatacgggctcttttggttccatatgaaatatttttgtatttatttctctaaagtattttattatatttatttctctaaagtatttatttctctaaagtgttgaggtgatggtatagactttcttctttagtctgttaacaggggaaaccattatg

SEQ ID NO: 406262 - DNA, 395 bp, Homo sapiens
accctgcagcagccatgtggcacagagtatctgtgcacttgagggagggaagcgaagtgattgtggaacttcacattggaactcagtgctcccctgtcacagcaaaaataatactgggtagaactcaataaacacccacaaaaggagcatttaggccagccctagccagaggggagtcatccatcctagctctctgaatttgagttccagcaagcctcactaccttgggctaagctgttctgggatcctaaataaactaraaagtcagtctaggccacaaggactgcaactgctaggcaagctgtaatgctgtgctgggctttgagccagtggacttgagaggcacatgacctagtgagacaccagctggaggggccaacggaatgcttgtccca

SEQ ID NO: 406263 - DNA, 577 bp, Homo sapiens
gaggaatagggcattactataaaaatacctgaaaatttggaaacagctttggaactgggtaatggagagaggttggaagagtttggagggctcagaagaagactggaagataagggaaattttggaacttcttagagatttgttaaatggttgtgaccaaaatacagatgtaaatatggacagtgaaggccaggatgacaaagtctcagatggaaatgaggaagttactgggaaatggaccaaagaccacccttattacacctcagcagagaacttggctgcattgtgtccacgtcctgtgggtctgtggaggtataaacttaagagtgatcacttaaggtatctggaagcaaaaatttctaagcagcaaagtgttcaagacatagcctgggtgcttctaatagcccacratcagatacaggagcaaagtaagacttaaagtcagaatttatgaataaaaaggaagcagagtttaaaagtttggaaagctcacagcctggccatgttgtagagaagggaagagcatttgcaggagagaagctgaagctggcttctaggcaaccacttgctagagaga

SEQ ID NO: 406264 - DNA, 563 bp, Homo sapiens
ggtggatctaccattctggggtctggaggatggtggctctcttctcacagctctactaggcagtgccccagtaaggactctgtgtgggggctccaagyccacattgcccttctgcactgccctagcagaggttctccatgaggaccgcaaacccgcagcaaacttctgcttgagtatccaggcatttccacacatcttctgaaatctaggtggtggttcccaaaccccatttcttgacttttgtgcactcacaggctcaacaccacatgaaagctgccaagacttggggcttgcacactctgaagccatggcctgagctctacattggctcctttcagccacagatgaagtggctgggacagagggcactaagtccctagactgcacacagtatggagaacctgggcccatcccacaaaaccactttttcctcctaggcctctggacctgtgatgggaggggctgctgtgaagacctctgacgtgctctggagacattttccctattgtcttggggattaacatttggctccttattacttatgcaaatttctgcagctggct

SEQ ID NO: 406265 - DNA, 601 bp, Homo sapiens
ctaacgtaaattaaggctgctaaaagtatggctgcaacaaattaaatttaagagggtgtagtcaatgaaaatattaagaacacatatttctttattttattcttatattaatttagatgctcagaaagaaatgtccctaggatacatttatttacctctctaaataaaaaaaaccttcaattaattgcktctgtgttatgctcagagttttaaacaaagtttaaggatttaccacccgaaatgtttttatttatcttctgcagatgacatgcaaaattgcctattataataccagatacatggtaaatcttgataacagtaaataaaattcagaggaattatacttgtatcatattgttaactgatacttaacaccaagaaaactaaatcctccaaagttttataggaatttctttcagggcagttgttcatatcttctacaggtaaaattaatcctttatgtttaaattcattactctccttgattctgttttaaatattattccatgtgctttggtgaagtattctagtctcctggaataattttaagtcttaattctgaaacactaaaatttactacacttcccagtatcatgaaaat

SEQ ID NO: 406266 - DNA, 601 bp, Homo sapiens
ctaacgtaaattaaggctgctaaaagtatggctgcaacaaattaaatttaagagggtgtagtcaatgaaaatattaagaacacatatttctttattttattcttatattaatttagatgctcagaaagaaatgtccctaggatacatttatttacctctctaaataaaaaaaaccttcaattaattgcttctgtgttatgctcagagttttaaacaaagtttaaggatttaccacccgaaatgtttttatttatcttctgcagatgacatgcaaaattgcctattataataccagatacatggtaaatcttgataacagtaaataaaattcagaggaattatacttgtatcatattgttaactgatacttaacaccaagaaaactaaatcctccaaagttttataggaatttctttcagggcagttgttcatatcttctacaggtaaaattaatcctttatgtttaaattcattactctccttgattctgttttaaatatkattccatgtgctttggtgaagtattctagtctcctggaataattttaagtcttaattctgaaacactaaaatttactacacttcccagtatcatgaaaat

SEQ ID NO: 406267 - DNA, 628 bp, Homo sapiens
agtctgtgtgcccccgtagcctgcctctttgctataccttgcagccttgcatctgaatayattcctttcccattgtctcaattcaagctttcatttgcccacctattcgttcatttatttggcaaatgtttctgaagaggcttttccatttcaggctttcattatcttggtgcaatgtgttttgtgcctttagtatcattcctgtaaaacatagaaaccttcctcaattctgccagaacaatgattcgaaaacacaaatctggtcctgtttcttctctactgaaagtccttctttggcttttcatagtcataaaatgtggtgttcacatattaagtgaaaagggaaagaaggtgtcaggaaactattaaaatattaataatctttcagcatctaattctaaagtagacttgataaaaaatcagacagcaaatgtcaaatctgctactcttcttccatgctaccaaagtctgaatagcttggaatggccgataacaacaataatcaatttcttcctttgttcctttcctcccatactaattaaggaaagatgaggacatatattcatatttctggtacacatatttaagttatttctaaaaattaccaggggacaatgaggagtttgaa

SEQ ID NO: 406268 - DNA, 442 bp, Homo sapiens
tcaagctttcatttgcccacctattcgttcatttatttggcaaatgtttctgaagaggcttttccatttcaggctttcattatcttggtgcaatgtgttttgtgcctttagtatcattcctgtaaaacatagaaaccttcctcaattctgccagaacaatgattckaaaacacaaatctggtcctgtttcttctctactgaaagtccttctttggcttttcatagtcataaaatgtggtgttcacatattaagtgaaaagggaaagaaggtgtcaggaaactattaaaatattaataatctttcagcatctaattctaaagtagacttgataaaaaatcagacagcaaatgtcaaatctgctactcttcttccatgctaccaaagtctgaatagcttggaatggccgataacaacaataatcaatttcttcctttgttcctt

SEQ ID NO: 406269 - DNA, 425 bp, Homo sapiens
attaaccaagaaaagagagaaaatccaaataagctcaataagaaatgaaacaggagatattacaactgataccacagaaatacaaaagatcattcaaggctacgatgaatacctttacactcataaactagaaaatctagaagagatgaataaattcctggaaagctacaaccctcctagcttaaatcaggaagaattagataccctgaacagaccaataacaatcagcgaggttgtatggtaattaaaaaattacctataacaaaaagttcaggaccaaatggattcacagcagaatgctacmagacagtcaaagaagaattggtaccaatcctattggcactattccacaacatggagaaagagggaaccctccctaaatcattctatgaagccagtatcaccctaatacccaaaccaggaaa

SEQ ID NO: 406270 - DNA, 604 bp, Homo sapiens
tggttgtgaaaatgttatcagatactgcttatgaaagtgtaaattagtaaaacctttcataaggcttttttattgtgctgcttttaactataaaatatgcctattctttgggtcataggcgcaaatataaaatataaaacttctagaagaaaacataaaagaaaaccttgtgaccttgggttaggtgatgagttattaaacacaactctaaaagcatacttcgtaaagaacaaaaaaagctgagttttattttttccacataaaaaacttttactctatgaaagacattgttaagagaatgraaagtcaagccataagtcaggagaaaatatttacagatcacgtatctcaggaagatacatccaaaatatgtaaagaatgctcagtcattgtagatagaaatggaaaatggtcagtcactttggagagaagtttcttgtacagttaaacatatgcttataatgaccctgaaacctaaagtgcattaagaatgacagaattagaagtattaatacatgcaaccaaatggataacaaatataatgttaggaaaaagaagccagacacatgagtatacatgatatgattccatttatgtaatgttc

SEQ ID NO: 406271 - DNA, 608 bp, Homo sapiens
ttttctaagtaggtaatcactaactttaagataattgaagaatgaaaaagatcctaggcttggagaagggaaattttagtgttacagctcgtggatgcacagctattttgggggatgtcaagttgcaggatgtagtcatgcctatgaggagctcaaatggagtatagatgaagactatatgtactgagaacgtcaaggtcctgtgaggccaggaatggaagatggtaaaattcctaaggaacatagctgtaaaggaccccatgagacaaatgctaacatatttgaagaaggtaggacrttgttctggaggttagctgtgcatgggaatggtgttgaaagcaaggtacttactatcctggttttaggaattttgaaaaatggcataaggaatggcctccggaggagaaaattgtcagggaaatggaattgttattggtgacctcttggtcaccactttgtttagtgaagaagatagaaagaatcaatcgaataatgttatctggcaattgggaagggatttcaatgaaaagggagagcagaggatcacggaagagatgataggggagcactagaaagaagctacaaacaaatgagaagaaaataccata

SEQ ID NO: 406272 - DNA, 343 bp, Homo sapiens
gaagaagatagaaagaatcaatcgaataatgttatctggcaattgggaagggatttcaatgaaaagggagagcagaggatcacggaagagatgataggggagcactagaaagaagctacaaacaaatgagaagaaaataccatagcaaggagtagtttgaaatcagacagccctgggtttgaattctgactctgctacttagctgcaggcattgatgcaattttagaagctttcttttaagaaaagtaatgcaaaayataaaactaaaattaggagcaaatataaatttgtattaaaaaaagtaaaaggaaatgtaaaagaaatataaaagctaacaaacacc

SEQ ID NO: 406273 - DNA, 455 bp, Homo sapiens
atccactcctttacctcacagagttataaggcagatgaattgaaagaatgcatgtaaagtgcactgttcctggcatatagtaaataatcaatggcaaataaaaatatgtaattacgagattttacaaactggtaacctcttattttgtatatttgattacagtaggtgccatcgaaattctcaaaggctatgaaggtttttgtttttgtggtggtttttatttaaagagagttagtgtgggctacttgagtactttttaccctccctgtagaactgggggcaccttggagtattataatggagagcttggaatctccaggggtgggggacagttttactgcagagcagtgagggtaaaacagctttagtccatcaggaaatcctgcctctgaaaggatgccctctyttttactctgctagttgcagcaggtatgtgggcttaaataaaagcattc

SEQ ID NO: 406274 - DNA, 472 bp, Homo sapiens
tgttgttaatgaatacaggcctgctaggccggtagctcacacctgtaatcccagcctttgggactttgggaggctgaaggcaggtgaatcgcctgaggtcaggagttcaagaccagcctggccaacatggtgaaaccctgtctctactaaaaatacaaaaatcagctgagtgtggtggcacacacctgtaatctcagctacttgggaggctgaggcaggggamtcgcttgaacccaggaggcagaggttgcagtgaactgagattgtaccattgtactccaccctgggcaacagagagagactccatctcaaaaaaaaaaaaaaaaaaagaatacaggccctttttggtgtctttctccattccttaaaaaagaggcataaattccataaccaaagtagtcttgtttggatatctttctgataataaaagcttcaaagtgaatcataaagtcttggcaaaattgagtgagtg

SEQ ID NO: 406275 - DNA, 547 bp, Homo sapiens
aaaaactgtttaaaaaattataatggggccaagcatggtggctcacacctgtaattccagcactttgggaggccaaggagggaggatcatttgaggccaggggttcaagaccagcctgtgccacatagccagactcccttcacctgcaacccttgatctctacaagaaataaaaataacataaaattgtaacaattgtgaaatagtctggattttggaactaggaaggattttagatattaactactccaagtgattttcaaataaaattaaaatctagagatgttaagtgagttgtcagagatcacagaacatttgactagaggagccaaactgkatgataagtctgatgtttttccctaaaactattaatgaaattagatatattaagataacaccatgtttcaaaacaatggactggttttccagaatcaattaaatccacatagttgagtgttcctgcattccaaattagacagcttggctcacaagtgttattgctgtcaaaagccatattatctcaagttaattttcttaatttgaaaagc

SEQ ID NO: 406276 - DNA, 547 bp, Homo sapiens
aaaaactgtttaaaaaattataatggggccaagcatggtggctcacacctgtaattccagcactttgggaggccaaggagggaggatcatttgaggccaggggttcaagaccagcctgtgccacatagccagactcccttcacctgcaacccttgatctctacaagaaataaaaataacataaaattgtaacaattgtgaaatagtctggattttggaactaggaaggattttagatattaactactccaagtgattttcaaataaaattaaaatctagagatgttaagtgagttgtcagagatcacagaacatttgactagaggagccaaactgtatgataagtctgatgtttttccctaaaactattaatgaaattagatatattaagrtaacaccatgtttcaaaacaatggactggttttccagaatcaattaaatccacatagttgagtgttcctgcattccaaattagacagcttggctcacaagtgttattgctgtcaaaagccatattatctcaagttaattttcttaatttgaaaagc

SEQ ID NO: 406277 - DNA, 547 bp, Homo sapiens
aaaaactgtttaaaaaattataatggggccaagcatggtggctcacacctgtaattccagcactttgggaggccaaggagggaggatcatttgaggccaggggttcaagaccagcctgtgccacatagccagactcccttcacctgcaacccttgatctctacaagaaataaaaataacataaaattgtaacaattgtgaaatagtctggattttggaactaggaaggattttagatattaactactccaagtgattttcaaataaaattaaaatctagagatgttaagtgagttgtcagagatcacagaacatttgactagaggagccaaactgtatgataagtctgatgtttttccctaaaactattaatgaaattagatatattaagataacaccatgtttcaaaacaatggactggttttccagaatcaattaaatccacatagttgagtgttcctgcattccaaattagacagcttggctcacaagtgttattgctgtcaaaagccatatyatctcaagttaattttcttaatttgaaaagc

SEQ ID NO: 406278 - DNA, 512 bp, Homo sapiens
aatctataaatacacataataatatagaataatctataaatacccacaataatatagacaaatttcacaaattcatgaaatttgtgaattgttgagtgaaagaagccagatacaggaaaagtatatactatatatataaatacatttatatatagtctaaaaacaggcaaaattaatcattgttgttagaatgcactgtgttamcttttgtcaatctggctacataatttgcaaggcccaatagaaaatgaaaacgtagaaacccttgttaatgtttttaaaaatctagttcttcaaatgctttccatatatcttaggttctagaatgtttaatctcacaattgtctccttaagatatattgactgtatctttagcatcagaaattttttgagatgcatgggaagaatctggtatcagaacaaaacctgatccttgaataagaaagaatttggtagaaactaacaggagcttaatataaatgataagtcttgttttatttgaaacaacagac

SEQ ID NO: 406279 - DNA, 606 bp, Homo sapiens
gctgaattgaaaataatagattcttcagcaggaacttaaatctttccaagaccagtatcccaaatttcaaattaggtcaaactaaacaaatgaggtttcactgtgtttcctcacgtacacttttgtatgcacttttcctaaccttgagagttagtaggttttactgtcagaagacatgtctcccttaagatttcagtgcagagattaaaacccytctttttctatttttctatttaaaccccctctatttctatttttctgtatttttcatagatctttttctagatctatgaaaaatacatcttattttagcagcaaagattaagggctattgccttctgtctcttctagaaacacttcattgattttgtggccattaccacaaacgttatcttgtcaggggccccccagaactgacgaagatttcaaagaaacaattctagataaatgtgagctttgagtaattgcctctttgagtcagttttgggttctgtgctgcttttgatgaagattattaaaattaaagcattgctgaagataagatttggtggccaagttctcttcagaatcattagttacttcatttctctaggaaaacaaagcttt

SEQ ID NO: 406280 - DNA, 601 bp, Homo sapiens
gagttggtatccaagatgcaagacaaagctgctatctaagatgcaagacaaagttctcctccctcttccctctcctcacctcaagtggaagggtctcttttggagccacaggctggggttagggaagtagtgatgccagcactyctttagccactccagctggtgtctcaataggtcatgtgccccacccccattcagtctgctggttctgggccaaatttaggactagaactgtcctaaaagttgcagtccttgtgccctacactgtctttgtgcagccatcagagttgtcttatttttgtgtgccttattttgtcatggttgttgttttctaagcattcagcctatgataaattaattcattgatgtattataagcctatctgtgttttacatctagtgctatagtttgatcctccaaaattcatgttgaaacctaatccccatggtaacagtattaagaggtgggggcctttgggaggtaaagaagctaaagtcatcaaattggagctcccatgatgggactggtagctttataaggagaatagagatctgaactagcacacttggcctgtgtctcgccatgtgatgcctcccactat

SEQ ID NO: 406281 - DNA, 533 bp, Homo sapiens
agtaaactatttaaagtgttgagagaataagacgaccaacatggaattctgtaccttatgaagttatccttcagaagcgaagggagaaaatccrtaaggacatagttgaactcaacagcaccatctatcaactggataaaattgacatgtgtagacaactttgtccaacaacagaagaatacacattaatttgaagtttacatggaacattcatcaagatagaccacaatctgggccataaactaccttaacaaattttaaaaatagaaatcatacactgtctgctctcagaccacaatggaattaaactataaattaataataaagctatctgaaaaatctcccaaatgcttggagattaaacaacacatttctaaataacaggtgaatcaaagagcttgcaaaagaagtttaaagatattttgaattaaataaaaatgaaaatacagcttatcaatatttgtgggatagaacaaaagcaaagtttagagggaaatttatagcagtaaatgcacgtagtagaaaagaatgaa

SEQ ID NO: 406282 - DNA, 596 bp, Homo sapiens
gagttgtaataagtattcccaagwtgttattgtgttcacagaagtttgagaaccactcacttgtaggctatcatgcaaattccttggcacaagcagccctaatgaaccagctttccagcttcatattttgatactttccacgtatcctgtattgtaattacactcagctactcatctttctgcagacatacacggaaaattctcttctgttgtctctgtatgttctagtccttcagcctgaaatattaatttgcttcacaaactcctgctaatccttgacagccagttcacatcttccagaaacctacctttttcataattatgtttctgtgccttcctgtataattcataattgcaatgtgtggagttaagtgcctacttttccctctggtggactgagtttcttgagggtgaatgtcaaatcttatccatatgtacatgactattacctagcacactgcaatcatataatacatgttgactgcatatttgcggaattaaatttttatggaaaccttgaagaatatcagaatagaatatcagcctagaatatcagagaaaggatatattaatctactccacttatttgtagattc

SEQ ID NO: 406283 - DNA, 631 bp, Homo sapiens
gacagccagttcacatcttccagaaacctacctttttcataattatgtttctgtgccttcctgtataattcataattgcaatgtgtggagttaagtgcctacttttccctctggtggactgagtttcttgagggtgaatgtcaaatcttatccatatgtacatgactattacctagcacactgcaatcatataatacatgttgactgcatatttgckgaattaaatttttatggaaaccttgaagaatatcagaatagaatatcagcctagaatatcagagaaaggatatattaatctactccacttatttgtagattcaactaaagcccagtggtattcattgacaacaaaccaactttactttggccccaacctttgttggaaataaaaattaacctaagcccagatacttttaacagaaaattgtttgtattctggattgttcattggattgcaagtttttggattgttctacaaaatttataagttcctttctaaccgatgtttatttggaatggcttatacagacccatgacatcttttcatttgattatttttcttaatcacaaaagtaatacacgctaatttcaaacagtggaacaatttaacatataaaaagtaagaaatagt

SEQ ID NO: 406284 - DNA, 585 bp, Homo sapiens
gaaaaatactgcctgataatctttttcttgtatttctctttacaaataaaaccaaataatttttttttattttgtaaaataggaacttcctcattagctaggagtataaataccagaattttgtttgctgattaaaagaaatgctacagagacaaataatgagaattcagtttcctacttgcacatattttcccccaaatatttcacaatttaatcctcataacaacttgggaggtaagctgggaagatgctattattcccactttacagatgctctacctccttctgatttagccattttcaaaataagtgagttggagactaaggattagggtccacaggaagtactgcaraattctggaaaataacaaaaattatgaaatttaaagatccagtgcattatgaatacacataattgttgtatttcactagcagtaaaatgaatgaacttaaccaaagaggtctgaggacctgtttatattcgcattctattaattataccatgagcaaatgttgtgtctactaaatgcactgttcccatttgccccgaaattttgaaacatcatacaagggggtccagtattt

SEQ ID NO: 406285 - DNA, 579 bp, Homo sapiens
ttatgtaacagccacaattccttcctcccagattgaatttctccttgaggtttctcaccagtagtgctgtccccaccctctggtctcaggaacattgtttccctaaaatatggatcaagtattacatgcttaactgtgactatataggaacttcccctaattttccagtgacataaggaactcattcattcttcatcaaatatttatttactgcctagtcctgttctagacacaggggatacagcagttaacaaaacacacaaatattccttctcacatggagtttgcattattccatacaccaagacaatttaaaaataggtttaccaaacactgtgggaaaacacaaaggaaagagacagagctggygatgtgtaatttgataacctggctcatgaatctggcttctgatttctcttcagcctttggcctacaccagagtgttcccacctagtcttgtctcaaagtgtcatgagatactgttctccaacatctaggagtgttcttaattttgaattgacttcttcaagtccagacaagtagggtgtgagacccagagatatgtcttcccaaaatcaa

SEQ ID NO: 406286 - DNA, 526 bp, Homo sapiens
tcattttttaacagcttcattgttattgattacatcatgcctctacccttcatatgttgaagccctaaycctcaatgtgactgtatttgaatttagggcctttaatgaggcaattaaggttacattaggccatgaggtagggcctagtctgatagtactggtgtccttcaagaagagaaatagataccagtgatctctctccttttgtgcatgcacagaggaaaagccaagtgagaaaacagagaaggtggctgtctataagcaagaaagagaggcttcaccaaaaaccaactggacagcattctcattctgatcttggacatctagcatctaaaactgtgagacatacatttctgttgtgtaaacctcccagcctgttttgttatgacagccctagcagatgaatatgcctattttccacattttattaattttagaatgactcttctttcttttgaaagcaactattgtgaaaagttgagagtaaaagcaagtggagatggaaagaaaatgactgagaaaataa

SEQ ID NO: 406287 - DNA, 582 bp, Homo sapiens
tgttagttgcaaattatattaggactagggcatcaacatgaatcaatctcttgttttactctttataatgtaactgtaatgaacaattaatctttgcrtgtttttttctcccagtggaattaatgcttaggcttgtgtagagctcccctccatacaataaagatatactctttttacttctgtttcaattgaactcctttataaatccttaataaaggatatgctgattatgggattaaatatttaatgttttttgcctatctggaatttctttctctgaattcaacaatagggtaagaaccctaataaaataatctcttttacagaacacctgttccaggaactacagtagtttctttatatatgggaaacaatttaatcctcatacccacacaggaagttgagcatgagtatctccattttccagataaaagactgtgaggactatgcacattgtcacccaggttggaaatgctagagctgggatcaatatccagatctgtctggcatccttttcagtctaaatacataaaagaagtatttcatggggatacagtgaggtgtcactaatatattaggtgt

SEQ ID NO: 406288 - DNA, 582 bp, Homo sapiens
tgttagttgcaaattatattaggactagggcatcaacatgaatcaatctcttgttttactctttataatgtaactgtaatgaacaattaatctttgcgtgtttttttctcccagtggaattaatgcttaggcttgtgtagagctcccctccatacaataaagatatactctttttacttctgtttcaattgaactcctttataaatccttaataaaggatatgctgattatgggattaaatatttaatgttttttgcctatctggaatttctttctctgaattcaacaatagggtaagaaccctaataaartaatctcttttacagaacacctgttccaggaactacagtagtttctttatatatgggaaacaatttaatcctcatacccacacaggaagttgagcatgagtatctccattttccagataaaagactgtgaggactatgcacattgtcacccaggttggaaatgctagagctgggatcaatatccagatctgtctggcatccttttcagtctaaatacataaaagaagtatttcatggggatacagtgaggtgtcactaatatattaggtgt

SEQ ID NO: 406289 - DNA, 506 bp, Homo sapiens
acctctcttcactgatgatatgattctacgcctagaaaaccctaaagactctgctaaaagactcctggaacagctaaatgacttcagtcaagtttcaggatacacaatcaatgtacaaaaatcagttgtatttctattaaccaataacattcaagctgaaagctwaatcaagaatgcaatctccggccaggtgcagtggctcacacctgtaatcccagcactttgggaggccaaggtgggaggatcacttgaggtcaggagttcaagaccagccttgccaacatggcaaaaagctgtctctactaaaaatataataattagctgggcgtgatgggcatgcgcctgtagtccagctattcaggaggctgaggccggtgaatcatttgaacctgagtggtggaggttgcagtgagctgagagatcgtaccactgcattccagcctgggtgacagagcaagattctgttcctaccacccacccccagccaaaaaaaaaaaaaaataata

SEQ ID NO: 406290 - DNA, 452 bp, Homo sapiens
ctactaaaaatataataattagctgggcgtgatgggcatgcgcctgtagtccagctattcaggaggctgaggccggtgaatcatttgaacctgagtggtggaggttgcagtgagctgagagatcgtaccactgcattccagcctgggtgacagagcaagattctgttcctaccacccacccccagccaaaaaaaaaaaaaaawaataataatctcatttacaatagccacaaaaaaatacatctgaccaaggaggtaaacgatatctacaagaactataaaatattgctgaaagaaatcatagatgatgcaaacaaacggaaaaacatgccacgctcatggattagaagaatcaatattgttataatggccatattggccaaagcaatctacagattcaatactattcttatcagactaccagtgtcatttttcacagaattagaaaaaaaa

SEQ ID NO: 406291 - DNA, 452 bp, Homo sapiens
ctactaaaaatataataattagctgggcgtgatgggcatgcgcctgtagtccagctattcaggaggctgaggccggtgaatcatttgaacctgagtggtggaggttgcagtgagctgagagatcgtaccactgcattccagcctgggtgacagagcaagattctgttcctaccacccacccccagccaaaaaaaaaaaaaaataawaataatctcatttacaatagccacaaaaaaatacatctgaccaaggaggtaaacgatatctacaagaactataaaatattgctgaaagaaatcatagatgatgcaaacaaacggaaaaacatgccacgctcatggattagaagaatcaatattgttataatggccatattggccaaagcaatctacagattcaatactattcttatcagactaccagtgtcatttttcacagaattagaaaaaaaa

SEQ ID NO: 406292 - DNA, 540 bp, Homo sapiens
tgccagaagataagaggtgagaaacaaagccaggtaagatagrtgttgccaataactctaaggaattggtggctagggaaagctcctcagaaagcagagcttgagataacaatttgggtgcacaggatttactgagggagtgtccttcaggacaatcctataagagaagagaaaagaagaattgtacggggaaaaggctaaacttacattagtcagggttctatggaaaaagagaacaaattgtgtgtgagtgtgtgtgtgtgtgcgtgtatgtatgtgcagagagagagatagattagaattaaagttatataaagatataaagttatctgtagataaatataaatgtttatatctctataaagacgtttttagacgctattggctcttgtgaccatggaggctgaggggtcccataatctgccatctgcaaactggagatcctggaaagccagtagtatattttaagacccgagagctgaaagccaatgttatagattccaatctgagcctaaaggcctgagaaccaggagtaccaag

SEQ ID NO: 406293 - DNA, 549 bp, Homo sapiens
tgattaagtcataagttaacaaaaaaatggctcttgagactaactcattgggaagtagctcaggttgggtggagatctaatggagtttagtcattaatatttcaactgagctttagtcacatcagcactcacatcaaccttctttcttgtgaaccacaaaaccatttattaggcgagcccttgccaagagagctatatcatctgtctgagaggctgacatttagtaggtctttgtgacatattcttttttaagwagttcaaactacaagttgaaaactgatcatgttgtggggcataggacctgctgaagaagctaggggtattagaaaaggtgggaatgggcagggagcctaaataaacatgcagagtcccagaagtcaaattagaagagtgaaatctggggagtaggaagaaggatgaagtgcagacaaatgatctgtagggggaatcagatattcagcccagattttttgactgcctcacaggtagaaacattaaagagatgcactcctgacaaagttcctaaaatcaggctcaaataaggtgctc

SEQ ID NO: 406294 - DNA, 549 bp, Homo sapiens
tgattaagtcataagttaacaaaaaaatggctcttgagactaactcattgggaagtagctcaggttgggtggagatctaatggagtttagtcattaatatttcaactgagctttagtcacatcagcactcacatcaaccttctttcttgtgaaccacaaaaccatttattaggcgagcccttgccaagagagctatatcatctgtctgagaggctgacatttagtaggtctttgtgacatattcttttttaagtagttcaaactacaagttgaaaactgatcatgttgtggggcataggacctgctgaagaagctaggggtattagaaaaggtgggaatgggcagggagyctaaataaacatgcagagtcccagaagtcaaattagaagagtgaaatctggggagtaggaagaaggatgaagtgcagacaaatgatctgtagggggaatcagatattcagcccagattttttgactgcctcacaggtagaaacattaaagagatgcactcctgacaaagttcctaaaatcaggctcaaataaggtgctc

SEQ ID NO: 406295 - DNA, 627 bp, Homo sapiens
ttattgacattctgattgtaccaaaatagcttagatttttatccaacagcaaatcacagtggaaggtgatgtgataaaagccttagcagygcatttctatttttcttttttttttctctaaaagtggatagtaaaatcaatgaaagcaagtgactatatcctttacttaataatgcttctagcattaagtcatgcctggctttgtaaagaacatttgcaaatgaaggcaaatttcctatgaggtcacttgaaaaaataggtctatctgactcggcttcatttattatttattgacttagtggttcccttattcatgcgtttattaaatacatatttacacagtgtctctcatattctactaaacactggtaaatcaaagagaaataaaatatactgcctaatataaagtcatttatagaatggtataggatacatcatatatggtacatataataagaaagaaccaactataatgtatgagcaaggattggtttgtgcaaaacagatctgcaaaaataatattagacataatatttcaagtttctatttcttcttgaacttcctgactcagacttgtttattctggcattaaaaaaaaaatcaccatatgtttatttttcgttccaa

SEQ ID NO: 406296 - DNA, 606 bp, Homo sapiens
ggtcattttatataatatctcacaggggttctcttcatcttgaatttgaatgtcggcctctagcgagattggggaaaggttcatgaactgtattttcaaatatgttttccaagttgcttgctttctcttactctctttcacagatacaaataagacatagatttggtctctttacataatcttatatttttcagaggctttgctcattcctttaaactgattttctttatttttttctgactgagttatttcagagaactggtcctcaagctctgagattctttcctcagcttagtcaattctgctgttaatactagcaattatattatgaaattcttgaggtaagtttttagctgtatccgatcagtttggatccttcttaaaatgacaattttgttttcatcttctgtatcattatattgtactcattagattccttggattggttttgactttctcctgaatcttgatcatstttattcctttccatattttgaattctatttctgccatttcatccatttaatcctggttaaaaaccattgctgggaaactggtgcagtcatttggaggtgagatgacactatggctttttgcattggtaga

SEQ ID NO: 406297 - DNA, 433 bp, Homo sapiens
ctggttctttctcatctgtatgggataatgttcctgcagtctttgaagttgctatcctttggatggaatttttttttttttttttttttttggctcttctttgatgctcttgggggtttgattgtggtgtaaggtgggtttggtcaagtggctttgtttctggacgattttagggggccaaggctcagctcagaaatcctgggttatgtgctgtagctgtagggtgctggtactgggccccaggctttgttctctggcccctttaggttaggaacatgctgtactaaaggggctgtgttgttcccagtccactggccataacactttgakgggtggtggcagtgagatccatgctcactcatgcatgccagcagctgtggaagtgtggccaggtgcataagcattggctggggtgagggactgactgtagtgg

SEQ ID NO: 406298 - DNA, 686 bp, Homo sapiens
gtagctaaattgtggatttctgtaagaaaatataatacagtaatgtaaataagtgaattacctaaacataatattgaaggaaataaagcaagacacaagagagtatatgctrtgattccatttatgtgaagttaataaagagtcaaaactaatgtatggtataataaacacactttaataaggatgaagggtcatgaccaaaatgggcctaagagaggccattatgttcttctaatattctattcttgatctggctttttaaaaaaaatcactaaatgtgtttacaatttgtgaaaatttacccttatgaattgtgcacttttctgtatatatgtgatagcacaaaaatgaagctagagaagtttaagagagctccaaatgattggtagaagttggtgagtcttaaggaattcctactcctacactggaaaaaaaaaaatgcacgtaaactaaaagtagggaggcctgttgttaactagggacattctggacccaaatgttatgtgaaaacagccaaaggctgtcagctcatttttatcacagacaggcaggcaggccatttgtgtataaaaaagcacagtccttgaataatcatcacatttccttgttttacaaatgtagaactatcactccaacagtgaaggtgatgacagcagtcacttttgttactgttgttgttttattgt

SEQ ID NO: 406299 - DNA, 686 bp, Homo sapiens
gtagctaaattgtggatttctgtaagaaaatataatacagtaatgtaaataagtgaattacctaaacataatattgaaggaaataaagcaagacacaagagagtatatgctatgattccatttatgtgaagttaataaagagtcaaaactaatgtatggtataataaacacactttaataaggatgaagggtcatgaccaaaatgggcctaagagaggccattatgttcttctaatattctattcttgatctggctttttaaaaaaaatcactaaatgtgtttacaatttgtgaaaatttacccttatgaattgtgcacttttctgtatatatgtgatagcacaaaaatgaagctagagaagtttaagagagctccaaatgattggtagaagttggtgagtcttaaggaattcctactcctacactggaaaaaaaaaaatgcacgtaaactaaaagtagggaggcctgttgttaactagggacattctggacccaaatgttatgtgaaaacagccaaaggctgtcagctcatttttatcacagacaggcaggcaggccatttgtgtataaaaaagcacagtccttgaataatcatcacatttccttgttttacaaatgtagaactatcactccaasagtgaaggtgatgacagcagtcacttttgttactgttgttgttttattgt

SEQ ID NO: 406300 - DNA, 544 bp, Homo sapiens
ttaaagtaatattatattttcacaatctcggccatgaccctaactacacctcagcagtggtagagtaattgttgaaagcaagaaggtgggaatgtcttttgttatccttcaatagataagatgtcaattcttaaatatgtcttgtgtgtgtgcttttcgttactccaattagtatttataatgtgagtgaagctgcattcttgagacctgaagtggcagttacaactaaatcatgaccttccttcagttttatactycaattacactttatatggaggatataatttcacatttggtaacacttgggagattaaccaacacactcatttatgatactttactcatccaaactcacatcctgctattaagttgtaggtacaaattcaccaggaacccaattcttatccaaccattcgttcacttatttaacacacatgctatgtagacaacatactgtgttgggcactttggcatgtattatttcatttagatttctaccaccaacttcagaacttcattagtagcattagagtaaaataataat

SEQ ID NO: 406301 - DNA, 588 bp, Homo sapiens
gtaaaaatggaaagaaaacagcaagaaattagtctggtacttgtaggaatttagacctttggcaggcttggagcttaktcctgatgagagatggtaaagctaagtgtatactgggaaactcacctttgacttgcccagaaataaatttcctaggattggttttgcacagtctctagaacctagtggatagaaaggtgtttagccagagtttccaaattgtaaatcttccactagaatggaaaagtggtagttctgattatgttcaggattttattccaccaagacagaatcattggcagccgggcatctcagagagaactgattatacattagcttacacattctgtgagagaaggtcgtatgccagacttttcttcaagtattctgaaccacaatataataatgccagtactaaggaagtgataaagaaacaaccactgaattttcttgacagaaatgaagagttgattatgtaatcttttgtgagcattatggtaaggttctccagctgcctatctttgccctagggctttttgacttggcctttttgtgaaagcaacagaacttagttggacagaagctccagag

SEQ ID NO: 406302 - DNA, 196 bp, Homo sapiens
caacaaagcaatgacaaatgagtcatttaatttatatgaaatattaatgaagtagttaattaaaaatgaaaaactagagkatggccacagcatggtagtatgaaaaataaaaataaaacttcacaaaattcttgcaatatatacactggttttgaaaaattattaataaataaatattgcacccataaaatgggca

SEQ ID NO: 406303 - DNA, 554 bp, Homo sapiens
  misc_feature (1)...(554): n = A,T,C or G
ttaaataaaatataacactgtatagtcaagcaacaaaattctacacagtttaaaaagtgtgctacattggtatttactgttatcagtagatcttcaaaatatattataaaactgtaaaagcaaggtatagttacactgggtgatctggtgatcttttttgcataggtaaactgtgtgtgtgtgtttgcacatgtgtgcatattatattacttgcatattttaactaagagttaagaatattttggtacttttttgttatgtttctaatgttattggggattggataatgagaaactattttttaaatacaaactttattttttagagcaattttgggttaatrgtgaaattaagtgggtagaacagaaatgttccacatacccactgccccaaaacatgacgagccttctcaccatcatcctcctgtaccagaacgttacatttgtcacaatcaataaacctacattgaaacatcattatcactcaaagttcatagtttacactaggatgtactcttggtgtgtatgttntgtgggtttggaacaaaagtataa

SEQ ID NO: 406304 - DNA, 471 bp, Homo sapiens
  misc_feature (1)...(471): n = A,T,C or G
nnnnnnnnnnnnnnnnnnnnnnnatttttagagagattcatcattgatgatctcaaaattctattgactaagacacacaagacatttaaatgggtctctaactctccataggttactttctttatttaaacattatctaagtcactatggatagcaggatctaatctgcaaggaatgacaatttttaattttttcttttcattcaatacacaaatccaagcatcaaaatacacataacaaaataaaatattaaactgaaaatttgagtcccctcatctcccacatctcctcaggyagggcaggtcactaactaataacctactttattcctaactcttcaatcacttattgtgtattcatacttgtcattactcccctattttaactgcaaaatataaaagtagtattgaaatggtaggacaaataccctagaaataagaagagagaaacctctcccttgcagacaccaga

SEQ ID NO: 406305 - DNA, 402 bp, Homo sapiens
aacattaacatatttgacctattgcatctaactcagctcaatgggttcaactaaaatatagtattccctgtgccctaaaaagtaatacagatcgaatcaattagagaaaagtacaacaatttttttagattggctctcactatgttgtccagactggccttgaactcctgagctcaagggatcctcttgcctcagcctcccaaatagctgagactacaggcacatgccaccacacccaactacaaaattataatttaaatgaggaattttattaraatatagtgttgtgggacaatcaaagaatggagagaccaaaaaacgttcaggagggtttattaaattaaggtgatcactgactcagccagacatatgtccagaaagtctgagcctcaaacaaagtgc

SEQ ID NO: 406306 - DNA, 602 bp, Homo sapiens
taggaggaaaaggaaccagatttggtgaagagataacccatcttgtccacaacatatccatattttatgtcagttcactggctctgtcaaggcagggtgagagttttactcacgtttatctgccacttagtttaatatagaaactggagatwatagcagttcaatgagtgtgcaatttaatgggttttttgttttgaaatttaattggaattatttaaatattctctaattttaatcatgggaaatgcacttctagcaaggacttgcaatggacaaggttaccctaacacaaagaagagatggcagatggacaaagtggactaggtatggaacagatttttcctgaggctctataaactgtgaaaaagccctgctttattttaactcatcatgtaaaaggacacatatgtttagctaggttagatcagacagaatatggtctgtcatctgccatgatcccatgcagtgtgatggagaataatccaagatgacactagtattgccactatattcatacttagaataaatactttgaacagataaggcattgtgtgtatgaggagggtatggggggctgttcaacattaaaaaattgctattag

SEQ ID NO: 406307 - DNA, 533 bp, Homo sapiens
acatggaatatcattttccatctctttattttcaggttaygtgtatttttataggtgaagtgtgtttcttctaggcaacagatcattgggtcctgttttctcatccattcacccactctatgtcttttgattggagagtttagtctatttatattaaatgttattattgatgagttaaggactgattcctgtcattttgttatttgttttttggttgttttgtgatcttctttcctttcttcctgtcttccatataatgaaggtaattttatctggtgatgtacttcactttcttgctcttttttttgtgcgtatccattgtatgtttttagatttgtggttaccatgaagctttgcaaatagtatctcatatcttattattttaaactgatgactccttaacactgattgcatgagcaaacaagcaaataataaaaactaaaagcaaaaagaaactaaaaaatctaaaaaaaagaaacaaaaagaaaactaatagaaatgctactctttaacttcatctccctgctttataa

SEQ ID NO: 406308 - DNA, 389 bp, Homo sapiens
ctcctgctctcttttggtttccattaacatggaatatcattttccatctctttattttcaggttatgtgtatttttataggtgaagtgtgtttcttctaggcaacagatcattgkgtcctgttttctcatccattcacccactctatgtcttttgattggagagtttagtctatttatattaaatgttattattgatgagttaaggactgattcctgtcattttgttatttgttttttggttgttttgtgatcttctttcctttcttcctgtcttccatataatgaaggtaattttatctggtgatgtacttcactttcttgctcttttttttgtgcgtatccattgtatgtttttagatttgtggttaccatgaagctttgcaaatag

SEQ ID NO: 406309 - DNA, 635 bp, Homo sapiens
ttctaaatacatttcgtatcttaaagggatccagacttttgaagaagcaaacgattccatgtctaggacctggacagcatgaagtaatcctggaacatcttctctagaaagcaagaaaaaagtatcagagcataggatacagacaaaagacagtgcctccaccagcaaarttagtacactttgagcacagtgatggattacaatatactgggataggggagggaaatctatgagtggtacccaatgaaaaaatggtagaattacaaaatcaccattttaatattggaatctgatcattaattcatgcagtgttcatcaatagaagaacaaaaagctgggtaaatgttggggaatagaacagtcatacaacttcaaagtaaccatacattacttattaaaaataaacatgttaatataatgcataattagaaactcctatggagagatctggagagagacaaccttaactaagtgattgtctgagcatcacccattatccaacaaactgaaatctcattgctttctgatgggatgcaatgggaagtacacaacattatctgtgcaatatttttttgcaacaaatctttaacctgaatctaatcatgaggggacaaaaagacaagtccagatgtggg

SEQ ID NO: 406310 - DNA, 533 bp, Homo sapiens
acatggaatatcattttccatctctttattttcaggttatgtgtatttttataggtgaagtgtgtttcttctaggcaacagatcattgggtcctgttttctcatccattcacccactctatgtcttttgattggagagtttagtctatttatattaaatgttattattgatgagttaaggactgattcctgtcattttgttatttgttttttggttgttttgtgatcttctttcctttcttcctgtcttccatataatgaaggtaattttatctggtgatgtacttyactttcttgctcttttttttgtgcgtatccattgtatgtttttagatttgtggttaccatgaagctttgcaaatagtatctcatatcttattattttaaactgatgactccttaacactgattgcatgagcaaacaagcaaataataaaaactaaaagcaaaaagaaactaaaaaatctaaaaaaaagaaacaaaaagaaaactaatagaaatgctactctttaacttcatctccctgctttataa

SEQ ID NO: 406311 - DNA, 533 bp, Homo sapiens
acatggaatatcattttccatctctttattttcaggttatgtgtatttttataggtgaagtgtgtttcttctaggcaacagatcattgggtcctgttttctcatccattcacccactctatgtcttttgattggagagtttagtctatttatattaaatgttattattgatgagttaaggactgattcctgtcattttgttatttgttttttggttgttttgtgatcttctttcctttcttcctgtcttccatataatgaaggtaattttatctggtgatgtacttcactttcttgctcttttttttgtgcgtatccattgtatgtttttagatttgtggttaccatgaagctttgcaaatagtatctcatatcttattattttaaactgatgactccttaacactgattgcaygagcaaacaagcaaataataaaaactaaaagcaaaaagaaactaaaaaatctaaaaaaaagaaacaaaaagaaaactaatagaaatgctactctttaacttcatctccctgctttataa

SEQ ID NO: 406312 - DNA, 641 bp, Homo sapiens
tggtaagtttacaaggaggaaaattaaaatcagattggatagtatgggaggtttcccaaagaaggtggcataactcaaatactgaaaggcatattgagattgatgagaggaaggggctttgtagaaaactgtatcaaacagatcaggcaagctggaagaaatggtacagctaaggactgcaagggggatgaagccatatcatagaaagccttgtatacggaatgattctgactttrcaatatgtgcaatgattgggaagaatgagattaaaaatggaagtttttaattcagagctgatataatcaaccctttgacatttggaaaagacaactggctagtatatagagcagtattttccagacagcaggtctgagcctgcttcagatcaatgtagtaagtccaggccagcataatttttaaatgaaatagaataaataaaatgagatcacctatatcaaattggatcatatactggaggactaaatatcactttgtgaaattttgattctatatatattacgagtgtgtgtgcctgcatgttaatgactcagatgcaaaatttctgaatgtaaacccatagcaactgggaaaaaatgaattggcgagacaaagtgcagtgataggaagactaggaacaaagt

SEQ ID NO: 406313 - DNA, 641 bp, Homo sapiens
tggtaagtttacaaggaggaaaattaaaatcagattggatagtatgggaggtttcccaaagaaggtggcataactcaaatactgaaaggcatattgagattgatgagaggaaggggctttgtagaaaactgtatcaaacagatcaggcaagctggaagaaatggtacagctaaggactgcaagggggatgaagccatatcatagaaagccttgtatacggaatgattctgactttgcaatatgtgcaatgattgggaagaatgagattaaaaatggaagtttttaattcagagctgatataatcaaccctttgacatttggaaaagacaactggctagtatatagagcagtrttttccagacagcaggtctgagcctgcttcagatcaatgtagtaagtccaggccagcataatttttaaatgaaatagaataaataaaatgagatcacctatatcaaattggatcatatactggaggactaaatatcactttgtgaaattttgattctatatatattacgagtgtgtgtgcctgcatgttaatgactcagatgcaaaatttctgaatgtaaacccatagcaactgggaaaaaatgaattggcgagacaaagtgcagtgataggaagactaggaacaaagt

SEQ ID NO: 406314 - DNA, 584 bp, Homo sapiens
ttttggttcttatgaaagtgcttttttatgcagatagttgttaaatttggtgttcctgcaggggggatgatcaatagaggcttctatttggccatcttgctcagcctcccccatctgttgaaataatttaaagtggactaaataaatggaaagatattccatggtcatgtatcagatgacttaatattgttcaggtggtaatatacccccaaattaacatacacattcaatgcaaatcccagcaggcttctttgcaggaataggcaagctgattctaaattcattttgaaatttaagagatccaaaatagccaaaataatgttgaaaaaagaacaaagttggaagactcatactttctgatattaaaacatattacaaacctgtagcaattaagaaagcatagtgctggcataaggatagacatatagatgaatggtatagtagtgagagcccagagacaaactttagttttacattaaattgattttcagaaagatcgccatgataattcartggggaaagaataatcttttcaacaaatagtgctgggaaactttattcacattcaaaacactgaactccca

SEQ ID NO: 406315 - DNA, 405 bp, Homo sapiens
ggaaccagtcatggcaggattcatcatgtgccaactgaagaacacttggaccttaagcataaaagaaatgtaaattaaaatgctatagcttaaaaacaygaggatagggttatacatcaaccccacctttcctttcatgttctaggatagaactaatgctttattcttgttaggagaaagtatacttacttacacatttgatgcttttttaaatttaaggttaacaactaaagacacacacacacacacacactccacatcattagagaaaaattttacaaaaatcaacttaaaagaagctggagaattaaacaaaaaaatatctgttactgatggtgtaagtccaaatatatctgtggttataattcatacaaatggattaaaatcaccaaataaataaaaatt

SEQ ID NO: 406316 - DNA, 601 bp, Homo sapiens
gtacattttctgaacataaatatagcaagaaatgtattgtatctatagaaagatagaaactaagcttcaaaatattatagaagaacataaaagaagaaaaataaatgcaaagctatttgagtaggaatgcaaaattttctacaaattaatctgtatattcagatgtaacagaaaggttttgaaatgacaaagtgttaaaatttatctgataaaatcatcacttcaaaacatccaagaaattctggaaaaaarttataaatattaaatgggagtgagaagctacaagagtaatagaatttgatgctagaatagaacaaagagatcaatagagtagaaaattcagaaatagactcaaatacacatggagaatttaatgtacattcaaggatttgatgcaaattagtaggagggattatttagtaaatattatttgagaataaaattggctaatcatttgcaaaagagcagtgcattcctatctcactcttggagcaaatgcaaaaagccccaaagagtacatagaataatagtgagcattcatgtacccatcttctggcctaaatcatcataaccttggtggaagctttccgtgcccctccca

SEQ ID NO: 406317 - DNA, 531 bp, Homo sapiens
taagcattatcttaatgctggtgtttaacattctcatgaatccttttataattccacaatataagtatgtacagtattcccccttatctctggtttgccttcacagtttcagttacccaaggtacagtacaataagacattttgagagagagagaggctacattcatctaagttttattacaatacattttataattgttctattttattatgtttgttaatctcttactgtgcctaatttgtrcattaaactttaccatatagttgtttgtataggaaaaatatatagtatgtacaggattcagtactatacatgattttaggcatacactgggggtcttagaatgtatcctccacagataagaaggagctattgtattcctaaacattttttacttttatttttcatgattaaaaccatataaacatcacattacattcaacttactttttcatttaatatagtatctgtaagtaatactctgattcattgattttcacaggtttatagtatttaattttatggctgca

SEQ ID NO: 406318 - DNA, 558 bp, Homo sapiens
ataagtcaacagcatgagttaagccaaagacagctaagaagccctgagcaagaactgccaggactgtaatcaatatgttacctctgacatttacaaacaccctttagaagcaaaacactattttaaaaccttttaatgtcatttatgaagttggcttgccctttaaatgtctttcattcctcttgagaattaaatcagtttcaatgaggacccttttttgattatttgaacagcagttgggggtaaggagcaaaagaagaaggctcttcacctgcttgtaatagcctattgtcattgtgattgccaacctttcaactcttccmctgtccttaagaattcataaaagagtgacaggtgacagcttccttctcggatggaactccttgcttgagaatcaaatgggactggaagtcgatgcagaggaggctttttatgagcatggctttgagagagccatggccctgccattccctggcacacaggagatacctatcagttggattcacagaggcatatcctccctcttaatgtagtctgcagacatgaggatccttctgg

SEQ ID NO: 406319 - DNA, 558 bp, Homo sapiens
ataagtcaacagcatgagttaagccaaagacagctaagaagccctgagcaagaactgccaggactgtaatcaatatgttacctctgacatttacaaacaccctttagaagcaaaacactattttaaaaccttttaatgtcatttatgaagttggcttgccctttaaatgtctttcattcctcttgagaattaaatcagtttcaatgaggacccttttttgattatttgaacagcagttgggggtaaggagcaaaagaagaaggctcttcacctgcttgtaatagcctattgtcattgtgattgccaacctttcaactcttccactgtccttaagaattcataaaagagtgacaggtgacagcttccttctcggatggaactccttgcttgagaatcaaatgggactggaagtcgatgcagaggaggctttttatgagcatggctttgagagagccatggccctgccattccctggcacacaggagatayctatcagttggattcacagaggcatatcctccctcttaatgtagtctgcagacatgaggatccttctgg

SEQ ID NO: 406320 - DNA, 549 bp, Homo sapiens
gggtgcacctgattcggagaaggaccatgggcagcacctgatcccaccttagatgagtttcttggcaaaacttctttaacagctgtttgagtgtctggttcattctttcaacttttgagaactctgtgggcgatagataagctgttggcagtttccatttgatttttaacatctgcgttagctgttgtactatttttgccacaaatgctgggccattgtctggtcctaaagttagaggcagtcaaaatctaggaataatgtcctttaataagattctggttacttcccgaactttctctgtcctggtgcgaaatgcctcggcccaccctgagaaagtgcagacaaacattagaatgtaccggtaacctctggctcgaggcagctaggtaaagtccacaagcaggttttcacagggtgtagctccagtttcttgaatccctgggggccatgttggcccctgctgtggattgttttgggcacaagttaaacattgctcacaaasagctcgagtgatggcagttaggcacggcacatagaaatgccatccta

SEQ ID NO: 406321 - DNA, 540 bp, Homo sapiens
gtgcttcctcaaaaaaatggttggggagcatttaaatccttgggaggcctggtccaagtatactgtgatgagctccactcaaaggcaaagatgccctggctttcaagagctagtcaaatgcagaataatgcatcctttatgtataagcacataaacccagcagcatcagcaggaatttgcccaagcattgtatatgggttgggcacaatggcayataatgtagctgcaaccttatttactgcctgcaaatcctgtagtggccggtaatccccagagggctttaacaccagtagcaatggagtgttccaagaagaggcacatctttctattatccaaatttaaggagccagtctatatgctttataatcccatgggtggcttctactggcatgtgatactgacagattcacactgggtaattgccccgcagcagttccaccactacggacgcctgatttatggctagccccaggggattgtcttctgcccagacccctggcagcttgagaaataattcctcatatattgcctcatttcccc

SEQ ID NO: 406322 - DNA, 519 bp, Homo sapiens
caaggtttaataaaagagctcctgctatattcatttacatcactactgctttccacaaagagccagaaaacatgagaatgacatagagtgaaataggatttttctttcttcctagcaacaaggatggkctggtgacaacgtgtatcacttgctagaaaggaaaataggcttgaggtgaaagaatgtttgggtttctacaaacaccttacaggcatggcatatagtatgtgtagtacattaccatgatgacttggtttttagtcatctcctgtgtctttgttttgttccatatgacactgcagtttctctcactaaactgagagggtctactttcctatcctttgaatttgaactaatctgtatcttgctttggccaagagaatgtggcagaagttccagtgtcccaattctgggcctgcatctagaggctttatgtgtctctatccgctttattgagcctctgccatcacaatgaaaaaaacactgtgaggctatcccagtggagaataaaagacacac

SEQ ID NO: 406323 - DNA, 540 bp, Homo sapiens
gtgcttcctcaaaaaaatggttggggagcatttaaatccttgggaggcctggtccaagtatactgtgatgagctccactcaaaggcaaagatgccctggctttcaagagctagtcaaatgcagaataatgcatcctttatgtataagcacataaacccagcagcatcagcaggaatttgcccaagcattgtatatgggttgggcacaatggcatataatgtagctgcaacctyatttactgcctgcaaatcctgtagtggccggtaatccccagagggctttaacaccagtagcaatggagtgttccaagaagaggcacatctttctattatccaaatttaaggagccagtctatatgctttataatcccatgggtggcttctactggcatgtgatactgacagattcacactgggtaattgccccgcagcagttccaccactacggacgcctgatttatggctagccccaggggattgtcttctgcccagacccctggcagcttgagaaataattcctcatatattgcctcatttcccc

SEQ ID NO: 406324 - DNA, 590 bp, Homo sapiens
tgaaaaaacctggcttctcaaattcttacgtgtgaaatcagagctattaacttctaatttatctataatgttcctgtggttctctttaagctgaactcttcttttttgaatggggtacgttcttcagtttcaactgaaatattcagrcaataccactatgttttggatggtttgttagccagcaattccataattttgcagctactaataggaagcaaagaaatccattctgagttatacttcagagctctttaatggtcagaaggcatcttaaggatggacgaaagaagaaagtaattagtatgaataattcccaaactgaataaacaaagcttagcagattacaagtttttattttccttgtctttacattagccttcaggctgccttaccaaattatgttttgctcggttgatgtgtagttaagagaaaggaaatgagcactagaataagcaaaggatgccagcagaggaagacactttgaagtctgttcctggagtacaacttcttttgtcttcgaacattactatagtttgatcaccatctagatgaaagctagtgtcacatattcaaagttaacgtgttaatcc

SEQ ID NO: 406325 - DNA, 439 bp, Homo sapiens
ctataatctgattcgacaataaaaattacctaaatgctgaaaaggtttagggtatgacagaatggaataaagtataagatcattaggtgacaggaggtcaaggaactacatttatttccaataataaatggctcaccaaggattatgacaggagcagtggtagagctaagcgctaaaatcatcaaagaacggagcgtttggtactggagtttataggtgactgcaacaaagaaggtagttggtactgtatttctgtgtctggaatttattccttcttgtgggttcttggtcttgctgacttcaagaatgaagccgcagaccctcatggtgagtgttacagctcttaaagatggtgtgtctggagtttcttccttcyggtgggtttgtgatcttgctgagttcaggaatgaagctgtggacccttgcaatgagtgttaca

SEQ ID NO: 406326 - DNA, 571 bp, Homo sapiens
aaagcggaagctggttccaggcaaaccaatgctcccaactctgaagagttgggggttgttagagagccctttcccagaaaatctgacacctgtgtctttagtccagtagctatgctatttgcttttmactggctgacatgtgcctggtatttagcccccaaattctaaggaaaaataggacggaatagcaagtgaaaggggtccgatggtactcactgcttggtgataggtgatagtcctttcatggtctccaaaatatgtccagaatttattccttcttgtgggttcttggtctcgctgacttcgagaatgaagccatggaccctcgttgtgagtgttaaagctcttaaagatggtgtgtctggagtttgttccttctgatgtgcagatatgtctggagtttctttcttctggtgggttcatggttttgctgatttcaggaatgaagctgcagacccttgcaatgagtgttacagctcataaaggtagtgtggacccaaagagtgagcagcagcaagatttattgtgaagagcaaaagagcaaagcttccacagcgtggaaggggaccca

SEQ ID NO: 406327 - DNA, 565 bp, Homo sapiens
tctgcccacaaatccttgtcactgactgcttttcaggagtacccaaattaagatagttagtgtcaggagtgactttagaaatcaaatgcttacaatgaaattgagcccaactkcccacagcagtggactaaggaacatgacttattgtcttttcctccttccttcattctctcctgttctcactcctcctccttggatcacctcctgagtcaatgttggacacgagttcttactcagggtctgctattggtggaaacccaaacttagggactgagcaggagtaataagagaaatggagctggtagtttcgcataagtcaaaggatagacaaatttcaaaaacagtaattagtaacatcaaaagctatagagaggttaaatgagatgagaactagcccgggggtggtggctcatgcctgaaattccagaattttggagcagagaggattgctttagtgcaggggtttgagacgagcttgggtaacttggtgaaaccccagctccacaaaaactacaaaaattagccaggcatgctggcatgcatctgtagtcccagctactgtggt

SEQ ID NO: 406328 - DNA, 605 bp, Homo sapiens
taagcttctctaaattctggagtttgctatgcatgttagaagaatattgaaacaaaatacaggctgagtgtggtggcttatgcctgtaatcccagtactttgggaggctaaggcggacggatcacttaaggtcaggagttcgagaccagcctggycaacatggtaaaactctgtctctactaaaaatacaagaatcagccaggtgtagtggcgtgtgcctgtaatcccagctactcaggaggctgaggcaggagaatcacttgaacccaggaggtggaggttatagtgagccgagatcatgccactgcactccagcctgggtgacagagtgaaactgtgtctcaaaaaacaaacaacaacaacaacaacaacaacaacaacaaaaatccaacaaaatacattggtaaaggttttgattcatttttggcgtcgagtaatgagggtaaggaaacttattatttattagaaggatccagaaatggcagactcaatgaataaaaattattttgctggtgttaaaatgcatgttctttagaattttattttaatctttaatttgaaatagtcttttccttcacaatgtctcagacattattgtcgatgtc

SEQ ID NO: 406329 - DNA, 605 bp, Homo sapiens
taagcttctctaaattctggagtttgctatgcatgttagaagaatattgaaacaaaatacaggctgagtgtggtggcttatgcctgtaatcccagtactttgggaggctaaggcggacggatcacttaaggtcaggagttcgagaccagcctggtcaacatggtaaaactctgtctctactaaaaatacaagaatcagccaggtgtagtggcgtgtgcctgtaatcccagctactcaggaggctgaggcaggagaatcacttgaacccaggaggtggaggttayagtgagccgagatcatgccactgcactccagcctgggtgacagagtgaaactgtgtctcaaaaaacaaacaacaacaacaacaacaacaacaacaacaaaaatccaacaaaatacattggtaaaggttttgattcatttttggcgtcgagtaatgagggtaaggaaacttattatttattagaaggatccagaaatggcagactcaatgaataaaaattattttgctggtgttaaaatgcatgttctttagaattttattttaatctttaatttgaaatagtcttttccttcacaatgtctcagacattattgtcgatgtc

SEQ ID NO: 406330 - DNA, 533 bp, Homo sapiens
tgggaggagcagcagaaaaaagatcaattacctctctaagtaatggtaattaataattctaaggaaaggagaaagtactgtacttacagtaagacagtaatataacccttttcttactcattttggatttagctaggatttatgtctcaaaccctaaggcctggaacaccagaagaggtgttaggcacacacttggcaatgcctgacatttaccacttagccttagggyctgggagataaaaggaaccagtgaagaatgtgacacaatagtgatcatatgcccaaactagggaaatggccacttctctacttgttttttgcctaatggaatgtgtgcttgtgttgtttgatattctgtatttcaagagaacctagacacacagatgtttaagtgaaatctctagagcttccacatatgttcaagatctctccctcctttctcctttcctgccttccttccttttatgtaccttccttctttttattctttcttttttactatttaacatcaaataggtcaaagttaaatgctg

SEQ ID NO: 406331 - DNA, 533 bp, Homo sapiens
tgggaggagcagcagaaaaaagatcaattacctctctaagtaatggtaattaataattctaaggaaaggagaaagtactgtacttacagtaagacagtaatataacccttttcttactcattttggatttagctaggatttatgtctcaaaccctaaggcctggaacaccagaagaggtgttaggcacacacttggcaatgcctgacatttaccacttagccttagggcctgggagataaaaggaaccagtgaagaatgtgacacaatagtgatcatatgcccaaactagggaaatggccacttctctacttgttttttgcctaatggaatgtgtgcttgtgttgtttgatattctgtrtttcaagagaacctagacacacagatgtttaagtgaaatctctagagcttccacatatgttcaagatctctccctcctttctcctttcctgccttccttccttttatgtaccttccttctttttattctttcttttttactatttaacatcaaataggtcaaagttaaatgctg

SEQ ID NO: 406332 - DNA, 533 bp, Homo sapiens
tgggaggagcagcagaaaaaagatcaattacctctctaagtaatggtaattaataattctaaggaaaggagaaagtactgtacttacagtaagacagtaatataacccttttcttactcattttggatttagctaggatttatgtctcaaaccctaaggcctggaacaccagaagaggtgttaggcacacacttggcaatgcctgacatttaccacttagccttagggcctgggagataaaaggaaccagtgaagaatgtgacacaatagtgatcatatgcccaaactagggaaatggccacttctctacttgttttttgcctaatggaatgtgtgcttgtgttgtttgatattctgtatttcaagagaacctrgacacacagatgtttaagtgaaatctctagagcttccacatatgttcaagatctctccctcctttctcctttcctgccttccttccttttatgtaccttccttctttttattctttcttttttactatttaacatcaaataggtcaaagttaaatgctg

SEQ ID NO: 406333 - DNA, 566 bp, Homo sapiens
acctctctccatgtgtatctttcctcaatgttttccttccatttttcattctctctgaacccttctgtcctttttcttcttcagttttctttctttcacgtactaatagagctaacgcataaacraagtatttgttttgcttattgaatacaaattttagctctcaatttatattctttctaaaagaaaaagatcaatttttatgtctttaaattgtaagatctttaaaaatctatcataaatatcactatatttcactgtctccagtatgaagcaatgtagcatgggcccttgtataggacacgtaggttttaccttataaacacttaatgaatttaattaaatattttttattggtgtactgatttccaccccatcaccaattttacctcttaattttaacacacatgccacaccccacatgcaggcacactaaaagggtgcactaatgatggtgttgttagaccctgtttagacttaatgatgaaatcatcatgggtaggaaaactttttttctgcctcaaatgataacaaagggtagctgaccatttctcctatgtattgag

SEQ ID NO: 406334 - DNA, 566 bp, Homo sapiens
acctctctccatgtgtatctttcctcaatgttttccttccatttttcattctctctgaacccttctgtcctttttcttcttcagttttctttctttcacgtactaatagagctaacgcataaacaaagtatttgttttgcttattgaatacaaattttagctctcaatttatattctttctaaaagaaaaagatcaatttwtatgtctttaaattgtaagatctttaaaaatctatcataaatatcactatatttcactgtctccagtatgaagcaatgtagcatgggcccttgtataggacacgtaggttttaccttataaacacttaatgaatttaattaaatattttttattggtgtactgatttccaccccatcaccaattttacctcttaattttaacacacatgccacaccccacatgcaggcacactaaaagggtgcactaatgatggtgttgttagaccctgtttagacttaatgatgaaatcatcatgggtaggaaaactttttttctgcctcaaatgataacaaagggtagctgaccatttctcctatgtattgag

SEQ ID NO: 406335 - DNA, 564 bp, Homo sapiens
ctattttaaatagcacttggatgaacatatgagtgcatgtgtcctcttagtagaatgataatttcttttgagtacatactcagtaataagcttgccaggtcaaatggtagttcaacattcagttctttgagaaatctccaaactgctttccaaagaggctaaactaatttatattcccaccaaccatgtatgagtgtccgtttttctctgcagcttcaccagaatctgttattttctgactttttaaaaaagccattctgtctgatttttatataccataccatctgtgagatgatatttcattgtggttttgatttgcattcctctgtgattagtgatgatgagcatttttttaygtttgttggtcatgtgtaagtcttcttctgagaagttcctgttcatgtcctttgcccactttttaatagagccatttgttttttgttgttgatttgtttaagttccttatagattctggatattagaccttttttagatgcatagtttgcaaatattttattccattctgtaggttgtctgtatacttccttgatagtttctcttgcc

SEQ ID NO: 406336 - DNA, 649 bp, Homo sapiens
agaaccccaaaatatgtgatgcaaaagttgacagaattaaggaaatatacaaattttcaatcataggtggagaatttaataccccttttttgacaattgagagaatcaggcaaaaatattggtaaggataggtgtacctttaacaatcactttgacacaaccttttttagaatactttaacaactacagaatacacattttcttccagagtaaatgttttattcaccaaaatagaccaaatgttgggccataaaaccagactcaataaatttaaaagaattgaaagaaaaccttcagccaatcccacagaagtctaagcttcagcaataactataacactgtctgtatcaatcatggtgaggagttgccatgaaccccttacataggagaaaaggaaagaagatgtgtcccaatccagctacttgacaaaaatctctcctactcaaagaagagggactaaagtggtccaactctatkgctactatattctatgatatccagctcaggaaagtacatagtaggtaagtcataaagagcttttctttcacttcccagaaatggtattaaaaatagtctgtaaggaggagagaggtggagcaagatgaccaaatagaaccctccagcaatcattcccccatgggaacacaaa

SEQ ID NO: 406337 - DNA, 600 bp, Homo sapiens
gttttaaaatgtaatttatatttaaaagtcacttatacattttaaaataaggccaaatacaattttttaataatttcccataacagtgtaacagctttaaaacaaaattaggtaatattcagcttactttacgtttaaagaatgaagcttacatgaagatttaaattaggtaaaaatatttttaatttgtttcatggcctattgttactgatgctattctttataatttaagtagactaatgattactgcttttttaaatggtttatacataacaatatttcacatatcttttctgcaagacttttcagaaccttattttcatcaagaatctcccttggactaatgtttcaaggaccacattttgggaaatgcttgctgattgtcagatgrtcaagatgtcctgaaccacattttgaatgtaaatcattccgaaggactatccctttattggaagatataatttctgggtgtacaaccaagtgctctttaaaattgcctttttttcccttctcatgcttacctaatgtctttgctctaaaagagcagctgtttctcttattttgtctgcaggccggccttgtttaccagcaattttcaga

SEQ ID NO: 406338 - DNA, 599 bp, Homo sapiens
agaccaacgctgtttgagcctgcttgatttatcggctctcccataattgtaaatttattgatttctctttgttctgtcaatttttcttaggggaaaacatctaaagctaacatgcataagtgttcagattgctatatagtcctagtgaattattctttttatcatcayaaagtgactattactactcaagtttttatataagtctattctgttaataaccagctttctttgcatttgtctagtctcttttcctagccctctactttcaagctttgcataataatcttttatgtctcttggaagtagcatggaactggattttttttaaaattccattaagagattattttaaccgatatatgtagtcaatttctgtgtactgtgattagtattctgttctatctattgagctttctacctcttttattccgccaccactttctactgaactgaacaggtacccttgttttctttttttctcctttcctgacaatgtctaatttttcaattataactcttacatgtacaccatgcatacttctgcatatgtagtatgcaattaaaaaaatctaaaggtaattacaatgttcctcccaaat

SEQ ID NO: 406339 - DNA, 599 bp, Homo sapiens
agaccaacgctgtttgagcctgcttgatttatcggctctcccataattgtaaatttattgatttctctttgttctgtcaatttttcttaggggaaaacatctaaagctaacatgcataagtgttcagattgctatatagtcctagtgaattattctttttatcatcataaagtgactattactactcaagtttttatataagtctattctgttaataaccagctttctttgcatttgtctagtctcttttcctagccctytactttcaagctttgcataataatcttttatgtctcttggaagtagcatggaactggattttttttaaaattccattaagagattattttaaccgatatatgtagtcaatttctgtgtactgtgattagtattctgttctatctattgagctttctacctcttttattccgccaccactttctactgaactgaacaggtacccttgttttctttttttctcctttcctgacaatgtctaatttttcaattataactcttacatgtacaccatgcatacttctgcatatgtagtatgcaattaaaaaaatctaaaggtaattacaatgttcctcccaaat

SEQ ID NO: 406340 - DNA, 562 bp, Homo sapiens
aaataactttaggtgaaggacatcagaaatagcaaaaaaatggaaatatggaaattatgtgagttttttttttaatacataggacatctagccttttatggagtaagtctgccaactccagtctaggttgtagaatgcagaatgatacagrgaaatactgaactgatccagctccctccactgaatggctgtatgtgctttgacaagtcacaatctctttcaaaactagttgcctcatttataaaatgcaaacgcctgagtcccacacccaatcaaatgaaattcaaaatctctgggaatggggccccacacatagcctcccccaggtgattctaaagcatagtgaggaccgaaatcccgagattaaatgatgactaaatctcttcagctctgctattctttctataaataacatagtttgtaacactgatttttttaaaagaactgcatcctaaaaataaccttcctcctgatataatccaaacttaagttctatgtattttatacaattaaaaacaagtagctacaagttaagtcactctacagcaaatacaatctaaat

SEQ ID NO: 406341 - DNA, 588 bp, Homo sapiens
ctttctaatgactgatctatgttacagattaattgcctccttttttgtcctgtacctaactcagaccatttagctcatgattgttacgwcttcagtgtaattgttacaccttcagtgtggaatgttaaatacacatttcccaaaagaaaaagaccacctcagctaatcagattactataaccatgcattactataagccttatatagaaagccttatatagaaagacgttaaaactctcttaagcttccctaaactttgtttatataaatgatcccaaacttatatacttcaaaacattgacttccattttttggaatttgtgcttcccaggcagctgtccttaaactttgcacttgaacgaactctctttaaactagattctgacctttttgattattttgggttgacaaggcccactatattatgatctagttcttgggcctccatgagaccccatatgcctatttacgataaatctctatttgttcaagatatttgagtgggtgccaggctagctggaacagaaataaaaaaagaaaagcgaaatgtaaatgtacaggtggtcagtgctagggaggcattttgca

SEQ ID NO: 406342 - DNA, 482 bp, Homo sapiens
ggaggggggactttatttgtttgttttgtagagacaggatctccctctgtcacccaggttggagtgcagaggtgtaatcatagctcactgtagcctcyatctcctgggctcaagggatccttctgccacagtctccccagtagctgagactacaggcaggcgccactacgcctggctatttttgaaataatattttgtgttttgcagagatgaggtcttgctacgttgccaaggctgctctcaaactcttggcttcaagtgacactccagcctgagctcccaaatgctgggaatacaggcatgaatcaccatgctcagcaccttaatgatttctaacctccttttaaatcactcattaatttttttatcattactatattttctattttaaaagtattatttggttctttttcaaattctcctattctttttaaaatactgtatttttctttttttatttttctcctgtattttaaaggctt

SEQ ID NO: 406343 - DNA, 529 bp, Homo sapiens
acttttccaagaaaaataaaagtgaaagagacttaatttatatgttcttttaatttatatatatgttactccagcctggagtgattattcaaaataaattttgaatgcaataaaattaatttatgcaaaattttgtgtgtttatatatattttccctactaagacatttatagctttcatcagtttctcagagatatgtgtgacctctctcccccttaaaaaaatgtaaaaacaatttatgtctatacctgaataaaggawcccaagcaagaatattcaacaattacataggatgggatgggataggataaaaagaagtggagtagagtggagtggagtgaagtgaaaagaaacagaatttaccaactcaaatgcactctcaataaaatgtacaaggcaaaatagtaacagcaaatggtgccagtctttcactctttttctttaaatgacagtgagaaccctctccttttccatcgggtttaccccaaagctaagagatgacccttatataaacagccaattgaaatat

SEQ ID NO: 406344 - DNA, 601 bp, Homo sapiens
gaatgcactagggatggtaaggtcaaatgtagttggtaaacatattcataaggtgaagtagacttatgcattccaggamttcctaaaagacttaatgtgatagccaggtgtggtggtgtgtgcctgtagtcccagctgcttgggaggctgagacctgagaatcacttgaacccctgaatccagaaagcagaggttgtagtgacttaagatcgtgccactgcactccagcctgggtgacacaatgagactctgtctcaaaagaaaaagacaacacaataatgatcattaggaatatcctaaaataaaatatttggacaagaggccctttttttaatctttgagcgtctctcaggagtgctatgcaaaatgcctttaagcaacttaaaccatgctcaaaccatattgtggaataaggagtggtattcaggacatctctctttctttcccaacaccccctctaaaaataaaaaaaaatttttttttaaagctctgtgagttttacctcaggtgaagcatttctggaagtgttgaatatctgtccaaccactcgcgtagcactagtgatgttctcagcagttaatttattggcatcagatgttaa

SEQ ID NO: 406345 - DNA, 601 bp, Homo sapiens
gaatgcactagggatggtaaggtcaaatgtagttggtaaacatattcataaggtgaagtagacttatgcattccaggacttcctaaaagacttaatgtgatagccaggtgtggtggtgtgtgcctgtagtcccagctgcttgggaggctgagacctgagaatcacttgaacccctgaatccagaaagcagaggttgtagtgacttaagatcgtgccactgcactccagcctgggtgacacaatgagactctgtctcaaaagaaaaagacaacacaataatgatcattaggaatatcctaaaataaaatatttggacaagaggccctttttttaatctttgagcgtctctcaggagtgctatgcaaaatgcctttaagcaacttaaaccatgctcaaaccatattgtggaataaggagtggtattcaggacatctctctttctttcccaacaccccctctaaaaataaaaaaaaatttttttttaaagctytgtgagttttacctcaggtgaagcatttctggaagtgttgaatatctgtccaaccactcgcgtagcactagtgatgttctcagcagttaatttattggcatcagatgttaa

SEQ ID NO: 406346 - DNA, 517 bp, Homo sapiens
aactaatacaagaatctctttacacagagaatacaaaaataatctcaaaaaatttataaaaataaatttgaatagtggaaaygggagttaatggagtagtgacacatgtcatcccaaagagaataaaatatttgctgaaaaaaatatatatttggctttgtggtccatggaaatcgtgggcaaataagggttttaatggatgatggtaatattcaagcggagaaagataggctgagtaaattcttaggccactcctatggtatcactcccagtgtgagctagccccatgtcatccccttcagcatctcccacagtcggcagtctccaccccacttcaacctcatctgccctagtttcaggcagaatacaaatttttaaattttcaaaattaacttatattttagttatgtattgttatttctttatatgccttattttctaagaatagtgaatatcttgtatcctctattatttatacctagtacaggcagtgacttatcaatagagatacatgata

SEQ ID NO: 406347 - DNA, 598 bp, Homo sapiens
aaactgataccacagaaatacaaagaataattagaggatattatgaacaagtatatgccagcaaactggaaaatctcaaggaaactgaaaaattcctagagacatacaacctacaagattgaatcaggaagaaagagaaaacctgaacataccagtaacaagcaacaagatcaaagcagtaataaaaggtctatcaacaaagaaaagcccaggactggacggttttattgctgaattctatcaatcttatagagaggaactaacaccaattcttctcaaaccactccaaacaacttaagaggaggaaattttatctaactcattctacaaggccagcactaccctgataacaaaactatacaaggacatgagaaaaaaagttcaggccaatatgagcaacacagatgcaaaaatcctcaacagaatactagcaaacagaatccaaccacacatcaaaaaagataatgcaccatgatcaagtgagatttatctcagggatgcaagacacacacaaatcaataattgtgatacctcatattagaaygaagggcaaaaaccatgtgatcacctcaacagatgcaaaaaaagcatttgataa

SEQ ID NO: 406348 - DNA, 570 bp, Homo sapiens
acaggatttcattcttttttatggctgaatggtattccattgtgtatacagacaccgtatttycattatccactgatgggacacttaagttgattctgtatctttgctatggtgaatagtactgcaaaaaaacatggtaggtgcatgtatctctttggtatattgacttcctttcctttagataaatactagtagcaggactactggattgtacagtggttctatttttatgtttctttttaaaaattttttttttttttgagacggagtctggctctgtcgcccaggctggagtgcagtggcgcaatctcggcccactgtaagctccgcctcccaggttcacgccattctcctgcctcagcctcccgagtagctgggacttctttttaaaatttgtttttttcttttttgtttcttttttttaatctattttagttttctgagaaatctccatactgctttccataatagttacaccaatttacattcccaccaacagtgtatgagagttccctcttctccacatccttgccaacatctgctattctttgtctttctaaccgccattct

SEQ ID NO: 406349 - DNA, 384 bp, Homo sapiens
caagtcctccctcttcactatgagcctacttccttcttttcctattagcattttccccctaatttttaaaaacagtctttctaattcctcctcacaatgcaaaatcacttcattattgttgttagacaaattatgtactggaacatagttatttattgtggtaggaaaattatgaaaaacttggtactaaagcaaattgatgattattttcctttaaaatgttgtgctggagtattttctaatatgacagttctttcaggagacatacttttgtttgataacctagacaatttacagttctataaagtttaagactaaaytgtaaaaaaactattatgaagtaatttttttcttggcctggtaggaaaaatatctctaaagtta

SEQ ID NO: 406350 - DNA, 598 bp, Homo sapiens
atagatatccagttgcatgaagtcattcsacttcaacattgatattaatagtcagtaaaatttattgaggactgcaatatatctggtgctttgctttacttcaaatctctgtgacaatcccaagagataatatattattcctgttttatggatgagaaaatggagattgtaagatattaactaacttggccaaggtcacacatttggtaagtgactgaatcagaatgcattcaatcccagatctctctaacactgaagcccatattcttcccattgaattacattgcccctgcctcatgataaatgtgctttagaattgggaccaagactgggaaaactaaggttcactataacttctcccttgaattaaaaggaaggggactctgtagaagaaggagtactttgaaaggcagtaggagacctgattttcatttctgttcctagagagactgaatgacaatgaacaagttatttggcctcctgagcctcatctgtaaattagagatgcttgaatacatgactgctgtgagcaaacaaatagaaagtcgcctgtggagcataaggaactatgtgaggatcacaccgacactggaactgc

SEQ ID NO: 406351 - DNA, 539 bp, Homo sapiens
cccaataaagcaagtcacatattttttggtttcctagtgtatataaaagttatgcttacattatactgtagtctattaaaagtgcaataacattacatctaaaaaaggtatataccttaattttaaaatactttattgctaaaaaatgcaaacaatcctctgagctttcagcaagtcatcatctttctgcttctggagggtcttgcctccaagttgatggctgctgactaatcagaatgatggctgctgatgattgaggtaactgtggcaatttcataaaaataagacaacaatgaatttggccscatcaattgattttttctttcacgaaagagttccctgtgatatgtaatgcagttgataacattttatctaaaagtcctcttaaaattggagtcaatcttctcaaatcctgtcacttctttatcaactgagtttatctaatagtctaaatcctttattgtcatttcaatactgttcacagcatctttaccagaagtagattccatctgaaggaacaactttctttgctcattcat

SEQ ID NO: 406352 - DNA, 571 bp, Homo sapiens
cgcatgcctccctgactttgctcatgctcattcaaccagctagaaagcatcccagcccaaacatagcaaatgtctactctttctctccagcaaattaccacagccatcattaaaacttttaagactctttccccaggcaaaacttatttgtacctcatcaaggctccttagcatcttattcttagtgctacttctgtttttcttcaatttgacacccctttgaggacaaggaccatgtgtttattcaaattcatagctctcttccacccagccagctccttgtccaatatttggcacctggtaagtactaaataaatgtgtaaatggaacattgtattccattagagagctcttttccttatttacctgaagggactctctctttcactcctgtcatggtgtgcttgragagtcctgatgaagaagtagatgatagcagaaaagatgacaagaagtccaaccacggaggcaatagtgatgcctatgatcacgggctcagacacaaattcctcacagtgcttgcctcggtaccaccagttctcacccacccggcacctgcaaccaacagtca

SEQ ID NO: 406353 - DNA, 540 bp, Homo sapiens
acaagaagtccaaccacggaggcaatagtgatgcctatgatcacgggctcagacacaaattcctcacagtgcttgcctcggtaccaccagttctcacccacccggcacctgcaaccaacagtcaccaagtccgatatctgaatcactctgctcacactgacaattaacagcagaaccttctgagggactagaggaaagtagagaaataaatgctgaccacgtgaagcttcataaagagttgaatagacagattaaaagatcatacaatttaaggcagtgmataaagcccagcacagacctagtaggtcctcaatgactgtttgaaagaaaactgaataaaaagctaaataggtttaaggaaattattctacttaacatccttatttatagataaccaaaaaacaagcctaggaaggaaagtgactggcattaggccatacaattagtctgctgcagaactgggcctagaacccaggcctccagacgccccatgtcctttcagtatgctaaagatatccttcaaaccctaaggccacaggg

SEQ ID NO: 406354 - DNA, 587 bp, Homo sapiens
gctatagggaataaaaagaaatagcatagcctcttggtttccagaataatggaaggatctacatacataatgttttgaaaagcaatgatttccttgctgctctggaaattgaagacaattttgcacaagtctgtgcccttggagtttggagatcactgaagttgatctcctttggctgcatgtggtaacaggggaaatgtactgagttgaatagtgtccccagaagttcatgtccatccagaaccgcagaatatgaccttacttggaaacagagcatttgtatatgtaatcaagttaagaagaggccatacgagattagaatgagccctaatgcaatgattggtgtccttataagaagagggaaatttggacacagacagaaacacacaggaaacaaggctatctggagacaaaggcagatattagagtgatacacctataagctaagggatgccaagggattgctggtaaacatcagaaaccaggaaaaggtaaggaaagagkcttccctagatctttcagagggaacagggcctggccaacattttgattttggacttctagcctcaagaactgtgggagaataa

SEQ ID NO: 406355 - DNA, 525 bp, Homo sapiens
accaagtagtacatataagatttatgcatttcactctgtaaatttcmcctttaagaaagtaaacaaatattgagctctagttaatgatactcatactgaaatatctagagggaattgcactgatgtcttcaacttatgaaatacatttaaaggattagatggttaagctaggcatggtggctcacacctgtaatcccagcactttgggaggccaaagtaggcagatcactcgagcccaggagttcaagattagcctgggcaacgatatcttgtctctacgaaaattacaaagaaattagccgggcatggtggcacgtgcctatagttccagctactccggaggctgaggtgggaggatcatctgaacccagggagatcgagtacgcagtgaggtgtaatcacaccactgcacctcagcctgggtgacaaagtgagaccctgtctcaaaaaaaaaaaaaaaaaaaaaaaaaaaaaagatggttacagagatagacacataataaagcaaacataataaaatgttaa

SEQ ID NO: 406356 - DNA, 525 bp, Homo sapiens
accaagtagtacatataagatttatgcatttcactctgtaaatttcacctttaagaaagtaaacaaatattgagctctagttaatgatactcatactgaaatatctagagggaattgcactgatgtcttcaacttatgaaatacatttaaaggattagatggttaagctaggcatggtggctcacacctgtaatcccagcactttgggaggccaaagtaggcagatcactcgagcccaggagttcaagattagcctgggcaacgatatcttgtctctacgaaaattacaaagaaattagccgggcatggtggcacgtgcctatagttccagctactccggaggctgaggtgggaggatcatctgaacccagggagatcgagtacgcagtgaggtgtaatcacaccactgcacytcagcctgggtgacaaagtgagaccctgtctcaaaaaaaaaaaaaaaaaaaaaaaaaaaaaagatggttacagagatagacacataataaagcaaacataataaaatgttaa

SEQ ID NO: 406357 - DNA, 603 bp, Homo sapiens
aatcaactattgtttgagtaggtgtaggggtggtaacatttacattcaactttgaaaaaataaagttcacaagaagtggtgaaaaggtatggaggtacaatktcacaacccccactccacacaagcatctatagtcttgggttcaaagtgatattcacactcatgggacaacagtccaaaatgtggctccaggcttactttgtagaaaaatatggcacagcaaacagtgttataataataatttcaagttaagtacatcttcatctggaatctttataagagccctgatttctccagcccccaagaaggatgcactaagttgtaacagaagagaccacctgggtgggagcaggccacagaagcagacagaagcctcatacacacagaactatgcctcttaacaacgcatgggcagtttccaaatttccacaaggacaagtttagttacaagagaccgcagaggaagtacctaaatacatgaacgaataattttatacaactgcaaaagtagaggacaatggaaagataagaataggatataggctggaacaagattaaggatgggctctataggccaagtctaaacctatttttcctcttggc

SEQ ID NO: 406358 - DNA, 603 bp, Homo sapiens
aatcaactattgtttgagtaggtgtaggggtggtaacatttacattcaactttgaaaaaataaagttcacaagaagtggtgaaaaggtatggaggtacaatttcacaacccccactccacacaagcatctatagtcttgggttcaaagtgatattcacactcatgggacaacagtccaaaatgtggctccaggcttactttgtagaaaaatatggcacagcmaacagtgttataataataatttcaagttaagtacatcttcatctggaatctttataagagccctgatttctccagcccccaagaaggatgcactaagttgtaacagaagagaccacctgggtgggagcaggccacagaagcagacagaagcctcatacacacagaactatgcctcttaacaacgcatgggcagtttccaaatttccacaaggacaagtttagttacaagagaccgcagaggaagtacctaaatacatgaacgaataattttatacaactgcaaaagtagaggacaatggaaagataagaataggatataggctggaacaagattaaggatgggctctataggccaagtctaaacctatttttcctcttggc

SEQ ID NO: 406359 - DNA, 570 bp, Homo sapiens
aagtgcttaatagctgcatgtggttaatggccatcatactggacaagatggtaaagaacatttccatcaccacagatgttctgttgaacaggaatgtattaagaatctaaactgcatgagattggagaccttgactaatatattcctgctgtattttccagtgcctaaaacagtacctgccatttagtaggcattaaaaatatattttggggataaatgaatactatgtgccaggcaatgtagaaggtacttggcatataattgtgagcaaaacacccattgtatatgaaggttacagtcttatagaaattatacacactaaatcaataattacagatgagacaagtagtacagacaagaaagtagtggctgctagaaggaacataaaaccacacacctgatctcatctgagagatcaytgaaatcataaaacctatttatataaagaaagtcaagcttagagaaattatttgctgtaggccccattgctaacaggcatcaggtctcctggctgttgttttaccatgccactctgcaattgcaagcaaagataagaagagatcagaagat

SEQ ID NO: 406360 - DNA, 555 bp, Homo sapiens
tatagctggagttcactaatcctatcttctactgtatctagtcctctattaaacttgtccaataagttcctaatttcagatatgtcattatacatcttcagctctagaacgtctatttgattttttttttgtatactccatgtcttcatccrttttgtttcatctttggctttatcttctctaacctattaatcaaatcattttaaagttcttatctgccaattacagtatctggatcacctgtggttctatttctttctctttaaaaaaaatcttgattacctgtaacatgtgcctgcctctttgcttgcccagtgatatagttttgctgtgccccgacccaaatctcatcttgaattgtagttcctataatccccactgtggtgggagggacctggtaggaggtaactgaatcatgggggcggttttcccccatgctattctcctgatagtaacttctcatgagatctgatggttttataaggggcttcccccttcgctcagctctcattcttctccttgctgctatcatgtaaaaaaggatatgtttgcttc

SEQ ID NO: 406361 - DNA, 535 bp, Homo sapiens
ctttaacttcatcaactttcagaatttccatagtggtggccaggggtttagggagttgaatatgaatggaagtgagaaaggtaaacaaatagtttcaatagtttagtatgtaaactagtttatataaggataggcttctctcttatcattaatatacactcatgggtggctcaaaggattatgctggttttgaatgtatgctttggcagtattttgagaatctagatatgcagtaatttataaggaactgaagaggtaagaataaatccagagtcaggaaaaactctagacattgagaatggtcatctccacaggccattatgagactgacctatcatttggttaatcttagaagtttttgtgtgtttttttaaattattttatttttttttattttagagtttggggatacatgtgcttttttgttacatgtttattacaagtgtaatggtgggatcgggcttctagtgtgtcatgatccacatattggacattgtacycagtaggtaacttttcacccctcactcccctccca

SEQ ID NO: 406362 - DNA, 630 bp, Homo sapiens
tttatttcctgtcctgttgagggcttacgaacccactgtcttttcttaatacatttattcacccatgtgatcctgaaataaataagatcaggtaccaaaatgagtactgtcctcctggaaaaacaatacatgaggaaatctgagtaaaagtaaaatctcaattgaaaaacaaaatgaaatcaagggtatgaaaatctatgtcattaccaaatttgatcctgagattcctggcagccaaagaaataaattattagctttataacttttaaaatattaaaataaattgattgttcagcttcttgtggtacaaagctgagggaacttctttcttcccttgtcctcttaaagggatgctgtgagatgtagtgaattgtactcttaataatacccctaaaataataaaaattagaacattaaaaagtattcatatactttttaaaaataatgttgctcaacatgggcttagtactgtcagcrcattttagcataagaatttctcattcaggttttgtagtctgaattgacctagggaccaagctttttatatgactagactgtgaactgtgaactctctggtaatactccattaataatgacttctcactacttagcattgatggtaattggaaa

SEQ ID NO: 406363 - DNA, 502 bp, Homo sapiens
taaatcttgaactctttttaatagggttgttttactcaaagtatgcttgtagcaattctaaaactattttatgtgtattacatgactgaacaaatgagtaacagtattggtgttattaggagtcagagttctcacttgttataagaacccagaagccatcttgaaaagattctcccttgataaatctgggacaatctgagcatcaaaataaataagggaagtaactracaataacctatttaataaaattaaaatcatgagtccttactcctgataaatagataaataaaataaggaaggtgggctcttccttactgtagaatgctggctgtaacatggagggagcagtagaattggaaaatctatattttgcaatcatcagacaagaatcatcaatggataacagagcaacagccttcaaagtctgagtctagaactttaaaaaggcataggctttatgggtagtgaacaagtttgtgaaaagaaaaataagatggtatta

SEQ ID NO: 406364 - DNA, 611 bp, Homo sapiens
cttattttaatattatcatatattttttaacactgatctatttaaaaatatacttctaattgtatttggatatacagccaattcaaagaagagctacatctatgctagaaggctctaaacaatatgctcagcagtgaaagggagagacacaaacctcaggtgcccacagatgctagacagaacaggtttcattaatgctcaacccataaattgtgagtttagctccattttaggcatgaacctttttagaaaggtttataaagatattcttcataatatcactgactttaatgagtattattaatgtacaatgcaagatggatgaatggatggataaacagacagatggatagatgaatatattgttaatagttcacagttagtgggtcgattacaacataaagttacagtctttcaaacaactaagataaaatgcattcaaatcatctgcttcttactacctaactgtatgctagtcctggctctttattcccaaaatgcttatctttgaaatatatttgagktatatgacctggctctctcattcccaaaatgcttatctttgaaatacatttgaggtatatgacataagtaaaaatgaaatataactt

SEQ ID NO: 406365 - DNA, 609 bp, Homo sapiens
agacatccaaatgaagatatagattaactagttagatatttgaccctgaagttcaaggagaagaaagaactgaatacataaattgaaccttcatgccataaacatgttataaaaagttgtggaacctgttgagataaactaagaaatgcatacagataaagaaaaaaaagaggtccaatggctattttagcattttatgaacaggaagagtaagaagatccagcaaaagaagctgagaggaagaagatcaggagaaggcatgataagccatgtgcagtgagatagctatgcacatgtctatgcctcaaggagagaggaagctaacaggaagctgacttatcatggaaaagaactgaargaagatttcctggaaagaggaaggattgagataaattaatcttcaaggttttaggcttataaataattggcaaactattatccacctcttctagaatctaaatcttgctccctttaaggtgtgtgcattcttataggaaatagatgacatatattcaaacacctcaatttttagaaatttcaaaatttctaaagccactttcacatactcataataaccctgaatgacaaatgtttgtaactactattacg

SEQ ID NO: 406366 - DNA, 302 bp, Homo sapiens
gtagtatcgactcttctaggtaaatcactgaagatggctcatagtttagtttaatccctctttttaaaaagtrtcttgaaagtctgtatcttaaaaccatgattcaaaaatttccccttgaatttaagcatatcatgctaattttacctatataaaaacatttctgatgtgtagtttatatgtaataaaatacacccatttaaaatatacaatttagtgaatttttatggaagtatatactcttaaaattaccatcacatgatatgaatgtttctatcattcacagacattttcattctttg

SEQ ID NO: 406367 - DNA, 474 bp, Homo sapiens
attttaacctttccccttgacctcatatctctaaatttccagttcagtgtttctttcattccatgatttatttttttcttttcttgccactttgattctgccctttacctttttcctgtatcaggcttatttttaaaagaaacattggttcttttaatatcattttgcaaacgccgtgggaacatcttctctcattttatttttactaattgggctttcagagtaaactctccaacttgtcatatagttcattttaagcacctgcaagaataagtcagttgccctgtcagcttccagatgcagtggaatgttcatgttagatcttacatatttcaaacttcyaatttttaattactctcttctcggtttggagaagagggaggaacagatataaagagctatgaagttttgaaagagagataataaactgaaaataaataagcaaatgtgataacggggacacttgcttcctta

SEQ ID NO: 406368 - DNA, 417 bp, Homo sapiens
aaaacaaccactcacataacatttaagttgtaataggtattataagcaatctagatataatacatamattatagacaaatactatgccattttatatgagggacttaagaatccatagactttggtatgtgcagtaggtcctggaatcaatatcccacagataccgggggaagatggtatataaaatagtaactgtccaatccaggcagggaaagggcatgtgatacatgctacctatctggtacttcccacacgcaggacaaacattcataatcaatgacaactctctttccaactgaggccaggtgcaactcaacacattttagtaaggagtcatggccagttgtttggagttagcaggtgagatgcaagctattcaccgtcaccccccacttcaacccatgctcttgaccttgt

SEQ ID NO: 406369 - DNA, 540 bp, Homo sapiens
aacatgtttgggatttcatataacctgttctataaaaattcaatgcctgtaaaactgattattcaacattatgytaaattatctttaattaatgaagaaaaagccatttttctccagtgtactggaatgtttctttctgattttgccaaggttagtctttttttttttctttttagtttaatagacatttattcctttagttgaacaacctctacacaatcaaaatgtatgacttaggatcttttcttttttttaagaagaaatttaggtctcaagaacttttatgaacttgctatgagtactttctggaaatcaattaactaagccttttgaaacccctagagaagataggagaaaatcggttcagagaagcaagcatttaaattaagtcagcaaagtcagaattgagaattggacaattccttgtctacatttcctttacactcaaactcaacctggaaaacagtagcctagtctcctggaagccgtgatggaaacagaaatgcaatgtggtggtatactttcactgaaagtggacac

SEQ ID NO: 406370 - DNA, 540 bp, Homo sapiens
aacatgtttgggatttcatataacctgttctataaaaattcaatgcctgtaaaactgattattcaacattatgttaaattatctttaattaatgaagaaaaagccatttttctccagtgtactggaatgtttctttctgattttgccaaggttagtctttttttttttctttttagtttaatagacatttattcctttagttgaacaacctctacacaatcaaaatgtatgacttaggatcttttcttttttttaagaagaaatttaggtctcaagaacttttatgaacttgctatgagtactttctggaaatcaattaactaagccttttgaaacccctagagaagataggagaaaatcrgttcagagaagcaagcatttaaattaagtcagcaaagtcagaattgagaattggacaattccttgtctacatttcctttacactcaaactcaacctggaaaacagtagcctagtctcctggaagccgtgatggaaacagaaatgcaatgtggtggtatactttcactgaaagtggacac

SEQ ID NO: 406371 - DNA, 578 bp, Homo sapiens
ataattaagaaagagacaatagcctatataatacatataaatcatggcatgcagcgaaaaccagtcactatatagtatgttaggaaagtcatattagtctacttatgtttaactcccaggccagagtttattaatgttgtttcctccatccacaatatccatcccattcatatcacacacacttgctcctgcccttgagtgaatttactcatttacttttccttcagattttactcagatttttgcttaatagaaatgtacttaacagatgaataaatgaatactacttgttatataactggatactatgataaaattatttgaaaagtatcaatagtgttataggtatccaaaagacacattagttagaaaagataacagaactatatmctactagaaaagggaaaaatggtcagattacataaaatataggtttacttttacaaagtatacttaagtagtattttgttaatcatttcagagttatatatttacttttatacaaataaatgtacttaaagtatgctgaaattttactgtgattatgttgcaatcaattattacagaaaagttgtgaa

SEQ ID NO: 406372 - DNA, 589 bp, Homo sapiens
acaaaaatttaaatgaagtaaacgaatgaaataattttgtaaatatcatttaggcacatacttggatattttaaacatatctgaaacgaatgcccatattcatgaagaggtcctaaaaaccaaagtagtatttaaaaaggtgaacaacagaataattaaaactggaaattaactggcaattcagcaagaaaaaaaataaatgatctattattctataaaaagattctcaaccttaatgatatttaagaaataaaaatcaaaacaatatcctttatttgctgcctacttaagtagcaaaactttaaggttataacctttttcaawctggttatggggagatgacagtctcatataattatgtattttcaatgaaaggtaaatacctcaaataatatattttcaatgtttaagataacagagaaagtctactatgattaacaaaagtgttcaagaattctatgcatttataaatgatctgcaatagagatataaatttaaactttagtataaaaattatctcaagtcacagtatctttaaaggttttgttttaatgtaacttaaaattaaaattaagactaatagtgaagg

SEQ ID NO: 406373 - DNA, 636 bp, Homo sapiens
agctattataaattgtttaaatattgaaggaaaaatagtgtcaatgaatggatgggaaatctcatcagagatatggaaactatattttttcaaaaagaaaattctaaaggtaaaagcaaaatttaaaaaaattcatgaaatgggctcaagaaagaaaacagaaaaataaaatcagtgaacttaaagaaagaccaccataagttactcaatttggagtacaagaaaaaaaaatttttttaaatgaagaggacctcaagagatctgtaggacaatagcaagtggtccaacatatgtgtaaggtccaccaagagaaaaagaacaaatgaacaaacagaatatctgaagaaataatagcataaaagttctcaaatttgggggraaacatttatttacacagacaaaaagctcactgaaaagtgagcttttcagtttggctaaacatgaacaaaaatcactctcacgcatgatagtcaaacttctgaaagccaaagataaaaagaaaacctggaaagaggccagagaacaaagatgcagtatatactggaacaattataagattacagctaacttttcctcagaaactatgaaagccagaaggcattggaacaaccaatacaaagtgatgaggaaagaaaa

SEQ ID NO: 406374 - DNA, 563 bp, Homo sapiens
tgtgcaaccctggatgactcaacttattgccaaatggcagttagctaacttccatttgcaagaagaggagacagcctattgtcaggaccaacttggtggggaaaggatatatagtctgtgtctaatgcacatatctaagcaaaatgtgatgcatatatttttccacattygtagatgctctttcttgtttttttccaatttatattgttgacataagtgtctcatcgtccaaatgcttaaattgtgtataataattctaaacagcattcgaccattcagatttgggcattgggcatcacagatatgttaaatctagttacagaggcagagctagagcatggtttccatgccttgaggggagagacatttttcagtaacctttgccaaaaccgctatatactgtttttctcaacagagctcagagactcattgtaattgtgtagaagtcaacagaaatcatattaaactataacactttcaaattttttcaagtatatttgcaatccagtgtaaatagggccaatggtcacaatgtatatatttttggaacactaatatttgtt

SEQ ID NO: 406375 - DNA, 563 bp, Homo sapiens
tgtgcaaccctggatgactcaacttattgccaaatggcagttagctaacttccatttgcaagaagaggagacagcctattgtcaggaccaacttggtggggaaaggatatatagtctgtgtctaatgcacatatctaagcaaaatgtgatgcatatatttttccacatttgtagatgctctttcttgtttttttccaatttatattgttgacataagtgtctcatcgtccaaatgcttaaattgtgtataataattcyaaacagcattcgaccattcagatttgggcattgggcatcacagatatgttaaatctagttacagaggcagagctagagcatggtttccatgccttgaggggagagacatttttcagtaacctttgccaaaaccgctatatactgtttttctcaacagagctcagagactcattgtaattgtgtagaagtcaacagaaatcatattaaactataacactttcaaattttttcaagtatatttgcaatccagtgtaaatagggccaatggtcacaatgtatatatttttggaacactaatatttgtt

SEQ ID NO: 406376 - DNA, 636 bp, Homo sapiens
tatggtgcaaagacttacatgcatctactagtaayagacaattaggccatctttaaactatagtctatgagagtaaaagaatattaaaatctctactctgactgctcatgcaggcctgtatccatcaaatccatccaacatcagtgtaaatttataagaaccatctgtgtatgaatcacaacttattattcaagtctatttaacaataacaacaattaatctttccccacctactccctcaattcaggaaacaatattgctatatattgcctatgtaaatcataatctccagccaagacttttaatccttttataatcccttattagaggaaaatgtggatttgtaaaactcatagtacaaatgtctatgaaggacttaaagtccttctaaaatcattacttcaaaaaaattagtgtattttgtatccaaaagctttaagaagttagaacattcatgtttatgactacaaaggctacatacttaaattttaaaattcagatgatttcatgaattcaatatgacacggggataatccttttataaaagggagaagtctttctggagcagcctaagttcacccaattctttcaagttccagtatgactaatcatttatcctctaaaaggtaaaaatta

SEQ ID NO: 406377 - DNA, 636 bp, Homo sapiens
tatggtgcaaagacttacatgcatctactagtaatagacaattaggccatctttaaactatagtctatgagagtaaaagaatattaaaatctctactctgactgctcatgcaggcctgtatccatcaaatccatccaacatcagtgtaaatttataagaaccatctgtgtatgaatcacaacttattattcaagtctatttaacaataacaacaattaatctttccccacctactccctcaattcaggaaayaatattgctatatattgcctatgtaaatcataatctccagccaagacttttaatccttttataatcccttattagaggaaaatgtggatttgtaaaactcatagtacaaatgtctatgaaggacttaaagtccttctaaaatcattacttcaaaaaaattagtgtattttgtatccaaaagctttaagaagttagaacattcatgtttatgactacaaaggctacatacttaaattttaaaattcagatgatttcatgaattcaatatgacacggggataatccttttataaaagggagaagtctttctggagcagcctaagttcacccaattctttcaagttccagtatgactaatcatttatcctctaaaaggtaaaaatta

SEQ ID NO: 406378 - DNA, 556 bp, Homo sapiens
gtcttagaaaaaagctcatttcaattttgtaattgacttaatttgaaataactgccatattcatttctaatttgaactaaatgccatattatgagtcttttattataactcaatttaatataactcaatttgaaataaacgcygtatttactatgagtcttctactataagaacatattgtgttttgtcatacattcaaagctgcttctctatgctgaagtagttatgttgtttctttcagtcccatatattatttaagaatgagtgttttatacttcgtttttgctagtttgaatgctggtgtataggaaagcaattgtttgtatgtctactgtacagtggaacactggggtccaagagtataagccttggaatcagtcagatctgacctcaagtaccaatggacctcaggccttggtattgtttttctcatttataaaatgattctttgtgaaagctgcctaactcagagcctggtacacaaaatctccttaataaaaggcagccgatataataccttaagcatcaccattatcatctcactatcttatacttt

SEQ ID NO: 406379 - DNA, 556 bp, Homo sapiens
gtcttagaaaaaagctcatttcaattttgtaattgacttaatttgaaataactgccatattcatttctaatttgaactaaatgccatattatgagtcttttattataactcaatttaatataactcaatttgaaataaacgccgtatttactatgagtcttctactataagaacatattgtgttttgtcatayattcaaagctgcttctctatgctgaagtagttatgttgtttctttcagtcccatatattatttaagaatgagtgttttatacttcgtttttgctagtttgaatgctggtgtataggaaagcaattgtttgtatgtctactgtacagtggaacactggggtccaagagtataagccttggaatcagtcagatctgacctcaagtaccaatggacctcaggccttggtattgtttttctcatttataaaatgattctttgtgaaagctgcctaactcagagcctggtacacaaaatctccttaataaaaggcagccgatataataccttaagcatcaccattatcatctcactatcttatacttt

SEQ ID NO: 406380 - DNA, 603 bp, Homo sapiens
aaatttggaaagacgttggccatcatttcatctaaccttcagagtacagacagatggactgaggcccaaaggactcaagtggcattcccaagtcaactattggcagactatcaaagtaactatgtatgagtatttcaagttcctttctactttcacttaactaccttctcattcccaccttcactgacttcaaaggatcatatgacttccctatctacgattagcccttccagtgagccacggatacaaacccttccttaatacatyatctgttttaatcttcatgcaaacatatgaagtagtaatgtttatcatggccattttagagataaaccaagacttggagagattaagtgacttgactaggatcacacagctagtaaatgaaagagttggacttaaaggcaggtctacaagactttagtgtataagttattaaccactgtgctatacccatttctccattagcttcttttcctcatttcatgaggaaaccccattgattttcattctcttccattgactattcaaacaattcatccaaattctatccttagtgtctccacattatcattcagtattaaataactggtaagtttctga

SEQ ID NO: 406381 - DNA, 576 bp, Homo sapiens
gactcctaatgggaaattgttagtgattctattgctttctttactacttttcttgcctcctctcttcctttaacaaatagagtgctttctatatgccactstgctggaatggcatgaaggaaacatacatggccccaggccttcgtggtgcttataacctatgtccctccgaaaagcacctgaaatatggaagagtttacagttcttcatttgagccaaatgatgtgacataatctcatatgcttttcagagggaatttgggcaattaaatcttatcataaatttgctgatgaagtaatttacttggaaagatattgagcgctgtgtactgaattgtgcccctccctccaaagttcatatgttgaagccctaacctcctaacctccaatgtgactgtatttggagataaagcctgtgaagaggtgctgaaagttaaatgaagtcataagggtgggtccctaatgcaatagggctggtgactttataagaagaggaagagatatcagagctctctctctaccatgtgagtgaggacgcagtgagaaagcagccatctccaagctaggaagagagccc

SEQ ID NO: 406382 - DNA, 497 bp, Homo sapiens
ttttaaatgggcaaaagatttggttcaagataagtaaacagaacacatttatacttctgcctggaacaaccaaaaccagcaacaacaagaaaaaaattccaaaatgtattttttaatgttgtgcaaaaccytggaaattaggcaacaaaaaatagtaactactgagagttaagaaacaaagtatgaaggcctgtaattacaggtcccagtgcaacagaggagaactcaagtagagcttggcaaactcctggatttgcagagtcagagctggcagtccaggcagaccaaggcagttaagagttcacaagacagagtgtgtatggcagaccagagagcagcacagagacagatcagggcaatcttcaaatagtcagcaaagtactaattagcacatgcctgtaaaggcaaaagaaaacacaatttcaaagaattggagattactgcctggtggtcatacaaagtgagaaatagtgcccattccaacaagccagacagga

SEQ ID NO: 406383 - DNA, 574 bp, Homo sapiens
gtttttctctcaaattcaagaatttgggtaaatatgaaaatatgtaaatatgcccagaaaggacaaagcatataggtttttatactagcatttaaacaagcagctgaaaagtttacattctttatttttttctttttagcagttcacataatgaatttcaaggaagcatttactttcttacgaagtagaaatagttccctcattcctttaaactgtcttggacattgcctaaatggctttcatgaggtgagaacaatgtaggttctcaatttgacacgctggtagggttaccatctgagtttcctctggaaagtctgagaataaaacgtctagactgattttcaatgcagaagctcaaacttcaagaaagttggggcagtcacagcagcctgaggakatggaataagcccagctggggcatgcatagtcacactgtttccatcagattaaacaccaattccagctttttctctctcctgccagaataagaatcaactcattcttcccatgctacctcctcagcaaaacctctttcttttttcagtttatttctggtcctgtcatggttctactt

SEQ ID NO: 406384 - DNA, 574 bp, Homo sapiens
gtttttctctcaaattcaagaatttgggtaaatatgaaaatatgtaaatatgcccagaaaggacaaagcatataggtttttatactagcatttaaacaagcagctgaaaagtttacattctttatttttttctttttagcagttcacataatgaatttcaaggaagcatttactttcttacgaagtagaaatagttccctcattcctttaaactgtcttggacattgcctaaatggctttcatgaggtgagaacaatgtaggttctcaatttgacacgctggtagggttaccatctgagtttcctctggaaagtctgagaataaaacgtctagactgattttcaatgcagaagctcaaacttcaagaaagttggggcagtcacagcagcctgaggatatggaataagcccagctggggcatgcatagtcacactgtttccatcagattaaacaccaattccagctttttctctctcctgccagaataagaatcaactcaytcttcccatgctacctcctcagcaaaacctctttcttttttcagtttatttctggtcctgtcatggttctactt

SEQ ID NO: 406385 - DNA, 548 bp, Homo sapiens
atcttgtttttgcccctctgaaggtcatttcatccaatatgcagaagtccttttcatttttgattttttttttttactggagaatgacaagttgtctagcatttcaaggaatgaaagcctaaataaaggcattttcttrtgtcttaaaaattccttctgactctatgcaactttggtttgccacctttccaaagaaaatgaaagaccaagatcattagtttacaaactttatgagtctctaaaattcttatgggttgcttttcatatcttagactccaaatcctcattgcaggactggggcagagttagctgctggaggagcagacacaaaacaaacatatcccaaatgggcatattattcttctttcaagaaacccttgggggatagttagtttgaggagccagaaggagggaagaccacatttatatctttcaagcgtacgaaccttaatgccaaagagataatccaaggatggtagaggaaagaggtaagctgactaacaaagtggtctgtacacgaagtaggtgggagaaagcacacactgtaa

SEQ ID NO: 406386 - DNA, 589 bp, Homo sapiens
attaaactaatagccatattcttgaaacagagtataggtataaccctatttgaatggcccctgytttgcctaaaatccttactgatactgaagagactctttgtgagcattgtttgagaactccaaatgaaactctgccaatgaatgattaataatcagttagtaagccaaccctgggactcatttttctggcacaaaaaaatgcataattctatgactcttattcatctgatctagtcatcatcctattaattattcttattgctaatttctaagtattatctgtacctttttcaatggagttcttctgaaattatttctgtgttactaccacggctcagctgttgataagactttatatgactgaaattcttagacctcctgggtcttgctaaggcttaaagttgccctccttcaaatacattcacattctgtttgactgtttttaaactgttcactttatctggagaacactggagatgggagaggggggagatgcatattttcacagtagagaagaaatattaaaggctgaattagaggaaatcagtcttccagcataatgttgatttgggccctggtgttaaga

SEQ ID NO: 406387 - DNA, 589 bp, Homo sapiens
attaaactaatagccatattcttgaaacagagtataggtataaccctatttgaatggcccctgttttgcctaaaatccttactgatactgaagagactctttgtgagcattgtttgagaactccaaatgaaactctgccaatgaatgattaataatcagttagtaagccaaccctgggactcatttttctggcacaaaaaaatgcataattmtatgactcttattcatctgatctagtcatcatcctattaattattcttattgctaatttctaagtattatctgtacctttttcaatggagttcttctgaaattatttctgtgttactaccacggctcagctgttgataagactttatatgactgaaattcttagacctcctgggtcttgctaaggcttaaagttgccctccttcaaatacattcacattctgtttgactgtttttaaactgttcactttatctggagaacactggagatgggagaggggggagatgcatattttcacagtagagaagaaatattaaaggctgaattagaggaaatcagtcttccagcataatgttgatttgggccctggtgttaaga

SEQ ID NO: 406388 - DNA, 589 bp, Homo sapiens
attaaactaatagccatattcttgaaacagagtataggtataaccctatttgaatggcccctgttttgcctaaaatccttactgatactgaagagactctttgtgagcattgtttgagaactccaaatgaaactctgccaatgaatgattaataatcagttagtaagccaaccctgggactcatttttctggcacaaaaaaatgcataattctatgactcttattcatctgatctagtcatcatcctattaattattcttattgctaatttctaartattatctgtacctttttcaatggagttcttctgaaattatttctgtgttactaccacggctcagctgttgataagactttatatgactgaaattcttagacctcctgggtcttgctaaggcttaaagttgccctccttcaaatacattcacattctgtttgactgtttttaaactgttcactttatctggagaacactggagatgggagaggggggagatgcatattttcacagtagagaagaaatattaaaggctgaattagaggaaatcagtcttccagcataatgttgatttgggccctggtgttaaga

SEQ ID NO: 406389 - DNA, 418 bp, Homo sapiens
gaagacaagtaaaattacacaagattaaaagcattgaaaatcatcctgaaacctgcaaatgacatttcctgttacccataaaaaattatcaggtgaggattgggtatgaggtgctgcaaagttccttctaaytctgaggttctaaagctttctcacctgtatttgtatggcataacaaatacatacagaacaaagtactttcacatgtatctctaatttcagttttatgataaccttaagtcagagcacatgagccccacagagaaagaaactgaggctgagggatttgggatgatttccccaaagtcatcaatttcttgtcatggttgaattctgattacaatcaaggtttcctgactctccatccaatgttttactgcccttggttcacacaatactcacgaaaagatatgagatt

SEQ ID NO: 406390 - DNA, 479 bp, Homo sapiens
cttaagtcagagcacatgagccccacagagaaagaaactgaggctgagggatttgggatgatttccccaaagtcatcaatttcttgtcatggttgaattctgattacaatcaaggtttcctgactctccatccaatgttttactgcccttggttcacacaatactcacgaaaagatatgagattggttatatcaatcttggaactttggaacacctctctgcttagatatggttgtaagttaagcaaatttgtgcagataaacttrctaaagctgtttttattctgttgccatattcgtgtgccaaaatgtggtagacatacggtccctacctcaagaattttagctgttttaaacaatagaattgtaaattagtttcctttccacacatattcattacgctctttcagcatgcagagagcacatatgctcaagtttcctctgaaaagtggagtttatagttggaatacaagagaagta

SEQ ID NO: 406391 - DNA, 642 bp, Homo sapiens
aaagatgaacaccaaggattaagtgaaaattcataaaagtaataaagaagaaaaaccctgacagcttacacacagataaaaatgataagaatgatagcttcttgctagaaaaatatctttttttggatagatacaagtgatcyttattcagttgatgtaatagcactgtcagaacataaggccaacatattagaataccaagctgctgattacatatattctgacaatgaggttttatatattttttaaataatgtaataattttcttttatattttttctattccctcaagcatttatttttccagatacaaacaatccaattacattgcttgttattttaaaacatacagttaagttactattcactgtagtcacccttttatgctaccaaatagtaggacttattcactctttgactttttgtacccattaaaaatctccacctcccccaacccccgactacccctcccgcctctggttctctatatccatgtctctattctctatgtccatgagttcacttgtttgatttttagatcccacaaataagtgagaacatacgatgtttgtctttctgtgcctggcttatttcacttgatataatgatctccagttccacctatgttgttgcaaatgattg

SEQ ID NO: 406392 - DNA, 642 bp, Homo sapiens
aaagatgaacaccaaggattaagtgaaaattcataaaagtaataaagaagaaaaaccctgacagcttacacacagataaaaatgataagaatgatagcttcttgctagaaaaatatctttttttggatagatacaagtgatccttattcagttgatgtaatagcactgtcagaacataaggccaacatattagaataccaagctgctgattacatatattctgacaatgaggttttatatattttttaaataatgtaataattttcttttatattttttctattccctcaagcatttatttttccagatacaaacaatccaattacattgcttgttattttaaaacrtacagttaagttactattcactgtagtcacccttttatgctaccaaatagtaggacttattcactctttgactttttgtacccattaaaaatctccacctcccccaacccccgactacccctcccgcctctggttctctatatccatgtctctattctctatgtccatgagttcacttgtttgatttttagatcccacaaataagtgagaacatacgatgtttgtctttctgtgcctggcttatttcacttgatataatgatctccagttccacctatgttgttgcaaatgattg

SEQ ID NO: 406393 - DNA, 616 bp, Homo sapiens
ggctctttgttcctatagagttggttgagcttcttaaatatggaagctggtaacgtgacaagggattacttattaatcccttgtcagatgrgtagtttgcaaatattttctctaggtccatttggtgtatagtgcagattaattctgatgtttctttattgattttctatctggaagatatgtccaatgctgaaagtggagtgttgaagtccccagcaattattgtattgaaatatgtctattatatagacatatttatagacatataattatatatgtcattatatagacacacaatatgtctattatatagatatatttctctttagctctaataatatttgctttatacctgggtactctagcattgggtgcatatatatttaaaattgttataggcttttgctgaattgactgcttcatcattatatagtgaccttctttgtctcttcttacaatttttgtcctgaaatctattttgtctgatataagtatagcgactagtgctcctttttggttttcattgtcatggaatgtctttttccatccctttattttcagtgtcttcataggttaagggtgtttcttgtagaaagcaaatcagtgtatcttgttt

SEQ ID NO: 406394 - DNA, 580 bp, Homo sapiens
attctatctccagtgaatatatgctctatgtacaaagataaattaaataaactttcagatagacaaaagataaaagctgagaaatttgtctccaggaagcctgcactatagaataaaataaattatttagactaaagcaagtgatgcccagatctgcaagaaaccattaaaaatgccaaaggggaaatttgttggtgaatataaatatatatatacacagacacacatacatatatacacrtatatgtatatttaagttttctattgctgctgcaataaattaccacgatcttacaaacatagtggtttaaaataacatttgttttctcaaggttctgttgattcagctggtttctctgccctgggttttgcatttgcaggcccaaaccaggtgtcaacaagctgggcacttatttagaggctctgggagtaatcctcagaatccagtaccttgtgattatagggccaagatctcactgtcctgatggctgtcagccggaggccatccttaccacttagagttctctttaggcttacttgtgggctctgcatcttagacgcagcaatacttctcacactt

SEQ ID NO: 406395 - DNA, 580 bp, Homo sapiens
attctatctccagtgaatatatgctctatgtacaaagataaattaaataaactttcagatagacaaaagataaaagctgagaaatttgtctccaggaagcctgcactatagaataaaataaattatttagactaaagcaagtgatgcccagatctgcaagaaaccattaaaaatgccaaaggggaaatttgttggtgaatataaatatatatatacacagacacacatacatatatacacatatatgtatatttaagttttctattgctgctgcaataaattaccaygatcttacaaacatagtggtttaaaataacatttgttttctcaaggttctgttgattcagctggtttctctgccctgggttttgcatttgcaggcccaaaccaggtgtcaacaagctgggcacttatttagaggctctgggagtaatcctcagaatccagtaccttgtgattatagggccaagatctcactgtcctgatggctgtcagccggaggccatccttaccacttagagttctctttaggcttacttgtgggctctgcatcttagacgcagcaatacttctcacactt

SEQ ID NO: 406396 - DNA, 580 bp, Homo sapiens
attctatctccagtgaatatatgctctatgtacaaagataaattaaataaactttcagatagacaaaagataaaagctgagaaatttgtctccaggaagcctgcactatagaataaaataaattatttagactaaagcaagtgatgcccagatctgcaagaaaccattaaaaatgccaaaggggaaatttgttggtgaatataaatatatatatacacagacacacatacatatatacacatatatgtatatttaagttttctattgctgctgcaataaattaccacgatcttacaaacatagtggtttaaaataacatttgttttctcaaggttctgttgattcagctggtttctctgccctgggttttgcatttgcaggcccaaaccaggtgtcaacaagctgggcacttatttagaggctctgggagtaatcctcagaatccagtaccttgtgattatagggccaagatctcactgtcctgatggctgtcagccrgaggccatccttaccacttagagttctctttaggcttacttgtgggctctgcatcttagacgcagcaatacttctcacactt

SEQ ID NO: 406397 - DNA, 552 bp, Homo sapiens
aactccaccaaaaaactgtgaaaactgataaacaaattcagtaaagttgcagaatrcaaaatcaacatacaataattattagtgattctaggtactaataacaaattatcctacaaaggaaagtaagaaaacaatcccattcatcataacaaccaaaaaaattaaatatttgggtgtaaattttacaaaggacgtaaaagagctatgcactccaaactataaaacactgatgaatgaaactgaaggaaacacaagtttggaaagatatcccaagttgatgaattaaaagaattaatattttgaagagtctgtattacccaaattgatctacagatttaatgcaatctctgtcaaaattccaatgccattttttacagaaatagagaaaaacaattcatgaatttgtatggaaccacaaaagacccagaagacccaaaataatcttgaacaaaaagaacaaagctgagtgcatcaccctctgatttcaaaacatattataaagcaaatgtaatcataaaacatggtactggcataaaaacagacacttagacc

SEQ ID NO: 406398 - DNA, 552 bp, Homo sapiens
aactccaccaaaaaactgtgaaaactgataaacaaattcagtaaagttgcagaatgcaaaatcaacatacaataattattagtgattctaggtactaataacaaattatcctacaaaggaaagtaagaaaacaatcccattcatmataacaaccaaaaaaattaaatatttgggtgtaaattttacaaaggacgtaaaagagctatgcactccaaactataaaacactgatgaatgaaactgaaggaaacacaagtttggaaagatatcccaagttgatgaattaaaagaattaatattttgaagagtctgtattacccaaattgatctacagatttaatgcaatctctgtcaaaattccaatgccattttttacagaaatagagaaaaacaattcatgaatttgtatggaaccacaaaagacccagaagacccaaaataatcttgaacaaaaagaacaaagctgagtgcatcaccctctgatttcaaaacatattataaagcaaatgtaatcataaaacatggtactggcataaaaacagacacttagacc

SEQ ID NO: 406399 - DNA, 530 bp, Homo sapiens
ggtatatgttcacagtggaatactcttctgccttaaaaaagagggagaatcctgtcatttgtgataatgtggatgaatctggaaaacattcttttaagtgaaataatccaggcacagaaagacaaaaaccacatgatctcacatatgtggagactaaaaaagttaatctcatagaagtaaagagtagaacaatcgttaccagatatatggatcgggggtgggaatgsggtgttgttgatcaaagtgtataaagtttcagacagacaaaaggaattggctttgagatctattgcacagcagggtttttgtctttgtttctgtttatatgctggattacatttattgatttgtgtatattgaaccagccttgcatcccagggtagatgcagaaaaggcgtttgacaaaattcaacaacccttcatgctaaaaactctcaataaattaggtattgatgggacgtatttcaaaataataagagctatctatgacaaacccacagccaatatcatactgaatgggcaaaaactgg

SEQ ID NO: 406400 - DNA, 415 bp, Homo sapiens
attaacactgaattttctagaacaaaatacttgtcttcattatatcagasagcaaagtattttttaaaaaaactcaaaattcacaaattataaaagcctgttaaatttgattacagcaacatgaaagctattacatgacaaatgatctgataaatgaatttaaatgacacattacaaagtgacaacacaaagcaatgtttagctgacaaaggatttgtatctaaaatctacaaataaaccaataaggaaaacacaattgcatagaatatgggtaaaatatatgaatggaatcttcacagaaaagaaaacctaactgtcaaataaatacagatgttcaaccttgctaaaatgaggaatagttggaatggttggaagaataggaaacaatgatgggaaagatctaatataaagtaga

SEQ ID NO: 406401 - DNA, 587 bp, Homo sapiens
tatatgaacagacaccttgattttaacccatggtaggtttctgacctccagaactgtaagctaacacatttggcttgttttaagccacaaagtttgcaataatttgttacagcagcaatagaaaactaatatagcatattaaactttaataattattgctaactttcttttcaaagtggctataccaaattatgtgctctctatcaatgtataagaatccctgtgactcattagtcttataaacctagaattcttccagattttaaaatgtttttctgtctgctgagtttgaaaagatatgtggttttaattgcacatgggtgtagcttacattttcctaattctttatagtgttgagcattttactttggtgttattgaccctttaaacatctcttgagtacctttctcacaaaatgccctttatattggattatgttttgcttcttcattttaaatcatttacatattctggatacaaaattattattggcaataaaccatgcagatataaattcccattctgmagctcctttaaccttgtggtattttattaaatagaaagttttcattttcatataggtaaat

SEQ ID NO: 406402 - DNA, 413 bp, Homo sapiens
tatagtacatataactgagaaaccattaaaatccagaatataaaataattctaaaagctaacaagaaaacaaacagtcccatggaaaactaatgaatgacttagagaaataattaattaaaaaggaaacctcaatggctaataaatatatttaaagtttctcaactttacttgcaaatatagaaatgtaaatgaaagcaacaggaagacaccatttcatcatgaaggcaaaattaagtctgaaaataccaaatattggcaacaatgttgagaaagagatactggtgtatactgctgcaataaaaattgtttcaagttctttttagtgtaaactgcttgagattctttgaagaccaattttgaaatatctaataaggcaaagatgtgtayatctcacatacacaacaattctag

SEQ ID NO: 406403 - DNA, 579 bp, Homo sapiens
gaagataaacctgagctgaagctagtggttgagttgcagttgactagtcagggttatagggaagagcattctagccaaaaggaaccagatatataaatattctgtgtcaggaggaagtctggtaagtagtagggcctgaaagaagatcagtttggtggtgagactggctagaacgtggaaaagtctgtgagaagtgatgaattaagagtccctccatggaagaccccttaggaagtttgccctagcttaaaatggaaaaacatttaagaatgatgaaaaatatgtattayatgatcaaacttgtatgctctttgttttttaaagaatcactttggctgcaaggtggagaacagagtggaagtagggaagagagaccaattagaattctactgctaaagtccagagcatggtgcctggactcctgtagaaatggtaaaaacagaagcagatgaaataaggagacatttgggaatcacctttgaactctctggtagccgcatatgtccatccttgtatgcattcacatgtctcccaggtcaagaaatattccttggttcccccagactccaccagaggaac

SEQ ID NO: 406404 - DNA, 579 bp, Homo sapiens
gaagataaacctgagctgaagctagtggttgagttgcagttgactagtcagggttatagggaagagcattctagccaaaaggaaccagatatataaatattctgtgtcaggaggaagtctggtaagtagtagggcctgaaagaagatcagtttggtggtgagactggctagaacgtggaaaagtctgtgagaagtgatgaattaagagtccctccatggaagaccccttaggaagtttgccctagcttaaaatggaaaaacatttaagaatgatgaaaaatatgtattacatgatcaaacttgtatgctctttgttttttaaagaatcactttggctgcaaggtggagaacagagtggaagtagggaagagagaccaattagaattctactgctaaagtccagagcatggtgcctggactcytgtagaaatggtaaaaacagaagcagatgaaataaggagacatttgggaatcacctttgaactctctggtagccgcatatgtccatccttgtatgcattcacatgtctcccaggtcaagaaatattccttggttcccccagactccaccagaggaac

SEQ ID NO: 406405 - DNA, 579 bp, Homo sapiens
gaagataaacctgagctgaagctagtggttgagttgcagttgactagtcagggttatagggaagagcattctagccaaaaggaaccagatatataaatattctgtgtcaggaggaagtctggtaagtagtagggcctgaaagaagatcagtttggtggtgagactggctagaacgtggaaaagtctgtgagaagtgatgaattaagagtccctccatggaagaccccttaggaagtttgccctagcttaaaatggaaaaacatttaagaatgatgaaaaatatgtattacatgatcaaacttgtatgctctttgttttttaaagaatcactttggctgcaaggtggagaacagagtggaagtagggaagagagaccaattagaattctactgctaaagtccagagcatggtgcctggactcctgtagaaatggtaaaaayagaagcagatgaaataaggagacatttgggaatcacctttgaactctctggtagccgcatatgtccatccttgtatgcattcacatgtctcccaggtcaagaaatattccttggttcccccagactccaccagaggaac

SEQ ID NO: 406406 - DNA, 365 bp, Homo sapiens
taacaacacaacactttccataaaaggttatggtgaggattaatagaaatactgctgacagagcacttatcaaatagctgagcatattataagaccttaataaaagataatttattattaacgttagaaaaaagcttaarttattaatattataaacattgtgaacttttcctaaaatagtctttccagcaaaagccaataactggtaggaaaggtatccatataaaaattagagtctatctggggagataaaacatttcagagttttactctattaggtgcattctgagtaagctgattaatagggggaaatagtattatggtatctaggaaatgtctgcattatcaatttgcaattggggtta

SEQ ID NO: 406407 - DNA, 533 bp, Homo sapiens
gttgatacgcatatgatagaataaatttttctaatcactttcaattcacatttgatatagtaaaaaattatattcaagtcagattctgtttyacatgtcaattataaataagcacaggttgatcctctactattatttgtaatgtttttacttgcagcctctgattattcatcaacataagcctatgttgtttaaaaacaatttttaaaaattgtagttgtcaaagatcaaacatacatttctcataaaaactcctagtttttaatatgaaagaaatatgttacatttgctctaaactagccatgcacatgcattctcctagagttttgcatattattatgtctatatagaatctccagtggtcgttaatgtccttcctagggttatatggcatttaatcagtgtacccacctggcaggactgtggttgatgttccacagcaaggaaggaaacgagcccattaatgaaatttatagcactttattacatcatttctggtggagaggggaattagaagtcacttctgttatggt

SEQ ID NO: 406408 - DNA, 559 bp, Homo sapiens
ttaaagattgcccttaaaaaggactttcagtaagataaaatattaaccctgaggaaaaagtgagttccgagaaggaataggaagcaaagatacttaaaaatattaaactaaaaatgtatttagaaaagtgtaataaaagtttcacatagtttttggagataaacagcaagttatcattcttgtttaggaaaagaaccaaaatgttaactaatttttttactttttcagaaaaatataaagctaattaggttttaaaacttcaaaggagagcactaaattcatggaaataaatgctatcccttctaattcaggagaagaaaaaagaaaactaccttatcaatacaacaagaagtcaggaaaaraggtaagtaaaatatgtttcattataagattgcagaaataaatctaaatgtattagtaatcacaataaaatttctttgattcagtacaaccagtaaaatatatagattataggattggataaagctgtaatagctacactttataaaagacacttgtaaaaggaacatgaagatttaaatgcagatactttaacata

SEQ ID NO: 406409 - DNA, 608 bp, Homo sapiens
gatttttttctcttttgtgatgcttatactcagagaagagatgtgtatcatatgtagattgcttaggaagaataaagtatcatcctgcaagggtactatctaagttttctgcctcttctctttataagaatctatcctctccatgttttgtggattcatcaattgccacataataaatactgagaaagcattcataaaattaaactatagataaagcaaaaagtgaaagtattttgtgattttttttacccaattctgacaggctttttccatgcttatgaaacatacatgtattcataaagattttataaaaatggcatcatgttatatactttcatgctttgtttctcttaccatatcatgatcctctttctttatcaatgcatttaaatccccctcttaaaatatttatttatgtagcttacttattatttagtttaatatgctatttatttaatttaattaatctwatattttaattaaaaatttaaatcaattttttaatttaaaaagttatatcaattttcttaatttaaaaaattatttcaaattttttaagaaattaagaaaatcattttaattttttagtgtttggtaccaaggctgtg

SEQ ID NO: 406410 - DNA, 384 bp, Homo sapiens
agcttctaatttttcttcttcccttactaacggtttagtgccctttgctgttatttttcttctactcattccttgaatgttgatgtttctagattatctgctcctttcattacccacactctccctaggtaatcacatctactctgacaaatagagcaatcacatctattargaagggtcaacgttaggataatatgacaatgagaccctacaaaactcaattacttaaagaacaaatacctttaaaaaattcacaaaacagttcaagatgagtactttaggctggtgggaggctttgttccagtgacccaggtttccttcaaatcacttcttcaccattctgtagggcattgctgtggctccgtgatcaatggtggattgttc

SEQ ID NO: 406411 - DNA, 598 bp, Homo sapiens
aatgacataattaaagtgctgaaagaaataaacttttatcctagaatagtacatccagagaaaatatctttgaaatgtaaaggaaaaataaagactttcccagacaaacaaaagctggggcatttaatcaccacaagatctgtcctataagaaatgctaaaaacagttcttccatctgaaagaagaggatgttaataagcaataagaaattrtctgaaggtacacactcactagtaacagtaagtataaagacaaatacacaatcacactgtaatttgggtgtgtaaaccactcgtatcttgagtagaaagactaaaagacaagccaatcaaaaataatagctacaaaacctttttaagaaatagtctaaaaagatatacatagaaacaacaaaaagttaaaaaatgagagagatgcagttagattgtagtgtttttattacttttctctttgcttattttttggtagttttttttcaatcagacttaatttagcaaaagcttaaaataattgattataagatgttatttacaagtctcatggtaatttcaaatccaaatatctacaagagatccaagtaaaatgaaaagcaagaaat

SEQ ID NO: 406412 - DNA, 470 bp, Homo sapiens
tattaattctaatttaggagatttggaaagaccacattgagaaggtaaattttgatgaaatccttaaagaatgttatggccttgacagagggagttggggaccatgagcctggctgaggccagaagctggctgaatgtttcatttaaaagaacgttaggtagaagtrgggtagggggtaaaataataatattgggtatagtgtacactgcttgggtgacaggtgtaccaaaatctcagaaatcaccactaaagaacttatccatgtaactaaaaaccacctgtaccccccaaaagctattggaataaaaataaaaaagaaggttgagtaacagaggtcagcaggggagattgagaatagttaagagagacaagacaaataagtacagtgtaacaaaggctaagaaaagaaaatatagaaaaggagaggatgtagagtccaacattgcagttatatcaatagagaatgcaa

SEQ ID NO: 406413 - DNA, 470 bp, Homo sapiens
tattaattctaatttaggagatttggaaagaccacattgagaaggtaaattttgatgaaatccttaaagaatgttatggccttgacagagggagttggggaccatgagcctggctgaggccagaagctggctgaatgtttcatttaaaagaacgttaggtagaagtagggtagggggtaaaataataatattgggtatagtgtacactgcttgggtgacaggtgtaccaaaatctcagaaatcaccactaaagaacttatccatgtaactaaaaaccacctgtaccccccaaaagctattggaataaaaataaaaaagaaggttgagtaacagagrtcagcaggggagattgagaatagttaagagagacaagacaaataagtacagtgtaacaaaggctaagaaaagaaaatatagaaaaggagaggatgtagagtccaacattgcagttatatcaatagagaatgcaa

SEQ ID NO: 406414 - DNA, 618 bp, Homo sapiens
ttggaaataagggatgagtgatggcacaagagcagaggagagacagctaggaatgatacaaaggcactggcacagagagtagccttgcaaagaaagaaatataattttttttctgacacaggagtttaagaataatagaggggcatggtatacrtcagaatagactagtattctttgtaactttttttaattgaggaaaatttatatagcataaaattcatttttacctgttttaaagtgtacaacccagtggtttttagagcatccacatgttgtaaaagcatcatcattgtctaattctggtacattttcatcaccctataaagaaaccctatgcccattattcagtcactcctcaaacctcttctttagctcctggaaactattaatctgctttctgtctttatgggtttgtctattctggacatttcatacaaataaggtcataatctgtggcctttgcatatggcttctttcacttaacatagtgttttctaatttcatccatgaaacatgtatcagtacttcatttctttttatggttgaataatattccatctatcaatataccatttgtcaattgatggccatttagaatgtttccactttgaagctatt

SEQ ID NO: 406415 - DNA, 618 bp, Homo sapiens
ttggaaataagggatgagtgatggcacaagagcagaggagagacagctaggaatgatacaaaggcactggcacagagagtagccttgcaaagaaagaaatataattttttttctgacacaggagtttaagaataatagaggggcatggtatacgtcagaatagactagtattctttgtaactttttttaattgaggaaaatttatatagcataaaattcatttttacctgttttaaagtgtacaacccagtggtttttagagcatccacatgttgtaaaagcatcatcattgtctaattctggtacattttcatcaccctataaagaaaccctatgcccattattcagtcactcctcaaamctcttctttagctcctggaaactattaatctgctttctgtctttatgggtttgtctattctggacatttcatacaaataaggtcataatctgtggcctttgcatatggcttctttcacttaacatagtgttttctaatttcatccatgaaacatgtatcagtacttcatttctttttatggttgaataatattccatctatcaatataccatttgtcaattgatggccatttagaatgtttccactttgaagctatt

SEQ ID NO: 406416 - DNA, 623 bp, Homo sapiens
acctcatcttcagtgagtgggggctttaataatgccaytagtaaaaacagaggaatcaaaagaaggaaggactaggagaaaggaaatactggtctctaactctagatacattggataagtcatctaagtcctctaggtctccttaaacttctgcaaattaatagagttgaaattattaaataattgctagtgatccatacagctctatgagttgattttttttgggaaataaagatgagttcaattttgaatatcttgaatttgagaaaactgtggaatatccactgactatgtccagcatgcaagcaaaacttgagttcggaatttaaataagtggaaatgcagactacttaaaatttattcaagatcattcagaccccattttatttggaagaaatattttagaaagctattcttttgggcagaaattgtgtatatctggggttgatccaaaagtgtatttcttttggaaaaaaatgatgcacgtgttaaactatgtggagttaaaacaggtgagaaagtatcttttactattgttaaaggatcactttcagtgcaatgcttatggtgagagtttaaaagttgaaacttcacaggtatcaagttatcactgaggaatttat

SEQ ID NO: 406417 - DNA, 582 bp, Homo sapiens
taaaatttattcaagatcattcagaccccattttatttggaagaaatattttagaaagctattcttttgggcagaaattgtgtatatctggggttgatccaaaagtgtatttcttttggaaaaaaatgatgcacgtgttaaactatgtggagttaaaacaggtgagaaagtatcttttactattgttaaaggatcactttcagtgcaatgcttatggtgagagtttaaaagttgaaacttcacaggtatcaagttatcactgaggaatttattacttattaataaaatcattgttaccatggaaagcaatcttattyggaaagcaaggtcattttcataaaactgcctcaaatggaacaatagaatctcaatttctttgaactctattgaggtgaatggaccagcagacagggaggagtaatggaaaggacatgaagaaggaaatgtaataaaactaagaaaatagattcttccttctcgtttctgtctatgtttattaaagatgaaattagaggtaacaacttgaaattgcttagcgtttaggttccagacataaatacagagaggcaaagaactgtgaaa

SEQ ID NO: 406418 - DNA, 630 bp, Homo sapiens
aacttgaaaagttcaattttttaactgttattttagattcaagagtacatgtgcaagtttgttayataggtaaactttgtgtcatggaagttaaacgtacagattattttattgccacccaggcaataaacatagtacccaataggtatatttttcttatgtcctctctcctaccaccctctgtcctcaaatacacctctgtgtctgctgttaccttctttgtgtccatgtgttcttgttgtttagctcccacttataagtgagaacatgtggtgtttggttttctgttcctgtgttagtttgcttaggataatggcctccagctccatctgcattgctgcaaagaacctagtcttgctctttttatggtggtgtagtattccatggtgtatgtgtaccacattttctttatccagtctaccattgatggacatttaagttgattccatgtctttgctattgtgaatggtgctggaatgagcatacatgtccatgtgtttttatgatagtatgatttatgttcctttgggtatatacccaatactgtgattgctggatctcatggtaattctgttttaagttctttgaagaatccccacactgtttttcacaatagctgagctaatttac

SEQ ID NO: 406419 - DNA, 630 bp, Homo sapiens
aacttgaaaagttcaattttttaactgttattttagattcaagagtacatgtgcaagtttgttatataggtaaactttgtgtcatggaagttaaacgtacagattattttattgccacccaggcaataaacatagtacccaataggtatatttttcttatgtcctctctcctaccaccctctgtcctcaaatacaccyctgtgtctgctgttaccttctttgtgtccatgtgttcttgttgtttagctcccacttataagtgagaacatgtggtgtttggttttctgttcctgtgttagtttgcttaggataatggcctccagctccatctgcattgctgcaaagaacctagtcttgctctttttatggtggtgtagtattccatggtgtatgtgtaccacattttctttatccagtctaccattgatggacatttaagttgattccatgtctttgctattgtgaatggtgctggaatgagcatacatgtccatgtgtttttatgatagtatgatttatgttcctttgggtatatacccaatactgtgattgctggatctcatggtaattctgttttaagttctttgaagaatccccacactgtttttcacaatagctgagctaatttac

SEQ ID NO: 406420 - DNA, 579 bp, Homo sapiens
ttagtttttattgtgacatacaacaagctgacaatgttcttttacttgtgtgaaattaataagcctgacatctttgkattcctcctattcttttacgtcatattcactggacataggcaattcatttgtgtatctgtatgagtctgttctcacactgaaataaagaaatacctgagactgggtaatttataaataaaggaggtttaattggctcacaattctgcaggctgtataggaggcatagtggcttctgctcagcttccagagaggcctcaggaaacttaccataatggcagaaggcaaaagggaagccagcacttcacataatagagcaggagaaagagagaggggtaaggtgccacacaccttaaacaaccagatctcatgagaactcactattttgatgacagcaccaagggggatgatgttaaaccattcaggagaaactgtccccatggtccagccacccactagaccccaccttcaacattagagattacaatttgatgtgagatttggtggcgatgcagatccatatcagcatcacttgcttctcagctttaataggcctcccttaaa

SEQ ID NO: 406421 - DNA, 589 bp, Homo sapiens
tatcaagcacaaggtactttgctaggcactgtacatagactatcttattttaatcacataataatcccatgatatgtttttgcctaactttatgaacagatacagaaaaatctaaasacattatttgtgaccataaactaatagccaaggagaaaacatctccggagtttttcacatttcaggaagaactgctggactttaacaccatttgaatgataataataatgatgataatatatttattaaccacttacttcctgttaggctctggcccacaagggctttgactactttatgccattttatcctcataacaacctttggaggaaggtgaaaactttgttttacaacatgagaaaactgaggctaagggaggtaaaataacttgaccaaagtttcatagctgggaattagtagaacctatattggaactcaatcagcttgagttcagaccctttacttttaatgacaacactatttgaaaatgtgagatatcacacattgttttctacttagtcatcttttgcaaaagcactcccagctctcttcattaaaattgccacacttaaacactacactacacatcttg

SEQ ID NO: 406422 - DNA, 576 bp, Homo sapiens
tatcaagcacaaggtactttgctaggcactgtacatagactatcttattttaatcacataataatcccatgatatgtttttgcctaactttatgaacagatacagaaaaatctaaacacattatttgtgaccataaactaatagccaaggagaaaasatctccggagtttttcacatttcaggaagaactgctggactttaacaccatttgaatgataataataatgatgataatatatttattaaccacttacttcctgttaggctctggcccacaagggctttgactactttatgccattttatcctcataacaacctttggaggaaggtgaaaactttgttttacaacatgagaaaactgaggctaagggaggtaaaataacttgaccaaagtttcatagctgggaattagtagaacctatattggaactcaatcagcttgagttcagaccctttacttttaatgacaacactatttgaaaatgtgagatatcacacattgttttctacttagtcatcttttgcaaaagcactcccagctctcttcattaaaattgccacacttaaacactac

SEQ ID NO: 406423 - DNA, 616 bp, Homo sapiens
atttcacatgcattaaaattagcagcagatgaactatagtacattaattaaaaactggagatccaaacagcagggcttcatataatttgcccataggcatacagcaaatatagcatttaaagccatatagtctgattcctaagccaactcactaaccattctctgaaagacaaatttgaacaactttccactcagtaaatttttaaatagaaaaattgttttttaaaattgccatatttcaacaataaatggtatataagtcctgaaaagccagtttgtaaaaacaaartatcagggagttactctcctatccttagcttttatcatcattcacttaattttcagatttgttcttggcctccatagaacacttcctctggatataacctaatctcctaatttagaatgttctcagctccattgcttccacagcttcttcaggtataaaaacttttacatgttttttttctatattcaaatttttaatgtccccagagaatgagccttaattgcaagacacacaaaagagacatttaaaaagatctttctggcttttcccaattcttagctgcttcgaatgtagggtatggtgaggagagaaacattcatatttcaa

SEQ ID NO: 406424 - DNA, 616 bp, Homo sapiens
atttcacatgcattaaaattagcagcagatgaactatagtacattaattaaaaactggagatccaaacagcagggcttcatataatttgcccataggcatacagcaaatatagcatttaaagccatatagtctgattcctaagccaactcactaaccattctctgaaagacaaatttgaacaactttccactcagtaaatttttaaatagaaaaattgttttttaaaattgccatatttcaacaataaatggtatataagtcctgaaaagccagtttgtaaaaacaaaatatcagggagttactctcctatccttagcttttatcatcattcacttaattttcagatttgttcttggcctccatagaacacttcctytggatataacctaatctcctaatttagaatgttctcagctccattgcttccacagcttcttcaggtataaaaacttttacatgttttttttctatattcaaatttttaatgtccccagagaatgagccttaattgcaagacacacaaaagagacatttaaaaagatctttctggcttttcccaattcttagctgcttcgaatgtagggtatggtgaggagagaaacattcatatttcaa

SEQ ID NO: 406425 - DNA, 616 bp, Homo sapiens
atttcacatgcattaaaattagcagcagatgaactatagtacattaattaaaaactggagatccaaacagcagggcttcatataatttgcccataggcatacagcaaatatagcatttaaagccatatagtctgattcctaagccaactcactaaccattctctgaaagacaaatttgaacaactttccactcagtaaatttttaaatagaaaaattgttttttaaaattgccatatttcaacaataaatggtatataagtcctgaaaagccagtttgtaaaaacaaaatatcagggagttactctcctatccttagcttttatcatcattcacttaattttcagatttgttcttggcctccatagaacacttcctctggatataacstaatctcctaatttagaatgttctcagctccattgcttccacagcttcttcaggtataaaaacttttacatgttttttttctatattcaaatttttaatgtccccagagaatgagccttaattgcaagacacacaaaagagacatttaaaaagatctttctggcttttcccaattcttagctgcttcgaatgtagggtatggtgaggagagaaacattcatatttcaa

SEQ ID NO: 406426 - DNA, 611 bp, Homo sapiens
atattctttcaggaggatttataagtgaggaagtatccaaagggatgagccaggagaatcttcatgtaagtgggaaaaatgtcaggttaatcacaaaacagatgtcagtatagtaaggaaggctacagatggtgatgtagagcagaaccatgtaaaattttatgagtacccrttccatcttcatcccactgagcatatgtgcctgtttgataccaaattacagcatggatacggggatatggggatcattgtagtcctatcatatttttaatgattctgtaattaacaaaagttcaaaagtgtttaaagttctttttccttcttacttggtaaggagagaacatacttttctctccacaatatacaccgttatgtattctgaacctctaaaagtttataaaagaaaaaaaatgtcatggcagtaacttttggtgatgtgagagtttcatcagtaaatggaattaaatgagagatgggttattgcaaatgtgaacaccagcttcatagtttgagtaccacattttgtttgcaaataaatatctcaagtgctttccaaaggaatgaaaatggaaagacaagtaaaagactagaattacgtaagatccagatga

SEQ ID NO: 406427 - DNA, 546 bp, Homo sapiens
acccactgtcctgcgcctactgtctggcactctccagtgagatgaacccggtacctcagttggaaatgcagaaatcacccatcttctgcattgctcccgctgggagctctagactggagctgttcctatttggccatcttggctcctcccccctggttttctkttcttatattaattttgtgttttcttattctatgattctcaagagcataactgttacaagatcaatttttacagcaatttctctttcaaactagatgatgtacaggcccaatatggagattttcttttctttttttaaccactcaaagtccatgctaaaataaatgtccttgtattctccctatgccaataaatgtgcttgtagtctccctatccctctccctatgtttttattttctgtttttaaccttttggttgagtgcaggctcttgaggtcccaactttatattggtggtctcattccagatccattctgagccctacattctctgctcctctttcggtgcattaaaacccaaaatttagcacatccccaagagtaga

SEQ ID NO: 406428 - DNA, 558 bp, Homo sapiens
atttcaatcttttcatcaaatttgtstgataggattctgaattccttctctgtgttatcttcaatttcattgagcttcctcaaaatagctgttttgacttatctgtctgaaagtctattttgaattctgtttgaaaagtcacatatctctgttcctccaggatggatcgctggtgctttattcagttcatttggtgaaatcatgtttttataaatggtcttggtcttgtggatgtttgttgatttctgggcattgaagtgttaggtattaattctaatactctcagtctgggcttgtttgtatctgtccttcttaagaagggctttttatgtattccaagggaattgaatgttgtggtctaaatctttggtcgctgaagctctatctgcattgggagataataaagcccagtgttgctgtgacttttgtagttttatagatgtgccactttggtgaacttgggtaagatctgtgagaactccctggattaccagccacagtctcttgttctcttcccttactttccctcaaacaaatgcagtttctccctgagggctg

SEQ ID NO: 406429 - DNA, 558 bp, Homo sapiens
atttcaatcttttcatcaaatttgtctgataggattctgaattccttctctgtgttatcttcaatttcattgagcttcctcaaaatagctgttttgacttatctgtctgaaagtctattttgaattctgtttgaaaagtcacatatctctgttcctccaggatggatmgctggtgctttattcagttcatttggtgaaatcatgtttttataaatggtcttggtcttgtggatgtttgttgatttctgggcattgaagtgttaggtattaattctaatactctcagtctgggcttgtttgtatctgtccttcttaagaagggctttttatgtattccaagggaattgaatgttgtggtctaaatctttggtcgctgaagctctatctgcattgggagataataaagcccagtgttgctgtgacttttgtagttttatagatgtgccactttggtgaacttgggtaagatctgtgagaactccctggattaccagccacagtctcttgttctcttcccttactttccctcaaacaaatgcagtttctccctgagggctg

SEQ ID NO: 406430 - DNA, 612 bp, Homo sapiens
tgcaaagccacaggcacagagctaccaaagcctggggagaccaccactttcactaatgtgccctagatgtaagacatagggtcaacagaggttattttggagccttaagatttcttgactaccctgctggattttggaactgcatggaccctgtagccccttacttttggcgtttttctccattttggaatgggaatatttactcaatgcctgtacccccattgtattttggaagtaactagcttgctttggattttgtaggctgataggcagaagggacttaccttgtctcagatgagacagaacttttgagttaatgctggaatgggttaagacttcaatggattgatgataaggcataattgtatttttcagtgtgagaaagacatgagatttgggaggaacctgggatagaataatatgatttggatctgtgtcccgaccgaaatctcatgttcagttgtgatcctcaatgttggaagtggggactggtgaaaagtaattggattatggaagcatttaacaccataatccacttaacaccatcttcccttggtgckgtcatcatgttagtgagttctcatgatatccagttgtttaaaagtgtgtggc

SEQ ID NO: 406431 - DNA, 570 bp, Homo sapiens
ataaagaattgttttaagtgggatagaaaaaaagtccaaagtttgatggaaaattaattctagaagtcaaggccttcatccaaggacaagagagaaagctcatagtgatgtcatcagtggtggaggaaatcattccaaagcagtcccagcacccatctaaggtcagagacatctgacagactaagatggggcccaaagggggattcccccagggatcayggtcagggaccagaattattccagggggatgcctcaaggaaaatttgggtcacctaatgagtcctccacttttcaatgtcatcttctcttttccagaccactacgggcaactctccatctatccctcctgattcctttatggacaactctccatctattccacctgattcctctatggacaactctccatctattccgcctgattcctccatgggcaactgtccatgtattccacctgactcccagctaggctgcatcctccaccattggaatcaatttgaccctgacaacctaaaaagaaaactgtgatgattaatactgagtgtcaacttgattggatagaaggatgca

SEQ ID NO: 406432 - DNA, 570 bp, Homo sapiens
ataaagaattgttttaagtgggatagaaaaaaagtccaaagtttgatggaaaattaattctagaagtcaaggccttcatccaaggacaagagagaaagctcatagtgatgtcatcagtggtggaggaaatcattccaaagcagtcccagcacccatctaaggtcagagacatctgacagactaagatggggcccaaagggggattcccccagggatcacggtcagggaccagaattattccagggggatgcctcaaggaaaatttgggtcacctaatgagtcctccacttttcaatgtcatcttctcttttccagaccactacgggcaactctccatctatccctcctgattcctytatggacaactctccatctattccacctgattcctctatggacaactctccatctattccgcctgattcctccatgggcaactgtccatgtattccacctgactcccagctaggctgcatcctccaccattggaatcaatttgaccctgacaacctaaaaagaaaactgtgatgattaatactgagtgtcaacttgattggatagaaggatgca

SEQ ID NO: 406433 - DNA, 570 bp, Homo sapiens
ataaagaattgttttaagtgggatagaaaaaaagtccaaagtttgatggaaaattaattctagaagtcaaggccttcatccaaggacaagagagaaagctcatagtgatgtcatcagtggtggaggaaatcattccaaagcagtcccagcacccatctaaggtcagagacatctgacagactaagatggggcccaaagggggattcccccagggatcacggtcagggaccagaattattccagggggatgcctcaaggaaaatttgggtcacctaatgagtcctccacttttcaatgtcatcttctcttttccagaccactacgggcaactctccatctatccctcctgattcctttatggacaactctccatctattccacctgattcctctatggacaactctccatctattccgcctgattcctccatgggcaactgtccatgtattccacctgactcccagctaggctgcatcctccaccattggaatcaatttgaccctgacarcctaaaaagaaaactgtgatgattaatactgagtgtcaacttgattggatagaaggatgca

SEQ ID NO: 406434 - DNA, 599 bp, Homo sapiens
gccacctggtcactttgggctcctcctacctttaagtcaacaggctaagaagggacttacagtgttggctggagtgattgacctgaactatcaagatgaaatcagtctaccactccrgaatggaggtaaggaagagtatgcatggaatacaggagaccattagggtgtctcttagtattaccatgcccatgccctgtgattaaggtcaatgggaaactactatggtccaatccaggcaggattacaaatgactcagaactaatgggatatatatatacatatatatattcatacatattctattatatatatattctattagttcagtccctctacagaaacctaatataaaaacatatgattatgttccacaatgctgtttggcaccattatgagctgcccagcccagaacaatggctggtgaatggtagcctttattgtgacaatcctgcaatttgacctattttgtaagtggtagggcaaatggtcagaaatcccatatgtacagcctccatggccctataacaaaacctaataattgccccaaaagaaagtccaaaggcagaactagatattacacatgacccttttcaagggct

SEQ ID NO: 406435 - DNA, 599 bp, Homo sapiens
gccacctggtcactttgggctcctcctacctttaagtcaacaggctaagaagggacttacagtgttggctggagtgattgacctgaactatcaagatgaaatcagtctaccactccagaatggaggtaaggaagagtatgcatggaatacaggagaccattagggtgtctcttagtattaccatgcccatgccctgtgattaaggtcaatgggaaactactatggtccaatccaggcaggattacaaatgactcagaactaatgggatatatatatacatatatatattcatacatattctattatatatatattctattagttcagtccctctacagaaacctaatataaaaacatatgattatgttccacaatgctgtttggcaccattatgagctgcccagcccagaacaatggctggtgaatggtagcctttattgtgacaatcctgcaatttgacctattttgtaagyggtagggcaaatggtcagaaatcccatatgtacagcctccatggccctataacaaaacctaataattgccccaaaagaaagtccaaaggcagaactagatattacacatgacccttttcaagggct

SEQ ID NO: 406436 - DNA, 546 bp, Homo sapiens
aatgccatttaaaacctcagatgaacttcagcaactgtgcaarataaagcacagagtgtaaattccatgagacccacacttcctcctttgcttggtgatttgttgtcttgttttgctttgttattttctcctttggttcaggggaggatttgacaaatgaatctttagctaaagtagggcagagcaagttcctaacatttagctaaaagcagggaagagcaagttcctgactttttttaatacttgaaacgtaccttaggataatgaaaattatgttctttaatgatctaaccaggacaatggaaaagcctgaatcatttaactattataacaaaaaatatagactgcttttggcaatacagaagtctagattttatatgtgtacctttaagctacaaagcacttagataagttgataaaatgcaagaaacaccttctccaatgtttatttgagatcaccggaatataagggaaatacagaggcagaaccaaaatataaatagtaagtggatagaggcagctgttctcaggttagttgcctatctt

SEQ ID NO: 406437 - DNA, 546 bp, Homo sapiens
aatgccatttaaaacctcagatgaacttcagcaactgtgcaagataaagcacagagtgtaaattccatgagacccacacttcctcctttgcttggtgatttgttgtcttgttttgctttgttattttctcctttggttcaggggaggatttgacaaatgaatctttagctaaagtagggcagagcaagttcctaacatttagctaaaagcagggaagagcaagttcctgactttttttaatacttgaaacgtaccttaggataatgaaaattatgttctttaatgatctaaccaggacaatggaaaagcctgaatcatttaactattataacaaaaaatatagactgcttttggcaatacagaagtctagattttatatgtgtacctttaagctacaaagcacttagataagttgataaaatgcaagaaacaccttctcsaatgtttatttgagatcaccggaatataagggaaatacagaggcagaaccaaaatataaatagtaagtggatagaggcagctgttctcaggttagttgcctatctt

SEQ ID NO: 406438 - DNA, 623 bp, Homo sapiens
cattccatttaggcaactgataaattaaaagtgcattttcttgggtgtgaaatatcaacaattcatgattcaatcccttttctctactgcacatgaacagattttaaaaatttaatctgtgrgtatagatcactctgaacagtaggcttctctgatatgtcattttacataatttaatggaaactgtggcttgcaatccactgggaatataatattaccatcttcaaagtgttttttagatccaacactcagtctctcatcaagctgaaagatcttatgcaaaataataataaaaagacctcaaaggtcccttcacagaagcaattaatacctttagaataggctgatttctctctgtttgggagaaggtttcattatgtgcaaattgtgcattcatccttcaattcagaatcctattgtttctgaaaacacaatactcgtgttcctgtggagagtaaaattgaccctatttttgatgtcttgcatagctcctatttggatactttaatgtgtttccctgtatgtaatgacagaaaataccataattaattttccgataagtattaacttgaactgaaaaaaataagccaaagacaaattatatcattctaaatggaccttcc

SEQ ID NO: 406439 - DNA, 462 bp, Homo sapiens
aacattctcttcggcaggagaaagggagctaaatatgaactttatctcccactgaatagaaaaatccattaaaatgtcccccagtggcaacraccacaaagtatttctttctaattatcttatcccctcatcttacaaaatatgaccaatatttacatgtttgtttgcttgcttttatctgggacctctaagaaaccttagtcctaaagtatgactcttccttccccaatatactgcttctttaggttcaaaaagtactaatacagaatggccttagatgaatctgtgtcttggataaattgccctagcatcttcaaaagcttcacttgtatttgtgtgtgttcagctcggtagatcagttaactcaaacctttgcacttttttccagccagataaatgagaaaaaattgcactttaattttatttcaatgataagaaaattaaagttatttctattaaaaa

SEQ ID NO: 406440 - DNA, 546 bp, Homo sapiens
aactgcaactttaagcaaaaggaagtataatgaaacacttttatcacaggctaattggtagaaacaagacttaagttcccatggcatatttctggtcacaaaaacatttccaaacttctcaaaacacttcaatattaagcattcaaatacatgtaaactatgtatatatgtaagaaaggttactataaaccagatcaatatttacccaattrtttaagttcagggtcttaggtggctggagcctatccgagtagctcagggcacaaggcgggaaccagccctagacaggacaccatcctgttgcagggcacgttcacacatgcccacacgcaggctgggaccatttacatgtgccaattcacctaccatgcacatctttgagacgtggcaggaagcaagagtacctggagaaaatccatacagatatggggagaatgtacaaactccacccagacagtggacccagccaggaatcaacatttgggcaacattataatgaaacgaagttgaatgaaatgatgtcgttccacgacctgctgtacttga

SEQ ID NO: 406441 - DNA, 649 bp, Homo sapiens
gttaatatcgtaggaagtccacaatagcgaagttcactgagccacaggggagccacttttatacttttatggttattatctcccatagaatagttctcagaaatttcatgagtattattgtttaatgatgtttttcagtggcaaggatactctggaggtactcataaagtttctctggggagcttatagtttatgtcagataaataacaaaatcgaagccaaatggagagttgaaattttaaagtaatacgcacggtaaaagcagggctagcactatgtagcctttacagtgattttggtattttttttcctaatggttattamaacaaccccatgaagctagttgacaagtgctgtcttcatttgacttaggggcaaactgaagcccagagcagcaaatgtgcttagacagcaaatggcagggctatgattagaactcagatgttctgcttgttccactacgaggcgtctgcaaacaccagcacgttgaaatagggttttagtaatgatcactggagtatgtcatgaaaagtgaatatttatttgaaactcaaaggcaaaaattctttgataggcatttctaggaagaaaattttagttataatacagaatgtgagaattaaacttgtttcagaagcaggctgggaaa

SEQ ID NO: 406442 - DNA, 510 bp, Homo sapiens
tcatgtcatatttggtattattatttcttacttaacaatactcaaaatgatatatcttaatagtattatatgacaatttaaattcaatgaatatatttacctcttgtaatgcatggaaggatatatacctctacatatcagcatacagaaatgctaataattatgatattagaggccctaagttttacagtagagaagtagattaatttttatatacattttatgataatccttctactataaaaygtatgtcttgtatgacttaattttatatttctaatatcagttcataatacaactttcataaagacatgcaatatatgcctacattagaactatgttaacttctaaaactgtttttgagataaatatttactttctttaaataagaaggattattttaattattttcaaaggcaggtactctaatcaaccaacattattcatgtccttaacttactataggtcagttcataataaattaggcatttgaaagaaattctttgaaat

SEQ ID NO: 406443 - DNA, 614 bp, Homo sapiens
gtattaactactatggagagatcaaaggagccaaagactctggaaataaacccttggaatttatacaaggaaaaaaggtacaaatatcggagtaccagctatatgctcagtgcttttccttatgttaaatattttaagaacgaagastgtggcagtgactttggaaagagaattttggcaggaaaggagtgaacaataaatacaaagtggtgccttgggggaatagtgaggcctagctagaaattttttttgttttgttctcttgtgtcaagatagagcaaactgcttgtttgaaggcaggaagaaagaaacctcttgagagagagattagagggagtatgatagaagctaagtgattgcaatggcaaatgttgaaaagttgaagttttagtattaattagcaatcttgaatcttcatgaaagagttaattttgtttaattatgcatggaatgagtccatttttctacatcacctctccttgtctctttgccctttacttttatggctttgaattcttagaaacaaagtctttttcattatattatattcttgtgaacagttaattagttttagaaagaaatatgtattttgactaatcagcttaattgttcac

SEQ ID NO: 406444 - DNA, 184 bp, Homo sapiens
ctgtgacaaattgtggcacttcattttggaccccctgacattttgttcactgtgtaactcttctgcataaacactgactcaagccrcaatccacaatccaagacactgtaagaatggatggaaacagaatcatgtgatgtgaaatgcagagtcatatctcagctcctataataactgtcacaga

SEQ ID NO: 406445 - DNA, 184 bp, Homo sapiens
ctgtgacaaattgtggcacttcattttggaccccctgacattttgttcactgtgtaactcttctgcataaacactgactcaagccacaatccacaatccaagacactgyaagaatggatggaaacagaatcatgtgatgtgaaatgcagagtcatatctcagctcctataataactgtcacaga

SEQ ID NO: 406446 - DNA, 562 bp, Homo sapiens
taccctttacctgccccctgcaaaaaagagttttctttttttcttttttttaatttttttatatccataggttactggggaacaggtggtgtttggttacatgagtaagttctttggtggtgatttgtgagattttggtgcacccaccacccaagcagtatacactgcaccctatttgtagtcttttatccctcacccccttcccaccctttccccaagtctccaaagtctgttgtgtcattcttatgcctttgtatcctcatagcttagctcccacttataagtaagaacatacaatgcttggttttccattcctgagctatttcacttagaataatagcctccaatctcatccaggtcactgctaatgccatgagttcaaaagaaagagtattcttatctcttaggcacctggtcattgttttcagcttgagactataaggaaaaactaaggtagagagggggagatgggaaaaggaggagacgagatcacagttcctayataaataagcacagtattacagtttatgttcagactttaaaagaaaaatcaatctaaaca

SEQ ID NO: 406447 - DNA, 490 bp, Homo sapiens
agccactgcacaccagcctgggtgacagagcaagactccatctcataaaaaaaaaaaaaaaaaaaaaaaaaaaaaaatatatatatatatatatatatatatatatatatatataaaagaaaaaaatatawcttttcgaacaaaaagaggggaaatggtgcaagaaaaagaaacaaaaaccaatgcaaaaggatgaaaaaggaaaataaaaattaaaggtaagatagatagaaagctcaagatatgacaatgattataatcaatataatgaaccaaactcttcagttaaatgactaagattatcagactaaaatcctgaatgtttaaaataaaaactcaaaacttaaagacacagaggagcagttgaataaaaggattgaaagagacaaatacaaaccaaaataagactatagtagccatattaatgccaaacccatattctgaggtgtaaaacattatcaggtataaagaaagacactatataataata

SEQ ID NO: 406448 - DNA, 646 bp, Homo sapiens
  misc_feature (1)...(646): n = A,T,C or G
ctctctacctccccagactgaacgtaaccaccatttttccactaacaccacggcccacagagcactgtgggagaaataccatgcctggagggtctttctctgaagaaatgatctaaagtaattgtctaaagctctcagaagcattggcttgaaggaaattgccaaaatcctgagagatttggcattttgagtcatgtgacgaactgcccacagaaggcrgatttcaacaggagctgtaactgactgtgaattctgacggtcgtccactggtgattaatgacatcagggaaagcaagccagcaggcaccaatgttaagagaganagctattttaaatatcnccgcattttaattaaatatttcttcttataacacttgcaacctaaaaatagttatgatctgtccgcaggggccacttcaagtcgacatggagaagtttaattagattgcctcaagcaagaatgttattctccaagtttcacgatattggcattaactcccggactgaagtaagtgcaatttacacatgtgtgtgatgcctgctgaagtggaggacagtattttctacaaaatcctgatatcagaagaggctggaagaaaggcatttgtaattgacttcatatttacaattgcttaaaaatccagca

SEQ ID NO: 406449 - DNA, 646 bp, Homo sapiens
  misc_feature (1)...(646): n = A,T,C or G
ctctctacctccccagactgaacgtaaccaccatttttccactaacaccacggcccacagagcactgtgggagaaataccatgcctggagggtctttctctgaagaaatgatctaaagtaattgtctaaagctctcagaagcattggcttgaaggaaattgccaaaatcctgagagatttggcattttgagtcatgtgacgaactgcccacagaaggcggatttcaacaggagctgtaactgactgtgaattctgacggtcgtccactggtgattaatgacatcagggaaagcaagccagcaggcaccaatgttaagagaganagctattttaaatatcnccgcattttaattaaatatttcttcttataacacttgcaacctaaaaatagttmtgatctgtccgcaggggccacttcaagtcgacatggagaagtttaattagattgcctcaagcaagaatgttattctccaagtttcacgatattggcattaactcccggactgaagtaagtgcaatttacacatgtgtgtgatgcctgctgaagtggaggacagtattttctacaaaatcctgatatcagaagaggctggaagaaaggcatttgtaattgacttcatatttacaattgcttaaaaatccagca

SEQ ID NO: 406450 - DNA, 564 bp, Homo sapiens
gattttgatatgagctgagaggtaggatctagttatattgttccccatattcaacaagctgcccaagtttttcttaaactttccaagcgtttctaccagtgtccagagacacagctcgaagggggcctcattcagcagtccacagcatcaaatgaccgccaatggaatgaccacaaggcaataaacaggtttcatcataaattatggaggagagtgccaaatattttctgagagtattattaaggaaagtattttgtctcaaagctattgcaggagggacaaatrctattagaacaaccagaggaatatttactctgcaccagtggtcaaaagtggtgaggatgaaaagggatgcagatcctacaaatgccgggtgagactgaaggacagattctcatttttaaagatcaatcataattttcttcacaagagtatttaaacgttaatgaattcagatgttaactccccgtgccaggacaaaatgtttatgacctttccacaggttacagccaggacagcctggccgcgtcgacagtttggaagactgagtacagggagctgtgg

SEQ ID NO: 406451 - DNA, 629 bp, Homo sapiens
gtggcaggaggcggggggaatccaggcaatagaaatagcaagtaccaagacctgaggcaggaagagccagaaaaccagcaagtgctggggcaagtgagaatgggatgtaaggaggggaacatgagagagttaaagagaagttgatcaatgggtacaaatatatggtttgatagaagaaataagaactagtattagagagatcagtagagtgactatagcttacaataatctgttgtacacttcaaaatagctagcagagacttcaaatggttttaacataaaggcatatatttaaggtgatrgatatcccaaatatactgattttatctttacaaattatatgaattattgcatatatcccaaaattatgtacatccattatgtatcttttttttcctttaaaggtgagttaggcagaacctgattactttgactgcagggtgatggcacggaaatacaagtattgagtagactccagatgtattttggaggcagagtccacaaaacttggtgttggattggatgtagggaaagggaagagtgaagggtaggggccagatttctggctcaaactaggctggtggcaccattgctgagatgcggagaactggagagtcacagtttgcata

SEQ ID NO: 406452 - DNA, 571 bp, Homo sapiens
tttatcttttgctgtaacagctagtattttgcacttaattagaactctaaaagtaggaaaacacacaacacaataaaattgttgcaagatcttctagttccttgatcccaaatttttgacattgggaatttaagatccgtctaccttaaaatatttcatgaaactaaaacatttagggataataggtcttaagggaattactctggttgaggaggttaaaaaaactaatctgatagctattattgaattttcaatgttttactttttaaaaaatttattwaaaaaaaaataggaagaaaagaaacggggtctcaccatgttgcccaggctggtttcaaattcctgggctcaagcaatcctcctacctcagcctcccaaagttctgggattacaggcatgagctactgtgcctggcctgaattttcttagtaattaaaatgtagcctacttttatgtttccagaattttgccagataatgaatttaacttaggatagctcatttattttaaaaggttagtatgtttaatgtgttctgtctactaaacaggatgactcagcaatgatgtttct

SEQ ID NO: 406453 - DNA, 600 bp, Homo sapiens
tctacataacaacgctgctgaccacatggtgacggtttcaaaatcacacatatcaatactaaccatgaatgtaaacaggctaaacaacccacttaaaagacagagtggcaagctggataaaaagaaaataaccaaccatctgctgccttcaagagactcatctcacaagtaacaacacccacagtcttaaaataaagggatagaataaggactgccatgcaaccaggaaagaaaaaaaaaacaaagaacgggagtcatattatcacatcagaaaaaaagatttaaaccaacaaaaatgaaggacaaagaatgacawtacaggatttcaggccagctccagtctgcaattcctattgacaccaatgcagaaggcaggtgatttctgcatttccaactgagatacccagtttatctcattggtactggttaggcactgggtacaacccatggagggtgagcagaagcagggtggggcatcacttcacctgggaagtgcaaggagccgggggaacctccctcccacagtcaaaggaagcccatgagggactgtgctatctggtgcagatactacatgttttcctatgcttttgccatggtttt

SEQ ID NO: 406454 - DNA, 596 bp, Homo sapiens
cccattgtttggttctgtcagcctcatcaaagatcagatggtagtagatgtgtggctttatttctgaattttcaattctgtcattggtctatatgtttgtttttgtactagtaccatgctgctttaattattgtagccttatagtatagtttgtagttggatagtgtctgtggatttgttctttttgcttagaattgctttggctattcaggctttttttttgctctacataaattatagaattgtttttctaattcggtggacaatgatgttggtagtttgacaggcataatgttggaactttaaatactttgggctataaattattcaggctattttttggcttcacataaattatagaattgygttttctaattctgtggaaaataatgtttgtagtttcataggcataatgttgaatctataaattactttaggcagtatgaccattttaatgatattgattcttccaatccatgagcatgggatgcttttctatttgtgtcatgactgatttttttttagcagttctttgtagttctccttgtaaagatctttcatgtccttaattagctgtattcctaggtattttattt

SEQ ID NO: 406455 - DNA, 561 bp, Homo sapiens
cacaagatctgatggttttattaagggggagtttccctgcacaaattctctcttgtatgtcaccatgtaagatatgcctttcgccttttgccatgattgtgaggcctccccagtcacatggaactgagtccattaaacctccttttctttataaattaccctgtctcaggtgtgtccttatcagcaatgtgaaaatggaataatacgcccctcytccttgattttttgtagtaatttcaggacaattgataccagttgtttttgtacatctggtagaatttgactctgaatccatctatttccagggcttttattggttggtattttttttattatgcattcaatttcagagctcaacactactctatttaggatttccaatctctttctgattcaatcttgggagattgtatatttccaggaatttatgcatttcctctagattttctaatctgtgtgcataaagttgtttatagtattctctgaggatcttctgtatttctgtggaaccagttataatgtcatctttgtcatttctgattgcgcttatgtggatcttcc

SEQ ID NO: 406456 - DNA, 561 bp, Homo sapiens
cacaagatctgatggttttattaagggggagtttccctgcacaaattctctcttgtatgtcaccatgtaagatatgcctttcgccttttgccatgattgtgaggcctccccagtcacatggaactgagtccattaaacctccttttctttataaattaccctgtctcaggtgtgtccttatcagcaatgtgaaaatggaataatacgcccctcctccttgattttttgtagtaatttcaggacaattgataccagttgtttttgtacatctggtagaatttgactctgaatccatctatttccagggcttttattggttggtattttttttattatgcattcaatttcagagctcaacactactctattyaggatttccaatctctttctgattcaatcttgggagattgtatatttccaggaatttatgcatttcctctagattttctaatctgtgtgcataaagttgtttatagtattctctgaggatcttctgtatttctgtggaaccagttataatgtcatctttgtcatttctgattgcgcttatgtggatcttcc

SEQ ID NO: 406457 - DNA, 525 bp, Homo sapiens
atccacacatttatggtcaacttgctttcaacaagtgccaagaaaacacaatagacaaaagacaatcttttcaataaatagtgtaaaggaaactagatattcacaagcataaaaaagaaatgggacccttttcttattctttataaaaaatcaacacaaaataaacaactaaatgtaagacatgaagctgtaaaactactaaaggaaaacacaatgaaaaatcttcttgacattgatctgggcaaagacattttgacattacctcaaamcaaaagcaagagggtggctggcaagatggccaaataggaacagctcctgtctgcagctcccagcaagatcaacacagaaggtgggcgattcctgcatttccaactgaggtagccagttcatctcattgggactggttagacagtgagtgaatcccacaaagagcgagctgaagcagggtggggtgatgcctcacctgggaagtggaaggggtcggaaaactcactcccttagccaagggaagctgtgagggactgt

SEQ ID NO: 406458 - DNA, 581 bp, Homo sapiens
tcctcctattgccaggttgggtgtagggaaacagcaggcctaggtcaccttcttctgtcgtgtggaggacttaacatgctcgctcggacacttggttgatccctgatgctagggtcccagacaatttcatctttctctttccacctttcagagttctccattgcttttgtctttcattaatcccagagtttatagttgtttttagtagggagtagcagagagagacgagtctacaccacctggtcaggatcactgttattccaccaaaaccaaatcagataaaaaagtgaggtcttatgtagttaaagaatggtgtggtacccagaaaacccaatatgtagcttccatgtcatttatttgtgaatsacaacctctaatttctcttctaaatctccaactctgagaaatatagcacaaaaatagtttgatttagtcacagtatctggaggaatgaatgcacagtatcaggagacttatttaaatccttactgtgtttattcagtcaattggggtaactattataatgcaagaattaaaacttctttattaacatgagaagaataaaagtactaagtatggtc

SEQ ID NO: 406459 - DNA, 448 bp, Homo sapiens
taaaagtttaataatagcaaccatataaataaatatctttgcttttacttctttctttctcccctccctctccttttcttcctttctgtcttctatttgctgcataactactatatgtcatagaatatttgatgacattttcaagtgtaaatagctttcatctrtattatctcatgttatccttgtaacaatcttttaggttaaatacagaagtattagcttctcttgctgatgagaaaatctgtaaacattgttttccaagtttttgccctacatacaaatataggacctcaaccccatataacataagttccgtcaagagttgctaaagtccctaagcagtatcttgtatgtgtttataaaccagtctggagctagctgattttccaggttctagcagggtttcttctgaccagtacttcgtttgccatgtcacatttactgggta

SEQ ID NO: 406460 - DNA, 579 bp, Homo sapiens
tttatttgtagacccttatgatatacagcttataatttctacttatttcccatgatttcaatcacttcatgcttataaatacaaagagttttctgtattaaatttttaagatgaatttcattgattaatattatttaggacatagaaaaaaacacaacttaaattcagtgtttataataaaacaagytggtttatgcataatgtattcctatcttctagcaagcatctgctgcactaggaaccccaacactggctttttctgcaaagaaaaaaagtaacaaaaagaaaatatttacagctattttcagatccaaattcaaaattttagcttggactaggactcagtgggacttcattagaattgctgtagagaattggaaaactgaaaagagtttctgcattccctgtgcagcagcaggtctgcagaattcagaataatccccctgggaggcattaagcaacaagtcatgatttctcactttcctgtttcatttgtttgagagggtagttttccttttgtgagagagggtaaaaatgaagttattagttttggtttttgctctcctgcagtatcatgtc

SEQ ID NO: 406461 - DNA, 548 bp, Homo sapiens
accgacaaaaacaaaaacaacgtgctaaaacatagaaggcaaaaaaagagcagtcctataaaggaagtttagagataaacatctacagtaagaaaacaaaaagatctcaaatgaacaacctaagagtataagtaaaggaactagtaaaagaagaccaagctaagcccaaagttagcaaatggaagaaaataataaagattagagcaaaaataaatgaaatcaagggtagaaaaacagtagaaaagatcgataaaattaaaagctggtttttaagaacacaaacaaaattgataaacccttagttaaatcaattaagaaaaaaagagagaaaattaaataaaatcagaacyagaagaggagatattacaaccattgccatagaaataaaaaagatcataagggactattatgaacaattatacaccaacaaattcaacaactagaagaaacagacctatttctagaaacatataatcttccatgactgagtcacatagaaagcttgagcagaccaataacaaataaggattaaaccagtaaccaaaacc

SEQ ID NO: 406462 - DNA, 582 bp, Homo sapiens
ctcagcattcagaaaatgacacttttagcacatttccctatttcagggaccagggggtacagtttgatcctaaatgaataagatgcagtacaaactgtgtggattccatctctgtggattctcctactcttgcttccttctaatatttcattcattttcaaagttagacctgtcttcaattccccttcagctcctggcactcttgactgatttcttttgagtctactactttctgtctttcccagtgaaagctataagactttgtcaagctgtgctctaagtttatttccccaaagcctttcaactgtgtctgcgtcaaggcctcaggcatcmggtgtttctcctttagtggaatgccaattttaaagagacgaaaagcatagtatggaacccttttaatatttggtttcatgactagatatgccaatctcattggaacaaacttggaatatcattaattaaaaccaacttatcacccagtttatttatagtatatatgaataatatttgcagctcactggagggatagtatattaatttggacttttcttaacctcaaattacagcagcccactccagcca

SEQ ID NO: 406463 - DNA, 582 bp, Homo sapiens
ctcagcattcagaaaatgacacttttagcacatttccctatttcagggaccagggggtacagtttgatcctaaatgaataagatgcagtacaaactgtgtggattccatctctgtggattctcctactcttgcttccttctaatatttcattcattttcaaagttagacctgtcttcaattccccttcagctcctggcactcttgactgatttcttttgagtctactactttctgtctttcccagtgaaagctataagactttgtcaagctgtgctctaagtttatttccccaaagcctttcaactgtgtctgcgtcaaggcctcaggcatcaggtgtttctcctttagtggaatgccaattttaaagagaygaaaagcatagtatggaacccttttaatatttggtttcatgactagatatgccaatctcattggaacaaacttggaatatcattaattaaaaccaacttatcacccagtttatttatagtatatatgaataatatttgcagctcactggagggatagtatattaatttggacttttcttaacctcaaattacagcagcccactccagcca

SEQ ID NO: 406464 - DNA, 516 bp, Homo sapiens
tgatgtcattgatgagtcacagatcacagataaaataggattgggaacatttatcatatttgtttatttttcttggtttcagattttgtattctatgcaaaataaatttcaatttgcatattaattactatgtaccatgtwaagtaccaatgtaggcattatgatgtaaaaacacatttatttaaaacacaagtaattcatgtccaatagaaaaatattggaaagcacagataaacaaaaatttaaaaagataaaattaagaacccaattttggagctttcctccctattcttcctgccaagtacagctaaaacccctgaacattatgtataaaaaacagaagaaggctttgaaaggtagaaagaggaaagtagaccagctaagaatcttaagaccaagaaataacatactggagagttccttgggttttctttttgcctcatatatcccagacttggagctgaagaagctagcaacgcgaaacacccagggcagcgatgtaaccaatgaagattc

SEQ ID NO: 406465 - DNA, 566 bp, Homo sapiens
aaaaaactttgatatttaactaaaatatcatcaaatgggactcgatttaatgtttttatacttaattatttaatatctagacatctctaagcatttacttttctacttcctatccctgtacatcagtagttcttatttttttttccatcctaacatctgtttacatgcaaaataatcacacacccaggtattgaagttgggctgtcgataaaagctgggattatacacatttgctaatatgggctatcactaatttcatttctttctcacaatgagaaagtaaatacgtgagaactgatgtccttgattatcaccactggaatgcagcaratgtttacagagaaaccccattgctcatggggtttctccttgatatttttagtccctttgatatttttactcagaacatgtcagaaaaatacaatacccactaaaataggaaattgtcataatcactgactccccagacagaagcttcttttacagaagaataaactgattctttagaaataaaagttactttcccaaattggtaatacagattttgattaaaaatgaatggcttt

SEQ ID NO: 406466 - DNA, 613 bp, Homo sapiens
ggataaaggttgcatgtgtgaatggtgtaaataaagtaaaacataggatttatggagtgctaaacctatttccagaagcaatgtgggctaaatagccttcatacagcctcttaaccagcagacaggtcatggatcaagcaagagtctgaaaataaaaatctacttaactctagcccctggcttatgattgatgtgttaaaagtaaataakcagatgtgtaaatattaatagatagcagatagcatcatcttcccattgccacacaagactactacaatttataaaagcagaaaactaacaaactctattgtccgttatattttacaggagaaggctttggggtaagaatgccccattatgctctctcaactgactagtatttttaattaaaagttacggttatgctcattaacaaaaattttactgcagagtttctgcaatgatggaaaatatttgaaatatttggtaaggatacatttatttggcaagaaaattaaagttacattggtctataatggtgtatttttatacacactcataaaaggttttaggtgcagacatatgttctgttgaatgacttggaattgaaataaatatgatgctgaaaaacata

SEQ ID NO: 406467 - DNA, 619 bp, Homo sapiens
ttgtaccatctaatgactgtattagtgtagattcaaacaggagatagacaccacacattgggttagactacagaagtttaatataaagaataataaaactatgataaaagaataactacaacatttgagaaaactctctatggtaccccaagatggaaagtaagtaccacaggaaagacaaatttggtagggggcttccttcccaaggctggtgtgatggttcatactgagtgtcaccttgactggatggaaggatgcaaagtattgatcctggatgtgtcagtgaaggtgttgccaaaggagattaagagttgagtcagtgcactgggaaaggcagacccacccttaatctgggtgggcacaatctaatcagctgccagcacgcccagaataaaagcaggcagaagaacatggagagatcagactggcttagcctcccagcctacatatytatcccatgctggatgcttcctgccctcaaacactggactccaagttcttcagctttgagactcggactggtttccttgctcctcagcttgcagatggcctattgtgggaccttgtgatcgtgtgagttaatactcactccttaatcaactcccctttttatatacat

SEQ ID NO: 406468 - DNA, 562 bp, Homo sapiens
gtaaagtaatttaacattttaactcttggagtctaacccttcagaactatgctgtcctgtctctcaaaacagtgtgagcattttatattttaagcacgtacccaaaatatcagcaatacttttaatctctatattttcagttcttccattagagatggaatcatggatgatttttattttgtgttttattttctaagtttttgaaaataacatgtataatcattatgatacagygagtagtttttctttgttgtcgtaatgatttaagatacagtttctgttcatcttgattcatatataattgtcttaaatgtagaactcatggaaatttgcccaagaatatgaccttactctctttacagcccaattgtcatcaaaacttcagcttgttgaaattcttatccttaaagatttatatttaatttacttttctaggtaggctaaatttcagattagacaagactctcagagaaccatgtgctaggaactagatgtcctttatatgattgtttttacaaaaatgaaatttggaatttttccatcaactttatattgagacata

SEQ ID NO: 406469 - DNA, 562 bp, Homo sapiens
gtaaagtaatttaacattttaactcttggagtctaacccttcagaactatgctgtcctgtctctcaaaacagtgtgagcattttatattttaagcacgtacccaaaatatcagcaatacttttaatctctatattttcagttcttccattagagatggaatcatggatgatttttattttgtgttttattttctaagtttttgaaaataacatgtataatcattatgatacagcgagtagtttttctttgttgtygtaatgatttaagatacagtttctgttcatcttgattcatatataattgtcttaaatgtagaactcatggaaatttgcccaagaatatgaccttactctctttacagcccaattgtcatcaaaacttcagcttgttgaaattcttatccttaaagatttatatttaatttacttttctaggtaggctaaatttcagattagacaagactctcagagaaccatgtgctaggaactagatgtcctttatatgattgtttttacaaaaatgaaatttggaatttttccatcaactttatattgagacata

SEQ ID NO: 406470 - DNA, 618 bp, Homo sapiens
aaccactgaattttgaagcttcagttgctaaagctacctaaattgacaatttcatacccaagacactcatgtaaacctcacaaggttgtgagaaatgaatgtgataatgtatgtaaaagcacatggcacagtcactggaaaactgtagttaagggatggttttcattgattcaatgcatttatttcacttcttactagccttgtcactcttctttcccttccttgttccaggcttctggctccttgtctctcacccttacctgtgggagtgtaacgcccctgctaagagcagcacgcacatctctgagctcatggacccagcagtatcaatgcctttgctctctgaatctgctcttagtcctacccatcacacatgcacattccagttttgattcctactacagctttgtatgctgcttagcactgagggaagcaaggcagaccagccccatcagctacaacagtagaatcatccgtggcatccacaarttgatataggtgtagtcggttctctggcacatcacacacctgaacaaacactcacagaatgttctgaatattatgtttctgaccaagtgaagataaaggaaggaccaaaagcgacagaaaaagctacaa

SEQ ID NO: 406471 - DNA, 403 bp, Homo sapiens
caatattttaatggcaacaactaatctcagaattttcatatttcctgaaggatgggcttagtagaaaaagagaacaatagctggtgacagccaggagctggccagtgctattcactgggctttgatgtacaaggagttggactagcacttgtggctacgccacggtattctcatgttgaatataaacaatttcacacaactccaacgtgagataagaccactctgtttcactgatggtcttgtttcttcgcaaaacaagaccactgaactattttgtctgatgacagatacaacatacacatttccaaccttaaaaaaaatgataaaacatctgttyatcctggctaatgtgaataactgctgcttcttaccaaacagacttgcttcattctttttagttttc

SEQ ID NO: 406472 - DNA, 597 bp, Homo sapiens
tcaatctgttaagacagctgtgctatactactgtcccctcctcacaactctgttattccagaatgtttttatccatactttctattgaatattctgaagtatatttggtctataaagtagaggagaagatgcagaaatcacccaccttctacattgatctcactgggagctgcagactagagctgatcctattcagccatgttgcccgggaacccacatgggggcctgtcaggcggctggggggtaggggagggagagcattaggagaaatagctaatgtagatgacaggttgatgggtgcagcaaaccaccatggcgcrtgtatatctatgtaacaaactttcactttctgtacatggatctcagaacttaaagtataataataaaaaaaaaaagtagaggagaagaggcaaccttttttctcgatcaattcatgaaagtgatttattatcatatattagggatcaggtaaattatttaaaaaatgtcaccatcaaaacattttgttcttctttttcatgtatatttgcatttaggaaagtgagaaattcctttctccatctccctttaactatttgtttggtccccaaaatttag

SEQ ID NO: 406473 - DNA, 591 bp, Homo sapiens
cttcaaaatacctgacaatcttgttagacaaaccttttctggggcaactaatagctagaataatgttcttattcccttaagtttgttttaattactgtttgtacatctctttcctatttcccagaaatgcggtaaagactttattgagtataattaatagaaaaacaattatgtatgtgaaaacaagaatgaagattctcattcaacacatgaaaaagaatgatgggtttgaattttgatagagtgttyacaacatgattttaatcacacccccagcttacagactccagcatacatgggcaaaatgtatgtttaacagagtaggaggaagcatttgctactacaccagctataagagtatcctaaacaagtaatggccaccatgactagcactgcttgcattccagttgcgttttctaatgtaggcaagggtaatggaattgatgcacatgttctttttgcttgcatctttttttttcacttatcattaaggtcccttatcatttagtccaatctttgcctgctaactagtctatgtactgaaaatgatatgaataactaatcagcctaaaatgttctatgtaagcccat

SEQ ID NO: 406474 - DNA, 585 bp, Homo sapiens
ctgtttgcagattacataatcttatatttggagaaacctaaagactccaccaaaaaaactatttgaactaacaaagaaattaagtaaagttgtgggataccacaatagcaacatgtaaaaatcagtagcatttctatatgccaacagcaaacaatttaaaaaagaagtcaagaaagcaatcccatttacaacaactatgaatgaaattaaatacctaggaagacaatcaaagaagtgaaagatctctacaatgaaaattataaaacaytgatgcaagaaatgtaagaggacacaacaaaggaaaagatattccattttcatgggttggtaggatcaatattactaaaatacccacactatccaaagcaatctggagattaaacgtaatcactatcaaaatactgataacattcttcacataaacagaaaaaaggattctaaaatttatatggaacacaaaagacccagaatagtcaaaaccatcctgggcaaaaagaagaaaactggaggaatcacattacgtgactccaaagtatactacagagctatagtaatcaaaacagcatggcactggcataaaaacag

SEQ ID NO: 406475 - DNA, 534 bp, Homo sapiens
aaaccaacagcacctccaacagcaaaaacaggaacagtgagctctggaattcatgtcatgtttattttgataaaagaactatattcatttcaatgaaattttgacaagaagcggcagcagtgatgagttcatttccttgaattctctttgcccaaacagcctaagaacttaccttttcacagaaagacatttctgtgaccactttattaagttttagctaagaagcaatgcttcccatttttcatacatttgagaagtcagtttacgtaaaagcagctaccctgaggactcatttttatgaatcaacttttactgttgttgccaagagctgacattagcatgcagattttgaagtcattttaagtattgtctgttaattaacatttactttattaatgtaaaatttactaaatcattctttgttagagattcaaaaatttaatgtattcaaatgactatataagatgcacrgacatctcacattttaagtgttagtagcagctaatctttcaacgaaattgcttcagttctcta

SEQ ID NO: 406476 - DNA, 570 bp, Homo sapiens
gcaataacaatcgcccatgtactacctccccagctaaagaagaagctgacatttttttctcctctgatatatataactgtgacagtttgaaaagtgccttcagggaaggttataagagtctccaaatacaaatccgtgtcacttaaaactggacaacaccttgtggaaactacagaacaaaatgtgtctgcactgacttggaccccattcctcttttttatttttatattttatttattttattttattttttattgagacagtgtctcgctctgtcaccaggctggaatgsagtggcgcgatctcgactcactgcaacttctgctgctcaggctcaagcaattcttgtgcctcagcctcctgagtagccgagactacaggtatgtgccaccatgcccagctaaattttttgtatttttagtagagatggggtttcgccatattggccaggctggtctcaaactcctgagctcaagtgatctgcccacttcggcctcccaaagtgctgtgattacatgtgtgagccaccacgcctggccccattccttttatctatgacaatcacctact

SEQ ID NO: 406477 - DNA, 546 bp, Homo sapiens
ctaaaagctattgtttctattgaacaatagaaatgcatacaaaaatatagatagaataaatacaagagtatttgataacaccatgaagattacagtcaataatttattgtatattttaaaataactaaagagtataattgtgtaacacaaagtaatgataaatgcttgaggtgatgaataccccattaaccctgttgtgattattacacattgtatgcctgtatcaaaatgtctcatgtactccataaatatattcatctactatatacgtataaacatttagaaataaaaagaacacatrcaagtggccaaaaagcatctgaaaaactgctcaacatcatgaatcagagaaatacaaattaaaatgaaaatgagataccgtctcacaccaatcagaatgagtgccattaaaaagtcaaaacaactgatgttggcaaatgtgtcagtctgtttgcactgctataaatgaatatgtgaagctgagtaatttatagagaaaagagtgttatttgggctcacagttctgcaggctgtaaaggaagcatg

SEQ ID NO: 406478 - DNA, 571 bp, Homo sapiens
ataacacctggttttaacttactaaaagaggcactgaaaatggaaagaaaaacagtctcgaattgctcaggccacccatcccctrtctcccagcagtggctgcatggtgcagagaatctgtgcaattggggagggagaacacagtgattatgagactctgcattgaactcagtactaccttgtcacagtggaaagcagaaccaaactatatgtagttgatgcttgcccatggagggagcatctggaacagccccagctggaggggaatcacctatcccagcggtcagaacttgagttttagcaagttgccaccactggctggagtgctctgaggccatcagtaaacatgaagggcagtctaggacacaagaactgcaactttttggtgagttctggtgctgtgtcgggatgagagccggtgaacttggaaggcacatggcctactgagacacaagctggggcagctaagggagtgcttgcaccacccctctcccaaccccagactgcacagttcatggctccaaaagagaccccttctgaccccttcaggagagaagaggaagagtaaagg

SEQ ID NO: 406479 - DNA, 571 bp, Homo sapiens
ataacacctggttttaacttactaaaagaggcactgaaaatggaaagaaaaacagtctcgaattgctcaggccacccatcccctatctcccagcagtggctgcatggtgcagagaatctgtgcaattggggagggagaacacagtgattatgagactctgcattgaactcagtactaccttgtcacagtggaaagcagaaccaaactatatgtagttgatgcttgcccatggagggagcatctggaacagccccagctggaggggaatcacctatcccagcggtcagaacttgagttttagcamgttgccaccactggctggagtgctctgaggccatcagtaaacatgaagggcagtctaggacacaagaactgcaactttttggtgagttctggtgctgtgtcgggatgagagccggtgaacttggaaggcacatggcctactgagacacaagctggggcagctaagggagtgcttgcaccacccctctcccaaccccagactgcacagttcatggctccaaaagagaccccttctgaccccttcaggagagaagaggaagagtaaagg

SEQ ID NO: 406480 - DNA, 563 bp, Homo sapiens
aagcgtagtgggaggatgcggtgagataagggtagttaatgggtaaaaaaagaatacttagaaagaatgaataagactagtatttgatagcacaacagagtgactatactcaatgataatttaattgcacattttaaaataattaaaacagtaaaattagattgtaacacaaaggataaatacttgaggagatgcagactccattttacatgatgtgattattatgcactgcatggctgtatcaaaatatctcatgcaccccataaatatatacatctactatgtacccaaaaattaaaattaaaaaattttacaaaatatgataaagttggcaaaggaagacacacttctcaagrgagacatagaagcatccaacaaacatatgaaaaaatgctctgcatcactaatcatcagagaaatacaaaataaaaccacaatgagataccatctcataccagtcaagatggcttttgtgaaaaaggcaaaaaattacagatgttggcaaggctgcagacaaaagggaaccctcatacgctgttggtgggaatgtaaattaattcagt

SEQ ID NO: 406481 - DNA, 526 bp, Homo sapiens
tgccatatatgcgcaataaaataaatcttaaattgcaaaatgtttaaaattaattcacatcagaattgtaaatcaaaaacmaagttaatttttagaattagtaacatattttaaagtctcaaatataaataaataagacagtctatttgaaattacatagatttaagaagaaaacacaaaggactttagaacatatttctgatttgatgacaattgataataaaatatagtagatcaaaatttataaaattaagtgctcagaaggaaattcaaagctttaaaaaacttatactagaaaataagaaaggcctaaacatttacttatcactttagaaaattagaaaaagaactaactgtaggcaaagtaagttggcaaaaggaaataatgaaaacaaaaatagaaattaattaaatggaaaacaaaaataactagacatccagaaatcaagagagagaaaaattaacaagtaaggaattcaaaggagatgccactacagatagtaaaaccattaaaatgatataaata

SEQ ID NO: 406482 - DNA, 599 bp, Homo sapiens
catacacacaacttgaatcaatcttaaaaacatattttgagtcaaagagggcagtcataaaagaatatatacagtattattttacttcatgaagttcaagagaaggaaaattactccaaggtaataaaaattagaacagtctctgcctattcggggattgacyggaaagagaataagcaagtactctcaggtgatttatatgttctatagctagcctgtgtagtgactacacacatataaatatttattaaggccgggcatggtggctcatacctgtaatcccagcactttgggagactgaggcaggcaaatcacctgtggtcagaagtttgagaccagcctggtcaacatggtgaaatcccgtctctactaaaaatacaaaaattagccaggcatggtggcgcgtgcgtgtaatcccagctactcaggaggctgaggcaggagaatcacttgaacccgggaggcggaggttgcaatgagctgacatctcaccactgcactccagcctggggggactccatctcaaaataaataaataataaataaataaataaacaaatatttattaaaagttgttgaattgtacacttaaggtctgt

SEQ ID NO: 406483 - DNA, 599 bp, Homo sapiens
catacacacaacttgaatcaatcttaaaaacatattttgagtcaaagagggcagtcataaaagaatatatacagtattattttacttcatgaagttcaagagaaggaaaattactccaaggtaataaaaattagaacagtctctgcctattcggggattgactggaaagagaataagcaagtactctcaggtgatttatatgttctatagctagcctgtgtagtgactacacacatataaatatttattaaggccgggcatggtggctcatacctgtaatcccagcactttgggagactgaggcaggcaaatcacctgtrgtcagaagtttgagaccagcctggtcaacatggtgaaatcccgtctctactaaaaatacaaaaattagccaggcatggtggcgcgtgcgtgtaatcccagctactcaggaggctgaggcaggagaatcacttgaacccgggaggcggaggttgcaatgagctgacatctcaccactgcactccagcctggggggactccatctcaaaataaataaataataaataaataaataaacaaatatttattaaaagttgttgaattgtacacttaaggtctgt

SEQ ID NO: 406484 - DNA, 632 bp, Homo sapiens
ttgccctgtcaacatggtccagaatgaattatgaccagatcactactctagtgagtggaaaagataaaagggaaatggagggttatgcctttcctataagagtgcaaccaggcagttgtgcacctcatttttcctatccccattgaagattacttcagctaatgytactgaaagcaaagcaggaacatgtagtttctattctggttggccacgtgccaagttaaaattaggggttttattattaggctggtgcaaaaggaactaaggtttttgccattaaaagtaattaatgccattaaaagtaatggcaaaaaccgcaattctttttgcaccaatctgttactagagaaaaagcaggtaatggatgtttgacaattagtattgtctagtttaagcagattcaaataaccattttaatttaaaatgtattaagcatctttaaaaacagtgtgaaatcaaagaaagaatatctgacaaagggccaagagatgttggtccttttccagatctaccaagaactagctgtgcaaccttgaagcagtcactcaactcctcttaaatttggtatgccatctgtagtactgaactaaaaatactcagctgcacctaagcaaaagattctccctaaaact

SEQ ID NO: 406485 - DNA, 632 bp, Homo sapiens
ttgccctgtcaacatggtccagaatgaattatgaccagatcactactctagtgagtggaaaagataaaagggaaatggagggttatgcctttcctataagagtgcaaccaggcagttgtgcacctcatttttcctatccccattgaagattacttcagctaatgctactgaaagcaaagcaggaacatgtagtttctattctggttggccacgtgccaagttaaaattaggggttttattattaggctggtgcaaaaggaactaaggtttttgccattaaaagtaattaatgccattaaaagtaatggcaaaaaccgcaattctttttgcaccaatctgttactagagaaaaagcaggtaatggaygtttgacaattagtattgtctagtttaagcagattcaaataaccattttaatttaaaatgtattaagcatctttaaaaacagtgtgaaatcaaagaaagaatatctgacaaagggccaagagatgttggtccttttccagatctaccaagaactagctgtgcaaccttgaagcagtcactcaactcctcttaaatttggtatgccatctgtagtactgaactaaaaatactcagctgcacctaagcaaaagattctccctaaaact

SEQ ID NO: 406486 - DNA, 559 bp, Homo sapiens
acaaaaacagttgtgtttagtaaaaagatcatttactttagagtcataaaattaggacttgtatcatggctccaccattataatgattcagtgattcaaggaatacgtacatatataatataaactaactgttatgctgtaggcagtaaacaaatattagtttatatgctaacttaagcatgagatttaacataaaagtstttacggtacactgggttaagagcattaaatctggtgccagattgcttgggttttaatcctgccacttttgattttatgtcttctgtatctcagtttcctcatctgtaaaactgggatagtgtattagtccattcttacactactatgcagaaatgctcaaaactgggtaatttataaagaaaaagaggtttaatggactcgcagttccatatggctgggaggcctcacaatcatggcagaaggtgaaggaggagcaaaaggcatgtcttacatggcaacaggcaggagagcatgtgcaggagaactgccctttataaaaccatcagatctcatgagacttattcagtatcgtgagagc

SEQ ID NO: 406487 - DNA, 582 bp, Homo sapiens
ctttacggtacactgggttaagagcattaaatctggtgccagattgcttgggttttaatcctgccacttttgattttatgtcttctgtatctcagtttcctcatctgtaaaactgggatagtgtattagtccattcttacactactatgcagaaatgctcaaaactgggtaatttataaagaaaaagaggtttaatggactcgcagttccatatggctgggaggcctcacaatcatggcagaaggtgaaggaggagcaaaaggcatgtcttacatggcaacaggcaggagagcatgtgcaggagaactgccctttataaaaccatcagatctcatgagacttattcagtatcgtgagagcagcatggaaaaatcctgcccacatgattcaattccctcccatcyggtccctcccacaacaatatgtggggattatgggagctacaattcaagatgagatttggatggggacacacccaaaccaaatcagatagcaatagtatataccacctaaagttattacgagaataaacagaatttatttatttgtagtggggagagagggccgaggagataagccaag

SEQ ID NO: 406488 - DNA, 514 bp, Homo sapiens
ttcacagaaaagtatctgtgctagataaacttagttcaggtgtgagttttygtgctcttggctatgaattcaatgttaatgaatcaacaatatatattaagtaaggcatctttaaacagaaagacacataaaataaggttatgtattgattggttgaggaaaatgtgaacataagctcccaggaacctaaccctagatttcccctagaactaatgctttagcactcactaattcagcatttgtggtaactttatagaacatgagcactgcaaataatgagaattgactgtatttgatatttcaatatacacaatttatctggggtggtatatgtaatataatgtaaacaagagcattggaaagattaactgatagatgtaggcacaaaacaatataaaagaagtcaattatcccgaactcagatttatggtggttatttggaacatggcctggaggctgaaattcaggaaaggtgaccctgttcaataaatggtgctgggaaaactcgatagcc

SEQ ID NO: 406489 - DNA, 368 bp, Homo sapiens
acaggtagatttttctgtgttttattgatactggtggtacaaagagatgtgatagatttaacttcatcaggatttagtgtatcctttagaactatgaagatttattttctgaaaccttgtgtgttacaaaaattcactattgggaacattggaagcaaatctatagactgggactaatattcagccattgtataaaaatataacatattggttgttaaaacataaaaatgattatgaactagttttatacaacatctttcctaagtcaaaytatctcctatcgcttattgcctcacttctgtctcttgtcacagtccagcaattaaagttttaattcctgacacaggcaggggcctcccagtccaaga

SEQ ID NO: 406490 - DNA, 624 bp, Homo sapiens
agggtcactgactttaactgtctttaactgaaacatcattgtgtagagcatgactatatatctatttattttgaaccagtatttcacgtacctgaagcagctcttttctgcttcatatttggaatactctatgtgtatttctggtctaattagtatgaagtagccaaaaactacactggatactgaaaactacaatctgagtataaagtttgatctacttatgaaaactcactgtttataaaacattcatttgtaaaataagaaaaaaacacatatctgtgggtaactagaataagggcaacatggtaaacaacttacattatttggactgtgagaatcacaaacatacacaatgctctgtccctgtaattgtaattatcattttttggagaatgtaatatccagacatccaagtatgataacctttctgttatcatgcatggttaaggaatgaggtatattcatattccaactaaagttatatgacaatgaattccactgtcattattgaattgccaattttaagaattagctaatgatgatctaytattcaaactaaagttatttttaacataaggctttgattcaagaggcagttggaaaacttacagcaaaattcagctc

SEQ ID NO: 406491 - DNA, 577 bp, Homo sapiens
gattgattggttgtatttgaccattgaattccttcaaatcttgagaccctatgattttaaacttctgcatgcttcttgcagaggtaaataagtgtttcagaaattctcaaaccatcatgggtcagcagttgcctactccaggttcactcctgtgatagaggagttgaattgctccgtaggaaattctaatcgttagttttaagcatagacagtctaattagcctggaaaatactgtttgttgttgtcttttttctttttttttttaaaaaaaaaacctcattcaacaagcatgtttatgcaaacacagcattacttaaaaactctgaggtgatcacaaagattgataaaaattcagtatagctatcttagcccttttaaaaatggcttcctacagtttgtccaaaatcagaactttcttccccaaaagatttgattcacttcaggtagcatacagggtgttatatttgacaacaattmattgagtttatcaaaagcaaaagaaaaaatggagctctattatagaaaacagtatgatgtggctacaatgctaattttttagaattgattttgaagtat

SEQ ID NO: 406492 - DNA, 295 bp, Homo sapiens
gaaagtgggaccagggggccaacactagtatggaggctgcaaaggccctgagctctggaagcctgcactatttattggtgatcaaacaaagaaacaggtggtgaggatgtgggggttgaaaggtagcggtgcatcaacgcgtgacttatagctgtgacagtttagcattttctttgaagcatatggaacacgttctgctacttgaratgacaggaaacatgttcttctagtttaggatacaatcgttctaggagcctgggaatgctagaagcaaggagccagcaagtctagacac

SEQ ID NO: 406493 - DNA, 545 bp, Homo sapiens
tttgctgttttattgttacctgtttttattttcaaacttcctgctcatttgtttgttaactatttgacaatttctgtgatttaatcatcgttgttcactgtaatgtctaaattgtgccttattcctgccattttgtttcatgttctgattgtttatgttttgctctcttttttctttcatgttggattaatcaggactttgggatgaggtgggggctattcgttggttctttgttttctctggttattcattctatttctggcaatttcccttttttactttctttttttgtgtctttgtttctctctcttttctttatcaaaagacattaacgagcakgttttgagggaaaaaaatcacggggttttgacttttttctcttctgaatgctttaataatatttttatattatttttatatcataaattccccttttttcaatttatttttacttttcctggatttttctggattcctgcctcaaggaattctcccaaagagtatttagatggtaaactttctgagactaacaagtctgaaaatgt

SEQ ID NO: 406494 - DNA, 592 bp, Homo sapiens
gcttaggcactctttcagagtatctttggcatcaaaactcccacttcagaggacttttactagtgggctttgacttgagagtgggggaatgaacacaactgttattccattctttaattaaaatgttgactgcccatcgccctggcttttatccatactcaactagagtgggggttattcttggattcttctgggaaaactcacatttttatttccttaacttatattggattacgtattcttcatctgttttatatcttccagaaattccttattgttgtggccttttctctcttaattctcataataacctaatgaaataagtacaatattatgcccactttaaaaagagaaaactaggggacaaaaacttcaaggagctagccagcctcagatctcacagtcagtttcaggatcaatatttaaaatcagatccagagaccacactctgacaactttcrccaaccattcagagcagggatagcatagcaaagcttcccagtgtgtttcatttagcttttgactgtacaatattaaggaacataatgggaaattttaaatgacctctagcccacaaggttcaaggaagctg

SEQ ID NO: 406495 - DNA, 606 bp, Homo sapiens
tggatttggataggacttctaggtttttggcctgaaagcttcaatatatagtggaactgctagccaaagtgggtaaagataagaacaaatttgatgggaaaaattaaaaataattaaaaattattaacaatgtttttaataatcaatattttgacatactatgtttgtggtgattaagagatatccaaagtatattcagctggagttatcaaataagcaggtagatatttaattccgaagctcaggggcttacagacctttctycccttaacaggtcatgttgcaatgtggaactgtggaccagagagagattaagtgagctcatcaagatcatagcttagaaatgacaggtgtttaggctataaatcagtgttcaatccaatagaaacatgaaccctaaaacaaaggaaacatattgtctcatctgtacccttttctactgagctgcacataaaggtttgaaaaggtaacttggagactgaaggaactggcaaggatggagctatataatagtggctcacttttcttctgcaaagtgagaagttgctacaaagagatgggctaattcaccctaaatataatagactttagcatgcgcaaatttaa

SEQ ID NO: 406496 - DNA, 458 bp, Homo sapiens
tcaggggcttacagacctttcttcccttaacaggtcatgttgcaatgtggaactgtggaccagagagagattaagtgagctcatcaagatcatagcttagaaatgacaggtgtttaggctataaatcagtgttcaatccaatagaaacatgaaccctaaaacaaaggaaacatattgtctcatctgtacccttttctactgagctgcacataaaggtttgaaaaggtaacttggagactgaaggaactggcaaggatggagctatataatagtggctcacttttcttctgcaaagtgagaagttgctacaaagagatgggctaattcaccctaaatataatagactttarcatgcgcaaatttaaccttcatggttagattatttataaatgcccctagactctcatgatagcttgtaattttactaagattacaaatttgcatcaaggtgtcatgag

SEQ ID NO: 406497 - DNA, 607 bp, Homo sapiens
tcattgtttttgcttgttttcttgtacatggggacttttagtaaataataaaatagtttgattctaaaatatattacaaaaacaataaaaacctccatgaaggaaagaagttcaaatgattcaaacataacttcagtattattgtatttatatattagagatttgaagaaattgcttaaattctttagtgatgctttattgcatcttatgggggatattattggctatcatggtatctggggaatgacaacattctaaaaggtattcctgacaaacagcaggagtccatgttattgtttcactgaataccagaaaatcctttgattctaaaccaaaaaggcattgatttatcatgaaaataatttcagacatgcattaaaatgggaagagatgaaggtaaatagtgactgcatttggtagtacagctttgaarctggtacacttagttgtcacatggctgtccaatattggcagcggtctactaagtagaacagttgttacagtttcaatggacattcaaccagtttatgggatttacagatcaatgtagttaataatctggaccaagagaacatgttactacaaagaaaattttagaaaaagaata

SEQ ID NO: 406498 - DNA, 600 bp, Homo sapiens
agacatccctgccttatggttctgaagagagcagcagacctcccagcacagtgttcgagctctgctaagggtcagactgcctcctcaagcggatccctgacccctgtgtatactgactgggagacatctcccagtagggaccaacagacacctcatacaggagaattctggctggcatctggcaggtgcccctctgggtcaaagcttccagaggaaagaccaggcagcaacctttgctgctctgtagcctccactggtgatacccagacaaacagggttgggagtggacctccagcaaactccagcagactggcagcagagggtcctgttagaaggaaaagaaacaaacagaaaggattagcacatccagtcaargaccccatttgaagaccaaaggtagataaatccaaaaagatggggtaaaatcagtgcaaaaagcctgaaaatacaaaaacaagaatgcctctcctcctccaaaggatcacaactccttgccagcaagggaacaaaactggacagagaatgagtgtgatgacctgacagaagtaggcttcagaaggttggtaataacaaactcctccgagccaaaggaacacgtag

SEQ ID NO: 406499 - DNA, 573 bp, Homo sapiens
tacattttgaatgcaatgatagactgtggaaaggtgaaggaactcaggctgtggctgctctttctgacacctgagaagaggaattcagtacataccggcagaggaggggaccattcatctaatattgtgtgaaaagtcccaaaaagcctttctacccagaactcatctcttctctggcctgcataaaagcctggaattcgaagtataaactcaagttcttagtagcttttagcattcattttttagtggagtgatgatggtcttacaaaatctgagagtaatattctctstaaatgaaatattggcaggaacttacaaatctattttaatcagcacatctttttatttcaacatcgatgaaaacctttataaaattttagtctaattttctgttcttattattgtggtgggctaaattaatttgcttttctaaacctgaagctcttgtaatacctaagaatcattcttaacataatactgtattttgcccaatatatcttgatactttagatagagtgaacttcttttagatacagtctctcccctccctcccaactatccagtgagtaaggc

SEQ ID NO: 406500 - DNA, 457 bp, Homo sapiens
ccagatgggtcataccacttagtgcaagaccttagagctattaatcaaatagtccaaactacccaccttgttgttcccaatccttatactattatcggtaggatccccagtcaccactggtttacagtagtagatttaaaagatgccttctggacttggttgttggcagaggacagccaggatctatttgcctttgagtgagaagatcctcactctggtcgaaaatagcaagaccaatagacagtcttaccccaagggtttacagaatctccaaatttatttagtcaaatattagaacaagtcatttaattgcaaagrcaaacagagaattgagcttaagagattgaaggtatcatatccttgcctctgccggagacaaacaagaacttcgaaaattttaggattggtcgggtactgttgtctatggatagactcttatatcctaaaaacaaaaccc

SEQ ID NO: 406501 - DNA, 457 bp, Homo sapiens
ccagatgggtcataccacttagtgcaagaccttagagctattaatcaaatagtccaaactacccaccttgttgttcccaatccttatactattatcggtaggatccccagtcaccactggtttacagtagtagatttaaaagatgccttctggacttggttgttggcagaggacagccaggatctatttgcctttgagtgagaagatcctcactctggtcgaaaatagcaagaccaatagacagtcttaccccaagggtttacagaatctccaaatttatttagtcaaatattagaacaagtcatttaattgcaaagayaaacagagaattgagcttaagagattgaaggtatcatatccttgcctctgccggagacaaacaagaacttcgaaaattttaggattggtcgggtactgttgtctatggatagactcttatatcctaaaaacaaaaccc

SEQ ID NO: 406502 - DNA, 545 bp, Homo sapiens
tttttaaaaaacattttcattcacgtagggggttctagaaatctgcgggctgggctgatcaagaaaaaacatgtgaccacgaggtggcagtagcacacacatctttactgagcagcacttcactttgacggatttacatggtgaggaagtccctcacagcaggagtctatctggaggctacagcttgatwactactcacaaagggaggagagcaagggaactctagaggaagagggaaattaaataggtggttatgtgtctaggcaatgtcagcagcacaacagggactctccaaatacagagttccaaagggactgtagcttacggtctttatggctccaggcttatcttacaatttgctagcagacattgggcacagtttcacagaatattcgaaacaggcaggctctaaatggctaaaaatgtgctatttggtgtttgtttcaaacagttggatgtgtaaatattagaatttgctctgctgctcagcctgcactaaagaaatattaaatagccaagtgatcaatatacagaagctatctgtc

SEQ ID NO: 406503 - DNA, 608 bp, Homo sapiens
gtattatgggccagattttgcaaatggattgaacaacttgtccaataaaatgagtcccacaattactatgtagctcagaagggattcctcaaataggaatgattctaataatatgttgcttatcattaaggcagaagcctcctctgacaaggaaatgcttctacccaatgagaaaacatacaaaccaagaacaacacatatttataattttgagacagcagcatctggatgaaatccaattgccatactttaaattgtcctgctgacaaaggaaaatgactgtggaagccatgtaagsgcttgccagggtgatgttctgaacatgtggcacattgagagtataccttttagactattgtaaaagatggtttccagaaatattgttttccccataatatcattttctcaggggcccgatgagtcatttcatgaataaattaaaagagaggtaattgtgcacctataggaactatggggtttttttgttagcacctaccaacaattctctatttgggtcaaatacacctcccctttcctgccagatgtgtttatctcaaggggttaatgcctgttggtattgtaaaagaaaattagtgagggagagcatt

SEQ ID NO: 406504 - DNA, 528 bp, Homo sapiens
cctgttttgcatagatttccacaatatggtgagaaatcacctctgtttccattgcatgacaaaatcatgggctactccaaaagcataaaggctatcagtgtatatctttctcaccttttcttcagccaactgcaaagcccttgttaatactattaattcagccaggaactgaattaggaagctgaygttactccttggaattgagtgttttcaattatgtccaccaaggaagtgatggtgtgtcctcctcaataatacccttgatcatcccttaaataagaaccatctgtgaaccaaattaagttagcattcttgacagaagtttcctataaatcttccctaggggtgagtaagatatcagtagactgctgtggtgtttttcttctcactgttcatctgcaagagggagcaggttagcagggttaagagtgttacagcccttaaaagagaagttaggggcacaaagcaagagcacctcataagaggcaaggtagctcacggaatagtgttgagtgtgatgagaattta

SEQ ID NO: 406505 - DNA, 627 bp, Homo sapiens
gtcatcaggttatccaaagttaagacaaaggaaagaatcttaagagctgtgagacagaagcactaggtaacctacaaaggaaaacctatcagattaacagcagatttctcagtagaaaccctacaagctagaagggattggggccctatcttcagcctcctcaaataaaacaattatcagctaagaattttgtatccagtgaaactaagcaccatatataaaggaaagatacagtcattttcagacaaacaaatgctgagagaatttgccattagcaagccaccattacaagcactgctaaaaggagctctaaatcttgaaacaaatcttggaaacatatcaaaacagaaactctttaaaacataaatcacacagaacctataaaacaaaaatacatattaaaaagcaaaaaacaaacaaaaaaaaacataggcaacaaagaacacaatgaatgcaacagtacctcacatttcaatactagcaytgaatgtaaattgcctaaatgctccacttaaaagatacagaactgtagaatgggtaagaactcacgaactaactatctgctgccttgggagactcacctaacacataaggactctcataaacttaaagtacaggggtggaaaa

SEQ ID NO: 406506 - DNA, 610 bp, Homo sapiens
aatttttagtttataaaaactttgactctcttaagaaaaatgacatcaaagagaaattcccagatactaacaggcttttaaaatatatacatatatatatatatatawaaatgagtatctgctggtaatataaaactatgaaaaattatgattcctgacctgtaaaaagagaacacattcatgctaatttcatgggtctgccaagacaagaaatcagctttccactttgctcactacagaaaaacattgaagtgccattttggtggcaagaatgaacaacaacaacattcattctttgatatttttcctttttcatcatttatagttgtcagagcagcgatcctggcattattccacatagtcaaatcacactcaacttcgtcattctgtagctgcttttagatgataagaagaaattttagcagttttcattataatgtacatgctgaattctgcattgtttactctcatacacagggattctaaacacaatttattattgttcagaccaatacccaggtaagagaactcctcgatgttcacaattcatgcatctttattcttcatttaaataagcacaatcaacaactcctctcatgaggaaatgcca

SEQ ID NO: 406507 - DNA, 610 bp, Homo sapiens
aatttttagtttataaaaactttgactctcttaagaaaaatgacatcaaagagaaattcccagatactaacaggcttttaaaatatatacatatatatatatatatataaatgagtatctgctggtaatataaaactatgaaaaattatgattcctgacctgtaaaaagagaacacattcatgctaatttcatgggtctgccaagacaagaaatcagctttccactttgctcactacagaaaaacattgaagtgccattttggtggcaagaatgaacaacaacaacattcattctttgatatttttcctttttcatcatttatagttgtcagagcagcgatcctggcattattccacatagtcaaatcacactcaacttcgtcattctgtagctkcttttagatgataagaagaaattttagcagttttcattataatgtacatgctgaattctgcattgtttactctcatacacagggattctaaacacaatttattattgttcagaccaatacccaggtaagagaactcctcgatgttcacaattcatgcatctttattcttcatttaaataagcacaatcaacaactcctctcatgaggaaatgcca

SEQ ID NO: 406508 - DNA, 590 bp, Homo sapiens
ccagtagctatcatatgtacaatttcaatgccatagtctactcctttgagtgaatatgctgcaatttatttatcaattatattcttcatggtcatttggattggttctagctttgggataaaactgatacaaacaatgctgttacaaacaatgctgaagggaacactcatacatgtatcttgacgcagatactcacaagcagctctaaaatatattcctaggagtggaattgttgggtcaaagggaggctcattagagcctcagcactcaaggtttttattggtggcttktcaatgggcatgctttgcctggaatatgcaaaaattctaggctccaggaggagaacaggtgttaagtataaaccaaattgtttgcacaaagagtttaggcatagttagccactcttatccattaaagtggtggaaaccctcccaaaagtcaagttctcagataccagccacggtcaacctttctaaacagtcctaccaaacgctagcactcaggcctgctgtgtgtgtcaactcttctctgtacatcctgaatatcagactcattcaattattattgctttgtaataagcctctatatct

SEQ ID NO: 406509 - DNA, 526 bp, Homo sapiens
taagtcgtaatctctttatctttctgttccttacctgcaaaacagaaataacaattgtaccttcctcatgggttggtatgaggattcactgagattatgtaatagaagcacctagcacaatctctgggatgtactaaacattaaataatggtcattattaccatcatcattatcatcactatatatacacatgataaataatcatatttagccccacagacattactatttttgtttataaagtcagtgcccctttagatttagtgacatatttacctgtttctttttcattcttttctgcatcccagccctcccccctctggaatctctgtccttccatctcatgtacatctttagaaatttctctagtgacagactatatatttttattttaaaatgtttttatttcaccttctcttttacagaatacttccactgggtayagacattcagagctggcagttatttgcttctctgtgcattgaggttatcgatctactgcctcctagcttccagtttctattgt

SEQ ID NO: 406510 - DNA, 541 bp, Homo sapiens
atttggatcacatcaaaggggttgccatagttttcctctcatactttcttcttggctaccaccacacctgaaggacttaagacagtcatacagaattaagctttagagtgrctagagaaggcacatttaattagaagccagggttccataactgtccagtatgggcctagcactgctaggcactttatatataccatcttacaggctctcccaacaccagatgacagatgtcaggtctctaggtttagaatggttaactaactttcccaaggtcacatggctatttagtgatggaacttgaattagaattcaggacaggttcaaagctctttctccttgtgatggttaattttatgcatcaacttgactgggccacagggtgcctagatcagctctcgtgggtctgtagcttactaggtgaagatcatgggacttctcagtcttcataattgtgtaagttaatttcttatataaatctttttctgtctttgtacaaatatgtctatttttcttgtttctctggagaaccctgaccaccaca

SEQ ID NO: 406511 - DNA, 575 bp, Homo sapiens
ctgtaatatagggaaaaaagcctttatatggtagtatctttaagtttacaaaactcacattattcattccctaaaaatagtcttcarttgcagtttgcctcttgccacatttagataggtttcccacatcacacaatgttatagcaactttgtggcttcctattttcattgtacagacttcccaatgattttggaatccaaatcttatgtcaatattttcatacatgagtatggatagaacatatcatttcaatagagattaagaataattcagtggagaaaaacttggcttaggagtcagaaagtggagtatgtgtgtttgagtcccaattccacaactttctaattatgttgttaacctgaaaaacaggaatgacaacatctgctccatgggctgattgtgagggaagaatgggttagttatgaaaaaaagactttgttaactgtaaagcattgtattaatataaatattaataattcaaatatccatgtaattttctgaaatacatgtagaatatgttgcattaaacatcaaagttattcataacaactgctagaaatgaccactgccatgc

SEQ ID NO: 406512 - DNA, 605 bp, Homo sapiens
taacagataaaagataggaaaatttgaggatttatcttggaggaccaatagcttaccactagtagtcataggaagcaaaaacagaaaaaagtaggggagaaaattaaatgacaaaaaagtttccaaaaaactctcaagggcatccaaatcaagattggtagggcataccaaatgccaaagacaataaatttttaaaaggtttatatcaattttatatcatgtgaaatttcagagaaacaagaataaggtgaagatcataaaagctttcaataaaataaaccagctatgtacaaataaattagaatggctttagatttctcaatatcaatactggaaattggaaaataataaggccaagtcttcaaaatttttaaagaaaatattttccaagcttgaattttatatttagtggagctgttaatcaagtataatgagggaaaataaagaaatatttatatatgttaaaactccaagtttaactcatatcgccctactctcagggagttcctagattagaygctttagcaaaatgagagcgtaaactaagcaataggaagacttgggatgaagaaaacagagaattctgcacaggaaaacaaccatga

SEQ ID NO: 406513 - DNA, 622 bp, Homo sapiens
gaatatctttgtaaaatgttctttttttttttcaaatactaaagattaacaaataggcatagtggatgattttgtatctgtatggtaaatcagtgcttaatagttaacactactttgccaaatactgatgttactcataaccattcccacaaaatctatttcaagtattttgttcacattttggctttggttagtcttcaagagtatcacttatggatgtaataaaatatttcaaaattgataatgacaggagacagataaattcctaggtagacagggatgggtccctggtgaaacctgaccttcaagccaaagacagtttaaagcctgaaaactgggctgctggttccggatagagtccatgactggagtgagaacttttgtctctgtcttactctctctctctggattgtttccttctgaatgacgccttttaaccaattgaatggtgctttttccaaagaccacccatggaccaatcatcattcactcccccattctgagcccataaaaatcccggactagccttacagggagtgacccsctttctggccccctcttgcagctgagggcgacctgctttccggccccttcttgcagttgagagctttccttcagtcac

SEQ ID NO: 406514 - DNA, 605 bp, Homo sapiens
gtctgttatttttcgactttttaatcatagccatcttgacttgtgtgagatggtatctcactgtggttttgatttgcacttctctaatgattagtgaaacatacatagcttactggtacagcagagctctttcctggatatcaagtctctggtctaaatatcctcaaacaaggagtcagaacatcttttcacaataattaacatatgctgccacttgctgatgttgagatcctgagtttagtgcatttttgatataattgaatttagtattcaccacaaccctattagataggtactcactacctgaatctgttctgaatcattctaatctcccacatttccttctcttactactttgtgcatagatagttttgcttataactatgaatacgtggtggggaaaagtgcagatcatgcttgcttagtgatcgctactacttttgcagggctttcttccccaacccctgcttttttcccaccaaaccctaatttaatattcctctgaagcttcatcagagtyatgtagagttccttttcttgttcattttatactgataagatgcaaagtgttaacatcttcaaagcaacatcatattgtgagataa

SEQ ID NO: 406515 - DNA, 560 bp, Homo sapiens
tcctctagttatttctggccactttgtagtttgaagtgagggaataggggaaggaggagaaggaaaaatgaaatagtctagacaagtgcatcagtccattctcacactgctataaagaaatacttgacactgggtaatttataaagaaaagaggtttaattggctcacagttccataggctgtatgggaaccatggccaagagtgcctcaggaaacttacaatcatgatggaaggtaaagggaaagcaggcacatcttacatgaaaggagcagaaggaaggggttggagaggtaccacatacttttaaacaaccagatatcatgagaactcactcactattatgagwatagcaccaaagaggaaatatgcccccatgatctaatcgcctcccaccaggacccacctctaacaatggggattacaatctgacatgagatttgcctggggacacagaacaaaccatatcaacaagaaatttcagagagcaaaggattaggaggaatagaaaaagagacagtttttggagcctctctcatttcagaagtggcttatgttagtg

SEQ ID NO: 406516 - DNA, 560 bp, Homo sapiens
tcctctagttatttctggccactttgtagtttgaagtgagggaataggggaaggaggagaaggaaaaatgaaatagtctagacaagtgcatcagtccattctcacactgctataaagaaatacttgacactgggtaatttataaagaaaagaggtttaattggctcacagttccataggctgtatgggaaccatggccaagagtgcctcaggaaacttacaatcatgatggaaggtaaagggaaagcaggcacatcttacatgaaaggagcagaaggaaggggttggagaggtaccacatacttttaaacaaccagatatcatgagaactcactcactattatgagtatagcaccaaagaggaaatatgcccccatgatctaatsgcctcccaccaggacccacctctaacaatggggattacaatctgacatgagatttgcctggggacacagaacaaaccatatcaacaagaaatttcagagagcaaaggattaggaggaatagaaaaagagacagtttttggagcctctctcatttcagaagtggcttatgttagtg

SEQ ID NO: 406517 - DNA, 507 bp, Homo sapiens
acatgaactcattctttttaatggctgcatagtattacatggtatggtatacatgtgccacagtttctttctccagtctatcattgatgggcattttggttggttccaagtctttgctattgtaaatagtggaaggacattatttttattatcctgaaaagcaagcaaatctatcctctgctccagaaggagatactgtcactaacttccatggttatttgctatacaattatcctaaaaaagatagtccagaacaaatgctgcaaaacctcttttcagaagaaatgcagaattgcaagaaacattaactatcccccaaaacctttaraaaacaacttgacttctcagaatgattgaaccctccaattagtttccaactagaacactgaggcctcaagcagcaagtactcagaggaatatatgaagctagaggccttaacacatcaatggagtattttttccttggttttctgatctgtgaaaatggaggtgataactattctatag

SEQ ID NO: 406518 - DNA, 545 bp, Homo sapiens
tggcattattacttgagaagataaaccagccacttggtggcaagtcaacaacactgtgccctttccattctggagtggccagcagtttatccttacagggatacatatttattctgggtatgggtttgcctttcttggcttcagagccacagcccataccactatctagaggcttaaagaatggcctgatccacaggtatagtatccaactcaacacaggatccaaacaggggatccatttcakagtaaaggtggtatgagtatgaactaatgactaagggatctactggttttatcacatactgcaccatctggagcagccagcctgatagagcactgggcaacctactgaaggtgcagctggagtgccgatttggaggcaatattctgcaagaacagagtgccacttttcaagatcagtatatatactaaatcagggagctctaaaggcactgtccctaataggaagaatacatgggtccaggaaaaaggcagaggaagaagaagtggccctacttaccatccacccaaacgactcatcgggg

SEQ ID NO: 406519 - DNA, 591 bp, Homo sapiens
agtaacaagtaaaaattgaaaatctaaaatcaatgattttaaaaaaagaaacagggaaagatatgatttcaaaatcctcagctcatctgcagactttttaagtacgagcaaagaggctcttgatctcatgacacaattaagattgttaatgaagtctgcaggttgtcaaaaaagtttctggatggtaatatcgatagtactctttcatgaggggagggaaactaaaatctttttttgaaaaaacatgtctattcaacataatatatatacatatatacacacacacacacacacacacacacacacacacacacacacayatatatatatatattttttttttgagacaaggtcttgctctgtctcccaggctgcagtgcaatggcacgatcttggctcaccacaacctccgcctcccaagctcaaacaattctcctgcctcagcctcccgagtagctaggacttcaggtgcacaccatggcacctggctaatttttgtactttttgtagagacagggtttcacccgtgttgttcaggctcatctcaaactcctgagctcaggtgatccagctacctcagcctcccaaact

SEQ ID NO: 406520 - DNA, 540 bp, Homo sapiens
ctccttttctttttctctttcttctattcttcctcctcaaatctatcctctgcaaataaacgacttatttttctgaaatgtaaatgtgagtctacccygtaatgtcttctatccatctaaaagtttaaaatctttcactggctctccaagaccatggaataaattccagtcttctgcatgtggccttctaggccctaccttacctccccagggtgttctcctctcctctgccctccaccactaatgttcttctccttaatctccattattttgcacttgatgtttcttccttgcatccctttgttaattttagctgctgctttgtgaagttttccctggcagcttcactagcagaattagggttctctcccttgtccattcatactactggtaaatatgttataatattttataatttttttgaagttcctctctttttaaattggcacatagtttacatatttatgaggtacatgtgtatttgttacatgcatagaatgtgtaatgatcaagtcagggtacttggggtattcatcacct

SEQ ID NO: 406521 - DNA, 605 bp, Homo sapiens
ttatttttaatggggagatatcacccctcaagggggcaaaaaaccttagatattacaatggtccttggccctccaaagagccacagtacataaacagacatacagtatatctgtgatttaagatttcatgggggtgggaggagcaatgaggaaagtggtgtctaaaatggctgcttaggggatcaattatgaaaacaaggctaagaaatacggtctagaagaagaaaaaaggagagaaaaagaaagaagatgaaagagaaggaaagaaaataaaagtagaatgatgaaaaagaaaaaggaaaggaggaaagaagagataattaaaggagaaggtatatgaaattttaagacaaaaataggtttgtctaccaccaagccatatgacatatarctttttttccttgacattctgaaatacaagcttattcttcttacattatttctggctctggcaacaaagtattaaaggaaatgcaatactggaatgcctaccgtttataagaattccttatcctaaagcattctgtttcttgcacaaatactccaaatgtccgtactttttttcatttaaagcttaaacttactttgggaggccgaggcggatg

SEQ ID NO: 406522 - DNA, 588 bp, Homo sapiens
tgtgctgggtcatggctaattcattgcatgatttcagtgcgggatattctgagaggcttcccatggtcccacgtgcttagttatcccaggaagctaaaagctttcttcttgcaaataccaaatttctcccacccacacagcaaataaaaatacatacagagcatgcactgtagttgaaaaaatatgaacaataatggcatgtgtgaatgagtaaataaaaaatattatagctattaaccttagaagaaaaaagcagtatagttataaaaaattgggcaatgttacattgagatcaggaakatttcattgaaaaggtggtattttgcttaagatttgaaaaagaagtggtaagtatttctctattttaatttttttattttactttatgttttgggatacatgtgcagaacttgcaggtttgttacataggtaacaaatacatgtgccatggtggtttgctgcacccatcaacctgtcatctaggttttaagccccacatgcattaggtatttgtcctaatgctttccctccacttgccccccacaccctgacaggccctcttgtttgtgatgttccctccctgtgtcc

SEQ ID NO: 406523 - DNA, 609 bp, Homo sapiens
ttgaaaaaatatgaacaataatggcatgtgtgaatgagtaaataaaaaatattatagctattaaccttagaagaaaaaagcagtatagttataaaaaattgggcaatgttacattgagatcaggaagatttcattgaaaaggtggtattttgcttaagatttgaaaaagaagtggtaagtatttctctattttaatttttttattttactttatgttttgggatacatgtgcagaacttgcaggtttgttacayaggtaacaaatacatgtgccatggtggtttgctgcacccatcaacctgtcatctaggttttaagccccacatgcattaggtatttgtcctaatgctttccctccacttgccccccacaccctgacaggccctcttgtttgtgatgttccctccctgtgtccatgtgttttcactgtgcagctcccacttatgagtgagatcctgcagtgtttggttttctgttcctgtgttagttttctgagaatgatggtttccagcttcatccatgtccctgcaaaggatatgtactcattcttttttatggctgcatagtattccatagtgtatatgtgccacattttctttatccagtcta

SEQ ID NO: 406524 - DNA, 610 bp, Homo sapiens
agccagttatgtatctaaattcatgttattttaacaccaactttaatatttttcaaagcacaatgcggcagagccagagatacaggcatacttccttgtgttgtgctttggtttattgtgcttcacaaacgttgcattttttaaaaaaactaattgaaggtttgtggcaaccctgcatccagcaaatctatgggtgccatttttcaacagcatgtgctcacttttgtctctatatgagatgttggtgatactcaygatatttccaattttttaattattattgtatttggtatggtgatctgtgatcagtatcttttgatgttatgttgtaattgttttggggcagcacaaatcgtgctcataaaaaatggcaaacttaattgatagatgctgtgtgtttctgacagctccaccaatcggccatttccccatctctgtccctctccctgggccttactattctctgagacacaaccgtattgaaattaggtcaattaataactttccagtggcctctaagtgttcaagcgagaggacaagtcacatgcctctcacttgaaatcaaaagctggaaaagattaagcttattgaagaaggcacattgaaagcc

SEQ ID NO: 406525 - DNA, 593 bp, Homo sapiens
gtgaccttcggatggggtttttgtgtggacatcctttttgttggttttgttgctattcctttctgtttgttagttttcctgctaacaggcccctctgctgcctgtctgctgtagtttgctggaggtccactgcagaccctgtttgcctgggtatcaccagcagaggatgcagtacagcaaagattgctgcctgttccttcctctggaagcttcgttccagaggggcaccggccagakgccagccagagctctcctgtatgaggtgtctatcgacccctgctgggaggtgtctcccagtcaggaggcgcagggatcagggacccacttgaggaggcagtgtattccttagcagagctccagcactctgctgggagacctgctgctctcttcagagacggcaagcaggaatgtttaagtctgctgaagttgtgcccatagcccccgcttccaccaggtgctctttcccagggagatgggagttttatctataagctcctgactggggctgctgcctttctttcagatatgccgtctcagagaggaggaatctagggaggcagtctggctacagtggccttgcggagctgcggtgg

SEQ ID NO: 406526 - DNA, 504 bp, Homo sapiens
tacgctgctcataacagactctatccctatgcctaatacagagttatcagttctaaatgtcgctggtgccaaggctgaaacatcttggtccaatgatgcattggggatgaagacattgacaatatgagaaatgggatcactaatggaacaaaatcaggaagaaagagaaagggaggagataaaaatgttactcttagaaaagttttataagcaactattatcctcatttcatttcattttttaacaaatacagagaytgaagtccagagagtttaaatgatttacacttttaggatctagcataagtttaattcaaaatttgagctcctaatacaatattcttttaattataccacttaatctttcaagttcaaaattggatatggataattgttggtgatttgatagcataaatatcaaacacgtagcaattattttgcctgaaaattaatgacatatctattggctttatgtttctataaacaatatatttagagtcttagt

SEQ ID NO: 406527 - DNA, 649 bp, Homo sapiens
gtgtttaataaccacttgttgactgaatgactgaatgaatacaaaatacaacataagcattcaaataagttaacttggggttggaattgtcaaggaaggtcttaagacaatggcattaaattgacactaaacaaagggaaagaagtggataggtggaaagaaggaagagaagcattttctgagagtagggtaaaataagacagcataacacaaaactaagcattttaaagtgaacaattcagtgacattaatacattcacartattgtgaatttgccaactcaaactagttcccatttttatcaccttaaaaggtaacctgctatcgccagccatgattccatcatcactatatttttatttaccttcacccttgacacttcttcatcgtattcagcaaatgaataaatataagcatagataattttattctattcttcttggatttctttactcagtgagatgtgctctattttttactgtgttcctttacttgcctctactttgaaacaacagcccatatcctgttgctaaactccatgctgttcagattatttaattgagacaaactttagcttctattccttcaactgaccttatgccctccttggactgaaagcatttagaaaaccccctctgatggaaaccca

SEQ ID NO: 406528 - DNA, 649 bp, Homo sapiens
gtgtttaataaccacttgttgactgaatgactgaatgaatacaaaatacaacataagcattcaaataagttaacttggggttggaattgtcaaggaaggtcttaagacaatggcattaaattgacactaaacaaagggaaagaagtggataggtggaaagaaggaagagaagcattttctgagagtagggtaaaataagacagcataacacaaaactaagcattttaaagtgaacaattcagtgacattaatacattcacaatattgtgaatttgccaactcaaactagttcccatttttatcaccttaaaaggtaacctgctatcgccagccatgattccatcatcactatatttttatttaccttcacccttgacacttcttcatcrtattcagcaaatgaataaatataagcatagataattttattctattcttcttggatttctttactcagtgagatgtgctctattttttactgtgttcctttacttgcctctactttgaaacaacagcccatatcctgttgctaaactccatgctgttcagattatttaattgagacaaactttagcttctattccttcaactgaccttatgccctccttggactgaaagcatttagaaaaccccctctgatggaaaccca

SEQ ID NO: 406529 - DNA, 649 bp, Homo sapiens
gtgtttaataaccacttgttgactgaatgactgaatgaatacaaaatacaacataagcattcaaataagttaacttggggttggaattgtcaaggaaggtcttaagacaatggcattaaattgacactaaacaaagggaaagaagtggataggtggaaagaaggaagagaagcattttctgagagtagggtaaaataagacagcataacacaaaactaagcattttaaagtgaacaattcagtgacattaatacattcacaatattgtgaatttgccaactcaaactagttcccatttttatcaccttaaaaggtaacctgctatcgccagccatgattccatcatcactatatttttatttaccttcacccttgacacttcttcatcgtattcagcaaatgaataaatataagcatagataattttattctattcttcttggatttctttactcagtgagatgtgcyctattttttactgtgttcctttacttgcctctactttgaaacaacagcccatatcctgttgctaaactccatgctgttcagattatttaattgagacaaactttagcttctattccttcaactgaccttatgccctccttggactgaaagcatttagaaaaccccctctgatggaaaccca

SEQ ID NO: 406530 - DNA, 602 bp, Homo sapiens
gatctatcaaaatgagaacttgggtgtggtacttagcaacttttagatataccaataaaacaacaacctaatgcctaaagaaaactgggtaattttatattaatattttatggtatttttggaacctcatatgagtatgcaccagaggagggttagaagttgaaatgcattattatatgtcaagctggtatcatatatcaaatgattttagaggacagggagctaagaacaggagtactgggaaatacaagatagaatttcaaaggcaggaagaagcctgatgggaaaaaaattaagggtgaattggtggaaattcatggataattgcaaggaatgctcaagggagataaactttatattcattggaaagggttaagaatgaagactgttacaaatactagacacagaaggtctggaaacatagaccatgattttatgatggattaatccatagtttcagacttgttcaacatcctgcagatatgatcaatgtgtaaataagtgttttaactcagtaacagcagaaggtgcatttttagagagaggaayacttgacagcctccagtaaagtgaaaatgggaagtcactgctttcagtttgaa

SEQ ID NO: 406531 - DNA, 528 bp, Homo sapiens
acaaacacacacacacacacacacagctgttttgaaatatcctcagagttcctagtaaaatgctgcatgatctgaaaaagacaaatttttgaagctattgatggggtagcttttctgggtggttcctagaaaggatctggatgttagttagatctgaagtttagaacctgtactggaactgggaactggaactgattacaggcagcaattactttaactcattacttagattaaaatcataggctaattatagtgttaccctgtgttaaaatataagaataaagtttaaatgtttaagaaaagatttactctcaatccctgaacgaaacctaatgcayccttagaatatctgcaataaagcaggagatggttaacatgtggattctgaaggggtaagagcaatggttacatggtgcttgggatgtgaaaatgtgcagtattccaagtgatcctataaatctttcacaattacaagttacaaccattgcaaatgacatttttatgataccttttgaatggcttggcttt

SEQ ID NO: 406532 - DNA, 499 bp, Homo sapiens
agcagaaagaagtatgagaaataattgctagcactcacacaaggttgggaatagttgacgttttccccagccagagtgaaaagaccacaaggtgtgtgttagattcacaaaattgtatttctttacaartggtgcaaaattagctctaggcaatcagatctgtaccttctttaacaatttatttaaaatgctcaaaagctacttaactatgtgccattacaaaatcaaatcctacttgaaatccagtatacaagtgtacaattcaaaatgtctaccatctagtaaaatattaccaggcatgttaaaaagcaatgtgacatgactcatatccaggagggaaaaaaatccattaatggaaacatacttaagaaatggcagaggtgatggaattagcagacaagttgttgttaaaacaactattataaatatgctccatatgttcaagaaggtagaaaaacaaatgtgataaggagagacatggaagaaagaaaagacaccc

SEQ ID NO: 406533 - DNA, 618 bp, Homo sapiens
ctttaatcaacatacttccttatttagaattattgcccaattttaacttttatgtcagaatgtgaatgagccaaatattagtagctatgattggtgataaatattaagaaggtttattcctcccttgacaatgatgattatgctaatgatggtgattacacctaattttaaaggagccctcaatgtgtgtcacacactgtgctgaattctttacatactaccttatttcgttcctgccatagcccttttattttttaaattcaaattggaaaatgaaataccaagaggcaaatgaacttccctgggtygtgtacaagcagatggtggtgatagttcatatctgttgttttgatgccagaacacatacttttgaccactatactgtaccatatcacaaatgttacatatgtggatgtgaatgtatatatctttacatatgtatatatataaaatattcaataacgatatgtagttataatcttttatattatcttattagttataatgctactgtagtttttgattccccagaatctcaacagtaagttcagtgaatactgggagttgatgtcacaaaaacttatacaattagatcaatgtcctaaaatgtatcatttt

SEQ ID NO: 406534 - DNA, 652 bp, Homo sapiens
tatgttttccttagctatatcttgttctgatttctttcttatctcaaattttctaatctctctcatatggatttgtttttccattcttcctgggcatacacccaaatgaagaacagagtcactttgccttggaacctttacttaacattctggargttaaggttaagaaagagtgttctattttgtcacagctcagcaaacaacatccaattaagcattaaacatccctgttcatgaaagtttcttggccatacttactgtggagcacttcctggcttttacatctcaatccccagtctccttccaacttggtctgccacctttcttttactcctattttcatttccaacttctttccagtcttgggctcactcattccttccctctcagattacttgtgcaaactcaagattctgttttacattattatggaaagcaattattttttgtggacaagccttgtattttatagaaaattttttactttattcttaaaacatttcaaagaaagtattataatctacatttacagagaaataaacagagagagtaggagtcatacataggatcacacagttaactagtaacaaaatccaaaatttgaattaaagtttgttcaaaggaagacttttttctatgttattttatttat

SEQ ID NO: 406535 - DNA, 626 bp, Homo sapiens
ataatctactgttgactggaagccttactgataacatagccaattaacatatattttgcatgttacatgtattatatactatattcttacaatacaaataaaatatcaagaaagtcagaagaaatagaaaaatatatttactattggttaagtggaagcagactatcataaaggtcttcatccccattgtcttcatgctgagtaggctgaggaggaggatgagtagggrttggtcttgctgtctcaggggtagcagaggcagaagaagtgaagcgggtagaaggggagccaggagaagaggcaggtacacttggtataacttttgttgaaaaagatctaggtataagtggacccgtgtagttcaaacccatgctattccagggtcaactatatgtaagtgtgttctggacatcacttacaaaattggattcatcatttcctctaccaccctcaaactattactgcctaaatgatactctgtctactgtacttctccagccataaacctgtgcatttcctccctcactcttaccctttccatccaataacaaaattcaatcggtattaccctattgatgtgttttatatcattttgtccatttcctcagtgtagaaaatgaagaagt

SEQ ID NO: 406536 - DNA, 591 bp, Homo sapiens
ttaataaactgaatccccccaaagtggcctaaatatgttttttaatttttttgttcctccagttatatattcataatatgagcatatcaggcaagataatttgtaagtttccttctagaattgaacatctttgagttaatttatttgcaggcattgaatgaaagttttttaacatttctattctcagaaaaaaatacagaaaaagcataatcaactgataggtctgtaaacaaatacataagtgcccacatatayggtcacagccaaaattttatatgaaaaatgcaatttttatagaaatttgtaatagagaatgtggtattatttagtattagtaatatctaacatgtcttgatactttacatgtgcatctagaatatgttatatactttatctcatttatttacacagtaaactaatgagataagagttatccccatttaatggatgtagaaaagtaataatttatttggcatttaaaattaatgaatagaaaaatacaaaaactcaaatgtactttcatattttcaagaacaaacgaatgaacacgcatattcatcactttaaatctcatatgtatgaagcaattca

SEQ ID NO: 406537 - DNA, 622 bp, Homo sapiens
aaacaaggttggctctgcacccagatttctggcagggagaaggtgtgtgaaccagaagattcaagcctttcacagcatgtcataacttgaaatgtatttgtatctgggcagagatcctatttattttgtttrtcattggcttcttaatagccagcagagtgctgttcacatagcttgactagtatctgctcagtggctccatgtagtctaagcagcatgccaacctctttaaggaggctcatcataatccctccataaatcaaatttaaaaaaaaaaacttttcaataacattattgtaagaattaattattatagttttgcaaaactgaaaagttgttaaggcatacagagatcttctccttggtttactttattcgcagtcacttctgtaaaatgtagggcttagtaaaggaaagaggactgaggaaatgtttggtatatcacaccatctcccagtaccattgtcacttctacatggagagagcatgtgctctctttctctatgtctctgtctctctgaatagagacactataaacatattttacagaaaattaataacatagtagaaaaacatttagtaaaaacccaaaaggcaaaaaaaacttgcaaaaattactata

SEQ ID NO: 406538 - DNA, 535 bp, Homo sapiens
gttatagattttgcacaattgtaaatctaacacayagatacatgttacaagagaagtaaatgactttccttttgcctttaaatcttgataatggtcccaactctatatagcactgaaaattttgttctaggtatgaagcagtacctgcaatgtacctgagggataattttataaagaccccatgctctcatgatgtacataaatggcattctgcatcaatgattgaaagctacaataacttttttttactctcagcaaaatagcacagtgtgcagaaaaatacacaacatgaagtaaaaaaatgaccaaatcagcagaggtttgatactcagcctgtatgtgcctgtttcgtaatgacacaccctgtggcacagctacaaaagacattgaaaaaagaactctgcttcaaaaattataaatggtttagtttaatatatctaaaaacagtgtcctcagtaattatatatttcatttcactgataatatctttatcctagtaatttaataaccctatttattttttggtaaaaattat

SEQ ID NO: 406539 - DNA, 575 bp, Homo sapiens
gttcctgcacacaattgtaatcacacatggataacttacacagagtatggagggaaatgtgaaccttaatttgtttctagtcatgttgcatttcccattcagaattttagagcatgaacatagaataacacattttccaaccatatcttgaacttttttgtgctgtaatatctgccttcatggaatgggatgtctgtaaatatagactgtacccctgccttctacatactgcctccaggagagaagaggtgactggtccttgggtggagagagaagagtggtctcatttatgcaaggaatattggtcccttaaccatacagattatagaaggtaggagagggcattgatcaaaagggccattagcgttaaagaaaaaatgatytttaaaggcctctgaggagtaggtaaatatggtcatcaccagagaacttcctcactgttagcacagaacctgctaaacaggagaggtttcagctttggtttttgtgggtcaggggctcacaggataaagaatgcctgctgcaacccttgctgccctcaacttctgtagaccagcatcatcatcattgttagg

SEQ ID NO: 406540 - DNA, 568 bp, Homo sapiens
tctgttctctattgcctctcaaaatatcactgtctgctgtttgctccataactccaaatttgttcactgatcaaaacctaattgtgaaaggatcccctgaaatctaggtaccatgccagttacatatgctatggagatgaatgatcagtttcaatgaggtgcctttgaagcacacatgctactggaagagaagtccgttacaaaagaatatggtaggtgatgcagagactcacaagagcacaaaagcagcagcagatgastatccgagccactcagttaaggtgatttttaagctatttatcaggaagccaaagatgaaaggggcaatccaaatgaaagaaagaacatgaacaaagacatgcagtcctgaaggaacaggaagtattagagaacaactatgactagagcctagagttcatgtgggggatggtgagaactgagaatggaaaagtagagaaggtaaaaagttgaagaaaaggaaatgaaagatcactcaagttaggcatgcagactgggaatagaagtcagaaaaagaagccctgaagaatccaactagatatgaaaagaa

SEQ ID NO: 406541 - DNA, 568 bp, Homo sapiens
tctgttctctattgcctctcaaaatatcactgtctgctgtttgctccataactccaaatttgttcactgatcaaaacctaattgtgaaaggatcccctgaaatctaggtaccatgccagttacatatgctatggagatgaatgatcagtttcaatgaggtgcctttgaagcacacatgctactggaagagaagtccgttacaaaagaatatggtaggtgatgcagagactcacaagagcacaaaagcagcagcagatgactatcygagccactcagttaaggtgatttttaagctatttatcaggaagccaaagatgaaaggggcaatccaaatgaaagaaagaacatgaacaaagacatgcagtcctgaaggaacaggaagtattagagaacaactatgactagagcctagagttcatgtgggggatggtgagaactgagaatggaaaagtagagaaggtaaaaagttgaagaaaaggaaatgaaagatcactcaagttaggcatgcagactgggaatagaagtcagaaaaagaagccctgaagaatccaactagatatgaaaagaa

SEQ ID NO: 406542 - DNA, 528 bp, Homo sapiens
ctagtgagtcagcagcaccccaagcacatgcacatccagctggaatgaacacaacagcacctgggcttggcctcaactttgctctgaaatcagaacaggtgctgggagtggggagctgccaggcagagggagcaggcacttctgaacctgtgggggcagggggacttctgggccaggagtacagktgcctagatccatagctacagctggagagctgaagctatgcctgggagggcgggctcctgccctgcaatctcagaatgaggtaggcagggctcctgcctgttcctggttcctgccagctccatggagtgtgcaaccctggcagcacctcccctactgcagccagtgtcttttcagcagctgctccagatgagccactgcagccatcaatgactatttattactctcttcttccttaaattaattttactcatcaacattgcccttcctcaaaaaataatagcacttagtgaatctttacagtgagtcatacattaatcctttacatgaattgatatatattta

SEQ ID NO: 406543 - DNA, 591 bp, Homo sapiens
cagggggacttctgggccaggagtacagttgcctagatccatagctacagctggagagctgaagctatgcctgggagggcgggctcctgccctgcaatctcagaatgaggtaggcagggctcctgcctgttcctggttcctgccagctycatggagtgtgcaaccctggcagcacctcccctactgcagccagtgtcttttcagcagctgctccagatgagccactgcagccatcaatgactatttattactctcttcttccttaaattaattttactcatcaacattgcccttcctcaaaaaataatagcacttagtgaatctttacagtgagtcatacattaatcctttacatgaattgatatatatttaatccttgtaaaaaatcaaggaggcaggtattttttcattgccattttaaaattgggaaaactgaggcatggaaaggttcagtaatttgctcaaggtaacttatatggtaaatagctgagtccaaatttaaatcaaggcaggtcatttccagggtgtgtttttaagtactacaatatagttgctgcatgtttatgaaacaattcttagtcaagactgtgt

SEQ ID NO: 406544 - DNA, 565 bp, Homo sapiens
taacaaattgctgtattagggataggttcaaggagaaagcagaaactgaactgattttcgagggtcaagagagaacaaacaagaacattgcagatatcaggacaagtatgagtagaagcacaaagtctcatgataattgctaccttgtttgtaagcattaatattctcggagtggtggtaggcrtgggctgcctgcttcatggtctttctcatgaaaggaataatgtgggctaccgtattaatttcaatatggcttttatgagaaacaatttgcaaatgacatgctttggaaacccaagaaacctgtggtcatccctccttcaattttacttcttgttacaaatttcttagtaacagagcctatgtatgtgagatgaggagatgtttgttacattcaaccttaaacaagttatggcttagcaggagctgagtgatcttatttgatgagtgtagatttataagaattttggcttggggtttgggatcaaattctctcacctaagctgtggggagcccatgaagtctttccagtaaaaatccttgcagttaagatttttgccaaata

SEQ ID NO: 406545 - DNA, 492 bp, Homo sapiens
ttttttcctaatattgaatagtgatcaatatgtagaaaagaatacaattagaactctatacaggaaactatcagaagttgttttaaactacaagttttcaaaaaactacttcattattgtataactttctaagatttttcaacttttgtgatgaccattctcttgtaacttaytcttcagctacctgattcctaagattaagtataatgaaacacgaattgatcttttcttagtgaacaggtattgtgatgtattaaaggtgtcattatagaggcagaggcagcagaacatgaagcaatataaggtagatcagaataccatggggtactgaccccaaaagagaaccaagaactcagtatctttgtttctattgctttattaatacgtaattatgtactctcaacttttaaagttgcatgtagaattgaagtatgagttcttcacagctgaagaaagaataaaagagaaagctagagtgagatagagacagaa

SEQ ID NO: 406546 - DNA, 551 bp, Homo sapiens
gatctcaagcattctaaccgtgcttcaagacaaatgtgtgagggttartagagctcttactttgtttgagaaagattcatgactgcatagtacaagtcaacctcattgtggataaaaataattgctttatatttacccattgaataaccttagcccagaatcaattcacataccttctcacttgtgacagaaacaccaaagaatcctaatgggccaaaacatcctaataatacaagtagtgagaatctgttgtcatactctgataattatatgtaactttcaaatatatgggtcaaggaaactaaatagtacttgagtgctactaaccagaacgtagggccaagtatttgtttactgatttgccagaactttcctttcttagtgaatgtgctgattaacattagaagaccaataaaattcctattttacatctgaggtaagctctgtccttttcagagactgagggatggcctgtgtcatctctgaagatcttttttcaatttgttaagtccgtagggcatctataattctccaaggttatatttgtaaaa

SEQ ID NO: 406547 - DNA, 551 bp, Homo sapiens
gatctcaagcattctaaccgtgcttcaagacaaatgtgtgagggttagtagagctcttactttgtttgagaaagattcatgactgcatagtacaagtcaacctcattgtggataaaaataattgctttatatttacccattgaataaccttagcccagaatcaattcacataccttctcacttgtgacagaaacaccaaagaatcctaatgggccaaaacatcctaataatacaagtagtgagaatctgttgtcatactctgataattatatgtaactttcaaatatatgggtcaaggaaactaaatagtacttgagtgctactaaccagaacgtagggccaagtatttgtttactgatttgccagaactttcctttcttagtgaatgtgctgattaacattagaagaccaataaaattcctattttacatctgaggtaagctctgtycttttcagagactgagggatggcctgtgtcatctctgaagatcttttttcaatttgttaagtccgtagggcatctataattctccaaggttatatttgtaaaa

SEQ ID NO: 406548 - DNA, 601 bp, Homo sapiens
gcctgtctgtatctagctcaccctttcacttctcacatccagcttagggcctatggtaaaatagattctcaagagatattgtacgaatgaatgtaaatcgagtgagtgaacaacagaggtaaggctgtakgggttgtgcttattttctgaccatccttagatacgtatttgactttgtaagggaggcttgtaagtcatttcatccaactgaccacttgcccttttctgcctgacagccagatagatatactagtggcttgatgttcaatccacctttcgtctacaatcttacggcctcaagcagataatgccatattgccatagtgtgactcatgtgcaaactagtgttttctttgattgaacttttagtgtgagaggttaccgatattcagtgctcagagcaaaatccaaaaagaagctgaaaagacatgggaaaaaaataggtcccacaaaacaagacattttctattggtctgtgcttcacacatattcttacagcaaagacttgctcaggagctgaattgtcatttcatcaggaaagagttttattagtcaagaaagcacccaggctggtcaatagaaatatactgtgagttgactg

SEQ ID NO: 406549 - DNA, 601 bp, Homo sapiens
gcctgtctgtatctagctcaccctttcacttctcacatccagcttagggcctatggtaaaatagattctcaagagatattgtacgaatgaatgtaaatcgagtgagtgaacaacagaggtaaggctgtaggggttgtgcttattttctgaccatccttagatacgtatttgactttgtaagggaggcttgtaagtcatttcatccaactgaccacttgcccttttctgcctgacagccagmtagatatactagtggcttgatgttcaatccacctttcgtctacaatcttacggcctcaagcagataatgccatattgccatagtgtgactcatgtgcaaactagtgttttctttgattgaacttttagtgtgagaggttaccgatattcagtgctcagagcaaaatccaaaaagaagctgaaaagacatgggaaaaaaataggtcccacaaaacaagacattttctattggtctgtgcttcacacatattcttacagcaaagacttgctcaggagctgaattgtcatttcatcaggaaagagttttattagtcaagaaagcacccaggctggtcaatagaaatatactgtgagttgactg

SEQ ID NO: 406550 - DNA, 555 bp, Homo sapiens
atattttttcacaccacatttacaactattatttctaaatctttctaccatcagtctagtaaggtcatttgtcaagtctgaattatgccatcttgcagatgctgaaactgaggcatagaggttaggttaactccctaggatcacatagctaaggttttcacagcacactgggtaaaaaaaatgttattcagaaattaaattaatgttaagatggttatctgtttaatgcttgtcacatcaactaaactttaagctccaggaggtcagagaacttgtctgtcttctttaacacttgaagcgtagagcctagcccagtgcagcccgagaaaacactcacttggtattagttgaatgaataaatacataaagaatgctggggctctgactaaaacctaggtttcctcattcagaggttgagtttcttttagtcacactcctgagttatgagasagggtatgagtcacttgggaatttcagttagaaggcacaggcaccaatcatgccctccccttcccctgttccctttccatcaaagcatatctttgtgtgagaaat

SEQ ID NO: 406551 - DNA, 398 bp, Homo sapiens
aactaaaacacaatactaccattctttctcttaatcacatgttattctatgtaaaagaagtgctatgagaaaatgcaatcatgtatgcttayaaattctgagaacattaaagttaaaagaaggaaaaataagagacaaaacaatgccagaaaaatgcactaaaatgcaattaacaataatttttttgtatgtgcttagtgagtgtttatcatattgattttcaattttcagtattttgatcatttttttggagacagtagttttataattaaaaagaaaatacccccaaagcccagtactctgccttaatgattaaatgaatggaagatggaaagcaaagggagaatctgagttaaccagtcatcaatgacatgggaagacaattcactaggaggtat

SEQ ID NO: 406552 - DNA, 564 bp, Homo sapiens
ttacatatttccatcagatggaagaatatgtttcctaccattaaaaattgtgctgctctgtaactattttgaccaatggaatatgactccagaactagaccttagggtacctgacagtttccagtgtgatctgagggatccctgtggcaccaakaaagacatctaggttccctgctggagtggccagatggtgagaccttaacaactacatgcagagggagaaggagccagctaaatccacattgctggctgttcctgctaaggtaatacatatttgattgaagctgtcttggatcctccagaacaattaacatctagctgggtaccactgagtgatcccagttgacactacattcagtcagaaaaaaaaataataataacacagctgtgatggcttcctgatatgtcaatttgttcaccctgtggatagcagcttcagcctatgcatatggtcttcccttcctggtttcctgttggtatagacttcgggcttagccctcaaaattgcataagccaaattgcttgtaataaataaatctttgtaataatttcctgctgagtcac

SEQ ID NO: 406553 - DNA, 587 bp, Homo sapiens
  misc_feature (1)...(587): n = A,T,C or G
tagatttgttttaagccaagaaaatctctatcgatatttatcaaaacagaacagctaaaataacatattttatgagataatgtaaaaaatgcttggagtatgcggagaacattttgtgaatttgagaaggaatgttagctgttttgaactaaaataaattgagaactgaaataatcctgtttctaaattgtccactgtttgtcaagctacaatcttggtacaatgtttcttgtttaaaaaaatggctgcaaatggatctatttataaaaatttaactgaaacatatagncatttatatattttattctttcaaataatgtttaggaataatacttggattctttcaaataatgtttaggaataacacttggattctctatggccaagtattaaaatacaaaatggagaataattttttgcatttttrtattttataagtagtaaaaccaaaactgacaagttaaattttcggtggcagccacataacaagtcattcctcgtgccagaaaatttagtgcaccaaacttttatttcttttcctctaggggaatttactagaaacatgtttcttcagaagcagaagagat

SEQ ID NO: 406554 - DNA, 577 bp, Homo sapiens
aaatgttgaagattacatatattataggaagcacatgtacatttaggaatcacatacaatatttttgatttttcttttctttcaacaaccatgacaagcatttattgagtacacattactaattatacacctttctaggttaaaaaaaaaaaagaatacaaacactcctgcctgagtggagtttatactttaggagcatatttataaataaataaatgttgttataacaacatggtaatggccaacatgaatgtatacatacatttgtacatacaatggtagccaactcaactattcacccacaggacagtgaacaatcactttatgcatattttgcaatggtaaaagtgaatatactttttacctttgtaaaccaaaggtaataatttaggtaaataatcacttccagtatgatagaagttttataaagctaacaaaaagcaaaataaaacaaatattacttacaaaaacataaatatgtagtaaaactattttttaaatgtataatggctacccctgcccaaagacagsataaaggaataacaaacataagtagcttttgcaatagaggtccagt

SEQ ID NO: 406555 - DNA, 591 bp, Homo sapiens
attatttagtttcttgtaataaagagtttcttgattccagtaattactgcttatctgagacaatattcttgaatgagaaaaagaacagtcatgtaaataaaaatcaattgcaaatttcctggtatccctgtgtagcaatcactccaataacaatcttattaagacacagaataagaacagaagctaaattgctatccttcattatcctycacaatagaaatattaggatgattttaattaatggatttgcggagagttacttatttatgaatattatcacaagtctagtctttacatatataatatacattccatgctttcttgtgacatatccctataaatgataattacatttctcaacagaaaatggggaaagaatttaatatgatagttgtagtaagaatattctgcccatgacaggatttaggaataagcaaatggcacaataagaattaccttcaaatgagaaagagaagagagagagagagatttgtttaaagcagtttcataacttaagtacaatatttatttttgttcccaattttctttctttgctgagaaaagtaagcaaacaaaccttaaatgaccagt

SEQ ID NO: 406556 - DNA, 591 bp, Homo sapiens
attatttagtttcttgtaataaagagtttcttgattccagtaattactgcttatctgagacaatattcttgaatgagaaaaagaacagtcatgtaaataaaaatcaattgcaaatttcctggtatccctgtgtagcaatcactccaataacaatcttattaagacacagaataagaacagaagctaaattgctatccttcattatccttcacaatagaaatattaggatgattttaattaatggatttgcggagagttacttatttatgaatattatcacaagtctagtctttacatatataatatacattccatgctttcttgtgacatatccctataaatgataattacatttctcaacagaaaatgkggaaagaatttaatatgatagttgtagtaagaatattctgcccatgacaggatttaggaataagcaaatggcacaataagaattaccttcaaatgagaaagagaagagagagagagagatttgtttaaagcagtttcataacttaagtacaatatttatttttgttcccaattttctttctttgctgagaaaagtaagcaaacaaaccttaaatgaccagt

SEQ ID NO: 406557 - DNA, 515 bp, Homo sapiens
aatatcctgatgacactctgcactctttagccatgaaaaccctgcagcttccccaacttacttgaaaatatcgcaaactgtcctttattcagccaattttcttctctcaaccatttctgagaaattcatattattcatctctttcgcatttagtataatccaggatgattatcccagatttcctttttgctataaccacctgaatttgttatttgaacaataattgtcttgagacaagtgagaatttgctactttattaattcttatcaccctcacattgtaaatatacattttttcattaattttatcttggccagtgcatggctagattcttatgaggaaaatggacttacaaaaaataggactgtagttgctggagaaatggcwtacagtctgaatcctcaggtggacaacattgagtatgcaacttgacaatggtaacttgagtatcaaaggaaaagtaaatccaaccacgggtttcaaaggactgtgattctgattagctcagctgtcat

SEQ ID NO: 406558 - DNA, 601 bp, Homo sapiens
ggttttttgtatctgtgaagtgacgacaatagyatctacatgttattgtagttatcctgtagtcgtaaggatagaatactctttaagcatactgtgtatttgccaaaattgttttttaaatgaaaactggtattattcttgttgttttacagaatggagatggctttaaggccaaagcagaagctctgataacatttaggccaaaatggcagggctaaaagaccatcaggttatatatccctcaaaagaaccctggcacatagaaaagaatcagttcaaaacgtaatatagaccagatggggtcttcaggaaccaagaatatgctttcatatgtcagtgtaacccttacctatttttgccacttggggaagaaaagattgtcactatttggttttgcctaaaagaagattctgagacaaggacttaccttttttaggagataacctcaggaagcagaagtgaaagtgagaaaggaatggaaagaaacccagtatagtatgggttaatgagttggttaccactgtgggcaaatcaactcagtcccactgagaggcctctggagaactgtgtagaatgcaactcagaattatctattggcagg

SEQ ID NO: 406559 - DNA, 601 bp, Homo sapiens
ggttttttgtatctgtgaagtgacgacaatagtatctacatgttattgtagttatcctgtagtcgtaaggatagaatactctttaagcataytgtgtatttgccaaaattgttttttaaatgaaaactggtattattcttgttgttttacagaatggagatggctttaaggccaaagcagaagctctgataacatttaggccaaaatggcagggctaaaagaccatcaggttatatatccctcaaaagaaccctggcacatagaaaagaatcagttcaaaacgtaatatagaccagatggggtcttcaggaaccaagaatatgctttcatatgtcagtgtaacccttacctatttttgccacttggggaagaaaagattgtcactatttggttttgcctaaaagaagattctgagacaaggacttaccttttttaggagataacctcaggaagcagaagtgaaagtgagaaaggaatggaaagaaacccagtatagtatgggttaatgagttggttaccactgtgggcaaatcaactcagtcccactgagaggcctctggagaactgtgtagaatgcaactcagaattatctattggcagg

SEQ ID NO: 406560 - DNA, 601 bp, Homo sapiens
ggttttttgtatctgtgaagtgacgacaatagtatctacatgttattgtagttatcctgtagtcgtaaggatagaatactctttaagcatactgtgtatttgccaaaattgttttttaaatgaaaactggtattattcttgttgttttacagaatggagatggctttaaggccaaagcagaagctctgataacatttaggccaaaatggcagggctaaaagaccatcaggttatatatccctcaaaagaaccctggcacatagaaaagaatcagttcaaaacgtaatatagaccagatggggtcttcaggaaccaagaatatgctttcatatgtcagtgtaacccttacctatttttgccacttggggaagaaaarattgtcactatttggttttgcctaaaagaagattctgagacaaggacttaccttttttaggagataacctcaggaagcagaagtgaaagtgagaaaggaatggaaagaaacccagtatagtatgggttaatgagttggttaccactgtgggcaaatcaactcagtcccactgagaggcctctggagaactgtgtagaatgcaactcagaattatctattggcagg

SEQ ID NO: 406561 - DNA, 469 bp, Homo sapiens
taactgagtcatggggacaggtttttcctatgctgttcttgtgatagtggataagtctcatgagatctgatgattatataagggagagtttccctgcacaaactctattctcttgtctgccgccatgtgatacatgcctttcactttctggatgattgtgagaagtccccagccacatggaaccataagtccattaaacctttctttcttccccatctcgggtatgtctttatcagcgtgtgaaaatggactaatacacctgtgatatagtaataaattaatttctgattaaaaaacaatctgtgtggaagaagtaacacctagcagttaagcatgtgcctccatcgttttcatgtgtacaacaaaaataataatcatacctgaacataaatgtyatgcaggaactaaatgagataatacacggaaaacacagttctctttctgacatctgttaagcactcaataaata

SEQ ID NO: 406562 - DNA, 592 bp, Homo sapiens
tctgtccacgtaacaagcaactgaaaaaaaattttaagctttcaaaaataatagcatttacacatgctgagttctgttaaaaagcatcatgatatcaatttaattcattctgtgagttttgaaaatacatataaagtttataacaatataygtaactgtgtattcaatacatacaatatgcttttcaaaacgtctttgtctcatggctaaccttgttgctataatgtatgtgacaccaggaacattgttttgtctctctatacaaaatcttttcttataacttttggtagctatgcacatcaagaaagcaaaatatattgaaaataaggtatttggtagaaggttgtatgccttcctattctgcagtctctctcagtctccttgaaagtttcatttaaatgtccatattaatgttgtttatgcgtaggcatcattttcaatttaagggtagttgaatgaaccttttgaaatgtactaaaattcaagtgcaactgagttaaggacactggtaagtacagtatgaatagaattcatgaaaaggttttcaatcagctatggcttgaaaactatagctttgttgaaggatgctttg

SEQ ID NO: 406563 - DNA, 537 bp, Homo sapiens
agagacattttaaggtcatacctcaaggaactagagaaacaagaacaaaccaaacccaaatccagcagaagaaaggaaagaaccaagatcagagaaaaactaaatgaaattgaaacaaacaagcaaaaaaaaaaatacaaaagataaataaaatgaaaagctggttctttgaaaagataaataaaaytgatagaccattagcaagattaaccaagaaaagaatggagaaaatccaaataacctcattcagaaatgaagtgggagatattacaactgacaccactgaaatacaaaagatcattcaaggctactatgaacacctttatgcacataaactggaaaacctagaagagatggataaattcctggaaaaatacaactctcctagcttaaatcaggaagaattagataccctgaacagaccaataactagcagcaagattgaaatggtaatttaaaaattacaaagaaaaagagtcatggaccaaacaaattcacagcagaattctaccaaaccttcaaagaagaatttgtacc

SEQ ID NO: 406564 - DNA, 630 bp, Homo sapiens
ggagtgttacatagtataccctgccaaactatcaagaaaatgtgagaaaaagtatagaatcagttatagattctagttttctaatgccagaattcagtgaatttatcatccatgaaccatatataacccaaaaggcttgcaggaatctggacagaaaataaaagagagtctatttaacataaacatttggaagagtcttttttttaaagtaatgaatttttaatgccatagcatcgtattttcccctttatggatycattcatattactgactttatagaacaaaatatttagaaacccatattgtaaatgctgcctattagcatttgattatttggaatcagtctagacatagcacaaaagacttaatgtttaaatagcagaatgaaaatgctaaggtttggcaacataaaaatggtaatataactaacaaagtgagagacggaatggaaaagaattgaaagaaaagttgaatgtgcataatttcttattttcttagtagagattcattaagcattgtattaatttgacaaatcagtaaagcacatagaaaataagtacgttatttgacatttaataggcaattaaaagaaaaacaaaaaattaatagtggtttcctttggatagcgag

SEQ ID NO: 406565 - DNA, 635 bp, Homo sapiens
gattatacccaggtgattaacagtgcaatctatcacctgcacaatttcatcagtttatgcctagcgtattttgatactctcctgttacacacatgcacattaagaattactatgtcttcttggataattgacccttatattttttacataatgccccggtttaaacctgataatttttttctttgaaatctgctctgtctgaaattaatatagctatttctactttctttcaattttttattggcatgaaatatctttctctatccatttactgttaatcaacctatgtctayatttacagtgggtttcttgggctggacacagtggttcacgcctgtaattcaagtactttgggaggtcaaggaagaaggatcacttgagcccaggggtttgagactagcctgggcaacacagtgggacctcatctctgcaaaaacaaaatgttatgatgtacatctgtggtcccagctacatgagaggctgaggtgggaggattgcatgagcccaggaggtcgaagctgcaatgagctgtgattgagccactgcactccagcctgggcaacagagcaagaccctgtctctaattaactaactaactaactaaataaataaataaatataggtttactgtagac

SEQ ID NO: 406566 - DNA, 329 bp, Homo sapiens
cacagtggttcacgcctgtaattcaagtactttgggaggtcaaggaagaaggatcacttgagcccaggggtttgagactagcctgggcaacacagtgggacctcatctctgcaaaaacaaaatgttatgatgtacatctgtggtyccagctacatgagaggctgaggtgggaggattgcatgagcccaggaggtcgaagctgcaatgagctgtgattgagccactgcactccagcctgggcaacagagcaagaccctgtctctaattaactaactaactaactaaataaataaataaatataggtttactgtagacaacacacagttgg

SEQ ID NO: 406567 - DNA, 577 bp, Homo sapiens
agtgtctctaaaaatcttaaaggaagacctcacagactcattgacaatggaacttccaaggattttagatgtgtttttctacagcagccatgcagaaagttcaaaataaagtttattgtgacaaaatgttatcaatgtcgctttttaaaaaattgagtacattcccaataagatttctaagaggcccatagaatctttttaaactggttgtttgytctatcctctacttattttttactttaaactttttttacttgtttttttttttttaactttcactttagatacagagggtacatgtgcagatttgttacacaggtatattgcagaatactgaggtttgcagtacaactgatctcttcacccaggtaatcagcatagcacccaatagttagttgttcaatccttgccctcttctctccctcacctcccttgcagtccccagtctatttttgccatctttttatccatgagtactcaatgtttagctcccacttataagtgagaacatgagttattggttttcttatcctgcattaatcacttaggataattgtctccagaaacattcatgttg

SEQ ID NO: 406568 - DNA, 614 bp, Homo sapiens
aagccccaagcctaggcagtttccacatggtgttgagcctgcaggtgcacagaagtcaagaattgaggtttgggaacctctgcctggatttctgagaatgtaaggaaacacctggatgtctaggcagaagtttactgcaggggtggagacctcatggagaacctctgctagtgcagtgcagaagggaaatgtgggatggagcccstacacagagtctttactggggcatagcctagtggtgctatcaaaagacagccaccattctccaaaccccagaataacagatccaccaacagctggcaccatgagcctggaaaagctgcagacactcaatgccagcctgggaaatcagtcaggagggaggctgtaccctgaaaagccacagggacagagctgcccatggctgtgggagaccacttcttgaatcagcatgacctggatgtgagacatggagtcaaaggagggaattttagatctttaagatatagttacttgcctcactggatttcagacttgcatgggccctgtagcccctttgttttggccagtttctcccatttggaataggtgtatttacccaatacctgttctcctatcttatctaggaagcaact

SEQ ID NO: 406569 - DNA, 605 bp, Homo sapiens
tatccaatgaactcacattgcattttttagttgaagggtgtattctctctgcagtcataagctaacwagctccctgtaaaagctgtcagaatagttctagattcttcccatgacacaaaacaccctttataatctagccttgtatttccgactataatgacccctcctggtcaaaatatgtgtccaaagattatagagctacttgcactttctaactgtgcatacaatttggtgcttctgtatatttgcatacccttctgttcatcctagaatgcctttttcctggttcacttggaaaataccttaatattattccataccaaaatcagggatcacttccactatagatagtaatttacccaaaaggttatccaagagaaaaagtcctccagcaatttttttttccttagaattcctgctttgggccaggacatatgtctcccagttcatactgagttttaaatactcatttttaaaaaatctctctccttcactagtttctgagctccctgaaagtaggatcaatacctatgtcattttgtatctcagaatcctaggacagtgccagacatgtagaatttgaatttatatgtccaaatgtattt

SEQ ID NO: 406570 - DNA, 614 bp, Homo sapiens
aagccccaagcctaggcagtttccacatggtgttgagcctgcaggtgcacagaagtcaagaattgaggtttgggaacctctgcctggatttctgagaatgtaaggaaacacctggatgtctaggcagaagtttactgcaggggtggagacctcatggagaacctctgctagtgcagtgcagaagggaaatgtgggatggagcccgtacacagagtctttactggggcatagcctagtggtgctatsaaaagacagccaccattctccaaaccccagaataacagatccaccaacagctggcaccatgagcctggaaaagctgcagacactcaatgccagcctgggaaatcagtcaggagggaggctgtaccctgaaaagccacagggacagagctgcccatggctgtgggagaccacttcttgaatcagcatgacctggatgtgagacatggagtcaaaggagggaattttagatctttaagatatagttacttgcctcactggatttcagacttgcatgggccctgtagcccctttgttttggccagtttctcccatttggaataggtgtatttacccaatacctgttctcctatcttatctaggaagcaact

SEQ ID NO: 406571 - DNA, 614 bp, Homo sapiens
aagccccaagcctaggcagtttccacatggtgttgagcctgcaggtgcacagaagtcaagaattgaggtttgggaacctctgcctggatttctgagaatgtaaggaaacacctggatgtctaggcagaagtttactgcaggggtggagacctcatggagaacctctgctagtgcagtgcagaagggaaatgtgggatggagcccgtacacagagtctttactggggcatagcctagtggtgctatcaaaagacagccaccattctccaaaccccagaataacagatccaccaacagctggcaccatgagcctggaaaagctgcagacactcaatgccagcctgggaaatcagtcaggagggaggctgtaccctgaaaagccacagggacagagctgcccatggctgtgggagaccacttcttgaatcagcatgacctggatgtgagacatggagtcaaaggagggaattttagatctttaagatatagttacttgcctcactggatttcagacttgcatgggccctktagcccctttgttttggccagtttctcccatttggaataggtgtatttacccaatacctgttctcctatcttatctaggaagcaact

SEQ ID NO: 406572 - DNA, 514 bp, Homo sapiens
gtgtttttaaattcccccatccattcttttatagaattcagtcatgaatccattcattatacctgagtgtataatctgaaagacagactcttgatgctatcccaattccccatgaaaacatttctggtcattgcctgtttgcactaagatattgcttatattgttttcagccttccagatatgttcagccaatataagacactggtagaatatcagaaggttgctgaagtagagaagccaggacatttcttgagttagcagtttctggtatgggctatgtctctttcagggtagcaagtcctgccagagcagctctcctttttaatacccatcccccaccagggaactcctgctgtggttctagctccccttgggtgttcctaacttctaatttttggtgatactrcctccctgctgtattcctccaggacctagagttggctttctgctgtttctgatcatttggttatttttctatgccctgcttggcttttcatccctttattacctctaa

SEQ ID NO: 406573 - DNA, 579 bp, Homo sapiens
tccttgtgtttaaaacacgagtggttttttgttttttttaaattttctcactgacctctttctgataccagatgaacaaatatgcatgctcargcagtctgaatcccagggctgaatgtggcttcacctcagtgtcaacttgtgctatgtgcaaacccaattacaaattgaaaagttcttagtgcttaacagatgtagtggagcatctcacttaaatcagtaaagaattagtagagaaactctggagtcagtatgttctgaaaagaataaacttcagttttaacctactttcatgtagctgactgctaaaaatgttaccaattggcactggagtttccctatacagaagtcaaaatttctggagaaattagaccacccatgagaaattcttactgttaggatactaacaaacttttatagaaacaaggatgcctgatacagaatttgaaattacttgctgttatgcactgaattgtcttcctcaaaagcataggttgacatcctaagcccaagtacctcagaatgtgactatatttggagatagaatttaaaatcactaactttaaaaaaggtaattaa

SEQ ID NO: 406574 - DNA, 579 bp, Homo sapiens
tccttgtgtttaaaacacgagtggttttttgttttttttaaattttctcactgacctctttctgataccagatgaacaaatatgcatgctcaggcagtctgaatcccagggctgaatgtggcttcacctcagtgtcaacttgtgctatgtgcaaacccaattacaaattgaaaagttcttagtgcttaacagatgtagtggagcatctcacttaaatcagtaaagaattagtagagaaactctggagtcagtatgttctgaaaagaataaacttcagttttaacctactttcatgtagctgactgctaaaaatgttaccaattggcactggagtttccctatacagaagtcaaaatttctggagaaattagaccacccatgagaaattcttactgttaggatactaacaaacttttatagaaacaargatgcctgatacagaatttgaaattacttgctgttatgcactgaattgtcttcctcaaaagcataggttgacatcctaagcccaagtacctcagaatgtgactatatttggagatagaatttaaaatcactaactttaaaaaaggtaattaa

SEQ ID NO: 406575 - DNA, 579 bp, Homo sapiens
tccttgtgtttaaaacacgagtggttttttgttttttttaaattttctcactgacctctttctgataccagatgaacaaatatgcatgctcaggcagtctgaatcccagggctgaatgtggcttcacctcagtgtcaacttgtgctatgtgcaaacccaattacaaattgaaaagttcttagtgcttaacagatgtagtggagcatctcacttaaatcagtaaagaattagtagagaaactctggagtcagtatgttctgaaaagaataaacttcagttttaacctactttcatgtagctgactgctaaaaatgttaccaattggcactggagtttccctatacagaagtcaaaatttctggagaaattagaccacccatgagaaattcttactgttaggatactaacaaacttttatagaaacaaggatgcctgatacagaatttgaaattacttgctgttatgcactgaattgtcttcctcaaaagcatargttgacatcctaagcccaagtacctcagaatgtgactatatttggagatagaatttaaaatcactaactttaaaaaaggtaattaa

SEQ ID NO: 406576 - DNA, 580 bp, Homo sapiens
tggatttgaaatgttgggaacatgtgatgtttccaaagtttatttgctttaataaaatgttatttgactacccaggctattctttttacttaacataggtacttggagaaagcrcattaccactttgaactttagattcttctgtgaaacagagattgcatttttctcataatgctgatatgaggataaaataaaaaatcatatctagtgctaaacgctatgctagaaagtttacgtagggtatgccatttagtctttcaattatttataaagctgttattatccccgttttgcaaatgaggaaggtgaggttcagagtgattaggaaaagtattccaagttgtacacagagtcagagacgaagttgggacatgaaagaaagtccctccgattctatatcttattctctttccattaaaccttacttcatctcaagcctatttatattttaaaaggttatctttagagataatacataacccaagagatgagactctattggggaaatgcctgattccatgacatgcaaataaatgtttgcctgaagtgggtttaattctgcttggaaacagggaggaaa

SEQ ID NO: 406577 - DNA, 584 bp, Homo sapiens
tgcagaaccgtgtgccaaaataaaacctcttttctttataaattaaagcagcatgggactggtataaggatgcacaatagaccaataggaataccagtcaggtattcctttatagcaatgcaaaagtggcctaatgcagtgtcaaaaaaaaaataaaatacttagtaatacatttaacaaaaggacaaacttttatactctgaaaattacaaaacatgttgaaagaagatttaatgaaaagaaatcccatgtttatgaaccagaaaactaagtattaagatggcaatatttcccaagttgatctatagaattaaygcagtccatctcaaaatccctagctggcttctttgcagaaaatgaccagctgatgatataattcatctggaaattaaaggcggcccagaatagccaaaacaaacttgacaaagaacaatgtcggaggactcatgcttcctgatttcaaaacttattatactgctacagtaattaaagctgcatgggactggtacaagaatgcatataaaccaacaggataccataggatagaatagcccagaaataaacctttatgtatatagtcaatt

SEQ ID NO: 406578 - DNA, 538 bp, Homo sapiens
aaggtactcacatatttggttaaactttattccatatgtgtctgaaagggtgtttctggatgagatacacatttgaaccagtagactctaaagcagtttgcccttcccagtggggtgggcctcatccaattcacagaagacttaaactgaacaaaagtaagagagattagttttctctacctgatggtctttaatctgatacaatggtttttttcatgccttttgacttggacatagactggaattctacctttgtctctcctgggtcttcagtttgcctactatagatcttgggatttctcagcatccatgaccatgtaagccaaatccttatagtaaatctctctctctgtaggaaatatatacattttctattggttctattctctggaaaacccagactaatacaattgggaaataagaaacagyggaacaaggcactggggaaaatagtgtagttctgtcttaaatgggccaatgtttttttcaagtttgatagaaagatattttcagacatccaagaagtcagaaaatttat

SEQ ID NO: 406579 - DNA, 573 bp, Homo sapiens
taagtaaatggatgaacaaaggtgtaccaggcaaatggaaatacaaattttaaaaagcttaaatatcttcacatgctgctatggagtgatacatatattcataggtctaaaaaagaaaagagagaaaactttatagtatgttacyatcaaagaaaggatcagggaaagtgattactatgctttatgttggcttacttaaaaactacaatgataaaccagaatcgttttttttttttaactggggatgggaaaagacaaggttaaaagctacactcatctaaatagatcttatatttttttccactttggaaccatctgccaacaaaactaaatgaaattttccaaaaagacaagcttagtaaaagcacaatgaaacaaatgcatctaactttgttttgagttagcaacatagcctcacagagaaaaattactccaaatgactataaaacactgtaatgattctaagggcaaaaaaaaaaaaaattgcaaaaaaaatcatgtactgttttcagtaatcacaatgttaataatatttctaatgttattctgaaaatattatagagtaaataagta

SEQ ID NO: 406580 - DNA, 560 bp, Homo sapiens
tttcttacttagattaaaaaattaaatatacttttctgaaactttattaattttctatatgtgtatgtttgtgtatgtacagtctgagacaaaagtgggtagcactcaaaaattgttgtaagctgttgatctcagctgcttaaataccaaaaattttaaaggaatttctttaagtagcattttatttttcttcaatatctgtaattatagtataaatattttcttatcacaggcctagcccgtgaaacaatgataaaagtcactgaagcctrttaactccaattgaatcaggggtcagagaatagagtgtgtaagaaaaatgtgaataaattcacaagagtgggaaaagactgaggcatttattaccttacctgtttggggaaaattaagtgaaaagctacaatacacttcaaatttagttctttagtaccacttattttcacctgaggaaactggaagcattttaattgataatttgtttcttctctagatattagctgactctcatgaagtaataatcttttgctgcttctaagaatgtttaagattggtttcagtac

SEQ ID NO: 406581 - DNA, 434 bp, Homo sapiens
gggattcaggcataagcaagcatcattcccactctgatggtactcttggacttaggaatgcagatatgaaaacatgtactttcartgttgtgtactgtgcacacgagcaatgaacagaaatggccatattttggtcactaaagaagagtggtcaggaaagaaacaaaacaaaacatatagtttatgtgactagggcaaatagtaaaattgttaacaaggaaagagagagacaaaggaaaatcagtggttgatgatattggaagaaaggtttgaatcaaatcatataggatactaactactgtcttaatacatttggacttcttccagaagaaactggggagcagttaatagcttgaaacagagaaattatttaatcaaatttcaattcagaaaatctacttgggctataatctgaagaatggagtaaggagggt

SEQ ID NO: 406582 - DNA, 434 bp, Homo sapiens
gggattcaggcataagcaagcatcattcccactctgatggtactcttggacttaggaatgcagatatgaaaacatgtactttcaatgttgtgtactgtgcacacgagcaatgaacagaaatggccawattttggtcactaaagaagagtggtcaggaaagaaacaaaacaaaacatatagtttatgtgactagggcaaatagtaaaattgttaacaaggaaagagagagacaaaggaaaatcagtggttgatgatattggaagaaaggtttgaatcaaatcatataggatactaactactgtcttaatacatttggacttcttccagaagaaactggggagcagttaatagcttgaaacagagaaattatttaatcaaatttcaattcagaaaatctacttgggctataatctgaagaatggagtaaggagggt

SEQ ID NO: 406583 - DNA, 434 bp, Homo sapiens
gggattcaggcataagcaagcatcattcccactctgatggtactcttggacttaggaatgcagatatgaaaacatgtactttcaatgttgtgtactgtgcacacgagcaatgaacagaaatggccatattttggtcactaaagaagagtggtcaggaaagaaacaaaacaaaacatatagtttatgtgactagggcaaatagtaaaattgttaacaaggaaagagagagacaaaggaaaatcagtggttgatgatattggaagaaaggtttgaatcaaatcatataggatactractactgtcttaatacatttggacttcttccagaagaaactggggagcagttaatagcttgaaacagagaaattatttaatcaaatttcaattcagaaaatctacttgggctataatctgaagaatggagtaaggagggt

SEQ ID NO: 406584 - DNA, 573 bp, Homo sapiens
ggatcttaatcacatcattcccatatagcataagcaaatcatgtgaataaaatcccagaacatctgcaagttcttctcacactcaaagggagaaggttatgcaagaagtgtccaccaagagatgggaatcttggaaccaatttagaattctgtctactacagcattcctaacaaataatgtttactgattcctagtttgtactttcatacataattctcaggtgtagaatattagtcctggcagggattttggagattgttagcttgctgttctggctccttgcttgcatttccttgtttctttagcatttctttttatttaatawgtttttagaataatacacgtaaaacacggccccagtgatttcacgtttgtgttctcatttattagaaatggcttggctgtagaaactactatcagtgtgaacaggcaacctacagaatgggagaaaatttttacaatctgcccatctgacaaagggctaatatccagaatctacaaataacttaaacaaatttacaagaaaaaatcaaagaaccccatcaaaaagtgggcaaaggatatgaacagac

SEQ ID NO: 406585 - DNA, 544 bp, Homo sapiens
  misc_feature (1)...(544): n = A,T,C or G
nnnnnnnnnnnnnnnnnnnnnnnnnnatcaatgatgacttcaacaaaacaacaaagcaacgtaaagaccaaggacctaaaagaccaagagctcatacacagggcatgaggtgcacagaaaacctgataatatagctgctgcatcattttgtgaatatgtctaaaagaaattcccatgtaaatactatattcgtttttgtttcgtttaatagtaacccagtactttgtgaatgatccctgtgggaaacactagtgtctttagtcaagagcattcattgaggaacagacwgtttttgataatgttgcaaaaagtcttaaattttttaatctgatactcaattaaatgaaataatagagggtaaatttgccatctaaataagcaagcaaaccctagtctagtactttaatggaaaatgaagaatgtgtagggggagcatatgtgattgcattatttcacaacaatatattctaaaaataatttctatgatgcagatattattctacatagctcatagtggtgctcagtggtggagcagtgtttgaaa

SEQ ID NO: 406586 - DNA, 492 bp, Homo sapiens
aagttgctgtagcctcttgtgtacttttctccaggctctcttgtaccacttcagtatcactgatttccatgtgactgctttcagcaagttttcatgatcctttgcttattgtaaatcaagcattgatgatcatccaaggctttattaggccacgaaccgatttctattggatctggctttgtgagcctagtcacaggagcaagaacttcatttcatggttgtcttaaaaataatgttaggcacatcatcagtcttgttttttttttttttaagttttttaatttgaaagctaaattggtaccattgacttagtgcctgacccttgcatttttcagtaagttcttaaacagttgacagccagatttaagatcagaggtatattctaaatgcttacaaaggagtggaagagagttgcyaaactctatctcacgcaacatctgctctaacacgttgttggaagaccggaaatgcaattgagatattagaacctca

SEQ ID NO: 406587 - DNA, 492 bp, Homo sapiens
aagttgctgtagcctcttgtgtacttttctccaggctctcttgtaccacttcagtatcactgatttccatgtgactgctttcagcaagttttcatgatcctttgcttattgtaaatcaagcattgatgatcatccaaggctttattaggccacgaaccgatttctattggatctggctttgtgagcctagtcacaggagcaagaacttcatttcatggttgtcttaaaaataatgttaggcacatcatcagtcttgttttttttttttttaagttttttaatttgaaagctaaattggtaccattgacttagtgcctgacccttgcatttttcagtaagttcttaaacagttgacagccagatttaagatcagaggtatattctaaatgcttacaaaggagtggaagagagttgccaaactctatctcacrcaacatctgctctaacacgttgttggaagaccggaaatgcaattgagatattagaacctca

SEQ ID NO: 406588 - DNA, 380 bp, Homo sapiens
ggggcgggtctttcccgtgcagttcctgtgatagtgaatgggtytcgtgagatctaatggttttaaaaaatgggagtttctctgcgcaagctctctctttgctgctatccatgtaagacatgacttccttgccttccaccatagttatgaggcttctccagccacatggaactggaagtctaattaaacctgtcttttgtaaattgcccagtcttgggtatgtctttatcaacagtgtgaaaacagactaatacacctttcctcttttcccctcccctctcctcccctgtcttttgcttcttcccttcccttgtctttttttttttttttacattagacttcttttgaaaactgcaataaggaattgctgttccatctag

SEQ ID NO: 406589 - DNA, 380 bp, Homo sapiens
ggggcgggtctttcccgtgcagttcctgtgatagtgaatgggtttcgtgagatctaatggttttaaaaaatgggagtttctctgcgcaagctctctctttgctgctatccatgtaagacatgacttccttgccttccaccatagttatgaggcttctccagccacatggaactggaagtctaattaaacctgtctttygtaaattgcccagtcttgggtatgtctttatcaacagtgtgaaaacagactaatacacctttcctcttttcccctcccctctcctcccctgtcttttgcttcttcccttcccttgtctttttttttttttttacattagacttcttttgaaaactgcaataaggaattgctgttccatctag

SEQ ID NO: 406590 - DNA, 380 bp, Homo sapiens
ggggcgggtctttcccgtgcagttcctgtgatagtgaatgggtttcgtgagatctaatggttttaaaaaatgggagtttctctgcgcaagctctctctttgctgctatccatgtaagacatgacttccttgccttccaccatagttatgaggcttctccagccacatggaactggaagtctaattaaacctgtcttttgtaaattgcccagtcttgggtatgtctttatcaacagtgtgaaaacagactaatacacctttcctcytttcccctcccctctcctcccctgtcttttgcttcttcccttcccttgtctttttttttttttttacattagacttcttttgaaaactgcaataaggaattgctgttccatctag

SEQ ID NO: 406591 - DNA, 410 bp, Homo sapiens
tcacaaagttcatggctgagaccactataacaaaagacagattaacaagagaaaatcacccaaatttatttgatgtgagcattatgtgatatgcaagccttcagcaaagaagacccaagaaacagaaaaataatacgtatttttatgaacagtcatgcagaggtatkattgagagacaaaacggtatgatctaattggaataaactaggagaaaatggtaagtcctgtttgtttagattcttggtcactatgagtctttggcttattttctgctgggtgtaggcagaacagttgcttcagaggaaggtcagataaatcttttatagcacgcttccggggaaaaaggtgggagaaggtcagagggtgacattctcacttccgcagttttctcagtttccttcagtttaaag

SEQ ID NO: 406592 - DNA, 410 bp, Homo sapiens
tcacaaagttcatggctgagaccactataacaaaagacagattaacaagagaaaatcacccaaatttatttgatgtgagcattatgtgatatgcaagccttcagcaaagaagacccaagaaacagaaaaataatacgtatttttatgaacagtcatgcagaggtattattgagagacaaaacggtatgatctaattggaataaactaggagaaaatggtaagtcctgtttgtttagattcttggtcactatgagtctttggcttattttctgctgggtgtaggcagaacagttgcttcagaggaaggtcagataaatcttttatagcacgcttccggggaaaaaggtgggagaaggtcagagggtgacattctcacttcygcagttttctcagtttccttcagtttaaag

SEQ ID NO: 406593 - DNA, 610 bp, Homo sapiens
ggctttattaaggtaaaaaaccaaactttttgtatcttcatgataagagagagttttgcaatttggagcaaggctcctatgttcccacagaaacagggagataggagcactaccttgatatttatatttcagacagatggtttccggtccttaagacagacattcctagattataaaactgtaaaaaggackatctagttttcaaaaggatttgtgcatttcaaagagtggagacagtacttacaagttttctaaagtaaatgctctgagaaaaataaggggagggaaatctcatcccttattttcaacagggcaaattaaggctctcagttcgtattgatacaaattatggcagagttgggagtatacagtagatgagttaaaatagaaaaaaattctaattaacatctattttatcattattcctctttgtgtaggattttgtataagcctaaactcagccaatgaaaacgtatttaagaagtaaggaaatgagacagtgaaggaacaaaacattgcagtgggctagagctgagtctttctttttaacaaaagaaatgcttcaggaagcattagcaccgtatctccttattccaactctcctaccatt

SEQ ID NO: 406594 - DNA, 610 bp, Homo sapiens
ggctttattaaggtaaaaaaccaaactttttgtatcttcatgataagagagagttttgcaatttggagcaaggctcctatgttcccacagaaacagggagataggagcactaccttgatatttatatttcagacagatggtttccggtccttaagacagacattcctagattataaaactgtaaaaaggactatctagttttcaaaaggatttgtgcatttcaaagagtggagacagtacttacaagttttctaaagtaaatgctctgagaaaaataaggggagggaaatctcatcccttattttcaacagggcaaattaaggctctcagttsgtattgatacaaattatggcagagttgggagtatacagtagatgagttaaaatagaaaaaaattctaattaacatctattttatcattattcctctttgtgtaggattttgtataagcctaaactcagccaatgaaaacgtatttaagaagtaaggaaatgagacagtgaaggaacaaaacattgcagtgggctagagctgagtctttctttttaacaaaagaaatgcttcaggaagcattagcaccgtatctccttattccaactctcctaccatt

SEQ ID NO: 406595 - DNA, 583 bp, Homo sapiens
gaaggaaagactaaagtctgtcaacacgcatggacagacttcagttgcatctattgtctactctatgagaccaacagactttttcccaggccatgtatgttcttaaaaaccaattaattgccctaaaaattatttactacctccctaatgtgaaagcacctttgcaaaaattatatttgtgagaaaataataacagtgaaagaggtctgacctaactgactccatcttgctttcaacctccaagctgtccttgttcattcctgggttcaggacaaactaactaacttagtttacagtttaaaacaaagatgatagtagccctttcccaaaatttgcttttgtaagactaatcccaaaactggttgtctaagactaacaagttagccacaaaattagaaattatgatttaggagtcatgcaattacaggtcaccagattctaaatgtcgccagttkctcctaggaataatatcactattgtaaaacttgagattggtgcttgaggtatttttcagacctttcacttgatggatcaggtggtgccatccaaatcaataaatcagctcatctggtcttatggccct

SEQ ID NO: 406596 - DNA, 484 bp, Homo sapiens
atactataatatataatatatagtattttcattattgttttattttagatagcaattttggttttgttttcttctttgaatcaagagttgtttaagagggtgataaatctcatatggataagattttaaagattacttagttctgttcttaatttctagttttattgtgttattattggggaatgttcatttgcatcatttctgcactttagagtttattcaagtattggttaggagtgtagactctggatccacactgcgtgggttcaagtcctggttttcccatgtatcagctgcatgacctcaggcgtgttgtttaacctctctgtgtctcaagttttatcatggggttgttatggggattaaaataattaagatctacaaagtacttatgaatagtrcctggtacattttaaagtttcatagatatgttaaccattagtattcatatagttgtttatcatatactttttgatgcgttttt

SEQ ID NO: 406597 - DNA, 280 bp, Homo sapiens
attttatgaggcctgaatatgctaatatcaaaatctaataaaaaggaatataaaaataaaactataaagaattttaccggttaacatagaggcaaaaattctaaaacatattagcaaatgaagttggcattatattaaaagaatagtgtactataatcaagaagagtatataaataagcgtaaggatgattcattatagaaaatcttattaagaaatattttaatatattttatcacaycaacacataaaaagagaaaaattattaatagattatttcca

SEQ ID NO: 406598 - DNA, 594 bp, Homo sapiens
acttggctgttgctcacctcctgctgtgtggcccggttcctaagaggccacagactagtaccagtccgtgacctgggggttgggaacccctgctctagggtgcagataaaactccccatcagttcaggaatgaaggagtgaggcagttacagaaattctgactatatgccaggtagtgtcctgagtttgttcctatgggatatctcatttaattcgtgatggtttgggaggtatgtgttatttaccaaggaaaaaaaaactgatgttcatagaggtgagattacttgcataaggccacatatatgggtggatttgaacccaggtcagtctaactctacatctggggtctagtggctctaaaattggayaagatggagcagcgggatgcccagagaggcatctggagagcagatgagggttgtgcgtagggcctgggtcttggtcgtgggcctaggaactgatctagttgatcttgtttcctcctccagctggaagtttgatattctctctgaaacctctccaagaaggagaaggctgctgtaccctaacactgagtctcttatcctcagcagggggcatggcttgctgggcatg

SEQ ID NO: 406599 - DNA, 607 bp, Homo sapiens
aaattatcatcgacttctcttcctccttcttcccctttcccttctcctcctcctcctcttcctcttccttctcctcctkctcctcttcccttccctctcctctttctcattcttctttcttcttcttcttcattgtagtcatcaccatgaatgccttctggtacaactttcttgctttgcacatgaccaggatggtggtttggctgtaagccccacagagttctgggaagtggcacttagttcaagtggtgagcctaggaggttctcttctctgggggtgatgggaagaacagtctaattagattacaattatttggggatttagtaaattgccttatgaagtaattcacaaaggtctgtgagtacactgtgccagtggtggtaggaaaaatgcttggttatcatgtaagtaatgaaatgtattaagctaaggggcccaggaattaacctctgctttgctggataggaaatgacatgcagaagccttctaattattttaaatggttttcttatcttaattcttctttgatataatctctatctcagatcttcattaaagaaaatgacgatggaagaaaaggaggaggagggaagaggggaggataaa

SEQ ID NO: 406600 - DNA, 238 bp, Homo sapiens
tggtaggttctatgagttatacaaggctggttattaaaataaaactggaagtcattacagyaatgtagccatcaaatgcgcgggtgggagggtgttataaaacagcattaggagattgtctacacccagacagggtagtagtggtgaagtacacaagccttggaacccgttaggacttcccccatacaactgtttcactttgaacaaatccctgtacctctctgagtctccttttctt

SEQ ID NO: 406601 - DNA, 578 bp, Homo sapiens
ttacctttttaggttgtatagtttaaagtagttattaaaagtgtggtccacagaccagtggcacctgagagcttgcagaaatacaaaatgctgctttagagcagtgatgcccaacaagggtgattttgccccttaggggacattgggcaatgtctggagacatatttggttgtctcaactgaggatgggggtgctactgacatgaagtgggtagaggccaggaatgccactcagcctcctacaaggcacaagacaggcccccacaataaataattctcctgcccccaaatgtcaacagtcttgaggtggagaaaccctgatttagaggaaagtgaatgggaaatcgtggggtgtgagggaaagtgaatgggaaatagtgggttgggagtagggagagtaaaaagaaattgcttcaacctgctaaataatagaagtaatagtgagtcatggaattgggctgtgatcatggaagttgtgtacccataaggaagtcacttaccctttcttgatttcattttacacatttataaaatgaaggggaaaaataaaattragccaaaaagaattactatctacaa

SEQ ID NO: 406602 - DNA, 526 bp, Homo sapiens
agcaggggaggccctgaatgactgaagccaaacagcacaaaccatcccctgtcaaagtggttagtttatggatggtcatgtgacccagtttgggcaaatgagatgcaagcattttctaggggcttctgagaagcacaggcagagatgttctctttccttactgactagaaatggggaagcagagagcccctgcgagttgcttgcagccatttcgtgcccatgagggtagccagccttgggcaaagatgatatggaggaaaggcagagaagagagtcagagaaaaactcgttccacggtgccttgttgaactgatcaagcttcactggaatcttgacttytcatgaacatttcctttattatttataacagcttaaattaggttttctgttacctgcagccacaaaattctatctgaaatacatccctctcttgggagtggcaaaacagctaagagactgagacttcttttaactagttctttttcttttcccaacactgcttttgaggtatcaagatcagatgacc

SEQ ID NO: 406603 - DNA, 548 bp, Homo sapiens
gtgcccatgagggtagccagccttgggcaaagatgatatggaggaaaggcagagaagagagtcagagaaaaactcgttccacggtgccttgttgaactgatcaagcttcactggaatcttgacttctcatgaacatttcctttattatttayaacagcttaaattaggttttctgttacctgcagccacaaaattctatctgaaatacatccctctcttgggagtggcaaaacagctaagagactgagacttcttttaactagttctttttcttttcccaacactgcttttgaggtatcaagatcagatgacccccattctggtgtattttatagtgaaagcaatgagattggccatgttgagatcaaatatttgaaaacaaggttgcctgtctttctaatcccacttattttggagaacctcattatatatttcctgcaggcccaaagtaactttccaaaaagatgctgtgaactaagcatatttataaatgaaggaaaaataagcacatcagaaattttcctgccagataatttgaaaacacatga

SEQ ID NO: 406604 - DNA, 508 bp, Homo sapiens
cccaagaatgccactgcaccagacaaatctgcttcctcccactcacatcctaaatgtcaggcctacaatttccctattctgtgttctttagaaaacctccatgattacaaattattctttgaggcccaggtgtcaactgggggactargaagtgtacacatggaatttggagccaaaaccaagatgtggttaaaaaattagacccatcctcatacacagtttgaaaatcaactccaatagttattacaaaagaaaagtcaaaacctgttctgggccttgacatcatcatggaaaacacgtttggcttcctatggtgacttcttgggcaaccatgagctcgttcaatagaatatactccaccacatttgctttaaataatacacattttaacattatctcgatttgtgacaaaaggtcactccagatccagaatatatctcatggtgtttggaaagagccagaaggaattcacagtcagacccagcttgcttttgtctgctgtccctcc

SEQ ID NO: 406605 - DNA, 644 bp, Homo sapiens
  misc_feature (1)...(644): n = A,T,C or G
accaaagaactagggcattgccaataaggcatacacctgatgctctttcccagtccagggccccaggtcccctccacagaggtcattgttatcctgagtttgggagtgtatacactgctttgcatatataaagtcatacctacacagcatgtgttttactcttgcttattcttgttttataaaaatgagatcatgctattatatgtagtcttctggttttaatttttttcctactatttcccaaatttttttttttaatttttattttaggttcaggggtacatgtgcaggtttgttgtacattaataggtaaacttgtgtctcgggggtttgtggtacagkttatttcatcacccaggtattaagtacccaatagttattttttctgctcctctncctcctcccaccctccatcctcaggtaggctccagtgtctgtggttctcttctttgtgtctacgagttctcgtcattcagctcccacttatcagtgagaacatgcagtatttggttttctgtttctgtgttagtttggcaaggataatgggcctccagctccatctatgttcctgcaaaagacataatctcattcttttttatgactgcatagtatgctgtggtgtatatgtaccacattttctttat

SEQ ID NO: 406606 - DNA, 644 bp, Homo sapiens
  misc_feature (1)...(644): n = A,T,C or G
accaaagaactagggcattgccaataaggcatacacctgatgctctttcccagtccagggccccaggtcccctccacagaggtcattgttatcctgagtttgggagtgtatacactgctttgcatatataaagtcatacctacacagcatgtgttttactcttgcttattcttgttttataaaaatgagatcatgctattatatgtagtcttctggttttaatttttttcctactatttcccaaatttttttttttaatttttattttaggttcaggggtacatgtgcaggtttgttgtacattaataggtaaacttgtgtctcgggggtttgtggtacaggttatttcatcacccaggtattaagtacccaatagttattttttctgctcctctncctcctcccaccctccatcctcaggtaggctccagtgtctgtggttctcttctttgtgtctacgagttctcgtcattcagctcccacttatcagtgagaacatgcagtatttggttttctgtttctgtgttagtttgscaaggataatgggcctccagctccatctatgttcctgcaaaagacataatctcattcttttttatgactgcatagtatgctgtggtgtatatgtaccacattttctttat

SEQ ID NO: 406607 - DNA, 531 bp, Homo sapiens
gatcacctgagcccaggagttagaggctgcagtgagccattattatgtcactgcactacagcctcgtgacagagcgagaccctgtctcaaagaaaaataaaagaggtttatttggctcacagttctgtgcatgtgctagcacctgcttctgatgagggccttgggaagcatctactcatggcaggaggtgaaggggagccagaatcacatggcaagaggaaggaagcaagagagaggagggagatgccagactcttttcaataaccaattttcatggaaagtaagagtgaaaaactactcactcacaaccatgagaatggcacaaagccattcatgagagatccacccccaggacccaaacacctcaccyccaacattggggccaacaaaccatgtccaaaccgtagcaccaggccacatacattttttcttggatgactacaaaatcaggggttccccaacaccatcccccaacccctcaagttctataaattcccagaatgattcacagaactcaagaaagcactttac

SEQ ID NO: 406608 - DNA, 540 bp, Homo sapiens
ctttgggaggccgaagtgggcagatcacttgagatcaggagtttgaggccaacctggccaacatagcaaaaccccgtctctactaaaaaaacaaaaattaaccaggcatgtggtgcatgcctgtaatcccagctcctcaggaggctgaggcatgaggattgcttgaacccaggaggtagaggtgaggttgcagtgagccgagctcatgccactgtattccagcttgagtgacagagtgacactctgtcttttttgggggggtttttggtgccaattttaaatagttttatttaaaacattgcattttccacttacaatacagtgtttataaagtgcaatgttatttccttcccctgtgcatatgttccacattcaagtattgagaaaaatatggaatgcttcaccaatttgcttgccatcctcgtgcaggggccatgctaataatcttctctgtattgttccagttttttagtatatgtgctgccraaacaagcatgactctgtctttaaaaaaaaaaaaaaaaacaacaacaacaacaa

SEQ ID NO: 406609 - DNA, 570 bp, Homo sapiens
aaagccacaatggctggccgcagaaatcacacttcatcatttttgcaatatcatactggtatcacaaaaaasctccgttcagtgggaagtgggaataggggtgggctcaggtggtggtacttacacaacagcagtaataacagaaaaggggaccatattgttggaggctggtcaacagaatctctttgtaggaatctaatttaaccaaataatctgaaatgcagataaaactttatgcattaagatattcattataataatattgtaatagtaataatttgtaaacaatactcagtaatggagctggttaagtaaatcatggcacatctctccaatattcaattgtattctatattgcctcttatacaatcacatcaaaaatacatgtcattttcatatatccatatatacttatatgtgtagaaaaaggatgagaagaaaatggactaaatattaatgactactacctctgggtgatggaataattacttattatttacttttcatgcttttctccatttttaaacttttctaaaataggtgtatattacatagataattagaaataat

SEQ ID NO: 406610 - DNA, 586 bp, Homo sapiens
tataaaactcatttgtatttccttttctaaaacaaatgtgttgatagtctttgcccattccctaccacactttaatattttgcttaattaattagtaccacccttattaatattttgctggagagagcctatatgttccctctcrtatgcttttgaatgggtcacaataaatgtgtgatatgtgtctataaaagtagttccaagtctatgggatttgaacctagagggtggaggtgttgtcagggttgagggggtattgagtcacttcacatctaatctgcttagaaagggatcctggaatctatacagatttagatagaatgaataaatattgcttatatgaaaaacttatatgaaaaactgcccaaagtttacaaatgcgtatgctactatcttcaataaattataaatgcatttaagaacatctttgatatcataatagctttcttgccatatgagggattcttggaaaatcttttaccttaaaaatgttttcctagttaaaaaggtgttgatcatagctaaactagtatgcattttaaacacgtactagcaaatgtatatatgtgtttataccactgtttgt

SEQ ID NO: 406611 - DNA, 586 bp, Homo sapiens
tataaaactcatttgtatttccttttctaaaacaaatgtgttgatagtctttgcccattccctaccacactttaatattttgcttaattaattagtaccacccttattaatattttgctggagagagcctatatgttccctctcgtatgcttttgaatgggtcacaataaatgtgtgatatgtgtctataaaagtagttccaagtctatgggatttgaacctagagggtggaggtgttgtcagggttgagggggtattgagtcacttcacatctaatctgcttagaaagggatcctggaatctatacagatttagatagaatgaataaatattgcttatatgaaaaacttatatgaaaaactgcccaaagtttacaaatgcgtatgctactatcttcaataaattataaatgcatttaagarcatctttgatatcataatagctttcttgccatatgagggattcttggaaaatcttttaccttaaaaatgttttcctagttaaaaaggtgttgatcatagctaaactagtatgcattttaaacacgtactagcaaatgtatatatgtgtttataccactgtttgt

SEQ ID NO: 406612 - DNA, 548 bp, Homo sapiens
acagaaccattaagtaacatcctttttttwttttagatggagtcttgttctgctgcccatgctggagtgcagcagtacgacattggctcactgcaacctccacttccctaggttcaagcgattttcctgtctcagcctcccgagtagctgggattataggtgcctgccactacgcccagctaattttttgtattttcagtacagatagggtttcaccatgttggcaaggctggtctcgaactcctgacctcatgattcgcctgccttggcctcccaaagtgctgggattacaggaatgagccaccatgcccagccaatggtagcatccattttaagattgagtacaattattgttatttagaatttcgaacaaaaaaaatatttatttatttatttacttttttttttcagacaaggtctcactctgtcacccaggctggagtgcagtggtacaattacagctcactgcagccttgaactcctgggctcaagcaatcctcctgccttagcctcctaagtagctaagactatagacatgagccatcatg

SEQ ID NO: 406613 - DNA, 557 bp, Homo sapiens
agttaatagctgtatttctacatggagaaattagataaccggagtacaataataatagtttgctgtgtcttggytgatgctcttttaaatgctcacagcactttctcacctagttatcccactgttacctaaagggtctgtaattactgccacttcacagatgagaaactgagtcttggtgaagttaagtgatgggtccatgctcacagctgacctactactgagaccagggtttcctatcagccaactggctatcaggtactagtggatagttggtagtcagctaccaactatcatatacagaccacagaggaagttaacatcaagagatgagattagaattcatattttagcttttactccagcactctggttaaatagtagacatattagagagatcacctttaaaccctaaatttcacatgtaataaatagtctaaaactacttaaaaatgtttgcgtgcacatatgtgtgttgtgtgtatatgtgttcatctctctcccttgtcaacactacaataaaatgaagggtgtctcttcccctttatttgaaagtc

SEQ ID NO: 406614 - DNA, 557 bp, Homo sapiens
agttaatagctgtatttctacatggagaaattagataaccggagtacaataataatagtttgctgtgtcttggttgatgctcttttaaatgctcacagcactttctcacctagttatcccactgttacctaaagggtctgtaattactgccacttcacagatgagaaactgagtcttggtgaagttaagtgatgggtccatgctcacagctgacctactactgagaccagggtttcctatcagccaactggctatcaggtactagtggatagttggtagtcagctaccaactatcatatacagaccacagaggaagttaacatcaagagatgagattagaattcatattttagcttttactccagcactctggttaaatagtagacatattagaragatcacctttaaaccctaaatttcacatgtaataaatagtctaaaactacttaaaaatgtttgcgtgcacatatgtgtgttgtgtgtatatgtgttcatctctctcccttgtcaacactacaataaaatgaagggtgtctcttcccctttatttgaaagtc

SEQ ID NO: 406615 - DNA, 464 bp, Homo sapiens
aggcggaggaagggcggggaggctgagggccggcttctgccttccgcgccagatggcctctgcagctccgcctcgggctgccgcctgcggggagcagccccggagccagcaggcgtccccgggccactcccccaggtttccccttcgcgtccccgctgggtcgacggtcgggttcgcgcgcctgtccttcctgttagtcagcttactcatctgtggcccccagagtggcttgggtcaacgtgtaatagctaggggtggccgggtgacctgacctcccctcttcctggcccgggcgmcctggtggagtgggggtccaagggcaccgtgggcctcgccaccataggctctcactaaatctccgttgcgggactcagggttgtgcgttttctgtaaagctaggttttttggtgcccagatgttttgcaaacaagctcctatgctaaatactagccagcgacagctaa

SEQ ID NO: 406616 - DNA, 565 bp, Homo sapiens
gatattaccagttttctaactgtgttagactgacgtacatgcccactagcaatggatgagagttctgttttctccacatccttgctaacagtctctttagttgttccatttttaattgtgtcttcaagtaggaagcaccctcacttacaggagaaaggaactcccaaggaagtttctgattagtgcaagttgggtgggatgaagatgaataaccaatacatagcctaaagctttgctcagcatcttattcagatgtagtatttatttcaatgacaaccaaaaataatttytgaatggaccctccctacccatcaactgtaagttaacattgtccaaattctagtctaattatgcttatgttcttcttctcccctcttatattcatgctgaaatattaaaaaatcactgcaaattcctatggaaaacctcatacttcaaaagggatcagtgtttggtttctctctccattttttttttttttctgttgaaatagagtgaaagacccaggaataatatgcctgtgtgtacattttgcagatctggtaataataacaactgtagcggt

SEQ ID NO: 406617 - DNA, 614 bp, Homo sapiens
ctattgctaacatttattaatgcttatgaacttccaggcatcctactagtttacaaatgaggaaactgaggctcaaagaggtacaacgatttgccaggcgtgatggcccatacctgtaataccagcgctttgggaggccaaggcaggaggatcacttgagcccaggagttcaagaccaaactgagcaacatagtgagaccctgtctcttaaaaatgtaaaaaataaaaataaattaaaaaaacaaagaggtacratgacttgctcaagataatacagctagcactgatttaaacacagggtgccctacatagctgcttgcaattaatcaattaagaacacacacccttttagcctatagttctccctctttttcattactgagttttaagccctcacctcaaacaagcaagatgcattgtaatgttaattttaaaactgtaacagagcttcctcctttaggaatggattgtaagtggatttgttgatatcggtgctaggtttgcctttatgaaacgtactcgttccgctacacaataagcccaaattctcttcccccaaatttcacaaatactaatttggatacagagaccatcaacatgacagccaaggatca

SEQ ID NO: 406618 - DNA, 609 bp, Homo sapiens
aactgaaagtattccttatgggaaataaaggaatgggccaaagtaaagggatgagctctggctagttgtctgcagcaggagcatgtccttaaggcacagattgctcatgctattgtttgtggtttaagaacacctttaagaggttttctgccctgggtgggccaggtgttccttgcctcattccagtaaatccacaaccttccagtgtgggcatcatggccatcaagaacatatcacagtgctgcagggatttttttttttatggccagtctttgggccagtttatcagatttgggggcctattcccaacagagatggaaattagcattttagggtgtcaaaacatctaggagatgagagtccaaatatctcccacaaaaaggaggtaatgagaagtgattcacaaacactgcaccaatttttcccttattaatgccgtataaggcragtattttagaatcaaagcaaaagcagttgaaaagctgagctgagttcttggcattcttctaatactgtggcacaaaattggagtccaggaccaccaattaggagatgccttagtaaacacagccctggttctcatctgggagccctggttccagaggggtg

SEQ ID NO: 406619 - DNA, 525 bp, Homo sapiens
acctgtacaagtcttatacccaatgtctattattccaccaaaatttaccaggtatagtacaaacccaagccaagaaaacaaaaacaaaaacaaaaaaactagttaacaagtgggaaaaaaatctctgatccagctgatccagatattggagttatctaaaataactatggttaacataatcaagaaaatagatgacaagatggatattttgaccagggagcttaaatctataaaaacagaaccaagtagaaatcctaaaacctgaaaatacaaatttgaaagtaagaatttactagaatgtctagcagtagattatagactaatttaaaaacaaagaaaagaaaaaagattagtgaaacaggagataagtcagtagaaaatatccagactaaagctgaagaaaaaaaatgagatggaaaatcaaaaaagaaactcagaagcccaagagacacagtaaaaagttctaacatatgtrtaaatggagccccagacttaaagaatacagagaatgtggaagcaatattt

SEQ ID NO: 406620 - DNA, 551 bp, Homo sapiens
cttacaccagtggtttgccaggggctctgggccttcagccacagactgaagctgcactgtcagcttccctacttttgaggttttgggactcggactggcttcattgtccctcatcttgcagacggcctattgtgggacttcaccttgtgatcctgtaagtcaatactccttaataaactccctttcatatatacatctatcctattagtcctgtccctctcgagaaccctaatacagcaccttatgtctrtttgaaaggatggcagctgtttctgtctccaaagtcaacatgtgccctctctttcatatttaattaataattagcataccaaaggttctgaaaagtcccacggtaaagaaacctctttacatctgtgtagtaaatatatattttttaaaaagaaacctctttacctttctttaatgcagcttacttttcctccagagtcccttccttgcctcctattttctttcaaaacagttattagcatccacaggaagagtattccatgaaacacagttcgagtaattcctttttgtaggggaggcat

SEQ ID NO: 406621 - DNA, 604 bp, Homo sapiens
aaatttttaaaccaatttttaaattttaattgacaaattaaagttgtatgtatttatgatgtacaatatgatgtctcaatagatgtataccttgtgaaattactaaatcaaactatttaacatatggattacttcatatactcctttttatggtgagaacacttaaaatctactccattagcaagtttcaaatatacactgtattattattaattacagccatcatgatgtacaaagtctgactcttgttttcaattggaaaatcaaagtattttcccaaagtctcctttgcagatatctgcaaaggccttattccakaggccatcattcaccctagctgcaacggagtctggcaattgagtgtttgactttctagccttcaaactgtggaaggtggcaagggataaataaaggaattgtgaataaccaaggtgtaccacaatgtttcaagtggcctttaaactaatttgggtattaattttctacgataaagctcattcgtatctggaaattcatttttaaggcccaagaagctcccaatgatcggaccttggcacatctttagcagaacctgaaactgaaatagaaattgctttgggcaatg

SEQ ID NO: 406622 - DNA, 597 bp, Homo sapiens
gcaaaggccttattccagaggccatcattcaccctagctgcaacggagtctggcaattgagtgtttgactttctagccttcaaactgtggaaggtggcaagggataaataaaggaattgtgaataaccaaggtgtaccacaatgtttcaagtggcctttaaactaatttgggtattaattttctacgataaagctcattcgtatctggaaattcatttttaaggcccaagaagctcccaatgatcggaccttggcacatctttagcagaacctgaaactgaaatagaaattgctttgggcaatgtygacttgacaagtgtctggcttttgtgtgtgtgtgtgtgtgtgtgtgtgtgtgcttctggcttttagcaacagcaacaaaatactgcaatgggcaagtggtctactttccatgtgtagtatcttgttagattcttgtaatcacccccatgaggtacataaaggagacattgttacaattcagaattagagcatggaatcatagcaacttttataacttaaatttgtttaatatgagatctgtaactgtagatcttgcctaccatgagagatttcatgaagcttatgacaatg

SEQ ID NO: 406623 - DNA, 300 bp, Homo sapiens
catgctgtcataaatccattgaatacttggcagatgttaagaataacaagaggataaacagcagtgaaagtggatcagatggctaatgccggcagtagccttaaacttcaaaattggggctgccaatgcatctctgtgggtgggtgttgggatgtctgcttgtgagtgggtgacaggctcctggaaaattggtgagtttggcacgttacagccccttctgtggatatcctctttccctgttgctgtartgtgtcttcccctagagccctcttgggggatgttttttttcgcacatgcctc

SEQ ID NO: 406624 - DNA, 612 bp, Homo sapiens
acccttcttcatacccaagtgacccggctgcagatctggtgcctgaccacctgggttcaaattccagatccacctgtaagcagctgccatctttcccatgcctcaacccccaccactcaattctgctgggatttgggtaggagctctaggcggcttctctaaggaggtgactgtggggctgggcctagcagagtgaacattgacaggctgggaagtgrgtgaggtgtacggaaaaatatcccagccacagcagagacctatgaaggagcatggggatatctgaggagccgtgtatggctgaacttgggaagaacagagaagtgagaataattataggtcagcaccagagtaacatcaacagcagcagcagtattgggtattttgactgatgacttactctgtgctaggatttccaatgtgtaatctcatttactgctttcagcaatccccagctgccagtcatcttttaattcccactttgcagatgaggaaggtgaggctcagtaggagactgagtgattttctgaggtcacatagctgcaagtggcagtgccacaatttgaacccaggcagtctgacttttaagctcatgttctttcaacagccagcaac

SEQ ID NO: 406625 - DNA, 459 bp, Homo sapiens
aaaccaaacttctgctagctatgaccataactcctaccagctatgaaatcttgagctcattacttaaatgttccatgtctcagttttctcatctgtaagtggaaataattttacctacggaattgtgttatgaggatgagatgaactaatacgagcttggaaagtgcctggtatatagaaaacactctaagtcgtagctgttattattctcagggtctagaaatgaacatatgcttcagcttcaaaaataaaaaaaaggtttgccrattaaatcacattgaatctctggggatggagaaaggctttctattaagccttttcactccatgttagtttggttcttctggttgccaagaattcactcaagctaacacaacaagcaaggaagcttgttgtaaggctgtgactgtaagaatagagacacgcatctctagggaactgtagaacaatcagccagcc

SEQ ID NO: 406626 - DNA, 514 bp, Homo sapiens
tgtcctggacacgtccatcatctgcacatgaaattgtgtggtttgtgagcgaacagcctcatcatccccccatcaggtcaattctccctatgtgtaaattctatggcccaagcacctaacaatctatattattttccaggtcaaaggaaataacargaggattaaaaatgtatctcagaaatccatagacagagcccaagaaggcggcaaaagggggagtcctggttaatttcaagatgccaaacagctttccgtcaatttccaggacctaattttccccccttcattctcagaattgatgtttatgtttccaccaggatagagaccaattctccttggcatcctccatcagagagaatcagaaattttccacctgggatgctacaaactgcatttctcaacacagttctggaatacagggtatgaccagcatagctaatgctaaatgatcaaacctgaggtgctctaactttataacaatcgtcatcaggcagctggagtttcaccaaagcgt

SEQ ID NO: 406627 - DNA, 589 bp, Homo sapiens
  misc_feature (1)...(589): n = A,T,C or G
aatcttaagggtagagtagagagtagcatgtttcaccatccagattagaatttgccttgggggtctcaggatgcccctttcagccacagctctttaaaatttaatgttcctcctgagtataccttctgcaccttaggaagtagatagtgaaatgaataagcrgaatgaaaagtccctgaagggcccaaagggatggcttttcattaagtagctagtggtggcagttgtgatggtggtggtaggaggggtgacggcattggtggtaataagtaagcctggtagtcccactcattagcccaatcctgacccctcaattcacaagcctaaattaatgtgacagtgatagtgacagtaatatttactagcatctaaaattgtatggccagttgctcactctagcaatggattggaaacagagaggccagctgtcgtcagggaaagcaaggaactcanactaacaggacgagaaaaggaaagcagcagggacaagtcagagggatgagtagaggggggagaagagccagtccctcaaggagagctgaggatcttgggacatctgccctaataggctctaagcctgtgggacgca

SEQ ID NO: 406628 - DNA, 535 bp, Homo sapiens
tgcacttctagacatcttgctaagagataaaaacaacccccatttccattttctgtctaagccactgttagattttctcttatttgcagccaaaagcaatccaagccaatatagaagtgatttcttattctttcttcttgacaataaatgcttattttaaaaacttttagtgggcaagtaaaaaagtccataaataagcaccattgacatccttttgaaccttttcttgatttaaaatatatgagcgcacatcccacctctaccagctgctagctgtaygaccttgggcaagttgcttgactttcatgagtttcttcctctgtaaaatggaaataataataatatataccttaaaatattgtcacgaacattaaatagggtaacatctaaagagcttagcacagtgcctggtgtctagtaagttcttgctgtttgctagctatgagtattattgtgcaaaagcatcaagaccaccaacaattacagtgggatctcagaacagtcaagaacaggagttactaaagccagaactgat

SEQ ID NO: 406629 - DNA, 579 bp, Homo sapiens
gctgtaataaatttggcagtgcagagagtagtcagagctgctttgtgtggtaraaaaacaattctcttagggttgttcttggttagcagtcttgtgctttagttgatattcctgatggcccaaccatatgcccttggctttcaccattctgtgcactcttggcctaaggcttccaagagccagtgcctgtgtttctgcctgatggcttttgccagtgactggaggaacctaatggccctgtgctcaggaaatgccagagagttaatgctcctccgaattagttctcaaccaatacctgatgagagttggtggataaatacacaagctcccttgctagcacagatgggataactctgattgcccacagcggtaatctgctcaatagtacacggtttattggcttatttcatatcattggtttatcccaatccctaatgtgctgggtactgtgatgcaccatccagatgccccatcactgatgaacttgctgcccagctgctgggagtgttgctggtggattaacttcagctgtttgtcccttttggcattgcctcatctacagagagctgctttgtccaa

SEQ ID NO: 406630 - DNA, 341 bp, Homo sapiens
tacctgctggagtacagaatgatgtggaagcatttaataggaagacctggcctatgtagaagtagyggtaagaggttggaaagacttccctgagcaaggaacatttgagctgagatgtggagaatgagtaagtgttaagtatcgcaggaagagtgttgcatccagaaagcatagcatgtgcaaagcctctgagcttttcaaggagcttgggtagacaggaatcttggggtaaatcagtagatttggagtacagagaatacaggtaaaaagagtggttcaagatacatctattttcaaagcttatataggcttccccttatttattttattttattttattt

SEQ ID NO: 406631 - DNA, 502 bp, Homo sapiens
acagtcttggcaattaactcagcttgaggaaggggtggaatcaaagaattccatcggggagatggcatcccaaggcaaagtcatctgtcaaggacaggtttgtcgctaaaayaaacttcgtggcagcctccaagaaacaagtccctggaagggatggtggtgaggatgctaactagtgggacatatcaaagagggacaacctttcaaagaagatatgaaagaaagggctcaggcatcctatatgctctgcactccaggctcggttgtgccactcaatggctgtgtgatcttgaatgtttctgggtttcagtttctctatctgtgaagtgggtgaatcctatctacatgttttagagaggtaaggcagtgaactgacagcaaaggacataggccagtgtaaattaaaggggtttaatggtaaagtctctggaactggaaagggaagttctcagaatatgaagtagctctagtgacggtcttctccctcttcttttttgtcaca

SEQ ID NO: 406632 - DNA, 502 bp, Homo sapiens
acagtcttggcaattaactcagcttgaggaaggggtggaatcaaagaattccatcggggagatggcatcccaaggcaaagtcatctgtcaaggacaggtttgtcgctaaaataaacttcgtggcagcctccaagaaacaagtccctggaagggatggtggtgaggatgctaactagtgggacatatcaaagagggacaacctttcaaagaagwtatgaaagaaagggctcaggcatcctatatgctctgcactccaggctcggttgtgccactcaatggctgtgtgatcttgaatgtttctgggtttcagtttctctatctgtgaagtgggtgaatcctatctacatgttttagagaggtaaggcagtgaactgacagcaaaggacataggccagtgtaaattaaaggggtttaatggtaaagtctctggaactggaaagggaagttctcagaatatgaagtagctctagtgacggtcttctccctcttcttttttgtcaca

SEQ ID NO: 406633 - DNA, 614 bp, Homo sapiens
gtctgcaaatcacagcatggagcccccccagcttccatcacagtgtttccttctaccccgcaagcagtagaggaagagtcccctgagaccatcaaaatgaaaaacaccagcctgttttccacgcatgggggattgtcgatgcatcyggaatcagctatttcacaatctgtttgtctggaatcttatatctaaattatgttcctagaaatttaataaatgaggtttaatagaatgcactcaggtggcactgatgaaatctgtcatggaaaatattacgatttcattgtttttctataacctccttgggacctgtttcttcttatttccacacctcctcctttccctcccatttttaggttttttagtttttagcttagctttgaagtctttgaggccgctggagagtgattcgctctctctctcctccattacccacagcagggaggggctggatgccttgatcttacccttgctgggagtaaacaaagttataaacagttgttttaaaaaaatagttggtttcagatgaaaaatttctgtattcaatttgtcttgtgtacctagaatgccacggtagcacttctcccccagggaaatatgttggacatttctgt

SEQ ID NO: 406634 - DNA, 562 bp, Homo sapiens
ggaacatctgtaaaaggagataaggttatcaccatctccagtgactggaagcttattaaggaagatagttggaaagatgctatctccaccctgaaatattagcaagtttatctctggcagtggctcaggctggtcaggggagcaaaggcaacagggcgatcaattgcaacccgtcctactgtccaaggatgctgggaaatgccaccagtccacacgtgtgaggctaagcaccaagtcagatgtggatgggcagtccagctccatggggaaattaggttagttgtaagtttaaactctttcagggtagaatgtgtatccaatttagaaaatgacggaggcaggagacggaatcagagggcccaattctagcaccttctggctacgtaagcctggtaaaatcacygcacttctcagaacctgtttcttgctcagtaaaaataaagggtattcccacctgatccaccttcctggggctgcttgaaggttttccaaagggcactatgtatttcacataatcctggtggtataagacaaatccagatggtacctgaaaggacatttt

SEQ ID NO: 406635 - DNA, 587 bp, Homo sapiens
cagattaagttaaacaagtgcgctgctctcatagtgagggaagacaagaatattagagggtagaaatgctaccaagaatgaatgactttgggggctctttctgatgggctggtcagggaagaccttgctaaagataagacataagtgaccagaagagattaatcttggggaaggtttagggaagggaattccaggaagatggagcagctagtgccaagatgcatgcagggaacaggcatagcatatccaaaggacagaaagagccagggtgtctgaggcatagtgaaggggagagagcttcaagaaaaaccaagaatggcaggcagaggccagagtgtgcagggttattttaggcagagtaaagagtttggggcttgtcctaagggcaataggragactttagaggcttatgcaactaactcacacaattttatttaagatcactctgggccaggtacaatggctcacacctgtaatctcagctactcaggaggctgatgtgagaggatcacttgagcccaggagttcaaggttacagtgcgctatgattgcaccactgcactttagcctgggtgaaagagcaagac

SEQ ID NO: 406636 - DNA, 587 bp, Homo sapiens
cagattaagttaaacaagtgcgctgctctcatagtgagggaagacaagaatattagagggtagaaatgctaccaagaatgaatgactttgggggctctttctgatgggctggtcagggaagaccttgctaaagataagacataagtgaccagaagagattaatcttggggaaggtttagggaagggaattccaggaagatggagcagctagtgccaagatgcatgcagggaacaggcatagcatatccaaaggacagaaagagccagggtgtctgaggcatagtgaaggggagagagcttcaagaaaaaccaagaatggcaggcagaggccagagtgtgcagggttattttaggcagagtaaagagtttggggcttgtcctaagggcaataggaagactttagaggcttatgcaactaactcacacaattttatttaagatcactctgggccaggtacaatggctcacacctgtaatctcagctactcaggaggctgatgtgagaggatcacttgagcccaggagttcaaggttacagtgcgctatgattgcaccacygcactttagcctgggtgaaagagcaagac

SEQ ID NO: 406637 - DNA, 370 bp, Homo sapiens
actcactacatcagaaatcctkcagaccagcattttggctcagttccttgggcaaccttctccatcattcaatggtaggccactcctatgggtcagctgtgacccacatcctcctatttcttcatcactggtgatggcagccgcaccttctccaaagaagtctcgcacccttagcagtgagaaggggacccttttaagtttctaagtatcttcacctatttactatccctgtgccttggtggctgctttctgcagttgctctttttgtacctctttgggtcctcctctctctttttaagtagttatccacctttttactggttagactagttaacattttttatattaaattttccctgttcaaattact

SEQ ID NO: 406638 - DNA, 549 bp, Homo sapiens
ttggagctgtagcaggcagatcaagataggaggttccaaggtcacacaggaggatcttcttgtatccaagttgtgaggatgatatggagggtaagatgaagagggtgctaaagcagaaccacttctatttcattattatacttgtgaccaccatttaactcaacccagtctctggtgaatttccctattgtggatctaagtggcttattgatgatcctrtggggtacaattcacctaatagcagagagactatgtggtttctgccctcaaataatagctctgctctatttggacagccactccccgagcccacagctttttctttcctatcatttctgttctagcacatagcaattctgtcccaaaggcttcctgtgccttttcaactctgcaatcacacagcagttggtaagacctattaatatttcaacttgtttttttcaattgcagggccatgacactcatggaacacaaaccatctatttgtctaccacaaaatgcacccaagtgtctcaaagtgcccttctggttacaaaatgagacactgct

SEQ ID NO: 406639 - DNA, 549 bp, Homo sapiens
ttggagctgtagcaggcagatcaagataggaggttccaaggtcacacaggaggatcttcttgtatccaagttgtgaggatgatatggagggtaagatgaagagggtgctaaagcagaaccacttctatttcattattatacttgtgaccaccatttaactcaacccagtctctggtgaatttccctattgtggatctaagtggcttattgatgatcctgtggggtacaattcacctaatagcagagagmctatgtggtttctgccctcaaataatagctctgctctatttggacagccactccccgagcccacagctttttctttcctatcatttctgttctagcacatagcaattctgtcccaaaggcttcctgtgccttttcaactctgcaatcacacagcagttggtaagacctattaatatttcaacttgtttttttcaattgcagggccatgacactcatggaacacaaaccatctatttgtctaccacaaaatgcacccaagtgtctcaaagtgcccttctggttacaaaatgagacactgct

SEQ ID NO: 406640 - DNA, 600 bp, Homo sapiens
aggcttcctgtgccttttcaactctgcaatcacacagcagttggtaagacctattaatatttcaacttgtttttttcaattgcagggccatgacactcatggaacacaaaccatctatttgtctaccacaaaatgcacccaagtgtctcaaagtgcccttctggttacaaaatgagacactgcttcaggaccttggagagcgcccttccaggttaacacaaggtcaatatctccaggacctccctgagatccacgggatggcattttctcttcttgacattagccagaaaaaacaaaacaaaaaagcaaaattaagcaaacaatatgggctggcgtgagaaaataatttatttcacttgaaatatggcaatcttcctcagagggagtttggaggaaaatgtttatatttagcaagattaagacaataataattcactaagtacttgctatatgccagaaatgtaagacattgttgtcattttatgtatgcaaaagcagaggattaataagctaccatatmatacacttcctaaatgccagacactctgctaagatatatatacagatatactccatatctacaaatgtagtgctacaata

SEQ ID NO: 406641 - DNA, 585 bp, Homo sapiens
acctctcagaggcagtgtgaggccctcatgagattaaaggtacaaagtgatcaagggatacatagcatcaccaatgttttcttaacattgcttcctccattctgtcctcttgttttcaaaggaagcatcagttctggcacatgacacctgccccatctgaactatgcagagccagaagaccataagatgactcaacgtctgcctgcctcaggttgactgatggcaaactagtgaagtgctgaatttggctcaaatgcccgtctgccacatgctaggaaagaagcgtgggtttctggagcagccattgatgtctgtctgactgtctgatgtaagctaaattcagactggcaatcaatgaagactcctccagagacctcatttttacaggttctcttagctcaccagcatgtcattttgcagtggtgagaccttcattcagagctttggctcccgtttataagcaactgtctgaagtttccccagttctacttccactctccgtcatgttttaaatmacttcatcttatagacaaggtaaacatgttatcaatggccacttttctcaaggtggaactaacagatgtg

SEQ ID NO: 406642 - DNA, 569 bp, Homo sapiens
cagggaatgtgaatagtacctccaaattggccccttggaaaacctcaagttctgagttgctatagcttccaagtgtcaggtaagagtcgtgtcagtctcaattgcaggctctactctgttatttgctctaaatattttctggttgcaaatgttattgatttgacagtttatttcctgagacacactagttccaaactgctgtgatatgaaagtctcatcctaaggaaattggccttgtgaatggttatcccctgggaagagtatgctgtacttatggctgtgctaataggataaagaagtaaatgcaattagcgagcttggttggtgattttccagtaatgatgttaggggtatattattgttttagctgtaattgagcttaagatgatctggaaatgtctaaactggtgtgaaagtcatttcgcagctttggctccagtatggatgttcatgaaccaggtggcctgataacatctggatgtgctgaaacgggggggttatgttccaggatggcagtggtgtgtccytgaaatactatttaattttgctctatcaccagtaaggtgatt

SEQ ID NO: 406643 - DNA, 608 bp, Homo sapiens
ctccctggtgtgtcttgttctgcctaacatagcaccctgttccaaatgtcactcaataaatcttgttgaatggaattgaaataaggactataaaagctgagtgaacaggtgagtttagttctgaaggagacagaagatacatatagccatatggtgacattgtatattctgaagttttaagaaatttatattcaagtttccaatttmtattattcattttcatcagttgcttatagatgggtcaattttgatcatagtaagggtcaaaataattctctaaattatgttagaattaaacatttattaccattaaagataattgaaatgcaataattataattgcatttttcacttttgttttcttcacccattattagtggtgattatagcattgcttaggaatcaaagatgactagtattgattcttgttgacaaaatttcattcaaccatttgtttcaacatttatagaaatacttattgaaaagccagtcccccaaatggatgttttaagtatgtgaataattcttctcagctcttctgcactaattgtgctatgatctttttttaatccctgtgatattgtaataatccatagtaaatcacactt

SEQ ID NO: 406644 - DNA, 608 bp, Homo sapiens
ctccctggtgtgtcttgttctgcctaacatagcaccctgttccaaatgtcactcaataaatcttgttgaatggaattgaaataaggactataaaagctgagtgaacaggtgagtttagttctgaaggagacagaagatacatatagccatatggtgacattgtatattctgaagttttaagaaatttatattcaagtttccaatttctattattcattttcatcagttgcttatagatgggtcaattttgatcatagtaagggtcaaaataattctctaaattatgttagaattaaacatttattaccattaaagataattgaaatgcaataattataattgcatttttcacttttgttttcttcacccattattagtggtgattatagcattgcttaggaatcaaagatgactagtattgattcttgttgacaaaatttcattcaaccatttgtttcaacatttatagaaatacttattgaaaagccartcccccaaatggatgttttaagtatgtgaataattcttctcagctcttctgcactaattgtgctatgatctttttttaatccctgtgatattgtaataatccatagtaaatcacactt

SEQ ID NO: 406645 - DNA, 577 bp, Homo sapiens
agttcatgaagtataacattactttctgccaaatcctttcccttgtcaaatttttgccagaatcaattggttatttttggaattattaaacatagtactgaatcaagcaaattatgctacaaataatactttgcagagaaagaaaataatagatgattaatgcttcaatgcagtcttcttagaatagtgttttctaatgaattacatgatctagatatttagaaaactgtcttcctaccaaggaatgctcctttatgaacttaaaaaaatcagaatgatgccttacacaaatagtattaattcttggtttttaaataagcatttttyatttaagtaacaaatgtgtaggaagaatattcagtcatctaatttcatattttcaggactttacttcctctgattttcttaaatcattacagaaaattcagtgtttttcatcacatctttattttaatctttattgcttttctgattataatgctatgctgattataagaataatgctatactgtactactataaaaattcatatatttcagaaaagcattatacagaaagcaaagaatcctgcaattag

SEQ ID NO: 406646 - DNA, 511 bp, Homo sapiens
tacagaaagcaaagaatcctgcaattagccagaattgctactcttctagcaatctctgagcacagcttcaaattttctcaatctattaaccttttgacctctctttcttcaagatcagcccagccccagttccttccgccacaatacagccctgactttccagcctacgtgcagtgaaacacccataattttttaaatgtactttggtccttcagtcgctttaagccctgcaatttttctcttttctttcttatctaaacatctcaagagcaaggtatattcatttctcagatcactgaaatctggcttctttcccttctactcaacagaaaccatgaggttctaatgtcccaatgtaatgaatacatttttytaagaaatcttttctctaactttaacactgctgtgtctccttcctcaaaatacttatctcgttggtttgattacggttctctgtcctgcttttcttcctacgtctctgataatagtttgctgagttcatttattattc

SEQ ID NO: 406647 - DNA, 566 bp, Homo sapiens
ctcagtttcctcatttgtaaagtggatatcttaatgtaatccagatcaatgatacccagattataggaaggcaaagttaattgtatgattaatgcagaattcctagcacagggtgttactcaaaatgaactttcaatgactaggaggcattacaatcaattcagaggagagacgtcaggaaattttacagcttataggtcttacctgacccagagatgtactaagttttgattgtactgtgttttttattcttttaaggtgaattggttaccaacattaacaaactggggggatattatataaaatacatattttagttttcttttgaaacacttgaagatgtggtaatactaactgatagtggtcaagaactctataaagttaatcctagtcactgctctatctattactttataccaaaggtgcgttattctttcactaccagtctgtttccacctcctggtctgaataattttggtggatctgtcctgttactttagggattaatacatttgatttaaattacatcaacttttgcaaaygatagtactctctcttcaaagagc

SEQ ID NO: 406648 - DNA, 502 bp, Homo sapiens
atagttctgtagatcagaagtgtcattgggctaaaatcaaggtgtcagcagggctgcattctttctggaggctgtaggggagaatttcattgtcttgtttagcctctagagaatgcctgtattccttggcttgtggccctttcttccactttcattttcaaaatcagcagcataacgtggacaaatgtcttacttctacctccctcttataaaatatttttttgattgcattattgggtccacctggataatcccagacactctccccgcctcgccttaacttaatcacattgcaaagtgccttttgctatttaaggtaacatattcmtaagtttggaagttttagagcatagatgtctttgggggggcctttattttattttattctgcttaccacagtaagtgtttgcatgttgggttaatactgttgaaatactcactattacaatgctctttcttggaaccaaattgctgtgctgtgagaatttaagtaacaacgtac

SEQ ID NO: 406649 - DNA, 497 bp, Homo sapiens
aaaaaggagatgattcctttctgttaggtatatatttaatttcatacgtaacacaatatagtatattgtctaataattttacttggtggtctgtgatttaaagttatgaagccttaactgaacaatacttatttgctccaaaaaatcatttctctgaaaatataacatcataactaaattttataatataaagtagagccttgcatttcatattgtttaattrctctgtcacataagaatcttagaatttttcttagtttgttcaattgctgtaaatgacttctgaaagtaatataattataacttgtaatggtaaatgcattcatagaattcatggagcaagctgaatatgtaactgttcatttggaactgagttgattaccatttgaaaacagttaatggaatagctgattagaatacattgcaaagaatcatgatttaattttacatcacctagaaaaaatctgatgccatgcgtgttaatggcagttttgagg

SEQ ID NO: 406650 - DNA, 606 bp, Homo sapiens
tttcatagtagccatgatatggtttggctgtgtcaccacccaaatctcatcttgaattcccatgtgttgtgggagggaccagtgggaggtaattgaatcatgggggcaggtctttcccgtgctgttctcatgatagtgaataagtcttatgagatctgatgattatataacaaggagtttccctgcacaacctctcttctcttgtctgctgccatgtgagacatgcctttcaccatccaccatgattgtgaggcctccccagccacatggaactgtaagtccattaaacctctttcttttgtaaattgcccagtatcagatatgtctttatcagcagcatgaaagcagactaatacacatatcacccyggttaaaatggcttttatcaaaaagacaagcaataacaaatgctgacaaggatgtggagaaaggggaacccttgtatatggttggtaggaatgtcaattagtacaaccagtatggagaacagtttggaggtttctcaaaaaactaaaaacagaactacgatacgatccagtaattccactgcttagtatacaccccaaagaaagaaaatcggtatattgaagagatatctgcactccc

SEQ ID NO: 406651 - DNA, 429 bp, Homo sapiens
gggaaaatttcagggtgccccctcctaccacccccaacaacagatacagcttgggaaaaactaaagctgcctgggaagatgtaagtttagaagcttttgttctaactttacacattgaggtggaagggagcctccttctggtcaatcacatagaagcgaattttgtttttcactgaaagttctactttgcctactttattgctggacttgcaaccagcttctcttactaaaaaaaaaaaattctgcagtaatcatgtaagaacaaaggggggaaaaatcactctaaactacgacagcagaaatatgcccagacatatacatactycaaagcaaaggaagttctgtactgtttcaattactaatcatttaacacaacaaattccaaagaaaacacaacctacatattgaatatattctttagttatggga

SEQ ID NO: 406652 - DNA, 608 bp, Homo sapiens
aaagaaaacagaatatcattcagcctttaagtagaaggaattcctgccatttttgacaatatggacatccctagaggacaaaatgctaagagaaataaagcaggcacaattctttctgagacacatctgtctttccatactcaattacatgtactttgcgtacattagcttgcacacttaatgcaatacaacaataatcatttatatcttaaycgcaagtttgcaggccaattggggtagctctgcttcagtgtacagcttcacatcatggggaggctggggtggctctgctccatgtgtcttttgttctcctcctgggaccagcaggttatccagatgtcatgttttctcatggcaatggaaaagtacaagagtggcctccgagttaaattggaaatgaatgaaatgaatgaaagtatgggggaagcacatagttaagcacatacttaatctccttggcccagaagtggcacgtcacttcagttcctattacactttaccaaaagtggtaacatcctgcctacatagctgcataggggctggaagatgcagttcttggctgggcaactgcttctcagcaacagctccccactgtggaaggggagctc

SEQ ID NO: 406653 - DNA, 597 bp, Homo sapiens
ctttgtaactcaaccagccatttctgccacaatggagaatgtttcaatttctagcctaggtagaagaaaacacacaacaaaatatctccagtgtgatgtcacttttgtgatctagagagagagcgaggtgggaaaggttatgtagatattaatgtagatctacatctcaatctagatgaataaagaaaaccctgaaataatatattcacagtggttattgttgcatagtgaggttacaggtagtttcattttttcacttatatgcaaatatgaacaatttatactttyaaacaataaagtataatttttataatgagaaaataataaggtactgttaaaagtgccaatgaatttctcttttgtggtgcagtgacatttgctgctttctctaagaatctatagtaagataccatcattccttcctaactttttctttaaaagagtttattgctgggtaaaaaagtgtcattttttatttctgttatatcttgaggaaaatgatcatgctttgatttttggtcgtcactgttttgagactgcttataaaatactacagtgctctggatatattgatagttaaataattacctctcagta

SEQ ID NO: 406654 - DNA, 597 bp, Homo sapiens
ctttgtaactcaaccagccatttctgccacaatggagaatgtttcaatttctagcctaggtagaagaaaacacacaacaaaatatctccagtgtgatgtcacttttgtgatctagagagagagcgaggtgggaaaggttatgtagatattaatgtagatctacatctcaatctagatgaataaagaaaaccctgaaataatatattcacagtggttattgttgcatagtgaggttacaggtagtttcattttttcacttatatgcaaatatgaacaatttatactttcaaacaataaagtataatttttataatgagaaaataataaggtactgttaaaagtgccaatgaatttctcttttgtggtgcagtgacatttgctgctttctctaagaatctatagtaagataccatcattcyttcctaactttttctttaaaagagtttattgctgggtaaaaaagtgtcattttttatttctgttatatcttgaggaaaatgatcatgctttgatttttggtcgtcactgttttgagactgcttataaaatactacagtgctctggatatattgatagttaaataattacctctcagta

SEQ ID NO: 406655 - DNA, 527 bp, Homo sapiens
acctaatttgagagaatagaaaccttggggatcacaaacacaaagagaatttgcacccactcacaggagctcctctatggaccttacttactaacaagagagatgtggggcaactaaagagttaggaggaagactttttttttttgaggcatggtcactgcagtcttgacctcctgggctcaggtattccttccacctcagcttctcaagtagctgggactacaggtaagaagcctttcttataaagtcagctgagggaggaaaatattatccactcgagcaaaattacaaaactccacctggattcttctctccatctttcttaggcaacaaaagccttacaccgctgagggaagattcagcaaacccactwaatattgggcaaaaagccaagatctattgcagctagagaaagagaatagataaaattcttttgctcttccaggaaaggcaagaagtcatcctaaactcagatgattagtgctctcctacacctgggagagtgaaacaatcattgaaaatgtctc

SEQ ID NO: 406656 - DNA, 527 bp, Homo sapiens
acctaatttgagagaatagaaaccttggggatcacaaacacaaagagaatttgcacccactcacaggagctcctctatggaccttacttactaacaagagagatgtggggcaactaaagagttaggaggaagactttttttttttgaggcatggtcactgcagtcttgacctcctgggctcaggtattccttccacctcagcttctcaagtagctgggactacaggtaagaagcctttcttataaagtcagctgagggaggaaaatattatccactcgagcaaaattacaaaactccacctggattcttctctccatctttcttaggcaacaaaagccttacaccgctgagggaagattcagcaaacccactaaatattgggcaaaaagccaagatctattgcagctagagaaagagaatagataaaattcttwtgctcttccaggaaaggcaagaagtcatcctaaactcagatgattagtgctctcctacacctgggagagtgaaacaatcattgaaaatgtctc

SEQ ID NO: 406657 - DNA, 276 bp, Homo sapiens
tagtataacaaagcctaagtgtcctgcaccccacatagtacaaccaagacagcaagcactgcacaataagtaatagcagtctattgctgggagaggcccaaaagcttggaaagggacccagtctgaggcacaggcatgcagggaaagcctaaagctgaaggtggaacagatattaataaaattctccaacaaamcagccactaatctaaggacaaggaatttcaaggctgtggcatgctgaggttcacaattgcaacaaaaccacacccggctcca

SEQ ID NO: 406658 - DNA, 563 bp, Homo sapiens
ggctactaagctaatgatatggatgaaactataacattaggactgtctagataggaagaaagcattttacaaatctgaagatatttttaaaaattaagatattttcctttttcctgaatttattaagcatgtactttatattatccacaaaactctaggaattagccattattaatacccccattttatagagcaatgattacaacccagattttttctaattccaaaaccatgcacttaaggacttaaactacttttgccctatttgaaaaatactttggtcactataatgtacattttggcattttaaaaaacggcttctcagaaaatgaacccctttccgtgctttaggttcaccactgaacagggcagtcttcatgcaagacagaatttcacctatcactgccaatacttttgttcctagcccctggcagctagaataaagactcatgkgctaaactcaacaaatctggtgtcctatctaggattttgagtctggcatgaatattcaaaggagaaacagtttataatttggtttcagctttggcaacggccagtagcta

SEQ ID NO: 406659 - DNA, 500 bp, Homo sapiens
atggggtctcactatgttgctcaggctggtcttcaacctctgggctcaagcagcagtcctccctgctttgggctcccaaartgctgggattataggaatgagccatcatgcccaaccctaactacgggttttttaaaaggccaacataaaaagaattccaacaaacacttgaacttaacttattaagatgtgttagaacagataaggctacatagatttcttctatgaatgattttgtctcaaactttcctataaggaactattttatgtatatttttatcctctgctgagtctagcaaggaactgaacgtaacctaggaggttcaataaatatttgttagttgatctttatctgcatgaaatttgtatatacaaagaacaaagattgcctctgaatattgtgttaaaatagtaatatgtgttttgtgttagctgagcattttgtgtcacccatcactttgacaaagactgttcacacaaaacagcaggtaagtgaatca

SEQ ID NO: 406660 - DNA, 332 bp, Homo sapiens
tgatgcaagtgatgcaagaatggaaagaaaagcagtaggtagggtctaggaattttaggtttgtcytcaaaggcagtgtggagccactgcagggattaaaatagaggaacaacaaaatcagaactaccttttagaaagctctctagtacagtgtggagggtagatgaaatgggacaagactggaagtaggaagctgtcgctataatccaggtgacaggaaatgccagtctgagctaccagggtagctgcagggacggcaacagacaggggtggtgaggaggaggcgagactctaacccccactctggccctaactagagcagctttgccctt

SEQ ID NO: 406661 - DNA, 576 bp, Homo sapiens
acacaagccactgcgaaaatctggatttccgtggactgtttctgaggagtgccattatattagagtcragaaaaaaagtgggagggaggagggaaacactgcattcaattctcgtgcaatctatttttaacacgcctgagaaggttttgagctattaatgtaatgaggctagactcaaaaacaaaaaaagaccagcagggcagcaaaggcccaacatggagggagggggttaattccttaaggatgttgacaactgttcaatatcacatgagatgtttacattgcccatcaatgtatgtttaatttgaggaaatcctgattaaaaagaaaatgtgtaatgtgagtgaattagctttcccccggtactgtttttcagtcaaggggagtgtttcataactctctgctgtccatccactgaattttatgtcttacatatttatcaggagaaattgctgcaatcctccatgctggtggtgctctagactcttttaaaaaaaatgaggaaaatatatacatataaaatttaccttctttaccagttttaagcctacagttcagtggtaataaatatattta

SEQ ID NO: 406662 - DNA, 510 bp, Homo sapiens
tcaatgtatgtttaatttgaggaaatcctgattaaaaagaaaatgtgtaatgtgagtgaattagctttcccccggtactgtttttcagtcaaggggagtgtttcataactctctgctgtccatccactgaattttatgtcttacatatttatcaggagaaattgctgcaatcctccatgctggtggtgctctagactcttttaaaaaaaatgaggaaaatatatacatataaaatttaccttctttaccagttttaagcstacagttcagtggtaataaatatatttatattctctttttttccttcattctctcctcccttcccagcctttcataaccaccactttactatcttcacaagattcacttttttaccttccacatatgaatgagaacacacaatatttgatctaagtttttttttccccgtaaaaaatatggtcccagctacttggaaggttgagacaggaggatcacttgagcccatgagttcataggctacataatgag

SEQ ID NO: 406663 - DNA, 522 bp, Homo sapiens
ttcatattatttaaattaatatatgctaaagtagtttatgtatgcttttaaatgtgtgattcattctattccctcatgtactccttgtatactagattttattatatataattaaatatatatcactttctcatctggcacgtcaattcctgatgtaaaggaatgtcacatttttgtttttaatgaggaagagcacaaaaacaattttgttgaaagaatagatgagcaaatatgaccatagcagtaaagaaggggtcaattyggttattacattaacaaataaaattaaggtagttcagccattttctacttataacacctcctagccagagcttctgttataaaacatagaaaagagagaagcagtataaaatgttgctatatgctgtgtattttttaatccagaagcatagatattcattcatttatttattcaatcatccaacagtaggtagttattacctattatgttttaaaaattatataggtgtgggagagacaaaactcataatgtcaaatatg

SEQ ID NO: 406664 - DNA, 519 bp, Homo sapiens
gtgttgctaatggtttagaagttttcctttggacacaatagcaattggttatcaaaccactgtctaattctatttgtatcattggaacatttagacgttaaaaatccatgaatactttttcagaagatttaaaatgtgagagtataaaaatagaatatagacaactgcaattgatccctcagcttgacaacagatggaaatttttagagctaaacacattatttctattatctagccataaaaggaaaatatcatgatgacaastgcatttatcaatttcaaactagattctcataatcctcaccttgtaccagaattttatctgagttctaaaatataaacatcaagacatacttctattcatcttacagttttaaataattttaaggaaacgattcggtcccattgattaatacttgacatgtttctatgagctaaatgaatgctgagaaagtgaaagctccttactcatttaaagtgcataagctgcacatggataaggccatgtttggatttgtt

SEQ ID NO: 406665 - DNA, 604 bp, Homo sapiens
gactattcagtaagtcaagagatcatgacaataattttctactaagaaacaaatggtatatatgtctgaaggaagataaaaattaaaagcctaaaagtaccgctttttgcagtgactcacgcctgtaatcccagcattttgggaggccaaggcgggcggatcacaaggtaaggagatacagaccatcctggccaacatggtgaaaccccgtctctactaaaaatacaaaaattagctgrgcctggtggtgcacacctgcaatcccagctactcaggaggctgaggcaggagaattgcttgaacaggggagtcggaggttgcagtgagccgagatcgcgccactgcactccagcctggtggtgacagaccaagactccaactaggaaaaaaaagtatgtatttatcatgtaccacatgatgtttttaagtatatacatcacagaatgacatgtctagctaattaacatatgtattaactcatcatattattattatagtgatgagaacactttacatccactctcttatgtcaagaatacatagattactaactgtagtcattatgctgtacagtagagccacttttagatatttgttttattga

SEQ ID NO: 406666 - DNA, 423 bp, Homo sapiens
cagcatgatagtggtacaaaaacagacacagagaccaatagaacagaatagagagcccagaaataatgttgcacaccaacaaccatctgatcttcaacaaagttgacaaaaacaagcaatggagaaggctttgtattcaataaatggtgctgttataactggctagccatatgcagaagattgcaactgaaccccttccttacaccacacacaaaaatcaactcaagatggactaaatacktagatataaaccctaaaattttaaaaaccctgaaagatgatctaggaaataacattctagacataggttcagcaaagacttcataataaagatatcaaaagcaattgcaacaaaaccaaaacctaacaaatgggacctaattaacttaaaaaacttcagcacagcaaaagaaactatcaaca

SEQ ID NO: 406667 - DNA, 579 bp, Homo sapiens
tagttctgtcattcatgtatttatggttaaaaaaattgaaaagcgtagcttatatatatgtgtgtggaggggggcaattctatagcaactccacccatttaaaaaaccttttcagttgtattctgacattagctcgtgcgattcaattcataagttaaaacagcagggtaaatgcagacaactgaaacagggctatgactatcaaaaccaacacctcacattctttcttggcccttgagagcactacacttgtaggagccagctacatacacagagaggcaaagtgacatcctaaggtagccactacttttcattattttaggttagaaggcttttgttttgttttgttttgttgcattaagaataatccatgacagctaagtcttgctaagccaattttattcattcattcactcattcaatcaacaaatacaaagagcgtgccaactatgtgccacacaatgtgctgggttctacataaacaaacccgacatgktctctgacctgatggaaagtatatcctaacaggcaaatgtcatgactttaagaaaagaactcaaagagatactggcattgtgc

SEQ ID NO: 406668 - DNA, 583 bp, Homo sapiens
tttgtatcctttgacctaaatctccctagcccccaccttctagtaactaccatgatagtccctgttactatgagatgaattttattatacacataaatgagatcatgcagtatttgttttcctgtgtagcttgtttcccttaacatcatgtctttcagatccatcatgttgttgcaggtgacaggattttcttatttttcaagactgaatgatacatgaaaatgtggtatacatacacaattgaatataggttgaatatccctaatccaaaattcttgtgactagaggtgtttcagattttggatatttttgattttggaatatttatatatacataatgagatgtcttgggggtggaacccaattttaatcatraatttttttatgcttcatatatacctatacatgtagctgaaggtaattttatgcaatatttttaatagttttgtgcatgaaacaaagcttgtgtacatgagatcaggtgtggaaatttttattcacattttttttcaaagattcagcaattagttttttgaaacatcttttgctccatgatcatttacttattattacttgcttttat

SEQ ID NO: 406669 - DNA, 525 bp, Homo sapiens
gagcacacttttggaagggactgtttcttctatgagaaaccagtgtaaataaatgtttgagtgctatctttcgttttaccatctccagtatgccttggcctacaattcattttatgtacatttctttctttcattgtttttcttttctttttcttttttttctgagacatcatctccctgtgtcatccaggctgaagtgcagtggcacaatcactgctcattgcagccttgatctcccaaactcaagtgatcctcccacctcagcctccctagtagctgggactacaggcatgcaccaccaggcctggctgatatttttttttatttattttttaattttttttgtagtgatgaggctggtctcaaactcctgagctcaagcgatcctacccatgttggcctcccacagtactgggattacaggcatgagccaccgtccctggccttatgtatattccttgaaaggtggwttcctgaaccaagtaggtggaatatatttagatcccaaactaggtaatgcagttt

SEQ ID NO: 406670 - DNA, 548 bp, Homo sapiens
ccttggttttattatttttatacacacacacacacacacacacacacacagagagagagaaagagagagacagacagagagacagagagagagagtgacagaaacaaattgaaatctcccactgagacaaaagctgggaacacaagtagctaggatcaaaactatgtgccacccctgttccccaaactcattcccttggctctcacagatgagttaaatagtaatgaagggatgagaacctagaaacagattcctatgtggagactatgatggatagtaaggagacagactaggaaaacttcagtacgcaataaaggtaaatatctttcagacactggggtagggaaagatttctgaagtgagatacccaaaaagcatattttaaacaagagcaatgtgagcatttaaaattgagaattttattcatgaaagataccttgaagacaagttacaaaggaagakaatatattcactatataaaccaccccaaaaaaactactaataagactacataagaatatgtaaaagcccaagttagtagaaaaaca

SEQ ID NO: 406671 - DNA, 536 bp, Homo sapiens
tattttaaactaaaaaatacaattttagagaagggaaaaataggtagccaagttgggattcaaactttggtcaatttgaccacaacactactctatgaacttagcttctgtctctgatctgacagaatgtctcacggtgacctttcccacatagccctcttgggaggcattgtggtgaaaattcccattcccttcaaaaaataattctcactggggaccaggagcacttgaacagtagayggataaactccaaatagttctcctatcttgattatatctttaagttcataagacaaaaaaatctctttataaagataataatgaaagtaggagaaaatgagagataatcaagaagcaaataaaatttgtgacctaagtttctcaaaattttaaaaattgtgaaccgtctaatggctataggtacttatattggttacaaatttcatataagttttcaaagatgtatcacagtttatacaacatagttttaaaacattttgttttacagcaattaaaggattgatactgcttataac

SEQ ID NO: 406672 - DNA, 536 bp, Homo sapiens
tattttaaactaaaaaatacaattttagagaagggaaaaataggtagccaagttgggattcaaactttggtcaatttgaccacaacactactctatgaacttagcttctgtctctgatctgacagaatgtctcacggtgacctttcccacatagccctcttgggaggcattgtggtgaaaattcccattcccttcaaaaaataattctcactggggaccaggagcacttgaacagtagacggataaactccaaatakttctcctatcttgattatatctttaagttcataagacaaaaaaatctctttataaagataataatgaaagtaggagaaaatgagagataatcaagaagcaaataaaatttgtgacctaagtttctcaaaattttaaaaattgtgaaccgtctaatggctataggtacttatattggttacaaatttcatataagttttcaaagatgtatcacagtttatacaacatagttttaaaacattttgttttacagcaattaaaggattgatactgcttataac

SEQ ID NO: 406673 - DNA, 536 bp, Homo sapiens
tattttaaactaaaaaatacaattttagagaagggaaaaataggtagccaagttgggattcaaactttggtcaatttgaccacaacactactctatgaacttagcttctgtctctgatctgacagaatgtctcacggtgacctttcccacatagccctcttgggaggcattgtggtgaaaattcccattcccttcaaaaaataattctcactggggaccaggagcacttgaacagtagacggataaactccaaatagttctcctatcttgattatatctttaagttcataagacaaaaaaatctctttataaagataataatgaaagtaggagaaaatgagagataatcaagaagcaaataaaatttgtgacctaagtttctcaaaattttaaaaattgtgaaccrtctaatggctataggtacttatattggttacaaatttcatataagttttcaaagatgtatcacagtttatacaacatagttttaaaacattttgttttacagcaattaaaggattgatactgcttataac

SEQ ID NO: 406674 - DNA, 587 bp, Homo sapiens
cttttacacttcctgtataacgtgcattgcctttaagaacaaaattattactaaggactttactgtgaatataaaattaatcttactagttcaaatttataaaaatgtaaggtagataaattacatcatctgctttccctgtgaaaatgtcaaactgtctatggatcagttatagacttctatggactaccaatgacacacatacccactttaccataggaagagtttgttagatgtatttataatgcctatacaaagccctcatatttattttccattttaatttcattctcattttccttagcaaattctaraataaaaaaggctggtgtgtttatttgaacagatatccataacacatttacatttccagacccaacttctcccccagccttcagacttagatgcctgttagacatctctgcttggatatctcaaaagcatcatcaacttactatgtccgtaacagagctcctggatagtcttctgcaaaactagtccaccttattataacatcattcattcaattgttcaagcccaaacctaagattcaatagagtcttctttctttgacatcccatatcacc

SEQ ID NO: 406675 - DNA, 420 bp, Homo sapiens
acatctgtcacttcatacattttctttgatgggatttcatgtaatttgtgtcatacaaatgaatttgaatattatgtcagtaaagagttggacacatgtctattatttattctgatactccaataacgaaactaattcatcaattttgcctctgaggtgcttcctttcagttcaacttttcctttcccatttcagtttgtcatagctacaacgttacatgtattactatgattaatggattgctgtgtatctccrcagtttgcctataaacttcttgagggtgggaacttctctggtttggttaccattgtatcctcagggtatggtatattgtagtgattaaaattaatgcactttttccatttcactgccattgcattatttcaggccctcgtcatctcccctctgtccaattggaat

SEQ ID NO: 406676 - DNA, 538 bp, Homo sapiens
ctatccaagtctcatttaaggaaggagtcccttgctcacttcaacttaagactgaatttcccagacttatttcctttccctcgctaagaaaaagtatttaaaatctaggatgtaaaaggatgactgcgmcttcttcttgaggcctaaaaaagcactaacagggctgccccaggtttatctaattctctaagattatacagtttcatttgatttactatttactattgatagagtaccagactctgtgcagtaagatattaaccttcagaaggctgttaaattgcaaatgatttttatctagttgagttgcaaataatttctatcttatagaaaacataaccctaaaggttacttgttttggtcctggagcacattaaatcattttgtatttaatttagcaacataatttcagcatttttcctctttctgtaactatacatactttggtcttttctatactactttgaaccaatttatcctttggtttaattcctccttaaggtttttaatgtgagctcactttatgttttttgagtta

SEQ ID NO: 406677 - DNA, 590 bp, Homo sapiens
taaataagtcgattttagctgcmcttgtacttatatgagatgaaagatattaatatatatagtataccctagtaactattttactatttatattgtataacatcatgatgtcaatcccaaatatacataataaaatttatttgaaaaaataaataggtattttgcttattttcacattatattcaagtacaaaaataactatcagtattaaaggcataccaattaatatgaaaatataataataattctcccttagttaagtggcattatcataaataacatacacatcatttgaaatttccatttcaaaaaatcataaacccaagccttcaagtgagaaatatcagcaatctatctttagtgttcaaatttcttgtattttaaagcatgaaattttactgcatgttattcttttaaattcacactgtttttaacttcatgcagtgctttaagtattgagcatcctgaagctctgttattttcctgttaaatgaagtattttgaacaaagagctgattccttgaaatgtatgtagttagagtaaacagataacctacagaatggaagaaaatatttgtaaactatgcatg

SEQ ID NO: 406678 - DNA, 317 bp, Homo sapiens
tgccctttagcagtcacttcctgttcctacttctcctaacccctagaaactactaattttctctccagatttacctattctatrtatttatataaatggaatcatacaatatgaaatattttacatcttcctttgtttatttactgtgacattttcaagtttcatccatgttgtagcatgtaccagtacttccttcctgtttgtgaccaaacaaaattcctttgcccttttatttttattttttattatattttatttatttatttattttgagacagtctcattctgtaacccaggctagagtgcagtggcacaat

SEQ ID NO: 406679 - DNA, 596 bp, Homo sapiens
tgctgaatcgcatggtataatttgttttccaactgtagctacaccagtttacaacctcaccagcaatgtatgagtgttccagtttgttttctttttattttctttcttttcttttytttttttttttgagacagagttgctctgtaaccctgtaacccaggctggagtgcaaagtcacaatcttggctcactgcaacctccacctcctgggttcaagtgattcttgtgccttagcctccgggtagttgggattactgccatgtgccaccatgcccagcaacttttttgtgtttttaggagagacagagtttcaccatgttgggcaggctgatctcaaactcctgacctctagtgaaccgcctgtcttagcctcccaaagtgctaggattacaggtgtgagccaccacacccagcccagtcttccagtttctcacctcctagccaacacttgtttttgtcgtctattttagtcatagaagtaggtgtgaagtggtatctcactatggttttaatttgcatttccctaacaactaatgaggttgagtatgtttttatatgttttttggccatttatatatcttcttcagataaatttt

SEQ ID NO: 406680 - DNA, 596 bp, Homo sapiens
tgctgaatcgcatggtataatttgttttccaactgtagctacaccagtttacaacctcaccagcaatgtatgagtgttccagtttgttttctttttattttctttcttttcttttctttttttttttgagacagagttgctctgtaaccctgtaacccaggctggagtgcaaagtcacaatcttggctcactgcaacctccacctcctgggttcaagtgattcttgtgccttagcctccgggtagttgggattactgccatgkgccaccatgcccagcaacttttttgtgtttttaggagagacagagtttcaccatgttgggcaggctgatctcaaactcctgacctctagtgaaccgcctgtcttagcctcccaaagtgctaggattacaggtgtgagccaccacacccagcccagtcttccagtttctcacctcctagccaacacttgtttttgtcgtctattttagtcatagaagtaggtgtgaagtggtatctcactatggttttaatttgcatttccctaacaactaatgaggttgagtatgtttttatatgttttttggccatttatatatcttcttcagataaatttt

SEQ ID NO: 406681 - DNA, 549 bp, Homo sapiens
ttcctcccttctgttattccatttcattctagttggaaagcaaacttcgtatggtttaaatccttttaaatatactgatagttattttatggcataacagttagtctatactrgagaatgttccatttatacttgataaaagtgtgcattctgcttttactaggtcagtgttctgttgatgtctattagatcaagtttgtttatagtgttttttgagtcttttattttcttgttcttctgattagttgttctatccgttattgaaagttgagtattgaagttattgtacttttcaactccagaaattgtattttgcctttttaaataatttctgtttcttcactcatattctatttggtttcttttagttctttgaacataatcataatagttgatttaaagtcattgtctagtaagtccaaattttgactttcttagggccaatttttaactgcttttttttatgtgttcaggccctgctttcctgtgtgtgtgtgttttatgatttttcaatttaaaatactagacatgtaaaataacataatgttg

SEQ ID NO: 406682 - DNA, 549 bp, Homo sapiens
ttcctcccttctgttattccatttcattctagttggaaagcaaacttcgtatggtttaaatccttttaaatatactgatagttattttatggcataacagttagtctatactagagaatgttccatttatacttgataaaagtgtgcattctgcttttactaggtcagtgttctgtwgatgtctattagatcaagtttgtttatagtgttttttgagtcttttattttcttgttcttctgattagttgttctatccgttattgaaagttgagtattgaagttattgtacttttcaactccagaaattgtattttgcctttttaaataatttctgtttcttcactcatattctatttggtttcttttagttctttgaacataatcataatagttgatttaaagtcattgtctagtaagtccaaattttgactttcttagggccaatttttaactgcttttttttatgtgttcaggccctgctttcctgtgtgtgtgtgttttatgatttttcaatttaaaatactagacatgtaaaataacataatgttg

SEQ ID NO: 406683 - DNA, 616 bp, Homo sapiens
gtgcaatgcatattatttcctaagtaactctcaaatccatccacattttggctccatagaaaacatgatggtttacttattwtctgactccaggatacaataataaccctttaactaatctacttgcatctaggccagccccatttaatcatttatccacactgtagactacatgacatttttttaaatgcaaaagatggtcattgtcacttttggttaaaactcttaaatacatttgtatcctcttaaggaaaaagataaactttcttactatgatttttaaagctcatatatggcccaaactgtctttcaccataagatattagcatatgttcttccctctacttggaaaattttccctctgcccttggttgagtaaagttttacttagtctttatttatatcttgtgtgactccccaggagatttttctaattctccaactaaatcacatagcaccattcacctgtttttcctagcagttattccaagagcaatttcacatttattcatgtgattatttaattaatattggtttcttctataagactataagctctatgaaggcagagactctttctgattttgcttacagttgtattcccacagctatacca

SEQ ID NO: 406684 - DNA, 547 bp, Homo sapiens
caacctctttgaatggcagtttgacaatatctacctccaaatttaaaatacatatatcttggcctgacaattcaaatgtcaggactttctcctgcaggtaacctgaaaggaacatccttaaacacatacaaaactcttctttgcagggttctgaatatctgaatatcaagagattgagaaaatcttaagtacccatcaatagaagactattaaatcaactatggcacatccatacaacggaattctgggcaggcattaaataagcaggagattagagctaaaaagaccagaccagtgaggaatgctcttaaagatacagtgttaaatttaaaagcaaggtggagcacacccatttagaaatataattataagtccatcctacagcttcatcatgcattcatccatgtttccacataagcttggagatgcactgaacagctctggaaaattattcaagatatcagtamcagtggttacttctaggaaagggggctggaaggctagaaattgggtgggaaggaagcttactttttattgtatattcctt

SEQ ID NO: 406685 - DNA, 543 bp, Homo sapiens
gattgctggatctcgtggtagttctatttgcagttttttgaggatctgccataccgttctgcatactcckgtactagcctatattcccaccaacagtgtatgagagttcccttttctctgcaaccttgccagcatttgttattttttgtctctttataattgccgtcctaactgtgatgaaatgttatcttattgtgggtttcgtttgcatatccctgatgttgagtgaagctgagcatttcttcctgtatttgttggttatctatcttctttggagaaatgtctgttcagagcaagtgcccattttttaatccaattgtttgggttttttgcttttgaaatgtgtgagttccttgtatattctggatattaatcccttggtggatgaatagttttcagatattttcccccattctttaggttgtcttttcactctgttgcttgtttctttgctctgcagacgtttgttagtttaatataatcctgtgtgtttatttttgcttttgttgcctgggcttttgaggtcttattcataaaatcttt

SEQ ID NO: 406686 - DNA, 543 bp, Homo sapiens
gattgctggatctcgtggtagttctatttgcagttttttgaggatctgccataccgttctgcatactccggtactagcctatattcccaccaacagtgtatgagagttcccttttctctgcaaccttgccagcatttgttatkttttgtctctttataattgccgtcctaactgtgatgaaatgttatcttattgtgggtttcgtttgcatatccctgatgttgagtgaagctgagcatttcttcctgtatttgttggttatctatcttctttggagaaatgtctgttcagagcaagtgcccattttttaatccaattgtttgggttttttgcttttgaaatgtgtgagttccttgtatattctggatattaatcccttggtggatgaatagttttcagatattttcccccattctttaggttgtcttttcactctgttgcttgtttctttgctctgcagacgtttgttagtttaatataatcctgtgtgtttatttttgcttttgttgcctgggcttttgaggtcttattcataaaatcttt

SEQ ID NO: 406687 - DNA, 593 bp, Homo sapiens
ccaaaagtcttggaccgaatacacacagcattgtgtgacgtctcagtgaggtagatgcatgcgtggggaactctgtggcattggatgtccatttccagagtgggtagccaggattagtcttcaagattctgctggctgggggagatttgaagcctggtttacccacaactagcacaggaggcctcccaggctggaacccgggcctcagggagctgccactgcccatgggtccctccagcagcacatccagtggaggtggcatcttgaggccttgctgtgtctcccagtagtccagctcatgccatagagttaaatcctaaggcagctgtaggawccagaacggaaggcattggccttatttgccaggaggctttgggaagtgtccctcccgaaaggctgcccccaagcaccacctctgcctcccaatcctctaccaccctccctgtccctcagtgctccctgtccctcagtgctccctctcctgagaagagcagcaccagtgtggaatgggagctctgtcttactttatataagcagagtccccttcccatgggcagctgaatcccagccgtatctaatatccatgcacttga

SEQ ID NO: 406688 - DNA, 593 bp, Homo sapiens
ccaaaagtcttggaccgaatacacacagcattgtgtgacgtctcagtgaggtagatgcatgcgtggggaactctgtggcattggatgtccatttccagagtgggtagccaggattagtcttcaagattctgctggctgggggagatttgaagcctggtttacccacaactagcacaggaggcctcccaggctggaacccgggcctcagggagctgccactgcccatgggtccctccagcagcacatccagtggaggtggcatcttgaggccttgctgtgtctcccagtagtccagctcatgccatagagttaaatcctaaggcagctgtaggatccagaacggaaggcattggccttatttgccaggaggctttgggaagtgtccctcccgaaaggctgcccccaagcaccacctctgcctcccaatcctctaccaccctccctgtccctcagtgytccctgtccctcagtgctccctctcctgagaagagcagcaccagtgtggaatgggagctctgtcttactttatataagcagagtccccttcccatgggcagctgaatcccagccgtatctaatatccatgcacttga

SEQ ID NO: 406689 - DNA, 650 bp, Homo sapiens
gttttgtcatgtgtaaaatgggggcttttaatgtctgttgaaattaaatgaaataacttctgtgcaagtacccagaatattatagaggctccaaatgcattaacctcctcccttctctgctgaatcctcatttatggtcatgtgatataggatcagtagtttcagagctgaaagggaactgagtgacatttagagcagcactctcaacagaccatacttctgtttacgatcatgtaggtagccrttgacttgggaaatgcctgtaatcaagagccactctgggtatgttttggtgacattttaaagggtaaaacagaatgttccctctgatgaatgcaaacctctccaggcagaaaagcagaagtggttttgatgtgggccacagggacagcatggaacactgcaggcaggggatctgggtggctcagagggagccgctggaggggtcactggggatcgtgctctcagagcttggactgtggcttctgattcatcccaggtgactgtcattgtaccagattgggggatgggggagtcccctaagctaggaccatagaacagagggcaagacaagggccagtcttaatgcctgggacccaaaccaagatgagccacagggcaagctgcattgcccagttagggaacagaca

SEQ ID NO: 406690 - DNA, 650 bp, Homo sapiens
gttttgtcatgtgtaaaatgggggcttttaatgtctgttgaaattaaatgaaataacttctgtgcaagtacccagaatattatagaggctccaaatgcattaacctcctcccttctctgctgaatcctcatttatggtcatgtgatataggatcagtagtttcagagctgaaagggaactgagtgacatttagagcagcactctcaacagaccatacttctgtttacgatcatgtaggtagccgttgacttgggaaatgcctgtaatcaagagccactctgggtatgttttggtgacattttaaagggtaaaacagaatgttccctctgatgaatgcaaacctctccaggcagaaaagcagaagtggttttgatgtgggccacagggacagcatggaacactgcaggcaggggatctgggtggctcagagggagccgctggaggggtcactggggatcgtgctctcagagcttggactgtggcttctgattcatcccaggtgactgtcattgtaccagaytgggggatgggggagtcccctaagctaggaccatagaacagagggcaagacaagggccagtcttaatgcctgggacccaaaccaagatgagccacagggcaagctgcattgcccagttagggaacagaca

SEQ ID NO: 406691 - DNA, 593 bp, Homo sapiens
aaaacaagtaagccaaaggatctgaatagacatctctctaaagaagatataaaaatagcccacagttacatgcaaagatgctcaacatcactaaacatcagggaaatgcaagtcaaaactgcaatgagatatcacctcacaccagtaaggacagctattatcaaaaagacaagatgtaaaaagtattggcacaaatgtggagaaaaggatgcccttgtacattgttggggagaatgtagattggtgacgccattatggaaagcatatggaagttcctaaagaaattaaagctagaactacygtaagactcagcaattcctcttctggatatatactcaaaagaaatgaaaatcatcctgtaaagatatctgcactcccatgttcattgaagcactattcacaatacacaagatatggaaacaaccaaagtatccatcagcaggtgaatgaataaggaaactgtgagatatagtcacacaaacatgcacacactaaaatattattcagcctttaaaaaggaaattctgcatttgccagaacatggatgaacctgtaggatattatgctaagcgaaataagccagacatagaaag

SEQ ID NO: 406692 - DNA, 578 bp, Homo sapiens
tattatccatagtttgctaaacctgcagtgtttggctgacagagaaataaacttctgccttgtttaaactagactatttaaaatatgacagttaaattggatctttggtacagcagctaaaaaagccagaatttcaaaggcattgttcctcacaaaacttcatcccctaccttcaatcacttattaatcttgtcaattctacctgagaaaaagctctcaaatccatttcttttgtccaattgcatggatactgcttaagccctagctcccaaagtccctggcttagaattttctatgtctcataagcaatgcccctcaagacacagtctattcttcaggagcctaargtataatcttctataaaacatgtcttttgactcctctgcatcaaaacttctgaaagtttcctactatctaccaagtacaatacaaatccctcagcttgacataggtacatgtttgaaatccttcttacttcttaccactccttactatgcaccacatgctcctactacattgaagtcccattacttctgaaatgatctcagcctttatgatatgatgcctttgctcacaga

SEQ ID NO: 406693 - DNA, 591 bp, Homo sapiens
tggtgtaattgttatcctcattgaatacaagagactcagagagatcaagcctcttatgcaaggtcaaacagcgaggaaagtaccagagctgtgatatggacccagatttgcttggtcccagagcccarcctcattgtcactactagttatctgactaaaatgacacattgctcacagattgctagaatggaccagataattgaatgacaagtataagtccagtcaatccacaatgttcttaatttaaggtaattgtcttcctacttaacacaatttaaaattcttctttcataatatttatgtctaggcaaatgcatcagtcatagatttaattagaacaatgtgaacataaatattcaagttaaacatacacatggcaaagcaaatatacttcatatttttatattctggtttatttctttataaatttttgcatgacactataaactgtggcaaaataagtataaattatgaaggtatttgctcaatagtcatttaaaatctactatatttaagtaactagactagaagataaaaattggtaagatatgttcttttttgtaatgaaaattatatatatttagggcttat

SEQ ID NO: 406694 - DNA, 584 bp, Homo sapiens
gaattaaagagaaagaccttacaaacccttatccccataacggatttgaataaatacatttcaaaaaacatcagggtatgagaaccaagttatttaaatctgtgtagacccaatggggaaaaaagttactttttttaacctatgagatcaaatttttaatatttagctagtggtttgtagactcttaaagtgtaatgtttaatatctttccacagtgcttgcttgaatgttatcatatttgctaaagtctcaagaattcttttataataccttagtatcaaaaattaagaaagatatataatagtctaaaagtacttaagaaagtcaaatactgcccattctcacttgtcattgggaactaaataatgtgtatacatgtgaatcgagagtgaaataayagacactggagacttggaaaggtgggagggggtgagtgatgagaaattacctaacgggtacgatgttccctattcaggtgatagctacactgaaagcccagactttaccattacacaatatatccacgtaatagactgcttttccccctaaatctacaaaaacaagacataggaaaataaaaaagg

SEQ ID NO: 406695 - DNA, 646 bp, Homo sapiens
ggtggtactaatttacattcccactaacactatacaagggttcccttttctctacatcctttctagcatttgttattgcctgtcttttggataaaagccattttaacttggatgagatagtatctaattgtagttttcacttgcatttctccaatttagtgcactttttcatatacctgtttgccattttcaagtctccttttgagtgagaaatgtctattcagatcttttgyccattatttgatcagattattagacttctttcatatagagttgtttaagctccttgtatgttctgattattagacccttgtcagatggatagtttgcaaatattttctcctattctgtgggttgtctctttactatgttgattatttcctttactgtgcagaagctttttaacttgatacgatgccacttgtccatttttgctttggttgcctgtgcttgagaggtattactcaagaaatctttaccgagttcaatgtcctggagagtttctacaatgttttcttttaatagtttcttagtttgaggttttagattcaagtctttaatccatttttatttgattcttgtatgtggcaagagacagcaatctagtttcattcttctgcatatggatatccagttctccccgcac

SEQ ID NO: 406696 - DNA, 646 bp, Homo sapiens
ggtggtactaatttacattcccactaacactatacaagggttcccttttctctacatcctttctagcatttgttattgcctgtcttttggataaaagccattttaacttggatgagatagtatctaattgtagttttcacttgcatttctccaatttagtgcactttttcatatacctgtttgccattttcaagtctccttttgagtgagaaatgtctattcagatcttttgcccattatttgatcagattattagacttytttcatatagagttgtttaagctccttgtatgttctgattattagacccttgtcagatggatagtttgcaaatattttctcctattctgtgggttgtctctttactatgttgattatttcctttactgtgcagaagctttttaacttgatacgatgccacttgtccatttttgctttggttgcctgtgcttgagaggtattactcaagaaatctttaccgagttcaatgtcctggagagtttctacaatgttttcttttaatagtttcttagtttgaggttttagattcaagtctttaatccatttttatttgattcttgtatgtggcaagagacagcaatctagtttcattcttctgcatatggatatccagttctccccgcac

SEQ ID NO: 406697 - DNA, 626 bp, Homo sapiens
aattattacaatttttggaatatagcagcataattctagaataaattccgtagaataaaaattgcattgggtatgaaatttttaaaactattttaaaattttagctgataatgtataagtttatcccaaaaacatataatgggactcagtcctgttttcctaaaagaaaaagaaaaaagtgagaacaaattccttttatgtgtytcacagagattgtctaggcacgtaccaaaaagaaggaatctaataacagcattaaatcaagagcatattgaacctagctgaatctgacattttgagagttcaaaaaatggttaccagtttccagaataatacaatgtcatttatttccaacactttttcttttgttggtgtgtgggtgttggttgagggatgatacaggggacacagggagaacaggaaatagggaggaaccatccaaggatcttccagtgctggcatttgacattgagtaaatattttcaacatgtaacatacaaaatgaagctgttagagctttgttgttacatttctccccaattctgtcattctcagagatattagccttgattctatccatcacataccagagagaagaaggatatcaatacaaatcatcaagaagt

SEQ ID NO: 406698 - DNA, 626 bp, Homo sapiens
aattattacaatttttggaatatagcagcataattctagaataaattccgtagaataaaaattgcattgggtatgaaatttttaaaactattttaaaattttagctgataatgtataagtttatcccaaaaacatataatgggactcagtcctgttttcctaaaagaaaaagaaaaaagtgagaacaaattccttttatgtgtctcacagagattgtctaggcacgtaccaaaaagaaggaatctaataacagcattaaatcaagagcatattgaacctagctgaatctgacattttgagagttcaaaaaatggttaccagtttccagaataatacaatgtcatttatttccaacactttttcttttgttggtgtgtgggtgttggttgagggatgatacaggggacacagggagaacaggaaatagggaggaaccatccaaggatcttccagtgctggcatttgacattgagtaaatattttcaacatgtaacatacaaaatgaagctgttagagctttgttgttacatttctccccamttctgtcattctcagagatattagccttgattctatccatcacataccagagagaagaaggatatcaatacaaatcatcaagaagt

SEQ ID NO: 406699 - DNA, 607 bp, Homo sapiens
ccttcgcaagccttgggcagagtcagtcactcattcccctgagctccagcagtacatctctagctaagctytccctgcagaagctgcaatcaccaggattcatttagacatctgtcttccactccctatgttatgcaagatgaggtcagggaattcttcctatctgtcgatatctgataattttttaaatagagatattatttgttcatcagattttgatcatggaaaattttcctggagaaataaaactgcataacagtttctgctttttggtcattactctgtcaagtaaaaattttccagttcaaaatttgcagttctaaattgttataataaagtttgattcacacgttgttgttactgctgacctttaaaatacccaattttaccaaagtttctgaagaaaatttctctagtatcacctctatccatctctgggataatggctggatctaaatactatgtcacactacttctgtacgccccaagcatatgtgtggatttgtgtatgtatatttggagtgctggggtgggaggagtttgtgataaaaatatgtaacaaaatttacaatcttagtcatttttaagtgtatagtacattattgtt

SEQ ID NO: 406700 - DNA, 607 bp, Homo sapiens
ccttcgcaagccttgggcagagtcagtcactcattcccctgagctccagcagtacatctctagctaagctctccctgcagaagctgcaatcaccaggattcatttagacatctgtcttccactccctatgttatgcaagatgaggtcagggaattcttcctatctgtcgatatctgataattttttaaatagagatattatttgttcatcagattttgatcatggaaaattttcctggagaaataaaactgcataacagtttctgctttttggtcattactctgtcaagtaaaaattttccagttcaaaatttgcagttctaaattgttataataaagtttgattcacacgttgttgttactgctgacctttaaaatacccaattttaccaaagtttctgaagaaaatttctctagtatcacctctatccatctctgggataatggctggatctaaatactatgtcacactacttctgtaygccccaagcatatgtgtggatttgtgtatgtatatttggagtgctggggtgggaggagtttgtgataaaaatatgtaacaaaatttacaatcttagtcatttttaagtgtatagtacattattgtt

SEQ ID NO: 406701 - DNA, 559 bp, Homo sapiens
ctcaggttgaataaccatgtattaaactctaaaacgcagagtagtaaaatctctctcctcctttctctttttccctctccttctctgtctctgtctcttcttcccwtcaaatcatattcatgtaatgttgaaaaacatgaaatatacttctgatcctattttctataaaatattttgtgatattttattgccatgatcagaatccaagaaattatttaacacatcaattaaaaatatagaatgacatttgcatccttctcaaaatgttcacatatatctgcttcttatccatccttgaatagacttttaagtttggggactctattactggttaaattcactttttgtcattaagaagtgtgccaaggaaatgccacaatataaaaaacagaacaaaattttcaagaatgtttttgcctgtgtaataaatatgtgataattgtcaaattatctagaactggaaatctgttatatatgtgtttcataacatttgctttaaattatggagttgtagacactcaatgtatttttaaaaatcacatcacatgggtggtgaaat

SEQ ID NO: 406702 - DNA, 597 bp, Homo sapiens
attggtttccttcctcaaaacagatattttgaattctctgtctaaaagatcacatatctctgtctctccaggactggtcactggtgccttatttagttcaactggtgaggtcatgttttcctgggtggctttcatgcttgaggatatttgttagtgtctgggcattgaagagttaggtatttattatagtctttgcagtttggttttatttgtacctgtccttcttaggaaggctttcyaagtattcaaagggacttgggtatttgatgtaagtttttgatcactgccgcacatttgcatgagctgtcaccccaagtccagtaacactgtggctcttgcagactcatagaagtagtgccttggtggacttggataaaatctggaaaaattatctgaattaccagacagactcttactctcttcccttagtttctcccaaacaaatagagtttcaccctctctgtgctgagctgcctggagctggggcagggtgacacagcacccctgtggtcaccaccactggaactgtactgggtcatacctgaagtcagcacagcactgggtctcattcaggcccgtggtaaccactgcctgact

SEQ ID NO: 406703 - DNA, 572 bp, Homo sapiens
cattaaatatgatttaatatgatctgagtgctatataaagttcttctgttatttttctcttcagaaagaactcttcagcaatattttgaaaaataccaaaattactccaggtctcttaataatttttaagacttctcctaggcaagtttactttctttttgtgacaaatttccttatagcaaacttatattttccagatcaaggtgtagcctttttcaatcctattcaaggtaaaaataatcttctcaaaattggctatgcaatgtatataaatttcacttaagttttccaagtaattgtgggcctataaatttctaactggttacatttgggttttatctaaaccattaacttaaatttattgaactagaaaattagaaagtaaaagtagcaaacaaaataaaatgtaaacctaaccaaaaaattccaggtatatatattgatatgtatatgttcagaatatgagggacatgtcatggccatactattaagaaaaacatccaaccagtagtgtacatttacatttaaaggatattttgtaaygacagatatgtatttaataagaaaggaaa

SEQ ID NO: 406704 - DNA, 585 bp, Homo sapiens
tatatagtgaagctcaaatttgaacatacaactcaactcaaatttgactctaccaagtaccaattgaacgaccttgtactaattagttaattgaaaacatcagtttcaatagaagagaaataataattgatcrgtttaggattgttctgaagattagaacaacacattcacttaatagacacttcttaactgaagattagaacaacacattcacttaatagacacttcttaactgaagattagaacaacacattcactgaataaacacttcttaactgaagattagaacaacacattcactgaataaacacttcttaactgaagattagaacaacacattcactgaataaacacttcttaactgccttctatgtggcactgactctgccaagggcagggtatacagcagtgaataagagaaacatggctcctgacttcaaaaggtttgcaaaatgccttcatggcttcagaagcacatgggaagtgctcaaaaaatggtcgctgatcctgtcactgttactattaatattattaatgctattaatattattttgggcacagccaaatgatgacaacactgagctg

SEQ ID NO: 406705 - DNA, 542 bp, Homo sapiens
agtgtgaaaacatctgggaacctagaatccaaaggtatcatgggattttcatgaccttcacagatgctttgcatcttgagaagaggacaacagaattcaaaaccatcagaatcctaatttttctggtggcaagtgcaatcctattcttctatctaaaggaacaatgtcataagcaaagtagactagaaatggctggtaataaataaaagtagatagggctagagcaattcattcatctattcattcttttattaatttacccatctacctactcaccatcatgatacagtgggaacatttctgcctgtcaagctgaaaggctcgagtatatagtgaagctcaaatttgaacatacaactcaactcaaatttgactctaccaagtaccaattgaacgaccttgtactaattagttaattgaaaacatcagtttcaatagaagagaaataataattgatcggtttaggattgttctgaagattagaacaacacattcacttaatagacacttcttaactgaagaytagaacaacacattcactt

SEQ ID NO: 406706 - DNA, 585 bp, Homo sapiens
tatatagtgaagctcaaatttgaacatacaactcaactcaaatttgactctaccaagtaccaattgaacgaccttgtactaattagttaattgaaaacatcagtttcaatagaagagaaataataattgatcggtttaggattgttctgaagattagaacaacacattcacttaatagacacttcttaactgaagattagaacaacacattcacttaatagacacttcttaactgaagattagaacaacacattcactgaataaacacttcttaactgaagattagaacaacacattcactgaataaacactwcttaactgaagattagaacaacacattcactgaataaacacttcttaactgccttctatgtggcactgactctgccaagggcagggtatacagcagtgaataagagaaacatggctcctgacttcaaaaggtttgcaaaatgccttcatggcttcagaagcacatgggaagtgctcaaaaaatggtcgctgatcctgtcactgttactattaatattattaatgctattaatattattttgggcacagccaaatgatgacaacactgagctg

SEQ ID NO: 406707 - DNA, 662 bp, Homo sapiens
ttctgcattgctcatgctgggagctgtagactggagctgtccctattcgaccatcttccctttatattttttctaccctggccaccccagtctatgatagtgacctccccattttttcactctacagtgtactgttattctcaataaagtgggtcaatctgctatagggagtcaaattttcaatattttatccttccttctgatttttctcttactatcaacaatctaattattatcatggatctgtgggtccacaaacaacttggagaaaataattaataattatcacataagaggttaggttaaagagcagctttagcattgaaaatgtgcaactaaacaatgaaccaaacaaagttaaaatgaatgttcgggtgccttaatttttgcaaacaagttgggacagaagattcagatatgggaaatgattatcagatttcttttgattaggtggtgttttctttctaagtactttaaccrcatacaaagatatcatgtgatcttagaaaaccagataaaacattgatttcattacagttgctgaatgtttatacacaaatccagttaaatgactgcttctatggtccatttccaaaacgtgaaataactggacaatattataatgacaagggcatggtaaaacatgaagagttttccaaata

SEQ ID NO: 406708 - DNA, 615 bp, Homo sapiens
ctaccttttatgtgaaaatgagagacaattatgattctatattgatacttgcctgtaaaagaagtaattccagaagrcttcctaaaacacaacagtgggtacaagggagacgtggatggcagggagtcttcaccacatacctttttgtctctctggattttgaaccacatgaatatactattttttaaacacacacacaaattttaaaaatagaaaaagcattcacagacatttgcaaaatcttctagtctttctctgtactggggaggcgagaaactctgagtctgaatattcccacttatctacaaacacaaacatgaagcaactggggaccgccccatgactatgccaaggtaatgttctccctttggaaaaagctaggagacaaaagatttagaaatgaagttgatagggtgttaagaaagtcccagaaatagagataattgatttttctttaaaaaaaaataaatttggatttattcccattatatgggccagatgatcatgagtcctttaaatagcagtagcattaattaaacacatcctgggaattcaggatgacaagcttgggattctaaatatgcttgttctagggaggcagtttggaagcttgac

SEQ ID NO: 406709 - DNA, 573 bp, Homo sapiens
caagcacagggcagttgattggtgtgtattgaattgaggaggaataactcggatcttgagggatgagcagcattagcatagtgggcgagataagggaaagggaagggcatgctccaagctgttctcttcagtccctccaggggagggggcagcgtgcggggccacactctggacagggcagctactcctcacattgtcagcagaagccactgcagttctaggactcaggcagccacactcttgtccagtgtaatggaaactgccttctgagctgcatgcacccttacttgatatcaaygtaccagggactcggatctgtaactagaacagcacttacagcttgtctctcagggaaatggtgttggatggtcctcaggaatatttcttccaggttttcatggaacctagaaaaacaccacagcttgctaaggtgtaaacctctcagatgcctgggatgttctagactgagctgcagccagtgcctttctcctgttcagggctggatatgcacagacgccctcaccagggccttctaaacataatttgcttcaacccttgcttgttggcacaatt

SEQ ID NO: 406710 - DNA, 622 bp, Homo sapiens
ctgttccaagcactggtttggtcaaacccccagtgaaaagcgcagttagggcaatgccaagtgtcactgttggggtgttgagatcagaggcacatttttttttctagattcttaagattttcatgttgagaatgggggtgaatgtgggagttgagtaggggctctgagtcagttgccttccagtttaattatgtgaaatggcagatgtctctttttatagtagcatattttttcaggtgtctcactgccttttggtttgccacagctgtgtcttggaaagggctgttagtacttttggcttaaacaaattagagctatcctgatatagaagaccaaccttctccatcttttgtggtttatgctacatattacatcacagctttctgctgaaattgttgctaaataaccttaatctttaatactttattccttttcccagggagaatcaagatcacatggtagtgcttytcaaaccttctcagttctaatggcacaatgtaggatactctcctgcgtttcttctgctgtaaacttagtatgtttattttcaggccaaggtactttgtgttcacattctatagggattgtttttcccactttctcatgttttcctttagagtaa

SEQ ID NO: 406711 - DNA, 544 bp, Homo sapiens
ataacaaatcacccagctggccaaaaacaactgacctcacacacacaacagtgatgttttctgaaagatttaccactatcatgtcaacaaattctgggatgataaacattttcctacatttttagcaactgacttttctaagcctactatggatataaatttttaaacatagtatacttacttttttagaacttaaaaatattcttcatatggtaagggtaagagaaaaaaattaaaaaagcattaaacagaactttaaaaagtatctttgcaacagactaattgttacagttaatttgtaygtgtacatgtgtgcaaatgtatagtatgtgttctttaactagcttcccaaaaactctcatgaattgcaccattgcacctagacttgcaactgggcaaatgaggtcaagtgtatataatgatagctgattttcaacaccttttaaatgaggttatccatgtatgtattgcaatcatgtaaattttgccctctatagttaccaaaggcaagaaggtgagcgttacttttctgcctatacaaact

SEQ ID NO: 406712 - DNA, 545 bp, Homo sapiens
gtattgacaattatgtgtttagtcaacaaagacttcctgagaaatttctgtgttcagacattgtgttagaaaccaggattaaaaataataagattttcccttgttcctatggagttcacagtctactgaggaagacaaacataaaacagataatcacaaatgcttgcggtaagacttataacagatgcattcatggggcacttagaagagcagttaacccagttttggagaataaacaaattcttccaaaagagaatgtttaagttagggtctgaaagatgaacaggaagttgaaggcaggaatgaggaggtaggtaggaagttctagaaaaggggaactttatgttcaaaaaacctgaaggcaaaagaaagtcatttttagggaaaatacaagtaattcaatatggctgaagcactggggggaagggacagggagtccagctccctggagaaggaagcaggtaccygatggtgaagggtgtgggcattcagactcagttctgagggtggcgaagagccacggcatcttcctgtaggactcatgc

SEQ ID NO: 406713 - DNA, 451 bp, Homo sapiens
agagcataatactgctggcatacatcctaatctctaacttgagtataagaaaatagtagaaaaaataataattatattagatactttgaagagttgtaaaattttaaasccaggaaaaattattgggttattaattatggcacatgcagtttcttttagtcttacaaccgtgtcccatgaaatgcatcagataaactctggtgtcctcccactggtcatcatctatgctgtgacccacttgccccaatccatccttgattcacctcgtttctgaccttattacacatgcatatgacctattgttcattctcctcactgctgggatttgacagccaggactgtcttaattcctcacaagttcctcctttctacctttgggctggcttggagaaacacacctctcagttttaccaggtataaggccccctattttgataccactccaacttct

SEQ ID NO: 406714 - DNA, 451 bp, Homo sapiens
agagcataatactgctggcatacatcctaatctctaacttgagtataagaaaatagtagaaaaaataataattatattagatactttgaagagttgtaaaattttaaagccaggaaaaattattgggttattaattatggcacatgcagtttcttttagtcttacaaccgtgtcccatgaaatgcatcagataaactctggtgtcctcccactggtcatcatctatgctgtgacccacttgccccaatccatccttgattcacctcgtttctgaccttattacacatgcatatgacctattgttcattctcctcactgctgggatttgacagccaggacygtcttaattcctcacaagttcctcctttctacctttgggctggcttggagaaacacacctctcagttttaccaggtataaggccccctattttgataccactccaacttct

SEQ ID NO: 406715 - DNA, 451 bp, Homo sapiens
agagcataatactgctggcatacatcctaatctctaacttgagtataagaaaatagtagaaaaaataataattatattagatactttgaagagttgtaaaattttaaagccaggaaaaattattgggttattaattatggcacatgcagtttcttttagtcttacaaccgtgtcccatgaaatgcatcagataaactctggtgtcctcccactggtcatcatctatgctgtgacccacttgccccaatccatccttgattcacctcgtttctgaccttattacacatgcatatgacctattgttcattctcctcactgctgggatttgacagccaggactgtcttaattcctcacaarttcctcctttctacctttgggctggcttggagaaacacacctctcagttttaccaggtataaggccccctattttgataccactccaacttct

SEQ ID NO: 406716 - DNA, 513 bp, Homo sapiens
aaaaatgatggaatataaaacaatatacaatagaaggaatcactaaagccaaaagctaatttaatcaagactaatgcaaagtataaacatctagttaaaccattcaagaaaaaattagagaaagtcataacttactaacatattaagaactaaaatatagacatttctatagatagtacagatattaataaaggaattacaaagaactttatgccaatcaatgtagttattgcaaaacagaaaaatatctttcaattaaacacagtcagccttttgtatccacaggttctctactcatggattcaacctactgcagatcaacaatattttttacaaatggayagtcgcatctgtactgaacatgaacagacttttttcttgtcactatttcttaagcaatgctatataacagacatttacatagcatttgtattgtattaggtattctcggtaatctaaagatgatttaaagtatatggtaggatgtgcatagataatatgaaaatactacat

SEQ ID NO: 406717 - DNA, 424 bp, Homo sapiens
ctaattttgtcattgggcgtttaaatcttatgattcactgatgttggaccccagctattggtggagatacctatggacagttaagttgaaaaacaactgcccccagcctcccttcccttgtgcctgcaatgcaccgcggtcctgtagtgcagcaacggctctccttccttttgtcctttggactcctaagygcacagtaaggcctagttcttcaacgattggtttgtggggactttgccattcctctattcagcaaaagacaatctcctctgtgttgcaactctatatctggcgagaggataggagggttggcgcgaccagagctggctactaaaagcaggcacagtaaaaccccacaatgatttgcctctttttcagcttggcacatcatgttagaagctggaatagagaaacgtttgtaatg

SEQ ID NO: 406718 - DNA, 556 bp, Homo sapiens
ttctcatttaatgtgttgatgacatcacacttaagggtggtatggctggcgggacattaaataaattacactttataaggtacctaatgtgctaatactgggagggctaagttgagccccctgccatcaaagttcctatctggatctcagaaatgaaccaagaaccttagagaaaattcctccctgttaacttattaagcatatttcaccattgttcttcagacaaagaggaaaakattaggttatatagtatttattgtgcgtaagaccacacacgaaaatacacacataatcttactttctagaagataagcagaagaagagaggttttcatttctgaatttaaggagatgagattgagatcttctatatcagaaagtttaaagtgacatttttgcatgtcttagtccatttagactgctgtgacaaaataccttagactgagtggttataaacaacaataatcaatttctcatagagtctggaaagtctaagatcaaggcacagccagatgaggagacggcctcttctggttcatagatggcaccatctagct

SEQ ID NO: 406719 - DNA, 545 bp, Homo sapiens
tttaacttaatttttatttttcttccgttgcctttttagttctgacttcctgttccaaatccttaatctcaaggattggtctgtttttagcttttcatctcacaggctttagccttttagcctaaaccattatagyttttactgatgttttaaccttttatctcattggcttacagtattttatcttttgttttaaaatctcatttattttgtattttttaactcttaaccttttatcttcatgcagattttaaatttattttagctttcatgtcattcccttttagcttaccttttcccctctttttaaattttaacctccacttaaccaacttccctttttatttttcctcatttttaaaaaaactttatattgtttcctggctttagcatatgtttataatgaacttcaagttcattataaaaacgctcaagtcctcaaacgtccctaattatggtagcatgggaaggacccaaaccaccataattagggacaactgaacgcttcttcctcatcctcctttccatcctctagccagcctccc

SEQ ID NO: 406720 - DNA, 603 bp, Homo sapiens
aggctggtttcaacaagtggatattttgaccacctgaaaaattggggtgatattgaatatttccttatcaaatagtttcttaacaaaaaataaaccaaaatcaattgtattctatctatatgccgtaagragaataaaaaaagcttttctgaacctatggcaaagaatgatcttgaagatctcacttcaggccacttttagacaacataaatatattcatgttttacagttctttcaacaaatagcatcaaattcctttaccagaacttacatgtgtactatcacccaaacattctttacctttccagtgatatgatttggctgtatccccacccaaatctcatcttgaattgtagctcccataattcccacgtgtcatgggagggacctggttggaggtaattgaatcacggcagtgggtctttcctgtgctgttctcgtgatagtgaataagtctcacaagatctgatggtttttataaagaacagttcccctgcacatgctctcttgcctgctgccatgtaagatgtgactttgctcttccttcgccttctgacatgactctgaggcctcctcagccatgtggaactgtgagtcaattaa

SEQ ID NO: 406721 - DNA, 603 bp, Homo sapiens
aggctggtttcaacaagtggatattttgaccacctgaaaaattggggtgatattgaatatttccttatcaaatagtttcttaacaaaaaataaaccaaaatcaattgtattctatctatatgccgtaagaagaataaaaaaagcttttctgaacctatggcaaagaatgakcttgaagatctcacttcaggccacttttagacaacataaatatattcatgttttacagttctttcaacaaatagcatcaaattcctttaccagaacttacatgtgtactatcacccaaacattctttacctttccagtgatatgatttggctgtatccccacccaaatctcatcttgaattgtagctcccataattcccacgtgtcatgggagggacctggttggaggtaattgaatcacggcagtgggtctttcctgtgctgttctcgtgatagtgaataagtctcacaagatctgatggtttttataaagaacagttcccctgcacatgctctcttgcctgctgccatgtaagatgtgactttgctcttccttcgccttctgacatgactctgaggcctcctcagccatgtggaactgtgagtcaattaa

SEQ ID NO: 406722 - DNA, 531 bp, Homo sapiens
ttgaatcacggcagtgggtctttcctgtgctgttctcgtgatagtgaataagtctcacaagatctgatggtttttataaagaacagttcccctgcacatgctctcttgcctgctgccatgtaagatgtgactttgctcytccttcgccttctgacatgactctgaggcctcctcagccatgtggaactgtgagtcaattaaacctctttcctttataagttacccaatcttaggtatgtcttcattagcagcatgagagcagactaattcaccaaggaatttaacctcatcctgtcattaagattctgaaaagttactgatactaaaaataaatgcatgcatgcatgcatacatatacacatacatacattcatacaaacatacacacatacacacattcttctgaattaagaaagaggtgtgcctgttttgctgctaccagcagcttctcctcctccccggcttttgctctcttggtctttcatcactgaagctggtgtttaccctggagctgacattttaatgtccacc

SEQ ID NO: 406723 - DNA, 636 bp, Homo sapiens
  misc_feature (1)...(636): n = A,T,C or G
cagtaggaacttgtccttacagagcaagaggcaaacaataggaaggcaaaacaaaattacatcaaatgcaagttgccttaaaaaaattaataaattaaatgagaatagtaaaagttgtttggacttttttacttcctgatactattccaaaactctaatacaaaactacttcttaaaaacactattaataatctgtatgattaaataatattttccaaaaacattttataagttagttactttatacaaagtgtttctcattttttgtacccttggaaagggcaactttgaaaatgttggaattctaccaggcaaatctacacacacccagacacacacacagagaaaaakattgaaatctaaatgttttctttgtatagttagaaacttagaattagatcttcaatttccctttaacacttccattattttgctttgcttttcctttcggtcattntgaggtctgccatctcctggcacttccaatangatctctgattcctccttctttaggttcagccataggctcttcctaccctatgactcagtcatcaaccccagagtcctagaatgaatcatgatgccagaaccagagatgtcttgattcggcgtttggctccacccttggtcatatgg

SEQ ID NO: 406724 - DNA, 594 bp, Homo sapiens
tatcccaattcaaggttagagattgtcagcttaaacaagcaaacaaaaaagaccgagttttatgtgcctacaaaraagtgcactttaaacttaatgacacagacaggttaagaataaaaaactggaaactcctgacacacaaaaaatgttagagttgctatattcacattattcaaaacagatttcaaagtaaagaatagtactagggataaagaaattgtttcataataaaaaataggtcaggccaggtgtagtggctcacacctgtaatcccagacctttgggaggccaagatgggctggaatccaagactagcctaaggaacatggcatgtctctgcaaaaaaatacaaaaaaaaaaagccaggtgtgatgacacattcctgtagtcccagctactcgggaggctgtggtgggagaatcacctgagcctgggagttcacagctgcagtgagctagattgcatcactgcactctagcctgggtgatggagtgagacactatctcaaaaataaaataaaacataaaataaataaatgggtcaattcatcaagtcgtgtataaacatttatgtaccaataacagagctgcagca

SEQ ID NO: 406725 - DNA, 594 bp, Homo sapiens
tatcccaattcaaggttagagattgtcagcttaaacaagcaaacaaaaaagaccgagttttatgtgcctacaaaaaagtgcactttaaacttaatgacacagacaggttaagaataaaaaactggaaactcctgacacacaaaaaatgttagagttgctatattcacattattcaaaacagatttcaaagtaaagaatagtactagggataaagaaattgtttcataataawaaataggtcaggccaggtgtagtggctcacacctgtaatcccagacctttgggaggccaagatgggctggaatccaagactagcctaaggaacatggcatgtctctgcaaaaaaatacaaaaaaaaaaagccaggtgtgatgacacattcctgtagtcccagctactcgggaggctgtggtgggagaatcacctgagcctgggagttcacagctgcagtgagctagattgcatcactgcactctagcctgggtgatggagtgagacactatctcaaaaataaaataaaacataaaataaataaatgggtcaattcatcaagtcgtgtataaacatttatgtaccaataacagagctgcagca

SEQ ID NO: 406726 - DNA, 594 bp, Homo sapiens
tatcccaattcaaggttagagattgtcagcttaaacaagcaaacaaaaaagaccgagttttatgtgcctacaaaaaagtgcactttaaacttaatgacacagacaggttaagaataaaaaactggaaactcctgacacacaaaaaatgttagagttgctatattcacattattcaaaacagatttcaaagtaaagaatagtactagggataaagaaattgtttcataataaaaaataggtcaggccaggtgtagtggctcacacctgtaatcccagacctttgggaggccaagatgggctggaatccaagactagcctaaggaacatggcatgtctctgcaaaaaaatacaaaaaaaaawagccaggtgtgatgacacattcctgtagtcccagctactcgggaggctgtggtgggagaatcacctgagcctgggagttcacagctgcagtgagctagattgcatcactgcactctagcctgggtgatggagtgagacactatctcaaaaataaaataaaacataaaataaataaatgggtcaattcatcaagtcgtgtataaacatttatgtaccaataacagagctgcagca

SEQ ID NO: 406727 - DNA, 564 bp, Homo sapiens
tatgtaacaaacctgcaggatgtgcaggtttrttacataggtatatagggttttttaaaattaaaaaaaaagaaattaaatagcacatttctaaataacccatgggtcatagaagaaatcaaaagaaaaattagaaagtattttcaactgaatgaagatgaggatattatatatcaatatttgtgtgatgcccctaaagcagtatttacagggaaatttatagcagtagctctttttttgttgttgtggggtttttttggttgttgttgtttgtttgtttgagacggagacacacggagctacagccagaccagactcaggagattccaggttgccaagctcatgttctttcaaatacaatccaccaccgctctttggaatccccatgataaggttggcaaatgaagatgtttccagctaaaaagccaaaaaatgaaagtttacccttttttataagtcgatacattatcttggactgcctaatgacatttttacaggtatgttatagacctttgtatcataaattaggtgaaaagaagtgctagagttatgttgagttgtatt

SEQ ID NO: 406728 - DNA, 593 bp, Homo sapiens
cggtggaaatctcttatactttgtaaactatccgaggcaccacaaaamtttttcaacaaagggcagattgaaaaccaatttgtaactctatttgtgctaatatttcattttctcctggtttccaagaaattaaccagctgcctggtccaaaggtaatgataaagtgagccctaaatcttcagaccaaagtttgggaattctgctcgtccagctttcatagaaaggaatggaagtagaacctcaaatcacacatcaggctgctaagaccccctcccctgtctttaaatcagctataactagtgcttagggaagaatctgaacagcagaagtttcaaaacaatgggtcttttaatttccagtgtgtatgttctgtgatatgaaaccctaacatttaaaaatttaccatgtattataatatacaactcagctttttttatgtttaaaacattccccacattccagagtgctaatttgaggctaaatgcctggaaaaatggctcccttaaccccttcattgacatataagaccatttcatatttctgttgtccctaactgcaaagttttgattgatgcatcacaagttctggggttc

SEQ ID NO: 406729 - DNA, 607 bp, Homo sapiens
tgggggtttgttgtagagattatttcatcacccaggtattaagtctaggacccactagttatttctcctgatcctctcccccttcscaccttccacactcaggtaggccccagtgtctattgttcccctctttgtgtccatctttatcatcatttacctcccacttacaagtgagaacatgccatattcggttttctgttcctgcgtcagtttgctaaggataatggcctccaacttcatccatattcctgcaaaagacatgatcttgcttttttttaatggctccatagtattccatggtgtctatgtgccacattttctttatccagtcaaccattaatgggcatttaggttgattccatgtctttgctattgtgaatagtgctgcaataaatatatgcatgcatgtgtctttatgacagaaggatttacattcctttgggtatatagccagtaatgggattgctgggtcgaatggtatttctgtttttaggtctttaaggaattgctacaccgttttccacagtggttgaaccaatttacactcccaccaacagtgtataagcatttctttttctctgcaatctcgccagcatctcttattttt

SEQ ID NO: 406730 - DNA, 464 bp, Homo sapiens
tagcatttccagtttatatttaaaaccgtacagcataaggagggcccataaacaccctcaggtgtctagttcaggatttaacagccttgatttcccagacagcctttcctctacatcaaaacctgcatccttcttgttgcaggttaggccttttgttcctaccttcagcagagatggagaacaacagatggtggcaaaygcagaaatctggtaatggatgtaggatcagtttgtgccttgtatcgctgtgatcaacaccactactaaatcccctttttgctctctatggtaggatcatagtgacagcccaatttatcaactgtgaatattggcataaacaacttcaaggctgggatatttttcatactcccttgaaaactgtcatcagttctgtagagtagtaaggaaaccattgatccatttaagaaactgtcagcaggtgtacaaagaagtgaaagatggat

SEQ ID NO: 406731 - DNA, 614 bp, Homo sapiens
aattacctgtaataatacatgttggggttgaggggtgggtgttaaataaccttgtttccctttctaagttcgaaactgagagagagagagagagagaaagacagacagacagacrgacagacacaggagattgatgaacataaaatgctaggtgctcctccctaattcatcaatcagttaagtttctccttttttctgcgggaggttggggagaagcactagtgttagctatacacttttctgtaaagtaaggtagaaattgggaatacatagttttaaatttatttatatgaaggcctagaaatagcgtaggagggggttggctagtacagggcagggaaaggcaggagagagcctctgtctttcccttcttagtgctctgcatagcactaactatgggactttaatacagtgggtcgtcatttgatgtttgctgaactaaaaggaaacacatctcacttgtttgattaatattagttgttgggttcagggtctatttcttttcagaattattattcttcctttccatatgatctttagagtttggaggtttacgcaattttggttttttttttatacttaagaataacttttaatttgaagaataaatatac

SEQ ID NO: 406732 - DNA, 598 bp, Homo sapiens
tcaggaattaaaatggaaaaactactaataaagagtgagagagattaaaagcctccacgtggccatgtggctcactattatctcatcttaagtcaaatattgactgatgtaaataaatgcaatgtatcatcaatgcaaggatcctgttgcttacaaaattagaatcattactttagttaccctcaaatcatgcktatctcaaaatataattcaagtaggaagaaatcacttaattttttaccattgactcattacattccagaccctgttataagcactttacatgtataaatacagaagtacttaaaatcaagatgtttttaaactaacatttttctataattattgatgcataatttatcaccttaattgatgtcttatttctcataagcttatttataaattttgtgtaaaacatatgaaaagaggtgtgaattttgcaactaaaataactcattattaaatatcaaaatcaggttcattatatacacatatgacaggcaatagggagtgcctcaaattaccattctgtatttcacatatattaaaaatctactgaaatatactaaactgatgtcaaattaatgaatgtgttggc

SEQ ID NO: 406733 - DNA, 580 bp, Homo sapiens
attgtaaatatttagttttcaaagtcaaaactatccacttttgttcaaaatacctctcttccagaaagtctcaaacatctgtttagaaaatcttatagccagtttctagcctaacacaaactataaaacacacacacaaagttatatcatctctaagggaataagatgtatggaagatatggaaatgggacagggtttgggactgagatgtatcagaatgttttgaactatcaaaaaaatcaaaatggcttaatcagttggagacacttattttctccaaagtaagaggtttagcgataggatgtttccagaattaatacagcaatttaacaatatccttaaggattcaacttctttctgccttgatctgctatcctcagtgcaaccttccccccsctcaaaattatgtcctctttgttgcaagatggctgcagctgcttcaagtttcatactccacccatctgtgttctgaagggcaggccagaatgcatctcattcttacccttttttttcagaacaaagtacacttttccagaagtcattatgaagaattaactttatgtctttttttttcttttga

SEQ ID NO: 406734 - DNA, 580 bp, Homo sapiens
attgtaaatatttagttttcaaagtcaaaactatccacttttgttcaaaatacctctcttccagaaagtctcaaacatctgtttagaaaatcttatagccagtttctagcctaacacaaactataaaacacacacacaaagttatatcatctctaagggaataagatgtatggaagatatggaaatgggacagggtttgggactgagatgtatcagaatgttttgaactatcaaaaaaatcaaaatggcttaatcagttggagacacttattttctccaaagtaagaggtttagcgataggatgtttccagaattaatacagcaatttaacaatatccttaaggattcaacttctttctgccttgatctgctatcctcagtgcaaccttcccccccctcaawattatgtcctctttgttgcaagatggctgcagctgcttcaagtttcatactccacccatctgtgttctgaagggcaggccagaatgcatctcattcttacccttttttttcagaacaaagtacacttttccagaagtcattatgaagaattaactttatgtctttttttttcttttga

SEQ ID NO: 406735 - DNA, 556 bp, Homo sapiens
ctggaataaattatgaactaaaagtattcttgattattttatcttacaaagtgaagagactgtatattttatatttatattttccatgcacagtggtctgttcttccattatcttttcttatgagaggcataatgacaaataagtccaaagaatgtgtagcattattatggcagatcaatcaaatggctaattacccctcttatctaagtggcattatcttgctttaaaggtgatgaaaataacaaatgaagaagtkatttcgttttttaaaaacaattctgtaaggaaccagtctatcactgatgggcatttgggttggttccaagtctttgctattgtgaatagtgctgcaataaatatacatgtgcttgtgtctttatggtagaatgatttataatccttggggtatatacccagtaatgggattgctgggtcaaatggtatttctgattctagatccttgaggaatcaccacactggttgaactaatttatactcccaccaacactgtaaaagcattcctatttctccacatcctctccccagaatctgtag

SEQ ID NO: 406736 - DNA, 364 bp, Homo sapiens
aaataggcctgaaagtaacatgtgtaaaacattttaaaaatagtgcgtgtccatataaatgtgctattacaatggaaattaaggaatccaaggattaaaaaaawatataaatgagaagcgtaaacatccatgagtgtaaaggaaattaaaggaataatttcaaaagtattttttaaatttcatgcagatatatttatacacacacatattcaaaaaccagcatcatacttagtggtgaaatattagaattatcaatatattttctttaaagttgggagcaagataataatgttttatcattagagtttttggcagacaacagaaaccaatctagctagtttaagtagaaagggccatgtggcaa

SEQ ID NO: 406737 - DNA, 586 bp, Homo sapiens
gcacagtacatagcggagtttttattaaaatacagtgatgcctacagcaatgaatgaaagccatgccctactttaagtgagggtcttgaggaacttacagttctctgaaggaggtaaggcagatacagaagctatcactgaacctattcactatacctgtgcagtaaaggcaaacaccagcatgaaggtacgcagtaagagaaagaaaagcatttattgcagggtgccaagccaggagagcaggcagctaatgctgaagacctgaacaccatgataagcttacaagcaagggtttttaaagggaarggtgaggggattgctaaagtgagttaagggctggggaatttctgggacttccttatccagtttttggttctagtctgtcgaggtctacatgaaagtagtcagtgttttgcatctggtgggggtccttgtttttctgataaataactcaaagacatatgtcaagttactaacttcagtttctatagaaaacagtatcttgtgactcttatgttagttgagtcactattgtttaaactattgttatcttcttctttagcaagttgtatatttacttctttaa

SEQ ID NO: 406738 - DNA, 570 bp, Homo sapiens
ttccctctcacaatctttcccattttggaacttactttaagcaaaamattaacaattgttgtgttttatttatcacgctttttgcattataacaactagaattgtcctaataaataagcaatgattatattcctttacttttgatgagtctaaaggaaattgactcatgtcaccatctgtttaagcatccataagtatgccatcaaagttatggagaattatctatccagaatgcacagatgataggcaatacgttttttattggctttctgttcttttttctcttagctagtagaaatacattcagcatcccagtggtatgttacagccaaaattcaaaagtttctctgcaggggtcggtatagtgtgctgtagtttttagaattttatgtttccacaagaagcttaatgccccttttctgcctgctgccccagtataatgttttcttatattaccatctaggccttatgtctaaaaaagaagacataatctcatgtggcctgattactgaagtataagatgacttctcatcaggccacatgaggttatgtcttcttttttagcagagg

SEQ ID NO: 406739 - DNA, 572 bp, Homo sapiens
agttaagtcactatacctcatggtaaaatccagcagactatatgatctattgattcggttccacatgaaacctctgaacctcccagcctagaacccagagtgacaggagaaagagacaatatcctctaccaaaccatgcccttgaatatatttatgacctgctgtttctgagagtcatatgatctttctctcaaaagagcttcattaaaacaaacgcacacaatacaacctatgttccctcataacctaccaatcaaagcatgaaactgagccacagtaatggaggaaaacggtattctaacaagatttaagcacctccacatgttgtttccttgtcccacactcagaactgtttcccaaacatatgtgcttatgactaattctgttggttacaatgaggcatcgatttttcaatcatgtttgggtttcctgggaaacataatttttagtaagcactcagatgcctgcaagccactcaaaagtggggtaaagctacagtkgaaacttgacagcgccatcttctgatggtgctcaactgtcaatgccatatcctcttatcttcctttactggt

SEQ ID NO: 406740 - DNA, 511 bp, Homo sapiens
atatttttagaagatggaaaggaggcagactagagacacattcaggaaaaatggaagtttattatttgtttaattatgggagaaatgagcttaatatacattcatggaaaaggagctaatagagagaagattaaaatataggagaagtaggaaatgaattgttagtgggaaatattgaacrggcttgaaggagatatgtcgtgggtacaggcggggagataataataaatgaggcagaacatgccttctggaggaaggaaagcaagaattgaaaaaatatggatacaatttgtgtgtggaaaaaatatggaacaattttttattcccattataaatttttgagggttacagttcagttcagtgttcagccagttcttatttgcattttattcttgaagggttttattgaaatataatttacacactacaagtaaataacttttaataagttcatagagttgtacaaacattaccagaatacagctttaaaatattttcatcaccccaacac

SEQ ID NO: 406741 - DNA, 511 bp, Homo sapiens
atatttttagaagatggaaaggaggcagactagagacacattcaggaaaaatggaagtttattatttgtttaattatgggagaaatgagcttaatatacattcatggaaaaggagctaatagagagaagattaaaatataggagaagtaggaaatgaattgttagtgggaaatattgaacgggcttgaaggagatatgtcgtgggtacaggcggggagataataataaatgaggcagaacatgccttctggaggaargaaagcaagaattgaaaaaatatggatacaatttgtgtgtggaaaaaatatggaacaattttttattcccattataaatttttgagggttacagttcagttcagtgttcagccagttcttatttgcattttattcttgaagggttttattgaaatataatttacacactacaagtaaataacttttaataagttcatagagttgtacaaacattaccagaatacagctttaaaatattttcatcaccccaacac

SEQ ID NO: 406742 - DNA, 559 bp, Homo sapiens
aagtaggaaatgaattgttagtgggaaatattgaacgggcttgaaggagatatgtcgtgggtacaggcggggagataataataaatgaggcagaacatgccttctggaggaaggaaagcaagaattgaaaaaatatggatacaatttgtgtgtggaaaaaatatggaacaattttttattcccattataaatttttgagggttacagttcagttcagtgttcagccagttmttatttgcattttattcttgaagggttttattgaaatataatttacacactacaagtaaataacttttaataagttcatagagttgtacaaacattaccagaatacagctttaaaatattttcatcaccccaacactgtctcttatgtccatctacagtcaattcgtattcctacccctggccccaagtgaccactaatttgctttagatttagctttctctggatgtaacacatgtagtcttttgtgaccggattctttcactctgcataatatttttgaagttatttgtgttatagcacgtaggagtactttgttcagttttattg

SEQ ID NO: 406743 - DNA, 586 bp, Homo sapiens
ttagctttctctggatgtaacacatgtagtcttttgtgaccggattctttyactctgcataatatttttgaagttatttgtgttatagcacgtaggagtactttgttcagttttattgctgagtagtacgccattgtatggatgtatcacattgtaggtagacatttcctgttcttgggatattaagaacatttccaattttaggctgttccaaataatatctctataaacatttcaatacaaacctttacgtagacatgtatttccatttttcatgggttgatactttggcagaattttgaataatacagtacatttaggtttaacttattgttttaaattttttcttatttttaatttttatgagtgtacaatagttgtacatatttataggatacatgtgatattttgacataagcatataatgtgtaatgatcacatcaggataattgggatgtccatcacctcaaatgcagatcatttctttgtgttgggaacactgtaaatccactcctctagctattttgaattataccataaactattgttaatgataattgccctattttgctactgaccagtagat

SEQ ID NO: 406744 - DNA, 559 bp, Homo sapiens
aagtaggaaatgaattgttagtgggaaatattgaacgggcttgaaggagatatgtcgtgggtacaggcggggagataataataaatgaggcagaacatgccttctggaggaaggaaagcaagaattgaaaaaatatggatacaatttgtgtgtggaaaaaatatggaacaattttttattcccattataaatttttgagggttacagttcagttcagtgttcagccagttcttatttgcattttattcttgaagggttttattgaaatataatttacacactacaagtaaataacttttaataagttcatagagttgtacaaacattaccagaatacagctttaaaatattttcatcaccccaacactgtctcttatgtccatctacagtcaattcgtattcctacccctggccccaagtgaccactaatttgctttagatttagctttctctggatgtaacacatgtagtcttttgtgaccggattctttcactmtgcataatatttttgaagttatttgtgttatagcacgtaggagtactttgttcagttttattg

SEQ ID NO: 406745 - DNA, 585 bp, Homo sapiens
catctttatcctcaccatcattaagtctacataatgttctatgagaaagttgacttcataagtgcaacagaggcataatgcatggcacatagtagctattcaataaatacttattgaataagtgtggagtacatgaaggaggttgttgagcacctcttgtgtgataagcagtgtactaagtgctatgcattgaagatgacatttaatcattatcatcatcctgtgagtaggtcctgttgttattcccattttacaaatgaggaaactgaggtacagagaaaataagcaacttgctcaagtwgactcagcgagtgagtgggagaatttggacttactctcagtcctgtttgaatctagagcccatgatgctgttctatccagtattgtcactaccccaatcatttttccttctcttataattcttctagaaatggaagcttttagttgacttggtattatgaggaaaagtgggggcccagcagtactagtactagagttggatgaaatcagtgctacctctgtgttttaaaagcctttaaaatttctactcagagagtgatctgccttgataaatacttggttata

SEQ ID NO: 406746 - DNA, 400 bp, Homo sapiens
aaaaacgctgccatactgcttgaggacactataaacaaatcccactgcaatcctttcaggtaggctcttcattatagaacattcacatgcctctgtatttaatcttcacctttaaactctctgggctcatgtrtctctaagacctgattctggaagagcagccaagctgctttctcttacctaactgaaaagaatttgtaggtaataagaaagtgcttttattcaattatcatggttgccaatccagttagctatgtaactctcactttctcagcacactgctacaatttatatcctttgcatttaggttttacagggatgttcttagttacctaaactttttatggtgtagaaattgtacaagagtctatgaaattgtaagacaaactgaaagcatatg

SEQ ID NO: 406747 - DNA, 662 bp, Homo sapiens
tgttaaaaactgagcattctagatactataatagagaaaacctcaatttattttttcccaggtattgtttgtgtttgcttgtttattggttaatgccttgtttagatgaattctgtggagtctgtcttcctctacagtgtgtaacctctgatgtttcttctcaggtgttttcttctttattattacttttatttttatgcctgactccataagggttgctctcatgtcagaattgcttagtctttcaataatcagtcagattactcaccttgaacagctaaggtttctgctctcgttcatgaatctatgtgtgagctggggaacacttttacatttcagacggtttaataagttttcctggcttttcctttctgcttgcaaaaggcctcaccgtcatctagggacaagcagatagttgtcttctcttctctcctgagagtgtgtgcagctttgcacatgcgtacttcattccagacaatcagggttaggtggaagcttatcagggcctgctctggctgactcatttcatggamcttcctgttaaatttttgcctagtctgattgttgcttgccccaactgaaatcatgccttaggctaactaacattggcccttatcatcacctaaattgctgctacttttgaccatgcccctgagtgtggg

SEQ ID NO: 406748 - DNA, 625 bp, Homo sapiens
ttagacaattattttggtttttttaagcctcagtttcccatacatgaatgtgtttgtatagagcagtggttttcaaactctattaagaataacaatcatttagggaggttgttagcttgcagtttctggggattctcatctaccatgtttgattacataccttcctactagcgtctgtgcccatataggttgtcccctctcttgagagtaagaataaatggctaggccagaaccattcctccgcttktctactatattcatgtattttattccctatttcctattgaagggaaggaatccagaaattatccctttactctcatatatcatcatattttcccttctaacagactcatacacgcagcacacagatatggtttaattttatcttaaaactcaccctctagatttcacttctccctctacttaacaaaccatttctttcctttcttttactacaggacacattagtcccagatatttcaccttaagtcattttcattctgttttctaccatgaggagagttatattaggagtaatcccatgtttttcagtccaataatggtgagaatagttaacatttactgagcacttattctagtccagatgttttccaagtgctct

SEQ ID NO: 406749 - DNA, 586 bp, Homo sapiens
ctaggccagaaccattcctccgcttttctactatattcatgtattttattccctatttcctattgaagggaaggaatccagaaattatccctttactctcatatatcatcatattttcccttctaacagactcatacacgcagcacacagatatggtttaattttatcttaaaactcaccctctagatttcacttctccctctacttaacaaaccatttctttcctttcttttactacaggacacattagtcccagatatttcaccttaagtcattttcattctgttttctaccatgaggagarttatattaggagtaatcccatgtttttcagtccaataatggtgagaatagttaacatttactgagcacttattctagtccagatgttttccaagtgctctacctctgttgattccttcagtgttcacagcactcctaggaagttggtcatttcctttggcctttgactctttaagtcttcaggttaacagtttactcttcaagaccaactttaaaatcattttgtgaagtttcaaaataaaatcccattggagtttagattgagattgtgttaaactgataa

SEQ ID NO: 406750 - DNA, 589 bp, Homo sapiens
acaatctactctgatgcaacaattttctgataaaaactcttataatttgatttgttatttttcttccttttgccttgtagcatcactgcatacattcggtgctattttttggttgttgttattattcatctttgatgagatgaattcctcctggaccattggatggaggtttttgtcaaacaggggctatggtcagtattctttcttagcaataatttttcttatgatgaagctttagatgtgagtgcttttaatatttatgtttgcagccaacagagatgaacaccacagaggtgaccacaaggtggactctttcccttcctctcattcatactaatagtttgctgcaaatatgacttgtgatttgcatcttctcttaatcctgccttctctgcctcttgcaacttcacrtaaaactgaatccagggaaggtcttgcattatcctttccatctatttcatatttaaccaacaggggattattggttttaagcctcagattgtcccattacttaagagaacagatatatgtcagtgttgtctgaggtctacagccacagccatcctctctagtacattctgacaccttt

SEQ ID NO: 406751 - DNA, 644 bp, Homo sapiens
tttctctcaataatgccaaagtagtttctttaaaggtctgaattgtcaaattaggctcttgtttaaaatcatctaaagactccctttaccttccaggacaaagttcaaatttctctactgagcaccaaartccattcatgactaatgaattgcttaacactctacttgcattctttcattttttattaaatacctgctgtgtgtcaaaatgaacacagaaaaagcaatcaaaaacaaaaaatatgtgccctgatggagcttctgatctagtggagaagaaagatattaaataaatagatgcctacatttacataattccaaattataataaaagcattaaatggtgaagacagggtactgtgagctgaaaaacctggttgaggggaaacgtatgccaattacagagggttcagagtttgtcagtcttcagaagtgacatttgagtcaagacctaaaggatgaccaggagtgagttagtaaggtgaagagcccagtaaggtattccagggagagcaagacaaagaggcaccagaggagcagactttgaaaggcaaaagaacttggcatttccaaaatatcatttcccacagggattttctccaatcatatcaacctccttggaattcctaagctagaaatatttc

SEQ ID NO: 406752 - DNA, 644 bp, Homo sapiens
tttctctcaataatgccaaagtagtttctttaaaggtctgaattgtcaaattaggctcttgtttaaaatcatctaaagactccctttaccttccaggacaaagttcaaatttctctactgagcaccaaagtccattcatgactaatgaattgcttaacactctacttgcattctttcattttttattaaatacctgctgtgtgtcaaaatgaacacagaaaaagcaatcawaaacaaaaaatatgtgccctgatggagcttctgatctagtggagaagaaagatattaaataaatagatgcctacatttacataattccaaattataataaaagcattaaatggtgaagacagggtactgtgagctgaaaaacctggttgaggggaaacgtatgccaattacagagggttcagagtttgtcagtcttcagaagtgacatttgagtcaagacctaaaggatgaccaggagtgagttagtaaggtgaagagcccagtaaggtattccagggagagcaagacaaagaggcaccagaggagcagactttgaaaggcaaaagaacttggcatttccaaaatatcatttcccacagggattttctccaatcatatcaacctccttggaattcctaagctagaaatatttc

SEQ ID NO: 406753 - DNA, 640 bp, Homo sapiens
tcctctttctttaactcttacaataagcacttactaagtgtatttaaattaaaaataaatacataaattattacaagagaaataaataaaagtcaatcctagaagaatcttcgatggcagagatggtgcctttcttggtcactaccatgaacttagaatcctatgagccaggtacttagtaggtactcgaatatttgtttattattacttttgttttcctttattgtttccagtggggttggatcaaatatttgttaaagcacatgaatagatgaaagggggaattaaagaggtgaaccatatgatgagctttccycactccactaccagtcttccacaagagtcccattgagtcagcaaaagagctgtaggtgtgtgcttagtgactccatttttatttccccaaatctaacccccttccttgtggaggtcacagagtcatcaccctcagacatggaagtaaggaccacattcctagacccatcatgtaaataagatttttttaaaacaaaggccacttatagtgttctactataagtaactctgagatacctttatgaaaaagggaagagaatagaagaaatacacataaagtgatgagcttgacttattaattgctttcttataatgctaaaggagg

SEQ ID NO: 406754 - DNA, 577 bp, Homo sapiens
aaactgtttttaaaagcccagacccaaaggacttaactggtgaagtttaccaaatgtttacaaaaaaaaaaaaatagaccaattctgcataattttgtctagaaaattgaagaagagagaacacctcccaactaattttatgaggttcacattactctaatacctaaaccaagtaaagatattacaagtaaactacagaccaatgtctctcatgaatgtgtatgtcaattccttaataaawtattggcaaatttaacccagccagacataaagaggattgtgccacacaattttgcaagactggttcaacattagtaaaccagtgaaacttattgtattaacagactaaataagaacaactgtataatcatattaatggatgctgaaaaaaattaatagtattcaatacccactcacgataaagatgttcacaaaaaatagaaaaatagaaatagaagacactttcttacctaataaagtttatatgtgaaaaacctatagcaaatataatacttactaatgagaggcaggatgcttccccctgagatcaagaacaaggcaaaaatgtcctctctca

SEQ ID NO: 406755 - DNA, 468 bp, Homo sapiens
gctcttgtgattattggctatcataatgaacaacacatacgtagaacactttcaccatctcagaaagttctattgaacagtgtagctcctaggaattaagaacttaaaattaagaaaataattgcacctagtttgaaaagcatggcctgagggccagaagccagctcttaggtatcctcagctcttcctatatgccagcctctgtgcctaataagctcatcaacttattgaagctcaaactttcccatctacaacytgcacatcaaaaaaataaaatgaggggctcaaaactgctgatccccaaggtagctccctttcagctctcacagcatctggcacaactgctatggaaatctgcatgaacagtattaactgaccttaaaaggaaggctcttttcaaaaggaacacatagacagcattttgtatttcaatgttatctccattgtatcttaagaggagcacagaaa

SEQ ID NO: 406756 - DNA, 507 bp, Homo sapiens
gctacctgcaggaagcataactcagtatcaagtcactgaggcactatcacagacttacgagcacctggcaaacggcccagaacaatttttaaaagtcacctatttgtcaattaaacttcaccacaagtcaattagcatggtgatttttatgctccagagagaacaggctataatgaacagtcaggagttgtgaggactcacaataacagtaattctttatgggatggtatgtgaaaaatatcaacagcataacataaattttaaaataaatttctttctggctgagtgcagtggttcatacctgtaatcccagcactttgcgaggccaaggcaggcagatcacagggtcaggagactgagaccaycctggccaggatggtgaaaccctgtctctactgaaaatacaaaaaatcagttgggcgtggtggcacgcgcctatagtcccagctactcaggaaactgaggcaggagaatcgcttgaactccaaaggcagaggttgcagtgag

SEQ ID NO: 406757 - DNA, 543 bp, Homo sapiens
tgacttgctgtcctcactgggcctaatcatttctagcttttgatttaaagtgagagatgtacaactcttcctttcctttcacttgaacacttagaggccactgtagggttattaactggcctaatttcaatattgctgtgtctcagggaatagggaggcctgaggagatagagaggcacagaggaatggctggttggtgcagtctgaaactctgaactgggtattggcaaggacaggtagctctagttgaagcccttctactgttgacttgagcaatgggaaaagggcttcctgatgctcagagrcagtgggagaaattctgtttttgctttttgtttttttccttttctctgctcatgctcagcccccaagcaattccatggcaacgagattggtagcagtgatggcagaggcctaaaactctgaggggaaccttatctctggaatgtaggacaaccccattttttcctctctctgtcctcctgatactgggcccttaatgtgcagagttgcataaagtgtgtggcagagagaggtgaataa

SEQ ID NO: 406758 - DNA, 576 bp, Homo sapiens
atttttgtcagtttttgggtaccattgttctgttggatgcaagagttgggaagttttccttccttctcctatttgtgtagaattggcttctttttccccttaaatgtttgaaaaaatttgacggcaaagtcatttagtcttgttttttcactgcagaaaggttttaatgataccttttatttctttaatgaatacagcaatattcaaattttctatttcttctcgagtcagtttctccaggtgtttgtccattttccataagtttttttcaatttagtgggatagagttgtttaaaatattttgctattatttygttaatttctgtagatttttcattaaaaaacagattttaggacagtttatatgtacaaaaaatggagaaaataatacagagttcctacacaccccctcactccacccagtttcccttattagtatggtacacatgttacaattaatgaaccatgttacattattaactgaagtcaatagttcactcagattagataaaaacattagttattttctgttccaggttctcatccaggacattacattttatttgattgccatgt

SEQ ID NO: 406759 - DNA, 591 bp, Homo sapiens
tctgtcttctctggtttcagctgagcattttattttgttccattttatctcctctctttacatatatacttccttttgaaaytcagtgattgtcctagagtttccaatatgcattttaaccttcagataacactataccacttcacattgtctaagaaaatctttctctttcatatttgaaggttaatttcactgaatatggaatcctaggttggcagggttttcctttaaacatttaaaatatttcactttactcttcttgctttcatggtttctggtaagaagcctactataatttttattcctattcctccatagataaggtgatttttccctctggcttttttcagattttctttttaaattctacagtttgaatatgacatgcctaggtgtagttttttgttgttgggatatttatcctgcttggtgttccccaagcttcctagatctctagtttggtagctgtcattaattttgtagaattctcaggcattattacttcaaatatttcttctgctccattctcctttttcttctggtagttcaattacacatatgttacagcctttgaaattcttcctcattctt

SEQ ID NO: 406760 - DNA, 591 bp, Homo sapiens
tctgtcttctctggtttcagctgagcattttattttgttccattttatctcctctctttacatatatacttccttttgaaattcagtgattgtcctagagtttccaatatgcattttaaccttcagataacactataccacttcacattgtctaagaaaatctttctctttcatatttgaaggttaatttcactgaatatggaatcctaggttgkcagggttttcctttaaacatttaaaatatttcactttactcttcttgctttcatggtttctggtaagaagcctactataatttttattcctattcctccatagataaggtgatttttccctctggcttttttcagattttctttttaaattctacagtttgaatatgacatgcctaggtgtagttttttgttgttgggatatttatcctgcttggtgttccccaagcttcctagatctctagtttggtagctgtcattaattttgtagaattctcaggcattattacttcaaatatttcttctgctccattctcctttttcttctggtagttcaattacacatatgttacagcctttgaaattcttcctcattctt

SEQ ID NO: 406761 - DNA, 570 bp, Homo sapiens
aagaaaagactacagtaacagaaactcaatatggtctcgtatacccccaattctaaaaataagaccactaacagaccattccagcaaatagttttcaaactctgacccactgctgccaagacacacttactaatctctctcctataactaccctatgactaaccctagtctcacaaagtactctctcctaactcccatttgcaatgatactgagactcgactctgtcaaggctgagctcttccttgctaagcttaataaacacagctttgtttgatgaacaggtttccctagtaatctttggtgcaagctttgacaaggatgctttaattgaagtttagcaggaacctgtcacagccacagctcaggatcaccaactcagagggcactccactagaccccatgaacttctctgcttgggktttccttgtttgcaattatgaagtaagttcagtgctaagtctgtgccctaatccctttttgttgaattttaaaatctatatgaggtttattttatctgtcctaggaataaagtccccaagacattttattaactcatcaggtctgtacta

SEQ ID NO: 406762 - DNA, 533 bp, Homo sapiens
gtttcctctccccagatgataaactcttcaagagaagaaccaagtcttaacactgctttctacattcagaattctttataaagcaaattataaacaaactgtgctttaaactacgctactgaggaaggctrttaaccattttcatgctcacccctcataactgggaggaggaaagcctccaataatgggctgctgctttagtgaaagcatcaggaattagctcagtaagtcaagtttcactttgtgtgaacatctccatctaaagacttttgacacacattcagtctgtttataaaatgcatacatacaacttattatttgatgaccaaaattttcacagatcttctagttctaaactatcaagtttaaactatcaagctatcaagatggccctgggaaaaggcagctttcagtgatgtattttgagaggacactggtagggctcaatcacaaactgtcactgctcagcctctgtgacatgttaactaaatgacaacgtggaggtgctctgcattgtcctgaaagctacctta

SEQ ID NO: 406763 - DNA, 561 bp, Homo sapiens
attggaaatgtagtatgaacaataatccacgatggatggatttaaatttaaaaataccacccagaaataaccattttaawtgttagggaaaagcattaattgctggtgcatgtagagttaaaacgaaatttttattaaggaggtatcacaatatacagttacttgtagccaaaaacaaaattgatttaacttgtttttaacagaagagaaataaactcttctacccatttttttgtttatttgtttgtttgtttgttttgagacagggtctcactttgtcacccaagctagagtgcagtggtgagatctcagctcactgcagccttgactgcccaggttcgagcgatcctcctgcctcagtccccaagtagctgggactacaggtgcgcatctccacacctggctaatttttgtattttctgtagagatggggtgtcgccatgttgccccagcttgtctcgaactcctaagctcaagtgacccacctgcctcagcctcccaaaatgctggtattacaggtgtgagccaccagcccccaccacttctacctattttaacaca

SEQ ID NO: 406764 - DNA, 561 bp, Homo sapiens
attggaaatgtagtatgaacaataatccacgatggatggatttaaatttaaaaataccacccagaaataaccattttaaatgttagggaaaagcattaattgctggtgcatgtagagttaaaacraaatttttattaaggaggtatcacaatatacagttacttgtagccaaaaacaaaattgatttaacttgtttttaacagaagagaaataaactcttctacccatttttttgtttatttgtttgtttgtttgttttgagacagggtctcactttgtcacccaagctagagtgcagtggtgagatctcagctcactgcagccttgactgcccaggttcgagcgatcctcctgcctcagtccccaagtagctgggactacaggtgcgcatctccacacctggctaatttttgtattttctgtagagatggggtgtcgccatgttgccccagcttgtctcgaactcctaagctcaagtgacccacctgcctcagcctcccaaaatgctggtattacaggtgtgagccaccagcccccaccacttctacctattttaacaca

SEQ ID NO: 406765 - DNA, 601 bp, Homo sapiens
tacatcatttccaagtgtttgggatattattgagtcttttcacaccacaatgagctatcataatcttggataattgaagaatttctcccctttattccaatttatttcaaaattttgtacataagccaaatctaagtcaaccagtccctctcatccccttggctggccacattgattagttcagccatrgtcatatgacctaattttgtccatgaagatttagcccaggaattgttttttattgattgaaatgagagatatctctcagactacatgctaatagggaaatgtttgactccagttgcttcatcagccatcctctgatcatgaggagagactgcagaagatgaaattaatgccctgcctgaaagcaagcatgagaaaaataaggaaaccgggtctctgggaatgtcattcagccactggatcagactcacctgacagctgctctatctttggacttttgtggtccattgaattcccttaattatgtaagccagcttgagttgcatttttctgttacttgcaaccaaagcatcttaacaaataaatatatttcaaggttctaatattaggtgaagaaaaattcatgactcacaat

SEQ ID NO: 406766 - DNA, 578 bp, Homo sapiens
caaggcaggccgtcactgctttttttgagaaagggtgcagattgaccctcgctttctctgacttggaaatgtctgcccttccaaagaatccttaatacacaacgtcagggagaagggggtggcaaattcacccaacggccaagagcctgccagaaaaaagggatttgggactctgttcccttcttttattggagccagaggctctcagagaggcccccggcgggaagggtggccaggccccagagtgtacctctctgcaagagaaggacagagtctggcygggggtggcctgagcagccgtgcagcctcgggttcttaaacagggtgtggcagaggctcaggccctgtgagcagccaggcattcaaagagctgtcggcttagagcctcccggaaacacctgcctctggggttcttgaacaacttgcgcggccgggaagcttgtacgcccaagatgcaggatgcctgttaatcggagcaagcgggaggacgaaaggaaaccatgtggcaggagatgggcccctctgtgtgcgcagctggactcggccctttgctcggatcctagcactcatgacagctg

SEQ ID NO: 406767 - DNA, 552 bp, Homo sapiens
cctgtaacacacaacagatgcttcataactacgtggactcaccaaatgccatgtgtccccatgaagaatgggtgcccaagaaggttttagggacattctaaaaagggtccctatggcctccttacttttaggtgcccttagggaaatccacctcctcagaatctgccatccaagaaatatctttctgtcttgaaataatagaattgctctctctgcatctacagatttattcttggacatcattttccaagttaggattggcaagacaagcacttcagaaggtgtttacaggacttaccactatgtgaactaggttataaattctaggactaataaagcagattgttactgcataaggatgctgatcatagattaacacacaacakagacaatcttttttctccacaaaaatataattcttaattaaagtctcaaatacaactatttaatcaaccactgattactcatattgtatacatatataaaggatatgacagagtagaattttaataaaagtaaataactaattataaaataaggatcttatttaat

SEQ ID NO: 406768 - DNA, 561 bp, Homo sapiens
gaatgtacaggatatataaggaaagaatataaaggcataacaaaaaatttactatgcttttatagaggatgtctcaatattgtgaagacagtatctcaaaaatggtttgtaaattttatataagtccagtaagatctccatgagactttttttttctttttggagattggctgattattttaaaattcgttttgaaaaatacatatgtgaaaatagctaagcaacctttragaaagtatagagggtgacctttctcagtatttaaaaatattatactgttgcaggactaaacacatcaataaaacagtagaacaggtggtttcaaagtgccagttcattgatttggcatatcaaaaactccaggaggagctttttaactgtacaggttctggggtcccactcctgattccatagtttttggcaggtcctaggatttgtataggtccacatgattcccattatgatgtgcagctgtatttgagagcctgtaatctaagatgccttttgcaacaagaacaagaaacaaaaggacacatgaactgttagttgagctgacaggat

SEQ ID NO: 406769 - DNA, 631 bp, Homo sapiens
tggtcatgtctctgtccttatcttactgggcctcttggcagcatgcgctgaaactggccattcatttgaagcaccttcctttctggcttctgtggccccacagtctatagttttcccatctacagctactcaacctacagactccagcacccatttgttttcctctgggtccctcttcacttctgtgcacttgcattacctggatgatcttctctaggcccatagttttaaacattatctaaatgctaatgatyctcagatttatatctcctatttaagagtctctcctgaattccatactcatttatactactgcctactagaaattgccacttgaattcctcataagcatttcaaacttaacaagacaaaaatgaaactagattttttacctaaatattctcctgctaatctttctggcccatctcagtactcagtaaatggtacttaacacagtatattaagccagtatctaggaataccccttaatttatctttttatgctccctccaatctcaactaattcattaattcatttctacctccaaaatatatctgtgacagtccacttttctctatttctgccttatccagaaaccttatactaacacctattatatgtaccaccacc

SEQ ID NO: 406770 - DNA, 558 bp, Homo sapiens
gtgaatgatgtgttaatttcattgtgataagcattacacaatgtatatgtatatcaaaccatcacattttatactttaaatatatataatctttgtcaattaaaaaaaatttttttgagacatgggctcactctgttgcccaggctggagtgcagtggcatgaaaagagctcacagcagctttgacctcctgggttcaaggaatcctcctgcctctcaagactataggtgcatgccaccacacctggcatatatatatataaaatagagactggatctckctatgttgcccagcccaggctggtgttgaactcctgggctcaagcaaccctcccaccttggcgtcccaaagtgctgggattacaggggtgagtcaccgcatctggccatggggccggacagccaccgagtattcagagggccaccaagacatctgtgctgagctaatttagcaaaacgagtgagagccaagggtgaccatgagactctgtgtggcctcactcccactgtgaagaatccttggggagtcttgaaattccacagacttacagcagcatag

SEQ ID NO: 406771 - DNA, 626 bp, Homo sapiens
aaaagtcattgagagcttttatgaaagaaaaaggcaagccacagactaggagcaaaatatttataaaatatagatccaacaaagggcttgtatttggattatgtagagaatccttaccagtcaacaataagaagacaaggaacccaataaaaaatgggtaaaagatttgagcagatgtttcatgtttgccaataaaagtgtgcatttagcaaaaatagcaayataaaaagatgcttaacatcattaagtatagagaaattcaaattaaaaatacagtaaaatacaacaacacacccataaaagtggctacatttagactgacaatactaaacgttgatgagaatgtggagcaacaagaactttcatacataaagggtagaaataggaaaccactttgcagttccttgttaggttagacatacacttgctatgtatgtttaacttactatgtactcttactatatatccccatgatttaactcccaggtaaaacacaaagactcgtgtgaaaggcagctttattcataacgccctcaaattggaaagaacccacatgtccatcagaaagtgactggataaatacatcataatacattcatacaatggaatactatttggcaatgaaa

SEQ ID NO: 406772 - DNA, 626 bp, Homo sapiens
aaaagtcattgagagcttttatgaaagaaaaaggcaagccacagactaggagcaaaatatttataaaatatagatccaacaaagggcttgtatttggattatgtagagaatccttaccagtcaacaataagaagacaaggaacccaataaaaaatgggtaaaagatttgagcagatgtttcatgtttgccaataaaagtgtgcatttagcaaaaatagcaatataaaaagatgcttaacatcattaagtatagagaaattcaaattaaaaatacagtaaaatacaacaacacacccataaaagtggctacatttagactgacaatactaaacgttgrtgagaatgtggagcaacaagaactttcatacataaagggtagaaataggaaaccactttgcagttccttgttaggttagacatacacttgctatgtatgtttaacttactatgtactcttactatatatccccatgatttaactcccaggtaaaacacaaagactcgtgtgaaaggcagctttattcataacgccctcaaattggaaagaacccacatgtccatcagaaagtgactggataaatacatcataatacattcatacaatggaatactatttggcaatgaaa

SEQ ID NO: 406773 - DNA, 599 bp, Homo sapiens
ccttgcacttttatgttatgaagacagcttctgtacttaaaccttatgaaccaacctctgctggcttaaaatctttcttctgcagctccctcacctttcttagccttcatagaattgaagagtttgggscttgctctggattaggctttgagggaatgttgtggctgatttgatcttctatccaaaccactaaaactttctccatatgggcaataaggttatttcactttcagtgaaccattcacgtgttcacttgtatagcatttttaacttccttcataaacttttcctttgtattcacaatttggctatctctttggcacaagaggcctcgctctcagcctatctcagcttttgacttgctgtcctcactgggcctaatcatttctagcttttgatttaaagtgagagatgtacaactcttcctttcctttcacttgaacacttagaggccactgtagggttattaactggcctaatttcaatattgctgtgtctcagggaatagggaggcctgaggagatagagaggcacagaggaatggctggttggtgcagtctgaaactctgaactgggtattggcaaggacaggtagctct

SEQ ID NO: 406774 - DNA, 599 bp, Homo sapiens
ccttgcacttttatgttatgaagacagcttctgtacttaaaccttatgaaccaacctctgctggcttaaaatctttcttctgcagctccctcacctttcttagccttcatagaattgaagagtttgggccttgctctggattaggctttgagggaatgttgtggctgatttgatcttctatccaaaccactaaaactttctccatatgggcaataaggttatttcactttcagtgaamcattcacgtgttcacttgtatagcatttttaacttccttcataaacttttcctttgtattcacaatttggctatctctttggcacaagaggcctcgctctcagcctatctcagcttttgacttgctgtcctcactgggcctaatcatttctagcttttgatttaaagtgagagatgtacaactcttcctttcctttcacttgaacacttagaggccactgtagggttattaactggcctaatttcaatattgctgtgtctcagggaatagggaggcctgaggagatagagaggcacagaggaatggctggttggtgcagtctgaaactctgaactgggtattggcaaggacaggtagctct

SEQ ID NO: 406775 - DNA, 630 bp, Homo sapiens
ctcttgtgattgtttcctatgcagtgcagaagtttttatttggtgtaatcccatttctttatttttgcttttgttgtgcatgtcttttgatgtcttttctaaaaagtccttgcccagaccaatgacatataacatttcacctgttttcttctactagtttcatagtttggggtcttagatttaaatatttaatttattttgagttgattgttgtgtatgatgagagatagtggtctactttcattcttctatatgtggatatgcacttttcccagcaccatttgttgaaaatactgtcttttccccattgaatgtttgcacctttgtcaaaaataagttgcatgtaaatatgtggatttatgcctgggctccctatttttgttccactggtctacatgcctgtttttatgccaataccatgctgttttagttaggatagctttgtaatatattttgaaattagatagtgtaaatcctctagcattgctctttttgattaagatttatttggctatttgggktgttttgtagtttcacatggattttaagatttttttaatatccgtgaagaatgaaattggaaatttgatagatattatattggatttatagattgatttgagtagtatg

SEQ ID NO: 406776 - DNA, 445 bp, Homo sapiens
ttgctataactgctggttttgaatgtttgcatctatgtttatcaatgatattggcctggagttttcttttatttgctgttcttgtctcattttggaatyaggaaatgctgtcttcatagaatgagtttggaagagttccctccttttcatttttttgaaatagtttgtaaaaaatttgtataagttctttaaatgttttgtagaatttgtcagcgaaaaccaccaagtcatgaacttttctttcttcctctatttttttagagacagggtctcactctatcactgaagctggcatacagtggtgcagtcatagctgactgcagcctcaaactcctggtcttaagtgatcctcctgcctcagcctcctgagtacaaatacacaccactatacctggataatttttatttttatttttagagatggagtctcattgtgttgcccagg

SEQ ID NO: 406777 - DNA, 445 bp, Homo sapiens
ttgctataactgctggttttgaatgtttgcatctatgtttatcaatgatattggcctggagttttcttttatttgctgttcttgtctcattttggaattaggaaatgctgtcttcatagaatgagtttggaagagttccctccttttcatttttttgaaatagtttgtaaawaatttgtataagttctttaaatgttttgtagaatttgtcagcgaaaaccaccaagtcatgaacttttctttcttcctctatttttttagagacagggtctcactctatcactgaagctggcatacagtggtgcagtcatagctgactgcagcctcaaactcctggtcttaagtgatcctcctgcctcagcctcctgagtacaaatacacaccactatacctggataatttttatttttatttttagagatggagtctcattgtgttgcccagg

SEQ ID NO: 406778 - DNA, 445 bp, Homo sapiens
ttgctataactgctggttttgaatgtttgcatctatgtttatcaatgatattggcctggagttttcttttatttgctgttcttgtctcattttggaattaggaaatgctgtcttcatagaatgagtttggaagagttccctccttttcatttttttgaaatagtttgtaaaaaatttgtataagttctttaaatgttttgtagaatttgtcagcgaaaaccaccaagtcrtgaacttttctttcttcctctatttttttagagacagggtctcactctatcactgaagctggcatacagtggtgcagtcatagctgactgcagcctcaaactcctggtcttaagtgatcctcctgcctcagcctcctgagtacaaatacacaccactatacctggataatttttatttttatttttagagatggagtctcattgtgttgcccagg

SEQ ID NO: 406779 - DNA, 609 bp, Homo sapiens
actcactcatgtattcagggttcattagttcttgtaaaggtaatttcatatgtggatagttgttcatatagatgtgtccgtaggcatatgattattggagaggtcgactccactaccttgctctgcccaaatccttcctctttccaacaagagtttgccacctcctatttttcttttttcttaaccaaactaagtttagccttttaatccttcaccctcctccacttctaatgccattgcttctttgtatgtttattgtattttccatgctatatgactttcagctggttatttacagtatgtaaattttaatatcctgtaaaagagggatagtaatagcatccatttgatagggatgtwaaagatattaaatgacactgtccatgttaaataactttttgagatatattgagatgtttctgtacttccttgttctggccctcttgttgaaccagaggaatctattgacatgaaaagcaataaaactgtgatagtagaaattaaaagtgaggaggaacttatttaaaaatcatcattctccttttcaatgcaaaaataagaactagaaacttttttaaaaacatttttaagttaaatttactttttatt

SEQ ID NO: 406780 - DNA, 609 bp, Homo sapiens
actcactcatgtattcagggttcattagttcttgtaaaggtaatttcatatgtggatagttgttcatatagatgtgtccgtaggcatatgattattggagaggtcgactccactaccttgctctgcccaaatccttcctctttccaacaagagtttgccacctcctatttttcttttttcttaaccaaactaagtttagccttttaatccttcaccctcctccacttctaatgccattgcttctttgtatgtttattgtattttccatgctatatgactttcagctggttatttacagtatgtaaattttaatatcctgtaaaagagggatagtaatagcatccatttgatagggatgttaaagatattaaatgacactgtccatgttaaataactttttgagatatattgagatgtttctgtacttccttgttctggccctcttgttgaaccagaggaatctattgmcatgaaaagcaataaaactgtgatagtagaaattaaaagtgaggaggaacttatttaaaaatcatcattctccttttcaatgcaaaaataagaactagaaacttttttaaaaacatttttaagttaaatttactttttatt

SEQ ID NO: 406781 - DNA, 505 bp, Homo sapiens
agtgggagccaaagtattgcatgagtttcgttgggaacaaggtgtaggctgagaatctaagcaaacttcagttggtggttttcagttggtgggcagtggcagaaggaggaggagctccrtctgtgctctctcttcccccagtcacagccctcaggcttgttgcatccaggcccttctaagttaaaccagacaggttgacaggtttatttagcatttagcagacaagtcagctcagggtaggtgggtgaggtggggtgtgggctgctagtatagtgccacactttgacccagggctgcctgtacccatggggctattccatatattttatatatatatgcttgttggtttattaaaaccataaaaaacatagattctaagttgctctatcaacgtgatcattagaaaaatgtgatgtacttagtgtgtaaattttagagtatttcttctgttagtcttgttaatactcaattcttttctaaaacacctagcccaaatctccatagg

SEQ ID NO: 406782 - DNA, 505 bp, Homo sapiens
agtgggagccaaagtattgcatgagtttcgttgggaacaaggtgtaggctgagaatctaagcaaacttcagttggtggttttcagttggtgggcagtggcagaaggaggaggagctccgtctgtgctctctcttcccccagtcacagccctcaggcttgttgcatccaggcccttctaagttaaaccagacaggttgacaggtttatttakcatttagcagacaagtcagctcagggtaggtgggtgaggtggggtgtgggctgctagtatagtgccacactttgacccagggctgcctgtacccatggggctattccatatattttatatatatatgcttgttggtttattaaaaccataaaaaacatagattctaagttgctctatcaacgtgatcattagaaaaatgtgatgtacttagtgtgtaaattttagagtatttcttctgttagtcttgttaatactcaattcttttctaaaacacctagcccaaatctccatagg

SEQ ID NO: 406783 - DNA, 505 bp, Homo sapiens
agtgggagccaaagtattgcatgagtttcgttgggaacaaggtgtaggctgagaatctaagcaaacttcagttggtggttttcagttggtgggcagtggcagaaggaggaggagctccgtctgtgctctctcttcccccagtcacagccctcaggcttgttgcatccaggcccttctaagttaaaccagacaggttgacaggtttatttagcatttagcagacaagtcagctcagggtaggygggtgaggtggggtgtgggctgctagtatagtgccacactttgacccagggctgcctgtacccatggggctattccatatattttatatatatatgcttgttggtttattaaaaccataaaaaacatagattctaagttgctctatcaacgtgatcattagaaaaatgtgatgtacttagtgtgtaaattttagagtatttcttctgttagtcttgttaatactcaattcttttctaaaacacctagcccaaatctccatagg

SEQ ID NO: 406784 - DNA, 505 bp, Homo sapiens
agtgggagccaaagtattgcatgagtttcgttgggaacaaggtgtaggctgagaatctaagcaaacttcagttggtggttttcagttggtgggcagtggcagaaggaggaggagctccgtctgtgctctctcttcccccagtcacagccctcaggcttgttgcatccaggcccttctaagttaaaccagacaggttgacaggtttatttagcatttagcagacaagtcagctcagggtaggtgggtgaggtggggtgtgggctgctagtayagtgccacactttgacccagggctgcctgtacccatggggctattccatatattttatatatatatgcttgttggtttattaaaaccataaaaaacatagattctaagttgctctatcaacgtgatcattagaaaaatgtgatgtacttagtgtgtaaattttagagtatttcttctgttagtcttgttaatactcaattcttttctaaaacacctagcccaaatctccatagg

SEQ ID NO: 406785 - DNA, 572 bp, Homo sapiens
tccagaccagcctgggtaacatagcaagaccccatctctgaaaaaaaattaaaattagccagacatggtgttgtacgcctgtagtccaagctactcaggaggctgaggtaggaggatcgctgatgcccaggagttcaaggctgcagtgagctatgatcttaccactggactttaccctggatgacagagtgagacccrgtttcaaaaataaaaaaaagagaactaccacataatccaataatttcacttctggatatatgtccagttaaattgacataagagtcttagagaggtgactgtcatcccctgttcattgcagcatgacacacaatgaccaaaatatgaaaataacctaaatgtcctttgacagaggaacagatgaatgggtaaagaaaatgtagcgtgtatacttaaaatgaaatattatacaaccttgaaaaagaaggaaatccttctatttgtgaaaacatggatggagctggaagatattgcgccaagcaaaaatgcaagacatagagacaaatacttcatgatctcacttacatgtggaatctacaacagtcaaattcata

SEQ ID NO: 406786 - DNA, 572 bp, Homo sapiens
tccagaccagcctgggtaacatagcaagaccccatctctgaaaaaaaattaaaattagccagacatggtgttgtacgcctgtagtccaagctactcaggaggctgaggtaggaggatcgctgatgcccaggagttcaaggctgcagtgagctatgatcttaccactggactttaccctggatgacagagtgagacccggtttcaaaaataaaaaaaagagaactaccacataatccaataatttcacttctggatatatgtccagtkaaattgacataagagtcttagagaggtgactgtcatcccctgttcattgcagcatgacacacaatgaccaaaatatgaaaataacctaaatgtcctttgacagaggaacagatgaatgggtaaagaaaatgtagcgtgtatacttaaaatgaaatattatacaaccttgaaaaagaaggaaatccttctatttgtgaaaacatggatggagctggaagatattgcgccaagcaaaaatgcaagacatagagacaaatacttcatgatctcacttacatgtggaatctacaacagtcaaattcata

SEQ ID NO: 406787 - DNA, 572 bp, Homo sapiens
tccagaccagcctgggtaacatagcaagaccccatctctgaaaaaaaattaaaattagccagacatggtgttgtacgcctgtagtccaagctactcaggaggctgaggtaggaggatcgctgatgcccaggagttcaaggctgcagtgagctatgatcttaccactggactttaccctggatgacagagtgagacccggtttcaaaaataaaaaaaagagaactaccacataatccaataatttcacttctggatatatgtccagttaaattgacataagagtcttagagagrtgactgtcatcccctgttcattgcagcatgacacacaatgaccaaaatatgaaaataacctaaatgtcctttgacagaggaacagatgaatgggtaaagaaaatgtagcgtgtatacttaaaatgaaatattatacaaccttgaaaaagaaggaaatccttctatttgtgaaaacatggatggagctggaagatattgcgccaagcaaaaatgcaagacatagagacaaatacttcatgatctcacttacatgtggaatctacaacagtcaaattcata

SEQ ID NO: 406788 - DNA, 537 bp, Homo sapiens
gaacaatgctacgatggtctgaatgtttgtcccacacgtagggtccagaacaccccagctgtggtctgaatgactgtccctgacatgcrattcccaaacaccgccgctgggttctgagtgtttctcacttagataggattccagaacactgatatgagggtatcaatgactgaacctcacataggattccagaacactcctgcaattgtctgagtgtttgtccctcacataggattgctgaacactcctgctgtggtctaaatgtttgttcctaacctaaaattttagaacactcctgctgtcatctgaatgtttgtccctcacataagattccacaagaatgctacgagtgtctgaatgtttatcccacacttaggatttcagagcaccccagtattggtctgaaagattgtctctctcataggattccagaacactgctggtgggttctgagtgtttctccctcacattggattccagaacactgctacgaggttctgaatgattgtacctcacctaggattccagaaaactgct

SEQ ID NO: 406789 - DNA, 537 bp, Homo sapiens
gaacaatgctacgatggtctgaatgtttgtcccacacgtagggtccagaacaccccagctgtggtctgaatgactgtccctgacatgcgattcccaaacacygccgctgggttctgagtgtttctcacttagataggattccagaacactgatatgagggtatcaatgactgaacctcacataggattccagaacactcctgcaattgtctgagtgtttgtccctcacataggattgctgaacactcctgctgtggtctaaatgtttgttcctaacctaaaattttagaacactcctgctgtcatctgaatgtttgtccctcacataagattccacaagaatgctacgagtgtctgaatgtttatcccacacttaggatttcagagcaccccagtattggtctgaaagattgtctctctcataggattccagaacactgctggtgggttctgagtgtttctccctcacattggattccagaacactgctacgaggttctgaatgattgtacctcacctaggattccagaaaactgct

SEQ ID NO: 406790 - DNA, 537 bp, Homo sapiens
gaacaatgctacgatggtctgaatgtttgtcccacacgtagggtccagaacaccccagctgtggtctgaatgactgtccctgacatgcgattcccaaacaccgccgctgggttctgagtgtttctcacttagataggattccagaacactgatatgagggtatcaatgactgaacctcacataggattccagaacactcctgcaattgtctgagtgtttgtccctcacataggattgctgaacactcctgctgtggtctaaatgtttgttcctaacctamaattttagaacactcctgctgtcatctgaatgtttgtccctcacataagattccacaagaatgctacgagtgtctgaatgtttatcccacacttaggatttcagagcaccccagtattggtctgaaagattgtctctctcataggattccagaacactgctggtgggttctgagtgtttctccctcacattggattccagaacactgctacgaggttctgaatgattgtacctcacctaggattccagaaaactgct

SEQ ID NO: 406791 - DNA, 537 bp, Homo sapiens
gaacaatgctacgatggtctgaatgtttgtcccacacgtagggtccagaacaccccagctgtggtctgaatgactgtccctgacatgcgattcccaaacaccgccgctgggttctgagtgtttctcacttagataggattccagaacactgatatgagggtatcaatgactgaacctcacataggattccagaacactcctgcaattgtctgagtgtttgtccctcacataggattgctgaacactcctgctgtggtctaaatgtttgttcctaacctaaaattttagaacactcctgctgtcatctgaatgtttgtccctcacataagattccacaagaatgctacgagtgtctgaatgtttatcccacacttaggatttcagagcaccccagtattggtctgaaagattgtcyctctcataggattccagaacactgctggtgggttctgagtgtttctccctcacattggattccagaacactgctacgaggttctgaatgattgtacctcacctaggattccagaaaactgct

SEQ ID NO: 406792 - DNA, 582 bp, Homo sapiens
gtctgaatgatggtgcctcacataggattccagaacactgctgctgggttctgaatgtttgtccctcacaaaggattgcaggacaatgctgctggggactgaatgtttgccccaatataggattccacaactctactgctctggtctaaatgtatgtccgtcacatcagattccagaacaatactgctggtttctcagtgtttctccatcacatagaattccagatcaccgcgaggagtctctgaatgtttgtccataacattggattccagaacactgctgctgggttccgaatgtttgtccctcaccgaggattccagaacactgctacgattgtctgaatgtttgtctctcatataagattccagamcactcctaagagggtctgaatgtgtgtccctcacatagatttccaggacactactactattgtctgaatatttgtcccacacttaggattccagaacactgctacgagggtctgaatgattgtatctcatacagaattccagaacactgctacgaggatctgaatgattgtccctcacataggattcgagaacactgtgacgaggtgctgaa

SEQ ID NO: 406793 - DNA, 503 bp, Homo sapiens
gtagaccccagtagcagtgttctggaatcctgtgtgagggacaaacactgagaccccagcagcagtgttttggaatcctatgtgtgtgacaaatattcagacccttgtagcagtgttccagaatcctatgtgagggacaaacactgacaatctagaaacagtgttctgcaaycctataagagggacagacattcagaccacaacaggagtgttctggaatcctatgtgagggacaaacattcagaccctcgtatcactgttctggatcctaagtgagggacaaactttcagacaatcgtagcagtgttctagagtcctaagagaggaacgaacattcagaccctcgtatcactgttctggatcctaagtgagggacaaacattcagaccacagcagagtgttttggaatccacagtgagagacaaactttcagaccctcgttgcagtgttctggaatcctatggagtgacaaacattcagacaatcatagcagtgttctggaa

SEQ ID NO: 406794 - DNA, 487 bp, Homo sapiens
actacagcgagagtgttccggaatactactttatggagaaacattcaggctctcgtcgcagtgttctggaattctatgtgagggagatacattcagaacccagcagcagtgatctggaatcctatgtgacagccatacatgtagaccccagtagcagtgttctggaatcctgtgtgagggacaaacactgagaccccagcagcagtgttttggaatcctatgtgtgtgacaaatattcagacccttgtagcagtgttccagaatcctatgtgagggacaaacactgacaatctagaaacagtgttctgcaaccctataagagggacagacattcagaccacaacaggagtgttctggaatcctatgtgagggacaaacattcagaccctcgtatcacygttctggatcctaagtgagggacaaactttcagacaatcgtagcagtgttctagagtcctaagagaggaacgaacattcagaccctcgt

SEQ ID NO: 406795 - DNA, 460 bp, Homo sapiens
ttctggaatcctatgtgatttgcaatcattcagaccctcatagcagtgctctggaattctgtgtgagggacaagcattcagaccctcttagaagttttctggaatcctatgtgagggacaaacattcagacccctgcagcagtgttctggcatcgatgtaagggacaatcattcagacccacacagcactgttctggaattctgcttcagggccaacattcagaccacaaaaggagtgttctggaatcacctgtgaggaacaaactttcagaaccccgtagcagkgttctggaatcctatgtgtcagacaaacatttaaaccccagcaacagtgttctggaatcttatgtgagggagaaatattcagacaatcgtagcagtgttctggaatcctgtgtaagggacaaactttctgatccaagcagcagtgttctggaatcctatgtgagggacaaacatt

SEQ ID NO: 406796 - DNA, 606 bp, Homo sapiens
cagtgttttggaatcctatgtgagggacaaacattcagaagccagcacaagtgttctggaatcttctgtgagggaaaaacattcaatcaacagcgggagtgttctggaatcctatgttatggacaaacattcagatgctcatcgcagtgttctgaaattgtatgtgagggaggaacactgagaacccagcagcagttttctggaatccyatatgatggatgtacttgtagaccccagcagcagtgttctagaatcctatgtgagggacaaacattcagaccttcgtcgaattgttctggaatcctataagagggacaaacactcagaaaccagcagcagcattcaggaaccctatgtgagggacaaacattcagacaacagcaggattgttctggactcctatgtgagtaacatacactcagaaaacagcaggagtgttttggaatcctatgtaagggacaaacattcagatcctcacagcagtgtcctggatttctgcgtgagggacaaacattcagacccccatagcagtgttctggaatcctatgttagagagaaacattcagaccacagcaggagtgttctggaatctcctgtgaggaacaa

SEQ ID NO: 406797 - DNA, 606 bp, Homo sapiens
cagtgttttggaatcctatgtgagggacaaacattcagaagccagcacaagtgttctggaatcttctgtgagggaaaaacattcaatcaacagcgggagtgttctggaatcctatgttatggacaaacattcagatgctcatcgcagtgttctgaaattgtatgtgagggaggaacactgagaacccagcagcagttttctggaatcctatatgatggatgtacttgtagaccccagcagcagtgttctagaatcctatgtgagggacaaacattcagaccttcgtcgaattgttctggaatcctataagagggacaaacactcagaaaccagcagcagcattcaggaaccctatgtgagggacaaacattcagacaacagcaggattgttctggactcctatgtgagtaacatacactcagaaaacagcaggastgttttggaatcctatgtaagggacaaacattcagatcctcacagcagtgtcctggatttctgcgtgagggacaaacattcagacccccatagcagtgttctggaatcctatgttagagagaaacattcagaccacagcaggagtgttctggaatctcctgtgaggaacaa

SEQ ID NO: 406798 - DNA, 606 bp, Homo sapiens
cagtgttttggaatcctatgtgagggacaaacattcagaagccagcacaagtgttctggaatcttctgtgagggaaaaacattcaatcaacagcgggagtgttctggaatcctatgttatggacaaacattcagatgctcatcgcagtgttctgaaattgtatgtgagggaggaacactgagaacccagcagcagttttctggaatcctatatgatggatgtacttgtagaccccagcagcagtgttctagaatcctatgtgagggacaaacattcagaccttcgtcgaattgttctggaatcctataagagggacaaacactcagaaaccagcagcagcattcaggaaccctatgtgagggacaaacattcagacaacagcaggattgttctggactcctatgtgagtaacatacactcagaaaacagcaggagtgytttggaatcctatgtaagggacaaacattcagatcctcacagcagtgtcctggatttctgcgtgagggacaaacattcagacccccatagcagtgttctggaatcctatgttagagagaaacattcagaccacagcaggagtgttctggaatctcctgtgaggaacaa

SEQ ID NO: 406799 - DNA, 606 bp, Homo sapiens
cagtgttttggaatcctatgtgagggacaaacattcagaagccagcacaagtgttctggaatcttctgtgagggaaaaacattcaatcaacagcgggagtgttctggaatcctatgttatggacaaacattcagatgctcatcgcagtgttctgaaattgtatgtgagggaggaacactgagaacccagcagcagttttctggaatcctatatgatggatgtacttgtagaccccagcagcagtgttctagaatcctatgtgagggacaaacattcagaccttcgtcgaattgttctggaatcctataagagggacaaacactcagaaaccagcagcagcattcaggaaccctatgtgagggacaaacattcagacaacagcaggattgttctggactcctatgtgagtaacatacactcagaaaacagcaggagtgttttggaatcctatgtaagggacaaacattcagatcctcayagcagtgtcctggatttctgcgtgagggacaaacattcagacccccatagcagtgttctggaatcctatgttagagagaaacattcagaccacagcaggagtgttctggaatctcctgtgaggaacaa

SEQ ID NO: 406800 - DNA, 596 bp, Homo sapiens
tctatgtgagggagaaacaagtagaacctatcagctgtgttctggaatcctgtgggggggacatacatgtagacaccagcagcggtgttctggaatcytatgtgagggacaaacattcagaaccgagcagcagtgttctggaactctgtatgagggacaaacattaagaacacggcaggattgttctgcaatcctatgtgagggagaaacactctgaaaaccgtaagtgtgttttggaatcctacatgagggccaaacaatcaaaccctcatagctgtgttccggaatcctatgtgaggggcaaacactcagacaatcgtagcagttttctggaatcctttgtgagggacaagcattcattccctcgtagcggtgttcgggaaccctgtatgagggacaaacattcagaccacaccgttctggaatcccctctgtgggaaaaacattcagaccctcgtggcagtgttctggaatcctatgtgacggacaaagatttagaccacagcagcagtgttctgaaatcctatgtgagggacattcagaccctcttagcagttttctggaatcttatgtgagggacaatcattcagacctca

SEQ ID NO: 406801 - DNA, 531 bp, Homo sapiens
gggttctggaatcctatgtgagggacaaacattcagaagcctgcagcagtgttatggaatcttatgtgagggacaatcattcagactctcgtagcagtgttctggaattctgtgtgagggtaaaacattcagaacctcatagcaattttctgaaatcctatgtgagggacaaacattcagaacacagcaggagtgttctcaaatcctctgtgagggaaaatcattccgaccctcatagcagtgttctggaatcctgtgtgagggacaaacattcagaccccaacaacagtgttctgtaatcctatgtgttggasaatcattcagaaccccatagcagtgctctggaattctgtgtgagggacaagtattcaagctgtcattgcagtgttctggaatcccgtgtgagggacaaacattcagacactggtagcagtgttctggaatccaacgtgagggacaaacattcagacaacagcaggattgttctggaatcctatgtgagggacaagcattcagacaatcgtagcagtg

SEQ ID NO: 406802 - DNA, 531 bp, Homo sapiens
gggttctggaatcctatgtgagggacaaacattcagaagcctgcagcagtgttatggaatcttatgtgagggacaatcattcagactctcgtagcagtgttctggaattctgtgtgagggtaaaacattcagaacctcatagcaattttctgaaatcctatgtgagggacaaacattcagaacacagcaggagtgttctcaaatcctctgtgagggaaaatcattccgaccctcatagcagtgttctggaatcctgtgtgagggacaaacattcagaccccaacaacagtgttctgtaatcctatgtgttggagaatcattcagaaccccatagcagtgctctggaattctgtgtgagggacaartattcaagctgtcattgcagtgttctggaatcccgtgtgagggacaaacattcagacactggtagcagtgttctggaatccaacgtgagggacaaacattcagacaacagcaggattgttctggaatcctatgtgagggacaagcattcagacaatcgtagcagtg

SEQ ID NO: 406803 - DNA, 562 bp, Homo sapiens
tgagtaagtctgcatttggaaaacatgcacacatgagttaatacaatctttattgagcacgtactatgtgttcagaagtctgttacagagcactgttcaggaaatattacatgatgtgagttagtcctcatagcacactggcagctgggtgctaagttttctgtaattttcaggatttaaatgacaggcctagcatttctattttttcttccattttaaaaagtatttacctgaaaaacaaaatgtgcagaataaaagctatgtcracagatgcaagggatagagaaaaaagggtgaactgttcagagagatgttttatatttatatttactttctgtgccttgtgtagcagccactggatttgcaagaatggaaaacaagttgctaggtaggatgtctctagaagcactggcttcaatggaaaagaaattatgttccccaaatatgcaatgattttcttccatttatctgcttttccactttaggaaattgtgggcaccagctcaggaggcagcaggagcccccgcccgaatctctggtctcctttaatcagttctgaggc

SEQ ID NO: 406804 - DNA, 562 bp, Homo sapiens
tgagtaagtctgcatttggaaaacatgcacacatgagttaatacaatctttattgagcacgtactatgtgttcagaagtctgttacagagcactgttcaggaaatattacatgatgtgagttagtcctcatagcacactggcagctgggtgctaagttttctgtaattttcaggatttaaatgacaggcctagcatttctattttttcttccattttaaaaagtatttacctgaaaaacaaaatgtgcagaataaaagctatgtcgacagatgcaagggatagagaaaaaagggtgaactgttcagagagatgttttatatttatatttactttctgtgccttgtgtagcagccactggatttgcaagaatggaaaacaagttgctaggtaggatgyctctagaagcactggcttcaatggaaaagaaattatgttccccaaatatgcaatgattttcttccatttatctgcttttccactttaggaaattgtgggcaccagctcaggaggcagcaggagcccccgcccgaatctctggtctcctttaatcagttctgaggc

SEQ ID NO: 406805 - DNA, 562 bp, Homo sapiens
tgagtaagtctgcatttggaaaacatgcacacatgagttaatacaatctttattgagcacgtactatgtgttcagaagtctgttacagagcactgttcaggaaatattacatgatgtgagttagtcctcatagcacactggcagctgggtgctaagttttctgtaattttcaggatttaaatgacaggcctagcatttctattttttcttccattttaaaaagtatttacctgaaaaacaaaatgtgcagaataaaagctatgtcgacagatgcaagggatagagaaaaaagggtgaactgttcagagagatgttttatatttatatttactttctgtgccttgtgtagcagccactggatttgcaagaatggaaaacaagttgctaggtaggatgtctctagaagcactggcttcaatggaaaagaaattatgktccccaaatatgcaatgattttcttccatttatctgcttttccactttaggaaattgtgggcaccagctcaggaggcagcaggagcccccgcccgaatctctggtctcctttaatcagttctgaggc

SEQ ID NO: 406806 - DNA, 554 bp, Homo sapiens
ggtggtgacatcagaactcagaggaacagcataagggaagtggagcaaatgcagccaatgtcccctgtgcagctcccttctcccatccyaccacaggatgctgaattcagccattaagccgtttgtactagatggaaagtttctggacagtacaaaccatgaattcttcatctgtttttctgatggtcatgtgatgtagtttagatgctcctctaactctcatattgaattttaaactccaatgtggcaggtggggcctgaggaagaggtggttgaatcatggggtgtggccctcatggctctgtgccatccttgtgatagtgagtactcatgagatctggttgtttagaagtatggcccatccctccctcatttttcttgctcctgcttttatcatgtgagatgcctgctcttctttcatcataattgtgagcttcccgaggccttcccagaggccgacgctggtgctatgtttcctgtacagcctgcataaccatgagccaatcaaacccttttcttatacattacccagactcagatttttgaaatagcaa

SEQ ID NO: 406807 - DNA, 554 bp, Homo sapiens
ggtggtgacatcagaactcagaggaacagcataagggaagtggagcaaatgcagccaatgtcccctgtgcagctcccttctcccatcctaccacaggatgctgaattcagccattaagccgtttgtactagatggaaagtttctggacagtacaaaccatgaattcttcatctgtttttctgatggtcatgtgatgtagtttagatgctcctctaactctcatattgaattttaaactccaatgtggcaggtggggcctgaggaagaggtggttgaatcatggggtgtggccctcatggctctgtgccatccttgtgatagtgagtactcatgagatctggttgtttagaagtatggcccatccctccctcatttttcttgctcctgcttttatcatgtgagatgcctgctcttctttcatcataattgtgagcttcccgaggccttcccagaggccgacgctggtgctatgyttcctgtacagcctgcataaccatgagccaatcaaacccttttcttatacattacccagactcagatttttgaaatagcaa

SEQ ID NO: 406808 - DNA, 421 bp, Homo sapiens
agatgggtcttaactaatttcaaacagggtacctgagcatggaagacatactcttaattttttttcctaatacgatatttgacagttatgarggaattagccaagatggctgtataggtacagctctagtctacagctcccagagtgagcgatgcagaagatgggtgatttctgcatttccaactgaggtaccgggttcatctcactggggagtgctggacagtgggtgcaggacagtgggcgcagagcactgtgcatgaaccaaagtagggtgaggcattgcctcacccaggaagtgcaaagggtcagggaattccctttcctagtcaaagaaaagggtgacagacagcgcctggaaaatcaggtcactcccactctaatactgcgcttttccaatgggcttaacaaatggcacaccagg

SEQ ID NO: 406809 - DNA, 345 bp, Homo sapiens
taccagcacagtcaggattaggtttttaaaatacaaaatagcaayatacagccaggcatgggggtgcatgcctgtaatcccagctactcggggagctgtgaaagaggatcacttgagcccaggagttcaaggttatagtgagctatgatcatgccactgcactctagcctgagtgacagagcaaggtcctgtctcaaaaaaagaccgaaacaaaacaaaaggcaacatgtgaaggtacaaagtgatatatggagaacggtctctctcatgatagaccccagccatctattcatgcctgctttccagaggcaatgcctatcataatacttcttaaaaatgtctcta

SEQ ID NO: 406810 - DNA, 345 bp, Homo sapiens
taccagcacagtcaggattaggtttttaaaatacaaaatagcaatatacagccaggcatgggggtgcatgcctgtaawcccagctactcggggagctgtgaaagaggatcacttgagcccaggagttcaaggttatagtgagctatgatcatgccactgcactctagcctgagtgacagagcaaggtcctgtctcaaaaaaagaccgaaacaaaacaaaaggcaacatgtgaaggtacaaagtgatatatggagaacggtctctctcatgatagaccccagccatctattcatgcctgctttccagaggcaatgcctatcataatacttcttaaaaatgtctcta

SEQ ID NO: 406811 - DNA, 345 bp, Homo sapiens
taccagcacagtcaggattaggtttttaaaatacaaaatagcaatatacagccaggcatgggggtgcatgcctgtaatcccagctactcggggagctgkgaaagaggatcacttgagcccaggagttcaaggttatagtgagctatgatcatgccactgcactctagcctgagtgacagagcaaggtcctgtctcaaaaaaagaccgaaacaaaacaaaaggcaacatgtgaaggtacaaagtgatatatggagaacggtctctctcatgatagaccccagccatctattcatgcctgctttccagaggcaatgcctatcataatacttcttaaaaatgtctcta

SEQ ID NO: 406812 - DNA, 545 bp, Homo sapiens
aatttagaaatatgtgatttttgcttcatggccaactataattattagtcctcaagtaagcagcaacacaaatatacctactcaatagcattaagtgggaacaaaaaatatttcctactttaaacaaaatttaaagctagattcagaattaaataatgactctataatatgtaaccaaaaaagcagttatgatttttttaaacgtgttatkgagtcttacaaggcttagatgagtctgcaagtctctgtcatctgcattggtaagagtgaagcagaaaaaagaggaacagccaagagctttccttcaaacatgagtaaacatagtgtgttggttaaaatttttaaataaaatttggtactattcaaatgtctcaagaaagccacagagtcacaccaggccaaccctgcgaacacagtagaaaccaaccagcataaatcacagaaagaaagtacacattaaaaaaaagatcagtgagctgtaaaacaacttttagtagcataacttacatgttactggaatacccaaaggagaataaacagaacaa

SEQ ID NO: 406813 - DNA, 545 bp, Homo sapiens
aatttagaaatatgtgatttttgcttcatggccaactataattattagtcctcaagtaagcagcaacacaaatatacctactcaatagcattaagtgggaacaaaaaatatttcctactttaaacaaaatttaaagctagattcagaattaaataatgactctataatatgtaaccaaaaaagcagttatgatttttttaaacgtgttattgagtcttacaaggcttagatgagtctgcaagtctctgtcatctgcattggtaagagtgaagcagaaaaaagaggaacagccaagagctttccttcaaacatgagtaaacatagtgtgttggttaaaatttttaaataaaatttggtactattcaaatgtctcaagaaagccamagagtcacaccaggccaaccctgcgaacacagtagaaaccaaccagcataaatcacagaaagaaagtacacattaaaaaaaagatcagtgagctgtaaaacaacttttagtagcataacttacatgttactggaatacccaaaggagaataaacagaacaa

SEQ ID NO: 406814 - DNA, 545 bp, Homo sapiens
aatttagaaatatgtgatttttgcttcatggccaactataattattagtcctcaagtaagcagcaacacaaatatacctactcaatagcattaagtgggaacaaaaaatatttcctactttaaacaaaatttaaagctagattcagaattaaataatgactctataatatgtaaccaaaaaagcagttatgatttttttaaacgtgttattgagtcttacaaggcttagatgagtctgcaagtctctgtcatctgcattggtaagagtgaagcagaaaaaagaggaacagccaagagctttccttcaaacatgagtaaacatagtgtgttggttaaaatttttaaataaaatttggtactattcaaatgtctcaagaaagccacagagtcacaccaggccaaccctgcgaacacagtagaaaccaaccagcataaatcacagaaagaaagtacacattaaaaaaaagatcagtgagctgtaraacaacttttagtagcataacttacatgttactggaatacccaaaggagaataaacagaacaa

SEQ ID NO: 406815 - DNA, 566 bp, Homo sapiens
atcaagaatgtatgagcaacaaagcatttgcgatatataacctgccctttggctggagcctcttctccattcccatgagtacttcagttcagaagcttaacatctccagcctgggccactcttcagggcttcctacagtctccaggtacagtccttcaatgcagctttcacagtcacaccagactaattttgcaaatttgaccatattacttgctcagataaagytaaaatccttcactgttttccctctgactttaggaaatgatctaaattcttaaggctttggtagtctgatcccagtctaacttgaactactttttcacttaacactgtgctctattaaaatagttcataactccaacaatttcccccatcccccagacacaccctatcaatatgaagaggtcctttagatatggcttccttgagacagtggtgggtagggggctactgttggccaagaaaactttccctaattgattctgataagcttcctcagaaaaaaggaatatcctctcttcttgtttctcagcatagaacaatggcttcaattacttaaacgcaac

SEQ ID NO: 406816 - DNA, 608 bp, Homo sapiens
tggcctaactccactaatatgctgtggcccgtgttttacttctttgagagcaacttcaaagcaaatctgtcaatgccagtaaatacattaaagaactaactgtgggggagagttagtaaaaattaataaagccttttccttttataccataagaatgtgaccttcacttaattttctctctgttccactggaaatcagatgaagatagaatgtcaacgatgttacagtcagtattgcctacagtaatattatccctgaatgataaattgcaaccaaacaagaaggarttataaatgtcccataaatacctgaagatagaatgtcaactatgttacagtcaatattgcctatggtaatattatccctgattgataaattgcaactaaacaaggaggaattataaatgtcccataaatatctgatgagagtgctataatttgggcttccctgagtgtgttaactcttgtaattgggtatgtctctcatgtgaatcctggaagcctgtggagttgctacaagagatatagtgtcttgtgggacatgagactcttaagtagggcaacccctgaacctgccagatgagaagtaaatgaaataagcaatgaagg

SEQ ID NO: 406817 - DNA, 544 bp, Homo sapiens
aaaaaagttgatatagaaatagtgaatagaacattttatattcttgaatgggaaggttatatatcataaaaatattaatccctcatcaaattaatgtataactaaaatgcagttccaattagaattccaacagggatttatttgtgtttaaacaaaataatctggaaatttatatagaaacatgaaagccatggaatagtcaaccaaatgtgaaaaaaaaagaatagtaaggaagacttaacttaccagaaatcaaaacatgtcacagtcactattatcctagaaagagacaaattatcattaaaatggaataattaatatagaaatagattccagaaattttatatatgacaaagttggtagatcaattctgtaagaaatcatatttagtgatgccgtaatatgttgtactatcttaactgattaacaattgcaataaaataaaaatagacttctgttttagtccrtaaattccagatggaataattaagtaatcgcaacatcaaaacaattggaaattttcaaggaaatctagaagaacgtt

SEQ ID NO: 406818 - DNA, 608 bp, Homo sapiens
ttgcaggtttgcattatgcttgcctaaccagagattataattattctgttagtgaatcaaaaaatattgtaaatgtctaataaataaacttagtggaatgttatagaatgagtatttcttaatataaataaatgcaaaaagatctttggatttttagtggtctttatgtacaaaagtatttcttgcatcttaaattctagaacttctccatattgtttctcaattatattcctctttctcactgtcttttccctctctactataaacatttcaygaacgttaggatgatgttttgtgacatttggattttgggactgcggctcacaggatattgtgcttgtagaatgtggacctatacaaattccagctggtgatagtacacgttgttcttttgcagacaggcctcttcttaggcatgatgcctaagtttaatttccatgtgtaaagtcatacttaaagtatgtaaactgaaacagatgttagtactctgagaaggcatttggtgcatgaagaaacagttccctagcttctttttccactcccactattttggaagcccctttccatagaaaagggcctctggagaatcgtctagtgtctttgacccc

SEQ ID NO: 406819 - DNA, 508 bp, Homo sapiens
aaaaaaaaaaaaaaaaaagagtaaatttataaaaatctataaaatgtcaggctttttctagaattctgtgagcagaatctatcttgtgtcattttgtgagtgtaattttctgttgaaacaaaaacctacggtgattttcagacaagagaagaaagtatatctctaaagaaggataaatgccatggagtgaaaaatttataaatgaaacttcaaataagggaatgaatgggtgcatttttcaggtaaatgactatagtcacaaaaattatacttgtaatcagactgtggacacactacctattccattttgctttgttttcaggctgggtttctgcaaccaaagtcaagaggaccagttgaattaataattcagttcattatatcaaaaaatttgacagactcacaaatatatctggataactcagtataatgtggttaattgatcgtgttcatattaaatgaagtgcctttcatcactatcagcygctgttctacatgagaccaacag

SEQ ID NO: 406820 - DNA, 565 bp, Homo sapiens
atagcactttgtaaaaaaaacctttacaggtatggagtttggatgcttacttggagcaaattgcctaaaaatagtgaaaaacattaaccattttattgaaaatttagtataagcttaaaacaccttctgagatacagccactaacaaatcttcatatgcatgtcctgtttggaatgaacttggccagtacagacagtataagttaatacatgttaaatagatatttgaatgaatattcaacatattcattcatcaactgtttgaatattcaaacaggcaagccaattaggtttctttttccttttagtttataggaagtgatccttccagtttcttcagcacctataaattacatctccatctctctcagtgcttttgtgatgatttctctgtgtgtactttgtctcaacagtgttaagacaagagwttatcttgcatcatcattgctgaatttcccacaccttggaaactctagtaacaaattaatagctgctttttggcattttgtatttgaataacatcatgttcaagaggcttttaatgtataagtcggtcagtttaaaac

SEQ ID NO: 406821 - DNA, 665 bp, Homo sapiens
tttcttttgaggcttctcttcttgactgatagattggtgagttctctttcttattacatgtattccctctgtgtatatctgtgattttatctttttataagaacatcagtcatattaggttagggcccaacttaatggcatcatactaaataaattacctctttaaagacccaaagtccaaataaagttacattttgaggtactgggggttaggacttcaacatagaattttgggggtagacaattcaactcataacatatagctactcacattttgtttcttttcttgtgcgagttttaagttgtatttttcaaggaatttgctcatactatttcagatgtcaaattcattggaataaaattgtttataatacttttaatatctacaagctttgaggtgatgtccctctttcatctgttatattagtaatttatacttactctatttctcctcttgatcagtcctgctagaagtttagcaatttcattaatcttttaaaaaggatggtcttttgactttgttgatttatctattgttagtgcrttttctgtttcattgatttctatttctatctttaaattttcacctttcctactttctttggttctaatttattcttcctttttcaaatttcgaaagagtaagattggataattcaatttaa

SEQ ID NO: 406822 - DNA, 586 bp, Homo sapiens
ggtatagcaatctggggtgtagcagacacacatggatgttcaataaacactatttgatggtgatggtttataagtaattcagacaatggattcctgttgaaaaatattttttgaagcttctttaattagatacaatatcttgtaaatgttttargttatgttgtttatgtttatgtttaggtttaggtttagcttatgttgtttaggtccaggtaaagtagaaaacaaacacgttaactttttattggaacaaactaactcttctcatcagataatagaatcctcagaagtttttaaaagtagcatcacaaaattggtctatattgactagttacaaaattacatactgatgctttcaaagtaaacacttagaaatttacaattgcctttggaaaattactcagcaatatgcattagtaaaaaagctttaagaaaaccagatgcaagaattaaaccatggcagaaaaaaatgagtgttagtggttagattggatctcatatcaaagcaccttgtgttcctgtaattaacagactaatttattcatattataaatatttattcttcacttatcatgtactcagtact

SEQ ID NO: 406823 - DNA, 586 bp, Homo sapiens
ggtatagcaatctggggtgtagcagacacacatggatgttcaataaacactatttgatggtgatggtttataagtaattcagacaatggattcctgttgaaaaatattttttgaagcttctttaattagatacaatatcttgtaaatgttttaggttatgttgtttatgtttatgtttargtttaggtttagcttatgttgtttaggtccaggtaaagtagaaaacaaacacgttaactttttattggaacaaactaactcttctcatcagataatagaatcctcagaagtttttaaaagtagcatcacaaaattggtctatattgactagttacaaaattacatactgatgctttcaaagtaaacacttagaaatttacaattgcctttggaaaattactcagcaatatgcattagtaaaaaagctttaagaaaaccagatgcaagaattaaaccatggcagaaaaaaatgagtgttagtggttagattggatctcatatcaaagcaccttgtgttcctgtaattaacagactaatttattcatattataaatatttattcttcacttatcatgtactcagtact

SEQ ID NO: 406824 - DNA, 586 bp, Homo sapiens
ggtatagcaatctggggtgtagcagacacacatggatgttcaataaacactatttgatggtgatggtttataagtaattcagacaatggattcctgttgaaaaatattttttgaagcttctttaattagatacaatatcttgtaaatgttttaggttatgttgtttatgtttatgtttaggtttaggtttagcttatgttgtttaggtccaggtaaagtagaaaacaaacacgttaactttttattggaacaaactaactcttctcatcagataatagaatcctcagaagtttttaaaagtagcatcacaaaattggtctataytgactagttacaaaattacatactgatgctttcaaagtaaacacttagaaatttacaattgcctttggaaaattactcagcaatatgcattagtaaaaaagctttaagaaaaccagatgcaagaattaaaccatggcagaaaaaaatgagtgttagtggttagattggatctcatatcaaagcaccttgtgttcctgtaattaacagactaatttattcatattataaatatttattcttcacttatcatgtactcagtact

SEQ ID NO: 406825 - DNA, 575 bp, Homo sapiens
ggttagattggatctcatatcaaagcaccttgtgttcctgtaattaacagactaatttattcatrttataaatatttattcttcacttatcatgtactcagtactccagcagtcaccaagaatatatttataaaataaaacagtcctaactttgaggagtagacatctaattagaaacaggcatataaataaattaaaatacaaagtgacaagtaaatcaactggattatatttgacgtacatatgtattacatgaaagggaagtaattaattttctctcatgtgatcaggaaacgatcagaaagacacagaagtactggaacaaaatgaaggtcaatctgtttcttaagacactattaattgacatgttgtttacataatactaaaatagtcaaaaatttaaaactttaagacatagacttttagacaggccccactcatatataagaaagctctaaaaagaatacagtcaataaccacacgaaaaataaaatgtatataattacataaagcaaagtgttgcactatttttcatccctactattccaagccaatatcattccaaggtgtgaagg

SEQ ID NO: 406826 - DNA, 563 bp, Homo sapiens
ctgcctgtgtgttgaactgtagactcaccatcttagcaaccccaatcccctggagctcacccgcacaaatcacaacagcatatgcycagatggtttggtccttccagcaaagatatacatagtcacagcagaacatacctacatggttgatctgacttgaaagtcatgaacagtgtttgtaaatacaaaaagaggtctaataaatctgtcaagatgattgaaatctttaccaaaatgtctttatcaaaagagtaaaggtaaacttgactaggcatactccctaatagagagaaagtccccaaaagaatggcacagaagacaagtgaatatcaatatgaatcatatgaaatatggttgctgctgcctaacaaggcttattagggttgagatggagtaaggaaggaaattaggttatgagataaaggcaacaaatagagaaaagctaggcataaaaagtttggattaagaagatatccaaatataatggctgctgtcaaagatcataggaacatgtggtatggaccatgctcacctatgttccaaagttgttaaaagatattagt

SEQ ID NO: 406827 - DNA, 632 bp, Homo sapiens
gcattataggtaaaacttatttgcaggtgatgaaagcagctatgccaacaatcaaaactattcaaattgaaaggtaaaattgacwagctggtattcaaaattatttgactgaccaaaatataggagcactaaatgtgatcataattttaatgaaataaaaatgtaagcactcacttgttcctgacaaaattttcctctttagcactaattttaggaaagttttttgtttgtttgtttgtttgtttttactctcagagctctggaattctctagaagagtgcacaatatacagaaccaagatattatcgtgctgtttttctaaactctgtatctgaccctgtagaacacctgtgtctgcaaacactgatatgagtggtcccactcagggctgacttcaaactgcattgatctttcaactcactgcaatatctgagaacagagttggcatgtactgacttaagaaataagttaaagtatgacaaggggataaaaaataccaattaagttttctcacctgtagtgtcaacctatataatgctgacttatcctcaaggattccatcgcccattttactaaatttccttctcttgcctcactttagcctttgatttctatgccagccttgaattagc

SEQ ID NO: 406828 - DNA, 543 bp, Homo sapiens
caaaagaacactgtaagataagcctgttgtctatattttataggtgaagaaacaggcccagagagattaagtggttgtccctagtcactgttgttataacttgtgcttttttaaaatcacaatcctatgctgccttgatgttcttttaagaacacagtcctagttgtctttcattcacagcgttgccctctaagctcgaaataagctttaagaagtcatttaggtgactaaaaatagtaaataatgaccagccagtttgactaagtagtttcctgtctatttttccttgccccargtggggcgtttcacggcctttccattttttattttcaaaagtaggcaggaatctgggttctatacaagtttcctacagagtttgatacagtaggcttttgagtatcattgattggtgacctgtattatcctcattttgtaccaatgtactagtgggttgactactacacagaatgttctctaaagtcacacaagggcaaaggtgatatattagaactctttgcgtcctgtggccattagaggtagagc

SEQ ID NO: 406829 - DNA, 555 bp, Homo sapiens
tatgccctcataatgtaaatctgaacaaaatgttaaatcgaatatttatatttttatatcttttttttttttttgagatggagtctcgctctgtcacccaggctgaagtgccatggcacaatctcagctcactgaaacctccagctcccaggttcaagtgattctcctgcctcagcctcctgagtagttgggattacaggtgtgcgccacaaagcctggctaatttttttgtatttttagtagagatggggtttcaccatgttggtcaggctggtctcgagctcctgacctcrtgatccgcccacctcggcctcccaaactgctgggattacaggcatgagtcaccacacccagcctatatttttatttctaaaccaatgtaatttaccaaatagcattacttcataaatatattttgctagctagcttagagatcctatctttgatttgttgaatgaggtacagactatagtttattgattttatggattctgttttctcatcttcacaatggggacaatggctgcttctgtcaggtaatatgatgacagtgtt

SEQ ID NO: 406830 - DNA, 591 bp, Homo sapiens
cacagatctgtcttctctgccagggcttttgtgaaatctggtacctagcagacaatgcctgacacttaatatagctgataaatatttgttaggaaaaagaaggaagaaaggaggaaggaacagagggagggagggaggaaagaaagggaattaggaaaggaagcaagtaaaagagaaaggaggggagaagaagagaggaagaaagaaaaaaaggaaggaaggcaaagaaagaagagggcaagggaagaaggagggaagcaaaaggagaagaaggaagggagggagaggcaggttaagggatggagagaggggtggaaggaaggaagaaagagagaaaacaaagaaaggaatgaagagaaaagtagaaaggtagtaagagaggagatggagagatgaaggcaggaaggaaggaaaaaaggaagggagaaaacggaggaatgaagaaagggggagagaaaggaagggaaaaggaggaagggagaaaggtggagaaaagagagggaaggagggaggaaggaaggaagagacaaaaaaaaggatggaaggaatgaatgcagraaggaatgtaggcagagagggaaaaaggggaga

SEQ ID NO: 406831 - DNA, 617 bp, Homo sapiens
attattgcaaacattatatttactttaaagtttctgtgacacagtgygcctaacagatagtgggaattttatttatgcataaaatgcactgcataatgaagtaattgagtcttcattttccatatggcgttctggacagtttggttttgaatgagttggtaagattcccaagtggttgtcacacatgtggctgagagaaaattaaagggctggctctcctcatagttccttcaggtcaagaggaaagcagctaatattattgactcctcaacccaaaagaagacaaaaagacattccctcaagatacacagtcatattcttcctccctttcctgtgttgctagtttggatttcacagaagcataactaaggcatacctggtcaatttataggcatgcggaaagtaaaacaaaagtactgaaaaagaaattttagcatttgagcaaaagtacatcccagttctttctggaattaagtgctaagttcctgaagaatgaagttgatttatgcttttttttttctaatttaggaatcaatgacctcaaagaagccatttcttaatctttgctcagaattgatgctgggcttcctttgctctgcttttgctcaaacttctcg

SEQ ID NO: 406832 - DNA, 578 bp, Homo sapiens
ggatttaagtaaaagaaaactaaaaagtgaattgtggtctacaaaagtttaaagtcacgactataagataaccttttattgttttgtgctccagacaaagtatttagaactgagttaagtttaaaaaaagtagtaaagtggtttcaaagaatttagaaactgtggtgtctatagattagcaatatgcaggttttacaagttatcctacttatattttttaaccgcaatggctgcagaaaaccgaaactagccctttggcaataaagcagatgctgcagaggtttgggaagaaaattggatgatgccattggctagtcagaagcttatagagggcaatgaaacctcactactctgtctacttcaggagtccattttgtgaaacctcctgaaattgagattatttgaggatctcagcactataaaataaataatttgaggatagtacggacacaggacctcacactgaattcatctgcatagtaaatattatgatagcaaatcccatgcagatmttcatttagactgtgcatcccctggtttcaaagatgaacagccaacttgtgcctcagacatatgat

SEQ ID NO: 406833 - DNA, 650 bp, Homo sapiens
taacaatttcagagaaagtgccagccagcaggtaaaattgtttccaatgcataatgtaaatgggaacacggttttactagaatatttgccaatatgttatattattgagaggcctgagtctatctgccttaagctaactttctttccctaataagagggattcaaagatgagcaggccagccattaactcacttatgccattttttttttttttttttttggtgaaaagtcacaaaaagtttgcaaatttttttttgtgaaaagtcaggccttggtgatgaccttgagcagtaggatacatataactcctacaagcttagcgttccaataatggaacactaggcataaataggttaataagctttggattagtcactggtgttttttgcttgtgccacagctaaattttgctgtaattggggacctacacaagaccttaaagataagcaaatccataattttgagtttatgtttgaaaaactgaggctcaratatattgacctgtacataagaaactgggtgtcaaattagaacatagaatgcttatttcctgatttaggaaatgttttgtgttttttatttgtttatggacccacaaaagcaattgcttttgaaattttaactaattttctccctgtggaaatgtgaga

SEQ ID NO: 406834 - DNA, 616 bp, Homo sapiens
ttctatctcctgaactcttcccttatttcacattgttctccgttgattaatagagctcccctttcccccacttgtatcctgtgatccagtatgggaaaagcttgtgattaataaatgcaaaaactacaattaattttgctatgctaaatgaatcttcaaatagagccaataggagaaatttctgttttggtgacattcccagagaaaattacataccagaaaattataaccgatgataaatagttcttaggtacaaacacatccctgtttgcccaaaggctttcacktgaagagtgagaaagagacgagaaacagaacattaactttccaacaattgggtaaaatttgtcatttctgttcacatattcccattcctagtctttatggggaaaaatatgatttgttaggacaatatgaacattctcaactcatgcaaatgttgtaatagttttcatttcattctttattaacattttaatgtttaacatattacactctatttatgaatagtaaaagcattatttttcaacatcttttatataatgtactcaataaaatcattttaatccctgcctaaatctcagacacagatgaaactatgaagaatgatacagaa

SEQ ID NO: 406835 - DNA, 576 bp, Homo sapiens
tttttatagttcttcctagtagatcaactcagagtatgtcgtaggctgttttaagtccagaagttttatttaatgctgtgattatatattaaactccaaaaagtaccctcttggctttagttaatttccttatagaaaagaacctatttttatttcagctatactgatatcacctagcatgatagtaggtatagcagaactttcttaagccatagaaactggcatcttgaattttccaacttaaacgagatgaaggttaagaatcttcactgtgcctttctatttacaacatttcataattaatcaaatcctatctccttcaaaatgataagttatattgatgccaaaattctttatttatattaaggtcatgatttaaaatgagggctacttcaatgtcaatacatattcagtgagtccataaagtaagcagccttctcaaaaataaraatagcctccaaatcttaaaatataatgataatatgtttaatttactgtatagaaataaaaaactagaagtcattggtcaactacttctagggaaagatctgggcattttctgatcatcaaacacct

SEQ ID NO: 406836 - DNA, 369 bp, Homo sapiens
gcattttgtacattcacaatgtcatgcaaccactagctgtagttccaaaacatttccatcactcctaaataaaactctgtatccattcagcagtttgagtgggcattattaacttcagttttacgggtgaggaagcctactccgagactgtcaaatgttatgcaggtagtaaatgttagagctagaaacagaacccagtttttstaattgcaaattctctaccagaccagaggttctcaaaatttagtgtgcatcagaatcacctggagggcatgttaaaacacaggttgcagggttccaacttcaaagcctctgattcagtaggtctgtgtggggcctgaaaatctatgtttccaagtgataccaatg

SEQ ID NO: 406837 - DNA, 378 bp, Homo sapiens
accattgctgtgttttaaggagatgagtaccataakctaacttatgatttgataagattattctgatgaccataataggaagagaaaaattagaaatagaaagaccaattgatgggtgtatcaccctaaaactcagcgacttaaaactataaacattaattttcactcatgtatctttagtcatcaggatattttctttctctgttctcagttgagcccactcatacatctgtaattgacttcaaggtagctcagttgatcttagccctcctccattttggaagattgattaactgtaggttagacacagatagacttgtatgatctgggctgggatgactgggatctcctctttatgtgccctaattcttgcaggct

SEQ ID NO: 406838 - DNA, 520 bp, Homo sapiens
catgcctctctactggaatttttctgatgcttttctcataattagactcgatttatatgttttgaaaggaacactatagaggtaaagtattattttaatcatatatcaagaacgatattgtctgtcaacaaaatttgtcacttttttgtttcttttttttttttttttttttttttttgagacagtctcactccatcaccctagctggagtgcagtggcataatctctgctcactgtaacctccacctcctargcttaagtggttctccattcttgtgcctcggtctcctgagtacctggaattacaggcgtggcccacacacctggctaattttttatatttttagtagagatagggtttcaccatgttggccaggctagactcgaactcctgatctcaagtgatctgcccgcttcagcctcccaaagtgctgggattacagtcatgagccactgcatccggcctgtcactgttgaagctaaccttaatcacctggttaaggtagcatttgtcagattt

SEQ ID NO: 406839 - DNA, 545 bp, Homo sapiens
attcatacagaagtagtaaccccaagcaaacaattggacagaaaggaaatgacatagcaatggggttgtgtaaacttgacagtcttatagtgagaaggtaagaagattattagttgttaaattgctgggaatattatttttttcatttttccaaaaatcagaatagcagagaaacagtttgtgagaagacagcatgtctatatggcagacttcttttccctaaactagagattacattagaattatgaacattgatctgttcttttgttgttgatctgagaaggttgcctttcaactaagtcaaaacaggatttagtacattccaggtatcatcytaagctctttatataaattaactcatttaatttttctagaaaatgtatgaaggaggtactgttataacctaaactttacaaatgaggaaaatggaacatagaaaagtcaagttcacagtgttagtatatgataaaattgggatttgaacccaggcagtctggctccagtgtctgaactcccaattatcattcagtagagaaagacagcag

SEQ ID NO: 406840 - DNA, 545 bp, Homo sapiens
attcatacagaagtagtaaccccaagcaaacaattggacagaaaggaaatgacatagcaatggggttgtgtaaacttgacagtcttatagtgagaaggtaagaagattattagttgttaaattgctgggaatattatttttttcatttttccaaaaatcagaatagcagagaaacagtttgtgagaagacagcatgtctatatggcagacttcttttccctaaactagagattacattagaattatgaacattgatctgttcttttgttgttgatctgagaaggttgcctttcaactaagtcaaaacaggatttagtacattccaggtatcatcctaagctctttatataaattaactcatttaatttttctagaaaatgtatgaaggaggtactgttataacctaaactttacaaatgaggaaaatggaacatagaaaagtcaagttcacagtgttagtatatgataaaattgggatttgaacccaggcagtctggctccagtgtytgaactcccaattatcattcagtagagaaagacagcag

SEQ ID NO: 406841 - DNA, 543 bp, Homo sapiens
gtcagtaatggaatttagataaggcagcctgtagagcatttcataagggaacaggccaagatattttcaaggggcagttcggattcttagtaaggcaatgggaaagcatttagtccagggtaaccgggtttcaaagattaatttggttaggtgattttttagagtttgattcattctttataccttccctggtgagggyggatgccacggagtatgatattcccattttattcctagtgcttgggttagccccttaatgatgtgtgcagtgaagtgggtcccattgtccgaatcaacgttctctattagtccaaacctgggtatgatatgttccaacagtgctttgactacgttactggccgttgcacttgggaaggggatggcttctacccagtgggtgagatagtctactattactagtaaatacgtgaggtggcctattgggggcatttcagtgtaatcaacttagacgctttggaacagcctcaaccctgggtttcttcccccaagagattgcttctttagggtttgcttattagtttt

SEQ ID NO: 406842 - DNA, 543 bp, Homo sapiens
gtcagtaatggaatttagataaggcagcctgtagagcatttcataagggaacaggccaagatattttcaaggggcagttcggattcttagtaaggcaatgggaaagcatttagtccagggtaaccgggtttcaaagattaatttggttaggtgattttttagagtttgattcattctttataccttccctggtgagggtggatgccacggagtatgatattcccattttattcctagtgcttgggttagccccttaatgatgtgtgcagtgaagtgggtcccattgtccgaatcaaygttctctattagtccaaacctgggtatgatatgttccaacagtgctttgactacgttactggccgttgcacttgggaaggggatggcttctacccagtgggtgagatagtctactattactagtaaatacgtgaggtggcctattgggggcatttcagtgtaatcaacttagacgctttggaacagcctcaaccctgggtttcttcccccaagagattgcttctttagggtttgcttattagtttt

SEQ ID NO: 406843 - DNA, 543 bp, Homo sapiens
gtcagtaatggaatttagataaggcagcctgtagagcatttcataagggaacaggccaagatattttcaaggggcagttcggattcttagtaaggcaatgggaaagcatttagtccagggtaaccgggtttcaaagattaatttggttaggtgattttttagagtttgattcattctttataccttccctggtgagggtggatgccacggagtatgatattcccattttattcctagtgcttgggttagccccttaatgatgtgtgcagtgaagtgggtcccattgtccgaatcaacgttctctattagtccaaacctgggtatgatatgttccaacagtgctttgactacgttactggcygttgcacttgggaaggggatggcttctacccagtgggtgagatagtctactattactagtaaatacgtgaggtggcctattgggggcatttcagtgtaatcaacttagacgctttggaacagcctcaaccctgggtttcttcccccaagagattgcttctttagggtttgcttattagtttt

SEQ ID NO: 406844 - DNA, 543 bp, Homo sapiens
gtcagtaatggaatttagataaggcagcctgtagagcatttcataagggaacaggccaagatattttcaaggggcagttcggattcttagtaaggcaatgggaaagcatttagtccagggtaaccgggtttcaaagattaatttggttaggtgattttttagagtttgattcattctttataccttccctggtgagggtggatgccacggagtatgatattcccattttattcctagtgcttgggttagccccttaatgatgtgtgcagtgaagtgggtcccattgtccgaatcaacgttctctattagtccaaacctgggtatgatatgttccaacagtgctttgactacgttactggccgttgcacttgggaaggggatggcttctacccagtgggtgagatagwctactattactagtaaatacgtgaggtggcctattgggggcatttcagtgtaatcaacttagacgctttggaacagcctcaaccctgggtttcttcccccaagagattgcttctttagggtttgcttattagtttt

SEQ ID NO: 406845 - DNA, 242 bp, Homo sapiens
ggcaccaagcacctgcagtctcttgtatctcaccaccctagagcagccagccacacctctgtggcytagagtttctgctgcctccttccctataccatgcaacctgggcaaccaggaccagaagcagaaagaaatgctgcccccttatccttcatgcaatcaaatttgtgcagcgggtggggaggaggtaagaaatatgaatgcctgggaaaaggaggagctccaggtaatgggaagaaaga

SEQ ID NO: 406846 - DNA, 242 bp, Homo sapiens
ggcaccaagcacctgcagtctcttgtatctcaccaccctagagcagccagccacacctctgtggcctagagtttctgctgcctccttccctataccatgcaacctgggcaaccaggaccagaagcagaaagaaatgctgccccyttatccttcatgcaatcaaatttgtgcagcgggtggggaggaggtaagaaatatgaatgcctgggaaaaggaggagctccaggtaatgggaagaaaga

SEQ ID NO: 406847 - DNA, 242 bp, Homo sapiens
ggcaccaagcacctgcagtctcttgtatctcaccaccctagagcagccagccacacctctgtggcctagagtttctgctgcctccttccctataccatgcaacctgggcaaccaggaccagaagcagaaagaaatgctgcccccttatcsttcatgcaatcaaatttgtgcagcgggtggggaggaggtaagaaatatgaatgcctgggaaaaggaggagctccaggtaatgggaagaaaga

SEQ ID NO: 406848 - DNA, 374 bp, Homo sapiens
ttggggtttgggggctcaggtcttcagaggatattctcaactttatagcctctgctggcagcctcatcaagaggttgcatgtgacaaggatagcagagctacatggcgggaagggaacatcactcactttcctgacctacacctcatagaagaggaagcagtccgaacatattcagcttttatcaataactccttatgattcaacaacaaagataatttttaaagctttttttaagmctgcttatgttttctacttttgagagtggtccaaaacttcctttttgcagtgtaagataccacttcctgtaactgacctaaactacactctcacatttccttggatgccctctagtataactattctcagtttagtc

SEQ ID NO: 406849 - DNA, 522 bp, Homo sapiens
cacccagataatccagaataaatccctcctcacaagatccttaagttaatcacatatttgccatataagataatatttgctcttttgccacattagataacacttacaagttccaggaagtgactctattttggyaggggtatgctttttagtctatcacaagtcccatttgagtccccaagaccttagattctgcagttcttccttcagccccatgagccacctcagtagactcctcatcagccagtaagttccttcctggcccaggctagcatgaattggttcagtcacttgttttaagggtgtcttaaataacacacatccccatgtctgcagcaggctgggcagtggaggaagtagcaaggtgcagtagacagaacatttgctctttcatgagtgtttgggaaaatcacttccctttcccagctctgctgtttcataatctttgcaaatattaagcttaaaggactattgcatttgtttatgctatcttattgttttaaacaccctgtaattatattt

SEQ ID NO: 406850 - DNA, 506 bp, Homo sapiens
gaacctctggatgttggaaaccaggcattgatatttgttaaaagaactcccgatgattctaatgtgtagtcaggattgagaagctctgtcctatgatctctgaagctctgctattcaaagtgttgttggtgggcagatatagcaacatcacctgggaaaattttagatgcacagaccaatcttttgctctaccccagaacttttgaatcagaagctgcatttaacaagatgcccaggtaattcctattcacattaaaatttsagaaaaaatcctatttcttttcaaaatataaaatacagattttgctgaggccatttaccatattcctaaggagggaactattcaaaatcttgtttaaacaatgctcttctgtttccaaatactgtatattgcatgactatatttagttttgttattcacaggtaaattactacattttaagcaactcacagcttgtcagcttccaggaacaaggctttctaaacaacgtggtgtgtggaaaagc

SEQ ID NO: 406851 - DNA, 538 bp, Homo sapiens
ttccaagagctacttcctccccacctataaatacacccacatcttctcctaccctaaaaaaggcttcaaaagacccagctcccttttcaaattctcatccacacatagctttgctcccccactttccagtcactcctccactcatgcagtctgccatctatcactgtcactcaaacaccttccatcaagatcagcaatgatcgaatagccaatttcaccgacctcttagtagattctaggatgacttttcttggtgtaagagtaatacgcattcattattaatcatgaacattttggaaaatacagaaaaaaaaatagtaaaaaagaaagtcattgagaggagctccactcccatggggcatctatgagagaactggagttcttggaatgaaaaactaaaaaaggagaatagaaattgaaaacagttcagaggacacaaaatgytgacactgtaatctcaactattgataatctttgaggaatagttccggataatcaagcattctgaatacctaatactcatccctgtaaccaccaa

SEQ ID NO: 406852 - DNA, 446 bp, Homo sapiens
tttattttaaggagaaagacattcactttatgcattaattggtgtctgcctcctgttccacagaagggtaattttctgtgtggcaccaagggcttgatagtgatcaaagaaaaccccagttcccagtaggaacacacttcaggtgtgagtccattttgggtttctcaatctcctttcttgggagatgaaactagaagggagaatgggactgggaartgttttgagtagaggccagacattcaagtcttggctaaatgttgggtataataatttcagtactcactgcagacttatttcttaataaaactccccaagctacttgtggaccatgttgttttaaaggatagttacaaagttaaccgcttcctcttacagatacaattggagaagagtctttgtgttttttcattttctacaaaggaacatatataagctagataagaaac

SEQ ID NO: 406853 - DNA, 531 bp, Homo sapiens
aaaagtaatttattacaaggattttgtgtagctcacaaacttgttgggaaggccagagaaccagacctgaggacaaactttcggaaatggctcaaaactttagaactggcctgttgagaaaaatcagtactgctccaagcactgaccactagatgatacatgaactagatgcttgcagcaatttgactttactgaagctacgactgccccagcatcacygccatttctgatgtgaagacaccctccgcagtatgtaggtgctgtttcagtcttacctctgctgaccctgaaagccagtcacccctctcacaatcctcagcagcacaatgaattctgcctaaagcttctttcttcaagcaaggctctgctgtgcttggataatgctaattgggggactctcattcacaagctaatgagctagctgcaattgaggggctggggaaacaaattttctatctgggaaaaacagggctttaaatatggagatttacccaaatgcagcaacaatgttcatgtaccaagcaactagga

SEQ ID NO: 406854 - DNA, 531 bp, Homo sapiens
aaaagtaatttattacaaggattttgtgtagctcacaaacttgttgggaaggccagagaaccagacctgaggacaaactttcggaaatggctcaaaactttagaactggcctgttgagaaaaatcagtactgctccaagcactgaccactagatgatacatgaactagatgcttgcagcaatttgactttactgaagctacgactgccccagcatcaccgccatttctgatgtgaagacaccctccgcagtatgtaggtgctgtttcrgtcttacctctgctgaccctgaaagccagtcacccctctcacaatcctcagcagcacaatgaattctgcctaaagcttctttcttcaagcaaggctctgctgtgcttggataatgctaattgggggactctcattcacaagctaatgagctagctgcaattgaggggctggggaaacaaattttctatctgggaaaaacagggctttaaatatggagatttacccaaatgcagcaacaatgttcatgtaccaagcaactagga

SEQ ID NO: 406855 - DNA, 415 bp, Homo sapiens
ccagccttaaaccagggttgagaagagggtcaccaccagcctgagtcaatgagtaactgtcaggaactcctaccagatggctgtgattcccaaagtctctgagaaaattctaggagacgcactctgggtgggccttaccctttaaacatcctgcaattttgtaactgagcctgtggctgaaccacatgctcataatatctaggctggctagcttatgcctaaaacatagtcatttctgctggtgctctgggagagcctgatctttccctgatttcatgactacaggatccctgtgccactgttttcagttcagatgttaaagaatgtgtaagaatgcactcctggaaaccactccccttcaggggcagawatattaggtctcactgctgtggaatgatcccactccactgaccac

SEQ ID NO: 406856 - DNA, 606 bp, Homo sapiens
cattattttaagagtaatagtcactgatgtattaattatatgttccttcgtcttatttaaaacttttaatatgctttgcctcccaattagattttaaggttcttaaaagtagaaattacatctcttgtacttttatttgtttctcttgyaatgcttaatattgggccttgcacataataggtccacacagtaggtacgtgactaatgattgctgaatgaacatgttcataaattgaatatttccgcctaagagataaagtttggaaaaggatatgctttatatttcagaaatggcaagttccaatcctgtgtatatggagatggaaaaaggagatctaccaacaaggttaaagttactagatgacgaggttccttttgatagtccgttgttggttgtttatgctacccggtaagttgtcctgtatattgtttatatgagctaaagcacatgcatttttttgtgtattttagtctctaacatgttactcatttgcatatgaggcagcttctgttagtatatttattttcatttgtaataagtaacctaaatgtaaccaagttatataatttcactgaaattagagactaaagtgttttgtttttaaa

SEQ ID NO: 406857 - DNA, 628 bp, Homo sapiens
tgagattagtgttcagtctagtaaagtctgagttgaccccaagttgtaaaaaaagactgtaatgctattattacaatagcaattgtaaatgcttacaattagatttctgtcacaagtactgaagttgtagattttggggggcaggagggagagaaagggaggatgagagaaagaatggctttcaaagtcaaataaagcaagctttcaaagtctagtctttgtagatattcaaaactttgcaatcaacatattattactagaaataattaactgaagcaacatttggatrcagaaattcattcatccgtctgtaaaggaccaaatcactccccttcttgaaatctataatttgaaaaaaaatttaattcaatatagtccataggttcagaggaagaaaaagtataaaaaaaacaagaaaaaaatttttaaatcgaaatttgtatccaaggaaaaaggtgcttggtttacccaggaatttataatttgtaaagtcacacctaatacctatgctctggcacacccaaataccttttattaattacttggttttcctcagtaagaattaacatgcttctctctgttagaaaagtttgagaaagggaaattgcattgctctttgttatagttg

SEQ ID NO: 406858 - DNA, 628 bp, Homo sapiens
tgagattagtgttcagtctagtaaagtctgagttgaccccaagttgtaaaaaaagactgtaatgctattattacaatagcaattgtaaatgcttacaattagatttctgtcacaagtactgaagttgtagattttggggggcaggagggagagaaagggaggatgagagaaagaatggctttcaaagtcaaataaagcaagctttcaaagtctagtctttgtagatattcaaaactttgcaatcaacatattattactagaaataattaactgaagcaacatttggatgcagaaattcattcatccrtctgtaaaggaccaaatcactccccttcttgaaatctataatttgaaaaaaaatttaattcaatatagtccataggttcagaggaagaaaaagtataaaaaaaacaagaaaaaaatttttaaatcgaaatttgtatccaaggaaaaaggtgcttggtttacccaggaatttataatttgtaaagtcacacctaatacctatgctctggcacacccaaataccttttattaattacttggttttcctcagtaagaattaacatgcttctctctgttagaaaagtttgagaaagggaaattgcattgctctttgttatagttg

SEQ ID NO: 406859 - DNA, 628 bp, Homo sapiens
tgagattagtgttcagtctagtaaagtctgagttgaccccaagttgtaaaaaaagactgtaatgctattattacaatagcaattgtaaatgcttacaattagatttctgtcacaagtactgaagttgtagattttggggggcaggagggagagaaagggaggatgagagaaagaatggctttcaaagtcaaataaagcaagctttcaaagtctagtctttgtagatattcaaaactttgcaatcaacatattattactagaaataattaactgaagcaacatttggatgcagaaattcattcatccgtctgtaaaggaccaaatcactccccttcttgaaatctataatttgaaaaaaaatttaattcaatatagtccataggttcagaggaagaaaaagtataaaaaaaacaagaaaaaaatttttaaatcgaaatttgtatccaaggaaaaaggtgcttggtttacccaggratttataatttgtaaagtcacacctaatacctatgctctggcacacccaaataccttttattaattacttggttttcctcagtaagaattaacatgcttctctctgttagaaaagtttgagaaagggaaattgcattgctctttgttatagttg

SEQ ID NO: 406860 - DNA, 534 bp, Homo sapiens
gactgccacccgagtcttcctttcatttctcagcaacacctacaaatccaggcattaatgaatttctacccactccatctaaaaaatacctccaatgcagttctcttccactctattttcattgccttctttcaagtctaaatatgtaatgcgactccttttatgaatgttttctgagtttctggagcttaactagatcaaagttgtggaagtggtggcagtggagagasagccagatagagaagaactgttttatcagtcagggtccctttgggagacagaaaccaggcagtaatttgaaaagggaaattttaatataaagaattattaactgagagcagcattaacttctaagagtacagaatatgagaaggtataaatttgagattgggcccctcacaagactgacattggatggcaaatagtttactgggtccttcaagccaaaactgacatataagaactccattgaggtattaatgaaacttggcaggaagctacccagggtgtaacttaactctgggaatgcagcta

SEQ ID NO: 406861 - DNA, 453 bp, Homo sapiens
ttggtttaaatggccaggtgagcccttatgcttggggaaatgtctgacttgtttgagaacaggcaccatatcttgttcatcactgcatgcttaatgcctagcagggtccaggcactcagtagttgctttctgaattagattatcccattgaaaacctacacttcaacccacattactcttcactcttgcacattgtcttcttcctcttaataagtcaaacttgytgaaagtattgcccatctacacaccttctgattcttcacttctgatcatatgttaacccactccagcctggtttctgtccccacaacttcagcaaaatacctttgtcaccactgacctccatgctgccaaaaacaatgaacatctctcttttctcatatcagtagctctgtgagcaacattcaacgcagttgccttccccttccttcctgaatatttggtctcttggct

SEQ ID NO: 406862 - DNA, 569 bp, Homo sapiens
aaactgtacaaatgcataaaaattaaacaatatgtttctgaatgaccagtgggtcaatgaagaaagtaagaaggaaattgaaaaatgtcttgaaacaaatgataatggaaacacaacataccaaaacctatcrgatacggcaaaagcagtactaagagagaagtttataggtataagtgcctaaccaaaaaagaataaaaacttcaaatagacaatctaacaatgcatcttaaagaactacaaaaacaggaggaaacccaagaccaaaattggtagcagaaaacaaatagtaacgatcagaacagagataaaagaaattgaagtgaagaaaagaatacaaaaatcaatgaaacaaaaagtaggttttttgaaaagttaaacaaaactggcaaacctttagccagactaactagactaactaaaaaaaaaatagaatatccaaataaataaaatcagaaatgaaaaaggagacattataactgaccctgcagaaactcaaaagatcattagtggctatcatgagcaactatatgccaataaatttgaaaatctagaagaaatggacaaat

SEQ ID NO: 406863 - DNA, 569 bp, Homo sapiens
aaactgtacaaatgcataaaaattaaacaatatgtttctgaatgaccagtgggtcaatgaagaaagtaagaaggaaattgaaaaatgtcttgaaacaaatgataatggaaacacaacataccaaaacctatcagatacggcaaaagcagtactaagagagaagtttataggtataagtgcctaaccaaaaaagaataaaaacttcaaatagacaatctaacaatgcatcttaaagaactacaaaaacargaggaaacccaagaccaaaattggtagcagaaaacaaatagtaacgatcagaacagagataaaagaaattgaagtgaagaaaagaatacaaaaatcaatgaaacaaaaagtaggttttttgaaaagttaaacaaaactggcaaacctttagccagactaactagactaactaaaaaaaaaatagaatatccaaataaataaaatcagaaatgaaaaaggagacattataactgaccctgcagaaactcaaaagatcattagtggctatcatgagcaactatatgccaataaatttgaaaatctagaagaaatggacaaat

SEQ ID NO: 406864 - DNA, 448 bp, Homo sapiens
tgggtcatatgtcatatatttttcaaataaaagtcacctataaagactttaaggttcctttctttttatttgctacttgctgaataaaggggtagtagaaaatactcctttaaggagaaggtatagctcaggggtagagcatttgactgcagatcaagaaaatactcctttgatcatttttaggctaggaaattttagccaacttcttaygccaaatacacacatgcacacacacacacttacaaaatgagagctagaataaattaataagtgatgataatgctgatcaactttcctgcatctacattctaactacaagctcaacattaaaaaaacaaatctacatacagcttggttaaagggtttctcagttcccttccagttctaatgttctataaataacattatttctcaggtttggggtagttcaggtgaaagcatatctttc

SEQ ID NO: 406865 - DNA, 555 bp, Homo sapiens
tacaaaactgaggaggttgggtggcatttcttctctgtaaacaagaaaagggtagggacaaatgtcatttatataaatatgtcctagaatttaaaatcacctttttttttttttttttttttttgagatggagtctcactctgtcatccaggctggagtgcagtggtacgatctcggcccactgcaaccttcacctcccaggttcaagygattctcctccctcagcttcctgagtggctgggactacaggcacgcgccactaagcccagctaatttttgtatttttagtagagatgggatttcaccatgttggccaaactggtctcaaactcctgacctcaggtgatccgcctgcctcggcctcgcaaagtgctgggattacaggcgtgagccactgtgcctggcctgaaaatccttgtttaaattcagatcaaatcttaatctttttttttttttttttttggcctttcctgtttatttgcttcaaaggttttcaggagcagtgatgagaattattccacatgtgctggatagattttaggctttaaaagaggc

SEQ ID NO: 406866 - DNA, 393 bp, Homo sapiens
gttagtggagaggtccatgtagagagaaatgagggctccaggcccaaacccagctgacgaccagcatcaacttgccagccaagtaaatgagcaattttgaaagtgtatcttctagtcctgagttaagctgtccctgttaataccactgaaatcatagatggagttgctcctaacaagttctgctctaattgcagattcatgagcaaaataaatgatcactgttcttttaagccactaaatttggtggtggaggggagagctttttcctgctttaggaatatataagtgatataaacaccacattaaattatagtcatcaattaatatatagttatttcttagtgrggatctataaaaattggacttggggaaagatgtcttaagatggagagg

SEQ ID NO: 406867 - DNA, 579 bp, Homo sapiens
gatttacatgaatgtttccttgtgttayttgtaaaatgagattgtatttggatgtaatacaaaagcatttatattaaataaacacctcctttggtccagaactaaaaataattgctttgctctattttaacctggttccttcctatactttgtccggatttacattgtattgctccagtatcctcaaccctgacactgaatctctgtgtgaccttgaatgagttaatctcatctcttagtttgtataaaggagttggagaagatgatctctaaagttccttataactctgacattctctgtgtatctaaaacaagtttcctcaatgataaaatcacctccagctttgaacattatctccaaccacacaaaatcagagcccaaaaaggtacaagtttatcaaggtatcttagaaaagtaattcagaggtataggagcttaagggaccacctttgtgaaatcttcctagaacttaaatgtacacctcaagctccaataaaatttttattgacctgttcacaagatcttccactctgttctttgaggttatatttacaatatccaatggttcttttcattac

SEQ ID NO: 406868 - DNA, 591 bp, Homo sapiens
tcctctgttttactattgtgaataaaatgccttctaataaattactgttttggacacctatggagaaaaatggaattgcagacatgtatatcaaaagacatgtatattaaaatgtttaaaaacattcataacttttgrcacgtgaatcttttttctaaaaacatatcaaaatatgtatcctatattttacataagaatatccataaaaacactgtttataatagcccccattaaaaccaatcctatatccatgagtaaatcattatctagccatcaatgagatactatgtggccattcacaatggtgttttggaaaaatatttaatgacttaggagatgctcttattatgttgtaaagaataaaaataaagcaagattcaaatttactttttttttttttgagacagggtctcactatgttgcccaggctggacagcagtgatgtgatctaggcttactgcaacctctgcctcctgggttcaagcgattttcctgattcagcctcccgagtagctgggattacagatgcccgccaccaggcccaattaatttttgtatttttagtagagacagggttttaccatgttggcc

SEQ ID NO: 406869 - DNA, 591 bp, Homo sapiens
tcctctgttttactattgtgaataaaatgccttctaataaattactgttttggacacctatggagaaaaatggaattgcagacatgtatatcaaaagacatgtatattaaaatgtttaaaaacattcataacttttggcacgtgaatcttttttctaaaaacatatcaaaatatgtatcctatattttacataagaatatccataaaaacactgtttataatagcccccattaaaaccaatcctatatccatgagtaaatcattatctagccatcaatgagatactatgtggccattcacaatggtgttttggaaaaatatttaatgacttaggagatgctcttattatgttgtaaagaataaaaataaagcaagattcaaatttactttttttttttttgagacagggtctcactatgttgcccaggctggacagcagtgatgtgatctaggcttactgcaacctctgcctcctgggttcaagcgattttcctgattcagcctcccgagtagctgggattacagatgcccrccaccaggcccaattaatttttgtatttttagtagagacagggttttaccatgttggcc

SEQ ID NO: 406870 - DNA, 570 bp, Homo sapiens
aaatcctgtcccatgctcatgaccaatgggtgttaaaggtaacacattgctacactgaatcacagaattatatatttgcatgtttcttcatttctaggagtaatcctagagggcatttcggagtctgtggcagactgatggtagaaatgttgaggcaggaggccctttgttatcaaatcaatcctagctccacaattgtgattcagcaggttgtcacaaagtttccacaacagagtctcctgctcccaaaccttccmggcctccctactgccctcaagatgaagactaggcttctcagtgtaccttccaaggcatttcataatctgattatatcctgtgctgccagctccatctctagtcaacacctgccacctgttccagatctagactgtcttgccttctcccaaacgtggcttgttattcacacctccatgcctttgcccatggaattccctctgcctcaactgtcttctcagctccactccccttccctgattttgccaaaggtaaaacctcattcatccttttagacccagtgaaaatgttataccctctctatccccaggaacc

SEQ ID NO: 406871 - DNA, 570 bp, Homo sapiens
aaatcctgtcccatgctcatgaccaatgggtgttaaaggtaacacattgctacactgaatcacagaattatatatttgcatgtttcttcatttctaggagtaatcctagagggcatttcggagtctgtggcagactgatggtagaaatgttgaggcaggaggccctttgttatcaaatcaatcctagctccacaattgtgattcagcaggttgtcacaaagtttccacaacagagtctcctgctcccaaaccttccaggcctccctactgccctcaagaygaagactaggcttctcagtgtaccttccaaggcatttcataatctgattatatcctgtgctgccagctccatctctagtcaacacctgccacctgttccagatctagactgtcttgccttctcccaaacgtggcttgttattcacacctccatgcctttgcccatggaattccctctgcctcaactgtcttctcagctccactccccttccctgattttgccaaaggtaaaacctcattcatccttttagacccagtgaaaatgttataccctctctatccccaggaacc

SEQ ID NO: 406872 - DNA, 570 bp, Homo sapiens
aaatcctgtcccatgctcatgaccaatgggtgttaaaggtaacacattgctacactgaatcacagaattatatatttgcatgtttcttcatttctaggagtaatcctagagggcatttcggagtctgtggcagactgatggtagaaatgttgaggcaggaggccctttgttatcaaatcaatcctagctccacaattgtgattcagcaggttgtcacaaagtttccacaacagagtctcctgctcccaaaccttccaggcctccctactgccctcaagatgaagactaggyttctcagtgtaccttccaaggcatttcataatctgattatatcctgtgctgccagctccatctctagtcaacacctgccacctgttccagatctagactgtcttgccttctcccaaacgtggcttgttattcacacctccatgcctttgcccatggaattccctctgcctcaactgtcttctcagctccactccccttccctgattttgccaaaggtaaaacctcattcatccttttagacccagtgaaaatgttataccctctctatccccaggaacc

SEQ ID NO: 406873 - DNA, 515 bp, Homo sapiens
atctatatgcagccatggattaccacagctggttctggtaacatttgcaaattctaaactatctaagactatttctaaggctattgtgagtgacattaggcccatttctggcaagaaatcctctagttgtaatgtatactatcttaaatggtctttttgtgaccatggtctctacccttaaacaaatgaaaggcatatttcccctgatgggtgtcccaaggagagcttgggaagaaatcatcattatcaaggcggttcacccagacacacagacttgcttgttaccgtatttaaagaagtggccacaaagaaatagtcatyggatttacaataggggaaacctagtatgcatttccaaggaatcacattttggggagaattacagaataattacacatatgcttagatcacgagcattcaatgaagcggacagtattttgaggatttaagatgttggtgttgtggtcgtctctaagaaaccgggataattcagacattcaaatgcaaaaccgcac

SEQ ID NO: 406874 - DNA, 488 bp, Homo sapiens
tatactactgtgaacaaaatttagaacatatttgtttctttctacctgatttctccagagtttagaaactagctgtaagtattcttatggcaatatagttagttacataagtacaataagattctgttttcttttgtaacaggacacaattggagaaattggttaattttactaagactttgactagaatggtgtactttcctttaaggaatcaaacttaacttgtaaaggcctgtrgggaactagcctcataccttccctacacagtccctgtataggtttctgacctgtgttaagtaaagaatgtcactttctcacaggtccaggagccccaagttatcttgggacctcaaaaggagaagaatttacccaattcataggtatttgagggtaaaaacccatggcaggacttgactttaaaaaagtctcatctgagattccttatgaaacagagttccatcaaagccaattaaaaacctatgtgaaaa

SEQ ID NO: 406875 - DNA, 488 bp, Homo sapiens
tatactactgtgaacaaaatttagaacatatttgtttctttctacctgatttctccagagtttagaaactagctgtaagtattcttatggcaatatagttagttacataagtacaataagattctgttttcttttgtaacaggacacaattggagaaattggttaattttactaagactttgactagaatggtgtactttcctttaaggaatcaaacttaacttgtaaaggcctgtagggaactagcctcataccttccctacacagtccctgtataggtttctgacctgtgttaagtaaagaaygtcactttctcacaggtccaggagccccaagttatcttgggacctcaaaaggagaagaatttacccaattcataggtatttgagggtaaaaacccatggcaggacttgactttaaaaaagtctcatctgagattccttatgaaacagagttccatcaaagccaattaaaaacctatgtgaaaa

SEQ ID NO: 406876 - DNA, 668 bp, Homo sapiens
caattgcagtcaggtgcatctcactcttttgcacattttatgccacatctgaaactagacataatactttggcattgaacagttttatcactgctaatgtgcagaaacggggaaagtaacaaaagtggtcaacttgaacatagtgcagtgattttaagtcttacaggattttggaatcaaagcctatgaactagtgttcttgcttctttctgagatgaaaactaaaaactcagctgcactttcatcctctgcatttatcatcatcagaatggacatcaccaactgtcccttctccctgcagacctctcagataccatcagtcaggatactccagagaaacagaccaattagataaatagattagattagacaattgctataaatatagatgtagatagatacacatgtatacatatacatatgtatttatatatatatacatacacatatatgtgtgttaagatatttatttttaaaaattggctcatgagattgtggaagctgcaagtttgaaatctatagggcagrctgccaggctggaaactaaggtaggagttgttgttattgaattcttgaattctcaagaattcagtcttgagactgaatttcttctttgggaaactgcagtttttgcttttaaggctttcaactgattagatgagggtcat

SEQ ID NO: 406877 - DNA, 668 bp, Homo sapiens
caattgcagtcaggtgcatctcactcttttgcacattttatgccacatctgaaactagacataatactttggcattgaacagttttatcactgctaatgtgcagaaacggggaaagtaacaaaagtggtcaacttgaacatagtgcagtgattttaagtcttacaggattttggaatcaaagcctatgaactagtgttcttgcttctttctgagatgaaaactaaaaactcagctgcactttcatcctctgcatttatcatcatcagaatggacatcaccaactgtcccttctccctgcagacctctcagataccatcagtcaggatactccagagaaacagaccaattagataaatagattagattagacaattgctataaatatagatgtagatagatacacatgtatacatatacatatgtatttatatatatatacatacacatatatgtgtgttaagatatttatttttaaaaattggctcatgagattgtggaagctgcaagtttgaaatctatagggcagactgccaggctggaaactaaggtaggagttgttgttattgaattcttgaattctcaagaattcagycttgagactgaatttcttctttgggaaactgcagtttttgcttttaaggctttcaactgattagatgagggtcat

SEQ ID NO: 406878 - DNA, 636 bp, Homo sapiens
tagatgagggtcatccatattattgagggcaatctcttttatttaaagtgaactgattatatatcataatcacatctacagaacatacagcaatatctagcttggagtttgattaaataagtggttgctatagcctagctaagttgacacataaagctagctatcacagacactaagtggctagcaacttctgggtccaamgtttgctttgtgcttggtaatctcttgggctttgggaaaaaaacatatctggccttggtttctttttcttcaatgatctggcctgtctgtggacattgccccattgaaaaactggttttggaggtcaaagccaaagaggcttggtaccgtagaatgatatcgatgaaaaggacttgaaaaatgacctattcaagcccctcaacttacaaataaggagatggaagcctaacaaggagaggctatttaaagccatttataatgacaatagtcaagagactgtgacctgtgatcacacaaggtcactagagccttgaaatgcctcgtaacaataattgccatgttttcctaaacatagcactcggggaccatgtgctggcctgggcgtgggcgccatcaggcatatcatcagcagtgttcaccagttgcctacaaaag

SEQ ID NO: 406879 - DNA, 636 bp, Homo sapiens
tagatgagggtcatccatattattgagggcaatctcttttatttaaagtgaactgattatatatcataatcacatctacagaacatacagcaatatctagcttggagtttgattaaataagtggttgctatagcctagctaagttgacacataaagctagctatcacagacactaagtggctagcaacttctgggtccaacgtttgctttgtgcttggtaatctcttgggctttgggaaaaaaacatatctggccttggtttctttttcttcaatgatctggcctgtctgtggacattgccccattgaaaaactggttttggaggtcaaagccaaagaggcttggtaccgtagaatgatatygatgaaaaggacttgaaaaatgacctattcaagcccctcaacttacaaataaggagatggaagcctaacaaggagaggctatttaaagccatttataatgacaatagtcaagagactgtgacctgtgatcacacaaggtcactagagccttgaaatgcctcgtaacaataattgccatgttttcctaaacatagcactcggggaccatgtgctggcctgggcgtgggcgccatcaggcatatcatcagcagtgttcaccagttgcctacaaaag

SEQ ID NO: 406880 - DNA, 579 bp, Homo sapiens
catatatattatatatccatatccatatatatgtatatagatttgttacaggagtttaacctgatacaattgtgagagccagctaagcattttccataaggctgtcaccttcacatctaatgctggtgcgcgaggtccacggggcaggcagtcgagaaggaatggkggatgaaaagtaaggggagatcaagagcaggatagaacccaccagcatgagctggaagcccatgagaacagactaaaacccacactggtcagtccctgctgcccccatccttgtgagtgagtgtggaagtcctgccaaagcccaggcctttcttcatatggctaaacatgcacacctggctctggagtcaggaaagctggggaacatggagcacttgcaggcccagctgctgcctcgttccagtgaagtggctacaacagggctatcgcttttctttcactctccaaatttctcaggctttcttttgtggcctaccctgactagaatcacatagggagggaattctgaaaagtgtagttcagcctagtcaagttaacaccatataaagctaccacagttaatattattaactt

SEQ ID NO: 406881 - DNA, 579 bp, Homo sapiens
catatatattatatatccatatccatatatatgtatatagatttgttacaggagtttaacctgatacaattgtgagagccagctaagcattttccataaggctgtcaccttcacatctaatgctggtgcgcgaggtccacggggcaggcagtcgagaaggaatgggggatgaaaagtraggggagatcaagagcaggatagaacccaccagcatgagctggaagcccatgagaacagactaaaacccacactggtcagtccctgctgcccccatccttgtgagtgagtgtggaagtcctgccaaagcccaggcctttcttcatatggctaaacatgcacacctggctctggagtcaggaaagctggggaacatggagcacttgcaggcccagctgctgcctcgttccagtgaagtggctacaacagggctatcgcttttctttcactctccaaatttctcaggctttcttttgtggcctaccctgactagaatcacatagggagggaattctgaaaagtgtagttcagcctagtcaagttaacaccatataaagctaccacagttaatattattaactt

SEQ ID NO: 406882 - DNA, 561 bp, Homo sapiens
ccctgctgcccccatccttgtgagtgagtgtggaagtcctgccaaagcccaggcctttcttcatatggctaaacatgcacacctggcyctggagtcaggaaagctggggaacatggagcacttgcaggcccagctgctgcctcgttccagtgaagtggctacaacagggctatcgcttttctttcactctccaaatttctcaggctttcttttgtggcctaccctgactagaatcacatagggagggaattctgaaaagtgtagttcagcctagtcaagttaacaccatataaagctaccacagttaatattattaactttccctcagtttctgtgtcctctcctttaaataagcaggaataataatagtatctacctcataaggttcttttggggattattttaaataatgcatggaaaatatttaacatagtaccagacacatagtaagtactcaataaaagcatatatcactatatcactatcattgttgctgttattattattggtttaagtattcttcaccaggccgaacgtggtggcttacggctgtaatcctag

SEQ ID NO: 406883 - DNA, 528 bp, Homo sapiens
gagtcctttggtcatttatctcattttcttattgtcctatttggctggtaaatgtgagttcagattatcagtgtcttttataagagtgacattgacttatgttcactcacttaactgccttcttaaactgctcacttgatgggcacaacaatttattgtttatccacgtgactttttgggtaaagcatagtgcayttgtgttatttttaagattgcaaatgagaggaattcaatctgaacaaatttaagcaaaagggatctttagtatgtggattttgtcattttctagtagacaccaaggacagggctgtagtggggcctcaggaacccctggagccaggtacaataacaccatcaggaatgctgtctcttgtatttactactccacgcacatctgctttgtttgtctctctgccaatgtgttgtctctgtttttctggcttacgtgacagaaagcaaagtcattgatagccaatgagttttttacggtacaactttatctacctgagagaaattgaatgactcttt

SEQ ID NO: 406884 - DNA, 404 bp, Homo sapiens
gggtttgcatccaactaaaaaagtttctgcattgcaaaggaaacgatcaacagagtgaagagaaaacctacagaataagagaaaatatttgtaaactacacatctgctaagaagttaatatccaaaatatataaggaatgcaaataattctatagcaaaaaactcaattttttaaatggacaaaggatctaaatagacatttctcaaaagaagacatacaaataaycaacaggaatataaaaaactgttcaacatcactaatcatcagggaaatgcaaattaaagccacaatgagataccacctcacacctgttagaatggctactatcaaaaagataaaagatgacacgtgttggtgagaatgtggagaaaatgaatgtctcacacacttttggtgggaatgt

SEQ ID NO: 406885 - DNA, 595 bp, Homo sapiens
tatcccattatgcccataggtgtgaaagggcagaaggttgaaaggacaatgttgctagagtccagtgaccttggaagctgtagctacagtccctcccagaaatgcaactaggcaagaagggagtgggaggaataaatacctcttctgcccttgagttggtgctggtgctttccattgatagatatcaactagaagaatctagccagcaaggtatcctggtgtcaatgcatggcctaaaggccagcctctcagagcaaagcaggagggagaaagagtagacagtggggtttagaagggtaaacagaaaacaactaaccagcacagttcccaaggaggcaggagggggcttatctgcagggatgtgaatagaatggagagtaagctggcagaaaggaacctctctgtctgatgaccatctcttttctctctgcagtgggaggggaggttgatggtagatgaaggtaagcaggcaggggattgtcttattattccttctacaratggaagctggcatttggacttgaggcctttgtgtagtatagtaataccagaaataaagctattttcctcatctcttaccaatgtaagagaatgt

SEQ ID NO: 406886 - DNA, 528 bp, Homo sapiens
gagtcctttggtcatttatctcattttcttattgtcctatttggctggtaaatgtgagttcagattatcagtgtcttttataagagtgacattgacttatgttcactcacttaactgccttcttaaactgctcacttgatgggcacaacaatttattgtttatccacgtgactttttgggtaaagcatagtgcacttgtgttatttttaagattgcaaatgagaggaattcaatctgaacaaatttaagcaaaagggatctttagtatgtggattttgtcattttctagtagacaccaaggacagggctgtagtggggcctcaggaacccctggagccaggtacaataacaccatcaggaatgctgtctcttgtatttactactccacgcacatctgctttgtttgtctctctgccartgtgttgtctctgtttttctggcttacgtgacagaaagcaaagtcattgatagccaatgagttttttacggtacaactttatctacctgagagaaattgaatgactcttt

SEQ ID NO: 406887 - DNA, 455 bp, Homo sapiens
aacttacaagttagtccaaaatcaaagaagtttggatccaactggctcctgctgctcttctcagtcaggtcacaagtatctttgtcacagaagtattaataggcagtgttttaactgacttcagtaacatgacttgaacatagtggattctcaatgaatgacttgtgggtgtaactcaggctaaattgcaaaaaattgaggcacaatagaaggacagagtagggattttttttttttctccaagtcatgcccttccttttgtaattcaatcatttcctgaatacctactaagtgccatctaccayaaagcagctcactgttagacgtggcacacattaggaagtgcagagcctctggagcaagactgcttaggtctgaagctctgcttgccagttgccagttgtgtgacctccagcaagcaaactccttcacactttgtgcctctgtttcactgt

SEQ ID NO: 406888 - DNA, 564 bp, Homo sapiens
tttcactttaaaataaaatataaaattctaaaattatagcagtgtttggtaaaatcttgaagtgtagaacattttcaaagatttttaaaatactatattattgctaaacaagacaacaaagtgcacttcttgtgtttctgcatagactcaaaggaaacttgggaatttcaaaataacaattggttgaataacagggttacaggtgttgtagcaggtataacaagagagcagataagagcacagtagaagtgctgaagaaaaaaatggagttaatcccgagaaatgcacataaatctacatctacttgcttagaaaattctaggaagcacaagaaaatacaagcaaacattccatttgcagccatcagagggggagatggggacatcatcacacatgtagcctctggaaaactccaccacayaattgcagaagggtcttggggacttgcagggatcctcacaccccactttgagaaccacttctctacacatataaactactttactgtggtgagagatgggagaaatctatgaggccaagttcctaccaccccacctaaaaatt

SEQ ID NO: 406889 - DNA, 601 bp, Homo sapiens
taacttgtggctgccactagctcataaattagtgatttctctaatgcattctgcgaaaagtatttatgggaaaggaccaggttgattttacttagatttttaaactctgacttttctgatgcttgtcacatgaccatctcaaatcttaatgttatggcaacataatcacattctttttctcattaagtagaagtatatgatttcaatttggctacttctttgagagcagaaaatttctgaaatgatactcatgaaatgttcactgacttayatgcccttaaaaatatctcaattatttgtgtcattctgttttcctttgacctttctccatagacatctacttggcatattgtacaaagggatgtttttcagccaagggagaagaaaatgttcacctgtttttaaaagctgccactaagatcctgacacaggcaaagattctttctctcatcaccatattatttccctgaacagactgtaatttcatcaattttccatgcttacggtcatgaatgcttggcattaccatatctttatgttaacaaaaaaggaatttcatggctccagtttttacttgaaggcaggaaaggcatgaagacct

SEQ ID NO: 406890 - DNA, 565 bp, Homo sapiens
atttcatcaattttccatgcttacggtcatgaatgcttggcattaccatatctttatgttaacaaaaaaggaatttcatggctccagtttttacttgaaggcaggaaaggcatgaagacctcattagaaatatggtgtatctcatgttggctcgtacatgcctttggtgtaggctttcctttgctctctctttccttgatgttaacaccaagggtagacattactttccatcttccatgcyccaccctcctgcccccttgcccaatcctctcaggtaacaaggaggtcaaaatcttttccaaagctagtttttagggtacttataatgttggtgtctataaagtctagacccttctctttttgccttccagaatcaaagtaggaaccatttatagagaaacttatgtagcatttataacaacaaatgtatttcctttgtcttccctatactactcatatggctttgaaattagaaaaatgcactttattctcaaaattggtaactgtaagtcataacaaaacctactaaatattgaaagaattctgttgtgtgggaaagttcctt

SEQ ID NO: 406891 - DNA, 591 bp, Homo sapiens
acatgcctttggtgtaggctttcctttgctctctctttccttgatgttaacaccaagggtagacattactttccatcttccatgccccaccctcctgcccccttgcccaatcctctcaggtaacaaggaggtcaaaatcttttccaaagctagtttttagggtacttataatgttggtgtctataaagtctagacccttctctttttgccttccagaatcaaagtaggaaccatttatagagaaacttatgtagcatttataacaacaaatgtatttcctttgtcttccctatactactcatatggctttgaaattagaaaaatgcactttattctcaaaattggtaactgtaagtcataacaaaacctactaaatattgaaagaattctsttgtgtgggaaagttccttactacttgaatttatttctaactatgctatttactagctgcatgactttgggtgagttagttacaaagttacttctttttgcctctgttttcttatttattattatcatagtaatacttcagaagatatcatgaggcttcagtttgttaatacctgtaaaatactgacatcagtgtttggc

SEQ ID NO: 406892 - DNA, 333 bp, Homo sapiens
ttcacatgatgaatgagaggagagagaagaatgacagttagtggggtggggcagccccttataaaaccatcaaacctcgtgagaactcactatcacgagaacagcatgagggtaaccacccccatgattaaattacctaccacctggtccytcccacaacaggtggagattatgggaactacaattaagatgagatttgggtggggacacagccaaaccatatcactggagacatttctgactctcatgatgaggtgtttgagagatgtgctactggtatctagtgggtagaagccagtgatgccattaaacatcctacaatataccatatgg

SEQ ID NO: 406893 - DNA, 450 bp, Homo sapiens
gccttggaaggcattattaattaacagtagaagttttttccataccactcagagttggcctcagaatccttctttgcacagtgtgctgaatctatttcagttcatgtgctgaatctctacaaattagtgagattcagcacatgagctgaaatctagttgtcatccttagtccatatgctatctcttactagaggttatctcttgctagatataatgagttcccagtcactagaagtgcttaagtaaggctgacatgaaagggatttcacagagaggatcyaaaaattggatgcatgtttggataaccaccttggtagcatgagacctgcactccagattgacaacccctgttctcaaaacacaagtcacaaggaatatgattttgatgagtacataagtcaatgtaggatgaattctctgataactccaaaatcttataagaaaagcttg

SEQ ID NO: 406894 - DNA, 633 bp, Homo sapiens
gtataatgaaaacaatactgttagaagttaaagaagacctaaatgttcatacattggaggcttcaatattaccaaaatgtccactttcaactaactgactatttaaagtaatccaattgaaaaytgaagtggtttgtaaaaagaagaaactgaaaagctgattctaaaatttatatgaaaatgcaaaataattagaatagtcaaaacaattttggaaaagaagagccaattagggaggcttttcatacctgatttcaagattcattactatagtaagtatacttagtatggtatcattttgatagacatacagataaatggaagagaatagagagtttaagtacatatatatgcatatatacctatgtatatgttcaactgatttttaaaaagcttagcaacataatttaatgggaaaaggaaagtcattttaactaacagttaatgatactgaacaactggatatccctatgggagaaaataatgaaccttcaccaccagctctcaccatatacaaaaataaactccaaatggataatagacctaaatataaaaaataaaactataaaacttataaagaaaatcttcactgccttgagataagcaaagttttgttaaatgtgatagaaaagc

SEQ ID NO: 406895 - DNA, 605 bp, Homo sapiens
ccagctctcaccatatacaaaaataaactccaaatggataatagacctaaatataaaaaataaaactataaaacttataaagaaaatcttcactgccttgagataagcaaagttttgttaaatgtgatagaaaagcactaaccacagagaaaaatattgacaaactggatttcctcaaaattaaaaactctgctcttcaagacacactattaggaaaagaaaaagcaagccccttacttggaaaaaatactcacagtacagatatctracaaagaacttgtgtttagaataaatattttttaaatgggcaaaagatttgaacagtcacttcacaaaaagatataaacatcccatttatactcacatactattgtcagccaaaaagcacaagaaaagttggccatgattcataaacagggaaatgcaaattaaaactataatcagataccaactcctgatgagaatgtggagtaattgaaattcatacactgtaggtaatacaaccactttggaaaacaatttggcagtatcttacaaacttgaacataagctttacatataacacaacaattctactcttagatgtttactcaataaaaatatat

SEQ ID NO: 406896 - DNA, 574 bp, Homo sapiens
agtgaagtggactctgtgggagttcttggttgtagttttgcttagtgcacaggttttcttgagtgttggttatgctagcagtcacataaacagactcaggacctctggttagtgaggctattgcaggtggtgaaattagctgttgttttctccttctttggagtggggttgttctgtcatgagttactgtaatggcttgagttagttggcctccagccaggaagtggcactttcaagagagcaccagctgtggtagaagaagggagatataagtttgccctacattggctgggataagtattttataagaattttatttttggtttacacacatagactgaaaataaagagatagaaaaagacattccatgtgaaaggaaaccagaaaagggcaggagtagctctacttatatcagaaaaaaatagatttcaagacaaaaattgtaagaagagacaaagaagatcatcatatgataataaaaaggtaaattcagcaggatatamtaattatataatataatagttacaatataataatcataactatatatgcacccaatgctggagaacccag

SEQ ID NO: 406897 - DNA, 579 bp, Homo sapiens
ttattttataaattaaacataatatattcaaatttagtccacaaaaaatatagccagtttcctaatgatattttgtggaacacacttccacattagggaactctgttccattaacagataggacttgaaaaatgtgtctgtggtcaaataaatgtgggaaattctcacattgtatcttccccttggagattcacaatatacgtttgcatattaaagaatctgaggaactctgcaattaaaaaaaacaccttaaatgcatttacccaaattttctgaatctgtttggctttggcagatatcctgagacacccagacatggaaacactactgtagatcatcttatttcttgatatagrtagaagagtccaaagtaaaatgttaatatatagaattcaacagtacattatgaccaagatatataacagaaatgcaagagcagtttgctataaggaaatgtgcaaatatatcatggcaaaaggtcacataataaaataattatttcaaccaatgggtaatgaaaaggtgcttgataaaattcagcacttatttctgataaaaattcctggaatattaggaata

SEQ ID NO: 406898 - DNA, 538 bp, Homo sapiens
tgccatcataagggtgtgttccttattcccctgtccatgatagagttccagtcatcatatccacattccaaggggcggaatgaaggaaagggggaaaaagggactaagggaggcttatggaagctgccacattgtactttcacttgcatcctattggccagaatttagttacatggctgaatcctacctgcagggaaggctgggaaacacactttttattctaagcagttgtgtgctccactaaacatttcactacttagaaaggggcayagaatggctctgaggggaaaccagcagtctgtcactctcatggatcatggagtagaaacaagtggctaccagaagtgtcaaagctggagtatttacttttgtgtatgagttgtttcttccttgggattgattgtctgaattaactgtgcccccattctcttctctaacttgcagggctgctcttgctagggaccacctgtggccattgtcttcatactttgacagactatccatctgtgttgggtacaacctgtggcaacaggatccc

SEQ ID NO: 406899 - DNA, 538 bp, Homo sapiens
tgccatcataagggtgtgttccttattcccctgtccatgatagagttccagtcatcatatccacattccaaggggcggaatgaaggaaagggggaaaaagggactaagggaggcttatggaagctgccacattgtactttcacttgcatcctattggccagaatttagttacatggctgaatcctacctgcagggaaggctgggaaacacactttttattctaagcagttgtgtgctccactaaacatttcactacttagaaaggggcacagaatggctctgaggggaaaccrgcagtctgtcactctcatggatcatggagtagaaacaagtggctaccagaagtgtcaaagctggagtatttacttttgtgtatgagttgtttcttccttgggattgattgtctgaattaactgtgcccccattctcttctctaacttgcagggctgctcttgctagggaccacctgtggccattgtcttcatactttgacagactatccatctgtgttgggtacaacctgtggcaacaggatccc

SEQ ID NO: 406900 - DNA, 567 bp, Homo sapiens
agctcacataggatgcgaaggcccatagttagtggcatcgtgtcttcatcaggggatcatgcctgcacctcaggttctgtggcayagcttatcatgttctgcaggtagaccattccatgctcaatactgtagagatttattttgtgctttcttacaaactctcataatcagtccctaccacctttcaaggtcagttcccactgggaaaagaaaggttttctttttacattctttccaagttttctgcttgccaatattccttggagccacaatagttctcctaccacttccagctgccctaacttctttgctcatgaccactctgggatctgggaccccatttctcggtaggatactgccatctctgtataggcatcagtggaggagtgaaaatggaccaggtcatgtttctcatactgccttgttctgttattctcctactcaaacttccttgacattttggctttggagctggttgctttatggtggcaaggtggctgctgcagctccaaccatcacttcttcatatgacagcatccaaaatgggaagcaaaagggacaatggca

SEQ ID NO: 406901 - DNA, 577 bp, Homo sapiens
ggttaacctgtactgattaccagtatgctagtcatcagaaaattattttggtagacataataatgtagtgttttggtgaaatgttcctctggtgcttgattacctttgggttaactgatgattcagttttctaactcctttcctgaaacccttgggccagatwtgtttcaggattcagatttctaaagaagatttttagaataatatcaagtatatatcataatttagataaaaccctgtgtgttttatctagtgtatggtatatactttatattataagcacctcaaaatcagacatattaataatgttcgtgcaataaaatacataaatacttaatgagatagaaaggttataagtagcttcatgtcaggttttgctgttaaatgagttatgaaaaaaaacctctttggtttttctgatctttgaggatttcagaattgcagagaaggcgtgtaggctggttttgggctttgggctggtggagctggggatccgacctgcctggtagtgacctctccagaaacaactgctcagttgcagccagtcagtctctctctgaccttctcttttgcagca

SEQ ID NO: 406902 - DNA, 577 bp, Homo sapiens
ggttaacctgtactgattaccagtatgctagtcatcagaaaattattttggtagacataataatgtagtgttttggtgaaatgttcctctggtgcttgattacctttgggttaactgatgattcagttttctaactcctttcctgaaacccttgggccagatttgtttcaggattcagatttctaaagaagatttttagaataatatcaagtatatatcataatttagataaaaccctgtgtgttttatctagtgtatggtatatactttatattataagcacctcaaaatcagacatattaataatgttcrtgcaataaaatacataaatacttaatgagatagaaaggttataagtagcttcatgtcaggttttgctgttaaatgagttatgaaaaaaaacctctttggtttttctgatctttgaggatttcagaattgcagagaaggcgtgtaggctggttttgggctttgggctggtggagctggggatccgacctgcctggtagtgacctctccagaaacaactgctcagttgcagccagtcagtctctctctgaccttctcttttgcagca

SEQ ID NO: 406903 - DNA, 577 bp, Homo sapiens
ggttaacctgtactgattaccagtatgctagtcatcagaaaattattttggtagacataataatgtagtgttttggtgaaatgttcctctggtgcttgattacctttgggttaactgatgattcagttttctaactcctttcctgaaacccttgggccagatttgtttcaggattcagatttctaaagaagatttttagaataatatcaagtatatatcataatttagataaaaccctgtgtgttttatctagtgtatggtatatactttatattataagcacctcaaaatcagacatattaataatgttcgtgcaataaaatacataaatacttaatgagatagaaaggttataagtagcttcatgtcaggttttgctgttaaatgagttatgaaaaaaaacctctttggtttttctgatctttgaggatttcagaattgcagagaaggcgtgtaggctggttttgggctttgggctggtggagctggggatccgacctgcctggtagtgacctctccagaaacaaytgctcagttgcagccagtcagtctctctctgaccttctcttttgcagca

SEQ ID NO: 406904 - DNA, 554 bp, Homo sapiens
gctttgtgttgtgtgaattcatcacacagagttaaacctttcttttgaaggtacaatttggaaacactgctttggtagaatcattgaagggatatttggtatcrcattgaagcctatgatgagaaaggaaatatctagttaaaaaccagaaagaaactttctgagaaactgatatgtgatgtgtgtcttcatctcacagtgttgaacatttcttttgctgtagctgtttggaagaaatgtttttctaggatctgcagggatatttgggagtttgttgagacctatggtgaaaaaggaaatatcttcagagaaaaactagaaagaggcttgctgaaaaactgctttttgatgtgtgcattcatctcacagattcaaaactttcttctggttgagcagtttggaaccactctttttgtagaatcagtgaggagatatttgggagcacattgaagcctatggtggaaaaggaaatatcttcaggtgcaaatttgaaagaagctctctgagaaagagctttgtgatgcatgcattcatctcacactcttaaacctttc

SEQ ID NO: 406905 - DNA, 648 bp, Homo sapiens
tttgggagtgcattgaggacaatggtgaaaaaggaaacatccttagagaaaaaatagaaaaaagctttctgagaaaccgatttgtgatgtrtgaattcatctcacagagttacaactttcttttcatggagaagtttggaaacactgtttttgtagaatccaggaagggatatttgggggctcattgagacctatgttgaatgaggaattatcttcagataaaaactagaaagaagctttctgagcaacttctttgtgatgtgagcattcatctcacacaatcaaaacttttcttttaagggagcagtttggaaacactctttctataaaatctgtgaagtgatatttgggagcgcattgaagcctacggtgaataaggatatgtcttcagagaaaaacatgaaagaagctttctgagaaactgctttgtaatgtgtgcatttgtctcacagaacaaaagctttttttttattgagcagtttggaggcactgtttttgtataatctgcgaagggatagtagggagtgccgtgcggtctatggtggaaaagaaaatatcttcagagaaaaacaagaaagatgcttcctgagaaactgatttgtgatttgtgcattcatctcacagatgtaaacatttcttttggtagaa

SEQ ID NO: 406906 - DNA, 648 bp, Homo sapiens
tttgggagtgcattgaggacaatggtgaaaaaggaaacatccttagagaaaaaatagaaaaaagctttctgagaaaccgatttgtgatgtatgaattcatctcacagagttacaactttcttttcatggagaagtttggaaacactgtttttgtagaatccaggaagggatatttgggggctcattgagacctatgttgaatgaggaattatcttcagataaaaactagaaagaagctttctgagcaacttctttgtgatgtgagcattcatctcacacaatcaaaacttttcttttaagggagcagtttggaaacactctttctataraatctgtgaagtgatatttgggagcgcattgaagcctacggtgaataaggatatgtcttcagagaaaaacatgaaagaagctttctgagaaactgctttgtaatgtgtgcatttgtctcacagaacaaaagctttttttttattgagcagtttggaggcactgtttttgtataatctgcgaagggatagtagggagtgccgtgcggtctatggtggaaaagaaaatatcttcagagaaaaacaagaaagatgcttcctgagaaactgatttgtgatttgtgcattcatctcacagatgtaaacatttcttttggtagaa

SEQ ID NO: 406907 - DNA, 537 bp, Homo sapiens
agctgggttaagagttgcacaagtgcgcattcacagcactagcacttcaaataatagagcctgatatttaagtaaaaagttgtctgacagccacaagtctcctttagcagtgagtatgctgttcacatcatgagatgtccacacagtaagatcccttccttgtattattttaactgctaaagatacctagattgttactgctgccactatccataaacaatgaggacaaccctttgccactgcatcaatttccttactcaggtatgccatgggttccaagctcatctctcagacctatgtaaggactcctggagctattcttgtttttttctgtgacatataaagaaaagtcttgycctgttgggaagcttaacactggggcttaagttagggccttctttagtgcctggaaagcctcttctgcttcagatgtccagcttactaaatgggtattggctgtctgagttcctttaattagtgtatatagtggtgtggctattttgcggtacctgggaatccatattcagcagaaacctg

SEQ ID NO: 406908 - DNA, 628 bp, Homo sapiens
gctgttcacatcatgagatgtccacacagtaagatcccttccttgtattattttaactgctaaagatacctagattgttactgctgccactatccataaacaatgaggacaaccctttgccactgcatcaatttccttactcaggtatgccatgggttccaagctcatctctcagacctatgtaaggactcctggagctattcttgtttttttctgtgacatataaagaaaagtcttgccctgttgggaagcttaacactggggcttaagttagggccttctttagtgcctggaaagcctcttctgcttcagatgtccagcttactaaatgggtattggctgtctgagttcctttaattagtgtatatagtggtgtggctattttgcsgtacctgggaatccatattcagcagaaacctgctatgccaaggaacacttttagttgctttagggtttcgggatgaggataagccagtataggctggataagttactcacagaggaccctggtgcctttggataattttagccctaagtatttaacctgctgggaaacactcttttcttacaatctgtgaagtcacatttccaagcccactgaggcctatattgaaaaactgagtatctc

SEQ ID NO: 406909 - DNA, 552 bp, Homo sapiens
aaacctttcttttgattcaggagtttggaaacactctttttgtagaatctgcaaagggacaattgggggttcacttagaccttcagtgataaacagaatatcacraaatgaaaactagaaagaatatatctgtgaaactgctttgtgctttgtgtattgagctcacagagttaaaccttactttttattcagcagtttggcaacactctttttgtggaatctgttaagaaacattttaaagggctttgaggcttacagtgaaaaactgaatatcctgcaatgaaaactagatagaggctatctgtgaaattacttttgatatgtggattcagctcacagagtgaaactactcttttgaatcagcagttggaaacactatttttgtagaatctgtgaagggatatttttgtccccagtgaggcctatagtgaaaaaccaaatatcccaaaataaaaactagcaagaaacactccatgaaacttctctgtgaagtttgcatttagctcacagagttgaaatttacttttgattcagcagtttggaaacactttt

SEQ ID NO: 406910 - DNA, 533 bp, Homo sapiens
aataaaaactagaaagaagctatctgtgacactgctttggatgagtggattcagctcacagtgttaaacctttcttttgattcaggagtttggaaacactctttttgtagaatctgcaaagggacaattgggggttcacttagaccttcagtgataaacagaatatcacaaaatgaaaactagaaagaatatatctgtgaaactgctttgtgctttgtgtattgagctcacagagttaaaccttactttttattcagcagtttggcaacactctttttgtggaatctgttaagaaacattttraagggctttgaggcttacagtgaaaaactgaatatcctgcaatgaaaactagatagaggctatctgtgaaattacttttgatatgtggattcagctcacagagtgaaactactcttttgaatcagcagttggaaacactatttttgtagaatctgtgaagggatatttttgtccccagtgaggcctatagtgaaaaaccaaatatcccaaaataaaaactagcaagaaac

SEQ ID NO: 406911 - DNA, 533 bp, Homo sapiens
aataaaaactagaaagaagctatctgtgacactgctttggatgagtggattcagctcacagtgttaaacctttcttttgattcaggagtttggaaacactctttttgtagaatctgcaaagggacaattgggggttcacttagaccttcagtgataaacagaatatcacaaaatgaaaactagaaagaatatatctgtgaaactgctttgtgctttgtgtattgagctcacagagttaaaccttactttttattcagcagtttggcaacactctttttgtggaatctgttaagaaacattttaaagggctttgaggcttacagtgaaaaactgaatatcctgcaatgaaaactagatagaggctatctgtgaaattacttttgatatgtggattcagctcacagagtgaaactactcttttgaatcagcagttggaaacactatttttgtagaatctgtgaagggatatttttgtscccagtgaggcctatagtgaaaaaccaaatatcccaaaataaaaactagcaagaaac

SEQ ID NO: 406912 - DNA, 525 bp, Homo sapiens
aaaaaagtgcttccaaactgtggactcaaaagtatggtttaactctgtgagctcaattcacacatcacagagcagtttcacagataaattctttctcgttttcattgkgggatattcagttttttatgatcagccttactctgcttcaaaatgtaccttcgcagactctacaaaaagagtgtttccaaactgctgaaccaaaataaaagtttaactctgtgagctgaattcccacatcacagagcagtttcaaagatagattctgtttagattttttgtgggatatttgatttatcactacagcccttgtgggctctggaatgtccctttgcagattctacaaaaaaagttttcaaactgcttaatcaaaagaaaggtttaactctgtgagccaaatgtagacatcacaaagcagtttcacagataacttctttccagtttttatcacaggatattctgtttctcactatagaccttactgcactccgaaatgcttcttcatagattctacaaaaagagggtttt

SEQ ID NO: 406913 - DNA, 504 bp, Homo sapiens
ttcacagatagtttctttttagtttttattgaaagatattcagatttcactgtaggcctcagtgggtttttcaatgtcagttcttagattctacaaaaagagtgtttctgacgtgatgaaacaaaagaaatgttcaactctgtgagctgaatccacacatcacaaagtagtttcacaggtagcttctttcagttgttaacatgggcctagtgggctctgaaaagtccttttgtggtttctacaaaaagagtgttgccaaactgctgaatcaaaggaaaggtataactctgtgagctgaagggagacatcagaaagcagtttcaaagataaattctttctagtttttatctagggatactcagtttttcactataggccttactatgcactcaaatatccaatcacagtttctgcaaaaagagtgttttcaacctgctgaatcraaacggaagtttagctttgtgagctgaatccacacatcacaaagcagtttcacagatagtc

SEQ ID NO: 406914 - DNA, 581 bp, Homo sapiens
gaatccaaacatcacaaagcagtttcccagatagcatccttctagatttcatagcaggatattctgattttcactataggcctagtaggttcagaaatgtcccctcacagatcctacaaaaaggctgtttccaaactgttgagtttatagaaagctttaacttggtgagctgaatgcagacattagaaagcagttttgcagatagatactttctagtattaattgcaggatactcggtttttcactataggcttttctgcaccctgaaatgtccctttgaagattctacaaaaagagtgtttccaaactgctgaatcaaaggaaatgyttaactctttgagctgaatgcacacatcacatagcagtttcacagatagtttctttttatttttattgtgagatattcagtttttcactaaaggccttacagtgctctgaaatatccattcgcatattttttaaaaagtgattccaaccagctgaatcaaaaggaaggttgaactctgttagctgaatccatacatcacaaagcagtttcacagacagcttgtttctagtttttattgcaggatactcatttt

SEQ ID NO: 406915 - DNA, 582 bp, Homo sapiens
tttaactctgtgagctgaatccacacatcacaaagtggtttcacagataacttctttctagtttttattacaagatattcagttttcactataggcttcagtgggctcaaaaatatcccttcccagattttagaaaaagaatgtttccaacccactgaatgaaaagaaatgtttaagactgtgagctgaatgcagasatcacaaagcaatttcaaagatagcttattcccagagttttctctttatatttggtttttaactatatgcctagtgggctttgaaatgtactttcacagatgcaacaaaaacagtgtttccaatttgctgaatcaaaagaaagatttaactttgtgagattaatccacacattacaaagcagtttcacagacagattttttttttttttttagtttttattgtgaaattttctgttttcgtaataggcctcagagggttgagaaaaggccctttacagatcctacaaaaggagtgtttataacctactgaatcaaaagaaagatttaactttgtgagatgaatccacacatcacaaagcagtttcacagatagcttatttctagc

SEQ ID NO: 406916 - DNA, 511 bp, Homo sapiens
taggatatacagattttccccatatgcctcaatgggctctcaaatatccctttgcagatagtccaaaaagagtgtttccaaccagctgaatcaaaagaatggtttatctcagtgagatgaatcctcacatcacaaagcagtttcacaaatatcttctttctagtatttatctgaggatatttgtttttttcacataggamtcaatgggctcctaaatgtcccttagcagattctccaaaaacagcatttccaacctgctgaatcaaaagaaaggtttaactctgtgagatgaatccatacatcacaaagcagtttcacagatagattctctctagtttttatctggggatactcgatttttcccagtaggcttcaatgggctctaaaaggtccatttgcagaatctccaaagatagagtttccaacctgctgaattaaaaaaaaaaaaaaaaaaactttcacacttgacatgaatccacacatcacaaagcagttttccagacagcttctt

SEQ ID NO: 406917 - DNA, 511 bp, Homo sapiens
taggatatacagattttccccatatgcctcaatgggctctcaaatatccctttgcagatagtccaaaaagagtgtttccaaccagctgaatcaaaagaatggtttatctcagtgagatgaatcctcacatcacaaagcagtttcacaaatatcttctttctagtatttatctgaggatatttgtttttttcacataggactcaatgggctcctaaatgtcccttagcagattctccaaaaacagcatttccaacctgctgaatcaaaagaaaggtttaactctgtgagatgaatccatacatcacaaagcagtttcacagatagattctctctagtttttatctggggatactcgatttttcccagtaggcttcaatgggctctaaaaggtccatttgcagaatctccaaagakagagtttccaacctgctgaattaaaaaaaaaaaaaaaaaaactttcacacttgacatgaatccacacatcacaaagcagttttccagacagcttctt

SEQ ID NO: 406918 - DNA, 441 bp, Homo sapiens
cttctttctagtttttatctggggatattctctttttcctcgtaggcctcaatgagctcaaaaatggccaattgcaaattctataaaaaaagtgtttcccaacctgctgaatcaaaagaaaggtttagctctttgtgatgagaccacacatcacaaagcaatttcacagatagcttctttctagtctttatctgggaatattcagtttttccccataggcctcaatggactctgaaacgtccctctacagattttcaataaggatgtttccaacctgctgaattaaaaaaaaaggtttaactctgtgagattaatccaaatatcaaaaagcagattcacagatagcttctttatagtttttatctggggatattcagttttyccccattggcatcaatgggctttcaaatgtcccttcacagcttctccaaataaaatgtt

SEQ ID NO: 406919 - DNA, 566 bp, Homo sapiens
aaagaaaggtttaactctgtgagatgaatccacacttcactaagcagttttaccratagcgtctttctagtttttatataaggatattcgttttttctcaaacacctcaatagactccaaaatttcactttgcagatactccaaaaagagtgttaccaacctgctgaatcaaaagaatggtttaactccgtgagatgaatccacacatcacaaagcagttttacaaatagcttctttctagtttttttctgacaatattcagtttttgcacgtagccctcaatgggcccccaaatgtccctttgcagattctccaaaaagagcattttcaaccttctgaatcaaaagacaggtttaactctgtgagatgactccacatcacaaagcagtttcacccatagctactttctagtttttacctagggatattcagtttttcccaataggcctcagtgggctctaaaatgtcccttcacagaatatccaaagagagtgtttcccaacgtgctgaataaaagaaaggtttcactctgtgactgaatccacatgtcacaaagcagtttcaca

SEQ ID NO: 406920 - DNA, 566 bp, Homo sapiens
aaagaaaggtttaactctgtgagatgaatccacacttcactaagcagttttaccgatagcgtctttctagtttttatataaggatattcgttttttctcaaacacctcaatagactccaaaatttcactttgcagatactccaaaaagagtgttaccaacctgctgaatcaaaagaatggtttaactccgtgagatgaatccacacatcacaaagcagttttacaaatagcttctttctagtttttttctgacaatattcagtttttgcacgtagccctcaatgggcccccaaatgtccctttgcagattctccaraaagagcattttcaaccttctgaatcaaaagacaggtttaactctgtgagatgactccacatcacaaagcagtttcacccatagctactttctagtttttacctagggatattcagtttttcccaataggcctcagtgggctctaaaatgtcccttcacagaatatccaaagagagtgtttcccaacgtgctgaataaaagaaaggtttcactctgtgactgaatccacatgtcacaaagcagtttcaca

SEQ ID NO: 406921 - DNA, 502 bp, Homo sapiens
tctgtttttccacattggccccaatgagctcccaaatgtccctttgtagattctctaaaaagagtgtttcaacaggctgaaccaaaagaaaagttaaactctgtgagatgaatccatatattacaaagcattttcaaacatagtttctttctagtatttatatgggatattctgttttacaccatagaactcaatgggctcccaaatatsccttcacagattccttaaatagagcgatttcaacctgctgaatcaaaagaaaggtctgtctgtgtgagaggaatccacacatgacaaagcagtttcacatttagatgctttctggtttttatctggggctactctgtttttccccataggcctcagtggactcccaaatgtcagctctaagattctccaaaaagagtgtttccacctggttaatcaaaataaagtttaacttgttgagattaatgcacacatcacaaagcacattcacagatagtttccttccaggttttat

SEQ ID NO: 406922 - DNA, 553 bp, Homo sapiens
aggcagaggctgtcatggactccatgcacacagagaatgcctaaaccttgaggctggactatgaggagaacattcctgaacaggtgcatgcagcctggtcctgccctcagtgggaacccccttcctcttgggtactagacagaatgctgtgcactttcctggaggctccttgctggtctgttcatttggaagtttgaggctgtccatagggaggtaacaaaagagacttctcctccgtctgaaaaaaaaagacttctcagagcatgttgtggggcacaggctgagcccttgcctctctccctggtccctctgcagactgaggactgaaacaaggagctgcagacaatgagggaactattctgcaagaaccggccttagcggytgcttcaagaaagaacaacaatcaaaatgcctacagcctcgactgactggcagcctcaggcccatctactatctgcaggcaggttttcttgctgacaggatgaaagcaaggaaagcagaaatgagcccagccctctcaggcaccctgaaggctgtctggggtcccctgcaa

SEQ ID NO: 406923 - DNA, 619 bp, Homo sapiens
cacttcaactcggacatctcaccagaaacagtggggactggccaatctggccaatgcagaagctctgcaaagtgggacagagcatcatggggtgggggatctggggactgtctgctcatctgagcattgcttcctgggtgtgtgctctgcaggcttccttaaagaggattgtgagctcatcagggaggtcctgagcctgtagaacatgcctgaggccacacccatggggattacgcctacttgcacctctttgctcattccacaacactatgggtgactatgccgagatgggcctcaagcaccccctgggctgtgtcagcaaaggcctttaggcctggcctggaatggaaggatggaaaacgaggggtctggggttgcattgtcaccctctatggtaccacaaaatgagagagtccagacctgcatgactggaatcctatcaagggggttaggaggctgctcaattcctctcagggccccatgtggaggagcagagtgagggtagggagacccaggggactcacatgttctgtatgggctgyccccagctccaccctttgataaccatcttctgggaagagctcaggaacctcctgtgctctagtgaggcagggcctcc

SEQ ID NO: 406924 - DNA, 455 bp, Homo sapiens
gagaaaacgccggcatgaaggctaggtgggggagagatgccaggctgtggggctaggccctgggcatgctgagcctgttatgtcactggacatctaactgcccgggcaccagcccttgtcacatcagttgaggtaagaagattgggcagtactcttcagaagtcacactgctctgggagaatggaggagaatctacaacttctcatcctagggtaggttttagagtgagctggacactcttggagagctaatgagatgggaggaaggcagtcccccaggtgcacctgatggccagaacataggaagtgaggcggggtgtgtgcgggtggccagtccctatgagaggaggagtttaaagcttttacagctggtggctgctgctcagtcatccctctgcatagcaggcaggtcctcagccacaygtatagctgaatgtcttttggagtgtttagagg

SEQ ID NO: 406925 - DNA, 521 bp, Homo sapiens
ttaaaccatttttttttttttaattcagtggtttggaaacagtctttttgcagaatctgtgtagggatatttcagagcacagtaaggcctatagtgaaaaaccaaatatcctgtgataaaaactagaaagaagctatctgtgaaaatgcttgtcaagcctccattcaactcacaaggttaagcctttcttttgattcagcagtttggaaactctctttgtgtagaatctgtgaagggacatttcaagacccctaggcctctagtgaaaaagtgaacatcccatgataaaatctagaaagaagctatatgagaaagtattttgcaatttgtggattcagctcaaaaaataaamcattttttggatgctgcagtttggaaacactttttttgtagaatctgcaaagggacatttcagggtgctgtcaggcctatagtgagaaactgaatattcctagataaaaactagaaaaagtttatcattgaaactgcttcctgaggtgtgcattcaactcacagattta

SEQ ID NO: 406926 - DNA, 578 bp, Homo sapiens
tgaaaaacagaatagctcgtgataaaaactagaaagaagctgtctgtgaaactgctttgtaatatctgcatttgtctcacaaagttaaaccttcttttgattcagcagtttggaaaaataaatttttgtaggatctgcaaggaatawtttggagcctactaagtctatagtgaaaatctaaatatcttgtgattaaaactaggaagaagctatctgtgaaactgctctgtgatgtatagattcagttcactgagttaaaactttcttttgattcagcagattggaaacactctatttgtagaaactgtaaaaggacatttcagagtgcagtaaggcctatagtaaaagaccaaatatgcctagataataactagaaataagttatgtaaaaccgctatgtggtttctgcatttagctcacaaaggtaaacctttcttttgattcagcagattggaaacactttttttgtagaagagatgtttcagaccacagtgaagtttatagtgaaaaaccaaatatcttgcaatgaaaaactagaaagaagctatgtgtgaaactgcttggtgatgagaagactc

SEQ ID NO: 406927 - DNA, 578 bp, Homo sapiens
tgaaaaacagaatagctcgtgataaaaactagaaagaagctgtctgtgaaactgctttgtaatatctgcatttgtctcacaaagttaaaccttcttttgattcagcagtttggaaaaataaatttttgtaggatctgcaaggaataatttggagcctactaagtcwatagtgaaaatctaaatatcttgtgattaaaactaggaagaagctatctgtgaaactgctctgtgatgtatagattcagttcactgagttaaaactttcttttgattcagcagattggaaacactctatttgtagaaactgtaaaaggacatttcagagtgcagtaaggcctatagtaaaagaccaaatatgcctagataataactagaaataagttatgtaaaaccgctatgtggtttctgcatttagctcacaaaggtaaacctttcttttgattcagcagattggaaacactttttttgtagaagagatgtttcagaccacagtgaagtttatagtgaaaaaccaaatatcttgcaatgaaaaactagaaagaagctatgtgtgaaactgcttggtgatgagaagactc

SEQ ID NO: 406928 - DNA, 578 bp, Homo sapiens
tgaaaaacagaatagctcgtgataaaaactagaaagaagctgtctgtgaaactgctttgtaatatctgcatttgtctcacaaagttaaaccttcttttgattcagcagtttggaaaaataaatttttgtaggatctgcaaggaataatttggagcctactaagtctatagtgaaaatctaaatatcttgtgattaaaactagraagaagctatctgtgaaactgctctgtgatgtatagattcagttcactgagttaaaactttcttttgattcagcagattggaaacactctatttgtagaaactgtaaaaggacatttcagagtgcagtaaggcctatagtaaaagaccaaatatgcctagataataactagaaataagttatgtaaaaccgctatgtggtttctgcatttagctcacaaaggtaaacctttcttttgattcagcagattggaaacactttttttgtagaagagatgtttcagaccacagtgaagtttatagtgaaaaaccaaatatcttgcaatgaaaaactagaaagaagctatgtgtgaaactgcttggtgatgagaagactc

SEQ ID NO: 406929 - DNA, 605 bp, Homo sapiens
acatcacacactggggcctgtcagagaatgggggtcaaggagagagagagcgttaggagaaataactaatgcatgtgaggcttaaaacctagatggcgggttgataggcgcagcagccgggcagggcggctcacgcctgtaatcccagcactttaggakgtggaggcgggcggatcacctgaagtcgggagttcaagataggtgccgcaaacccccatggcacatgtaaacctatggaacaaacctgcacgttctgcacatgtatcccagaacttaaagtttttttttaaaaaagggcactaaggctgagggggagtggcggtggggggggagtgggtgggccctggagctttatgcaatcggtggcggtggcgtgggaacagcccaatcaggcacgcagttggagaggaaggaagggcgtggcttccagtgtttggcgggaactttttctctccctggcgccagaacttgggatccatctctactcttccaccttctccatgttgggagctccatggggccttcctcacaatctcttttgccctgtaatctgaaggtacttggggacgcatagctaagataccagaacatcctggaagctggga

SEQ ID NO: 406930 - DNA, 543 bp, Homo sapiens
aaaactagcaagaaactatctgtgaaaccgctttgtgatgtatggattcagcttccagagttaaaactttcttttaattcagcagtttggaaacgctctatttgtagaatctgctaagggacatttcagagcacattaagtcttatagtaaaaaacccaatatcccgtgataaaaattaggaagaagctatctgtgaaacttttttgtgatgtctgcattcagatcacagggytaaacctttcttttgattcaactcttggaaatactctttttgtagaatctgtgaagggacatttcagaggccactaggcctatagtgaaaaactgaatatcccatgaagaaaaacagaaagaagctaactgaaactgctttgtgatatgtggattaagttcacagaattcatcttttcttttgattcaagcagtttggaaacactctttttgtagaatctgtgaagggacatttcagagctcagtaaggcctatagtgaaaaaccaattatctcatgataaaaactgggaagatgttgtctgtaaaactg

SEQ ID NO: 406931 - DNA, 588 bp, Homo sapiens
acactgttctttagattcagcagtttggaaaaacttttttcacagaatctgcaaacagacatttttaagttcaataaggtcaacagtgaaaaacggattgtcctgtgataaaaattagagataatttatctgtgaatctgctttgggaagtgtgcattcrgctcacacatttaaatttttttttcattcagcagtttggaaacactctttttataggatctgcaaagggacatttcagagggcatcatggcctatagggaaaatggaataacccacgataaaaaacagtaagaagctatctgtgatactactttgtgatgtgtggactcagctcacagtgtttagcctttcttttgattcagctatttggaaaaactctttttgtagaatctgcaaagggatatttcagagccaactagacctatagggaaaaacaaaatatcccacaataaaatctaggaagactctatctgtaaaactgctttgggatgtgtggattcagctcacagagttaaaacattctttgattcagcagtttgaaaacactctttttgaagaatctgcgaagtgacatttcagaacatagta

SEQ ID NO: 406932 - DNA, 518 bp, Homo sapiens
aaaactagaaagaagctatctgtgtaactactttgtgatatgtggattcagctcccagagttacactgttctttagattcagcagtttggaaaaacttttttcacagaatctgcaaacagacatttttaagttcaataaggtcaacagtgaaaaacggattgtcctgtgataaaaattagagataatttatctgtgaatctgctttgggaagtgtgcattcggctcacacatttaaayttttttttcattcagcagtttggaaacactctttttataggatctgcaaagggacatttcagagggcatcatggcctatagggaaaatggaataacccacgataaaaaacagtaagaagctatctgtgatactactttgtgatgtgtggactcagctcacagtgtttagcctttcttttgattcagctatttggaaaaactctttttgtagaatctgcaaagggatatttcagagccaactagacctatagggaaaaacaaaatatcccacaataaaatc

SEQ ID NO: 406933 - DNA, 555 bp, Homo sapiens
agctcccagagttacactgttctttagattcagcagtttggaaaaacttttttcacagaatctgcaaacagacatttttaagttcaataaggtcaacagtgaaaaacggattgtcctgtgataaaaattagagataatttatctgtgaatctgctttgggaagtgtgcattcggctcacacatttaaatttttttttcattcagcagtttggaaacactctttttataggatctgcaaagggacatttcagagggcatcatggcctatagggaaaatggaataacccacgataaaaaacagtaagaagctatctgtgatactactttgtgatgtgtggactcagctcacagtgtttagcctttcttttgattcagctatttggaaaaactctttttgtagaatctgcaaagggatatttcagagccaacyagacctatagggaaaaacaaaatatcccacaataaaatctaggaagactctatctgtaaaactgctttgggatgtgtggattcagctcacagagttaaaacattctttgattcagcagtttgaaa

SEQ ID NO: 406934 - DNA, 590 bp, Homo sapiens
aacccacgataaaaaacagtaagaagctatctgtgatactactttgtgatgtgtggactcagctcacagtgtttagcctttcttttgattcagctatttggaaaaactctttttgtagaatctgcaaagggatatttcagagccaactagacctatagggaaaaacaaaatatcccacaataaaatctaggaagactctatctgtaaaactgctttgggatgtgtggattcagctcacagagttaaaacattctttgattcagcagtttgaaaacactctttttgaagaatctgcgaagtgacatttcagaacatagtaaggcctgtataaaaaaactaatatccctacataaaaatcagaaagaaattatctgtgaaactgcttctgatgtctgcattcagctcctagagttaaacctttccttttttcagawgtttggaaacactctttatgtagaatgtgcaaagagacattttgaagcacagtgaggcctatatgaaaaaacaaatatcctgtgataaaaactgtaaagaagctatctgtaaaactactttgtgatgtgtgcattcagctaacagagctaagcctt

SEQ ID NO: 406935 - DNA, 508 bp, Homo sapiens
cgatcactctaaatgcttcctgctgaattggagcatagtaggggttgtgcagttgagatttcctcaggaggggtggcttccatatcattaacatcagagcatgggctagaaggccagtccaggaatctgtggtagattttagtcatggattgcatctggggctccatttgaagaatgatttgtagctttacagctctgattctggaagagacaaacttaacaaggaggttaaagatacagggtccaaagaggagtagcaatattatagctactaraggttctaagaaggggagaatccaaggcatccattggatggcaaggccccagagtccagtgttttgaagctcctcggttctatgttgtaatcaatctcaaatttctttaactttctcagtcatgattccagattgatttacataataacagcattcttgccctaataataaacagattcccccactttcagtggttagcaagtctaaagctctttgattttgaaggactactg

SEQ ID NO: 406936 - DNA, 551 bp, Homo sapiens
tttttggttcgatgtgagctcagttgcaagccccatgtttaaaggtggaagcagtcaccttgccagctaggcttagggattcttagtcagcctaggaaatccaggtagctctgtctctcagttccacctctcaagaggaaaacccaagtgctgttggggaggttggccaacgatcactctaaatgcttcctgctgaattggagcatagtaggggttgtgcagttgagatttcctcaggaggggtggcttccatatcattaacatcagagcatgggctagaaggccagtccaggaatctgtggtagattttagtcatggattgcatctggggctccatttgaagaatgatttgtagctttacagctctgattctggaagagacaaacttaacaaggaggttaaagatacagggtccaaagaggagtagcaatattatagctactagaggttctaagaaggggagaatccarggcatccattggatggcaaggccccagagtccagtgttttgaagctcctcggttctatgttgtaatcaatctcaaatttct

SEQ ID NO: 406937 - DNA, 500 bp, Homo sapiens
atttgtggattcaattatcagagttaaacccttcttttaattcagcagtttggaaacactcttttttgagaatctgcaaaagaacatttgggagcccattgtggcctatgggaaaaactcaatatctccagataaaaactagaaagaagctatctgtgaatctgctttgtgatgtgtggattcatctcacagagccaaacctttctcttgtttcagcaggttggaaacactgtatttggagattgtgaaaagacatttgggagcccattgatgcctatgaggaaaaactgaatatyccctgatgggaactagaaagaagctttctgtgaactgtttgtgatgtgtgaattcatctcacagagttaaacctttcttttgattcagcaggttggaaacactgtttttggaaaatcagcaaagggacatttgggagccctttgaggactatagggaaaaatggaatatccccagataaaaactagaaagaagccatctgtgaa

SEQ ID NO: 406938 - DNA, 434 bp, Homo sapiens
tttgggagcccattgaatcctataagaaaaatggaatatcaccagataaaaactagaaagaagctatgtgtgaaactgctttctgatgtgtggattcatctcacakagttaaagttttttttcattcagcagattagaagcactctttttggagaatttgcaaagggacatttgggaggtcattgagacctatgggaaaaatagtatatgtcctgaaaaaactagatagaagctatctgtgaaacagctttgtgatgttggattcacctcacagagttaaacctttcttttgattcagcaatttataaaaactgtaatttgagcatctgcaaagggacatttaagagcacattttggcctttggggaaaaacagaatatccccagataaaaactagaaagaagctatctgtgaaactgctctgtgacatgtgga

SEQ ID NO: 406939 - DNA, 595 bp, Homo sapiens
ggacatttgaaagcccattcaggcytatgggagaaaacacaatatccccatacaaaaagtagaaagaacctatctgctttgtgatgtgtggattcatctcactgggtcaaacctttcttttgattaagcatgttggaatcactcttcttttacaatctgcaaggggacatttgggaggcctttcagggctatttggaaaaactgaatatccccaaataaaaactagaaaaatctattggtgaaactactttgtgatatgtggattcatctaacagagttaaacttttcttggattacgcaggatgtaaatactctatttgaaggatctgtgaagggacatttgggagcatattgaggccaatagggaagcctgaataccctagataaaaactagaaagaagctatccgtgaaactgctttgtgatgtgtggattcatctaactgagttaagccttttgttggattcagcaagttggaaacactctttttggagaatctgtaaaggtacatttgggagcccattttgtcctatgaagaaaaacagaatatccccagatgaaaattagaaagaagctatctgtgaaactccgttatt

SEQ ID NO: 406940 - DNA, 595 bp, Homo sapiens
ggacatttgaaagcccattcaggcctatgggagaaaacacaatatccccatacaaaaagtagaaagaacctatmtgctttgtgatgtgtggattcatctcactgggtcaaacctttcttttgattaagcatgttggaatcactcttcttttacaatctgcaaggggacatttgggaggcctttcagggctatttggaaaaactgaatatccccaaataaaaactagaaaaatctattggtgaaactactttgtgatatgtggattcatctaacagagttaaacttttcttggattacgcaggatgtaaatactctatttgaaggatctgtgaagggacatttgggagcatattgaggccaatagggaagcctgaataccctagataaaaactagaaagaagctatccgtgaaactgctttgtgatgtgtggattcatctaactgagttaagccttttgttggattcagcaagttggaaacactctttttggagaatctgtaaaggtacatttgggagcccattttgtcctatgaagaaaaacagaatatccccagatgaaaattagaaagaagctatctgtgaaactccgttatt

SEQ ID NO: 406941 - DNA, 595 bp, Homo sapiens
ggacatttgaaagcccattcaggcctatgggagaaaacacaatatccccatacaaaaagtagaaagaacctatctgctttgtgatgtgtggattcatctcactgggtcaaacctttcttttgattaagcatgttggaatcactcttcttttacaatctgcaaggggacatttgggaggcctttcagggctatttggaaaaactgaatatccccaaataaaaactagaaaaatctattggtgaaactactttgtgatatgtggattcatctaacagagttaaacttttcttggattacgcaggatgtaaatactctatttgaaggatctgtgaagggacatttgggagcatattgaggccaatagggaagcctgaatacccyagataaaaactagaaagaagctatccgtgaaactgctttgtgatgtgtggattcatctaactgagttaagccttttgttggattcagcaagttggaaacactctttttggagaatctgtaaaggtacatttgggagcccattttgtcctatgaagaaaaacagaatatccccagatgaaaattagaaagaagctatctgtgaaactccgttatt

SEQ ID NO: 406942 - DNA, 611 bp, Homo sapiens
catttgggagcatattgaggccaatagggaagcctgaataccctagataaaaactagaaagaagctatccgtgaaactgctttgtgatgtgtggattcatctaactgagttaagccttttgttggattcagcaagttggaaacactctttttggagaatctgtaaaggtacatttgggagcccattttktcctatgaagaaaaacagaatatccccagatgaaaattagaaagaagctatctgtgaaactccgttattatgtgtgggttcatctcacagatttaaaccattcttttgattcagcaggttggaaacattatttttggagaatctgcaaaaagacatttgggagcccattgagacctatggggaaaaaccaaatatttccagaaaaaaaagtagatagaacttatctttgaaactactttgtgatgtgtggattcatctcacagagttaaactttttgtgattcagcagtttggaatcactctttttgaagtatctgtgaagaaacccttcggagcctattgcagcctattaggaaaactgaatatttccaggtaaactggacagaagctatctgtgatactgctttgtgatctgtggattcc

SEQ ID NO: 406943 - DNA, 541 bp, Homo sapiens
ggctatttgtgaaactgctttgggatgtgaagattcatctaacagagttaaaccttccttttcattcagcagtttggaaacaattattttggagaatgtacaaagggacatttgggatcccatggaggcttatggagaaaaaccgaaaatccccagatgaaaactagaaggagctatctgcgaaattgctttgtgatgtgtggattcatctcacagagtaaaaactttcttttgattaagcaggttggrtataccctatttggagaatttatgaatggacatttggaggccattgaagcctacattaaaaaaatgaatatctccagataaaaactagaaagatgctatctgtaaatctgctttgtgatgtgtagattcatctcacattgctaaactttcttttgattcaacaggttggaaatactttttctgatgggtctgtgaagggacatttaggagcccagtgaggcctattgaaagaaatggaatatcttcagataaaaacgagacagaagctatctgtgaaactgctttgtgatat

SEQ ID NO: 406944 - DNA, 360 bp, Homo sapiens
tgacctgtactttgaaaaattgcttggctgatatgctgttaatttgtaactttgccccagycactttgccccagccactttgccccaaatttgagctcacaaaaacatgtgttgtatggaatcaaggcttaagggatctaggtctgtgcaggacatgccttgttaacaaaacgtttacaagcattatgtttgataaaagtcattgtcattctctagtctcaataaaccaggggcacaatgtactgtgaaaagccacagggacctcagccttggaaagctgggtattgtcccaggtttctccccatgtgatagtcttaaatatggcctcttgggatgagaaagacctgactatcccccagc

SEQ ID NO: 406945 - DNA, 587 bp, Homo sapiens
agaagtctgggactcaaacactggatagaggagtagctattttacaggctctaaatagctcctccaagtgtggaaccaggaccatctgatgaccacatgcatcacccaggggcttgttagacacatagatccagagtctccaccccagccactgactctgaatctgcattttcacaagtttcacaggtgacctgtgtgcacatgaatgctgacaagcactgatgtggagagcatctgaggaatacccaggttcaggtgggctgctgctctgaaaagcaagagtggggagaaacgctggggcaaggaagagcacgtggtgctagagtytggtctctaaggggacggccccagctgtgtgtccagcccagttgctccaattatgtctgtttttttatctagtcgggctgaaaagagtcattcaaatttgcataaggaggcctgaggtaaaggggcttgcgggcatgggtactcatctgacacctcactaagccatcttggtaaatcatctctagaatgcctgttgttattttgggaaacaccacaaagaggatgataattaaaagtaacaccctgagtgggaatttcta

SEQ ID NO: 406946 - DNA, 587 bp, Homo sapiens
agaagtctgggactcaaacactggatagaggagtagctattttacaggctctaaatagctcctccaagtgtggaaccaggaccatctgatgaccacatgcatcacccaggggcttgttagacacatagatccagagtctccaccccagccactgactctgaatctgcattttcacaagtttcacaggtgacctgtgtgcacatgaatgctgacaagcactgatgtggagagcatctgaggaatacccaggttcaggtgggctgctgctctgaaaagcaagagtggggagaaacgctggggcaaggaagagcacgtggtgctagagtctgktctctaaggggacggccccagctgtgtgtccagcccagttgctccaattatgtctgtttttttatctagtcgggctgaaaagagtcattcaaatttgcataaggaggcctgaggtaaaggggcttgcgggcatgggtactcatctgacacctcactaagccatcttggtaaatcatctctagaatgcctgttgttattttgggaaacaccacaaagaggatgataattaaaagtaacaccctgagtgggaatttcta

SEQ ID NO: 406947 - DNA, 587 bp, Homo sapiens
agaagtctgggactcaaacactggatagaggagtagctattttacaggctctaaatagctcctccaagtgtggaaccaggaccatctgatgaccacatgcatcacccaggggcttgttagacacatagatccagagtctccaccccagccactgactctgaatctgcattttcacaagtttcacaggtgacctgtgtgcacatgaatgctgacaagcactgatgtggagagcatctgaggaatacccaggttcaggtgggctgctgctctgaaaagcaagagtggggagaaacgctggggcaaggaagagcacgtggtgctagagtctggtctctaaggggacggccccagctgtgtgtccagcccagttgctccaattatgtctgtttttttatctagtcgggctgaaaagagtcaktcaaatttgcataaggaggcctgaggtaaaggggcttgcgggcatgggtactcatctgacacctcactaagccatcttggtaaatcatctctagaatgcctgttgttattttgggaaacaccacaaagaggatgataattaaaagtaacaccctgagtgggaatttcta

SEQ ID NO: 406948 - DNA, 543 bp, Homo sapiens
ctgccttggcctctcaaagttctgggattcaaggcatgaaccactgtgctccgccacataaatttttttttaattagctgggcatggtggggcatgcctgtgatcctagctactcaggaggctgtggtgggatgaccacttcagcacagggggccaagactgcagtgarctataatcatgccactgcactccagcctggataacagagtgagaccctgtctctaaaatataaaataataaataaaataataaaaagagagtacctggtagggcaaccatagactatcttatcaagataagaaaacaccctctgtgggccaaggtgatgcagccagctcacacaggattttacatagaattaattttatttattttttatttatttatttattttttgggacagaatgtagggagaccccatgaaactattgctatggaataaaagatgaaatgttcctgattattgtaaatacaaagctgcatgctggattgtgtaaagacaatgccaggttggactgccagaatgagccaacagcacatgat

SEQ ID NO: 406949 - DNA, 466 bp, Homo sapiens
gctcaccagtggtcagagtttaaggttatctctcttgttccctgaacattgcttttatcctgttcttttttcaagttggccagatttcatattgttcaaacacacatgctctacaatttgtgcagttaatgcaattgtcacagggtcctgaggtgacatacatcctcctcagcttatgagatgacaggattaagagattaaagtaaagacaggcataggaaatcacaagggtattgattggggaagtgataagtgtccatgaagtyttcacaacttatgcttagagattgcaataaagacaggcataagaaatcataaaaatattaatttggggaactaataaatgtccgtgaaatcttcacaatccacattcttctgccatggcttcagctggtccctccatttggtccctgacatcctgcaacagttgcttttcctatttaaaaaaaaaaaaaaaaaaaaggta

SEQ ID NO: 406950 - DNA, 592 bp, Homo sapiens
gaattcgatctctccatgttttctccccaagaggaggaacatggtgatgatcccctccctctgcctcytatcttggaacctgtaagtgttaaatcttcttctactaagccattgccccctctgccagaggaggatgtgtggtattcatctgaatggcctgattctcattcctctcatccctttggacctctcccctcttctaagcctactgtttctttcaatgctgtgggaccccttctttcagaggtttggattcctgcttcaccctagtccacctcccagtgccctcactctccttctctcttttcctctgcccctgcacaatagatgtatgagtcacctgtttgtgtagagcagtggccactttccaaacacaagttggaggctttaattgaaattgttaatgatttactacaagcaaacactattcagccctctttgtctccatggaactcgcctgtgtttgttgtacaaaaaaagtcaggaaaatggaggatggtaacacacttaaaagctgttgatgcagttattaaacctatgggggtgttacaacccagtatgccctccccctccgtgattcctaaggaatggc

SEQ ID NO: 406951 - DNA, 592 bp, Homo sapiens
gaattcgatctctccatgttttctccccaagaggaggaacatggtgatgatcccctccctctgcctcttatcttggaacctgtaagtgttaaatcttcttctactaagccattgccccctctgccagaggaggatgtgtggtattcatctgaatggcctgattctcattcctctcatccctttggacctctcccctcttctaagcctactgtttctttcaatgctgtgggaccccttctttcagaggtttggattcctgcttcaccctagtccacctcccagtgccctcactctccttctctcttttcctctgcccctgcacaatagatgtatgagtcacctgtttgtgtagagcagtggccactttccaaacacaagttggaggctttaattgaaattgttaatgatttactacaagcaaacactattcagccctctttgtctccatggaactcgcctgtgtttgttktacaaaaaaagtcaggaaaatggaggatggtaacacacttaaaagctgttgatgcagttattaaacctatgggggtgttacaacccagtatgccctccccctccgtgattcctaaggaatggc

SEQ ID NO: 406952 - DNA, 578 bp, Homo sapiens
tcactaaaatttctggctttcatccaaacattattgtggtccctttgtcaaaaaatgaagttaaaaataccttttctacatccttgtgctggcagactaatctggctgacttcattggcactatagataatcayttgcctaagtcaaaattctttcaatttctatgaaatacttcctggattctaccaaaacttactcgttcatcaccactagaggcagccattaccatttttactaatgggtccaataatggaaaggcagggtatgtaggaccaaaagataaagtcatttctactccatacacttctgctcaaaaagccaagttgtttgctgttatctctgcattacaggattttgatcagcctcttaatattgtctcgactcagctcaagtagtccatgccactaaggcaatagaaacagctaccatcagaaacattgctgacactaatctgttttccttgttctctttgttacaaaaaaactgtcagaaaccgaaaccacactttttttcatcactcacattcgatctcatactaatttgcctggacctttatccagtgataatcacaaagttga

SEQ ID NO: 406953 - DNA, 542 bp, Homo sapiens
atcaaatggccactttaattgggttaggatgtcaacgtatcactaaaatttctggctttcatccaaacattattgtggtccctttgtcaaaaaatgaagttaaaaataccttttctacatccttgtgctggcagactaatctggctgacttcattggcactatagataatcatttgcctaagtcaaaattctttcaatttctatgaaatacttcctggattctaccaaaacttactcgttcatcaccactagaggcagccattaccatttttactaatgggtccaataatggaaaggcagggtatgtaggaccaaaagataaagtcatttctactccatacacttctgctcaaaaagccaagttgtttgctgttatctctgcattacaggattttgatcagcctcttaatattgtctcgactcagctcaagtagtccatgccactaaggcaatagaaacagctaccatcaraaacattgctgacactaatctgttttccttgttctctttgttacaaaaaaactgtcagaaaccgaaaccac

SEQ ID NO: 406954 - DNA, 603 bp, Homo sapiens
gacaaattaatatggaaggattgtgttagttcagaaggaactgtgttatttaattgttctcactacaccattgttgattaggctcctaaaagtcatattattaatgattgctctcaaggtcacagagattrtcaacattttctctatgatattacttatcaagaaagtagtggcaaccctcacctattatatcatagatttaactccttttttcctcttacgtggaaaggggcaggggattgcccctccaaagccaaggctctttgttccccacttaggacctcaacattcagaattatggagtttaaccatagctatgactggtatgagagtttgggctggagaaagtgttataagtaaatccaccttgtcacctcaaaaaccaagacaacagattgattcacactactatttccacacagccaaaaaatatcactatggcaatcatcaaaaggtcaattcaaagatgggacagtaaagattatgaggacttatatcccccggttgctaatgtccccccaccacctctcatacaacctattccccccaccccacattcacaaaaaagagtaccatcccaaaatatatatactatctatatgg

SEQ ID NO: 406955 - DNA, 535 bp, Homo sapiens
gactcaggaaacaagctgactctgaaaatgacacagaattcagggttattgcttctttgaaaggtgggtggtttgtgtttttttcctcaacattcattcatatacttctaggaagtgccgtttagtttcataaagtttacatatacctggtttcrctgcatctggagagattcaggatagttcttgttaatgagaagtcctagggtggagctacaattcactctccattgtgaaccctgataacttgagacagatctcagtgaattaagaaagtttatttggccaaggttgaggacacatacccatgacacagcctcaggaggttctgaggacgtgtgcctaaggtcatcagagcagtttggttttatacattctaggaacaccagagacatgaatcaatttgtgcaagattaatattggttcggtctgcaaaggcgggacaacttgaagcaaaggcaggaattctcaaagcgaggagggcacttccgggtcataggtaattgagaaactaatggttgcattcttttgagtttct

SEQ ID NO: 406956 - DNA, 584 bp, Homo sapiens
ctgtgaaacgtttatgcgatgtgtggattcatctcacagagataggcctttcttttgatgcagtaggttgtaaacctcttttagtagagccttagaaggaacatttcagagcccatgaagtctattggaaaaaaaacgaatatctcatgataaaaatgagaaataatctacctgtgaaacggcattatgatgtgtggattgatctcacagagataaacctttcttctgacttagcattttggaaacactctatttgtggaatattcaaagggtaatttcagaacacattaagacctattgtgaaaaaccgaatatctggagataaagaatagaaataagctatctgtgaagctgctttggaatgtgtggattcatttcacagagttgaacctttcttttgattcagcaggttagaaaccatctttttttagaatctacsaagggatattttggaacccattgaggcctatagtgaaaaaccgaatattccaagacagtaactaaaaacaagctctctgtgaaatcactttgcaatgtgttcattcatttcacagaggtaaacctttttttgattcagcaggttg

SEQ ID NO: 406957 - DNA, 584 bp, Homo sapiens
ctgtgaaacgtttatgcgatgtgtggattcatctcacagagataggcctttcttttgatgcagtaggttgtaaacctcttttagtagagccttagaaggaacatttcagagcccatgaagtctattggaaaaaaaacgaatatctcatgataaaaatgagaaataatctacctgtgaaacggcattatgatgtgtggattgatctcacagagataaacctttcttctgacttagcattttggaaacactctatttgtggaatattcaaagggtaatttcagaacacattaagacctattgtgaaaaaccgaatatctggagataaagaatagaaataagctatctgtgaagctgctttggaatgtgtggattcatttcacagagttgaacctttcttttgattcagcaggttagaaaccatctttttttagaatctaccaagggatattttggaacccattgaggcctatagtgaaaawccgaatattccaagacagtaactaaaaacaagctctctgtgaaatcactttgcaatgtgttcattcatttcacagaggtaaacctttttttgattcagcaggttg

SEQ ID NO: 406958 - DNA, 469 bp, Homo sapiens
ctctgaagatatttccttttgcaccataggcctcaaggcgctccctagtatcgcttcacagattctacaaaarcagcgtttccaaactacacaatcaaaagaatagattaactctgtgagacgaatgcacacatcacaaatcagtttcctaaaaagcgtctttctagtgtttatctgaagatatttcctttttcaccataggcttcaatgtgctcacaaatatcccttcacagattatacaaaaacagggcttccaaactgctccatcaaaagaaaagattaactctgtgagatgaatgcacacatcacaaatcagtttctcagaaagcttctttctagttcttctctgagcataattcatttttccacataggcctcaatgcactcccaaatatatcttcacagattctacaaaaacagttttccaaactgctccataaaagaaagggtaaactctatgatatgaatg

SEQ ID NO: 406959 - DNA, 469 bp, Homo sapiens
ctctgaagatatttccttttgcaccataggcctcaaggcgctccctagtatcgcttcacagattctacaaaagcagcrtttccaaactacacaatcaaaagaatagattaactctgtgagacgaatgcacacatcacaaatcagtttcctaaaaagcgtctttctagtgtttatctgaagatatttcctttttcaccataggcttcaatgtgctcacaaatatcccttcacagattatacaaaaacagggcttccaaactgctccatcaaaagaaaagattaactctgtgagatgaatgcacacatcacaaatcagtttctcagaaagcttctttctagttcttctctgagcataattcatttttccacataggcctcaatgcactcccaaatatatcttcacagattctacaaaaacagttttccaaactgctccataaaagaaagggtaaactctatgatatgaatg

SEQ ID NO: 406960 - DNA, 494 bp, Homo sapiens
aacacaaagcaatttctcagacagctactctgtaggttttctctgaagatatttccttttgcaccataggcctcaaggcgctccctagtatcgcttcacagattctacaaaagcagcgtttccaaactacacaatcaaaagaatagattaactctgtgagacgaatgcacacatcacaaatcagtttcctaaaaagcgtctttctagtgtttatctgaagatatttcctttttcaccataggcttcaatgtgctcacaaatatcccttcacagattatacaaaaacagggcttccaaactgctccatcaaaagaaaagattaactctgtgagatgaatgcacacatcacaaatcagtttctcagaaagcttctttctagttcttctctgagcataattcatttttccacataggcctcaatgcactcccaaatatatcttcrcagattctacaaaaacagttttccaaactgctccataaaagaaagggtaaac

SEQ ID NO: 406961 - DNA, 605 bp, Homo sapiens
ttctgagaaactgctttgtcatgtatgcattcatctgaaagagttaaacttaccttttgattgagcagtttggaagcacttttttttagaatctatgaagggatatttggaagcttgttgaggcctatggtgaagaaggaaatatcttaagagaaaatgcattaagaagttttctgataatcttttgtgatgtgtgcattcatctcacagagttaaacctgtgctccaaaatggagcattttggaagcactatttttgttgaatctgcaaagggatatttaggagcacattgaggtctatggtgaaaaaggaaatattttctaataaaaastagaaaggaactttctaagaacctgctttgtaaagtgtgcattcatcttacagagtaaaacctttctttgatggagcagtttggaaacactgtttttgtagaatctgcgaagggatatttaggatcattttgaagcctgtggtgaaaaaggaaatatcttcagataaaaactagaaagaaactttctgcaaaaccgctttgtgatatttgcactcatctcacagactcacacctttcttttggtttagcagtttgcaaacactgtttttgtaga

SEQ ID NO: 406962 - DNA, 605 bp, Homo sapiens
ttctgagaaactgctttgtcatgtatgcattcatctgaaagagttaaacttaccttttgattgagcagtttggaagcacttttttttagaatctatgaagggatatttggaagcttgttgaggcctatggtgaagaaggaaatatcttaagagaaaatgcattaagaagttttctgataatcttttgtgatgtgtgcattcatctcacagagttaaacctgtgctccaaaatggagcattttggaagcactatttttgttgaatctgcaaagggatatttaggagcacattgaggtctatggtgaaaaaggaaatattttctaataaaaagtagaaaggaactttctaagaacctgctttgtaaagtgtgcattcatcttacagagtaaaacctttctttgatggagcagtttggaaacactgtttttgtagaatctgcgaagggatatttaggatcattttgargcctgtggtgaaaaaggaaatatcttcagataaaaactagaaagaaactttctgcaaaaccgctttgtgatatttgcactcatctcacagactcacacctttcttttggtttagcagtttgcaaacactgtttttgtaga

SEQ ID NO: 406963 - DNA, 621 bp, Homo sapiens
attttgtagctcattgaggcctatggtgagaaaggaaatgtcttcagagaaaaacgggaaagaggcattctgagaaaccgctttgtgatttgtgcatttatctcaaagagttaagcctttcttttgattcagcacatttgacacaacctttttgtacaatctgtgaagtgacatttaggagcccatgtagtcccatggggaataactgaatatccccaggtaaaatctagaaaaaagctaattgtgaaactgctttttgatgtgtggattaatctcacagaattaaacatttcttttgattcaacaggttggacacactgtttttggagaatctgtgaagagacaattcagagcctaakgagggctacggggaaaaacagaatatccccaagtaaaaactagaaagaatgtatctgttaaactgctttgtgatgtgtggattcatctcacagagataaaacttccttttgattcagcaagttggaaactctctttttgaagaatctgtgatgggacatttgggaacccactgaggcctaaggagaaaagtcaaatatcctcaggtaaaaactgaaaagaagctgtccataaaaattgctttgttatgtgtggatttatatc

SEQ ID NO: 406964 - DNA, 593 bp, Homo sapiens
gtcttcagagaaaaacgggaaagaggcattctgagaaaccgctttgtgatttgtgcatttatctcaaagagttaagcctttcttttgattcagcacatttgacacaacctttttgtacaatctgtgaagtgacatttaggagcccatgtagtcccatggggaataactgaatatccccaggtaaaatctagaaaaaagctaattgtgaaactgctttttgatgtgtggattaatctcacagaattaaacatttcttttgattcaacaggttggacacactgtttttggagaatctgtgaagagacaattcagagcctaaggagggctacggggaaaaacagaatatccccaagtaaaaactagaaagaatgtatctgttaaactgctttgtgatgtgtggattcatctcacagagataaaacttccttttgattcagcaarttggaaactctctttttgaagaatctgtgatgggacatttgggaacccactgaggcctaaggagaaaagtcaaatatcctcaggtaaaaactgaaaagaagctgtccataaaaattgctttgttatgtgtggatttatatcacagagttaaa

SEQ ID NO: 406965 - DNA, 575 bp, Homo sapiens
gcaggtaaaaactagaaaggagcaatctatgaaactgctttgtcatgtgtggattcatctcacagaggtaaccctttcttttgatccagctggttggaaaaactctttatggagaatccatgaggggacatttgggagcccactgtggcctttggtgaaaaacagaatgtcctcaggtaaaaagtacaaataagctatctgtgaaactgccatgtcatgtgtagaatcatctcacacagttaagccactgttttgattaagcaggttaaaaacactctggacaatttgtgaaagacatttgggatccatttgcrgcctatgtggaaaaacagaatagccacaggtagaaactagaaagatgcttgctgtgaaactgctttgtgatgtgtggattcatctcacagagttccctttgattcaacaggttggaaacactctttctggagaatacacgaggggacatttgggagcccattgaggcctatggagaaaaacaaaatatccccagataaaaattagagagaagctatctgtgaaactgctttgtgatgtgtggattcatgtcacagagtgag

SEQ ID NO: 406966 - DNA, 434 bp, Homo sapiens
aaatagaaagaagccttctggaaaactgctttgtgatgtgtgcattcacctcacagagttaaacctttcttttgattgagcagtttggaataagtgtttttgtagaatctgagaagggatatttgggaacacacataggcctgtgttcaaraaggaaatatcttcagagaaaaactagaaagaagctctctgagaaactgctttgttgttttctgtgcattcacctcacagagacgaaccttccttttgatgtagcggtttggaaacactgtttctggagaatctgcaaagggataattgggactgtattgaggcctacagtgaaaaagaaaatatcttcagagaaaaaccggaaacaaggtttctgagatactgctttttgttgtgcccattcatctcacacattaaacctttcttgcgattgagcagtttgg

SEQ ID NO: 406967 - DNA, 439 bp, Homo sapiens
agttttctgacaaactgatctgtgatttgtgcattcgtctcacagagttaagcctttcttttgatggagccttttgaaacacagtttttgtagaatctgtgaaggcatattagggaatcaatagagtgctataatgaaaaagtaaatatcttcagagaaaaaaaagaaagaatctttctgagaaactgctttctgawgtgtgctttcatctcactgagtaaaatattcctattgatggagcactttggaaagaaagttttcatagaatctgtgaagggatatttgagagtgcctggaggcctatggtgaaaaaggaaatatcttcagagaggaactacacagaaactttctgagaaactgctttgtgatgtgtgcatccatctcatagagttaaacctttcttttgatggagcaatttggaaactctgtttttgtagaa

SEQ ID NO: 406968 - DNA, 509 bp, Homo sapiens
cacaatccttgggcccaaaatcttcctatccatgactccatactgaagaccttatcctagtatgagctarcattttaagaaacaaattacaaggctcacagaatctgctactttacatttataaactcttatttgatcaaagcattttattattggcatgtggatgtcccacaaaagaatgcaacactttatggttttctcagcaaatgctagtaaaatatttaaaattatgacaaaattaattctatagattgtgtctttaattgttccatgctgaattacaagaatatttgaatggcatatgtggaaagactttccaccacttttgttccagcaaaatatgttaaagtttttctccacaagaaagttgtggaaagttcttcctccatatgtcatttaaacagagcaaaccttaggtactttctggcccaagggcaggaagctggaatggttgatttctggaagagctaaacaccttttatttataccactgtacttgtctcagtata

SEQ ID NO: 406969 - DNA, 356 bp, Homo sapiens
gtacagaagggattgtacaaggttcagagcttgaaggtcccctcaagttcctcctcattttacatatcagggacctgaggcccagagatattaagaggtttatgttagtaacgttagtaactgacaaataaaaaagtctaaacaagggctctttctactataccaagataggtattaatcattacacaaggagttaaagaatcagggtattaatatgggcagaaaatgaagaaataaaggaaatagacctttakaaaaagacaccccatacagatgagcaaagaggtgggaaaaggaagtccaagggcaatcatttttagcaatggctggaaataaaagtgaggacgggatgcaat

SEQ ID NO: 406970 - DNA, 534 bp, Homo sapiens
gggtgttctcaggaaaatttttgaaatgtgaaaaatggtgaacaaattattctttagatgcatgcattgttctaacaataggctcaaatattctttgaaggactcaactaaaagtttactatcaatgtgttggtatgtgcatataaaggcaaaattcagccccagggttaatacaggggaaccagagcagaactatttaatgctacatacaagaaaaaaaaccgccaggaaaagttggagaagtagaagtgcaaatgaattgaagagacacttaaacttatttttggtgaagaaggtgattaaaaatcattgttaaaaaaaatcacagggaagagcaagtgagaaccaattttaaatgacaagttttgacaagcaaagttttcctaattataaaaccttcacatataagctagaacgcagttatgtaaacaagccttgaagttttcaatttatttatatttgtrtgcattgctgatcttattctgccacaggaaatgtgggtccattttaatataagtgcagtgtataccaatt

SEQ ID NO: 406971 - DNA, 534 bp, Homo sapiens
gggtgttctcaggaaaatttttgaaatgtgaaaaatggtgaacaaattattctttagatgcatgcattgttctaacaataggctcaaatattctttgaaggactcaactaaaagtttactatcaatgtgttggtatgtgcatataaaggcaaaattcagccccagggttaatacaggggaaccagagcagaactatttaatgctacatacaagaaaaaaaaccgccaggaaaagttggagaagtagaagtgcaaatgaattgaagagacacttaaacttatttttggtgaagaaggtgattaaaaatcattgttaaaaaaaatcacagggaagagcaagtgagaaccaattttaaatgacaagttttgacaagcaaagttttcctaattataaaaccttcacatataagctagaacgcagttatgtaaacaagccttgaagttttcaatttatttatatttgtgtgcattgctgatcttattctgccacaggaaatgygggtccattttaatataagtgcagtgtataccaatt

SEQ ID NO: 406972 - DNA, 604 bp, Homo sapiens
tataacattttggaaggcagataaaggatttttataaaatgtttgattttttgtgctttgcaaacacggtaagcaaaaattaaataaataatgtagtagggacccaaagaaacagctttaattgcacacatccccacctcatttcaggagttcttggaagacagatctttcaggactagcttctattaatgacagtataattgctggtatgtagtgtcctttactttcttgctatttttttcttgtaatttatttgtaagaggtgatgttttgatgtttcctgagggattsttcctcatttatgtgtggcttgatttgtattgcaaaacttatgctagaaaaatacttttggtggatttaatcaaatagtatttaacaacaagaaagatcaaaagtattttggatgtatgcttgtaaagaaatctttcttgtatttaaatatggtatttaatattttggatatttttctgtacccaaagaatggattcatggatactttatgaaaaattagatacttataaaatgcttaaatttataaaatttaattttaattaaatgtaatgaatatacatccctaatatttgaataattgtacatagatgtt

SEQ ID NO: 406973 - DNA, 604 bp, Homo sapiens
tataacattttggaaggcagataaaggatttttataaaatgtttgattttttgtgctttgcaaacacggtaagcaaaaattaaataaataatgtagtagggacccaaagaaacagctttaattgcacacatccccacctcatttcaggagttcttggaagacagatctttcaggactagcttctattaatgacagtataattgctggtatgtagtgtcctttactttcttgctatttttttcttgtaatttatttgtaagaggtgatgttttgatgtttcctgagggattgttcctcatttatgtgtggcttgatttgtattgcaaaacttatgctagaaaaatacttttggtggatttaatcaaatagtatttaacaacaagaaagatcaaaagtattttggatgtatgcttgtaaagaaatctttcttgtatttaaatatggtatttaatattttggatatttttctgtacccaaagaatggattcatggatactttatgaaaaattagatacttataaaatgcttaaatttataaaatttaattttaattaaatrtaatgaatatacatccctaatatttgaataattgtacatagatgtt

SEQ ID NO: 406974 - DNA, 602 bp, Homo sapiens
tgctttatattttagtttcagtttagatttcttttttaaaaaactgggaatcaaaaccatgtgtgacatatcggggacaagcacacatacgcaaacaatgattttattatcctgcatcatttccccaggaatagtcacagaacatattacatatcttgaaaaggatgaagctaatcagaattgatctctttaggctaatatgaattagcacagtatgtcagcacaaatcctatcattttgggaaatctcaagataataaaataaattttaactatatgttctataacatttataatgccatttccccaatctttgagcattgccatgctccttttgagcttttgtctccacatctttccttcttcagctctcactttctcttcctttcaatccatccctttctccytccctctttgcaatctttttagtcttttcatctttgaaatgagattggaggagcagccagaagaaaatacatggttcattttcttcctaatatactcaaatttctatttaaaataatagcttccttctataattgttttagaagcagtaagctgactcacaaaccacagctaataacaaaagcaactcaatttagt

SEQ ID NO: 406975 - DNA, 610 bp, Homo sapiens
cctctttgcaatctttttagtcttttcatctttgaaatgagattggaggagcagccagaagaaaatacatggttcattttcttcytaatatactcaaatttctatttaaaataatagcttccttctataattgttttagaagcagtaagctgactcacaaaccacagctaataacaaaagcaactcaatttagttctttctagtaattgcctgaggcactggctaatggtgagagaaagctacaaagaatgttccaaagagggggaaacagctaccattaaatagcttttgttaaaccaatgttttaaatggcatatgctacaattataagtgtgtcaaagttggcaagactttataagagaagaaacggggaaggaaggtcattccttgttagcatcttcacatcccacaccggaaggagtgctgatctgaattaaccaaagctaagaacactgggctctagtcactggggcagagctttctactgagttaagcctttctcaatgtttgtaatttcatagactctctctagaacacataaaatactggtaacaccaagaaatggaaccaggattccttggtagaactggggctccttccattccaaggt

SEQ ID NO: 406976 - DNA, 610 bp, Homo sapiens
cctctttgcaatctttttagtcttttcatctttgaaatgagattggaggagcagccagaagaaaatacatggttcattttcttccwaatatactcaaatttctatttaaaataatagcttccttctataattgttttagaagcagtaagctgactcacaaaccacagctaataacaaaagcaactcaatttagttctttctagtaattgcctgaggcactggctaatggtgagagaaagctacaaagaatgttccaaagagggggaaacagctaccattaaatagcttttgttaaaccaatgttttaaatggcatatgctacaattataagtgtgtcaaagttggcaagactttataagagaagaaacggggaaggaaggtcattccttgttagcatcttcacatcccacaccggaaggagtgctgatctgaattaaccaaagctaagaacactgggctctagtcactggggcagagctttctactgagttaagcctttctcaatgtttgtaatttcatagactctctctagaacacataaaatactggtaacaccaagaaatggaaccaggattccttggtagaactggggctccttccattccaaggt

SEQ ID NO: 406977 - DNA, 610 bp, Homo sapiens
cctctttgcaatctttttagtcttttcatctttgaaatgagattggaggagcagccagaagaaaatacatggttcattttcttcctaatatactcaaatttctatttaaaataatagcttccttctataattgttttagaagcagtaagctgactcacaaaccacagctaataacaaaagcaactcaatttagttctttctagtaattgcctgaggcactggctaatggtgagagaaagctacaaagaatgttccaaagagggggaaacagctaccattaaatagcttttgttaaaccaatgttttaaatggcatatgctacaattataagtgtgtcaaagttggcaagactttataagagaagaaacggggaaggaaggtcattccttgttagcatcttcacatcccacaccggaaggagtgctgatctgaattaaccaaagctaagaacactgggctctagtcactggggcagagctttctactgagttaagyctttctcaatgtttgtaatttcatagactctctctagaacacataaaatactggtaacaccaagaaatggaaccaggattccttggtagaactggggctccttccattccaaggt

SEQ ID NO: 406978 - DNA, 611 bp, Homo sapiens
ttggaatctgcttctaagaagacccaactaatgcatccccctttcatcctgacacactcagggggctgtttaggtaaaggagctttccaycatgcccaatgctatgtcactcaaattagatgtcatgatttgggggccaataacctacacctgatctcagccaaaatgctgagaagtgataggggggccaacaacctaaatagttattaagtgttaatttgccttattttgttctctgagcatatatctcgagcacgattttcccagcaaaaaatatttgaccaagaacagaatgcaggtaaatggctggattcctactcgttctccttttattcttagtgacagactccttacacactagggcaaggacacactcggccaaaagtacaattacatttttcttgtctgccttgtaagtatattagccagtgtggctgtaggggaggagaaatactttttcctctatcctttctatattcatggctgaggcccctataacaaaagacagagtaataagagaaaggcacacaaatgtacttagtataagtttgacatgacatggaagccttaataaggcaatgaagacctaagaaatgggaaaatttgtgtat

SEQ ID NO: 406979 - DNA, 611 bp, Homo sapiens
ttggaatctgcttctaagaagacccaactaatgcatccccctttcatcctgacacactcagggggctgtttaggtaaaggagctttccatcatgcccaatgctatgtcactcaaattagatgtcaygatttgggggccaataacctacacctgatctcagccaaaatgctgagaagtgataggggggccaacaacctaaatagttattaagtgttaatttgccttattttgttctctgagcatatatctcgagcacgattttcccagcaaaaaatatttgaccaagaacagaatgcaggtaaatggctggattcctactcgttctccttttattcttagtgacagactccttacacactagggcaaggacacactcggccaaaagtacaattacatttttcttgtctgccttgtaagtatattagccagtgtggctgtaggggaggagaaatactttttcctctatcctttctatattcatggctgaggcccctataacaaaagacagagtaataagagaaaggcacacaaatgtacttagtataagtttgacatgacatggaagccttaataaggcaatgaagacctaagaaatgggaaaatttgtgtat

SEQ ID NO: 406980 - DNA, 611 bp, Homo sapiens
ttggaatctgcttctaagaagacccaactaatgcatccccctttcatcctgacacactcagggggctgtttaggtaaaggagctttccatcatgcccaatgctatgtcactcaaattagatgtcatgatttgggggccaataacctacacctgatctcagccaaaatgctgagaagtgataggggggccaacaacctaaatagttattaagtgttaatttgccttattttgttctctgagcatatatctcgagcacgattttcccagcaaaaaatatttgaccaagaacagaatgcaggtaaatggctggattcctactcgttctccttttattcttagtgacagactccttacacactagggcaaggacacactcggccaaaagtacaattacatttttcttgtctgccttgtaagtatattagccagtgtggytgtaggggaggagaaatactttttcctctatcctttctatattcatggctgaggcccctataacaaaagacagagtaataagagaaaggcacacaaatgtacttagtataagtttgacatgacatggaagccttaataaggcaatgaagacctaagaaatgggaaaatttgtgtat

SEQ ID NO: 406981 - DNA, 513 bp, Homo sapiens
atgggaaaatttgtgtatgtttgtgctaggtttgatgaagaagtgaatagttgtrgaaaagttgtagattttagaaagtatgatctaatggtaataaactggggagaactcagcaaggcccatttattcaggttcttccctgggaccctgtgtcttccgggatgaggatgttcctttactctgcctatcaggaagtcacttctggaatgagggtcttttgacctgcttcagggaaaggtcggaaaatctttcctaggttttattacatgcttcaggggaaaaggctagaggaaagatgagagtgagcttcttgcttctgctgttttctcaaatgtcacattatggggtggcttgtcctgaaccctatcattgtgcaaggagaaatcatgacttcaaggaaactttcactgggagtgttgaggcagctgggatacaagggatactttggccatttatcccttctctttccctctgtctctaatgacaatatgatagctggagtttgagaggctt

SEQ ID NO: 406982 - DNA, 623 bp, Homo sapiens
atattattaagacccttttttttactgattttttcttttaatgtaatatgaggatcctagaaaaggagtgtgaaatggagtcagagtttcagtttgaaccccaggtctgttttattgacctgttacatggatggtgtttattttctctctccacggctcagtttcctgttcttctgataccaagatagtacttgctatggtctatgtccccccaaaattctcatgttgaaatccagtcacctttgtgatggtgttaggaggtggggccttcgggcggggattaggtcatggaggcaaagcactcaaagatgggattggtgtctttataacagagtccaagggagctccatcaccccttctgccatgtgaggacacaatgagaaggctctgttctgtgaaatagaaagtgggccctcaccagccacccaatctctcagcacgctgatcttgaacttccaggcttcggaacagtgagaaacaaatttgtgttgtttatcaatttatggtatttttgtcacagcagcctgaatgaacgaagacagcacttgcttcctcacagggcgctgtgaagatyacagaactaagggacactaagatgcctactgcaggaccaggaaaagaat

SEQ ID NO: 406983 - DNA, 550 bp, Homo sapiens
tttgttttattacttcttgtgtcaattttggtaaactttgttttcctaggaaatttatcttttatttaaatttccaaatttggcacaaagttgttcataacattttctcatgttctgaagaatctgtggtgacatctcttttcatttctgtgattgsgaatctgtattttatctttttcttggtaaggcttgccagatatttatcaatttcactgtttcttaaagtaactgatttgttgtgtggttcattttctccatttctttgttttctactgtattaatttatggattgtctttattttctttcttttattttctttgggtttcttttgctgtacttttctgactttttgagacagtatgtagattatcaaatttcaagtctttcagctcttcaggtataatgcatttaaagctacagttttccttctaccagtttagctacatcgtatgaattttgatgtctatttttattattatacttaaaaatattttctattatctactgagaatgcttctttgacactttagccaattgctatttctaatt

SEQ ID NO: 406984 - DNA, 575 bp, Homo sapiens
ttcagttctccactggaatatttcattttttcatttattgtttttaacatgataatctgttatggtaaagtgtatgtaaaataactcctgggaattttggataggcttttttttctcttaactctgacatatctgtaattttttttctgaatgacagatatcatacaaaaaaattgaggtggctctgggcgatacatttaccttatattctggtagactgcctgagtcggagaagatcatcttaatctaatcaagaaatgaaccaactgaatcacaattttttatagatctcttccacctctgattctaccctgttttcaggcctgacctgatttctaggattcttctttgataagtcctgaactctagttaacatatcctcagcactggaagattggaacaaactcagctccttcrctgacttttgcttgatttcgttgcctatcaccttatgcaacataaaatttgtcagctgcacatgtgggagctaaaacctttatcttatggatatggagaataaaatgatagataccagagattgggaggggtggatggagatgacaggagggcagagg

SEQ ID NO: 406985 - DNA, 578 bp, Homo sapiens
attgtttttaacatgataatctgttatggtaaagtgtatgtaaaataactcctgggaattttggataggcttttttttctcttaactctgacatatctgtaattttttttctgaatgacagatatcatacaaaaaaattgaggtggctctgggcgatacatttaccttatattctggtagactgcctgagtcggagaagatcatcttaatctaatcaagaaatgaaccaactgaatcacaattttttatagatctcttccacctctgattctaccctgttttcaggcctgacctgatttctaggattcttctttgataagtcctgaactctagttaacatatcctcagcactggaagattggaacaaactcagctccttcactgacttttgcttgatttcgttgcctatcaccttatgcaacataaaatttgtcarctgcacatgtgggagctaaaacctttatcttatggatatggagaataaaatgatagataccagagattgggaggggtggatggagatgacaggagggcagaggagcagttggttatggatacaaacatacagttagatagaa

SEQ ID NO: 406986 - DNA, 373 bp, Homo sapiens
tcaccttatgcaacataaaatttgtcagctgcacatgtgggagctaaaacctttatcttatggatatggagaataaaatgatagataccagagattgggaggggtggatggagatgacaggagggcagaggagcagttggttatggatacaaacatacagttagatagaagaaataagtactaatgtttgacagcaggctagggtgactrtgcttagcaacaatagtgtgtacatttcagagtaactaggagagaggacttgaaatgataccaacacataaaaataataaacattcaaagtgatgaataccccaatgaccctgacttgatcattacatatcctttgcatgtaacactcaaatataccccacaa

SEQ ID NO: 406987 - DNA, 373 bp, Homo sapiens
tcaccttatgcaacataaaatttgtcagctgcacatgtgggagctaaaacctttatcttatggatatggagaataaaatgatagataccagagattgggaggggtggatggagatgacaggagggcagaggagcagttggttatggatacaaacatacagttagatagaagaaataagtactaatgtttgacagcaggctagggtgactatgcttascaacaatagtgtgtacatttcagagtaactaggagagaggacttgaaatgataccaacacataaaaataataaacattcaaagtgatgaataccccaatgaccctgacttgatcattacatatcctttgcatgtaacactcaaatataccccacaa

SEQ ID NO: 406988 - DNA, 617 bp, Homo sapiens
gctgtggaagaaactcgaaggttatattgaactaggagatcagcagtgctggggacagagggttacaggttttggtaccagacaggaagagcagggaggcatcattgagaaggtaccaactgtgtactcagaagagaggaggcagctggttatgaggtcatctgggggacagcacgacaggtagagacaggaaaagtataaaggctctgaggtggaacctgagggttggaggcacagcaggaagccaagatagctggcattcaccataagaatggtagaaaggagtctgaggcaagatacaggccagcctgcayggggccttgtagaccgagtaaatacctcggatgttgcaaggacttttctgccttgcacgttctcctttctcaaaatctgttccttctgtttgttctacaaattcctagtttctgaaaaccagctactgatctggtctaattttctctttttatcatagggtaaaagatacttgaataatattccacatatcactacactcagattctactcttgattctgaagtttttgtttgtttgctttttactaacatcatcttctccctcaactacctaatctttggctttcctaaattgggaaaatta

SEQ ID NO: 406989 - DNA, 534 bp, Homo sapiens
gctatgccatcttcactctcaccactatcattctcactttaaatcaactggtatttggataaccatgttaattcagaaaatgcaggctttaaaactttgtcaaaacatgagcatttcacataagcaagtaaggtgattacattttcaggttttaaaatagcctggtttgtcccccttgtctaaccaaaatttgtttatttggtttcgcttgtagctttttctgctttctgttttctctgaaagagccgtgaatgatgagacgacaaaatattggattatttgtgctcttgaaacagatgccacctgagttgtgacaggtattttaagtataatcttctgcattcacttaacacyctcatttgaaaattttcaaaccttgggcatattcttgttcatttaccactgaaatgagtcacctcttgggtgtgaagagaaagctaggaataaaatgggaacaaggaatgcaggtgtaagggaacagtaacagagaaatcggaagtatcttgcaaagtttaactggctccaaatgcagat

SEQ ID NO: 406990 - DNA, 587 bp, Homo sapiens
caaaactagatagacagtaaattaaactcacatagacataaaaagcatgattaaagataactacatggatgctatggtttggatgtggtttgtcccagtcaaaactcaggttgaaatttaattgccaatgcaacagtgtttggaggtggtgtctttaagaaatgattaacttaagttggattaatgtctttctcacaagactgggttagttctctgcagaaaggattagttttgataagagttaattgttataaaatgaggttgcctctcacgtttttccctttttgcctttccctttatctgccatgtttggaggaagcacaaggccctcaccagaagcaggagatgcgattgtccaatcttgaacatcccagcctgcagaaccatgagctaaataaacctatttttttaaataaattacccaatctcagatattctgttatggcaacatacaacaaaaggtaagacatacagaaaacaaatagcatactgggagacataataattcctcatcagyaattacattaaaaaattaaactctccaattaaaaggcagaaatttcagaatggattttaaaaacatgatc

SEQ ID NO: 406991 - DNA, 516 bp, Homo sapiens
tgttcaaataacatggccccagcaacactctggttgcagccttgtgaaacctggccaggtgactcttctatgggaggggggcaaggaaatgctgggtagagaagggtggggtgcctggcgagggctccaccctcaggcctgtgcccatggacctaagtgagaacgggcartcctgttttcatgcccaaatgttgcatcttccaagaccactctggcctcccatgccccccatcctgtgcccataaaaatctgagaccatagtgggcatggacacaagcagctggatgttgaaaggaggagaagggcacaccaacagacaccagcagacactggcaggccactgacggcgggatgacacagaatttggtcgagggcagtcggaggagagtccagccactggccggcctgactccaggggaagacaccttcccactccatccccgttttgctccccatccacttcgctgagagctacctccaccactcaattaaacctcgcacccatcctccaagccc

SEQ ID NO: 406992 - DNA, 516 bp, Homo sapiens
tgttcaaataacatggccccagcaacactctggttgcagccttgtgaaacctggccaggtgactcttctatgggaggggggcaaggaaatgctgggtagagaagggtggggtgcctggcgagggctccaccctcaggcctgtgcccatggacctaagtgagaacgggcaatcctgttttcatgcccaaatgttgcatcttccaagaccactctggcctcccatgccccccatcctgtgcccataaaaatctgagaccatagtgggcayggacacaagcagctggatgttgaaaggaggagaagggcacaccaacagacaccagcagacactggcaggccactgacggcgggatgacacagaatttggtcgagggcagtcggaggagagtccagccactggccggcctgactccaggggaagacaccttcccactccatccccgttttgctccccatccacttcgctgagagctacctccaccactcaattaaacctcgcacccatcctccaagccc

SEQ ID NO: 406993 - DNA, 493 bp, Homo sapiens
ccaacaccaatgcttgagcgcttggaactgactgtgcatgcattgcttgctgttcatcagtgagcttctgtggagccaagttggaaaacttttccctagaaaggtatagttctgccagtaacaggaatgcacccaggatttggaaacactgtgatgctcragggcctcagctcacagcacagtagaaatcccaggccaagcccctaccttgccgtgggcatcaggctcagccacagtgctatggtggacactcatgctcagggcaagtcccttctccagccacatgccgcctgacgctgctccctgtcattgtgactccagccacctgccactctggcctcaattcattatttgtttatttgtttcttcgggagtgggacactggatcattttttcaaaacatctgctttctccccagacctctccaggaggggcagcacagacttcactccccccacccctccctgataccggaaacactgacacaggtcca

SEQ ID NO: 406994 - DNA, 472 bp, Homo sapiens
tccattacatctgagttatcaaatgtgtagtctctcatcaactttttgatctcttctgtatctgtaattacatcttccttttcattcataataatggttatttgtaccttcttttttgttcttacacattcttaccatatttgtctattttgttagaattttcaaggagctaccttttggctatgtttatcctctttaytgcagccttatattctatttcgttaatttctattcttatgtattatgttctttaaatttattcattcttctttttctaagtaaatctgatcacttcattcctattcttatgtattgtgttctttaaatttattcattcttctttttctaagtaaatctgatcacttcattcattttcaattgtcaatctttctaggtacctaaggctattcatttgcattacaatttcttctttgattaatgagttattaaaatctttttttaatttccaaat

SEQ ID NO: 406995 - DNA, 472 bp, Homo sapiens
tccattacatctgagttatcaaatgtgtagtctctcatcaactttttgatctcttctgtatctgtaattacatcttccttttcattcataataatggttatttgtaccttcttttttgttcttacacattcttaccatatttgtctattttgttagaattttcaaggagctaccttttggctatgtttatcctctttattgcagccttatattctatttcgttaatttctattcttatgtattatgttctttaaatttattcattcttctttttctaagtaaatctgatcacttcattcctattsttatgtattgtgttctttaaatttattcattcttctttttctaagtaaatctgatcacttcattcattttcaattgtcaatctttctaggtacctaaggctattcatttgcattacaatttcttctttgattaatgagttattaaaatctttttttaatttccaaat

SEQ ID NO: 406996 - DNA, 478 bp, Homo sapiens
tctttccttattgaatggtcttggcactcttgttgaaagttacttggccatagatctgtttcactgatctatttgactgtcttataccagtatcacactgtcttgattactgtagcattgtagtaaatttggaaatcagaaagtgtgattcctctcactttgttctttttcaagattgttttgacttgtctgggtttcaggaatttccatatgaattgtaggattagtttgttgatccttgcaaaaaaaaattctcgatgagatttttgataggaattgctttgatctgtccattaacattagatatattttcatttatttcagtctttaatttacttcarcaatgttttatggttttcagtgtatatgtcttgcacttctttagttagattttttctgaatattttattctttttactggtattgttgatggaattgtctttttcatttcattttaaaatttttcattgtgtgtata

SEQ ID NO: 406997 - DNA, 516 bp, Homo sapiens
tccctattgaaattcactgctgccatcagtccaatggcagagcatctgtgcccctggactagggaagcggagatgcccagatttctgacacataaaccactgggtgagaaattcatctggaataacaaatttatctttaaaaagccaaacaaggacatccagtttcagttccaacacgtaaaaagcttggagttgtcactcccatccttatgataagaaaaaagctgaacaaacagaaactcagcaacctttcttggacccctcagagagctgaggttgcagaacaaactgccactgggaaatctgaagagatgggaatgcacagggtcccggctgagatctgctcacctagagatgctgctgggccagcccccagttggagcctccaaacgttaattctgacaaattgctggaggctgagggtggaccagcctccaagtgagactgctggggctgcagttttagggggacaccmtacacttttgtgtgttttgcctctgagaacatcaccagatt

SEQ ID NO: 406998 - DNA, 559 bp, Homo sapiens
tcctaaaatccttggaatccccaaagtccttttgctaatgatgctaatgttaactgacagcttcaggatggggttgctcactggaaagacagaggcaggattagagggttgggactttcagcccaatcccccaaccccagggagtggagagggyctgaaggctaagttgatcaccaatagccagtggtttaatcaatcatgcctacacaatgaagcctcgataaaaacccaagaggaccgggttcagagagcttcctgatagctgaacacacggaggttcctggagggtggcgtcctgaagtgggcatggaacccaagtacaccttcctcctatcttaccctatacatctcctcatcggtgtcctttctaatatcctttataacaaaccagtaaatgttaagtgtttccctgagttctgtgagctgctccagcaaattaatcaaacccaaagagaaggctgtgggaaccccaaatgaaagctgattggtcagaagtcctagaggcctggacttaggactagtgttgggagagggggcagccatgggttccaggctctgc

SEQ ID NO: 406999 - DNA, 443 bp, Homo sapiens
ctacttctgttcaacatcatattagaagtcctagctartgcaataagacaagaaaaggaaataaaaggtacatagattgaaaagtcagaaataaaactgtctttgttcataaatgatatgattgttcatgtacaaaatcccaaagaactgtcaagaaactctcaaactaataagctagcataggtcacaggatacaatattaatatacaaaagtcaattgctttcccatattccagcaatgaaaaattggaatttgaaatttaaaatgtaccattaaacactgcaccaagaaaacgaaatacttaggtataaatctgacaaaatatgtataagaactatatgtagaaaactagaaaactcaaatgaaagagttcaaagattacctaaataaatatagagatattccatgttcatggacagaaagacaatattgttaatatgtc

SEQ ID NO: 407000 - DNA, 443 bp, Homo sapiens
ctacttctgttcaacatcatattagaagtcctagctagtgcaataagacaagaaaaggaaataaaagrtacatagattgaaaagtcagaaataaaactgtctttgttcataaatgatatgattgttcatgtacaaaatcccaaagaactgtcaagaaactctcaaactaataagctagcataggtcacaggatacaatattaatatacaaaagtcaattgctttcccatattccagcaatgaaaaattggaatttgaaatttaaaatgtaccattaaacactgcaccaagaaaacgaaatacttaggtataaatctgacaaaatatgtataagaactatatgtagaaaactagaaaactcaaatgaaagagttcaaagattacctaaataaatatagagatattccatgttcatggacagaaagacaatattgttaatatgtc

SEQ ID NO: 407001 - DNA, 617 bp, Homo sapiens
aagggaaactacagaccaagatctctcatggacataaagttctcaacaaaatattagcaagactaaaaatgtatgaaaagaattatatacttcaacccaatgggatttattataagtatgcaagactggtacaatatttgaaaatcagtcaatgcaatataccacatcaacaggctaatgaggaaaaatcatatcacatcaattgatgcagaaaatgcatctggcaaaatctaacactcatttatgaaagaaaattctctacaaactaagaacaaagatgatcttcctcaacttgataaaaagtgtttataaaaagctaacatcacacctaataatgaaatactgcacactttcccccaaaaaagaacaaggcaaggatatcctctctcactacttctgttcaacatcatattagaagtcctagctagtgcaataagacaagaaaaggaaataaaaggtacatagattgaaaagtcaraaataaaactgtctttgttcataaatgatatgattgttcatgtacaaaatcccaaagaactgtcaagaaactctcaaactaataagctagcataggtcacaggatacaatattaatatacaaaagtcaattgctttccc

SEQ ID NO: 407002 - DNA, 616 bp, Homo sapiens
cgcacaagtttcaatgatagaaaaggaagagatgagaatagctagcgaccagaaggaaacacaccaagagaaaaggagactgccccaaaacagaaagagagactggaccagttaaaactctgcactggaaatagttaagaccaggccagatactgcaaaaaaagaaaaaactggtaaaaatattttctgtagagcagtattttacatttcccctcattttgctagatttttctgtttgccctccagatccaccatacacctttactgctgcctggaggctgatcttgatgaggcttccctgttttccactgggttcagacttgggcagcactgaggggagactggagtgggcaaggsatggcaactggggtatttgtttcctctctgctggaaaggaccagtgcctgcattctctcaccaaaggccacccctgtctcagggtgaatcctacgaattcaggtctcactccaggccccagagccactccctccctgtgctgttaaggtccaggagccagggcagctctcagctatggctagccctgacagcctcaccatttctgcccctacctttgtaaatagtcaccccattaaactccccattacccaatttaaat

SEQ ID NO: 407003 - DNA, 596 bp, Homo sapiens
cctgacagctgccttgctctctcctggaacatagcagcaggtgattattcagtgtgggggcaaaaagagtccctatcactcctctggtctgagagccagatgctagagtatgtccaggaagcacttccgagaagctattccctggacaggctgagccgccttggggcagtcacccatctcctgaagccaggagtgctggagcacaggctgagaatgactctgaggctggagagaagactcaacaacctgttggtggctccaccacggctgtccctttctcccaaaactttctacagctcgatttactcctggacccctgcacctggtgcttttcctgcttcctggattttgtcttggttgttctgcyggcctgcaaggagtctactctctgatctacccgcccaaactccacccatccaataatatttgggctgaatcccattctcactgtaagattcagtctgaatcagtcttctcctacttcaaccttagtggaagcagcatgacacaatgaaaagagcatgccctctgaaatcagacacacctagactcctccatccaagctttagcaattacccttgtattatgctacccaa

SEQ ID NO: 407004 - DNA, 547 bp, Homo sapiens
cggctcagggccctgtgcaatgcatttcattactgcggcacaacaggctctgagcctcatctcatggcaattctgacgaccactctgtgctcacggtgtgctgatggtgtcctttatgtatccaggacagatagaacaaggaactgctgaccaggcaggttacagaatcagcccaggkttagacacttacaggtccaatggggaagcaccccaggaaacatgtaacaaagcctccattagcagcagctggacaaattcttccccttttctggaaacatccttaagctttgctgatgcccacacctggggatactaagtggtttattgtaatcaagaaatgtatcatggtcttggggtccagctacatgcaactcacttcacagcacattaaccaacagacacggatcacaggaaaatcactccagccataaagaaacacacagactctgggactccatccagaggcacatcccagggcttctgagctcccagagacggcccccactcagtgctgttccacagaccttaccacccactcagtctctac

SEQ ID NO: 407005 - DNA, 586 bp, Homo sapiens
atatgaggtctctgtcaatccctgctgggaggtgtcttcccagtcaggaggcacaggggtcaggaacccacttgaggaggcagtctgtcccttagcacagctgtgatgggagatccactgctgtcttcagagccgacaggcaggaacatttaaatctgctaaatgttcagcagcccctttccccaggtgctctgtcccagggattatgggagttttgtctataagcctctgactggggctgctgcctttctttcagagataccctgcccagaaaggagaaatctagagaggcagtctggctacagcagctttgccaagctatggtgggctccacccagtttgaacttcccagcagctwtgtttacattctgaggggaaaaccacctactcaagcctcagtaacagtggatacccctcccctgaccaagctcgagtgtcccaggccaacttcagactgctttgctggccacgagaatttcaagccagtggatcttagcttcctgggcttcatgggggtgggatccactgagctagaccacttggctccctggcttcagccccctttccaggggagtgaataatagat

SEQ ID NO: 407006 - DNA, 601 bp, Homo sapiens
tagagtattgcacactacgccagagagctgatttgtggaagtcattttctactttttaaattatcttcattgattttgatccttttgaaatttggtttattttgaggcaaacttaattgtggggacacatactatttccataagggagctttttaattaataaagtcaaagcaatgacataaatacactgaaagaagcagacattgtgtttatattttaggaatccaaagctttgtgattatagtggctgattttttctttagtggaaggcatggtaaaatacaaggttaccaaattcaaaagacagtgcaacatttgcccaatgttataacgtattcctggggcaaatttgcygtagcaaaacataatctcaataaagtgagttttgaaattgaataatctgttcttctatagcactcttgtcttggtgttctactagaaagaagactaaagtcaagaatcaatgaaaatagagcaaggcaattgagagcttgtctctgtgtccttctgctcctctgcccaccttccttcaccacataagtaggtggctctctgtaactcaccttttaaaatgacactgcccttccacctcagtcatgtc

SEQ ID NO: 407007 - DNA, 474 bp, Homo sapiens
ggaaaatgatgtattagaaaagaaaaagtatttacaatgttttatatggttttcgttgttgttaatcctcactgttctctcacagaaccaggtgaatgacaaaactttttcttccctkcattgaaaatgatatataacctgtctgacagggaaggtatcaacaataacttaagaattgtcctatatattcaaaagataaacttaattagccaattcaaaaaatacttcaaaatagaaatgctgtcagtaaaacaaagactattagatagcaattaccttctacctcaacctgggatacttccgaccatatcaatactatcacttcgcagaccaggcatttaatagacaaaatgaacaaatgatttttctgattacatcaaaaatataaagcagagctaaaataatttagcctcaaatccatagctagtgggagagaaaatgaagaaatggttaccctcatcaattaaacctggc

SEQ ID NO: 407008 - DNA, 350 bp, Homo sapiens
tgaagataggaaaaatggaaaaccttgatgtttatgttcacaaaggactaatttttaaaagcaaacatctaattattaaaagttcaaattaattatgcttcacatctagaagttagagtggttaagtgttggatgttaacagattaacaatatatgatattagttataccattttgtgcttaacacctatgtgttatactaagtgatgttattattggtaaaactagattgatttaggtttttatctgacaacaatgcatatcatacactcttrgttttattattattacttatgcaactgtaatgaaacctggagaaaatatggaagttatttcaggcatgaagcgggc

SEQ ID NO: 407009 - DNA, 582 bp, Homo sapiens
aaattgctttatgtgcactgcaggatatagcaaagtcttacaattcaggtgattagtaaatatactgttagctccttaactttttacttttcttccataactccaacttgaatcatttccatttcaggcatacaagattttcaaacatgcttcaattgtgtgaagttaaaattattatttaaaaaacatacttttctcatatgtgtgacctaataaatcaaacagtcattatgaaaatatgtcactcaatttgttgctggaaaggaagacaacattatgataatgattttcaatctgatggacaagttctcatattactaggaagagccagatgagatacaatgcagcactggcgttttgtgtgcctgtgggtgtgtccacatgcatgmacagatgagcctgtgttcaagttggaaagtgttgttctttcccagggccatatattgtaagtacttctttctctagacatttccaccatgtttgcagctaataaatattacaggacacttactcataaaaactacttttggaaatactatttgctatcaatattacaacaacaaatcaaagaaagtgaaataa

SEQ ID NO: 407010 - DNA, 582 bp, Homo sapiens
aaattgctttatgtgcactgcaggatatagcaaagtcttacaattcaggtgattagtaaatatactgttagctccttaactttttacttttcttccataactccaacttgaatcatttccatttcaggcatacaagattttcaaacatgcttcaattgtgtgaagttaaaattattatttaaaaaacatacttttctcatatgtgtgacctaataaatcaaacagtcattatgaaaatatgtcactcaatttgttgctggaaaggaagacaacattatgataatgattttcaatctgatggacaagttctcatattactaggaagagccagatgagatacaatgcagcactggcgttttgtgtgcctgtgggtgtgtccacatgcatgaacagatgagcctgtgttcaagttggaaagtgttgttctttcccagggccatatattgtaagtacttctttctctagacatytccaccatgtttgcagctaataaatattacaggacacttactcataaaaactacttttggaaatactatttgctatcaatattacaacaacaaatcaaagaaagtgaaataa

SEQ ID NO: 407011 - DNA, 616 bp, Homo sapiens
aatctcaaagtttcggtgagtcctctggctctccgctggctttcctctgcctccagttttctcaggtatacagagaagttgctaaatttagccacttagaaagttgataccaaatatctttatattaggaatggaatatttcataaatgtgtttactacattcaaggagcatcatttcaaggcatcgaaattgaaatttcaaagagttaggatttagagatactgcctattctgagataagttagttaaattacttcagagaaaaacaggttccttagtaataagtgactgccatsaataccttggcttattctcattttgacattgttttctcaaattggaatgtgttttcctccgagtttcctgtattagttgctcatgttcttatatttcttgtcttctgatttgtattgatgtaaattttctgagtccctgtccccatatttgattcggctgaatatgaaattcagctgggtatggaactgtaggtataaatgattttcgttcagaacactgaatgtaatgcaatgttactgatgagaaatctgatgctaatttaattcttattcctttatgagtaactgggtttttttccataaggacaagtttgatactc

SEQ ID NO: 407012 - DNA, 472 bp, Homo sapiens
ggagaataagtccttgtgtttcagccactattatttgtacagccactattatatatacaactaaaatactcctcatcgatacagatatatactacctccttaaatgagaaaaaaaattcatggattgtaaatgagcagcaccaagataatcttccaaaaatattgcctcgggctatgttgtcaaagcagaaagcaccattttggggtaacaataaaattatgatatttaaagtttgttaggaaaagaattggatgctttgtggtaattagcatcaggaaagtttatgtacagcagtcatactcctggcagaaagctggtgggtagattgacatacttaagacaggtatttaagaatgaggctgctgtgcatgcagaaatagcctcagacagttcatgctcctgaggacaaacgatgttttgttattatgcttaatctgtgatgaaatcartgaaggcattgtagtaagaagc

SEQ ID NO: 407013 - DNA, 620 bp, Homo sapiens
ttgcctcaccgtttagtaaaataatgatgctcatagtgatgactttgagacatctagaaaagttaaaaataagctcagaagcctgtgagccagatagataaatgccagattttccactatgatgtcgacatcagttacaaagtactcttgcaagtatgacaataaatcagtgatgtacattataatcactccaatatatatagagaagaagatctaatactcagggatgttcattggcctgaggtcacttggtattgtgtagatgcgggaatccagattttcggaatcaggtgcatttcccaccacctttgactcctttcaaagctgagcttttacctgtcagaaacaatactgtgaaaccacatcacgaaatcatttccaccttttttttcagttttcagacttctctttgtccttctaaccaagagaaaaaatggtgggaagtgggagtggagaagagaacaagcattcagtgagcacctyatcgggatcaggcacctcctattgcatctgatgtactcttttctggaatcctgtagatggggtaaatcagctagggctgagtgagttagccaagactgcacagctagcagatgacagagaagaatctacagcacagt

SEQ ID NO: 407014 - DNA, 558 bp, Homo sapiens
aaattatgacaccaaaccaattatactgaaggatagctacagttatcaaaacacagaaaaatcaaattatgatatagttatatatgtgcatccttaagacattaaataactagttctagaggaaggtctaataacgattgcaattttgmagtcgtgataagcatagataccattttgagatacctgcagcgacatgtggtgtgatatgaaagtctccgtgctttctcttggttccaaagtctcaggtactgtgaataccactgtgctttactgcctctctttataattgaaagaaataatacatctcagttagaagctggtgaaattaagatataatacttcccctttcaatgttctttgaattaagaacctcttgtcaggtgtccaaatgaactgggtttaaatctctctgctagcacgtaatagctgtgttaccttagcaagtaattccggctctctaagtccctgaagagggataatgacaaggggaatttacagagtttatgggtatgtagtgccgaaattgtgcacataaagtacttggtactgtgttagaat

SEQ ID NO: 407015 - DNA, 558 bp, Homo sapiens
aaattatgacaccaaaccaattatactgaaggatagctacagttatcaaaacacagaaaaatcaaattatgatatagttatatatgtgcatccttaagacattaaataactagttctagaggaaggtctaataacgattgcaattttgcagtcgtgataagcatagataccattttgagatacctgcagcgacatgtggtgtgatatgaaagtctccgtgctttctcttggttccaaagtctcaggtactgtgaataccactgtgctttactgcctctctttataattgaaagaaataatacatctcagttagaagctggtgaaattaagatataatacttcccctttcaatgttctttgaattaagaacctcttgtcaggtgtccaaatgaactgggtttaaatctcwctgctagcacgtaatagctgtgttaccttagcaagtaattccggctctctaagtccctgaagagggataatgacaaggggaatttacagagtttatgggtatgtagtgccgaaattgtgcacataaagtacttggtactgtgttagaat

SEQ ID NO: 407016 - DNA, 558 bp, Homo sapiens
aaattatgacaccaaaccaattatactgaaggatagctacagttatcaaaacacagaaaaatcaaattatgatatagttatatatgtgcatccttaagacattaaataactagttctagaggaaggtctaataacgattgcaattttgcagtcgtgataagcatagataccattttgagatacctgcagcgacatgtggtgtgatatgaaagtctccgtgctttctcttggttccaaagtctcaggtactgtgaataccactgtgctttactgcctctctttataattgaaagaaataatacatctcagttagaagctggtgaaattaagatataatacttcccctttcaatgttctttgaattaagaacctcttgtcaggtgtccaaatgaactgggtttaaatctctctgctagcacgtaatagctgtgttaccttagcaagtaattccggctcyctaagtccctgaagagggataatgacaaggggaatttacagagtttatgggtatgtagtgccgaaattgtgcacataaagtacttggtactgtgttagaat

SEQ ID NO: 407017 - DNA, 476 bp, Homo sapiens
tatttcattgttctggaggaaactcatgatcccattaaatgggcttgcttttatttacacttgcactttgtaaaaaccaaataattcagttgaggtgtgtatgtggaagaggggatgacaatataggtattaaacatacctagtgattttagggtatgtaagaatggggaaaaatgatgtatgcagagacactgattgaagagtaagcattagaaagtgatgaaattaaaaaggggaatagaatgtacaaaggtattttgtaagtagagaaggtatcagtattttctctttctaatgtactactctactgtgctattgttctagtttggatcgattctatgaaatagtttcctattaygggttagagagatgcaaactccctcatgatctgctccactttaatgcttttaaagtgagtgagtttaatattaaaaatgaaaaatgtgcaggcagattttatctaatgggaatttgtc

SEQ ID NO: 407018 - DNA, 602 bp, Homo sapiens
gatcactatcactcatcttctaggaaactagattggaaatccaaggctgtgcacctggaacagtatcgtggcttccctgagattattcatctgtttaatgaaagaagtcgctgtgatctcacaggccctcccttaattctaagtttggtttccagaattaactaaaatgtttatggtatatatgaacaattaactgtgaaagccattgtcataacccattctaccacacatccaaaataggtaccattgttctttatagtatttcatctatgttaagatttttaggaatgaatttttttatagacttttaagttaaagtaatagctatgaatatatttatcatatatatgaatatatattcagacccataagtgtatatatgtataaattatacatacatatatatccaatgtgtgtgtatatatgtatatatatgtgtgttttattatttttgctctcctttagaaaaaatctgatagttctatcattatgaattctaggggtccacaatcttcytgaaaaatcagtttgcttctgctttctcatgttggctttttgtttctatttgtatgtatgtgtgcatgtgtacattatggattata

SEQ ID NO: 407019 - DNA, 532 bp, Homo sapiens
ttacgcactgatactgtaaataagttgccaaactcttcatcagtaagcggtgggataataattctaaaaccagccccagctgatgtttcttacatttgagagcagaaaggaattaacacraaagggcctctgtgaatctattatctgtagtgactattatatcataacgaacttatttgtaaaaatccgccttgtaatgttggggatttttaagtttagaaattcctaaaatcctgctgctgcatgacaatggcatgcagaaaatacaaagagtagacagcagaactaggacagtgggtgagctcagtgcaaggaagaacttgaaaaagcaaacaagatctccacttgagataatatgctgttctcatggaaaaagaaactgagtgataagccctcaggaaaactgtaaacgggtggccaacagcatctaagattgctaactcaatggattagggaaggaaattaatagcaatgaggaaatataatagcacagatagctcataattttgagcttcttttcccatattgctcc

SEQ ID NO: 407020 - DNA, 535 bp, Homo sapiens
cagttctgcagacttaacaggaagcatgactgggggcctcagtaaacttacaatcgtggcagaaagtgaaggggaagcaaggaccttcttcacatggtggcagcagagaaagagagagtgaggggggaagtgccacacaattttaaaccatcagatctcgtgagaaatcactcactattatgagaacagcctgggaggatattcgcccctatgatccaatcacctcccaccaggtccctccccaacattgggaattaaaatttaacatgagatttgggtggggacacagagctaaaatgtatcattccacccctggttcctcccaaatctcaattcccactcacatttcaaaacacaaccatgctttcccaatagyccttcaaagtcttaactaattccagaattaacccaagagtccaagcccatagtctcatctgagacaaagcaagtctctttcacctatgagtctgtaaaataaaaaacaagagtattatttccaagatacaatgagggtaaaggcaccaggtaagtgatc

SEQ ID NO: 407021 - DNA, 532 bp, Homo sapiens
ttacgcactgatactgtaaataagttgccaaactcttcatcagtaagcggtgggataataattctaaaaccagccccagctgatgtttcttacatttgagagcagaaaggaattaacacaaaagggcctctgtgaatctattatctgtagtgactattatatcataacgaacttatttgtaaaaatccgccttgtaatgttggggatttttaagtttagaaattcctaaaatcctgctgctgcatgacaatggcatgcagaaaatacaaagagtagacagcagaactaggacagtgggtgagctcagtgcaaggaagaacttgaaaaagcaaacaagatctccacttgagataatatgctgttctcatggaaaargaaactgagtgataagccctcaggaaaactgtaaacgggtggccaacagcatctaagattgctaactcaatggattagggaaggaaattaatagcaatgaggaaatataatagcacagatagctcataattttgagcttcttttcccatattgctcc

SEQ ID NO: 407022 - DNA, 548 bp, Homo sapiens
aaatgcttaataaatacgtgtcaaataaattaatatggtggtaattatatgcacgatctccaattgttaactgcatttgtttagaaaaatcataaaaactggtgaataatacatcattttcttccaaagggttttgcatatatgttggttttcaaatgaaccactactgctcccatttttatcaccatcattaccgagcacccccaactggaactgacccacctacttatctcttcctgtgtaatgccttatgtgtacaacagaggtggtacayaccttggtaggatgatttgaaggatgcctggaaacatggacagagtttcacttccaatagctacaccatgagatactcacgcttctgactgatgacattaaaattctcccatagcaaaattgttatttaggagaaataacatttcagtcactattgaccattattgtcacaccccaagacagaatggccagctagtcagagaccagatgtccaagggaaggagacataatatacattttaattgggttgaggaagaatgttaagacattaagat

SEQ ID NO: 407023 - DNA, 397 bp, Homo sapiens
aatattacaaatttgctactcttctcccattgggctcagggcatgaagcatgtgtgaaggctgccaacattcctctatttgctggtttcatcataaaagggtattgatgcaatgacacggaaaaaggccagtaatataagcccaaagcaacatcagtgcacttgaaagcttaatgggtatttctttggtgatttcatcattgagtctaattaagtcctccataggcttttagacaaacaacacttttgaaatccctgccctccccaccaccaaactgacttaccagcattcttctcaaactaaattgcatgtatagcacatacacacacaartatttcatatagtgaaagaaaatccacatataaatgtgttttctggtaaagattatctatatttg

SEQ ID NO: 407024 - DNA, 648 bp, Homo sapiens
ttctgggatcagttcagaaaatatttaaacttggcaagctaaacaagcctcagctaagaaagcctaagggccccattcagaggaacattatctaccatttatgcttgatttaaaagacacacacacacacacacacacacacaactgaaattactcagaaaaaaactgtggacaacattgtttttgactaaattacaggcttttaatattcattagcagtgacttttccattattcagccaagaaaatctgtacacaaaccaaaaccaagacagggaaatttacagacaayggctggtgtttgttaacaacaaaacaataccaactaaagaaggtctacttaggttctgacctaaggtggctctgttgagtgattctctccctgatcacgacattcatgtagagattaagagtggaaaagaaataaaatccatattttccccattgttattttatgaattgtaactttgctactagagagtggctatttgtaagactcccaaagcagaggcagtgtgacattgtccaggggtgtagactgaatgcatcatttacccatagacctatcttagcctttggatggtcttgctttcttcagctaaccacagtttctaccacttccaattgtattgtagcacctctcttccta

SEQ ID NO: 407025 - DNA, 510 bp, Homo sapiens
atgggaatacaaattcagcatgaggtttaaataaagaaaaacagtcaggttcacatttttttcttggaagttaacatagttcacagccttcggcagactccattgcagtgttttttcaggatcaaattaaaatagtgtaactatctatttccctttcttctgcatctgattccagggtagacaaaaccccagggccaaactttatagatcaagtgstatttcagaagccaagctgctcccttaggcatcatggtttacttagagtacttagatggccaaaaggtcagcttctgggaggttaaaacaaaccaacctagatgtgtggtggtgggaaaatttgcttcatattggatactacttttgccacctctcctgttcctgccttccaatgtccagttaccataactattgatcagacaatgagttatgaatggagattaaaaaaaaaaaaacaaaactcatcctccaagagaccttttgtaggtcattgcttttgtgtagaaacagtgt

SEQ ID NO: 407026 - DNA, 570 bp, Homo sapiens
ctctcctgttcctgccttccaatgtccagttaccataactattgatcagacaatgagttatgaatggagattaaaaaaaaaaaaacaaaactcatcctccaagagaccttttgtaggtcattgcttttgtgtagaaacagtgttggggacatgatctacctgtggaaacacaattggtagctacacatgacaacagagctacttgaagggacttagcttaggagcttttaaaattcacagagacctaggttccactctaagccaattcaatcagtctgcaggactgtggccttaacctaagtatttctgtactgagaaccactgacctatatccatccaaaaagattccaaataatcttttatcaagaggcatttaactaattgaggacatgccagtttctaggtatacgggaatgaataatacaaatatgcctgctgtccagaagagaatagtctagtasgagtgggtaatagagcagtaatcaaaccacagtctaatggtggaataatgaaggcagctacaatatgctaagggaatattctttagtaagtattctgtaaaacatcagg

SEQ ID NO: 407027 - DNA, 582 bp, Homo sapiens
tgtcattagcaccatccgtataaggtaacagaaaatatgaggtgtggattttaaaaatatgataaaatgagaatactgttagatgcacaagaaggtgtgacttcaggccaggcatattcttattagaaaaaaactgcctctgttttattttactaaaataattggcattatgtgttttgagttgacatctttcaaattattttatcaaatcaaaaatatatacctcagttgaaatatattttaattatgtcattttaatgtagcatatgacataaaagattgctctggagtaggctcctaagcatttttaccrttaagaatattatgttagaatgaagaaacataatttatttggttatatattttggcccttaacacatttgcaacatgtttttgatgcttcagtagaaaactcttagaaaagtataaaaacacataacaattgctcaaaatatttaaagattaacacattagaatattcacatatatatataatttttaatgagcacgtgttattcgtaatcacaacacttagattatgtgtcatcacacccagcagcctgtaattttgacattgccttt

SEQ ID NO: 407028 - DNA, 602 bp, Homo sapiens
ttgaattcgcaagcaatagtgaagtgattgaagtaaaattcacccaatactattaaagttattcctcaaagtccatatttcattgcctacaaaggattatgaagtagtcccaggtctgattatagtttcttttgccacagattttccctgctatgtattaaacagaccacatcgatgtcatgccactcacccactaaattaattataatccacagaaggaacttgaaaggacrcccaagtgtctttaatgtattctttggaaccattatagtctgttttgttaagtcattaaaaaaaattagataatatattgtggtctagtcgatgatttctttagatctgccttaatcttctggatacagttgacaatgcttaaaaataaaaactataacaaatatacaaccttgaaatccttaaaaagttagcaatgagaaatactttcaagtgacaactgattttgatagcagattttttttgtatctacttgtaattatttcaaatgtagatataatggcacttttaaacagtgaattaaaaaaagaattcagtcacttaagttgctaaatttttaaggcagaaaagaatttttcagaaatgtgtag

SEQ ID NO: 407029 - DNA, 568 bp, Homo sapiens
ccagttagattattatctaccatgtttgtgactgttttctattcattacatttattttctcctcatttttctgcctttgctggtgttattgaacattttacatgatgctattttacctcctcacttagtgtatcaaatatatatatatatatatatattttttttttttgagaaggagcctcactctgtcacccaggctggagtgcagtggcgccatctcggctctctgcaagctctgcctcctgggttcacacaaatctcctgcctcagcctcccgagtagctgggactacaggcgcccaccaccatgccckgctaattttttgtatttttagtagagatggggtttcaccatgttagctgggatggtctcgatctcctgaccttgtgatctgcctgcctcggcctcccaaagtgctaggattacaggctttagccacagtacccagcctcaaatatatttttaaaaaatagtagttgttctagagtttataatatgcaatatgaactaattttagtactttgtatatactacattgcttcatgtgtcttacatataccctattaca

SEQ ID NO: 407030 - DNA, 418 bp, Homo sapiens
ttgttttgttaatagttaaacattttgcttttagatgctggatctggcttagttactttgtaatcatattaatatttctacagaaaagtgtttgaactggacttaggaagtcaggtttttctacccaatcaatttttgaaaaaaaacttttggttttagatgtaagaactgtgggagatcctgtatytgtataagaattttatgcttcttaagagttctatctgcatctgatcttatcactttttcaatggtaaaatgttaacatcttctataattattggtatgctcaaaatttctattgttggatcaatatttaacatttttattttgcagggaatgtatccattttcctctttttccatttattgctttggtgtagagatgagaaatcaatcaagcattggagtttggaacgtat

SEQ ID NO: 407031 - DNA, 629 bp, Homo sapiens
ttgctctaggtcccaatttacataaatatttgcacccattttatctggactttaagttttagaattgggctgtccgtattactggtgtcttctagayagtatctcctatgaagggagaggctcctaataccaaattaatcttaccggtgtccttgaatctgcagtcacttaaaatcagtatatactcctaaagagatactgtgaaaaaggacctagggagacttcaagagtgacttgggataatctctgatttaggagaaatcaaactttacagcgcttcttctatttttttcccccgagacaggttctcattctgtcacccaggtgaaatcatggttcactgcagcctgggttcggttgatcctcccatgttcctgtgttgctgggaccacaggcatgtggaccatgcttggctcatttgtttttatttttgtagagatgggtctcaatatgtttcccagactggtcatgaactcctgggatcaagcagtcctctggccttggcttcccaaagtgctgggattacaggtgggaaccactatgcctggcctattttggttttctttatgcctccatcgatcctcttgaggcaacactcttcacggcactgaatccagaatcagcgtatt

SEQ ID NO: 407032 - DNA, 552 bp, Homo sapiens
ctgggcatatgtaatatcacaaagtttcctacaatattcttatgtgttctcagtgaaaaaaaaatgtatggaagtttatcagatttttgaataaatcactttagtcaaaagcaatcagcatgccaatgtcagtttcttttttccactcctaaaattattcatctgtccctgaaaatatttgcattgctgttgacacatagatattaaaatattcttgatcccagtgttcaaaccagtgcctgccttaatatccagagartttgccattattattattatttagatttggataaatttaaggagttcaagagcagttattttacattacatagtggataagtctgggcttttagtgtaaccatcacctgagtaatgtacaccgtacccattaagtaatttcttatcctttatctccgtcccattctcccacccttctgagcctccaatgtctattactccacactgtatggtagtgtgtacccattatttagttcccacttataggtgagaacatgtggtattttactctctgtttctgagttattccactta

SEQ ID NO: 407033 - DNA, 426 bp, Homo sapiens
ttgtgaatagtgctgtgataaacatatgagtgtgcatatctttttgatataatgatataacctayagtgggatttttggatctaatggtagttctatttttagtttttaaaaaatatccatacttttttacatagaagttgtactaatttacattcccagtgacagtatataagtgtaccactttctctgcatccttgccaacatctgttaattttcatctttttaacaatagctatgatgactggtataatatctcattgtggttttgacttgcatttctgtgatgattaatgatgttgaacatttttttcatacgcttcttggccatttagtatgtcttcttttgaaaaatatctgtttatatcctttacccactttttagtggggctatttgttttttgttattattgttgagttgtttgaat

SEQ ID NO: 407034 - DNA, 561 bp, Homo sapiens
tttccataggttttcttctagtatttttatagtttcagagcatacatttaagtctgtaattcatcttgagttgatttttgtgtatgatgaaagagaggattccagttttattctgctgcatatggcaatcaaatttcccagcaccatttattaaatagggtgtatgtttccccagtgtatgtttttgttgactgcrtcaaagatcagtttgctgtagatacgtagctttatttctggcttctctattctgttccattgatctatgtgtctattttgatgtcagtaccatgcagtactctacccttgtagcataatttgaggctaggtaatgtgatacctctacctttgttctttttgcttagggttgctttggctattcaggcttttcattatatatgaattttgggaatttttttttctaattctgtgaaaatatgacatatattcactttatttattcttccttcattaacagagaaccccagcagagtacactaagtactcgggcaggcataatagctcagattgaaaaaagggatggacatttagtgcctgctattc

SEQ ID NO: 407035 - DNA, 570 bp, Homo sapiens
ccttagctgagaaataccactagctctctgcagtacctcaggatggaaggagacaacatgcacaaaagtgcttggtcaactgtcaagcgttacaccaatgaaagatgttcaaatgcacctcaaatttctcaacattttccaaagccaaccaaaacccttagcttctttgtaatagagacgatgaattactaggtaagaaatgagcacccagagatagaagttcaaataatgttttgaagaatgcaaggtcatgccagagaaaacaaactatattcctcaaactaaaatcaatgctacaagatgttgggtcatcactgcttttataagcccattagaaatgtaattagacttgcaaggcactgatactcccctccaaggttgtctaaagaagtaagcaactccagccattagtaagcactattttaaaagtacctgctggtagttgcacagttaccttaaawaaaaaaaaaaaaaaaaaaaaaaaaggctgaaatctaccattggagctatccaaattcaaccaacatggaagcgccggaagcgaaacctgatcctggcatatagctgcgc

SEQ ID NO: 407036 - DNA, 573 bp, Homo sapiens
gattttatctctgttgccaggctggtgtatggtggcacgatcttggctcactgcaatctccgcctcctgggtcaagctattctcctgcctcagcctccctagtagctgggagtacaggtgcatgccaccaygtccagctaatttttgtatttttagtagagacagggtttcaccgtgttagccatgatggtctcaatctcttgacctcatgatccgcctgcctcggcctcccaaagtgctaagattacaggtgtaagccactgtgcctggccaaccctttttatatgttgctgaatttggttggctagttcaggatttttgcatctaaattcataagacatattggtatataattttcttctgatgtttttgtattgttttggtatcaggattaatactgccctcataggatgagtttagaagtattctctcttctgttatttggaagaatttgtgaagaattggtgttaagtctttaatgttttgtaaaattcaccattaaagccttcacttttctttgtgaaatgcttttagattacttatccaattactctttctctttttattataggt

SEQ ID NO: 407037 - DNA, 463 bp, Homo sapiens
tacccatcctacacacccttgttgacatccatgcttaaaacccacttgttatctctgttatggaaagttcagagtatcctagaccccaccaccctagataatcctcccaggcctaagcaattaagggaactgaggagagagggccccagaacccgtgcccaggctgaacagagaacaacatgaaagaatgagaaacatattgtccccattgccgctgcaggacgccctatgtcaggtggaattatgtggccaagaactttgcccaggtgagaagatagggtagaagggtggacctgtgactcatggtggtggagagkggacatttctgggaggcctggggaggcagtgggagggtgatgccaagggaagagaaggccagtgctgggccagaggtcaatgccaccggcagctgccagcatccctctccagttatgtgtccccatgccccctccaggccctggga

SEQ ID NO: 407038 - DNA, 591 bp, Homo sapiens
gttttcataatttgtttttcttctcagtagaagacccttgattgctaactttcttaatgccaagtaacagaaactatcgacgtatcctgtgtaacaaatattactttctttgttcctgctcatgatcattagtgacttccagataacttatcaattattgtcttctataatacatagcactaaacacttgaacatagatgcttgtatttgatagtcatctggcatcatttatatcatttatgaacatgaacatgtacaattgacaagmcttcatagatccatggcaagtataagccatcactggtgaatgatttcacaatttgtaacagctcacatggttttgagaccttaaaccttaaccattcttctttgcatcttctgtcacccaccatgttcaacacgaatttcctggtggcccagatacttgccaaagcaggaaaagcctccccaagattatcttgctttaaatgcgcaggagaatctgagcttgtatggcattgttattgattaatcatatctacagtgttgttgattttttctggttgatttggaaacgagagatggcaatcaggaaactatcaacacattgaa

SEQ ID NO: 407039 - DNA, 567 bp, Homo sapiens
gcttggaagagtttgttattacccaccttctgaagcctacttctgtcaattcgtcaatctcattgtccgtccagttttgttcccttgctggcaaggagttgtgatcctttggargagaaaaggcattctggtttttggaattttcagcctttttgcactggtttctccccatcttcgtggatttatctacctttgacgttggtgaccttcggatgtggtttctgtgtctggacgttttttgttgatgttgttgccattcctttctgtttgttcattttccttctaacagtcaggcccccctgctgcagttctgctggagtttgctagaggtccactccagaccctgtttgcctggatatcaccagcggaggctgcagaatagcaaagattgctgcctgttccttcctctggaagctttgtcccagagggcacccgccaggtgccagctggagctctcctgtatgagatgtctgtcagcccctgtggggaggtgtctcccactcaagagacatgggggtcagggacctacttgaggaagcagtctgaccattagcagagttcaagcgc

SEQ ID NO: 407040 - DNA, 574 bp, Homo sapiens
gcgtttcagtgaagatacctttatgtytaatctatttgtggttctttgggctgcataaatctgaatattcatttccctcagcagatttgggaaattttccatcattatttctttctttcttttctgttttttttttttgtttgtttttttttgaaatggagttttgctcttgttgcccaggctggagcgcaatggcatgatcttggtcaccgcaacctccatctcccaggttcaaacaattctcctgcctgagcctcctgagtagctgggattacaggcatgtgtcaccacacccggctaattttgtatttttagtagagatggggtttctccatgttggtcaggctggtctcaaactcctgacctcatatgtttttacccttttctctctttctgttccttttatgatgtccataaagcatatattagtttgctggatggtttccatatgtcccattggctttctcctcttttttcactttgttcctctgactgggtaatttcaaatgacctgtctttgaagttggtcattttttttttcttctacctgatcaagtcttctgttcccttggtt

SEQ ID NO: 407041 - DNA, 468 bp, Homo sapiens
gcaggaaccatgggtgggcttgctgctagattccttaggtagactggcctggtgacttggccagcagtggggcaagcatggttcttgggtccccaagagccagccctcacacctgaacacatgagtgtgcctggagcctgggtccacttgagtaggcctggagcttacagacatagaatctgggactgtaggaactgaccttgtccaaggatagccattgtgtctgagtcctcaggggccagactaaagccaaggggaccagcctggakcttggtgctacaggtatggactttgagacttggaaccagggtggctggtctggcactggggtgagcctggagcctgtgctcgagaggccagcctggagtatggggccataggggttggcctggcataaggactcactggattaggcctggtgcaggggtccaaagcaaaattgagtgctcactttactccccttcctct

SEQ ID NO: 407042 - DNA, 468 bp, Homo sapiens
gcaggaaccatgggtgggcttgctgctagattccttaggtagactggcctggtgacttggccagcagtggggcaagcatggttcttgggtccccaagagccagccctcacacctgaacacatgagtgtgcctggagcctgggtccacttgagtaggcctggagcttacagacatagaatctgggactgtaggaactgaccttgtccaaggatagccattgtgtctgagtcctcaggggccagactaaagccaaggggaccagcctggatcttggtgctacaggtatggactttgagacttggaaccagggtggctggtctggcactggggtgagcctggagcctgtgctcgagaggccagcctggagtatgggsccataggggttggcctggcataaggactcactggattaggcctggtgcaggggtccaaagcaaaattgagtgctcactttactccccttcctct

SEQ ID NO: 407043 - DNA, 605 bp, Homo sapiens
tttaaaatcttgggctttggttctatagtagttaaaataaagattatgattttgatgatggctcactcaccaagacctaatgatgagctctagcttaatataacttaaatgagttcaactttatttagaaacgtttgttgagcagctgcatgacagggaatattattgtaagaagattcagaaaaatgttaacatatggagtattataatttgtgatrtaacaatgattaaaaacaacatattatgaaaatataaagaagtgaaaattttttattcaaaatttttgagtagaggtagatctttatgctttcaaagtgggtagaagggcattccaagtgagaaaagaattggagcaagaatgcaaagacaaatgcgtatacagagtagtgaagaaacaacagagagacaaaattgctgctacttagaatatgtaactgacatattaagagaaggtgccccagaaaatgatagaaaaatgggaaaggacaattgtagagagcactgattaaattttttctgttatttatattccgaggaaggccaaagcttttgaggagaatgctcccatatttcagcaaggtaacacatctgtatctagaaatcta

SEQ ID NO: 407044 - DNA, 607 bp, Homo sapiens
cttttcattcagagtttgctacctgccctcttttccttatctccaagacagatggccatagagagaataagaatgctttatgtgtggatcagtctaagactccaagtcaaaaattaataaggtctgggacaagtcactaggaaagaaaagaaaaaaaatagagatcctctagaggtacagatttagagctagcaagattggtcaagattcatattaattatgaaaataatttgaatctgaaatgtctcagggagactgccaaaatcagagtgaggtaagtgcctgaatgaggcacgtataccagaggctacagcagagaaggaagaacagctgaataatgaaaaggagccataacatagaagagacaaaccaaaagagtgtcatgaattttataaagaaggtcatcaacatcaccatatgttagggaaggagatcttccaatgtgagcatgaagaagagaagcatgtgctttaaccrgaactggtatattgtgtgactcatggtcagctcatggtcatgccacaacagccataatcactgcttgcggtcaaccactgctagtctgttttctaacctcatctgtaattgtcaagtctaaaaccaatct

SEQ ID NO: 407045 - DNA, 635 bp, Homo sapiens
gaaaagtgaaaagataaataactgttatattagtggacatttagagcaacttatctgcctggtgtgattgttcagtttggctaccaaggtcactgagaaacactaggtcttgcttgggttggcaccagctgaacaggcaagcaacataaactatgggtgagaatagaycagcgttgtgctcagtcccagaggacaggcaaccggatggttctgcctcgccagatgaccagccatggacataactctaaataggaaagtgtgtttctcagccttccccagagatactgagatcaatgttccatggacaagcccactgaactgtcattagagcagatggaagccagagttcccatcctccacaggcttcagagttattaaagtcgttctttgggttagtaagacttgaaactctcagtcgtctctatatcctgctcaagccctatctggttggcggggggcgggggggtggggtgaatcacaaaagtaaattaaaatggaaacatttcattaatttaaatagaaaatctgtggtgttcctgctctatacatatagacacccctcaaaatccccatctctttcaatgctcccaatgtctgttcattcttttttctggatgccattagttggttttatc

SEQ ID NO: 407046 - DNA, 620 bp, Homo sapiens
ttacaaatttgtgttgggccacattcaaagctgccctgggccatgtccggcctgccagtcacaggctggacaagtttgctctaaactcattttaattttctctatcgcagatctctcgaaaccactttaccaagaagccattgtttcttttgttgaaaaataacatttagaaactaagttctgggtctaggtgtgctgactgctactgggtgacattacttcttaaccctttcaatagacagagctagaaaatatatgtgtgtataatgacacatgtatatgcatacatatatttttatttctgtatttatctgcatacatatatttaaaaatgagttcatactgatacttkcaattccagtttaatacagtaaggttcaggattgccttttcttcattatttgtaacttctttctcgaacattgagaaatctggctcttctttttgtgttatatttacctatttgatcaaccttggtatatacacataaattagttccagattgcctgacccattaatgtgtaataaataatttttctaactaggttatagtgtttgagtagagtactttttatctttagcctcataatattcagccaatatactttttttccaaagta

SEQ ID NO: 407047 - DNA, 628 bp, Homo sapiens
gtaaataatgagaattgttctagatagatttagtgcactacactccaaggaaaaacagaagtttgggcatgtagtgagatgcattgtaaattagctctttcaggaaaaagaaaaaagggaaaaacaaaataaagtattattaacatcactaaaattcacagatgacagtactaattgcagtggatctctcattcataaatatttattaagcccttactatttgtrtaatgtggaaacatacaatgcccaaaggcctcaaagacctcagaatccaattaaagaaaaaaacacatatattcaaaaaagccattgtcatgattatctacatagaaaacttcaagaaatctacaaaataaaaaactccagaactaataagtgaatttagcaaggtcacaagatataagattcatgcacaaagcaattgcatttctatacttattacagccatggagaaatcaaaatttaaaaacacaatatcatttaaagtctcttcaaagaagatgaaatactcaggtataaacctaacaagacaaacacaggatatgtttgaagaaaattacaaaatgctgatgaaagaagtcaaagaacgcctacataaatggaacacatactgttcgtcgattggaag

SEQ ID NO: 407048 - DNA, 571 bp, Homo sapiens
tgacattttttccaggacaattgaagtcaaaattggtgttttggtaccaaagggtaggggctaaaaggcacactaccagaaaattatacccataattccatagactggtatccattgactctaaaaaccttgtctgagctatttgtgtatgcaattttgacttcaattgtcctggaaaaaaaggtcacaaaatccaattttaaccagcatgctaattttattactraacatgcaaacaaatcagcaaaggtttatttgagtccattcatagtaatatgcaagtgaattctgaagtcagggccagatgcagtggctcacgcctgtaatcccagcactttgagaggccaagatgggtggatcacttaaggtcatgagtttgagaccaacctggccaacatgatgaaacccatctctactaaaaatgcaaaaaaaattagctgggtgtggtggtgtggacctgtagtcccagctactaaggaggttgaggcatgaaaattgcttgaacccaggaggcggaggttgcagtgagccgagatcgcatcactgcactccagtctggcaacagagtgag

SEQ ID NO: 407049 - DNA, 571 bp, Homo sapiens
tgacattttttccaggacaattgaagtcaaaattggtgttttggtaccaaagggtaggggctaaaaggcacactaccagaaaattatacccataattccatagactggtatccattgactctaaaaaccttgtctgagctatttgtgtatgcaattttgacttcaattgtcctggaaaaaaaggtcacaaaatccaattttaaccagcatgctaattttattactgaacatgcaaacaaatcagcaaaggtttatttgagtccattcatagtaatatgcaagtgaattctgaagtcagggccagatgcagtggctcacgcctgtaatcccagcactttgagaggccaagatgggtggatcacttaaggtcatgagtttgagaccaacctggccaacatgatgaaacccatctctactaaaaatgcaaaaaaaattagctgggtgtggtggtgtggacctgtagtcccagctactaaggaggttgaggcatgaaaattgcttgaacccaggaggcggaggttgcagtgagccgagatcrcatcactgcactccagtctggcaacagagtgag

SEQ ID NO: 407050 - DNA, 596 bp, Homo sapiens
ctctccccacaaagaatctcaggtcctatgtgtcagaggtccctcagctttggggtctcaccctgtgctttctcttctggtgtggccatggcccctgaatggcagcagcagggtgggcattcaggagttgctcagtagcactcttgtgcctccttctactccaaagcactggttcagtggttacagggcatgtgccaacatccaagagcaagtgtagaygtctcttctcactcatccagttcctccatggcctctcccagattaaggaagaagttaagtagtcatgtgtacatgccctcccagtggctgcctcccacacaaggagctcagaactgaaggagacaattctgctccacctttccctgaagttgagtcatcctcttacatgtattcataaaaatgtagaggctctgcaggctttgcaaattacttcccttcacttcaaaagcaatttgaatcccagatgaaatgaaggttcctatccgaagtaaaacaggctcaccatttaagtaaaacaagctctactgcaggcagaagaagacatattccttccctatgctttttgttcatgctctttgtaaatcttgaaggaatct

SEQ ID NO: 407051 - DNA, 596 bp, Homo sapiens
ctctccccacaaagaatctcaggtcctatgtgtcagaggtccctcagctttggggtctcaccctgtgctttctcttctggtgtggccatggcccctgaatggcagcagcagggtgggcattcaggagttgctcagtagcactcttgtgcctccttctactccaaagcactggttcagtggttacagggcatgtgccaacatccaagagcaagtgtagacgtctcttctcactcatccagttyctccatggcctctcccagattaaggaagaagttaagtagtcatgtgtacatgccctcccagtggctgcctcccacacaaggagctcagaactgaaggagacaattctgctccacctttccctgaagttgagtcatcctcttacatgtattcataaaaatgtagaggctctgcaggctttgcaaattacttcccttcacttcaaaagcaatttgaatcccagatgaaatgaaggttcctatccgaagtaaaacaggctcaccatttaagtaaaacaagctctactgcaggcagaagaagacatattccttccctatgctttttgttcatgctctttgtaaatcttgaaggaatct

SEQ ID NO: 407052 - DNA, 613 bp, Homo sapiens
tttggtttgcatttctctaatgatcagtgatgttcagctttttctcagatgtttgttggccacatgaatgtcttcttttgagaagtgtctgttcatatcctttgaccactttttaatgttttttttttttcctgttaatttgcytaagttccttgtagactctggatattagacctttgtcagatggatagattgcaaaaattctctcccattctggaggttgtctattcactctgatgatagtttattttgctgtgcagaagctctttagtttaattcgatcccatttgtaaattttctttttgttgcaattactttagctgttaattattcaagaccaaaaggcataaaaagagacatatgtccacccaagtgataaggcaatttgggaaactacatttcctagcatgccctgccccttgaaagttaaaaatcttgactggcacagagcaccctggggcacctgtggctagcaccatttagaagtaaatggtgtagggctgtgttctgatgtgaaggcttcctgtttccatgggacacttaaccagacacaggacacaacaccagaggtgaaatttcagtggatattaagcctggggtagagcttctctcc

SEQ ID NO: 407053 - DNA, 613 bp, Homo sapiens
tttggtttgcatttctctaatgatcagtgatgttcagctttttctcagatgtttgttggccacatgaatgtcttcttttgagaagtgtctgttcatatcctttgaccactttttaatgttttttttttttcctgttaatttgctyaagttccttgtagactctggatattagacctttgtcagatggatagattgcaaaaattctctcccattctggaggttgtctattcactctgatgatagtttattttgctgtgcagaagctctttagtttaattcgatcccatttgtaaattttctttttgttgcaattactttagctgttaattattcaagaccaaaaggcataaaaagagacatatgtccacccaagtgataaggcaatttgggaaactacatttcctagcatgccctgccccttgaaagttaaaaatcttgactggcacagagcaccctggggcacctgtggctagcaccatttagaagtaaatggtgtagggctgtgttctgatgtgaaggcttcctgtttccatgggacacttaaccagacacaggacacaacaccagaggtgaaatttcagtggatattaagcctggggtagagcttctctcc

SEQ ID NO: 407054 - DNA, 593 bp, Homo sapiens
ctattattattaaggctcctgatacaaggcatttttaatccttatttatagcagaaattagcattccaaagctcatgytttgttaatatgatagctttattgttgtgtaattcacatactttacaattcaacatttaaaatgtacaattcaacggcttttagtaaatttgctgaattaggcaataattatcacaatcaattgtagagcattctcaacatcctaaaaagaaaccccctacccaggttattccctgttctccccacattgcttctacccctgaagcccctgctcctggctcacgccctggcaacactaatttactttccgtgtctgtggatttgcctaatctgaatatttcatatgtggttgattcttgagcaatgtggaggttatgggtgtcaatctcctatgcagttgaaaatctgtatataacttttgactcacccaaaacttaagtactaatagcctactgttgaccggaagctctactgataacataaacatatttgtatgttacattattatataatatgttcttacaataaagcaagctagaaaaaagaaaatgttattaagataaacaagggaaaat

SEQ ID NO: 407055 - DNA, 593 bp, Homo sapiens
ctattattattaaggctcctgatacaaggcatttttaatccttatttatagcagaaattagcattccaaagctcatgctttgttaatatgatagctttattgttgtgtaattcacatactttacaattcaacatttaaaatgtacaattcaacggcttttagtaaatttgctgaattaggcaataattatcacaatcaattgtagagcattctcaacatcctaaaaagaaaccccctacccaggttattccctgttctccccacattgcttctacccctgaagcccctgctcctggctcacsccctggcaacactaatttactttccgtgtctgtggatttgcctaatctgaatatttcatatgtggttgattcttgagcaatgtggaggttatgggtgtcaatctcctatgcagttgaaaatctgtatataacttttgactcacccaaaacttaagtactaatagcctactgttgaccggaagctctactgataacataaacatatttgtatgttacattattatataatatgttcttacaataaagcaagctagaaaaaagaaaatgttattaagataaacaagggaaaat

SEQ ID NO: 407056 - DNA, 593 bp, Homo sapiens
ctattattattaaggctcctgatacaaggcatttttaatccttatttatagcagaaattagcattccaaagctcatgctttgttaatatgatagctttattgttgtgtaattcacatactttacaattcaacatttaaaatgtacaattcaacggcttttagtaaatttgctgaattaggcaataattatcacaatcaattgtagagcattctcaacatcctaaaaagaaaccccctacccaggttattccctgttctccccacattgcttctacccctgaagcccctgctcctggctcacgccctggcaacactaatttactttccgtgtctgtggatttgcctaatctgaatatttcatatgtggttgaytcttgagcaatgtggaggttatgggtgtcaatctcctatgcagttgaaaatctgtatataacttttgactcacccaaaacttaagtactaatagcctactgttgaccggaagctctactgataacataaacatatttgtatgttacattattatataatatgttcttacaataaagcaagctagaaaaaagaaaatgttattaagataaacaagggaaaat

SEQ ID NO: 407057 - DNA, 439 bp, Homo sapiens
ttgcatggctatactacacataataataataatacctaacatttacatagtgctgactatatgccaggcattgtgttaagtacattacatatatattaattatatgtatattatatcatttaatcctcacagcaacccaatgtggtgggcattctctgatccagattttacagaagaagctgaggtacagaaaagtgacacgcactcaacggtgatacagactcacaattacttgtcgaaggtcatatagctactaaatctgcaatctgcaagatgatctcctggaaagggttaaggatataagtgatattttgcccattatttcctcacttccacataggtttcaggaaaaagcctaaaaaacactaagaaacacctctgtcttgttaaacagtgggcagaccaaagaaawttgttgaaccaatgtttagggggccac

SEQ ID NO: 407058 - DNA, 595 bp, Homo sapiens
aaagatgactgcaaaagatctcagtgcaaaaatattatgctttctatgtaaatgtaactttaaaacaagtcccctagccctcaattttaccacattattattccgaaatctcttaatgataaaattccagagccatagctatatcaattctatgtgggaacatttctgttgtccatttatactaaatgcattcagaacagatatctcctgtcattaaatttatgtctgactgaagtggaacttttcatgagaaaaacaaaatttctgcaaatcttgtgaaacacctaaacctrgtctggatatagtaaagggaatagcgtaagaaatgtgttgactacagtactccaagatcctatcatctactcctggccccaatgtcaagggatattttcacgtaactttcttttttaaattgcatcataaaaataaacatataagtcatctacaaccctgtagataaaaatttacagacaaggtcatctttgtccaactagtttgtgtccaaggagaaataaaggaaaaagagtttgtagcaatagctgatattagcactgtgctaaacatctcatatatgctatctctaccctggaaacaa

SEQ ID NO: 407059 - DNA, 638 bp, Homo sapiens
tttcacaaatgctggagttgatggggcaatggttaacattcattaagtgagagccaaaggccaagcagtgctaatcttccattgaatgggccctgcagctactggcagtgggttttaattgggttttctattaaagcaattttctcctcagtgatttatcataaagaaatgacacaattaagtctcatttggaaacactaatgaattatttagcatggaccaggcaaaaagaaaacatgacctccattagcctcatctgaggtgaaggaagaaaatcctgaagaaacggactaataagaatgtaggaaatgggagcatgaagagttacatatcaaaacagctttctacatcatctccctcattctattcaacctcccatcccaatttattaaataacaattcacaagacaaatctttgtaaaattgtatcttgatctattttgtgcctgtttttcactaacccagctaataaggatggtcccttagtctgttattcaatcctcatcttctctggttcctccctttctgkcttttatctttattctccctcagaaactggatgtggctaaatccctaagctcacaaatatcttcttaaagatcctctcctcactcatcctgagcaccccattatctctg

SEQ ID NO: 407060 - DNA, 577 bp, Homo sapiens
ctaccaagccagcactacaagaaatgctgaaaggagttytaaatcttgaaacaagaacttgaaatacatcagaatagaacctccttaaagcatgaatttcacagggcctaaaaaacaataacacaatgaaaaaaaccaggatattagggtaacaactagcatgatgaacagaacagtacctcacatcccaatactaatgttgaatgtaaatggcctaaatgcttcacttaaaagatacagaatgtcaaaatgcataaaaatccaccaaccatgtatctactggtttcaagagactcacctaatgactcatataaacttaagataaaggaatggaaaaagatattccatacaaatagacaccaaaagtgagcaggagtagccatttttatagcagacaaatcagacttaaaagcaacaccagtaaaaaaaaaaaaaaaaaaaaaagacaaagagggacattatataatgataaaaagattagtccaataggaaaatatcacaatcctaaatatatatgtgtttaatgctgtagctcccagatttagaaaacaattactattagacctaagaaatgaga

SEQ ID NO: 407061 - DNA, 504 bp, Homo sapiens
tgtccacagtcaggtataatgaagttgtgcagaaaaaaacaaaaatcaacacttatttgaacactggacttatatgatttaaaaagttcaaggttgaytttactgccaatagtaaggtttgatgtgtgtttttctatgtgtagcctactctcttcccttcatacatttgaattaaagcaaccttctccttctgtcttcaatgacctcccccgacccatttcctgtgaattcatttcagtcgtcttttaaaacttagctcaaggctcgttacccaacttacaacaattttcttagaaataagtgcacatctattcttcatgtaaattttggtattcacagtagttactgtatgcctgttactacaatagaaattggcctgaaatagagattaagtttccatagataaaaaattaatcaagagattctgaatataatctttcttggctgtcaatagtttcaaatgcctgtagttcacatttcccattcttaagaaggttgagacaa

SEQ ID NO: 407062 - DNA, 501 bp, Homo sapiens
tgtcaatagtttcaaatgcctgtagttcacatttcccattcttaagaaggttgagacaaccaaattaattttagtagcttccaggcttcccagatgacaggtatgtccttgcgtgtatgaaagtaagctacctgtrcgggcctaagaactttatgtggagggaaagagagtaagcatggtatgatggcagaagttgaagcaaccaccaagatgattatttacctttaccttgaaaaggaaatcttaactagaaaatatgaatagaacaatactttctcatctaacttgtattataacaagaattcaagaaatataaaaaattatttgcatatcagtcactgagcactgtggaagagcaacacagcatgtgcttatagcagtttaaagagcttagcatgtcatgtgcatgcataagcctgtaaaaatatctggtggcagttcaatgacagcttcacagcaagtgaaatatttccaaatacatgaaggttgagaaggcttcag

SEQ ID NO: 407063 - DNA, 590 bp, Homo sapiens
aacgtaaagaaatagttgatacatttttgtcacaaccccaaatagacacaaacttttttcaattattgtgtttgagattcaaaaggagatagaataaaggaatgacttaatatgtttgagacctcaagttctttatttcaaatgaaaatcaggaaactactgctcctttcctttccattttaaacactttaattttgatcctcttagttcatataatagtatgttgtytataaaacaaacccacaatttgaaaaatataaaatatcatgttttaataagtcatgtgatctcaataatttacatatttgaattctttttttattaaatccattgtgagttaaatatcttaaatctagatttatgacacctacaataatggtttttactgaattaaataaaatgcatatgtattgttatattacataaccaaatagcaatagattaaaaagtaatcactttatgcctatgtacacactataagtggaattacacatagtaacatatctgtatttagaatatattgagaatttacaatgatataatagcagctcagttagctaatcttcacaaactgtgtgtataacactata

SEQ ID NO: 407064 - DNA, 616 bp, Homo sapiens
tgatcaaatataattaagaacatttcatttaaaataatgcaaaaataagctgggcatggtggcacatgccatagtcccagctactcagggggctgaggtggcaggattgcttgaggtcaggaattggaagctccagaaagctatgatcaatcatgccactgcactccagcctggatgacaaacaagactttgtctctaaaataaataaataaataaataaacataaaaattagagatacagtaaattcctttcaatgtttgtatatatttatgtgtatatgtacatttgtattctaatttcctttccatgttgtcactctgagaagtatatgcgtatcccactgatgatcttttgttcaagtaattttgttaatcatcttttagaattgttgaattggatactttacrttctatgaaaattatttatacatttatattcatacttcctattggagtagaaatttatgtattctagtaaaaatatttctctaaacagttatgaatttttattcacctatttatgtactaaactgtacagagaaaaatatattacaattagatatgtgaaactaattggttttaattactcatgtagacctagtaaggtactagctat

SEQ ID NO: 407065 - DNA, 412 bp, Homo sapiens
ctctcatatattttaaatatctctaggttctttaaaatamctaatgcaatgcaaattctatgtaaatagttgatacactgtattctgctttatttgtattacttattattgttatatttttatttttatggctttttttccgaatattttagaactatggttgtttgaatctacagatgtaaaatccagggatgtgaaactcacagatacagaggtccaactctatttacacagtattttttaaaagagaaaaactgaaactaaaaaaaatcttaaaagttcaaaaaaataaaaaagacaaatgaattcaatagtttttaaaataaagctatatcccaatattagatatcagcatagaaactaaatgggaatatgggggaaaataatatgatttgcctatttaacaaagttg

SEQ ID NO: 407066 - DNA, 412 bp, Homo sapiens
ctctcatatattttaaatatctctaggttctttaaaatacctaatgcaatgcaaattctatgtaaatagttgatacactgtattctgctttatttgtattacttattattgttatatttttatttttatggctttttttccgaataytttagaactatggttgtttgaatctacagatgtaaaatccagggatgtgaaactcacagatacagaggtccaactctatttacacagtattttttaaaagagaaaaactgaaactaaaaaaaatcttaaaagttcaaaaaaataaaaaagacaaatgaattcaatagtttttaaaataaagctatatcccaatattagatatcagcatagaaactaaatgggaatatgggggaaaataatatgatttgcctatttaacaaagttg

SEQ ID NO: 407067 - DNA, 412 bp, Homo sapiens
ctctcatatattttaaatatctctaggttctttaaaatacctaatgcaatgcaaattctatgtaaatagttgatacactgtattctgctttatttgtattacttattattgttatatttttatttttatggctttttttccgaatattttagaactatggttgtttgaatctacagatgtaaaatccagggatgtgaaactcacagatacagaggtccaactctatttacacagtattttttaaaagagaaaaactgaaactaaaaaaamtcttaaaagttcaaaaaaataaaaaagacaaatgaattcaatagtttttaaaataaagctatatcccaatattagatatcagcatagaaactaaatgggaatatgggggaaaataatatgatttgcctatttaacaaagttg

SEQ ID NO: 407068 - DNA, 285 bp, Homo sapiens
tcaggtgagcagttacagtatctggttgtaacttcccaccacataagaggcaataagagggaaggaaagactgtctttaattgctgatgttaccactcacccattccytggcagtgactcatggcacagagtctgtgcacttggtagagcaccagtcagagtcatgagaacccccttccaggacctagggcccaaacaacctttccagacacaccgtgggctaaaagggaaactactacccaacactggacaatttacaaaagacagaagtttaattggacttac

SEQ ID NO: 407069 - DNA, 621 bp, Homo sapiens
tttaattgctgatgttaccactcacccattccctggcagtgactcatggcacagagtctgtgcacttggtagagcaccagtcagagtcatgagaacccccttccaggacctagggcccaaacaacctttccagacacaccgtgggctaaaagggaaactactacccaacactggacaatttacaaaagacagaagtttaattggacttacagttgcacctggctggggaagcctcacaatcatggcttaaggcaaggaagagaaagtcacgtcttacatggttgggaagagtcaaagagacagaacgagagccaaatgaaatgggtttccccttttcaaaccatcagatctcatgagacgtattcactaccatgagagtatgggagaaactgcccccatgattcaattatctcccactgggtctctcccacaacacatgggaattatgggaatacaattcaagatgagatctgggttgggatatagagccaaaccatcattccacccctgacctctgccaaaacttatgtcttcacatttcaaaaccagtcycccaaagtcttaactcatttcagcattaactcaaaagtccatagtccaatgtcttatctgagacaagtc

SEQ ID NO: 407070 - DNA, 584 bp, Homo sapiens
taacatttggctctttgttatttatacaaatttctacagatggtttgaatttctcctcagaatktttttccttttctgttgcatcatcaggctgtacattttctaagcttttatgctctgctgtcctttttaacataagttccaattccaaagcatttcttcgtgaatgcataaaactgaatgcttttaagagcaccaaagtcacctcttgaaaactttgatgcttagaaatttcttccaccatacactctaaatcatctctctcaagttcaaagttctacagatctctagggtagggggaaaattgctgccagtctctttgctaaaccatagttaagagtcacctttattccagttcccaaaaagttcttcatcaccatctaagaccaccacagcctggactccattgtccatatcactatcagcattttagtcaccacaatacagcagtcattaaaccttaaatttctcaagtgatctcctttgactccatgtctcacattcaggacacactgttgcaaagggtggaccccagcaacattgggtagctctggccatgtggctttgcaggatacagcacccaa

SEQ ID NO: 407071 - DNA, 576 bp, Homo sapiens
gtcctttttaacataagttccaattccaaagcatttcttcgtgaatgcataaaactgaatgcttttaagagcaccaaagtcacctcttgaaaactttgatgcttagaaatttcttccaccatacactctaaatcatctctctcaagttcaaagttctacagatctctagggtagggggaaaattgctgccagtctctttgctaaaccatagttaagagtcacctttattccarttcccaaaaagttcttcatcaccatctaagaccaccacagcctggactccattgtccatatcactatcagcattttagtcaccacaatacagcagtcattaaaccttaaatttctcaagtgatctcctttgactccatgtctcacattcaggacacactgttgcaaagggtggaccccagcaacattgggtagctctggccatgtggctttgcaggatacagcacccaacccatttgctttcatggactggtgttgagtgtctgtggcttttccaggaccacattgcaagctgtcagtagatctaccattctgggctccacttcacaatgccccagtggggac

SEQ ID NO: 407072 - DNA, 593 bp, Homo sapiens
tatagtcaaataaattaacccattcatcacctttcattgttaattttgtgtatgtgtgtatgtgtgtgttaagagcatctaaaacttagtctagtagcaattttttctatataaaattattaactatagcccttatacagaaaaatgatattgttagacttatttattctatataattataatttttaccctttgacctatttcttccatttctttcccctttctgcttatggcaaacactgtcccattttcagattatgtgtttgccttttttatattttagattccacatataagtgagattatgcagtatttttatttctgcatctatctcattttacccagcataatgtcttcyaggctcatccatgttatcacaaatagaagtatctcctcttttagaattgaataatgttccattatatatgtatatacaatatattattatatatctactgttataaataatgttagaatatcatgggatatattgggcatatatgaggatatataaaggattatcttattatatattcgtaatatatataatatgagatcacatatacatataaaagtttacccattcatatgtt

SEQ ID NO: 407073 - DNA, 554 bp, Homo sapiens
cagcacacctgacatggagaagaatcagatttgaataataaatgcaagtatggatttctgccaaactcactgtgaggtaaatttaatttcactctagaggtcttaatgacactaaaaatgtgtcattaagatctgtgttaccttggtctattcattttgaagtttcaatttttctcaattgtgtaamccaaggggatattttaaaattcctctaacaaggtttctaacattaaatatctgtgttgctccatatacaataaataatatagagaatgtagaaaaaacttatcgttgcaataaaatagttgaaaatgaaaagtagtaaacctctattgatagcttatattcaaattttaggctttagttaaaatatgaaggaatattcagatgacctatattctccatatcagcaaagttatcttactcaaataaaatgagctattttataaattatcttaccatccctagattttgtgacattaattttccagtgtataacagagtgtaagactgttgtagctagaactttgattatccctaccagatagtaagaa

SEQ ID NO: 407074 - DNA, 554 bp, Homo sapiens
cagcacacctgacatggagaagaatcagatttgaataataaatgcaagtatggatttctgccaaactcactgtgaggtaaatttaatttcactctagaggtcttaatgacactaaaaatgtgtcattaagatctgtgttaccttggtctattcattttgaagtttcaatttttctcaattgtgtaaaccaaggggatattttaaaattcctctaacaaggtttctaacattaaatatctgtgttgctccatatacaataaataatatagagaatgtagaaaaaacttatcgttgcaataaaatagttgaaaatgaaaagtagtaaacctctattgatagcttatattcaaattttaggctttagttaaaatatgaaggaatattcagatgacctatattctccatatcagcaaagttatcttactcaaataaaatgagctattttrtaaattatcttaccatccctagattttgtgacattaattttccagtgtataacagagtgtaagactgttgtagctagaactttgattatccctaccagatagtaagaa

SEQ ID NO: 407075 - DNA, 485 bp, Homo sapiens
attttaaaatagccatcatgaaaatgttttaataagcaattctgaacatctttgaggtaaatgaaatgctatgaagaatcagaaaaatgtggactcagcacaaaggaatatataaacaagaatcaaataaaaaaatttagaactaaaatatccaataacctgaagaaaaatcataacagactcaacagcagaattgaaaggattgagtaaagaattgaaaatagaaaatagaaaygacctaatctcaacaacacagagaaatgaattgaaaaagaaaatgagcagcgacacagagacatgtgggaatataacaatggttctaaattttgtgataattaaatcctgggtgtgtatttgttatcaggctacaagatgcagcacagatgtaaaatagtgcttatgcatcaagagcagaatgacctaaaattttgttatggatcttttaccttttagtgttatgcttgagaaatggctaatatcatttt

SEQ ID NO: 407076 - DNA, 606 bp, Homo sapiens
taacttgaacattttttggaggaaatcatttaattgaactaattatatttataatgctatgagctgttctgtttaaattatttgttakgtgtaaattctttggaaactgaagaaaaaacaaacctataaaataaaatgtaataaaggcattgtttttcaaggcagacaattcttagaaacctatcaaatgtttcagctgggtgcttaataaattatgacaattaacattttttcaatgaatttcctttttttggaattgcacataatgttattttctgggaaagaacaaaatgaaaaattaactgacatataaaagaaaaatgtggtctgggaacttttccaaaaagttaaatttttcacttattcaatttataaatgttttcaaaaactgaatcaatactttactttttaaaatatttaaattttatgagtaaaataatttgtaagacaaaaggaaatgaaattatgctatttttaaaggaatcagtttacaatggattcataaaatccctttcacttagaagaccttcatgtttctctaacttcatgagtgatctcaacactgactttggaaatcaccttcgttaagttttcattgatccataa

SEQ ID NO: 407077 - DNA, 606 bp, Homo sapiens
taacttgaacattttttggaggaaatcatttaattgaactaattatatttataatgctatgagctgttctgtttaaattatttgttatgtgtaaattctttggaaactgaagaaaaaacaaacctataaaataaaatgtaataaaggcattgtttttcaaggcagacaattcttagaaacctatcaaatgtttcagctgggtgcttaataaattatgacaattaacattttttcaatgaatttcctttttttggawttgcacataatgttattttctgggaaagaacaaaatgaaaaattaactgacatataaaagaaaaatgtggtctgggaacttttccaaaaagttaaatttttcacttattcaatttataaatgttttcaaaaactgaatcaatactttactttttaaaatatttaaattttatgagtaaaataatttgtaagacaaaaggaaatgaaattatgctatttttaaaggaatcagtttacaatggattcataaaatccctttcacttagaagaccttcatgtttctctaacttcatgagtgatctcaacactgactttggaaatcaccttcgttaagttttcattgatccataa

SEQ ID NO: 407078 - DNA, 606 bp, Homo sapiens
taacttgaacattttttggaggaaatcatttaattgaactaattatatttataatgctatgagctgttctgtttaaattatttgttatgtgtaaattctttggaaactgaagaaaaaacaaacctataaaataaaatgtaataaaggcattgtttttcaaggcagacaattcttagaaacctatcaaatgtttcagctgggtgcttaataaattatgacaattaacattttttcaatgaatttcctttttttggaattgcayataatgttattttctgggaaagaacaaaatgaaaaattaactgacatataaaagaaaaatgtggtctgggaacttttccaaaaagttaaatttttcacttattcaatttataaatgttttcaaaaactgaatcaatactttactttttaaaatatttaaattttatgagtaaaataatttgtaagacaaaaggaaatgaaattatgctatttttaaaggaatcagtttacaatggattcataaaatccctttcacttagaagaccttcatgtttctctaacttcatgagtgatctcaacactgactttggaaatcaccttcgttaagttttcattgatccataa

SEQ ID NO: 407079 - DNA, 606 bp, Homo sapiens
taacttgaacattttttggaggaaatcatttaattgaactaattatatttataatgctatgagctgttctgtttaaattatttgttatgtgtaaattctttggaaactgaagaaaaaacaaacctataaaataaaatgtaataaaggcattgtttttcaaggcagacaattcttagaaacctatcaaatgtttcagctgggtgcttaataaattatgacaattaacattttttcaatgaatttcctttttttggaattgcacataatgttattttctgggaaagaacaaaatgaaaaattaactgacatataaaagaaaaatgtggtctgggaacttttccaaaaagttaaatttttcacttattcaatttataaatgttttcaaaaactgaatcaatactttactttttaaaatatttaaattttatgagtaaaataatttgtaagacaaaaggaaatgaaattatgctatttttaaaggaatcagtttacaatggattcataaaatccctttcacttagaagaccttcatgtttctctaacttcatgagtgatctcaacactgactttggaaatcaccttcrttaagttttcattgatccataa

SEQ ID NO: 407080 - DNA, 520 bp, Homo sapiens
aattcactgctaactgaagtgtaatcagtagtatgcatttttctggttaccatatttctttgggagtgtttcattaatgttttaaaataattgaaaacggtttttaaattcataatgtttccyttcattgtttattttatggtcagcaacccctactgtgacacactatattatgattacgaacctgggaggacacttaaattcaatagctttgtaaagctttatttgctcaagtcagatgaattccactttaatttttctctaacaactataatgacagaaaatattttgtatgagaataatatctccttgacatgcctttttgcaatatttaatgagaaaattaacattatactactcgtagaacaaatattactgtcattgtatttgtaatttccaatggagcacatgactctaggttcatataaataaagagcaccatattgtaaaaatattttggcagtgattacagtaccttttttaaccccaaggacagtcaccccgaacagatttttgcata

SEQ ID NO: 407081 - DNA, 520 bp, Homo sapiens
aattcactgctaactgaagtgtaatcagtagtatgcatttttctggttaccatatttctttgggagtgtttcattaatgttttaaaataattgaaaacggtttttaaattcataatgtttcctttcattstttattttatggtcagcaacccctactgtgacacactatattatgattacgaacctgggaggacacttaaattcaatagctttgtaaagctttatttgctcaagtcagatgaattccactttaatttttctctaacaactataatgacagaaaatattttgtatgagaataatatctccttgacatgcctttttgcaatatttaatgagaaaattaacattatactactcgtagaacaaatattactgtcattgtatttgtaatttccaatggagcacatgactctaggttcatataaataaagagcaccatattgtaaaaatattttggcagtgattacagtaccttttttaaccccaaggacagtcaccccgaacagatttttgcata

SEQ ID NO: 407082 - DNA, 520 bp, Homo sapiens
aattcactgctaactgaagtgtaatcagtagtatgcatttttctggttaccatatttctttgggagtgtttcattaatgttttaaaataattgaaaacggtttttaaattcataatgtttcctttcattgtttattttatggtcagcaacccctactgtgacacactatattatgattacgaacctgggaggacacttaaattcaatagctttgtaaagctttatttgctcaagtcagatgaattccactttaatttttctctaacaactataatgacagaaaatattttgtatgagaataatatctccttgacatgcctttttgcaatatttaatgagaaaattaacattatactactcgtagaacaaatattactgtcattgtatttgtaatttccaatggagcacatgactctaggttcatataaataaagagcaccatattgtaaaaatattttggcagtgattacagtaccytttttaaccccaaggacagtcaccccgaacagatttttgcata

SEQ ID NO: 407083 - DNA, 560 bp, Homo sapiens
gaaacctcagctcacctaggcctgagctttggtcttcttcattcatctctgtattatccatttttatcaagcataccgtgaagtcagtatagccagccagaatctcccacccttggtatctatctgatcaccttcaatatctgaacaaatttctcatccctcaccaacccccagttgatatctaattgccatggccagccttcagcaagaatcctgtcaagtaggtttagccagtaccctctcttactcctgattgtcctcttagtattttttcatccactgacctctaccctattcattagctataaattccgtaccttattgtattcagagttgaccacaatcactctctcttactgcaaaatcccactgcagtaattcctatacctatcaaaatagtcctaagtaatgaatgataacgcaggcatttccatgggtcacaataatttttttacaattacataarcaaacactgaacttggaattatgaatactgaataccatgcaaatcaccacgaagtaagaatgaagcttttccccacaccttttaaaatacaaag

SEQ ID NO: 407084 - DNA, 568 bp, Homo sapiens
tcttactgcaaaatcccactgcagtaattcctatacctatcaaaatagtcctaagtaatgaatgataacgcaggcatttccatgggtcacaataatttttttacaattacataagcaaacactgaacttggaattatgaatactgaataccatgcaaatcaccacgaagtaagaatgaagcttttccccacaccttttaaaatacaaagactatatactttcttcttatatgaggtttttaaatttttttttctaaggcacttgggatatctcttggaaatgccagttaattaattgacttaaagaaaaacaaaacaaaacaaaaagtgtatgcctatacaatcaccatgctcaatattagctttttcaaacttgcttactcctacatttaaatgtatactttattctttaaaaaatgagtcaaattttttaaaagaccaagtagttacgcaattcatatctaatattattctaacccctaatgttaatttttcatccctgtaaaaagccacttttcacaatttcacttttttcttttgatsgtttatatgcatatatgtaataatat

SEQ ID NO: 407085 - DNA, 588 bp, Homo sapiens
gctagttgttaggcagacttgattgtgtgattgttttatattaataggacctatgggctatgtactatgtgtttttgtggtagttgatgtcattttttttttcagttccatgcactcccttaaggacttcttataaggctggtctaattgaaatgtattccctcaacatttgcttgtatgaaaatgattttytttccttcacttaagatgattaatgaataagtttgatgagatatgaaatttttggttggaatattttttctttaaggacattgaaaacaggctcctgatcttttctggctttgtaaagtttctgctgacaggtttgctgcaagcctgatggggtttcctctgtacacaacttgactcttctctctagctgcttttaagactttttctgtgtgtcttgaccttggtaaatatgatgaccttggtgaatgtgatgactatgtgccttcagatggttgtcttgtatagtttctcatgcgggttctctatatttctggtattaaatgtcaaactctctagtgtgattaaggaaattttgttgggttatattctcaaatatattttccaagttgtttattt

SEQ ID NO: 407086 - DNA, 588 bp, Homo sapiens
gctagttgttaggcagacttgattgtgtgattgttttatattaataggacctatgggctatgtactatgtgtttttgtggtagttgatgtcattttttttttcagttccatgcactcccttaaggacttcttataaggctggtctaattgaaatgtattccctcaacatttgcttgtatgaaaatgattttctttccttcacttaagatgattaatgaataagtttgatgagatatgaaatttttggttggaatattttttctttaaggacattgaaaacaggctcctgatcttttctggctttgtaaagtttctgctgacaggtttgctgcaagcctgatggggtttcctctgtacacaacttgactcttctctctagctgcttttaagactttttctgtgtgtcttgaccttggtaaatatgatgaccttggtgaatgtgatgactatgtgccttcagatggttgtcttgtatagtttctcatgsgggttctctatatttctggtattaaatgtcaaactctctagtgtgattaaggaaattttgttgggttatattctcaaatatattttccaagttgtttattt

SEQ ID NO: 407087 - DNA, 634 bp, Homo sapiens
gcagggtctttatttgtggctgaattcctgcccttagttttacaggtaggtggctctgcagggctgggcgggtggggggaagaaaggtgactccatcactaagtccacaactgcgcccctgttagcgttccaggctgcaggggccatggcagagaaacaggccacaccttttccgggccaatcctgcagaggcacaccctgctcctgcagcagcccccaaaccaccacaaatcactcctctgtgtactctgagaggascaattctcttccacttgagtgctggccatagatttctgacttgccactctcaagctgtgcaccgcaatcctgggacaagtttcaggctctttgttccctccccagctttgagggagcagggatgggaacctcagtcagggcaatgggagatggcctgtcagtcatttgtattcaggagctcaactctagagaaccacagagctgctgccaatcagaataatcaattgttggtggggtggctgtgttgctggccagagaaagctgggggccctgtctggggaagaccagggggtggggaacttgcagggaagacagactggcctcttctccatagggttgctgcagccagaggccctgcttagtgaggaataacagt

SEQ ID NO: 407088 - DNA, 634 bp, Homo sapiens
gcagggtctttatttgtggctgaattcctgcccttagttttacaggtaggtggctctgcagggctgggcgggtggggggaagaaaggtgactccatcactaagtccacaactgcgcccctgttagcgttccaggctgcaggggccatggcagagaaacaggccacaccttttccgggccaatcctgcagaggcacaccctgctcctgcagcagcccccaaaccaccacaaatcactcctctgtgtactctgagaggaccamttctcttccacttgagtgctggccatagatttctgacttgccactctcaagctgtgcaccgcaatcctgggacaagtttcaggctctttgttccctccccagctttgagggagcagggatgggaacctcagtcagggcaatgggagatggcctgtcagtcatttgtattcaggagctcaactctagagaaccacagagctgctgccaatcagaataatcaattgttggtggggtggctgtgttgctggccagagaaagctgggggccctgtctggggaagaccagggggtggggaacttgcagggaagacagactggcctcttctccatagggttgctgcagccagaggccctgcttagtgaggaataacagt

SEQ ID NO: 407089 - DNA, 634 bp, Homo sapiens
gcagggtctttatttgtggctgaattcctgcccttagttttacaggtaggtggctctgcagggctgggcgggtggggggaagaaaggtgactccatcactaagtccacaactgcgcccctgttagcgttccaggctgcaggggccatggcagagaaacaggccacaccttttccgggccaatcctgcagaggcacaccctgctcctgcagcagcccccaaaccaccacaaatcactcctctgtgtactctgagaggaccaattctcttccacttgagtgctggccatagatttctgacttgccactctcaagctgtgcaccgcaatcctgggacaagtttcaggctctttgttccctccccagctttgagggagcagggatgggaacctcagtcagggcaatgggagatggcctgtcagtcatttgtattcaggagctcaactctagagaaccacagagctgctgccaatcagaataatcaaytgttggtggggtggctgtgttgctggccagagaaagctgggggccctgtctggggaagaccagggggtggggaacttgcagggaagacagactggcctcttctccatagggttgctgcagccagaggccctgcttagtgaggaataacagt

SEQ ID NO: 407090 - DNA, 516 bp, Homo sapiens
cctactgtgtaccttcaaaaattaaaaaaatatatatttttaaaaagagcacatgtatttctataataacaattttagagagctagataaatctaaaggaagcatgcttgcagaaaataatacttgttttgaaattccttataaacctttactataatttcagtgcaaatcttaatctttcacctttagtttttgtttccctttggaaacctattcaacaaatatttattgaagacctgttataaccctatcattttgctttgtcttacaattataggtgaacaagacaatcaggatttctaccctacaaagtgttaaggaagacagaaaataagcaaatyaatacacaacacattgagataagggccacgatgaaaatgtaaacaagtggatgtcataggaagagtggaagaagtccttcatgttgggagtttagggaatagatatttcagaagatgtggtttaaggtgaatgagagagtaagctagctatgagaagcatgtcatagagaaagtg

SEQ ID NO: 407091 - DNA, 542 bp, Homo sapiens
tcctcagaccctaggatataaacagaatgcagctaaactcattgctaagacataactcaagtgacctttgctccaattcccaatgagttcctaatttccttctcagaccttagcagactggacttcactgtccatattactatcaacagtttgggcacaatcatttatcagtctctaagaarttccaaacttgtcttcatcttcctgtcttctttgagccctccaaacttgtccaacttctgcctgttacgtggatcccaagctgcttccacattttcagggatcttcatagcagtgtgccaataatcagtactaattttctgtattaagccattgttgcattactataagtaaatagctgacactgggttatatatagagaaaagagatttaattgaatcatggttgtacatgttttagagaaaccatggtcgtggcatccttctaaggaggcctcaggaagattgttatcatagcagaagatgaagaaggaaaatcacatgcacatggaaaaagaaggagtaagtgagagagagtcggga

SEQ ID NO: 407092 - DNA, 588 bp, Homo sapiens
aggaggtagacaggaataggggtagaaagtttattcaaaagataacatcagagaacttcccaaaattagagaaagatatcaatattcaagtaaagaaagttatagaataccaaacagatttaatctaaagaaaactacctcagggtattaaataatcaaactcccaaaaatgaaggataaagaaagcttccttaaagcagcaagatgaaataaacacaaaacatataatagagctccagtatgtctagtccagactttcagtgaaaacattatgggccagcagacagtgttatgatatattaaaastgctaaaaaaaatacagcccactttcacaattgaacaccattggacacatcttccagacagaaaataaataaacatagaacttaatctgtgctatagaacaaatgggcctaataggtatttacagaacatttcgtccagtggccggagaatacacatttttcccctcagcacttggatcattctcaaggatagaccatatgttaggtcacaaaacaagtatcagaacatcccaaagatttgaattaacttcaaacatgttctctgactacaatttaactaga

SEQ ID NO: 407093 - DNA, 621 bp, Homo sapiens
aatctcaacttttggatgctgattattttcgtattttgaattctgataaatgttattgagctttgttgtgaaatgtaataaatcacatggaaacactctgatcttttcaaggcttgcttttaagctttgttaggtaagagagcagccactrcttctctgccctgactccaagcttcatcttctcaattcagggagatcattagcgttggcttcagtgccctctttcttggacttagactgaaaactccttttgaaagtgggcttgagcaatcatagacttaacctgtgttgttgcccctgtctcagggatcactgttctgtgctgcctgatatgcattgtctgcacactgttatttcatatatttgtttatatacattttaaatatgttaaaaaaaagtctcaactggatgtagactctccatagaaaaactataattttgtaggtcatttggattattttgatttatttgtttgaagttgattttctggaagtatgctagcagttaagctgattttactcttggacaagaacataagtgcaagatgagtgggatattaccacattctttaaaaatatcatataataattatcttgtaagctttactaacttcttagctta

SEQ ID NO: 407094 - DNA, 621 bp, Homo sapiens
aatctcaacttttggatgctgattattttcgtattttgaattctgataaatgttattgagctttgttgtgaaatgtaataaatcacatggaaacactctgatcttttcaaggcttgcttttaagctttgttaggtaagagagcagccactacttctctgccctgactccaagcttcatcttctcaattcagggagatcattagcgttggcttcagtgccctctttcttggacttagactgaaaactccttttgaaagtgggcttgagcaatcatagacttaacctgkgttgttgcccctgtctcagggatcactgttctgtgctgcctgatatgcattgtctgcacactgttatttcatatatttgtttatatacattttaaatatgttaaaaaaaagtctcaactggatgtagactctccatagaaaaactataattttgtaggtcatttggattattttgatttatttgtttgaagttgattttctggaagtatgctagcagttaagctgattttactcttggacaagaacataagtgcaagatgagtgggatattaccacattctttaaaaatatcatataataattatcttgtaagctttactaacttcttagctta

SEQ ID NO: 407095 - DNA, 621 bp, Homo sapiens
aatctcaacttttggatgctgattattttcgtattttgaattctgataaatgttattgagctttgttgtgaaatgtaataaatcacatggaaacactctgatcttttcaaggcttgcttttaagctttgttaggtaagagagcagccactacttctctgccctgactccaagcttcatcttctcaattcagggagatcattagcgttggcttcagtgccctctttcttggacttagactgaaaactccttttgaaagtgggcttgagcaatcatagacttaacctgtgttgttgcccctgtctcagggatcactgttctgtgctgcctgwtatgcattgtctgcacactgttatttcatatatttgtttatatacattttaaatatgttaaaaaaaagtctcaactggatgtagactctccatagaaaaactataattttgtaggtcatttggattattttgatttatttgtttgaagttgattttctggaagtatgctagcagttaagctgattttactcttggacaagaacataagtgcaagatgagtgggatattaccacattctttaaaaatatcatataataattatcttgtaagctttactaacttcttagctta

SEQ ID NO: 407096 - DNA, 543 bp, Homo sapiens
tagagatagtgcaatagagttctaagtcacagatacaaaatattaattattttcatgcygcagatagtacttttaggtggaaatttggtcctgacttattcctgattacttgtgatttttgaagaaactatgtgcctatgggctgccatgggtagcagaacaccaaggaggcagtgacccctcacctaacctacaaatgcttgagagtctctttccaccttactgcagatatcatgtgaaaagaactacctactgatgtggtatctttagaatatcctatatgatgacagtcacagttgtgcaactggaaataattcactttaaaatttgcactgctgtagttatagaagtgtatgcaataatttgctgtttgacaggaatccttataataagaggaaaagcaatcacgtagacaaaagctgtggaagaattgaaagtaatattggacctgctcttctctgataaggagcaggagttatagaatatttccatttttgtgactctaactttataatcaataatatttgtcaaataatagcaaaa

SEQ ID NO: 407097 - DNA, 543 bp, Homo sapiens
tagagatagtgcaatagagttctaagtcacagatacaaaatattaattattttcatgctgcagatagtacttttaggtggaaatttggtcctgacttattcctgattacttgtgatttttgaagaaactatgtgcctatgggctgccatgggtagcagaacaccaaggaggcagtgacccctcacctaacctacaaatgcttgagagyctctttccaccttactgcagatatcatgtgaaaagaactacctactgatgtggtatctttagaatatcctatatgatgacagtcacagttgtgcaactggaaataattcactttaaaatttgcactgctgtagttatagaagtgtatgcaataatttgctgtttgacaggaatccttataataagaggaaaagcaatcacgtagacaaaagctgtggaagaattgaaagtaatattggacctgctcttctctgataaggagcaggagttatagaatatttccatttttgtgactctaactttataatcaataatatttgtcaaataatagcaaaa

SEQ ID NO: 407098 - DNA, 543 bp, Homo sapiens
tagagatagtgcaatagagttctaagtcacagatacaaaatattaattattttcatgctgcagatagtacttttaggtggaaatttggtcctgacttattcctgattacttgtgatttttgaagaaactatgtgcctatgggctgccatgggtagcagaacaccaaggaggcagtgacccctcacctaacctacaaatgcttgagagtctctttccaccttactgcagatatcatgtgaaaagaactacctactgatgtggtawctttagaatatcctatatgatgacagtcacagttgtgcaactggaaataattcactttaaaatttgcactgctgtagttatagaagtgtatgcaataatttgctgtttgacaggaatccttataataagaggaaaagcaatcacgtagacaaaagctgtggaagaattgaaagtaatattggacctgctcttctctgataaggagcaggagttatagaatatttccatttttgtgactctaactttataatcaataatatttgtcaaataatagcaaaa

SEQ ID NO: 407099 - DNA, 543 bp, Homo sapiens
tagagatagtgcaatagagttctaagtcacagatacaaaatattaattattttcatgctgcagatagtacttttaggtggaaatttggtcctgacttattcctgattacttgtgatttttgaagaaactatgtgcctatgggctgccatgggtagcagaacaccaaggaggcagtgacccctcacctaacctacaaatgcttgagagtctctttccaccttactgcagatatcatgtgaaaagaactacctactgatgtggtatctttagaatatcctatatgatgacagtcacagttgtgcaactggaaataattcactttaaaatttgcactgctgtagttatagaagtgtatgcaataatttgctgtttgacaggaatccttataataagaggaaaagcaatcacgtagacaaaagctgtggaagaattgaaagtaatattggacctgctcttctctgataaggagcaggagttatagaatatttccatttytgtgactctaactttataatcaataatatttgtcaaataatagcaaaa

SEQ ID NO: 407100 - DNA, 540 bp, Homo sapiens
  misc_feature (1)...(540): n = A,T,C or G
tacaacttttgcaagataggtaaaagaaatctattgtgcaaccataatctttgccatagaatctactatagagccatcaggagaaataagtgtctaatcattaccttatttatatttacctcaagccatagaaaaagggacctagcaaataatgtttatttagaaggatgaagaccttccagcaatgtatcctttaacctatcccrtaggttaaaaagagttgaccaatgttctctttcttactgattgtggagcaacaaaagtaccattaaagttatcagcccacattgttccttcatctttcctaattgaggtataagactacccatgtgtgaggttggctctaaaattctccatcaatgaaagtttaccccatgggtagtctggaactggagaacttttggagaattgtgtttttcaaagaggtgtaaggaggaaaaaattaaaataggagatggctctatgaagacagagaaacccctancataatctagagaaagttgtgcatatctaggatgctgtctgcttctgggaagaaac

SEQ ID NO: 407101 - DNA, 618 bp, Homo sapiens
ctttgccttaaccttgtctcacttaataatgcactcttctacagctatatgaaacttaagaatgcacatttttctcctaacaccctacatgttgaacatgcacttttaactacaaggaatatatttcctttgattgataattcatatactaatttaagatttcttcataataagcaatttttwaagtatatatctttgacttctaaattattatgggtatcattatatgatcccttagcctcatacctcattttatagtattagtcatttcgtaagtacacatcatatttgtttcttggctctattcccagtcagacaataaacttcataaactatacaatcaggtctgctttactttgtccagtgcttagcaacaaagcttgagtggagcatttgtttaattaataatttttgaattaatgaaggaacagaaaattatttagacataaaaacaagtggttaagagaaagtgatttttaatgatccatatagtcccatttattccctgctagttctctaatacgcttctacgggccctttattaagtgatagctagttccctccttaaatgattataaatcaaatttcaactttttcaagtacattttctcagctttc

SEQ ID NO: 407102 - DNA, 618 bp, Homo sapiens
ctttgccttaaccttgtctcacttaataatgcactcttctacagctatatgaaacttaagaatgcacatttttctcctaacaccctacatgttgaacatgcacttttaactacaaggaatatatttcctttgattgataattcatatactaatttaagatttcttcataataagcaatttttaaagtatatatctttgacttctaaattattatgggtatcattatatgatcccttagcctcatacctcattttatagtattagtcatttcgtaagtacacatcatatttgtttcttggctctattcccagtcagacaataaacttcataaactatacaatcaggtctgctttactttgtccagtgcttagcaacaaagcttgagtggagcatttgtttaattaataatttttgaattaatgaaggaacagaaaattatttagacataaaaacaagtggttaagagaaagtgatttttaatgatccatatagtcccatttattccctgctagttctctaataygcttctacgggccctttattaagtgatagctagttccctccttaaatgattataaatcaaatttcaactttttcaagtacattttctcagctttc

SEQ ID NO: 407103 - DNA, 611 bp, Homo sapiens
cactccctggcttctccccactcccagcactgctccagggagggtcaaagttgtagctgaccccsggtgctgtcgtgacccggctgggtgtgcgcacccttgggtggcactaaaacaccaaccctctgctgtcttggctccctctggactttgggtgcgaacaagcataggagagaggtcaggagggtgttgagggaagctctgtgtgggccttcagctgcctttcagcacaaacagcctgggctgtggatggcatgctgatggcaggaggcagacaggttcctgggcagaaaggggcaggtccctggtgaaacttcaccttcaagccagggacagcttgaagcctgggggcctcactgccaattctggacagagtctgtggcccaaagtgaggacttatggtacttattccggcccacccctaccagcccatgagcaaaccaacatacactttctcccttctgagcccataaaaaccccagactcagccagacacacacagatatcaggactaccagctgtgggaaggagcttcccactgcgagtctcatctccagtgagagctgggcactcgtcaggacaacctgcctgtggaaaggagctacccactt

SEQ ID NO: 407104 - DNA, 545 bp, Homo sapiens
gaagatgctgttgaaaattatgattaataatycccctgctttctttttattccccatttggcctttaattacagtaagggtactatcactagactacttcttcccactgtgtatcccgatgaaataattgcaccgcatggcatataaaagcttcatgttcagactgttattttggtctctttagcaacataaatgcacctgttccgaacacaattaggataggccatactgaagataatcaaaacaaataatgaaaaatggttttgcttgatttggaaaataaggcataatgtctactcaggcattggcaaagcttcgatagtaatgctgtgtggaattagcatatttaatgaaaattgattttgtttatgtacagaggtaatggatatgcctgaataatttctgggcactgactcatagttattaattattattttataatttacccaagacaatttaagccaaaggtagcatctgtttggcaccaaggttctacttagatttaattttccagttcagggaaatagctacagagagtggaataa

SEQ ID NO: 407105 - DNA, 611 bp, Homo sapiens
cactccctggcttctccccactcccagcactgctccagggagggtcaaagttgtagctgacccccggtgctgtcgtgacccggctgggtgtgcgcacccttgggtggcactaaaacaccaaccctctgctgtcttggctccctctggactttgggtgcgaacaagcataggagagaggtcaggagggtgttgagggaagctctgtgtgggccttcagctgcctttcagcacaaacagcctgggctgtggatggcatgctgatggcaggaggcagacaggttcctgggcagaaaggggcaggtccctggtgaaacttcaccttcaagccagggacagcttgaagcctgggggcctcactgccaattctggacrgagtctgtggcccaaagtgaggacttatggtacttattccggcccacccctaccagcccatgagcaaaccaacatacactttctcccttctgagcccataaaaaccccagactcagccagacacacacagatatcaggactaccagctgtgggaaggagcttcccactgcgagtctcatctccagtgagagctgggcactcgtcaggacaacctgcctgtggaaaggagctacccactt

SEQ ID NO: 407106 - DNA, 611 bp, Homo sapiens
cactccctggcttctccccactcccagcactgctccagggagggtcaaagttgtagctgacccccggtgctgtcgtgacccggctgggtgtgcgcacccttgggtggcactaaaacaccaaccctctgctgtcttggctccctctggactttgggtgcgaacaagcataggagagaggtcaggagggtgttgagggaagctctgtgtgggccttcagctgcctttcagcacaaacagcctgggctgtggatggcatgctgatggcaggaggcagacaggttcctgggcagaaaggggcaggtccctggtgaaacttcaccttcaagccagggacagcttgaagcctgggggcctcactgccaattctggacagagtctgtggcccaaagtgaggacttatggtacttattccggcccacccctaccagcccatgarcaaaccaacatacactttctcccttctgagcccataaaaaccccagactcagccagacacacacagatatcaggactaccagctgtgggaaggagcttcccactgcgagtctcatctccagtgagagctgggcactcgtcaggacaacctgcctgtggaaaggagctacccactt

SEQ ID NO: 407107 - DNA, 611 bp, Homo sapiens
cactccctggcttctccccactcccagcactgctccagggagggtcaaagttgtagctgacccccggtgctgtcgtgacccggctgggtgtgcgcacccttgggtggcactaaaacaccaaccctctgctgtcttggctccctctggactttgggtgcgaacaagcataggagagaggtcaggagggtgttgagggaagctctgtgtgggccttcagctgcctttcagcacaaacagcctgggctgtggatggcatgctgatggcaggaggcagacaggttcctgggcagaaaggggcaggtccctggtgaaacttcaccttcaagccagggacagcttgaagcctgggggcctcactgccaattctggacagagtctgtggcccaaagtgaggacttatggtacttattccggcccacccctaccagcccatgagcaaaccaacatacactttctcccttctgagcccataaaaaccccagactcagccagacacacacagatatcaggactaccagctgtgggaaggagcttcccactgcragtctcatctccagtgagagctgggcactcgtcaggacaacctgcctgtggaaaggagctacccactt

SEQ ID NO: 407108 - DNA, 575 bp, Homo sapiens
atttgtttactcctatctccagaaaccaacctttgattattcgcgtacaggactgctctctacttagggggttggcaatgtttattacccacaaattgtgtttgctccaagcctttgtcattagatctgtactaaataaatgtgagtggggctggcttagcggggcagyggcactctcatcagcagtgctgagccatgaagtcccctagccatgctgtcaggcaaaatacctgtggcagcgtacttctttcatccgtttctcagccagaatctgaggacagacttggcagtaggggccatcttccctgttttcataaggttgtctctctgtatgtgtctaacctaagctcctcttcttataggagcatcggtcatactggaatagagaccactctaatgacattatgttacctctttcaagaccctatcatcaaacacagtcacattcggaggtgcttgggtttgggaattcaacatacgaatttcgaggagacacaattcttctcatgatgtactaagaagaaaaataaaaccaactagggaataaatatagtgaatacctgcttcaattgcag

SEQ ID NO: 407109 - DNA, 575 bp, Homo sapiens
atttgtttactcctatctccagaaaccaacctttgattattcgcgtacaggactgctctctacttagggggttggcaatgtttattacccacaaattgtgtttgctccaagcctttgtcattagatctgtactaaataaatgtgagtggggctggcttagcggggcagcggcactctcatcagcagtgctgagccatgaagtcccctagccatgctgtcaggcaaaatacctgtggcagygtacttctttcatccgtttctcagccagaatctgaggacagacttggcagtaggggccatcttccctgttttcataaggttgtctctctgtatgtgtctaacctaagctcctcttcttataggagcatcggtcatactggaatagagaccactctaatgacattatgttacctctttcaagaccctatcatcaaacacagtcacattcggaggtgcttgggtttgggaattcaacatacgaatttcgaggagacacaattcttctcatgatgtactaagaagaaaaataaaaccaactagggaataaatatagtgaatacctgcttcaattgcag

SEQ ID NO: 407110 - DNA, 575 bp, Homo sapiens
atttgtttactcctatctccagaaaccaacctttgattattcgcgtacaggactgctctctacttagggggttggcaatgtttattacccacaaattgtgtttgctccaagcctttgtcattagatctgtactaaataaatgtgagtggggctggcttagcggggcagcggcactctcatcagcagtgctgagccatgaagtcccctagccatgctgtcaggcaaaatacctgtggcagcgtacttctttcatccgtttctcagccagaatctgaggacagacttggcagtaggggccatcttccctgttttcataaggttgtctctctgtatgtgtctracctaagctcctcttcttataggagcatcggtcatactggaatagagaccactctaatgacattatgttacctctttcaagaccctatcatcaaacacagtcacattcggaggtgcttgggtttgggaattcaacatacgaatttcgaggagacacaattcttctcatgatgtactaagaagaaaaataaaaccaactagggaataaatatagtgaatacctgcttcaattgcag

SEQ ID NO: 407111 - DNA, 554 bp, Homo sapiens
gaatagcttcttaaatgtgcactgagcttctgcccaggatgacaggaggctaatgaacataaggaaaccrttcctaaactgtgtggtaaggcaacacggcaccatacataactctgcagaatattttacatttttgacagaaacaaaaggacgttcaacatcaggtgacacacaaaatactagtttgagttcacaattataatatttgattatcctaccttcttttgttgacgccatatttgtgaggttgagttttggtagttgcaataataaaaggcaagtactgcatgaaaatcagtggagaactgtaaatcaggatagtcaatagaatttcaagtcattcggccctgatgagggcacgcatcccataagtaaatgtggttattatagacaaaaaataaattatgtttttttttttcaaatgacatgtttgttatttcacatgactcttaaattgttaagacataaatactcgttaaggattttggacttactatgtagttaaaaatagaaactcatagatattttaaaaagtagcaacacattcagagctt

SEQ ID NO: 407112 - DNA, 554 bp, Homo sapiens
gaatagcttcttaaatgtgcactgagcttctgcccaggatgacaggaggctaatgaacataaggaaaccattcctaaactgtgtggtaaggcaacacggcaccatacayaactctgcagaatattttacatttttgacagaaacaaaaggacgttcaacatcaggtgacacacaaaatactagtttgagttcacaattataatatttgattatcctaccttcttttgttgacgccatatttgtgaggttgagttttggtagttgcaataataaaaggcaagtactgcatgaaaatcagtggagaactgtaaatcaggatagtcaatagaatttcaagtcattcggccctgatgagggcacgcatcccataagtaaatgtggttattatagacaaaaaataaattatgtttttttttttcaaatgacatgtttgttatttcacatgactcttaaattgttaagacataaatactcgttaaggattttggacttactatgtagttaaaaatagaaactcatagatattttaaaaagtagcaacacattcagagctt

SEQ ID NO: 407113 - DNA, 608 bp, Homo sapiens
tctcaatttaattgacctgaagcaagttagagaaactctgagttttcttacttgaaaaatgtgggcaaaatatcaagtatctcatgggtaatttttttctttcataattaagtgttttaatgtaaataaagcatgtaaaagagaataaggtacatgctaatactagctgaataggtctcatctagaagcataaaaacacactgcatgaaccatgttttggaacttaaggaactgacaatttttaagtaatgaattaataactgctctagtagctatatgtcagaatgtatatgtttcattatagtgtttataacgtcacatgaaaacacagattaaaatgtgcgcagtttatgtttaaggtaagtaatacttgtttattttgtttaggaaaatctctgttcatcaaccacacatgtaattgaaaacactgattaataaaactatatgaaattatttagactattggcaygtaaattttaacctacattctcataaaatcttcacaaataacagctaatctaaacagtttggtagtttatggatgcaaagatagacgttggtatactttttcaaaatgtaaaagaatgatcaatatcaaacggggtata

SEQ ID NO: 407114 - DNA, 608 bp, Homo sapiens
tctcaatttaattgacctgaagcaagttagagaaactctgagttttcttacttgaaaaatgtgggcaaaatatcaagtatctcatgggtaatttttttctttcataattaagtgttttaatgtaaataaagcatgtaaaagagaataaggtacatgctaatactagctgaataggtctcatctagaagcataaaaacacactgcatgaaccatgttttggaacttaaggaactgacaatttttaagtaatgaattaataactgctctagtagctatatgtcagaatgtatatgtttcattatagtgtttataacgtcacatgaaaacacagattaaaatgtgcgcagtttatgtttaaggtaagtaatacttgtttattttgtttaggaaaatctctgttcatcaaccacacatgtaattgaaaacactgattaataaaactatatgaaattatttagactattggcatgtaaattttaayctacattctcataaaatcttcacaaataacagctaatctaaacagtttggtagtttatggatgcaaagatagacgttggtatactttttcaaaatgtaaaagaatgatcaatatcaaacggggtata

SEQ ID NO: 407115 - DNA, 417 bp, Homo sapiens
aacaaactgattttcatgctaaagacaaatatgactcatataaggtgggaagtttcaaggaaatttcttgctcattatgtcagagaaaagagaaatttggtcatagctgctcatgttcagccctagaacggtgactagaaaaagtcaagacaggaagtagaaaaatttgaagaaacttaggtgtaatrgaaaaacaagaccaaaataattataacccatgggaatgcaaacaaatctataattcatatataacaatataaagtgatataagaataaatttactgatgtgaaaactcagtatataacctttgacaatataacatgttgagataaaacacaagatttcaaagatatcaaataaaacaataaggataaaataacttgaatgtaagctaaaataatattcagttataaatt

SEQ ID NO: 407116 - DNA, 608 bp, Homo sapiens
ttgtggtttatataccatcttaatagggcaagaggttggagagaatggtacttaagagaaaacaaatgactatttgggaagataaataagcccttaggagaacagaggggagataagatagttctgtggcaatgtaggtttcaggtggtgtagaaacttctcatctccagtaacagtcaatcttgcctggttgcttttgggaggaaatttatcataattgtgttcttttcattcttctggaaggctctgcttttgggcagatgagagatttcaggaactcaaatgccttctatttgaaatcattctttatttttattttsgccgcagtggtgtattctggaccccttcaatatgtaactgggtccactgatgtgctttcctatcaatacaaaacttaacaggaaaatatccagtcaaaggactgggtagcagtaggaaaggcccccagcagtttaacattgtcttataggacattttcagcattataacgtaattccaaaatgcttgtggtggtgccaaatcacactacttagtgaggccagaatatactaggaaagggacacagaaatcattcttgaatgttgaaagaataaaaaaaagtgcatgca

SEQ ID NO: 407117 - DNA, 563 bp, Homo sapiens
actcaaatgccttctatttgaaatcattctttatttttattttggccgcagtggtgtattctggaccccttcaatatgtaactgggtccactgatgtgctttcctatcaatacaaaacttaacaggaaaatatccagtcaaaggactgggtagcartaggaaaggcccccagcagtttaacattgtcttataggacattttcagcattataacgtaattccaaaatgcttgtggtggtgccaaatcacactacttagtgaggccagaatatactaggaaagggacacagaaatcattcttgaatgttgaaagaataaaaaaaagtgcatgcatgcatgagctatgtatgtatatacatatatacaattttatatatttatatgaacatagtagattctacctatagtcaaccagaaaactacaacacacaattactctagaccatgagatttgcattgctacaataacaaaataattattactaagaaataatttactataatattaaagaacaaaagtatttgtctatgttgagaatcaaagatgcaataaactgttaaatt

SEQ ID NO: 407118 - DNA, 563 bp, Homo sapiens
actcaaatgccttctatttgaaatcattctttatttttattttggccgcagtggtgtattctggaccccttcaatatgtaactgggtccactgatgtgctttcctatcaatacaaaacttaacaggaaaatatccagtcaaaggactgggtagcagtaggaaaggcccccagcagtttaacattgtcttataggacattttcagcattataacgtaattccaaaatgcttgtggtggtgccaaatcacactacttagtgaggccagaatatactaggaaaggracacagaaatcattcttgaatgttgaaagaataaaaaaaagtgcatgcatgcatgagctatgtatgtatatacatatatacaattttatatatttatatgaacatagtagattctacctatagtcaaccagaaaactacaacacacaattactctagaccatgagatttgcattgctacaataacaaaataattattactaagaaataatttactataatattaaagaacaaaagtatttgtctatgttgagaatcaaagatgcaataaactgttaaatt

SEQ ID NO: 407119 - DNA, 608 bp, Homo sapiens
gtgaaccaaatgaaccatacaccttcccacccatgtgaagcttttattttatttgtgtggagaaaggaaattaagcaaataaccaataaacatgtaaaaattcaggcgaccctaaatgctacwaagacaaaaaagatcacatgtgaagaatgcattttcctgttggggccacagcggtatctcccatctgcacactcttctagaaccttgccactctctcctcaagaggaaaatttgaatccctctctgttgagtttaagctggtcatattacttatatacaagaaaatgtgatgatatttggtatctaatcagcatgggctgctataagcaaataccacaggcttgagcaacacaaaggtattagtcacagatcacacatctggaggctgggaagtccaagtttaaggtgccagcagatccagtgtccggtgaggccccacttcctggttggcaattgtccatcttttccttgtatcctcacatggctgagagcagggtgtgaaagctctctgtagccttgttttataagagcactaatcccattctggtgggctccaccctgatggctgaaaaacttcccaaaggccactcctcctaaaataatca

SEQ ID NO: 407120 - DNA, 608 bp, Homo sapiens
gtgaaccaaatgaaccatacaccttcccacccatgtgaagcttttattttatttgtgtggagaaaggaaattaagcaaataaccaataaacatgtaaaaattcaggcgaccctaaatgctactaagacaaaaaagatcacatgtgaagaatgcattttcctgttggggccacagcggtatctcccatctgcacactcttctagaaccttgccactctctcctcaagaggaaaatttgaatccctctctgttgagtttaagctggtcatattacttatatacaagaaaatgtgatgatatttggtatctaatcagcatgggctgctataagcaaataccacaggcttgagcaacacaaaggtattagtcacagatcacacatctggaggctgggaagtccaagtttaaggtgccagcagatccagtgtccggtgaggccccacttcctggttggcaattgtccatcttttccttgtatcctcacatggctgagagcagggtgwgaaagctctctgtagccttgttttataagagcactaatcccattctggtgggctccaccctgatggctgaaaaacttcccaaaggccactcctcctaaaataatca

SEQ ID NO: 407121 - DNA, 585 bp, Homo sapiens
aactaaaaaacacatacagtttaaatgagacttaaagcaacaaaaataaaataaatagtacctgaaaaatatataaaatgcaaataatctgcattattatatcttgttatataagagtttccaaaatttaataaagaaaaaggaaagcaacatcaaaatgtacataaggaaaaattcatagatgatggaactcacatacacaatacctatatgaacatataaaattgtacttaagtatggtattttactcaagataaagtttaattataaaaaacaaaatcaaacacaaatgacagaacaattcacacttaagagggagtcttcrgctgcatctctaacattaattttttcacattattactagtaaatatgagaacttatttacaaagtaacagttttgagttttgtatgtattggtgctgctccattactctattttgttgttgttgttttgatacacttaatatttaattaaaagaaattgtgttgctctatcccatgccattgaactttgattagagatctttacagtcagtgaaattagaaagaatgtgttatactagcagtaaaacacaggtttttttt

SEQ ID NO: 407122 - DNA, 585 bp, Homo sapiens
aactaaaaaacacatacagtttaaatgagacttaaagcaacaaaaataaaataaatagtacctgaaaaatatataaaatgcaaataatctgcattattatatcttgttatataagagtttccaaaatttaataaagaaaaaggaaagcaacatcaaaatgtacataaggaaaaattcatagatgatggaactcacatacacaatacctatatgaacatataaaattgtacttaagtatggtattttactcaagataaagtttaattataaaaaacaaaatcaaacacaaatgacagaacaattcacacttaagagggagtcttcggctgcatctctaacattaattttttcacattattactagtaaatatgagaacttatttacaaagtaacarttttgagttttgtatgtattggtgctgctccattactctattttgttgttgttgttttgatacacttaatatttaattaaaagaaattgtgttgctctatcccatgccattgaactttgattagagatctttacagtcagtgaaattagaaagaatgtgttatactagcagtaaaacacaggtttttttt

SEQ ID NO: 407123 - DNA, 585 bp, Homo sapiens
aactaaaaaacacatacagtttaaatgagacttaaagcaacaaaaataaaataaatagtacctgaaaaatatataaaatgcaaataatctgcattattatatcttgttatataagagtttccaaaatttaataaagaaaaaggaaagcaacatcaaaatgtacataaggaaaaattcatagatgatggaactcacatacacaatacctatatgaacatataaaattgtacttaagtatggtattttactcaagataaagtttaattataaaaaacaaaatcaaacacaaatgacagaacaattcacacttaagagggagtcttcggctgcatctctaacattaattttttcacattattactagtaaatatgagaacttatttacaaagtaacagttttgagttttgtatgtattggtgctgctccattactctattttgttgttgttgttttgatacacttaatatttaattaaaagaaatygtgttgctctatcccatgccattgaactttgattagagatctttacagtcagtgaaattagaaagaatgtgttatactagcagtaaaacacaggtttttttt

SEQ ID NO: 407124 - DNA, 646 bp, Homo sapiens
gagtatttgcttggtataaaaatgccttattaaatatttcaaattcgtctttagaaacttaccaggaagtctactctttctgcctctcattgatatgtgtctatgcaaaatacgtgctgtttataaagcagtagtaccaaaaaacaaacgaaaagaatgagaatgacacagggcaatacctaaagaaaataagatttaagttttattgtagaaaagatatcttgaaggcattctcatgtacttaaatctttctcagatttgtataaaacatyagctgagagaaactaatcctcagcatgggaacagctaactgtgttccataggaaatatttaccatgaaaatattgtataccaaaaagcaatgaaacttgaaatacaatatttttgtgattataacttttaagggaaacagtttcaaaatttaagaatgcttctaaagcacttttgaaagatttttctttaattgggaaaccaattatctagggaggggaactgttggtttaatatctattcatcaaatctatataataattcccagagaaaattagattcctattttaatattctggtggaataatggaattttagacaatatatattttcattttgaagtctagcacgtagagggtaataattttttttcttt

SEQ ID NO: 407125 - DNA, 575 bp, Homo sapiens
tcagcagccatgagttactggagagtcagaaattggtaaacacttgagaccagtggagagtaagtaaagaaagatccggattccaggaataagagctacttcccggaagtaaggagagcaataaaataagctagtgctaacagaatccaactgatttaagtaatccacactgtatatgtctgcaagaaataacttgcccctctttgaaagattgcacaatcatgaacctctgcaactcctttatgtaatgttcaatcagtaattcaaagtcatgattaaaaatgagcattggctaaaactaagaaggaaaaaatktaaaaaatgacccaggcatgattatgatattagaattctacaaaaagttttgaaataagtatggttaatatgtttatggttaatatgtttaaataaagaaaagggtggggaatttcaacagataccaataatctttatctactaaaccaaataaaaattttagaacaaaaatgtcaatgctgaagtgtgtacttaatatatttaatagatgggtttaattgctgaacaaacagcagaagaaaggattggtgtactagaat

SEQ ID NO: 407126 - DNA, 596 bp, Homo sapiens
ttcaaagtcatgattaaaaatgagcattggctaaaactaagaaggaaaaaatttaaaaaatgacccaggcatgattatgatattagaattctacaaaaagttttgaaataagtatggttaatatgtttatggttaatatgtttaaataaagaaaagggtggggaatttcaacagataccaataatctttatctactaaaccaaataaaaattttagaacaaaaatgtcaatgctgaagtgtgtacttaatatatttaatagatgggtttaattgctgaacaaacagcagaagaaaggattggtgtactagaatataggttaatataaaatatccaggttaaagaagactgtagaagactgtagaataataattattatacagcaaagacagtaatagatgaatgttatataactgaaagacctagctgacatactttgtagaactaatagaaaagaagtgagaaaatgaggtcgaagaaatacttgaaaaaattctraccaagagtttctcaaaactaataaaagatagcttaaaaaatctttacaaccattagtcagatttttaaaaagtaaatacctaggtgcattgtaggtta

SEQ ID NO: 407127 - DNA, 600 bp, Homo sapiens
tgtgaaagtattcatttgaacatatatttttatattattttcactcaaacttctaaagtggcataaagtcctcattaatagtctattagtttctatgactcttattagcattgaaaaaacaaataagatgataataaacatccgcttatattaaaagtttctctgttttagggcactatgatcaaaagacgctgttataggaatttaaaatgtaaatgctatgcatttaattaagaagagataactgtctatcaagcatggctgcagagaattatcaagtcagtatcatataaaataataaaaaatgtatcagtttcgcttcattttgaataaaataagtgagagtcaaaagagctcagtgtggtttaaaagatgtgtgaatgagtttttattttagtaattgaaaatagtcttgtaatgaatgatgtttcttaattaattgtgaaaaataagaaatgaaggtgacttcaaggtgcattgtcatgatgttccctgactggatgacatctcagccatgaaacattcatactagtgcaagcatgtatatccttgtgttaacacttcatccayagaaacaagtactttatccatataactggt

SEQ ID NO: 407128 - DNA, 593 bp, Homo sapiens
aacatttcaaagtaaaaatcataggacttatgggaaaaatagagtcaaggacatgacactaaaaaactttgtactatgataaataagacaaactttaagaacttagtaaaaagagtttccaagtgttaaatgatttaaaaattcaccaatattgcaataaatatggtaccttaccttgcaaaaacctgwagtttttatgtgatagtaggttttggaagagttacagcttgtgaattgttaagtaatggaaggaaagttgttcaaaatttgatggaaagttggaacaccagatatggatgttggtggctcattacacatgcaatgagatagccagcgtagatgtttaaaatgcctatttatgtgcgcgcacctacaaatacatacattttgtgtattcagtgggatgcagttgtctgtgttcacctagtgtttcttatggatgaaattgtgtgtaaacgaatgtagaattttgtggcaaatgtgttttgtgttccgcaactgtggaacacattgtgttttcagaacaagatttacagctgaactcattgtacttcaagttcattaaatcactacttttcacaatgtcacagtaa

SEQ ID NO: 407129 - DNA, 593 bp, Homo sapiens
aacatttcaaagtaaaaatcataggacttatgggaaaaatagagtcaaggacatgacactaaaaaactttgtactatgataaataagacaaactttaagaacttagtaaaaagagtttccaagtgttaaatgatttaaaaattcaccaatattgcaataaatatggtaccttaccttgcaaaaacctgaagtttttatgtgatagtaggttttggaagagttacagcttgtgaattgttaagtaatggaaggaaagttgttcaaaatttgatggaaagttggaacaccagatatggatgttggtggctcattacacatgcaatgagatagccagcgtagatgtttaaaatgcctatttatgtgcgcgcacctacaaatacatacattttgtgtattcagtgggatgcagttgtctgtgttcacctagtgtttcttatggatgaaattgtgtgtaaacgaatgtagaattttgtggcaaatgtgttttgtgttccgcaactgtggaacayattgtgttttcagaacaagatttacagctgaactcattgtacttcaagttcattaaatcactacttttcacaatgtcacagtaa

SEQ ID NO: 407130 - DNA, 569 bp, Homo sapiens
tagttatatttttctagtttttttgtgtgtgtttgttttctatactacgtaataaattactacaaacgttgcatataacaaaagctatcacatttggttctatgtgtgggggtgcttttttcttggtatctacatggactgttgtgataaacttagagagtagcaccgcttttatgaaaggtcgcaacttccacaatattccatggtgtctctgtgtggcacagcaggagaagatttaaattggccatttagcttgtrcaggacaataatatccaaactggatttcaaagttttctccttgccagagtatgagtacaagaaaatttctctatatactaaaataggaagtgaaattggctgagagaaactcagaggatttcaagaagatgtgcaattatgacagagagaatgaattcatgatgatcaaggactgatcaatgaaaaccagtgagaacacagaagtctggtagaaagcagtagagacctgtgatggcactgcagtcctcttccacatgcggccttctctctgcgtgatgtgccctcaccttctaccttcacagtgttttttt

SEQ ID NO: 407131 - DNA, 587 bp, Homo sapiens
cgcaacttccacaatattccatggtgtctctgtgtggcacagcaggagaagatttaaattggccatttagcttgtgcaggacaataatatccaaactggatttcaaagttttctccttgccagagtatragtacaagaaaatttctctatatactaaaataggaagtgaaattggctgagagaaactcagaggatttcaagaagatgtgcaattatgacagagagaatgaattcatgatgatcaaggactgatcaatgaaaaccagtgagaacacagaagtctggtagaaagcagtagagacctgtgatggcactgcagtcctcttccacatgcggccttctctctgcgtgatgtgccctcaccttctaccttcacagtgttttttttctatatccaattgctgtgtctcccctctatacctgaccattgtgcattcactctctatctgatcatggtgaattttctctacacccaatcactgtgtagtcattctatacccaattgctgtatcttctcactatatctgatgctatactttctctctaaacctgatcattttgtcttctgtctatacctgaccattgca

SEQ ID NO: 407132 - DNA, 603 bp, Homo sapiens
attcctacctatgccatgagtaatcatttgctatccttagaggagatcctagtctcagttgccctcaacaattaacaaaggaggctgagacagtgttacagctaattgagaagcaagtgcataagactcaaatagataaaatagatccagagaatactctagatttgctaattttttcaactcagcattcacctactggtgttattgttcaagagcaggatcttgtagagtggctttttcttccacatactaattcatggactttgactccttatttggatcaaatcaccactgtgataggaaatgggagaactcggattgttaaattacatggatatgatcctggaaaaattattgtccctctcatgaaggcacaaatacagcaagcttttatagtcttacttggcaaacccatttagctgactttgtgggtattcttgataaccattttcctaaaatgaaactgtttcaatttttgaaattaactaattggrttctccctaaaataactaaatttataccaattgaaggtgctgaaaatgtcttcacagatgggtctagtaatggtaaagcttcttattctggctcaaaatgtaaagtttt

SEQ ID NO: 407133 - DNA, 519 bp, Homo sapiens
catatcccaaaatgttgggagagttaggcacataagaccaaagcaaaaagaaaatgaaattgagattttaacaataatagaaaaaacataaaccttaaaaccataagtttggctgggctcagtggctcatgcctgtaattccagcactttgggaggccgaggtgggtggatcacctgaggtcaggagttcaagaccagcctggccaacattgtgaaaccctgtctctactaaaaaatacaaaatttgccaggcatggtggcaggcacctgtaatcccagctacacaggaggctgaggcaggagaattgtttgaacccaagaggcagaagttgaagtgagtcaaggtcatgccacagcactccagcctgggtgacagagtaagactccgtctcaaaaaacaaaaataaaacactcataagttaatgattcttctcttattcagacattcagcctttctaaattcaatatatggaagatgggaatatttytgagaaataaaataagacaattaaaaaacca

SEQ ID NO: 407134 - DNA, 547 bp, Homo sapiens
agttttacaaggttaagtatgcatggatcaaatattaacttctcacacaaaaaacagttaaaaggaaagaatctagtgccgaagataacagatataagagatgaaatatactaatcattctgaaaacaatattgtgtcccaagctgtttcaccctggtgaaacaaattaaatcttagrtgggagcaattaaactttacaagagagataactgtttaagaaagtagatattcccatgggtgttcaggattaaggagtccttcataaagttaccttatgggcttaattactataaaggctaaacaagaaatgcttgattttgatgacatagctgtgtcacaatttattttatttatttatttatttttttgagacaaggtctcactctgtcacgtagactggagtgcagtggcataatcatagcccgctgctctcactctgtcatgtggactggagtgcagtggcatgatcatagcctgctgcagccttgaactcctgggctcaagaccctcctgcctcagccttctgattaactgggactacaggtgt

SEQ ID NO: 407135 - DNA, 547 bp, Homo sapiens
agttttacaaggttaagtatgcatggatcaaatattaacttctcacacaaaaaacagttaaaaggaaagaatctagtgccgaagataacagatataagagatgaaatatactaatcattctgaaaacaatattgtgtcccaagctgtttcaccctggtgaaacaaattaaatcttaggtgggagcaattaaactttacaagagagataactgtttaagaaagtagatattcccatgggtgttcaggattaaggagtccttcataaagttaccttatgggcttaattactataaaggctaaacaagaaatgcttgattttgatgacatagctgtgtcacaatttattttatttatttatttatttttttgagacaaggtctcactctgtcacgtagactggagtgcagtggcataatcatagcccgctgctctcactctgtcatgtggactggagtgcagtggcatgatcatagccygctgcagccttgaactcctgggctcaagaccctcctgcctcagccttctgattaactgggactacaggtgt

SEQ ID NO: 407136 - DNA, 505 bp, Homo sapiens
atgaaaatgtgtgataggttcattgtaggactagagtagtgtgcatttgtaacagaataaaaaatcttgtccatctataaaatcaaagatgtaaaccactgctaataaggcaagtgactctagagaaaaattttaagtagccatccagcagaaagcctsctcatctccacaggaaccacttcctgttccctcaattgcttctgatgtttattctctcctaaaaaatatatagtagacagtaacattttagtttattgtttaatggctaatatatgtattctggtgatgctgttcttctacttagctactacaaatgcattactttttcactgcattaattgcatgcttttttttttttaccatttaatacttctgtgtgaaaatgattgtttagcagtagcaatataaattcagagtcagaaatagtggtgatgccaaacaaccacagattgtccacataggtggctgagatactgctttctgatggtttaatgtacacaaatat

SEQ ID NO: 407137 - DNA, 600 bp, Homo sapiens
attacagtatagtgttatactttatttttagttattgttaatctcttattgtgcctaatttataatttaaactttatcatagggatgtttaggaaaaaatagtatatatagggtttgaaattatctgcagtttctggcaaccacaagtgtatcttggatcatatcccctgtggggtaagtggagactactgcatttgcagataacatgatcctacctgtaaaaagccccaaatatcccaaaaaaataactgttagaagtaataactcaataaaatcttaggatacaaaatcaacatataaaagtaaataacatttttataaataaataacaacctaactgaaaaagaaatcaagaaagcaatcccattaacaaaagcataaaaacaaaacattaggaataaatttaaccaaggaggtgacagatctgtacactgaaaactataaaacagtgatgaaagaagttgaggaagacamaaataaatgaaaatttatctcagggatcggaagaattaatgttgttaaaatatccatactactcaaatatacagaatcaatgcaatccttatcaaaatcccaaggcattcttcacagaaacagaaa

SEQ ID NO: 407138 - DNA, 593 bp, Homo sapiens
cttccttaactcactggtatctctgtctgagtatctttttcggttttttccttatctttctgttacattttgggggtctcccaagtttcagttcttgaagttatcttcttctctacattcacttccttatatcatagccttacacaccactcattcactgataactactactccagacttctgcatctaaatgsttatttgatatttcacttggagagacagacacatcccaaaccacactcctaaatactctgtctccaaacctactccttcctatgattcttcatctcagtcaacggtgactcctttcttctgattgttcaggatgttagagacatccttggcttttctgtttctcacagccctcatgcaatctgtatacaaattccatcagctctatcatcaaattctatctagggctagacatttctccccaccatccccccactatatttcttctcactgctgcaacagcctcccaagaggtttgcctgctgccatctttaccttctgacactcttcccaacactgcagccagagtgatctttaaaaaaaatgtcagatcatgtcacgactctgctcaaagttcctga

SEQ ID NO: 407139 - DNA, 593 bp, Homo sapiens
cttccttaactcactggtatctctgtctgagtatctttttcggttttttccttatctttctgttacattttgggggtctcccaagtttcagttcttgaagttatcttcttctctacattcacttccttatatcatagccttacacaccactcattcactgataactactactccagacttctgcatctaaatgcttatttgatatttcacttggagagacagacacatcccaaaccacactcctaaatactctgtctccaaacctactccttcctatgattcttcayctcagtcaacggtgactcctttcttctgattgttcaggatgttagagacatccttggcttttctgtttctcacagccctcatgcaatctgtatacaaattccatcagctctatcatcaaattctatctagggctagacatttctccccaccatccccccactatatttcttctcactgctgcaacagcctcccaagaggtttgcctgctgccatctttaccttctgacactcttcccaacactgcagccagagtgatctttaaaaaaaatgtcagatcatgtcacgactctgctcaaagttcctga

SEQ ID NO: 407140 - DNA, 593 bp, Homo sapiens
cttccttaactcactggtatctctgtctgagtatctttttcggttttttccttatctttctgttacattttgggggtctcccaagtttcagttcttgaagttatcttcttctctacattcacttccttatatcatagccttacacaccactcattcactgataactactactccagacttctgcatctaaatgcttatttgatatttcacttggagagacagacacatcccaaaccacactcctaaatactctgtctccaaacctactccttcctatgattcttcatctcagtcaacggtgactcctttcttctgattgttcaggatgttagagacatccttggcttttctgtttctcacasccctcatgcaatctgtatacaaattccatcagctctatcatcaaattctatctagggctagacatttctccccaccatccccccactatatttcttctcactgctgcaacagcctcccaagaggtttgcctgctgccatctttaccttctgacactcttcccaacactgcagccagagtgatctttaaaaaaaatgtcagatcatgtcacgactctgctcaaagttcctga

SEQ ID NO: 407141 - DNA, 593 bp, Homo sapiens
cttccttaactcactggtatctctgtctgagtatctttttcggttttttccttatctttctgttacattttgggggtctcccaagtttcagttcttgaagttatcttcttctctacattcacttccttatatcatagccttacacaccactcattcactgataactactactccagacttctgcatctaaatgcttatttgatatttcacttggagagacagacacatcccaaaccacactcctaaatactctgtctccaaacctactccttcctatgattcttcatctcagtcaacggtgactcctttcttctgattgttcaggatgttagagacatccttggcttttctgtttctcacagccctcatgcaatctgtatacaaattccatcagctctatcatcaaattctatctagggctagacatttctccccaccatcccccyactatatttcttctcactgctgcaacagcctcccaagaggtttgcctgctgccatctttaccttctgacactcttcccaacactgcagccagagtgatctttaaaaaaaatgtcagatcatgtcacgactctgctcaaagttcctga

SEQ ID NO: 407142 - DNA, 553 bp, Homo sapiens
taacacttaattgatacaatgtacaattagtgtacattgtgaacaatgtagtacagtgttaacattcacaattgcactgtattagttaatgttaacaatcacattgttagcacttaactgatacaatgtacatgagtgaagtgcacagtcagtgtgcttcattagaagaaagcaaactgaattatatgctgtgccagtcgtagagaagtttttattattttgtggtgagaaaagacaagaactaaaggaaactttcagttttgttctaacttcactygtatgcaatgttggtgttacttgcattatcactggtgaccacaacaagtaacagaataggatgggttctgaaggaaaggacccagcctctggaccaccccttttcttgaaaccttcacttttctttgccccatgactagattctcctgattcctctcctacctccctgaatttttcttctgttttagatttatccatccagtctcacattgtatatttaccaaagatttgtccctgcagcttttctcgttttttctctacactctctcacttcaaa

SEQ ID NO: 407143 - DNA, 614 bp, Homo sapiens
caaaagacattattttatcccttttaatggctgagtagtattccatggtgtatacatgcaacattttctttatacattcattagttgatgggcacttaggttggtcccacatctttgaaattgtgaatagtgctgctataaacaaacaagtacaagtgtctttttcatataatgacttcttttcctttgggtagatatccagcagtggaattgctggatcaaatggtagatctacttttattaatagctctttaaggagtctccatactattttccataraggttgtactaatttacattttcaccagcagcgtgtaagtattcccttttccccatatccctgccaacatctattgtattcacactttttagtaatggccattcttgcaggattatggtagtatatctcattgtggttttaatttgcatttccctgatgattaatgatgttgaacagtttttcatgtttgttggtcttcatatattttcttttgagaaatgtctattcatgtcctttgcccactttttaatggactttttttttattggtaatttgagttccttgtagattcaggatattaatcctttgttggatgcatagattccaaatattg

SEQ ID NO: 407144 - DNA, 578 bp, Homo sapiens
tgatttggccaacattgatgacttgaactaaatgacgcagccaaggaggtagttggtaaaataaaaataattctgtgctagggagtcaagatccctaggctaaagtccttgacactgcttatttctggctgtgtgtccaataactaaactttctggtctaagcttatttaccagtaaaaggaggggaaagggataattaatttctgaatcacttcgaactctatgattccatgactaaaattgaggggcatttaatttccttctagtytctgcagattgctcatgctgttttattgctttaagtgtctgcagaattgaacctaagaatagagaacatattaatatctcacataccaacagctgcaaatgctgattgcagagcatctccttctatcccatcagttcttatctgcctggtatgtgagttgcagtaacagtccatcctgggttccctcctccccaacctccctccaccccagcctgcctccctgtcctttctcaacaggagcatcaacactatggccttccaaggattagactggatggtgccagatctgccagggatgggccactttgtc

SEQ ID NO: 407145 - DNA, 509 bp, Homo sapiens
tttctggctgtgtgtccaataactaaactttctggtctaagcttatttaccagtaaaaggaggggaaagggataattaatttctgaatcacttcgaactctatgattccatgactaaaattgaggggcatttaatttccttctagtttctgcagattgctcatgctgttttattgctttaagtgtctgcagaattgaacctaagaatagagaacatattaatatctcacataccaacagctgcaaatgctgattgcagagcatctccttctatcccatcagttcttatctgcctggtatgtgagttgcagtaacaktccatcctgggttccctcctccccaacctccctccaccccagcctgcctccctgtcctttctcaacaggagcatcaacactatggccttccaaggattagactggatggtgccagatctgccagggatgggccactttgtcctggtccatgatgacccccacctactttgagatctggtcattgttctctctc

SEQ ID NO: 407146 - DNA, 509 bp, Homo sapiens
tttctggctgtgtgtccaataactaaactttctggtctaagcttatttaccagtaaaaggaggggaaagggataattaatttctgaatcacttcgaactctatgattccatgactaaaattgaggggcatttaatttccttctagtttctgcagattgctcatgctgttttattgctttaagtgtctgcagaattgaacctaagaatagagaacatattaatatctcacataccaacagctgcaaatgctgattgcagagcatctccttctatcccatcagttcttatctgcctggtatgtgagttgcagtaacagyccatcctgggttccctcctccccaacctccctccaccccagcctgcctccctgtcctttctcaacaggagcatcaacactatggccttccaaggattagactggatggtgccagatctgccagggatgggccactttgtcctggtccatgatgacccccacctactttgagatctggtcattgttctctctc

SEQ ID NO: 407147 - DNA, 427 bp, Homo sapiens
atgcacgaccaccctcaaacctatatgaataaatacaagagaattacactatcattcatggacagggaacaacatctatactttagtctgggctgcccaggtgmtgtcaggctttatatacacagaccacacacacacacacacatatgtatatatgtatgtatataatctatagcacaagttccccttgtgggaatagacatgaaataataatattccatttcaatttctagttccaagactggcattgtcacggttaggtatttacttatttccctatctttctttctttttgctaaaacattggaaattttgacttcagatttttcgcttaaaaaaaaaaaacaagctgtatttatataaatgtatactacctaactgcaaagtaaatcagaatcttccaaaactacaaattctgttaaatata

SEQ ID NO: 407148 - DNA, 427 bp, Homo sapiens
atgcacgaccaccctcaaacctatatgaataaatacaagagaattacactatcattcatggacagggaacaacatctatactttagtctgggctgcccaggtgctgtcaggctttatatacacagaccacacacacacacacacatatgtatatatgtatgtatataatctatagcacaagttccccttgtgggaatagacatgaaataataatattccatttcaatttctagttccaagactggcattgtcacggttaggtatttacttatttccctatctttctttctttttgctaaaacattggraattttgacttcagatttttcgcttaaaaaaaaaaaacaagctgtatttatataaatgtatactacctaactgcaaagtaaatcagaatcttccaaaactacaaattctgttaaatata

SEQ ID NO: 407149 - DNA, 624 bp, Homo sapiens
tgaatcatatatatacatatacacaattgtacacttttttttttttttttgagactgagtttcactcttgttgcccaggctggagtgcaatggcacgatctcggctcactgcaacctccacctcccgggttcaagcatttctcctgcctcagcctcccgagtagctgggactacaggcatgtgccaccacgcccagctaattttttgtatttttagtagagacggggtttcaccgtgttagccaggatgatctcgatctcctgacctcatgatccgcctgccttggtctcccaaagtgctgggattacaggcgtgasgtaccgctcccagccagactgtacacttttttttccacaaattcctatatgacttcttttacaatttcataaaacattctttgaaaatactattttaataactgttttctaatattaaacactttcattgcttctaattttttagtgtgctgaatcatgttcattaaatatacatttcttaaaatgtctaatgattcttcagtctagattcctgaaaaggaaattactattttctttccaaagaaagaagcttataaaaagcaatttataaacattaccagtctgcttttccaaaaagctgaagcat

SEQ ID NO: 407150 - DNA, 624 bp, Homo sapiens
tgaatcatatatatacatatacacaattgtacacttttttttttttttttgagactgagtttcactcttgttgcccaggctggagtgcaatggcacgatctcggctcactgcaacctccacctcccgggttcaagcatttctcctgcctcagcctcccgagtagctgggactacaggcatgtgccaccacgcccagctaattttttgtatttttagtagagacggggtttcaccgtgttagccaggatgatctcgatctcctgacctcatgatccgcctgccttggtctcccaaagtgctgggattacaggcgtgacstaccgctcccagccagactgtacacttttttttccacaaattcctatatgacttcttttacaatttcataaaacattctttgaaaatactattttaataactgttttctaatattaaacactttcattgcttctaattttttagtgtgctgaatcatgttcattaaatatacatttcttaaaatgtctaatgattcttcagtctagattcctgaaaaggaaattactattttctttccaaagaaagaagcttataaaaagcaatttataaacattaccagtctgcttttccaaaaagctgaagcat

SEQ ID NO: 407151 - DNA, 649 bp, Homo sapiens
ggtggtacacgcctatagtcccagatacttgggaggggctgaagcaggaggatcatttgcacctgggaggtcaaggctgcagtgagctrcgatggtgccactgcactccagcctgggcaacagaatgaataccctgtctcaaaaaaaaaaatgcatttaatacaactaacctacagaacatcatagcttacctccctagcctaccttaaacgtgctcagaacatttacattagccgacagctgggcaaaatcacctggcaaaaaggaacactgtcaaatctcagttgtctacattcatgatggtgtgccaactgggagatgtggctctctgtggcttcccagcattgtgagagaggatcccaccgcatgtcattagcctggaaaaaagatcacaattcaaaattcaaagcacaattattactgaatgtatatcactttgacaccatcataaagtcaaaccttcataagtctgggaccatctgtatatatttctgtgcgtgtgttgctgttattgctgttgttattcatttattggctttgtgtctttctttttgcatatgctgtttcatatgcctggaatcacccacttctccttttcacctggctgaccccactcatcttttgaacttccgtttaggtgtcagcccct

SEQ ID NO: 407152 - DNA, 649 bp, Homo sapiens
ggtggtacacgcctatagtcccagatacttgggaggggctgaagcaggaggatcatttgcacctgggaggtcaaggctgcagtgagctacgatggtgccactgcactccagcctgggcaacagaatgaataccctgtctcaaaaaaaaaaatgcatttaatacaactaacctacagaacatcatagcttacctccctagcctaccttaaacgtgctcagaacatttacattagccgacagctgggcaaaatcacctggcaaaaaggaacactgtcaaatctcagttgtctacattcatgatggtgtgccaactgggagatgtggctctctgtggcttcccagcattgtgagagaggatcccaccgcatgtcattagcctggaaaaaagatcacaattcaaaattcaaagcacaattattactgaatgtatatcactttsacaccatcataaagtcaaaccttcataagtctgggaccatctgtatatatttctgtgcgtgtgttgctgttattgctgttgttattcatttattggctttgtgtctttctttttgcatatgctgtttcatatgcctggaatcacccacttctccttttcacctggctgaccccactcatcttttgaacttccgtttaggtgtcagcccct

SEQ ID NO: 407153 - DNA, 432 bp, Homo sapiens
gtgataggagagcattgccggtgagagagaatagactgctggcttcagcaaagacctgaataaggtcctgagcaagtcctctcggsaaaaagtgagtagatttgtgtggatacagctgagagtctgaggtactgtcgttgcacgatataagactgcaaagtggactggaccaggtcagggagggttttcgtgacagactgaggagtgcaggtgctatcccgtaggcagcagaggtccctgaagggctttcaagaaggagtgaatattatccaatgaggttgtatagaaaaattaaccctgcactgccatgaaatagagattctaaccaactttccttgaattcatagaaggaaaatcatgaattgtagccagcaaaccaggaatggcacatgtgctatgtggtttacgcagttaccttttactgtaagaatg

SEQ ID NO: 407154 - DNA, 618 bp, Homo sapiens
ggatggcacagatcacctgctttttggggtcatcaatgaatatacaaccatagctagagaatggctgccctgccaaagtcctaattcaaccccaaacagtgtgcatagcagtgaacaaacatggaggaccaagcatgtgccaaaggccatgctctttgccattcagaacattactgcaaaataagaaaggtctgccttgcctctgaaattgctacctttgaatatgtatctatcttggctttttaagtactttttgttttgttttgttttgctgtacaatctgctgtctctmcttttgtttaattgcattcagttttacaatttcccccaggaaaagcagctaattatattttagcacagagagaggcaggtgttagctaagatgtaagagtcctaattttagccttgataattcatgcagtttagctggatctcaatgtaaagtcaccagactgggtgtgtgagctcatcattttaggctttctgaaatttgcatgggatcatgtgactacagatttgcactttgagcttgtaaatgacaaagggttggcaataattgaaatggttgtgttgtaatcttgtgtccaaggaaatatggtccaatggtaaatccaaata

SEQ ID NO: 407155 - DNA, 510 bp, Homo sapiens
tcaccttggctgggtagtagaggaagcaccaaaagtccagcatccagattacctcttccatgctgcactgtctcgtgggcaaagcagttacttttgattcacattgaggttgcgagcatcctaatagtcttcttccgtcactaacatgaatttaacagaggatatttggcaaattctattaaaaatrtgtaattctccattaaaatattcaaattatatttaaaatccattttacccacacccatgaaattcgtagaaaatatccggttactgaggagctattagttagctctctgaactttaattactcccaggactgtgatttgcatggacaaatcaaaaaacacaatggagaacaaagaagaggttcagcaaagaaatgagatagttttctcaccctttccccttatttgtcctttgctacaggtcttgcattatcaaacaaaggcatgcatcacgtgcaaagaatagaaaacaagagagatgaaatgggcatctttctggaaacgt

SEQ ID NO: 407156 - DNA, 457 bp, Homo sapiens
atgtcattttgttcaatgttgtttcattataacactgatgggaaaaaaaaaaaaagtcacttcccatcagtggccactgtctggacattctccccatggctgcataggttacctactcagcttcctcccacatcccaaagatgtgcagcttaggtgaatctgtatgtctacatgagcccaragggagtgagcgtgtgtgtgggtgtgagtgtgccctgccataggaggaggtcctggtcagggctggttcccaccttgcaccctgagctgccgagataggctctggccacccgctaccttgaactggaataagtgggtaaaaaatgatcttacttgtatttattaatctttcttaaatgtatgtgtagctcatttttatatcaatgtttaatattagaagtgttttgggtcttgttttagaagtttggtgctgcttttttaccagaaatatgtagta

SEQ ID NO: 407157 - DNA, 585 bp, Homo sapiens
aggtagatgaaaaataggtatatgtttgtatctataaaagtatgtgagtatttttgcttaaaatctaaataattattagtgtattcatttctacatatacataaattgatatgtaattgtggattacataaaattgatccatgtgattgcgtacatgtatagaaacatgtaaacttagccatacctttataaaccatacataattcatttaatgacgtgcaatagaaactaggttaaaatttgagctctgccattgtcttactttgtgaaactaagtcacttaaatgttctgaccctcagttttatctttgtaaaataagtatgaaacaataatgctgccatacataccacagaggcctatgtggaggatcattcaaaaaacttttttaactataaaatactttataaatattaataatgtttaatgagatatgtataaatacctcaacttactcataaaaaatccatattcttaaaatagtatayttttcaacaatttagtatttcttttttatttacagctgatatgtaacacaaaataattgaaactttctttttaaaatgaattggtttaaaatatattaa

SEQ ID NO: 407158 - DNA, 614 bp, Homo sapiens
tgcagggctctcaatcccaaatacttatctccaaaatggagaaatgaattcttacttcaattgtaggatttgaatattaaagaggacacatgcaaatgcactatgtaaattgtaacatgttatgaatttagtagcactgttattattttccatgcatgagacctkaagtttccaagctgacgagacaaatgacatcctagattggatgcctgttactgcaccagcttttgatgaagatgagacaagggcaaagctatttatgagggcaaaccaggtgccaaatattgtgtgaaataagtcacttcatccttacagcaacccttaggggataggcattataacctccattttacggatgaattgttgtatattggagagtctagcacagtcctagcacatagtaggtgctcaataaacgacagctgatactaaactgggtctccattgggccctaaagtttctgcttcaattctacattaggcctattccattacataaagcaaattttcaaagggccatgatttgaatcaaatgattctcttctgttgctttctgtggagctcatttaaaacactaagtacctgctttgactacagctcataaccaggcacaag

SEQ ID NO: 407159 - DNA, 183 bp, Homo sapiens
cataaatgtcaataagcaaaggcatgtgatagtagaggaggagcagcartgtccaagaataatgataccccaagggataaggggatgagcaacctgcaagaggtccaatgcatagcaggacgttggttctgatcaggtaaatgcaggaaggttttgtggagatgatggcagttaagtgctgcc

SEQ ID NO: 407160 - DNA, 573 bp, Homo sapiens
ttaacaatggctcttccatagaataatttatgatcagagttcttgctttaactgattcctccttaatgctcggttgtaatagaaaataaaaataaaatcaataatatcctatgcgctttcctcttgagatttctatttaagtccccaaatamattttcatgtcacaaaagcattcagatatttttccatctctgccaacagattggactagacaatataccccagcactactttaaagatgaaccacataaaataaataaaaatgcacttggtataaacagtgacaaaaagtataaacattcaaatgttccatttgccttatggagaaatatttgaaataggagccaacattcaattttgggggtaaagattttttaaacattctgttattattgaccaaggcaatcttgaaatactttagcaatggataataccttggatgttggataaaatgctaactccttaggctgacatgaaaagtgatcgctatctaccttacctcatgcctctgtcacaaacagtcctacaacacctgcatatcatctactccagctactctagtttaggtattat

SEQ ID NO: 407161 - DNA, 573 bp, Homo sapiens
ttaacaatggctcttccatagaataatttatgatcagagttcttgctttaactgattcctccttaatgctcggttgtaatagaaaataaaaataaaatcaataatatcctatgcgctttcctcttgagatttctatttaagtccccaaataaattttcatgtcacaaaagcattcagatatttttccatctctgccaacagattggactagacaatataccccagcactactttaaagatsaaccacataaaataaataaaaatgcacttggtataaacagtgacaaaaagtataaacattcaaatgttccatttgccttatggagaaatatttgaaataggagccaacattcaattttgggggtaaagattttttaaacattctgttattattgaccaaggcaatcttgaaatactttagcaatggataataccttggatgttggataaaatgctaactccttaggctgacatgaaaagtgatcgctatctaccttacctcatgcctctgtcacaaacagtcctacaacacctgcatatcatctactccagctactctagtttaggtattat

SEQ ID NO: 407162 - DNA, 573 bp, Homo sapiens
ttaacaatggctcttccatagaataatttatgatcagagttcttgctttaactgattcctccttaatgctcggttgtaatagaaaataaaaataaaatcaataatatcctatgcgctttcctcttgagatttctatttaagtccccaaataaattttcatgtcacaaaagcattcagatatttttccatctctgccaacagattggactagacaatataccccagcactactttaaagatgaaccacataaaataaataaaaatgcacttggtataaacagtgacaaaaagtataaacattcaaatgttccatttgccttatggagaaatatttgaaataggagccaacattcaattttgggggtaaagattttttaaacattctgttattattgaccaaggcaatcttgaaatactttagcaatrgataataccttggatgttggataaaatgctaactccttaggctgacatgaaaagtgatcgctatctaccttacctcatgcctctgtcacaaacagtcctacaacacctgcatatcatctactccagctactctagtttaggtattat

SEQ ID NO: 407163 - DNA, 545 bp, Homo sapiens
agtttgcatttgtaaaagcagaacaataatagtaataggagttttgctgytgacatttctttaaaggatccaagacttacttatcatctgcaactctaactaatacagattacttttgttgactagagtctttgtttgttttctaagtttgtaggtttgcttcagtagattgacaaaacagaagatttaaaaataaaccacacatagactgaacagtaagaggctttatgaatatatccaggtgaaagccttatttgtctcatcagtcactcccttttccaaaggcagcattcctgtccattgctctgactccatggatctaccgtagtttctgtactctgtgatggcacttgatgctcatcactttccaagttgggagatgtggccttggccacaaaggtctcaatattttatcaggtcttggttctgcacctgattcagcttttgttaatgctgcactttaccaagctttttcatacatcattaaacagcaactatcgtgcttgtgccccctttctgatcgactacaatgttaagatcacatt

SEQ ID NO: 407164 - DNA, 545 bp, Homo sapiens
agtttgcatttgtaaaagcagaacaataatagtaataggagttttgctgttgacatttctttaaaggatccaagacttacttatcatctgcaactctaactaatacagattacttttgttgactagagtctttgtttgttttctaagtttgtaggtttgcttcagtagattgacaaaacagaagatttaaaaataaacsacacatagactgaacagtaagaggctttatgaatatatccaggtgaaagccttatttgtctcatcagtcactcccttttccaaaggcagcattcctgtccattgctctgactccatggatctaccgtagtttctgtactctgtgatggcacttgatgctcatcactttccaagttgggagatgtggccttggccacaaaggtctcaatattttatcaggtcttggttctgcacctgattcagcttttgttaatgctgcactttaccaagctttttcatacatcattaaacagcaactatcgtgcttgtgccccctttctgatcgactacaatgttaagatcacatt

SEQ ID NO: 407165 - DNA, 602 bp, Homo sapiens
gagaatggggcagaactcatagttttgtttgtttgttttatgtaacaccttcatttaagcacaattctattaattttcccaggtggttaatttttttrtctgctggttggtggtggcatattttcttccctgacacttctgggaatatctgagacacaattctcttaccacagatttataataggaagtttgattaacagaaaaacggcaagggtagccagcagagttccagggaggacagggaaagaaacgctgtctgtctttttcactgttgttaccccagtgctttttgtggctctataaatatttatctatagtaaataatcagttccagaaaattgttgacctgtctcagtctgtaaaattatttatttaactcctgtacttgaaaagcctgggagtgtgctgcctcgtgcttccattcatgctgcagtttcctttcaataagaaatctaccaaaggtggcctctcaagtccttactatgatgggcgatccaactgtcaccagcaggtacctgggtgcttgcaccttttgtgggcactatgggacatcctgttatcatggaggtggggattcttttcatccagatagtccagccgat

SEQ ID NO: 407166 - DNA, 602 bp, Homo sapiens
gagaatggggcagaactcatagttttgtttgtttgttttatgtaacaccttcatttaagcacaattctattaattttcccaggtggttaatttttttgtctgctggttggtggtggcatattttcttccctgacacttctgggaatatctgagacacaattctcttaccacagatttayaataggaagtttgattaacagaaaaacggcaagggtagccagcagagttccagggaggacagggaaagaaacgctgtctgtctttttcactgttgttaccccagtgctttttgtggctctataaatatttatctatagtaaataatcagttccagaaaattgttgacctgtctcagtctgtaaaattatttatttaactcctgtacttgaaaagcctgggagtgtgctgcctcgtgcttccattcatgctgcagtttcctttcaataagaaatctaccaaaggtggcctctcaagtccttactatgatgggcgatccaactgtcaccagcaggtacctgggtgcttgcaccttttgtgggcactatgggacatcctgttatcatggaggtggggattcttttcatccagatagtccagccgat

SEQ ID NO: 407167 - DNA, 616 bp, Homo sapiens
tagatgtagattttacttcaaaagaatcccactgaagcaacccttctggggttagaaaccgttgtgatgcttttgagcctctaaaccttcaaatttaacttggtcttgacaatcataaggtctgggctgctgcacatggtgtgattttattcccctggttgtcctagaagtggaaaaagaatcactttcaaatgagaatttttattgttttcatcacgggagcttcagtcgggctattaaaaaaggctttcttttatgaaatttctcttagaaaacaatggattataagataagaggaaatgacctcaggcaagtgaaaaagtactggtaaagctgtgagaaaactttccagaactttctctgtatttgtgtgttctgtcaaattgcagccacattcagccttccctttctccacccctaggcagtaaaactgcgagatggctaatttctagtctgttcccccttcacttaggtaactgcacagmaagcatgatctgacccagtcttctgtaaacaactccctacccctagccaagaaggcttaacctttgagaggaaatggatatgttgttttctggcatgtgaagaacgtaaagcagtatacctgccccaactg

SEQ ID NO: 407168 - DNA, 480 bp, Homo sapiens
ctgattaggactggtatagaacctagataaatactttacaaaaaatgtaaaggatgtgcaccgcatttgagaatcattgacctaaaccttagcctctgacttgaattagttaacagtttcaaaggagctccttctagcccagaaacatcttatttttaagaggtaaatgagcccatgacttatttcttcaaattaggggatgagaattagagaggtaaaagaactaagtctaataacattaaataagcaaytgaaaacagctgatttttctaaccaggcagtaaagaatctctttttcttgtgacgtctcaagccacagaagccatgtctttgaaaaactcttttgtatcagaagggctccgctccttttactccatcttttcaggattgtggattgtggttggggagggtggaccttgagcttttggatgcagaattgatgggaaatttaaaagcctcatggaaaatgtaaaagaaagg

SEQ ID NO: 407169 - DNA, 368 bp, Homo sapiens
ttttaatgtagattaaatttatatatgattaaatatcttatttatattaattagagagrtatgtataaaattcagacaaaatcctcaaattttatttccacttctaattccaattcatctgcattactatgtttttttagcaaaaatagaacaataacttgtcaatacttctcttgttcttctatgacttggatgaggatagagactgcagcaaaatggtcaccatccgaatcaacttgaggacaacaaagaagctagcattacaaattttggcaattcaaatatggaataacaggttcctgaagtatgattattcattgtctttccaaggaggctccaggttcagagtagttgcatttaaactctgg

SEQ ID NO: 407170 - DNA, 597 bp, Homo sapiens
acgctcctcacttccttattagtcctcaccagcagcatcctcagcaaccatttttctaccaacagcctgtttacaacaatctaggctttatctgtcatgcccctcaaaattcttccagattctgcccattatcaaattccaaagccacttccacatttttatgtattacagcagcatcacattttcattaccaaaatctgtatttgtttcctgtgcttttcacaaattaccagaaacttggtggcttaaagcaayagaaatttattatctcacagtcctggaggccagaagtccagaagtggttccactgtgttgacatcaaggtgtggacagggctgcattcctctggagtgcccaggggaaggtctgttcctggcctcttctagcttctggtggctgctggcattccttggtttttggctgcatcatttaaatctctgcctccatgttcacattgcctggatttcctttggagggccattgttgggtctatcacaaatatttatatgtatgctcatatactcttttataatgttaacataggaaattatactactcaatttcttagtgttgaaccacacttatatttttaaaact

SEQ ID NO: 407171 - DNA, 597 bp, Homo sapiens
acgctcctcacttccttattagtcctcaccagcagcatcctcagcaaccatttttctaccaacagcctgtttacaacaatctaggctttatctgtcatgcccctcaaaattcttccagattctgcccattatcaaattccaaagccacttccacatttttatgtattacagcagcatcacattttcattaccaaaatctgtatttgtttcctgtgcttttcacaaattaccagaaacttggtggcttaaagcaacagaaatttattatctcacagtcctggaggccagaagtccagaagtggttccactgtgttgacatcaaggtgtggacagggctgcattcctctggagtgcccaggggaaggtctgttcctggcctcttctagcttctggtggctgctggcattccttggtttttggctgcatcatttaaatctctgcctccatgttcacattkcctggatttcctttggagggccattgttgggtctatcacaaatatttatatgtatgctcatatactcttttataatgttaacataggaaattatactactcaatttcttagtgttgaaccacacttatatttttaaaact

SEQ ID NO: 407172 - DNA, 529 bp, Homo sapiens
cattaaaatccattggtcttcttgaactttgaaaggatcttttactcacccatgatgttacattggaaaatagtgattctctgaattatgcaaatctttcaatgttgtcatatttcattctagaatatcaaaaaatcacatgtgagaaaatcaccactgatgtaattagaaaaaagtctttaaatattgggaactgtcaagcacataatggtgaatacatattttccaaaattctaattatttgctttaaagcacaaattttacaatgggcgacaaatgctatcaattgttttccttgcagtgtcagkctctcttcattcatttttgagaaaatatctgctagatacccaaggctgaataatcttactttgtctgtcagtcattcttccatgcacaaataatggttcaagaacaaagcagctacttcagctcacaacacaaaacatacaagtgtttcacctcaaggcaaccatcatacttctttgtgcaacagaagttctttgtgcatacatgtcattttgttgcacgt

SEQ ID NO: 407173 - DNA, 529 bp, Homo sapiens
cattaaaatccattggtcttcttgaactttgaaaggatcttttactcacccatgatgttacattggaaaatagtgattctctgaattatgcaaatctttcaatgttgtcatatttcattctagaatatcaaaaaatcacatgtgagaaaatcaccactgatgtaattagaaaaaagtctttaaatattgggaactgtcaagcacataatggtgaatacatattttccaaaattctaattatttgctttaaagcacaaattttacaatgggcgacaaatgctatcaattgttttccttgcagtgtcaggctctcttcattcatttttgagaaaatatctgctagatacccaaggctgaataatcttastttgtctgtcagtcattcttccatgcacaaataatggttcaagaacaaagcagctacttcagctcacaacacaaaacatacaagtgtttcacctcaaggcaaccatcatacttctttgtgcaacagaagttctttgtgcatacatgtcattttgttgcacgt

SEQ ID NO: 407174 - DNA, 529 bp, Homo sapiens
cattaaaatccattggtcttcttgaactttgaaaggatcttttactcacccatgatgttacattggaaaatagtgattctctgaattatgcaaatctttcaatgttgtcatatttcattctagaatatcaaaaaatcacatgtgagaaaatcaccactgatgtaattagaaaaaagtctttaaatattgggaactgtcaagcacataatggtgaatacatattttccaaaattctaattatttgctttaaagcacaaattttacaatgggcgacaaatgctatcaattgttttccttgcagtgtcaggctctcttcattcatttttgagaaaatatctgctagatacccaaggctgaataatcttactttgtctgtcagtcattcttccawgcacaaataatggttcaagaacaaagcagctacttcagctcacaacacaaaacatacaagtgtttcacctcaaggcaaccatcatacttctttgtgcaacagaagttctttgtgcatacatgtcattttgttgcacgt

SEQ ID NO: 407175 - DNA, 650 bp, Homo sapiens
gttgttctcatgatagtcaataagtctcatgagatatgatagttttataaaggggagctcccatgcacctgctctcttgccagccaccaggtaagacatgactttgcttctcttttgccttccgccatgattgtgaggcctcccaagctatgtggaacygtgagtccattaaacctctttcctttataaattacccagtcttgggtatgtctttattagcagcataaaaacaaactgatacaagtacattttgggctttgggggaaagttcatgttaaagttggtagatttttttttccaagatggcagatatttttccaagatggtgtgctttgttagcatgcctcatttgctcagaaagaggaaaatcgtatgtagagactcatagtgtgaacttttatccaagaaggaacatggcaactcaacagaaaaagtgaaagttcagatacttttaaaacagcagcagatgggaacttgcaccatgagtcaggtagaaaactctgagtctccagagggtggaagatggaggggctgtctctgtggtacacattcccactggggagctgggcagtcgaggccatgggagagcacctcaccctgcccagaactggagctgatttggtgggtggtggggagtatataagaagaag

SEQ ID NO: 407176 - DNA, 650 bp, Homo sapiens
gttgttctcatgatagtcaataagtctcatgagatatgatagttttataaaggggagctcccatgcacctgctctcttgccagccaccaggtaagacatgactttgcttctcttttgccttccgccatgattgtgaggcctcccaagctatgtggaaccgtgagtccattaaacctctttcctttataaattacccagtcttgggtatgtctttattagcagcataaaaacaaactgatacaagtacattttgggctttgggggaaagttcatgttaaagttggtagatttttttttccaagatggcagatatttttccaagatggtgtgctttgttagcatgcctcatttgctcagaaagaggaaaatcgtatgtagagactcatagtgtgaacttttatccaagaaggaacatggcaactcaacagaaaaagtgaaagttcagatacttttaaaacagcagcagatgggaacttgcaccatgagtcaggtagaaaactctgagtctccagagggtggaagatggaggggctgtctctgtggtacacattcccactggggagctgggcagtcsaggccatgggagagcacctcaccctgcccagaactggagctgatttggtgggtggtggggagtatataagaagaag

SEQ ID NO: 407177 - DNA, 615 bp, Homo sapiens
tgaataatcatagtccaaatggaatgttaaagggaaagttctggaacctaccagagatttcactggaagaatctacaacacacacaaaagaaagacacaagaagctgacagagatcaaaccctgagaaagctagtattccataaaagggtagggagtattttcagcctytttaactcttgtggcagactgctggttatcataattcaagaagagattctttgccctcataagcccaagtactggagtgggctgcaatttggggacttcttcagagcattacactgggctaccagctcatgctgggatccttccttttccccctggacctgggctgtagtagcgggcacaatactgggtgtgcactcattgtgggacttcgctttgctcggagaccttcaaaccttgtctcttcacatcaccatatcctttgcaaccattccccagcacagcctggactgtgacagccccacagggtggctggacccagaggagcagtgggcttcacagtaagtagtctggctctcaggaattgccacacttagggtaagggggagtgtgacatgccaagagagcaccgcatggaacaaagggaaccagagtgcaagcttttttat

SEQ ID NO: 407178 - DNA, 529 bp, Homo sapiens
ccaggccccaccttcaatactagggattacatgtcttttgtttgtttgttttttctgttttcttgttttatgtctccccatagttaagcagggattagattttcacatgagatttggtagggacacagatccaaaccctattattgtcttaggttgaattgcctaaaactagaacctgagagaaggattcctgtgcatgtgatttatagaggaaatgctcttaggaagaggagagcaaaggaagcaaaattcaagcctggcttgtaaccagggttggagtctcgctctgtcgcccaggctggagtgcagtggcgcaatcttggatcactgcaacctctgtctgccgggttcaagcgattctcctgtctcagcctcctaagaggctgggattaaaggtgcctttcaccaygcccagctattttttgtatttttagtagagacgggatttcaccatgtttggccaggtggtcttgaactcctgacctcaggtgatcaacccaccttggcctcccaaaatgctgggattaca

SEQ ID NO: 407179 - DNA, 559 bp, Homo sapiens
gagttaaaacaaaatgacaaacctttagccagactaagaaaaccagaagatccaaataaataaaatcagaaatgaaaaaggacacattacaactaatactgcagaaatttaaagggtcattagcgactgctatgtcaactatatgccaataaattggaaaatctaaaagaagtggacaaattcctagatacataaaatctaccaagattgaaccatggagaaatccaaaacctgaacmgactaataacaaataatgagatcaaagtcataataaaagtctcccagtaaagaaaagccaggaacctgatggcttcactgctgaattctacctaacatttaaagcagaaccaactgataccaatcctactcaaactactcaagaaaaataaatacataaataaaataagacgaggagagagtacttccagaattactctacaaggccagtattacccagataccaaaatctgacaaagacatatcaaaaaaagaaaactatgggctagtatctctgatgaatattgatgcagaaatcctcaacaaaatactaggaaactga

SEQ ID NO: 407180 - DNA, 572 bp, Homo sapiens
ttcccttaaggcccaaggtctcttaagtcagcttgtcataaatgctgcctgacctgggcctcacccttcaggacagtgggctccccctctggcccaggaggtccagaaatgccatccaagagtcaagtcctgaaatcagagatcccaagagcccttttggtgttctaccctctttggccatgctggtacctaaggtgcaagacaaagtcccctttacttttccctctgcttttctcaagcaggaggagttttgccccatacaccacaactagttatgtggtaagtctcacctgaagccagcaagtcttagagactcaccaaggccctcaaaatgtaatatgggggtatcactgctggttattcagggcccaaaggctcttcggttcacaggtaatgaatgctgacaggaccgggtcctttccctcaaggtaacagkttcccttctggcccagggtgttctagaaataccatctgggagccagggcccgaaacaggggccccgtgactttaactgatgccctatcttgctgtggctgggctggtatcctaggtgcaagacaaagtcctccccc

SEQ ID NO: 407181 - DNA, 541 bp, Homo sapiens
atggcatctatggtttccaaggagaagtcagcacgcattcatataactgtttcccagcatggaatatataggatttctctaattgcttttaggacttttctctttagttttgatattcagcagtttgaccatgatgagcctagatgtagtcctctttagattatcttggtcagggttcggtgtgattcttggaatgtgagctgacattatcatcaatttggaaacattttcaacaattatcccttcaaatattccttctatctcattctttcatctccttctgagagtcaaatcatgtgactgttagataattttatgtaatattattccacaaagtctcagacactgtgttctgttttcttcattctttttgctttgtgtgtcagtttgagtcattyctattaaacagacctataattcactgattctgtcttctattatgttctgactgtgacgtccatccaataagtgtttttgaacttttattgtgaaataattataaattcacagggaatagaaaaagcagtacagagaagtccca

SEQ ID NO: 407182 - DNA, 603 bp, Homo sapiens
gtgaggaataaaagactacagatatggtgcagtgtatgctgcttgggtgatgggtgcaccaaaatctcacaaatcaccactaaagacttactcatgtaaccaaggaccrcctgtaccccaataacttatggaaaaaaaaatcctccaaaacaaaacttttctttcataatggttcctacaaaatccaggaaggacctctgagctgccaggtgggtcacacactcacctaggggacaatcatgatggccaaagggatgtcaggcttccatggaccagccagggtcatgtgacacactggagctgggaaacagagttactcccatcagaaccatgtagactgagggtgggagtagcctgagtcaataaagaaaaagtggtttgaatgctaggaagctaaaagaacaaatgtccagtgttgtggtagatgggggagccaaggtggctcttgaaaatgggcaaaatgtggggcggatctcctggggaaatgtgattttggtccgaatttggcacctagaactataagcatggtaagtaatccaccacaccctctgaaagaactgtctgcacttcctcacccacaccctctccattgccctgggggta

SEQ ID NO: 407183 - DNA, 560 bp, Homo sapiens
catttggttcaggtgctgtctgccagatttctccactgtaaggttcctattttccctatgcatcaaataaatgtggagatactacgttggtgcaaaagtaattaaaataattataaaagtaatggcaaaamctgcaactacttttgcactaacctaatgctttgaggctatgtaaatatcctattaattgccatattttgcccacaaattttagcatctattgatgattcttgtccaaagcaattattgctgtgctgtttgccaagaggtgattttgtattaccatcattcccttcctgtttattaatttacattttcaattctgtgcttacatcagctctgaactcatggatatttgttttatgccatggattatagagcattactatcagtatttattttcttcctcgaagtatcccggattcatcagttcatagcacttcaagtcatctcctgccaccatgctttttttgagcactttccttgttttgtgctataagaggtcctggcttatcacatacattttctgttttaggctggaatcagccattgctccaaat

SEQ ID NO: 407184 - DNA, 636 bp, Homo sapiens
ttaaggtaaatgaccacagatggacagtggtttccatactggaaaagactggagagctttcacctgtagcctaacttcaccccacctccttcttaccctggggcttcactatactctcacagtctttctgctgcctgcgtccctccgtctgcctgtattagaatctaagtgatctcccccctctggtttaatattaggacccaggatagcacctgacatgcattagcctttaacacacatccaccaaacaggagtttttctatccctgtatcaatggcatgaaagcatgtagktttataatttggagaaactgctttttcttcattatgcctattctataactaattgtggctattttaagcatctgtttttctagaggaattttagaattattttgttatttttctgaaaaccctgctagaattttttaaaattatagtaagaacactgaactgctagcatttgaatgagtgtcatattgcatttatagattactttgtggtgagtcaatcactttttgatagtagctttttttttttttatcatttcagaataggaaatgccaatactgatgtcttaatccttatcccctttagcaaagttggggagtgctttttttctactgttttcaaaaag

SEQ ID NO: 407185 - DNA, 555 bp, Homo sapiens
caataacacatataatttcttagtctctgtcttccctgctatattacagataaaaacccctgtaagggctggatggtgtcctccctacttcccttttccttttctttttctcttcttccctcctccctccactcctttttctttctttcctgtgagctctttagtacttagaaaagtacctatgatactttagtcagtatttaaatacttgttgagtgaatgagtgaattttgaacagtgatttattctcccaatacctgcataaagcacagtaccttgaattgctgtaaccttgagattcgtcacctttggctgaggactggaattcagactgagggcaccaacaagtggggaggctccatcctcaagtggctttataatcagcacatattactgatgagaggatatgagtagacttagaggactgtggaggcatatttgaaatgcctgggtacttgsgcatttataggaggtcatttagcaggaagctgacgtcctgctaaacacaggtagggtaaaaaatccagggaaatttgagatattagtcttgatgta

SEQ ID NO: 407186 - DNA, 494 bp, Homo sapiens
  misc_feature (1)...(494): n = A,T,C or G
tgacatttgtgcttccagggattctctgaggttcttgtgtttaatttgttgtctctcattagttttggaaaatttttggtcataatcccttcaaatatttccttcatttccattttttttctgtgaacaattacacatatggtaggttgggttaactcttggatgcactgttgttttatattccccacctrtttttctttttcttttagtttggataatttttattgactaatttttaagtttatttatatttgcctcagcactttcaaatctactcaagagcccccaaaatgaaggaattcttcatttttaatagcatgtaagttttcttccatttgactggagtgcctatctagtgttttttctctctttggattctttttaatcactctgattgagactgtgtctcagtgatttgaagttcataggtcttggcttcactgtgtaagtcaaattagctttctgtaannnnnnnnnnnnnnnnnnnnnnnnnn

SEQ ID NO: 407187 - DNA, 612 bp, Homo sapiens
tagattttagctcaaggaagacatccctggatttctttcattagtttttctacatttttattcaagcaagagacttgtcatgtataaaacttgcctatattctaaataaaaagactctggaatgtatttttttttcaaatttgatcatcatgcttagttgccttatgtagaaggcttttgttcccaacaggtactaaatacatttctttgatttttcatagcccaaaaggattaatctcagtgaaakttggtcttactaagcttatgaaatagaataatgagaacacaaatattatatagcttatgatttaattataaagctatttaaaaattctcttagtaatcttttaagggaatataataaaataatcttttgttttaattttgaggctctttcatgtggagccatccttaacatttagttaattctcttgaggtacatttaggacatagaaaataaatgaagggcaggacatatggaagtaccaacacaacaaaattttatgaaatatcggttctctttgtttccttttcagattataccctcttaataaataaaagccatatttttagtcaagtgaaaaaataatgacttcataagaaaacaattat

SEQ ID NO: 407188 - DNA, 559 bp, Homo sapiens
agataacaatataaacttgtggatgaattaaaaatataaactatacagacagaatttaattgttgttattcttggaaaaaagaagaccagccttgagagagaatattgtagtggtgtgaaagagaggtatttttgggttgattagagaaggtagtcaagaagtgagaggcaagtgatggtagtttaactatatagaatatagagcactgatacagagggagggatcagaaagatggaatacctctatctaaagaaggattctgagrggaaattaacattagtttcctaggagactggggaactaatcatggaaagttgcacaaagaatagttattgacagatgattttgtcatatatagtctgaaatgatgccatgataagaggaaatatcagaggtggaaaataatgatagaatcaatgatatataagtgataatgagaaggtagatttgggagtaatacttaaagtaaattgatcttgtggagaggaagggtgactgattattagaagtgataagatagtaaggatggccataaggatggttgattatgagaaaaaa

SEQ ID NO: 407189 - DNA, 614 bp, Homo sapiens
tattctgggttcaagggccctttagtctgcaggtgatgattcctgccaggactgggttctcttcaaggcagcgggttctcttcttgcccaaggtgtgtctagcaatgttgtctgggagctagagcctggaatggagacttcatgagtctgcctggtaccctgttctactgtggcttaactggtatccatgttgcaagacaaatcctttttactcttccaagcagaggaacgaagtctctcccagtagtgtgagcttcaytgcctggggctgggggaaggggtggtgcaagcactccccttgccacctcagctggtgtctcacttggttgcatgttcccaagttcactgacttcaagcccagcatagcaccaggacttacccagaaatcgcagtctggtggcctagaatggctttcaagtttatttagaaccctggaacactttagcacatggtggtgaggcttgtctgaactcaggttctcactgctgggatgggtgattctcttctggctagaactggtctaaatgcttcttctgtgggtggtagctgagtgctggctggtgttgctttccacttcatcaggtcagcactgagttccaacgctaagtcgcata

SEQ ID NO: 407190 - DNA, 528 bp, Homo sapiens
attaccttataaaaattggtgaaagtaattaaagacacacaaacaaggatgttttaaaaggaaaatgtattagtccattttcacgctgctgataaagacatacctgagactgggcaatttacaaaggaaagaggtttaatggagaacacacagttccacgtggctagggaagcctcacaatcgtggcagaaggcaaggaggagcaagtcacattttatgtgaayggcagcaggcaaataaagcttgtgcagggaaactcccctttttaaaatcaccagatctcgtgagacttatttgctatcatgagaacatcatgggaaagacgtgcctccacaattcaattacctcctactgggtccctcccacaacacgtgggaattcaagatgagatttgggtggtgacacagtcaaaccatagcagaaagaaaattcaaatcatgccaaaaaaagttattttaattacaacaatcataaatttttataagattctaaaagacgataaaaaagacaaataattattaatagata

SEQ ID NO: 407191 - DNA, 532 bp, Homo sapiens
aacggcagcaggcaaataaagcttgtgcagggaaactcccctttttaaaatcaccagatctcgtgagacttatttgctatcatgagaacatcatgggaaagacgtgcctccacaattcaattacctcctactgggtccctcccacaacacgtgggaattcaagatgagatttgggtggwgacacagtcaaaccatagcagaaagaaaattcaaatcatgccaaaaaaagttattttaattacaacaatcataaatttttataagattctaaaagacgataaaaaagacaaataattattaatagatatgccatagcatcatgtggtaaaactcattcctataagagaaataataaggtagtcttcaccatagttatgataaagtattatagatgggaaatatgcactattctaactatagtgtgccttcaaaagaagaaataatcacttagctccctacaaaactttgaagaaaactactaattcaaagattatatatgcctagggataagaggaatatgaggaaaaagtct

SEQ ID NO: 407192 - DNA, 538 bp, Homo sapiens
ccagtttgtaaagagaacaagaagagcttacttcttcaaatgtgcccacaccaatacaagtccaaaagatcgtgaataatcagagaaacatgacatcatcaaaagatcaaaataaagcactgatggtacaggagttaagaaattatttaggcagatagtgagggtaaggaagtccttggtaaggtttaccttttaatgaaaagcaacccacaaatcattttctttttgtttgtttgtttggagacagggtcttgctctgtcgcccaggctcgagtgcagtggcacartctcggctcactgcaacctccacctcctgggttcatgtgattctcctacctcagcctcccaagtagctgggattacaggtgtgccccaccatgcccggctaattgttgcattttttagtagagacagggtttctccatgttggtcaggctggtcttgaaaatgaaaataaatcagttcattctgccagagataagaaatcacaagcagtttcatacaaaaaagacctggtccataaggagttctctcccag

SEQ ID NO: 407193 - DNA, 550 bp, Homo sapiens
gattgtctttctgtatttaatttgttttctttggtttccttcaaaaatttatctttatcttctgtktataatagtcttgttatgttatgcttacatgtgtgtttttattggatttattttgcttgggttggctgtgctttgtatgtgtataaatttatgttcttttttaaaccaaattttaatttttaacttaatttaataagttcggccattgttgtagcatttattctaccctattttctatttttcttttgatttctcagttatttgtatttcagactttttatagattatcccatcggttcttggaattttttcaactttttttgtgttctttagattaattttaaattttattgattttatttctttcagaatctcttatcagaggtaaagctcatctagtgaattattaatttccaatattttatattttgttctaaaatttccatttattttttatagccactatatctctgttgagatatcctatctttttactcattttgagaatcttacctttatttcctcaaacatagttgttatagtg

SEQ ID NO: 407194 - DNA, 522 bp, Homo sapiens
aaacagaataagcagaagtcaaatccccaatatgaaagacactttaaattatgaaaattattcaagttattcagttattccatatcatttagcataaaaatttgaactataataattatttttataaaactttattccccacccaatctcatactgtatktcagagaattccatgagctacgtccttagtagataaaatagggtaggttccatgcacagttagagcagggattgcttatctatagtaacaagcaggaaggcagagaatataagtacatatgcttcaatgtaaatgagtaaaaaatctcaaagtaaaaaaccaccatgatgctgaattcatgttattatgaattgaccaatttaaatgcctgaatccttggaaaattaaaaatatgcaataggaaaatgtatcttcatctttattaaaagtgttgactccaactccccctcgaggtgactagaccttgtatgacctttgaaaagactatttctgctccttaaacttcagtaataaacaagatc

SEQ ID NO: 407195 - DNA, 625 bp, Homo sapiens
taccatggctatatatttactagactgtaaaaatatccatatgctcaaggataaataagtaacctgaatggctgcataatcattgaaaaaactgaattcatagtctttaaagacattgctggctgggtgctgtggcccatgcctgtaatcccagcactttgggaggcggaggcgggaggattgcctgagctcaggagttcatgatcagcctgggcaacatggtgaaaccccgtctctattaaaatacaaaaaaaattagccgagtgtggtggtgtgcacctgtagtcccagctacttgggaggctgatgcaggagaattgccaaaggcggagattgcagtgagyggagatcatgccaccgcactccagcctgggcgacaaagcaagacttcatctcaaaaatagaaaaaaatagaataaataaataaataaaaataaagacagagctacaagagaactctaggcccaaatggcagtagaggcaaattctatcaaacatttaaagaaataacagctctataaaaactattctaaaaaattgaagatagaagatcatttcctaacttatcttaggaggccagcattccctgattaaatcaatgatgttacaaggaaaggaaactaca

SEQ ID NO: 407196 - DNA, 625 bp, Homo sapiens
taccatggctatatatttactagactgtaaaaatatccatatgctcaaggataaataagtaacctgaatggctgcataatcattgaaaaaactgaattcatagtctttaaagacattgctggctgggtgctgtggcccatgcctgtaatcccagcactttgggaggcggaggcgggaggattgcctgagctcaggagttcatgatcagcctgggcaacatggtgaaaccccgtctctattaaaatacaaaaaaaattagccgagtgtggtggtgtgcacctgtagtcccagctacttgggaggctgatgcaggagaattgccaaaggcggagattgcagtgagtggagatcatgccaccgcactccagcctgggcgacaaagcaagacttcatctcaaaaatagaaaaaaatagaataaataaataaataaaaataaagacagagctacaagagaactctaggcccaaatggcagtagaggcaaattctatcaaacatttaaagaaataacagctctataaaaactattctaraaaattgaagatagaagatcatttcctaacttatcttaggaggccagcattccctgattaaatcaatgatgttacaaggaaaggaaactaca

SEQ ID NO: 407197 - DNA, 600 bp, Homo sapiens
acaaaatggagaccttccaaactcaccccagcttattttaatgcaactcttaataaaatacttcatataaaatccagaacaaatgtcaatctatgaagaatgctgggacagcatgtgtaaactgggactgtcctaggcaagctggcacatgttgcaactctatttataggtsacttaaatgaaggaaacttgacaatggttcaagtttaattcagttgaaaatagaaatagattctttttttcacctaaaaattgaaatatttaagttacatattccatgagaacaaactgacttctatgcagtaaaaccaattattatactatgttaaacatcttttttaagagagatactttgtctttcagagctcatatcatattcttgaaaatagaagtctattaagcattggccatataagaacagatcattatttgtcttcaagtctattgattaatcatcctttcaataaaagataaaaatgctacagaaaagacatcagtcatgttaaagacatttgttatttaattattacagctttctctcattcatcatatgcaccaagcatttattgaatgtgcataattcacagaaagtggcaccaa

SEQ ID NO: 407198 - DNA, 548 bp, Homo sapiens
catcaagatatatattatttccatcatcctaggaagtttatgcatgcccttttcctgtcagttttttatccccgtctcccaaaaggcaatcacccttctgaccttattaccataggtagatttgcctgtttttgaacatcatataaatgaaatcatataatatgtagtgtcctctttcaattcaaaatctatgagattcatccatgatgttgcctataactgtagtttgttcctttttattgctgatactactttattatatgaatatgccacaatttgtttatccatttttctgttgcaggacatatggattgcttctartgttgttggctataataaagccactataaacatttgtgttcaagtctttttgtgggcttatatgtttctttttggtagaacctaggagtagagtatgctggatcaagaagctggattcaattttcattgcaaacagttttgcaaaggtcatatacaattttatattcttaccagccaaatatgaacactctggttgctccataacctcaccagcatttggttgggtt

SEQ ID NO: 407199 - DNA, 548 bp, Homo sapiens
catcaagatatatattatttccatcatcctaggaagtttatgcatgcccttttcctgtcagttttttatccccgtctcccaaaaggcaatcacccttctgaccttattaccataggtagatttgcctgtttttgaacatcatataaatgaaatcatataatatgtagtgtcctctttcaattcaaaatctatgagattcatccatgatgttgcctataactgtagtttgttcctttttattgctgatactactttattatatgaatatgccacaatttgtttatccatttttctgttgcaggacatatggattgcttctagtgttgttggctataataaagccactataaacatttgtrttcaagtctttttgtgggcttatatgtttctttttggtagaacctaggagtagagtatgctggatcaagaagctggattcaattttcattgcaaacagttttgcaaaggtcatatacaattttatattcttaccagccaaatatgaacactctggttgctccataacctcaccagcatttggttgggtt

SEQ ID NO: 407200 - DNA, 549 bp, Homo sapiens
aagttctcctggataatatcctgcagagtgttttccaacttggttccattctccccgtcactttcaggtacaccaatcagatgtagatttggtcttttcacatagtcccatacttcttggaggctttgctcatttttcacctaacaccatactttaataaatgttggatagatccattttttacaatgtaaacataaaatcataacagtattacaataacagaaatatgtattaatcttagtgaagaagaaagggccttttaaatataaccccaacaaaggatttgatttgatatttctccaaagaagatatataaatagccattgaacacaagaaaagatgctcaacatcactggtcattagrgaaatacaaataaaaaccacttcatactccctggaatgattataataaaaatacagacaagagaattaaaaacatatgtccacacaaaaagttacacacaaatgtctataatagcattattcataaggctaaaaaggagaaactcaaatgtccatcaactgatgaataaaagaaatgtggtataa

SEQ ID NO: 407201 - DNA, 636 bp, Homo sapiens
tatgggtctgtgtagttgatttagttcccgccatgcaaggcatttatgtaggagaagtagagaccttgcaaggaaaagtacagaaataatttggggtaggggatatgatacctatgggaaaatactgatgaaagtttgatatcaagtattcattaatcattgctgaaataacagatgaatatatgctattttccaatagaaaagccagtcatttgaattatttagaagttctgcatgcaaagtaacttaattacacattttaaaacaataactagttgttatattcacaagttttcctatatgttatgaggcaggtaatgggatggtgttttacagacttctatgttactggaaaacgctaaacctgggagactaacatccctcttaggcttcaggtaggatatttacattcatatttctatgtctttagctattctggtataaatcaaaccyaaagggatgaagccagagttttgctttattttgtgttgcttttttacctttaatgcttccagtcaactgaatcatagttgatgggggctgctgtgtaggtgatagacaggcctgcctttcccggaggggaatgtgttctatagtactaataggactgagttactggggactaaagacatgaca

SEQ ID NO: 407202 - DNA, 457 bp, Homo sapiens
aagtgctatagatcttgcaagtaaactatttttttggctgattagatgtgtatattgagtttatatttattttttattcaaattataccacaatatctaatttttaacagtcaaaagatgttaaagggtgttttctaattcttctgtggatttgtcttaactgtcaaaagggacttactctgagtaaaacaaagtttgctaaataatagttagcttcaacagttgtaaactatatgtctgtcataatccagatttctgctaatattagtagttacctacatttctctcttccctttcaatctttttaaaaaayatttctcttctgaaaagtaacttttctcattttggccaagattgtttgctttctcatacaaaatagtatcagctcaacttaagtaaatggaaaatatcagttcaacagaccttatgcatcagagtaatgcaatcacaaagtttg

SEQ ID NO: 407203 - DNA, 563 bp, Homo sapiens
ctccctgacctcaacaatcacttctccatggagagcatccacattgctatctttagttctagcttttctacagagctgcacacccacattctaaataacagctggttattggttcaytcgttcctttgtccattcattcagtgtttatatagcatctatgaggcacctggatgaatacaacagggtctctaactttgagaagttcacatcgccatcaaatactacacaggcttttctaattcagaaagtttagaacttaattcattgtctttcctttaaaatctgttccttctctagacgtcccatttcctgccattggtattctcttcatccagttacgtgggcctacagctggggagtcatcttcaattcttccgttttttttttcttcctatatccaattagctacccaatcctgtagattctactctgattgtgattcctgaatcaatacctgttttctataccagcccctatttctccctttgctacctactgtgaggacatctatgaaaagctcctgactggtttcacttttccagtttttctttacctcttgtcca

SEQ ID NO: 407204 - DNA, 563 bp, Homo sapiens
ctccctgacctcaacaatcacttctccatggagagcatccacattgctatctttagttctagcttttctacagagctgcacacccacattctaaataacagctggttattggttcattcgttcctttgtccattcattcagtgtttatatagcatctatgaggcacctggatgaatacaacagggtctctaactttgagaagttcacatcgccatcaaatactacacaggcttttctaattcagaaagtttagaacttaattcattgtctttcctttaaaatctgttccttctctagacgtcccatttcctgccattggtattctcttcatccagttacgtgggcctacagctggggagtcatcttyaattcttccgttttttttttcttcctatatccaattagctacccaatcctgtagattctactctgattgtgattcctgaatcaatacctgttttctataccagcccctatttctccctttgctacctactgtgaggacatctatgaaaagctcctgactggtttcacttttccagtttttctttacctcttgtcca

SEQ ID NO: 407205 - DNA, 563 bp, Homo sapiens
ctccctgacctcaacaatcacttctccatggagagcatccacattgctatctttagttctagcttttctacagagctgcacacccacattctaaataacagctggttattggttcattcgttcctttgtccattcattcagtgtttatatagcatctatgaggcacctggatgaatacaacagggtctctaactttgagaagttcacatcgccatcaaatactacacaggcttttctaattcagaaagtttagaacttaattcattgtctttcctttaaaatctgttccttctctagacgtcccatttcctgccattggtattctcttcatccagttacgtgggcctacagctggggagtcatcttcaattcttccgttttttttttcttcctatatccaattagctacccaatcctgtagattctactctgattgtgattcctgaatcaatacctgttttctataccarcccctatttctccctttgctacctactgtgaggacatctatgaaaagctcctgactggtttcacttttccagtttttctttacctcttgtcca

SEQ ID NO: 407206 - DNA, 525 bp, Homo sapiens
gaaaatatgacataagtgaattcctttaaaatctgaaagtagagagtcttttaacttcactaaaaatctggaatccatagataaaattttgtgatgaatttgattatatgaagttttttaaaaaggcttttgcgttcatatarcattgtaaaagtcaaaagacaagtgacaaactaaaaagattatttggaacttatttcacagccaaatgattaagctctttaacataaatagttcctagaattgaagaagaaaaagacgaattccgaacatatccaaagacctgaactgagagttcatagaaaacgaaatacaaatattccttaaacaaatggaaaactcctcaacttcagtcatagagagacgagcatcaagactacaccatgctacctccccaccaaacaggcaaaaatcaaaattttaacaatatattctattggtaaggccgcagataaacaagtaccaccatatattgttgttaggaatgcaaaatgataccactcccttggaggagagtatgtcaat

SEQ ID NO: 407207 - DNA, 608 bp, Homo sapiens
ttataaagaaaaaaaggtttaattggctcatggttctgcaggctgtacaggaagcatagcagcttctgcttctggggaggtctcatgaagcctccaatcatgatggaaggtaaaaacagagcaggacgtctcatatggctggagcaggagcaagagacggggaggggtgctacacacttttaaatgatatctcatggtaaatcactcattcactatcatgagaacagcaccaagaagatggtgctaagtcattcatgaagcaccacccccatgatccaatcacttcccaccacacgccgcctccagcactgggattacaatttgacatgagatttgggcaggaacacagatccaaaccatgtcatggctgaatttaccaaatcaactgtgaatggaaagaagtgaatgaatgctagcaagtaaatgtatttcagattaaatttttttagggaactagaagtaaattgccctgtttaaaaaatkaatttataatggacttctagctttggcagcatgaagatgttgtcacattctctccaaaaagcaagtacagatgcttctagacttacaatcatgatatctacccataagtaaaaaaaaaaaaaatc

SEQ ID NO: 407208 - DNA, 527 bp, Homo sapiens
gtctcgcatatcactggctattagggaggcctgagagggatttgagaaacagaagctgaggaagacttgaggactcacttcaactttaagtgtgttttccaaaccactcactaataaatgtgaagtgggtagacaccttatggaaacaaagcctttgagtacatcctctatccaaataactgggtgatcactaaactatgaagacatgctggagggccaggctcattcctataatccctgagctttgggaggccaaactgggaggatcatttgaggccaggagtttgagaccagcctgggtaacatagagaagtctttccctgcaaaaacatttttttaaaatgtatctgggctagtggtgtgtgcctgtagtcctaattacttgggaggttgaagtgggaaggtcacttgagctcaggaatttgagattayggtgagctgtgatcaagctatcacactccagtccgggcgacattgtgacaccctgcctgtaaaaataaatgaatagataaatagacgcagggcag

SEQ ID NO: 407209 - DNA, 527 bp, Homo sapiens
tgttcacaaggggacttaggtgataggagtatctgctcttacccacatatgccccatctcccctgctgtcagtaaactttgacaggaacaggaactttcccasgaacaggagaggccaggctcctccgccctgcaaatggtacagacttcctgaggctccaccccaatctcccagtgcgcaggcgggcattattcagaaagaatcagctgggaaaagggcaggcttcatctgggatgggcagcccagtttttcagccttcaggctgttttagtcttgaaggtgggcttttgctgggggacctttggctgcctcctgtctctgtcactatcaaccaactggatctagttgacatctataaaatattttacacaactgtaaaatatacattactttcaggcatacgtgtaacactctcaaagggaccatatgctaagcattaacaaatgtctcaatatacatgaaaggactgaaatcatataaagtatattctctgatcccaatacaattctattaggaatcaacaaca

SEQ ID NO: 407210 - DNA, 570 bp, Homo sapiens
acgtggatggttaataaaaacatgtaatttctatcccccaaattgtacctatttaggattagatttcagaatcttatttgaaacttaaacaggctttagaaataattttgtcccactctattattatagagatgaataaatgtactttcaaggcaagtagagcgacttgccaagattacaaaaaaatgtctgcgacagagccgagtctagatgtttatcttctagtttccagccagatactagttttatggctagtttccgccatgctctgagggaggcacattttccatcatcttttatctcaacactgaatactgtttttgacacatagtaggaaatcaattaatactatttaaatgaatacaaatacatgatgtaaaatatatcagagaagtctattatgtgttttcagacaagcttttatttctacagtgtatatttttatgaaactgrtaggtatttttttagactaatgtgcaccatcaaatagcactcatttttgaaacattttgagcgtgatatgtatgtaccatcaaacggaattgagtaatatctgaagttgtactgggc

SEQ ID NO: 407211 - DNA, 570 bp, Homo sapiens
acgtggatggttaataaaaacatgtaatttctatcccccaaattgtacctatttaggattagatttcagaatcttatttgaaacttaaacaggctttagaaataattttgtcccactctattattatagagatgaataaatgtactttcaaggcaagtagagcgacttgccaagattacaaaaaaatgtctgcgacagagccgagtctagatgtttatcttctagtttccagccagatactagttttatggctagtttccgccatgctctgagggaggcacattttccatcatcttttatctcaacactgaatactgtttttgacacatagtaggaaatcaattaatactatttaaatgaatacaaatacatgatgtaaaatatatcagagaagtctattatgtgttttcagacaagcttttatttctacagtgtatatttttatgaaactggtakgtatttttttagactaatgtgcaccatcaaatagcactcatttttgaaacattttgagcgtgatatgtatgtaccatcaaacggaattgagtaatatctgaagttgtactgggc

SEQ ID NO: 407212 - DNA, 569 bp, Homo sapiens
actacttaaatatctgtcctgtccttcggagcttcaatatcacagagtcagttatacacaggagtaaatgcctctaaatagtccaagctaacctgagaagggaratgagacccataatttttcatgttttccaaagtcaaagactacaaaatgtctataatttgtccaaaaacatggtgaataaaacaagattattcagcatttcaaatctaacaactcataatactactgtttaaaaaaacctagcaactttcattttgtcatttctctcaatagaaaatatttgctaaagagtaaacaggtgattgtcataattataatcacacattagaagaattatttatgagagatttgtgtatttggacaattttttgtgataatatatcttttttattagccttctttagtcatagcactcattatagtgtatatgtgaaataatcacagtacaaaggcaaaaatatgactagcctcaaatttataaacaattcaaaataaaaatatacagattcattaagaaaaacgctaccttgtgttctttatccataatatcatcacaatacacactt

SEQ ID NO: 407213 - DNA, 598 bp, Homo sapiens
gacagccacataattttcattaatatcaatcatgtgtacaaatattttagcatgaattcttaaaagcttaccacgatttgagcacagttttgttgactgatgctttcaactttcaaggcagaagatattcaaaagtagcaaataccctctccagacttttttctctgaatgtgaaaagcctataattagcaagtattttgtcacttggtaagggaaatgcttcagagataaacaactcatrgactgtgaaacactgtagcagaattccaaacatttagatttggaagttttttattcattcgatatttgagtgcctgttaacgtgaatatgcagtgctgaattggacagattttactctaatggaattaagaatctggaagagaagacagacattacatttatgattatagataggatatactgtaggtaaggagaagtgttgaattttctgaatgtttatatcaaagtaatttaggtcaagattatgattcacaaaatgtggttctcagacaagtagcattaacatcatcaggaagcttcttagaagtgcaaattctaggctccacccaagacatactgagtcagaaatactgggga

SEQ ID NO: 407214 - DNA, 569 bp, Homo sapiens
actacttaaatatctgtcctgtccttcggagcttcaatatcacagagtcagttatacacaggagtaaatgcctctaaatagtccaagctaacctgagaagggagatgagacccataatttttcatgttttccaaagtcaaagactacaaaatgtctataatttgtccaaaaacatggtgaataaaacaagattattcagcatttcaaatctaacaactcataatactactgtttaaaaaaacctagcaactttcattttgtcatttctctcaatagaaaatatttgctaaagagtaaacaggtgattgtcataattataatcacacattagaagaattatttatgagagatttgtgtatttggacaattttttgtgataatatatcttttttattagccttctttagtcatagcactcattatagtgtatatgtgaaataatcacagtacaaaggcaaaaatatgactagcctcaaatttataaacaattcaaaataaaaatatacagattcattaagaaaaaygctaccttgtgttctttatccataatatcatcacaatacacactt

SEQ ID NO: 407215 - DNA, 611 bp, Homo sapiens
gcatcctttggaggcttgacggagactttgattgccatttggccttaagctccatatcaagctaacatgaattagaaaattattcccacactgctstaaaggtgaagccatagactccatgtcagatcctcggcacatatgtaattgagtttgtgccataaatagcaaggtagtacagaagttacgtgaaaattagtctgtactatagttacaaatatgtatagtaaaaattgtgattaaattcagggcattttaaacttgagttgtccttttattattcggagacaaatatagtaaaatctagaggagtggttttaccccaaaagcccaagaattattcatcagcagaacaaaggcataaattgaggcctcttgaatcccaatccttttgtactctttaatacaggtactcttggatttatggtgagtttatgtcccaattagcccatcataagttgagaatatcataagtcaaaaatgcgttaaatactcccaacctaccaaacattatagcttagtctagcctgtcttcagtgtgctcagagtacttacattagactgtagttgggcaaaatcacctaacacaaagcctattttataataaggtgttg

SEQ ID NO: 407216 - DNA, 528 bp, Homo sapiens
tatagacagcacatagtcatatctttctcttttaaacaagttagttaccatatccatcacctcccttacctatcatttaagtagaataatattctattataaatagtatttctgtatgtggagcattaaggataatataatgagggctcaaaagaagacaaaaaagactaaaaaaatgtttaaaacttcttagagattggttcagttgtcatgaccagaatgctgacagaaatattaacagtaaaagccattcagatgagacctcagatggaaataggactatcttactgggaactggtgtaaaggccatctttgttagacattagcagagaacttgatcatattgtgtccctgtcctagggctttgtagacatwtctaagcagcaaatgttcaggctgctgcctggttacttctaactgctagtgaactgctagaaagaagggaagtagagtgaaaagatttggtcaatttattgcttgaccatgtggtagagaataaaactgttttcagaagaaaagccaagggtg

SEQ ID NO: 407217 - DNA, 464 bp, Homo sapiens
aatggaataattcttgaaagaatggattgttataaagtgaagttgcctctccaatttggcctttcttttgtgtgcctccttccccttccatttctcttccatgtcatgatgaagtaaaaggccctcatcagatgctgatcaaatgtggcttcccaatgttgcactttccagcctccacaatgctgagccaaaataaacgtctttttttttwaaatagattacccagtctcaggtatcctataatagcaacacagaacagatgaagacaggtagcataaacattttcacaatatcaatttttctaatccatgaacatggcatatctttccattgatttgtattaccctgaatttctttcctcaatgtttatagttttcagtatataagttgatatagtttggatgttgtccccacctaaatctcctgttgaactgtagtccccagtgttggagaggggcctggtt

SEQ ID NO: 407218 - DNA, 506 bp, Homo sapiens
tgtttgtccttttacgtgttttttttctttaagtccttcaatgctgctttcttttgtgtttatttttataatgcccttctttgatctcttctcatttcctctcgaattttttttcttatggttatgttggtcatcataattcatattttaaatttakaacaatttagtttgaactaattttatcttatgttcaatcacatacacaaactgtttttatacagcttcacccttacaatattgtttttgtcacaaattacatctatatatattgtgtgaccattaatctagatttataattattattatacatttttcttttaaatcatgttaatataagaaatataaagatgagtcacaagccaaatatacaataagactgccttttctatctacctagggagttatcattactagagttttttgtttcttcatatagcttcaaattattgcctatatttttccacttcatgctgaagcctccctttgacatttttggagggcagttc

SEQ ID NO: 407219 - DNA, 506 bp, Homo sapiens
gtatctatggcagccttatcaaatgtaattcttaattaccaacattggaaaatcaaaattactccttgatccgtasgctgcagaatggatgttgtgttagcaggcatgaaaacaaccattaatattgatgtacatcttcatcagggctcttgggtaaccaggtgtattgtcaatgagcagtgatattttaaaaggaatatttttatgagtagtaagtctcagtagtggatttaaaatatttagtaaaccatgctgtatccaagtgttgtcagccaggctttgttgtttcatttataaagcacaagctgagtagctttagcatgattcttaagggccctagggttctgaggatagtaaatgagccttggcttccacagaatgtcaccagctgcattagcccctaataggagagtcagcctctcctttgaagctttgaaaccaggcattgacttttcctctctagctatgaaagtcctagatagatcaagaccatgctggctaacacg

SEQ ID NO: 407220 - DNA, 440 bp, Homo sapiens
ctcttgcttttcccatgtgacatggctcctcccctttcacctcctgccatgagtaaaagctccctgaggcctcctcagaagctgagcagatgcccgtgctatgcttgtacactctgcagatccataagccaattaaaccattttatttataaatttcccagtctcaggtatttctttatagcaatgcaaaaatggccaaatacactatcaattamtgaatcaaccacttatctatctttttaaaagggaaatgaaaaatggttgagttaattttcaacatatactacatgtgcttcatttaggtggaatagtgttctattataaagagttacctaattttttagtttcaatttatgctcattgtaaataattctataataaatactgttatgaatatacctctgagaatgagcaattttgaaggctaggttactagaaat

SEQ ID NO: 407221 - DNA, 616 bp, Homo sapiens
aagatgtcaaattatcttaattttaaaaataaatttgtagtcatattttagcataatatgtcttactatagaacaggccattctgttatgacattttcatcaatagtatatttattttctcaaaygacttgtcatgctttcatttcaaagctttttatactgatctgatccaattaattattattataattaagatattgataattgctcacagaaaaaccagcaatatgtttcaataaaatatatttttcaacagagtttcctggaagagaaattaaatcccggttttagcctaacgttagtattaaaaacataagtgtattaaataatgccattttgaagttaggagagaatgattaaacaagctcctttgaaatcatctggaattatggtaattcctatttttgttctcagttttgggtaactggttgcaaactgatgccaccttccactcccctaacccctgcccgacatcgaatttagacacctctaggacttataaattgcttaattatctgtgttgtgacataaatgtccttagggagcatatgaatcttagaagacaagtaaattagaatatttgctaaatatgaccctgtggtaattaagagtcacg

SEQ ID NO: 407222 - DNA, 602 bp, Homo sapiens
actactatttcttctttaaatatttcacagaattttgaataaggccatgagatagagggcttttattttagagaagatattaaattgctaattcaattttatagttttattcatactctcaaattctcattgaccccactttggtaatttgggtccttccatgactttatccatttttgctagttatctaaattattataataacatttttataatatattaaaatgtctttagggtcctaatgatgtcatctctttcattgtcagtcttggtaatttgtgttttcyctcatgtttgtagtaaatctaggtaagattttgtcagttttgttggtctttttaaagaattaacttttgggtatatttccatcttaatctttattattttcttccttctgtttgctttgaataactttgcttttctgttgttaagtttcttaagattaagctagggatattaatttgagaatattattcttccctaaaatagacatttaaaactataaattcccccaaaactaccgttttagttgcattctataaatgttgaaatgttggattttagtcttcattcagtccaaaatattttacaatttcttgtga

SEQ ID NO: 407223 - DNA, 602 bp, Homo sapiens
actactatttcttctttaaatatttcacagaattttgaataaggccatgagatagagggcttttattttagagaagatattaaattgctaattcaattttatagttttattcatactctcaaattctcattgaccccactttggtaatttgggtccttccatgactttatccatttttgctagttatctaaattattataataacatttttataatatattaaaatgtctttagggtcctaatgatgtcatctctttcattgtcagtcttggtaatttgtgttttccctcatgtttgtagtaaatctaggtaagattttgtcagttttgttggtctttttaaagaattaacttttgggtatatttccatcttaatctttattattttcttccttctgtttgctttgaataactttgcttttctgttgttaagtttcttaagattaagctagggatattaatttgagaatattattcttccctaaaatagacatttaaaaytataaattcccccaaaactaccgttttagttgcattctataaatgttgaaatgttggattttagtcttcattcagtccaaaatattttacaatttcttgtga

SEQ ID NO: 407224 - DNA, 596 bp, Homo sapiens
ggtttcccaaatttatttgtgtagttgatttctaatttaattctatttttgccagagaaaatattctcattcataaggaaaaatcatattcactgttattcagtgacatagactttgcaaaatctcagaacactgtgattttgtttattctaagaaaaaaawttttctaatttatagaataattgaaaataaggcaagaaaagaataaaaaaagagtatgccaatttaatgtatgagttccttctagcaataatcaatatttaaaaatgtaaacacttaagaagaatttgagttaaaatgtaagtagtccatgatctccttattataaataactactcaagaatatcttttcttaagtgaggagtaattgaaaaaaatgtacccttcttattttaaggattaagacaggtacatttaaaatcaaacataaggtaaggttttaattcaacagatattcctagtaagtttatataaaccatattaagtagttggaaatgcctaattatggattttaaaataaataatccaagctcatccttacgtagtgaaaggtaagaaaaaaagtaaaaattcttactattgtcatctccataagg

SEQ ID NO: 407225 - DNA, 634 bp, Homo sapiens
gtttcccaaatttatttgtgtagttgatttctaatttaattctatttttgccagagaaaatattctcattcataaggaaaaatcatattcactgttattcagtgacatagactttgcaaaatctcagaacactgtgattttgtttattctaagaaaaaaaattttctaatttatagaataattgaaaataaggcaagaaaagaataaaaaaagagtatgccaatttaatgtatgagttccttctagcaataatcaatatttaaaaatgtaaacacttaagaagaatttgagttaaaatgtaagtagtccatgatctccttattataaataactactcaagaatatcttttcttaagtgaggagtaattgaaaaaaatgtacccttcttattttaaggattaagacaggtacatttaaaatcaaacataaggtaaggttttaattcaacagatattcctagtaagtttatataaaccatattragtagttggaaatgcctaattatggattttaaaataaataatccaagctcatccttacgtagtgaaaggtaagaaaaaaagtaaaaattcttactattgtcatctccataagggaaatgtaagtgaagtatttccataaatcctactatatg

SEQ ID NO: 407226 - DNA, 596 bp, Homo sapiens
ggtttcccaaatttatttgtgtagttgatttctaatttaattctatttttgccagagaaaatattctcattcataaggaaaaatcatattcactgttattcagtgacatagactttgcaaaatctcagaacactgtgattttgtttattctaagaaaaaaaattttctaatttatagaataattgaaaataaggcaagaaaagaataaaaaaagagtatgccaatttaatgtatgagttccttctagcaataatcaatatttaaaaatgtaaacacttaagaagaatttgagttaaaatgtaagtagtccatgatctccttattataaataactactcaagaatatcttttcttaagtgaggagtaattgaaaaaaatgtacccttcttattttaaggattaagacaggtacatttaaaatcaaacataaggtaaggttttaattcaacagatattcctagtaagtttatataaaccatattaagtagttggaaatgcctaattatggattttaaaataartaatccaagctcatccttacgtagtgaaaggtaagaaaaaaagtaaaaattcttactattgtcatctccataagg

SEQ ID NO: 407227 - DNA, 598 bp, Homo sapiens
ccagaaaagccaaattttctagagacaaagarcagattgcctggtgattgaattttacctatacaatggctaaatttttaagatatgaacattacacccccaaaatgagagacatggaaggagtaatcagagccatttccagatgtaatctcagcctcttaccatagggatgatatggactggaggaaattctcaagaatgtgattattttaattatgatgggaacaaggtaactataaagaatagaaaacaaacattttagagataagccctgattccatttctgtattgaatttacagataattgtttagacactacttttgatcgaaataacatatataagctatttagacttaaaagaaaaagacatgtagaaagtttcctctagttgaacaaaaccttcaactgctttctgtattcctattttgactctcgaaaagaaagaaaatgaaaaggcaaacaatgggtgaagagcttttattcaactacattcttttacctgatatgttttaggttcaataaaagccaattttatgagtttgtggatatatatacacacacacatatatacgtattgagcattgcttgaatattgag

SEQ ID NO: 407228 - DNA, 598 bp, Homo sapiens
ccagaaaagccaaattttctagagacaaagagcagattgcctggtgattgaattttacctatacaatggctaaatttttaagatatgaacattacacccccaaaatgagagacatggaaggagtaatcagagccatttccagatgtaatctcagcctcttaccatagggatgatatggactggaggaaattctcaagaatgtgattattttaattatgatgggaacaaggtaactataaagaatagaaaacaaacattttagagataagccctgattccatttctgtattgaatttacagataattgtttagacrctacttttgatcgaaataacatatataagctatttagacttaaaagaaaaagacatgtagaaagtttcctctagttgaacaaaaccttcaactgctttctgtattcctattttgactctcgaaaagaaagaaaatgaaaaggcaaacaatgggtgaagagcttttattcaactacattcttttacctgatatgttttaggttcaataaaagccaattttatgagtttgtggatatatatacacacacacatatatacgtattgagcattgcttgaatattgag

SEQ ID NO: 407229 - DNA, 602 bp, Homo sapiens
ctccagtgtcatgttatatgtatgacagatgcttacagtcaacaattgccactgcaaacagcattggttagcaactgtattaaacttagacgtactgttggtgatttgggtggacttaacagttgtcaaaatttggggtaagtcagttttcatcttgtgagtttgatttttttttttttttagtctgggtcatgctctgttgcccaggctggagtgcagtggcacaatgtggtctcactgcaaccaccacctccctygttcaagtgattcgtctgcctcagcctcccaagtagctggaattacaggcacgtgccaccacgcccggctaatttttgtatttttaatagagctgtagtttcaccacattggccagggtggtctcgaactcttgacctcaggtgatccacccacctcagcctcccaaagtgctgggattacaggcatgagctaccacgcccggctgtgagtttgattttaatataaagttttctaaccacatgaaagagtttctattgttttgattaccatggctataattgatctcaatttttttcatgcaggcaatattagcattgtgatacataaaatatatactcaattta

SEQ ID NO: 407230 - DNA, 602 bp, Homo sapiens
ctccagtgtcatgttatatgtatgacagatgcttacagtcaacaattgccactgcaaacagcattggttagcaactgtattaaacttagacgtactgttggtgatttgggtggacttaacagttgtcaaaatttggggtaagtcagttttcatcttgtgagtttgatttttttttttttttagtctgggtcatgctctgttgcccaggctggagtgcagtggcacaatgtggtctcactgcaaccaccacctcccttgttcaagtgattcgtctgcctcagcctcccaagtagctggaattacaggcacgtgccaccacgcccggctaatttttgtatttttaatagagctgtagtttcaccacattggccagggtggtctcgaactcytgacctcaggtgatccacccacctcagcctcccaaagtgctgggattacaggcatgagctaccacgcccggctgtgagtttgattttaatataaagttttctaaccacatgaaagagtttctattgttttgattaccatggctataattgatctcaatttttttcatgcaggcaatattagcattgtgatacataaaatatatactcaattta

SEQ ID NO: 407231 - DNA, 634 bp, Homo sapiens
acaggcatgagctaccacgcccggctgtgagtttgattttaatataaagttttctaaccacatgaaagagtttctattgttttgattaccatggctataattgatctcaatttttttcatgcaggcaatattagcattgtgatacataaaatatatactcaatttaattctttgggagtgaccaccagctctctccttaactgactactctctagggataaaaaagcaatttgaggaaatttgggccatgtaaagatattgtaaacatcaaaattgtgagaaacaaaaactaaatataatatgaattcaaattgtgtgtgtatattcacataaaatctgtccaacttccaacagttgaatgactggaattatttctaacttctgagatttgatattggttctatgactaaagaacaagctggaaaggactaccatgttattagaccacccataggtaaaattattttcaaggcttacatagtaaaacatatattttatatatatatayacacacacacacctttgtttgcattattatactagatattgtggctataaaacagaatagaatatgaaatttgtcctcaaggatgtaaaagtacatttatctttttctttcttctcagaacattgt

SEQ ID NO: 407232 - DNA, 470 bp, Homo sapiens
caaattgtgtgtgtatattcacataaaatctgtccaacttccaacagttgaatgactggaattatttctaacttctgagatttgatattggttctatgactaaagaacaagctggaaaggactaccatgttattagaccacccataggtaaaattattttcaaggcttacatagtaaaacatatattttatatatatatatacacacacacacctttgtttgcattatyatactagatattgtggctataaaacagaatagaatatgaaatttgtcctcaaggatgtaaaagtacatttatctttttctttcttctcagaacattgtaataaatgtagtacattttcctctgtagaattagtaaccatagtattcatttgaatattcagtggtaatgtgagtttcaatttttagctttataggtactttctagtgactgatataataggtttcagaggcccattaactct

SEQ ID NO: 407233 - DNA, 571 bp, Homo sapiens
ggtcatggaagcacagtgtggaatagtggctaagatggtcatgggagcacagtgtggaatagtggctaagatggtctggggagacggaataatgtgaagttattatttaatgagtacgaaatttcagtctggaatgatgaaacgtgtcaggacataacagtgatgatgtttgcactrcagtgtgaaaacccttaacaccactgaactgtacacttaaaaatggttaaaatgatcattttatgttacatatattttatcacaacaaaaatagaatattttaatcttgacaaacgtaaccacagaaaacaacttacaaaatagaatttcagaaatttttgctaaattggaatacatgctgttttatttctacgagaagatggatagtaggttatttggagctgaagaattataatgcagcttccccaaattgtgatctcctatgtggcagtggttagaaacaaataaaattcttatctcttatccttaaagaaaatcgaaattaccacacatgtatttattcagatagctgttctgagttagacggcaaaatagagcttttattaaaaagtag

SEQ ID NO: 407234 - DNA, 493 bp, Homo sapiens
actttatcagtaaaatgttttcaatagatgaaactcatagcaagtcaatacaccattttccacttaaatttgcattattttacattggattctaattgatccatacagctcgattgtctccccatctagtttgcagttgatgagaatgggaatgacacattatatttattttgtatcttcatatgtgttgctgtacatactatatacaatgatagagtgctgtgtatatattatattctcaaatgattcaatttgattcaatttctgatagtgaaatacccagctacctgattctgctggttttcaatgttactttaattggcgtgaatttccagcaattagctttccttcaccatacatactttataaccctctagactgctcaagttggctgggcctggtcttcctgacccagaccattrgatgtttaagatcacattccaggcatgaggatggctgcacatctattacctcacagattgtcaagcttgat

SEQ ID NO: 407235 - DNA, 608 bp, Homo sapiens
ttataaagaaaaaaaggtttaattggctcatggttctgcaggctgtacaggaagcatagcagcttctgcttctggggaggtctcatgaagcctccaatcatgatggaaggtaaaaacagagcaggacgtctcatatggctggagcaggagcaagagacggggaggggtgctacacacttttaaatgatatctcatggtaaatcactcattcactatcatgagaacagcaccaagaagatggtgctaagtcattcatgaagcaccacccccatgatccaatcacttcccaccacacgcygcctccagcactgggattacaatttgacatgagatttgggcaggaacacagatccaaaccatgtcatggctgaatttaccaaatcaactgtgaatggaaagaagtgaatgaatgctagcaagtaaatgtatttcagattaaatttttttagggaactagaagtaaattgccctgtttaaaaaatgaatttataatggacttctagctttggcagcatgaagatgttgtcacattctctccaaaaagcaagtacagatgcttctagacttacaatcatgatatctacccataagtaaaaaaaaaaaaaatc

SEQ ID NO: 407236 - DNA, 529 bp, Homo sapiens
ttgggtcacttttcctctctgaagactacttccacagttctcaaagtgagaaggcagaaatgaaagcactttcccttttctgtttgtgcccctaaattcccctgcaccttcagtcttcctttggccaggtaacttccttttgagttggctagcttcctctgcctgctgcttagggatacaggagagatggtccattcgagaaaggactctaatctttgtcttttgtgtatrgagtaaataggtacttggccaggattccctgagctcttgctcccaggctgactcgtttgcctgtgttctgaggaaacaggcagagtgtgtcttcccaggacagcccgggggcattcagagtgatcaccccagatgctgccaggtttttgtgtgtcttccaaactaagacttttatacaaactaaaattagcctttgaggatagagaactccctaaatggaaacatgtagcaaagtggatggagggatggcaaaatggggcaaggctgtctcacctgcatgttttggcgaaaaatggtg

SEQ ID NO: 407237 - DNA, 608 bp, Homo sapiens
ctcagtgtgtgtgtgtgtgtgtgcacgcgcgcgcgcacacgtgtgtgtgtatatctcagatctttgtttttagtgactcacatatgtgctcctgagytgctttttgtggacgacagggcatatacctccctattcttctcagtcctttcggacatgcactcattttatatcacctcagggatggctccagccttcctacccaattcttaagtattagaagacaggttactcccaaacaactaggcggtgtctgatacccttgtggcaatcaagtgatgctctacaaagctgctttgtagagctgacctgagtggctagggtctttgtagagatgagctgagtggctagggttagattaaggcttggaggggtccaagaaaaatgaacaagttacaaggctgtaaccctctgaaaggccacagaattattagtgatattttgagttttaattattgatagcaactcagtaatttaagtagttaatcaactcaagaataaatacaacttagcaggaagtaattaaaaaattgagatgtttaactggaggagttttaagctttgaagttatctattcagtcagaatagttgcacaaaataccaaattattc

SEQ ID NO: 407238 - DNA, 554 bp, Homo sapiens
tgtgccattccttcaatccattcttgctatatggaatatagatctgtcacatttccctgcaggccagaataaaattcacatttctttgcataacacttgyaactctgactcttatttaatgcttcagcattgtatctctctgccttcatgttggttggttcttccaggaagcagacaccaacatgggattagaaatgcaaaagatctattggggaaagataatagggaaagggaaaaagagtaggtagggaaactttagactgcaataccaagtgagacacatgaaaaagaaaggaatcaagtacaatcagataggaagagcattgtactgcaatgtaactctgagcaacaaggaacttttgtgcaaagatcatctatagaggagtccccattggttgggagtggcaagccttgcttggttattggctggagctaccttagtagagcatgacctcagcttcaaagccgtggcagatcctaaagacacccacagctaggagctgtcagctaactctactccttgtggcagattttgtcttgaaaataaatctgag

SEQ ID NO: 407239 - DNA, 536 bp, Homo sapiens
tctaaatggaattgggaaagcaaaaaaaaaaaaatttgtccagataataataatgaaaggctttaattatccaaacacagagcagccaactgttcagtcagaaggagaggtgcgagagacaatgggaatagatgtcaataaactgagaactgctttctaaatcccacaaggaaaggaatggagggaactttcatcctaaacaggatcagaaatggacccaagagattgtgttgggtgaaccactaagtaacaactaatacagtaattaaattctacatcctcatgggacaggggaaaaccatgaaacaaattgcacacactttagattttttaaagggaaatatgatraatatagtctctatttaggagacatttgaaataaaaaactttaaaaagtcaataacccacaagaaaagcctaaataccttgttgttattgttgtttgctttccacgaaaagcatataccaaggaataaaaataacaaccattagaggtaggaactaaaaagagaactattagagccatataaattatc

SEQ ID NO: 407240 - DNA, 539 bp, Homo sapiens
taggacctgaaattgaaactttgcatttcttatggacctttaagatacaaatttcccatttctgaagaactttttaaagttttgctgcaaatgtattgcttggaagaaatataactgaacttccttgtagttacatttaatattgttttactttaatcagaataattcaactaatgacatttaactctaaggaaaacagtggtattatattattggttgaaaatagatggtccactggggaaaaatatccaatgtgaacattctttgatagtagagtaagattttaatatttttcaataaaacttaacactgtttagctccttcagcaaaaggcttattctgtacacaagaatgtccttgagagtctacagtgagaataytctttccgtatgatgaactccaatctcagacttgctgcttaatcattggtggtgcatagtgggccatggtgcaacataatttaattttcattttgtctggaactgcctcaaagtcttagcttcacaggtatatacttggagttagttttatataatatc

SEQ ID NO: 407241 - DNA, 620 bp, Homo sapiens
tcatctgagccttcagtgagttgtaatctttttgctggtagaggatcctcaatgttgatgactgctgactgatcagggtggtggctgaagtttggggtggctgtggcaatttcttaaacaataaagtttgccacattttacccacagaacttctttcaaaattggagtcaatactctcaaaccctgctgctgctgctgcatcaactaagtttatgtaatattttaaatcctttgttgtcatttcaataatgttcacagcaccttcaccagggtggactccatctcaagaaaccactttctttgctcatccataagcagcaactcttcatcccttcaagttttatcatsagattgcagaaattcagtcatatgttcagcctctacttttaattccagttttcctgctatttccactacatccgcagtgacttcctccactgaagtcttaaactcttccaagtcatccatgaggattggaatccacttcttacaatctcctgttaatgttgatattttgacctcttcccataaatcacgaatgttcttaatggcatctagaatgctgaatcctttccagaaggatttcaatttactttgctcagatccatcagaagaatcac

SEQ ID NO: 407242 - DNA, 552 bp, Homo sapiens
tgatttaacctacagagagggacaactgaagagaaacttctcttcttcactggcaactcaataacaagaacatggaaaccatggtataatatttttttcagcttacaaaggttagaargaacactccgttaaaaaaatagagcattgcctttcatttccacatatccccagcttcccaaatagtcctcctacttttttcttacaaactcgagagaaaaaatttcccttggtactcattataaaaccccagaatgctcttgacattgccattttaactgtctattgttctcctaactccaggaaatctctgaaagccagacataatgactgttgtgacggttttcagtaacaagaagtgaagtttcctgtcaaaagaagtgctctctccattttcatcatatgtaaaacaagatgcttccatgagcaccttcatagacagatgagcttctttgagaccctgaaaatgtactacataggatgaaagaacgaatcaaaatgacagataaatgtgtgggagtttttcccttttagctatagcaaactctgatttat

SEQ ID NO: 407243 - DNA, 605 bp, Homo sapiens
aagcacccacaaaacaaggcttacagaatcggctttgctctttaccatctgtcatctattttaatacatattataggaaaggcacagtgcatggtggtaggggaggcagaggcgtcagcattgtgtgtttggatgaggtgaggccattcagcatataatctgaagagacaagaaagcctgtgctgatcaattagtagagacatcctatgagtctctctcatctccatgtctcactttaaaataccacaactactgagcacaatggctcacagttgtaatcccagcaccttgggaggccaaggcaggaytgcttgaggtgaggagtttgagaccagcctgggcaacatggcaagaccccatctctacaaaaattttttaaaaattagctgcatgtggtcgtgcatgcctgtagtcctagctacttgggaggctgaagtgggaggatcatttgcacccaggaattcaaggctgcagtgagccatgattgtgccactgcactccagcctgagtgacagagtgagaccctgtctgtaaaaaccaaacaaaaaccaccactgcatcctcaggagtgaatacaggtgagcctttgaacactgcccacctgt

SEQ ID NO: 407244 - DNA, 605 bp, Homo sapiens
aagcacccacaaaacaaggcttacagaatcggctttgctctttaccatctgtcatctattttaatacatattataggaaaggcacagtgcatggtggtaggggaggcagaggcgtcagcattgtgtgtttggatgaggtgaggccattcagcatataatctgaagagacaagaaagcctgtgctgatcaattagtagagacatcctatgagtctctctcatctccatgtctcactttaaaataccacaactactgagcacaatggctcacagttgtaatcccagcaccttgggaggccaaggcaggattgcttgaggtgaggagtttgagaccagcctgggcaacatggcaagaccccatctctacaaaaattttttaaaaattagctgcatgtggtcgtgcatgcctgtagtcctagctacttgggaggctgaagtgggaggatcatttgcacccargaattcaaggctgcagtgagccatgattgtgccactgcactccagcctgagtgacagagtgagaccctgtctgtaaaaaccaaacaaaaaccaccactgcatcctcaggagtgaatacaggtgagcctttgaacactgcccacctgt

SEQ ID NO: 407245 - DNA, 602 bp, Homo sapiens
ctgcctagtacttaggtaagctggaccaaaatttagccgcaggaccctggctcctagttgtgaattattggagcctatacttggatagaataatgaaatgatggttattgtgagggtattgcagaagcacaggccagtaacagttaaatctttggagacctttgatggtcctgaatcaaacacaggtgtagccattattcagagacaagccagcaagaggaaaggagatgctgatatcaacaactcattttagcagagtgtatcaagcctgaaaagatttagaaggctatttttaaaagccctgcattttgtgcctgatttataaggcagacactaaaaatattaataagtataaatggtgctgatccatgaacaygatgagctttcaagttctggagccacaaggtgacagactgccatgaagatgcttgcatcttcataatatcctgaagggatccaactttaaagaagaaaacattggtattttaaatcccagtttggcatttaactgtgttaagtcattctgttacattggcatcacttaaatagccttaaaaataaaaaataaaataaaccagattgtactacacatcatagaagct

SEQ ID NO: 407246 - DNA, 496 bp, Homo sapiens
atataatagaatactttcaagttctctaagaatatttagtgacatagtaaattataagatgtgtgaaaatgtaagatatatgtccttaaattcagtatgatcttaattttataaaataaaaatatatccctatatgcatgtaaattataccggaagaaaaaactccaaactgctaaccaatgagtttctgtggatgctgactgcatgggagattgccccactcttaaaaatgcgcctttgaaatttcttacgataattcttaagagaatggtagtgcattgacttctcaagctttacttggcaatataygaatatattatttctttatagtaatgcgaaatgacttactgatgcttactgatggctttgtcccaaaagtgtctgcctacagctgagatgggaaagaatcctaaagatacaagggcctcacgcccctattacttaatcccaacaatacagcagctatgtaatagttcccttttaaattaaatgggag

SEQ ID NO: 407247 - DNA, 484 bp, Homo sapiens
agactataaggcagaggaaatggggtaaaaaaatgaaaacattcattttatatttggaatttcagataaagaggcaagagactcttcccctaactttacattgtctttggactatgctttgaacaggctgtattctctaaatgttagctaagttcaataatttgcagagatgagatttaaaaatataaaaagcaagaactattcctcgaagaaagaaatagtaaaagaagagtcaatcctaacaaaagctgaaaggtaggraactgacatcatgaggcctcgcgaggtgcttctgttagtgaagacgactgtctggtataactgaaacacaccacactcaaatctaggttcctggaaaagagtctcaaacccaccacccactcactgcgtgtcctggagaaaccccttccccctttgcactatggtttccttaataaaagagctggtcttgatgacattcactcccactctatgatctcacgaa

SEQ ID NO: 407248 - DNA, 524 bp, Homo sapiens
tattcagaacacgtgtttctctcattgcctcaacactcattactccatttgcttaactaatccttgttcatctgggaagtctcagcttagaaaacaattccttccagaagacttctctgcccctgagttcttgtttatgagcctgataggctacatttaaagacgaatctagaatcttggaatctgttttctctttcccagatcaattcaacagaatattcaaaataaaagataaaatccctctggagtagaataaaaattctaaatyggtttcctcctttctagaggctggagaggaatgtataattctacattctgagttctcgaaggagaggtgtgcatacagaagaggaaatgttgatattagccactgaccaagctatcttaagcctgctccttgtggtcttatgcaacttttatttgttcattaatttattcattcatccatcctttcaatcattcaacaaacatttatgactctctattgtattctaggcaataaattagatctggaagtaaaaaag

SEQ ID NO: 407249 - DNA, 584 bp, Homo sapiens
gagtcattactccttttagaatgggatgaggycaggcgtggtggctcaagcctgtaatcccagcactttgggaggccgaggcaggtggatcacctgaggtcgggagttcgagaccagcctgaccaacacggaaaaaccccatctttactaaaaataaaaaattagctgggcatagtggcacatgcctgtaatcccagctactcaggaggctgaggcaggataatggcttgaacccaggaggtggaggttgtggtgagccgagatcacaccactgcactccagcctgggtgacagagtgagactctgtctcaaaaaaaaaaaaagaaagtgatgagagctatgaccttcctctcctgaaaaatgtccatacacacagttttctacacaatcttggtggattcagagacccattaaggtacatgaaacctatccatgtaccctaggagaatctgtgctccagtaaatattaaaaatgtaatttgttgtaagaaattatttagctttagctgaatcaattaattagtttccagaaatattggacagccgttctcagactagaggttggtggaaaagttccaaggcag

SEQ ID NO: 407250 - DNA, 584 bp, Homo sapiens
gagtcattactccttttagaatgggatgaggccaggcgtggtggctcaagcctgtaatcccagcactttgggaggccgaggcaggtggatcacctgaggtcgggagttcgagaccagcctgaccaacacggaaaaaccccatctttactaaaaataaaaaattagctgggcatagtggcacatgcctgtaatcccagctactcaggaggctgaggcaggataatggcttgaacccaggaggtggaggttgtggtgagccgagatcacaccactgcactccagcctgggtgacagagtgagactctgtctcaaaaaaaaaaaaagaaagtgatgagagctatgaccttcctctcctgaaaaatgtccatacacacagttttctacacaatcttggtggattcagagacccattaaggtacrtgaaacctatccatgtaccctaggagaatctgtgctccagtaaatattaaaaatgtaatttgttgtaagaaattatttagctttagctgaatcaattaattagtttccagaaatattggacagccgttctcagactagaggttggtggaaaagttccaaggcag

SEQ ID NO: 407251 - DNA, 614 bp, Homo sapiens
atggtcctggctctatttggacctgcacagctgtgagtggagtgacccatggcagcacaaacagcccgtcatttcaatgaattatttaaggctcttacacttcccttcaagtagctggatcatggtggcaccacatacagagaacaagttagtrtttccttagagaaatgcagcttttgttgaaagagagtctgaagagaagagattcagcagggcttcttcaactgctggttgaggaaagaatgtagtttgttactgaagggtgatggagattgggatcaactttctcaacccagctgctgactgctgaggtgaaaacagcagagataaaacatttgctccagtttctcttcagactctgtgaagatccccatcccctgtattgaatttttaaaaataaaaagcaaaaaatatagaattgtatctaattggtcttaacatatatccatgtttcttctgaacaggaagatttgtatgtagataaccacacgttgccagaagattaaaatcttcaattttaactttaaagaagcattaatcttacagtataagtgaaagattaactcaaatttgtgcatatataatttttctacaaaaacaaaacaaaattatgt

SEQ ID NO: 407252 - DNA, 614 bp, Homo sapiens
atggtcctggctctatttggacctgcacagctgtgagtggagtgacccatggcagcacaaacagcccgtcatttcaatgaattatttaaggctcttacacttcccttcaagtagctggatcatggtggcaccacatacagagaacaagttagtgtttccttagagaaatgcagcttttgttgaaagagagtctgaagagaagagattcagcagggcttcttcaactgctggttgaggaaagaatgtagtttgttactgaagggtgatggagattgggatcaactttctcaacccagctgctgactgctgaggtgaaaacagcagagataaaacatttgctccagtttctcttcagactctgtgaagatccccatcccctgtrttgaatttttaaaaataaaaagcaaaaaatatagaattgtatctaattggtcttaacatatatccatgtttcttctgaacaggaagatttgtatgtagataaccacacgttgccagaagattaaaatcttcaattttaactttaaagaagcattaatcttacagtataagtgaaagattaactcaaatttgtgcatatataatttttctacaaaaacaaaacaaaattatgt

SEQ ID NO: 407253 - DNA, 463 bp, Homo sapiens
gaatattttcataataaaaagatttctcaaaagttttttaaaaaatggtaatttaagcaagcttttacaaggttatacatttggggaagtacaatataaatataatatcaaattggtttgcacgatgaagttgaattgacagctttgcatgattaaaacctaaatatttgcaccaaagcactttattattcaaggtaaaaatttataactgaaacaattatttatatagtcctatggagaaacaactgccttgtctcctatatttaagtttttttcctctaaaataattataaataaatgtaakaaagtagtccttcccattagtaacaaaccaccagtaatgcatgaaaatatgatacctttgattgccatttgactttcataattttaaataacaaaaattattattattattatagtcttctccttatgagatacactctgaaaatgatccattgtaccc

SEQ ID NO: 407254 - DNA, 530 bp, Homo sapiens
atattaaattaaataatagatatttcattatttgaatattttccaatagaaatatattgtaggaaaaaattctttctaaaaaagtgtcattctaaaaaaggcgaacaattttgtctaattcaaagcttatttaaaggttatgggccagtcatggtggctcacacctctaatcccaggactttgggaggctgaggcaggtggatcacctgagaacaggagttcaagaccagcctgaccaacatgcgagaaaccccatctctactaaaaatacaagattasctgggcgtcggtggcgcatctgctcaatcccagctcctcgggagactgaggcaggagaattgcttgaacctgggaggtggaggttgtggtgagccgagatcgtgccattgcactccagcctgggcaacaagaacgaaactctgtctcgtaaacaaaacaaaacaaaacaaaaatttctgtgcagtgcagaaggtctttacttttgccttttggtaactggcctaacagattttattgtttattgaaacaat

SEQ ID NO: 407255 - DNA, 612 bp, Homo sapiens
gcagcgttagtttcaagtacaacacatagaatcatcatgtagcagagtacatctggaattcttccagagcagtgagaagtttatttgcactggaactagtaaatatcatatcttcacccttaaaaataatcaggaataaagcgtgatgaaaatgaatgggaaacttctcatttttctcttatgtatctgctgtaattttctataaataacattccaaaagaaaaaatacaatgaatgtcagaaatgcataagcattgtcaggaagcatatgaaaatagcatatgtcaggaagcaaaacaggatctcagtcactatagtagctgctgtattatttttggcatgtctttctatatggatgtggaatttaaacaaagaaagaactagaacataggcaaatatcacagtgtaaatggtatattgtggtacacctttttttgtttttttgagacaaagtcttgctctgttgcccaggctggagtgcagtgtcacactctcagctcactgcaacctccgcctcctgggttcaagcaattctcctgtctcagcctcctgagcagctgggattacaggcrtgcgccaccatgaccagctaatttttgtatttttagtaga

SEQ ID NO: 407256 - DNA, 636 bp, Homo sapiens
aggaacattactgtaccatgaaatcagtgtagtggggtttgtctgcmtgtgtatgagacagagaaattgaaaaaagtagaaatattgcagaatagaatagaaagcagggaagatactgttttatgaaactgtatatatatagtaggttgtgatgtgaaaggtaggtattatatgtcataataatcaatatttgaaacaaactcatgtatgtctgttatttcttatgggcattattttcctattatttgtcttttctatagaagttatatttctcaatttttttattctctcttatctttcagacttgccttcaaggtgtgcaagtaaggacttatctccagaaaagaacacttatgaaacagaattatcccaatgggaaatgagtgacagacttgaaaactgtgatcttgaagagtccaattccagggattatttggaagccaaaggcaagatggagaagcaacaagaaaatcagaaggaatatttcaggcaagggatgatcatatatgacaaaatgtccattttcaaccagcatacttacttatctcaacattcaagatgtcattctactgagaaaccctataaatgtaaggaatgtgggaaagccttcagacgagcctcacacctaacacaaca

SEQ ID NO: 407257 - DNA, 636 bp, Homo sapiens
aggaacattactgtaccatgaaatcagtgtagtggggtttgtctgcatgtgtatgagacagagaaattgaaaaaagtagaaatattgcagaatagaatagaaagcagggaagatactgttttrtgaaactgtatatatatagtaggttgtgatgtgaaaggtaggtattatatgtcataataatcaatatttgaaacaaactcatgtatgtctgttatttcttatgggcattattttcctattatttgtcttttctatagaagttatatttctcaatttttttattctctcttatctttcagacttgccttcaaggtgtgcaagtaaggacttatctccagaaaagaacacttatgaaacagaattatcccaatgggaaatgagtgacagacttgaaaactgtgatcttgaagagtccaattccagggattatttggaagccaaaggcaagatggagaagcaacaagaaaatcagaaggaatatttcaggcaagggatgatcatatatgacaaaatgtccattttcaaccagcatacttacttatctcaacattcaagatgtcattctactgagaaaccctataaatgtaaggaatgtgggaaagccttcagacgagcctcacacctaacacaaca

SEQ ID NO: 407258 - DNA, 636 bp, Homo sapiens
aggaacattactgtaccatgaaatcagtgtagtggggtttgtctgcatgtgtatgagacagagaaattgaaaaaagtagaaatattgcagaatagaatagaaagcagggaagatactgttttatgaaactgtatatatatagtaggttgtgatgtgaaaggtaggtattatatgtcataataatcaatatttgaaacaaactcrtgtatgtctgttatttcttatgggcattattttcctattatttgtcttttctatagaagttatatttctcaatttttttattctctcttatctttcagacttgccttcaaggtgtgcaagtaaggacttatctccagaaaagaacacttatgaaacagaattatcccaatgggaaatgagtgacagacttgaaaactgtgatcttgaagagtccaattccagggattatttggaagccaaaggcaagatggagaagcaacaagaaaatcagaaggaatatttcaggcaagggatgatcatatatgacaaaatgtccattttcaaccagcatacttacttatctcaacattcaagatgtcattctactgagaaaccctataaatgtaaggaatgtgggaaagccttcagacgagcctcacacctaacacaaca

SEQ ID NO: 407259 - DNA, 636 bp, Homo sapiens
aggaacattactgtaccatgaaatcagtgtagtggggtttgtctgcatgtgtatgagacagagaaattgaaaaaagtagaaatattgcagaatagaatagaaagcagggaagatactgttttatgaaactgtatatatatagtaggttgtgatgtgaaaggtaggtattatatgtcataataatcaatatttgaaacaaactcatgtatgtctgttatttcttatgggcattattttcctattatttgtcttttctatagaagttatatttctcaatttttttattctctcttatctttcagacttgccttcaaggtgtgcaagtaaggacttatctccagaaaagaacacttatgaaacagaattatcccaatgggaaatgagtgacagacttgaaaactgtgatcttgaagagtccaattccagggattatttggaagccaaaggcaagatggagaagcaacaagaaaatcagaaggartatttcaggcaagggatgatcatatatgacaaaatgtccattttcaaccagcatacttacttatctcaacattcaagatgtcattctactgagaaaccctataaatgtaaggaatgtgggaaagccttcagacgagcctcacacctaacacaaca

SEQ ID NO: 407260 - DNA, 601 bp, Homo sapiens
gctagcatctagaccctggcagaagctagccaggctcaataagtatttgttgaatggataataaatattcaaatactgaggcagtatttcccttttaggagccatattaaatgtggctcttctaaggacccgtgttttcaaactgaaattactttataaataggagttacttagaagcaattttcaaatgagtcaatacccattacattttaaactcaaatattactaatcwataacatagagaaagatgtctgagtagagaaaatatttttctgtagctaaagtattttccactggctacaattagaaaggtcactaggagatttttaaagcagccattagccacttctcagtaactaatataaactgaccatcactggactgtctgctagttctaataatcatgtaataatctaaaatttgaatgaattatattctgaaattttgtgatttacttataaatcttcaatggttatcaattacatatctttcattttttctgattaaaataactgcattatttatttcattgtacttattgaaataccttattattttacaatgtgttaattcagtaaagtctctttaaaaaacattgagg

SEQ ID NO: 407261 - DNA, 607 bp, Homo sapiens
tctacaatttattatatatttgaatactgtaatactttctctttcttttttattttttctccacaccatgattctgtatctctcctttttaaactacataattttctgttaatattacatatttaactttttctgttttttgcatcattktagaagttttttagaaaattagcccttttggctgagtacagtggctcatgcctgtaatcccagcacttgaggaggccgagacgggcagatcacctgaggtcaggagttcaagaccagcctggccaacatggtgaaacccagtctctactaaaaatacaaaaattaatcgggcatggtggtgcaagtgtgtagtcccagctactcaggagactgaagcaggagaatcgcttgagcccaggaggcagaagttgcagtgagctgaggtcacgccactgcactccagcctgtatgacagagcaagactctgtctcaaaaaaataaaaaaataaaaaataaaaaataaataattgcccttttacagatttcatgcattttgtttcatatattagtaattcacttcttacataagtgttaacaattttgattagaagttcttagtcttctcatttctaactgc

SEQ ID NO: 407262 - DNA, 607 bp, Homo sapiens
tctacaatttattatatatttgaatactgtaatactttctctttcttttttattttttctccacaccatgattctgtatctctcctttttaaactacataattttctgttaatattacatatttaactttttctgttttttgcatcattgtagaagttttttagaaaattagcccttttggctgagtacagtggctcatgcctgtaatcccagcacttgaggaggccgagrcgggcagatcacctgaggtcaggagttcaagaccagcctggccaacatggtgaaacccagtctctactaaaaatacaaaaattaatcgggcatggtggtgcaagtgtgtagtcccagctactcaggagactgaagcaggagaatcgcttgagcccaggaggcagaagttgcagtgagctgaggtcacgccactgcactccagcctgtatgacagagcaagactctgtctcaaaaaaataaaaaaataaaaaataaaaaataaataattgcccttttacagatttcatgcattttgtttcatatattagtaattcacttcttacataagtgttaacaattttgattagaagttcttagtcttctcatttctaactgc

SEQ ID NO: 407263 - DNA, 607 bp, Homo sapiens
tctacaatttattatatatttgaatactgtaatactttctctttcttttttattttttctccacaccatgattctgtatctctcctttttaaactacataattttctgttaatattacatatttaactttttctgttttttgcatcattgtagaagttttttagaaaattagcccttttggctgagtacagtggctcatgcctgtaatcccagcacttgaggaggccgagacgggcagatcacctgaggtcaggagttcaagaccagcctggccaacatggtgaaacccagtctctactaaaaatacaaaaattaatcgggcatggtggtgcaagtgtgtagtcccagctactcaggagactgaagcaggagaatcgcttgagcccaggaggcagaagttgcagtgagctgaggtcacgccactgcactccagcctgtatgacagagcaagactctgtctcaaaaaaataaaaaaataaaaaataaaaaataaataattgcccttttacagatttcatgcrttttgtttcatatattagtaattcacttcttacataagtgttaacaattttgattagaagttcttagtcttctcatttctaactgc

SEQ ID NO: 407264 - DNA, 503 bp, Homo sapiens
tattgaatgatcactaagttctacgctttttctctagatgctagagatagaagtaaataatcagaaaaatatataaaacatactatggtgaataagaaagaactatgaaggtgtatagaaagtataggggcttaagatttttagacgrtaaagtgctaggagactcctcaccagtaaaatgacatttgcataatgacctaaaagaggtgagcaagtaagccattctggtaattgataaatgattattccaggaagtgggaagcccctctgaggtggcagcttccctggcttgttcaaggaacagtaagaagtgcagtgtgtctggagtgagacgaacaagagtaagagtagtaaggagatgaaggaaatgaggttaaagaagtaattaatatacagatcaggtagagtttaatagatcattataaggactttgaattttgctctggttaaaataggagccctttgagggactgagtgaagaactgaccttatctgccttagca

SEQ ID NO: 407265 - DNA, 598 bp, Homo sapiens
tgtgttcactatgacagtttgtgagatgataatgaagtttgaatattctttgcatctataattacataaaatctttgtcataccatataagcaaaaataatgaactgatggaagtcagcctgaatacctgtcactatccactgtttcagagattctctttagttcctcccacccccattatatttaggtgcttttctcttacctgaagagaacatgcttttttgagaaaatataaacattttagttttcaaaggattgctatgagaagaaaaacattgcaggtcaaactgacttgcagttaacacttccataataatataatagtaaatattttattgcaatattttaaaaaaattgcacgtctcatctcactggatacccactgcatctctgggtagcaagcaggagagatatgcccttcctgttttataatagatggcatttttactcaaagttcagatgtattaggtaaagctggatggctaaaaagaatgcagaagtgggacatctaagccctgtttttttcttttacactagaaaagcaaatctaccttcaatgayatattttaactttattgaatatgctgaaagactatct

SEQ ID NO: 407266 - DNA, 576 bp, Homo sapiens
gactctgagcagttagataattgtacacagcataattaggtaggtttgcatttgggtcagactttatagctttttctaaataccgctctgcccgtaggtctcaactttttcatgttagcaaagcaaaaatgattaggtctacgaatattagtaatgttggcttacaaagacaggccctctaagtgggagacagttataygaatcttggaagggaggtggaaaaagtgggttgtagaagtttatagcactgaaaaggcccacccaatgattctgatgtggcctccttcaaagtcctacatttaacattgtacatcattcctaaacaatattgtgagagaatcaagatgaatgataataatatgcttaataaagtgtattaatgaaccttggggggaaatgatagacattaaatttcttactgaattttattcttttttataacgataactgatatttattatttagcattttagcttgaaagttgcagactttggggataattttggagttaggtgttttctaagcaaaacttgttttttaaaaaagtattcatacaaagcacatttgtagcagctg

SEQ ID NO: 407267 - DNA, 513 bp, Homo sapiens
tacccagtaatgggattgccgggtcaaatggtatttctggttctaggtctttgaggaattgccactctgtctttcacaatggttgaactaatttacatttccactaacatgtaaaagcattcttacctcttggcagcctctgttgtttcttgacttttgataatcactattctgactggcgtgagatggtatctcatcacggttttgatttggatttctytaatcagtgatgttgagctattttccacatgtttgctggccatatacatgtcatcttttgaggtgtttgttcatgtcctttgctcactttttaatgtttgtgtgtgtgtgtgtgtgtcaatttgtttaagttccttgtagattgcaaaaattgtcttccattctgtaggatgtctgtttgctctaatgatagtttcttttactgtgcagaagctctttagtttaattagatctcattcgtcaatttttgcttttgttgcaattgttttcagcaattttgtcaggaaatctttg

SEQ ID NO: 407268 - DNA, 513 bp, Homo sapiens
tacccagtaatgggattgccgggtcaaatggtatttctggttctaggtctttgaggaattgccactctgtctttcacaatggttgaactaatttacatttccactaacatgtaaaagcattcttacctcttggcagcctctgttgtttcttgacttttgataatcactattctgactggcgtgagatggtatctcatcacggttttgatttggatttctctaatcagtgatgttgagctattttccacatgtttgctggccatatacatgtcatcttttgaggtgtttgttcatgtcctttgctcactttttaatgtttktgtgtgtgtgtgtgtgtcaatttgtttaagttccttgtagattgcaaaaattgtcttccattctgtaggatgtctgtttgctctaatgatagtttcttttactgtgcagaagctctttagtttaattagatctcattcgtcaatttttgcttttgttgcaattgttttcagcaattttgtcaggaaatctttg

SEQ ID NO: 407269 - DNA, 513 bp, Homo sapiens
tacccagtaatgggattgccgggtcaaatggtatttctggttctaggtctttgaggaattgccactctgtctttcacaatggttgaactaatttacatttccactaacatgtaaaagcattcttacctcttggcagcctctgttgtttcttgacttttgataatcactattctgactggcgtgagatggtatctcatcacggttttgatttggatttctctaatcagtgatgttgagctattttccacatgtttgctggccatatacatgtcatcttttgaggtgtttgttcatgtcctttgctcactttttaatgtttgtgtgtgtgtgtgtgtgtcaatttgtttaagttccttgtagattgcaaaaattgtcttccattctgtaggatgtctgtttrctctaatgatagtttcttttactgtgcagaagctctttagtttaattagatctcattcgtcaatttttgcttttgttgcaattgttttcagcaattttgtcaggaaatctttg

SEQ ID NO: 407270 - DNA, 556 bp, Homo sapiens
tttttcatttaatatgtcctgtgtacctatttttatttttgttacctgtgattttgaggtcttagtcataaaatatttgcctagatcaacgtattgaagtcttaccgttaaattttcttctagtgattttataattttaggtcttttatagtttcatgtctctaagacatattgaattgctttttgtatattgagaaagtaggagtccagtttcattcattttttttttttttttttttgagatggagtctcgttctgccacccaggctcaagtacagtggcgtgatcttggctcactgcaacctccacctcctgggttcaagcaattatcctgcctcagcctactgagcagctggtattacaggcatgcaccaccacacccagctattgkttttttctatatatatatattttttatttttagtagagatggggtttcaccatgttggccagtctggtctcgaactcctgacctcaagtgatccacccgcctcagcctcccaaagttctgggatgacaggcatgaggcaccacacccagtccagtttcattcttt

SEQ ID NO: 407271 - DNA, 583 bp, Homo sapiens
tctacttaataaataagatttcaaagcaaatgagtgcaagataatataatggtcaaatattaataggtattaatcaayatttattattaataattagtattattaatatcatttgggcattagtttaatggccaaataattagatggttaaataactataactaaaatatcattatacgtatatatgcaaatcacattacatttccctatcttgtttatgtagtaatattaataatttggatgattcaccagagtgtttctttaaaacagtattactcatagagcacaattgattccaggtggccagacttagtggtaatccatgaagattttgctagtcagcatgttcaaataacctgttgatatggtttggttgtgtccccagccaaatgtcattttgaattcccaagtgctgtgggagggacctggtgggaagtaaatgaatcatggggggcaggtctttcccatgctcttctcatgatagtaaataagtctcacgagaactgatgattctataaggggaaatttccctgcacaagctctctcttcacctgctgccatccatgtatgatgtgacttgttt

SEQ ID NO: 407272 - DNA, 583 bp, Homo sapiens
tctacttaataaataagatttcaaagcaaatgagtgcaagataatataatggtcaaatattaataggtattaatcaacatttattattaataattagtattattaatatcatttgggcattagtttaatggccaaataattagatggttaaataactataactaaaatatcattatacgtatatatgcaaatcacattacatttccctatcttgtttatgtagtaatattaataatttggatgattcaccagagtgtttctttaaaacagtattactcatagagcacaattgattccaggtggccagacttagtggtaatccatgaagattttgctagtcagcatgttcaaataacctgttgatatggtttggttgtgtccccagccaaatgtcattttgaattcccaagtgytgtgggagggacctggtgggaagtaaatgaatcatggggggcaggtctttcccatgctcttctcatgatagtaaataagtctcacgagaactgatgattctataaggggaaatttccctgcacaagctctctcttcacctgctgccatccatgtatgatgtgacttgttt

SEQ ID NO: 407273 - DNA, 583 bp, Homo sapiens
tctacttaataaataagatttcaaagcaaatgagtgcaagataatataatggtcaaatattaataggtattaatcaacatttattattaataattagtattattaatatcatttgggcattagtttaatggccaaataattagatggttaaataactataactaaaatatcattatacgtatatatgcaaatcacattacatttccctatcttgtttatgtagtaatattaataatttggatgattcaccagagtgtttctttaaaacagtattactcatagagcacaattgattccaggtggccagacttagtggtaatccatgaagattttgctagtcagcatgttcaaataacctgttgatatggtttggttgtgtccccagccaaatgtcattttgaattcccaagtgctgygggagggacctggtgggaagtaaatgaatcatggggggcaggtctttcccatgctcttctcatgatagtaaataagtctcacgagaactgatgattctataaggggaaatttccctgcacaagctctctcttcacctgctgccatccatgtatgatgtgacttgttt

SEQ ID NO: 407274 - DNA, 583 bp, Homo sapiens
tctacttaataaataagatttcaaagcaaatgagtgcaagataatataatggtcaaatattaataggtattaatcaacatttattattaataattagtattattaatatcatttgggcattagtttaatggccaaataattagatggttaaataactataactaaaatatcattatacgtatatatgcaaatcacattacatttccctatcttgtttatgtagtaatattaataatttggatgattcaccagagtgtttctttaaaacagtattactcatagagcacaattgattccaggtggccagacttagtggtaatccatgaagattttgctagtcagcatgttcaaataacctgttgatatggtttggttgtgtccccagccaaatgtcattttgaattcccaagtgctgtgggagggacctggtgggaagtaaatgaatcatggggggcaggtctttcccatgctcttctcatgatagtaaataagtctcacgagaactgatgattctataaggrgaaatttccctgcacaagctctctcttcacctgctgccatccatgtatgatgtgacttgttt

SEQ ID NO: 407275 - DNA, 621 bp, Homo sapiens
gtgttatgccttagcaaagaagttggctgcattctcttcaggctctatggatctatggaagtttgagcttgagagtgatagyctagggtatctggcagaaaaaacttctaagcagcaaagcattcaagatgtgtcctggctgcttctgacaaccaatactcagaagtgggagcaaagaaatgagttaacgttggaatttgtatttaaacaggaagcagagtataaaagtttggaaagtttgcagcttggccatgtgacagagaaagaagctttttctagagcagaattcaagcaggctgctgagcaaatacttgctacagaaatttgcataactaaaaaggagccaagtgttaatagccaagacaaggtgaaaaatgtctcaaaggcacttcagaggcttttgtggtggcccctttcatcacatgcctagagacataggagggaagaatggttccagggaccaggaccaaggctctgctgctctgcacagcctcagggcactgcttctcacatctcagccactacagcaccagccagggttcaaagggtccagatatacctcgaaccgccactttcgtccagatacacctcgaactgccactttggagaatgcaagtcata

SEQ ID NO: 407276 - DNA, 613 bp, Homo sapiens
tcaaatttaacacagtgaaatcaaattcgttatctcctcccatgatagagccattcaaatctatacttcttacatcctctatttcaaaattcaatcaattttcacttctgtcacatccaatcatttttcaaatgttgtctattctacttcttacacatttgagtctatttcctcttcatttccactgccactgacttagttcaaaatataacttcaaaagacaatttcttggataaaattagcacatatctaattttctaggatcctttctccacatttaccaaagcctttatttcatatgagtgtttttagttttaaaatgcaaagctgaccatgtagcccatctaattaatgctttcccaatgccaatgtgtaatgtacagtcttttagttcagcatacaaatatcttcattatctggctcccaaagtactttcccagtttcatctcttctgccgctttccttcacacacccttgcttcatttgactccttatgcttcttctttgaaatmcccatgatgccatcccaataccgttcgcatgccattttgatgaactgaaatgtccctttctgcttagtctgaggaaagccagatcacgcttcacactgttt

SEQ ID NO: 407277 - DNA, 623 bp, Homo sapiens
  misc_feature (1)...(623): n = A,T,C or G
aagtcagcactccttgtatattctctaaccactggcgaaaccagtctcagtttgaatgtggcgtggtttcaacatgaagtcaatcatattaaaagattttctttcaaataatttggcccagagaagagtcatggnttatttatttttctcttttatttatttatttatttatttattttacagctttagagggcagcagtgcaggtctgttacatggacatattgtgtggtggtaaaggctgggygtttagtgcactcatcaccagatcagtgaacattgtgccaaataggtaatttttcagctttcacccccctccaaacctccccaccactggagtctccaggtgtctctcattctcctctatatgtctatgtgtacccactgtttagctcccacttagaagtgagagagacatagtttaacggcaagaaataactccaatataaagcttctcacacctctagccatcttctttaatcacccatctcatttatagttttgtgagtaactaaattctgtgctatttatgtaggtttgaccgaagaaaaatccccttcaacttttgaatagtttggaatatgcctgttaaagtggaaagaacaatcaagtctatttcttctga

SEQ ID NO: 407278 - DNA, 623 bp, Homo sapiens
  misc_feature (1)...(623): n = A,T,C or G
aagtcagcactccttgtatattctctaaccactggcgaaaccagtctcagtttgaatgtggcgtggtttcaacatgaagtcaatcatattaaaagattttctttcaaataatttggcccagagaagagtcatggnttatttatttttctcttttatttatttatttatttatttattttacagctttagagggcagcagtgcaggtctgttacatggacatattgtgtggtggtaaaggctgggtgtttagtgcactcatcaccagatcagtgaacattgtgccaaataggtaatttttcagctttcacccccctccaaacctccccaccactggagtctccaggtgtctctcattctcctctatatgtctatgtgtacccactgtttagctcccacttaraagtgagagagacatagtttaacggcaagaaataactccaatataaagcttctcacacctctagccatcttctttaatcacccatctcatttatagttttgtgagtaactaaattctgtgctatttatgtaggtttgaccgaagaaaaatccccttcaacttttgaatagtttggaatatgcctgttaaagtggaaagaacaatcaagtctatttcttctga

SEQ ID NO: 407279 - DNA, 623 bp, Homo sapiens
  misc_feature (1)...(623): n = A,T,C or G
aagtcagcactccttgtatattctctaaccactggcgaaaccagtctcagtttgaatgtggcgtggtttcaacatgaagtcaatcatattaaaagattttctttcaaataatttggcccagagaagagtcatggnttatttatttttctcttttatttatttatttatttatttattttacagctttagagggcagcagtgcaggtctgttacatggacatattgtgtggtggtaaaggctgggtgtttagtgcactcatcaccagatcagtgaacattgtgccaaataggtaatttttcagctttcacccccctccaaacctccccaccactggagtctccaggtgtctctcattctcctctatatgtctatgtgtacccactgtttagctcccacttagaagtgagagagacatagtttaacggcaagaaataactccaatataaagcttctcacacctctagccatcttctttaatcacccatctcatttatagttttgtgartaactaaattctgtgctatttatgtaggtttgaccgaagaaaaatccccttcaacttttgaatagtttggaatatgcctgttaaagtggaaagaacaatcaagtctatttcttctga

SEQ ID NO: 407280 - DNA, 623 bp, Homo sapiens
  misc_feature (1)...(623): n = A,T,C or G
aagtcagcactccttgtatattctctaaccactggcgaaaccagtctcagtttgaatgtggcgtggtttcaacatgaagtcaatcatattaaaagattttctttcaaataatttggcccagagaagagtcatggnttatttatttttctcttttatttatttatttatttatttattttacagctttagagggcagcagtgcaggtctgttacatggacatattgtgtggtggtaaaggctgggtgtttagtgcactcatcaccagatcagtgaacattgtgccaaataggtaatttttcagctttcacccccctccaaacctccccaccactggagtctccaggtgtctctcattctcctctatatgtctatgtgtacccactgtttagctcccacttagaagtgagagagacatagtttaacggcaagaaataactccaatataaagcttctcacacctctagccatcttctttaatcacccatctcatttatagttttgtgagtaactaaattctgtgctatttatgtaggtttgaccgaagaaaaatccccttcaactkttgaatagtttggaatatgcctgttaaagtggaaagaacaatcaagtctatttcttctga

SEQ ID NO: 407281 - DNA, 610 bp, Homo sapiens
cataaatgctaagcagttcaaatagataactctaataattastattgctttcacagtctgccaaattttaaattttagtattcatattgttagttcttcatggttcttcacgatctgttagcagaatcaatatttaccatttcacctaatatcctaaactgtttaatcatctcgtgtcatcactctgcacatatacaaatcctcacgcaggataagtctaataaactaaaagctaacttgaccttctatattttgctattttcaactaacagatctcctcctaacactcagaaccatgtttgaggtctggtctttcagattaatttttcccgcattttgtatttctcctcaactttccatatcactaaccccctcttttcagtgttcactctccatcttccagaaacgtcaagtagagagagtagaaagatgggatccatagtatttggattttctactttggattgacacagtgaaaaggtgcagctgggctccagggattacatggaaaaataataaatttgactcactgagtgaatacacctgcattaaggtagagactacatgaattagatcaaatctctaccctcattcttttcatagtataact

SEQ ID NO: 407282 - DNA, 420 bp, Homo sapiens
aatctttctacatcctaccacttgtacttttatttagcatatgtgttttgctactatgatttataaacattgttttatattgttgttctgtccacttaatmccactcacttccacactcatattgtaatttttttaatgaattttgcatctgtggaactgtagcagcgtgattagcattgactatgtgctcaataaatatcacattacaatagcttatagactcaagccaattttgaactgattctatgaacataaagtgtagcactgctgaagtgatatccttgactaggtgagaggggatgggatttttacatatgatgttgggttggagctttgattacgaattcaactaactgtgaaatccaaggagaagcagtatacgcagatgtggatagaaatggagtataaatctggaaaat

SEQ ID NO: 407283 - DNA, 618 bp, Homo sapiens
caccagctaaactcttggcaaatatcaatgtattttgaatcatttaactttgatcttcaaaacccttatttgcctttctggggaaaagagtaaaaacaacagtatcatagcaatctatttatacccctattttcagacagtcatgcttctatccaatatttatctagtttagcgaatcttatttctgttagygattgtttgtgcaataaatgtgctcctgtcacttcatctctatttcatgcttttatcatattcaatcctaatttgctctgaaggtttgctaacttttgctttaatcatgtcttttctcaaatagttcagatataatgaaatatattatgttcagtatttctctaatatttttctaccaaagaaaaataaaatattgatatgagatatattcacattgattgctatgaaggttacacatggattagtaaatcaaaacaagctctcaaaagctagaaaatcaattgatgtgtcagataggaaagacatagatggcaaaatcaaccgctgagttgacatctttcctcttgaaataatttaatttaccaaatttgaaaggttttgtgactatgaacacagtaataagctaaaaagcgggagaccaaacag

SEQ ID NO: 407284 - DNA, 618 bp, Homo sapiens
caccagctaaactcttggcaaatatcaatgtattttgaatcatttaactttgatcttcaaaacccttatttgcctttctggggaaaagagtaaaaacaacagtatcatagcaatctatttatacccctattttcagacagtcatgcttctatccaatatttatctagtttagcgaatcttatttctgttagtgattgtttgtgcaataaatgtgctcctgtcacttcatctctatttcatgcttttatcatattcaatcctaatttgctctgaaggtttgctaacttttgctttaatcatgtcttttctcaaatagttcagatataatgaaatatattaygttcagtatttctctaatatttttctaccaaagaaaaataaaatattgatatgagatatattcacattgattgctatgaaggttacacatggattagtaaatcaaaacaagctctcaaaagctagaaaatcaattgatgtgtcagataggaaagacatagatggcaaaatcaaccgctgagttgacatctttcctcttgaaataatttaatttaccaaatttgaaaggttttgtgactatgaacacagtaataagctaaaaagcgggagaccaaacag

SEQ ID NO: 407285 - DNA, 618 bp, Homo sapiens
caccagctaaactcttggcaaatatcaatgtattttgaatcatttaactttgatcttcaaaacccttatttgcctttctggggaaaagagtaaaaacaacagtatcatagcaatctatttatacccctattttcagacagtcatgcttctatccaatatttatctagtttagcgaatcttatttctgttagtgattgtttgtgcaataaatgtgctcctgtcacttcatctctatttcatgcttttatcatattcaatcctaatttgctctgaaggtttgctaacttttgctttaatcatgtcttttctcaaatagttcagatataatgaaatatattatrttcagtatttctctaatatttttctaccaaagaaaaataaaatattgatatgagatatattcacattgattgctatgaaggttacacatggattagtaaatcaaaacaagctctcaaaagctagaaaatcaattgatgtgtcagataggaaagacatagatggcaaaatcaaccgctgagttgacatctttcctcttgaaataatttaatttaccaaatttgaaaggttttgtgactatgaacacagtaataagctaaaaagcgggagaccaaacag

SEQ ID NO: 407286 - DNA, 618 bp, Homo sapiens
caccagctaaactcttggcaaatatcaatgtattttgaatcatttaactttgatcttcaaaacccttatttgcctttctggggaaaagagtaaaaacaacagtatcatagcaatctatttatacccctattttcagacagtcatgcttctatccaatatttatctagtttagcgaatcttatttctgttagtgattgtttgtgcaataaatgtgctcctgtcacttcatctctatttcatgcttttatcatattcaatcctaatttgctctgaaggtttgctaacttttgctttaatcatgtcttttctcaaatagttcagatataatgaaatatattatgttcagtatttctctaatatttttctaccaaagaaaaataaaatattgakatgagatatattcacattgattgctatgaaggttacacatggattagtaaatcaaaacaagctctcaaaagctagaaaatcaattgatgtgtcagataggaaagacatagatggcaaaatcaaccgctgagttgacatctttcctcttgaaataatttaatttaccaaatttgaaaggttttgtgactatgaacacagtaataagctaaaaagcgggagaccaaacag

SEQ ID NO: 407287 - DNA, 549 bp, Homo sapiens
ccacatcatcaccaaaactggttattttccatttgtgtttgtttgtgtgtttagttttgtttaataatagctgtcttaatgagtgtgaagtgatatttcattgtggtttttatttttatttccttaatgattggtgatactatttttacatatgattattggcaatttgcgtatctttggagaaatgtgaagtcttcgcccatttttaaactaggtgctcttttgttgttgacttgcaggagttctttttatgttataaatattaattccttattgtgtatgatttgcaartattgtctgtcattctatgggttgctttttcattctgatcatgtcccacttacacatgtttggaatttttgagtttaaatgtatttttttcttttgttgtctatgtgctgttgtcatatcattcctttacttatttaagcatgttttcaaaagttttttaaatgtatttataatagctgatttgaagtctttgtctgctaatttcaacatctggggcttctgaaaggcagagtcttttactaactttttttcttgtat

SEQ ID NO: 407288 - DNA, 595 bp, Homo sapiens
catatgaaaaaaaaaaaaaccgcaggattgataatgatatagctaagtataaaagatgttacaagtacataatgtctcatttcatagttgatttataaagcaattatgtaaaaattatgtacataattgtatcaggcttataacatatagaaatgtaatagatttgccaataatagcacaaaggagaaaaacaaaagcaatgctctcttggagtaagaacatgacatcagattgtaatccacagaaacaatgaagagaatcagaactgctaaaaagaaggttaatacaaaaatctttcctaacctgtcttctctcagcctctataaaagacataaaattatacaaagtaacaattatagctatgtattattgggtttataacacaatgacttaatatgtataacaataatagcaatcatacaagaagagagaatagagttatttatatatgagtaacatttctatatctaaaagtagtataaatctgaagtcarttatgataaactgagatatatcttgtattacttaggacaactattaagaaaacaactcaaacctaatgaaataaactattaaaataattgaaatattacac

SEQ ID NO: 407289 - DNA, 621 bp, Homo sapiens
tcgctctctctctttcagagctcaataataagaaaacaacctaataacagtcggcagaagattgaacagaatttctctgcagataacatatatgactagctaataagcacaatgaaaaaatcaataataattagaaaatgcaaatcaaaataattgtacaatagctaccactacatatatactcaaatgactaaaaaataaaattaaattaaaagctgaaaataccaactgctgggaagaaggtagagtagctggaagattgatatattggtggtaggattataaaagaatgcagccattttgaaaaatagtttggtaatttattataaagtaaaacatccacttaccacataacccagaaatcccatatttacccaaataaaataataacctatatttacacaaaatctgtatgtaaatatttatagagacttaatgcatagtaactccaaactggaaacaactcaaatgtgtgttacttgtgaaatgaatgaacaaagtgaggtatgtttataccatggattattactcagtaaccaaaarggagaactacctaatactaacaataatatagatgaactacctaatactaacaataatatagatgaatctcaaatacat

SEQ ID NO: 407290 - DNA, 567 bp, Homo sapiens
ttatcatgagaacagcaagagaaaaacctacccccaagtccaatcacctccctccaggtttctaccccaacattggggattacaattcaacatgagatttgggtgggaacacagagccaaatcatatcaaggtcataaaaagataccttaaaaacagaacaaagtggatctgtgtcaggggaatcttcacgaattggattagatttgatttgtgaaatgatatcttctctctttttatttatttatttatttttgaggcggagtctcaactgttgccaggttggagtgcagtggcactatcctctgcctcctgggttcaagcgattctcctgcctcaacctcccgagtagctgggactacaggcacacaccaccaygcccagctaatttttttgtgtttttagtagagatggggattcaccatgttgggcagaatggtctccatctcttgaccttgtgatccacctgccttggcctcccaaagtgctaggattataagtgtgagccaccacttccagcgacagcttctctcttctaatcaaaaggatagttttattttataatggtg

SEQ ID NO: 407291 - DNA, 567 bp, Homo sapiens
ttatcatgagaacagcaagagaaaaacctacccccaagtccaatcacctccctccaggtttctaccccaacattggggattacaattcaacatgagatttgggtgggaacacagagccaaatcatatcaaggtcataaaaagataccttaaaaacagaacaaagtggatctgtgtcaggggaatcttcacgaattggattagatttgatttgtgaaatgatatcttctctctttttatttatttatttatttttgaggcggagtctcaactgttgccaggttggagtgcagtggcactatcctctgcctcctgggttcaagcgattctcctgcctcaacctcccgagtagctgggactacaggcacacaccaccacgcccagctaayttttttgtgtttttagtagagatggggattcaccatgttgggcagaatggtctccatctcttgaccttgtgatccacctgccttggcctcccaaagtgctaggattataagtgtgagccaccacttccagcgacagcttctctcttctaatcaaaaggatagttttattttataatggtg

SEQ ID NO: 407292 - DNA, 560 bp, Homo sapiens
atgtatatatattttttaattacctgtgagaacacttataaagcatttctactttttctcagatcggaaacagttaggctttctatgagttttcacttcacctcacggattctgtaaaatctatcattcactgtgtaatctcccacctagtgactgctaaaaaaatgtaacagacaagctttggcctatctctgtgtataacacataaaacataatttgtagagaagctccagtaggcaccactttctttcccattcayaggttcccagtgtttcatctttcttcattatttcttagtgttttcgtattgttttattattcatatccttgtaactatattttttcttggtaaaagatagtgcaggaatatttaataaattaactatgtcaccttggaaaagaaaaagaaccttaattgataagacattagagtgcatttcattggagaaaaagaaatgttcaaaacaggacccctgtgtcatcatagttggatgatgaaatgaaaatggaacaaaaattgttgctttagacaagaaattacagtacaaaattgaaaacaa

SEQ ID NO: 407293 - DNA, 585 bp, Homo sapiens
ccagggggaatgtcagactcaaactcaaactaggaaaagctgctaactatgtagaaagacacttgtatgttcatgtggtctacaatagttggatgtcttttagaaaacagagcaatactgctaaaatttgtatgcttctctcatgattggtaaatagttgattagaaagacaaaatgcagtcatgacagattattttgcctctttgtgatcaaacagtgcttgctgttatgtgaatgtgtgcgtcctcatcccaccatccaaaattcatatgctacaatcctaactcaaaaggakgtggtattaagagatggagccttttggaaaagataaggtcattaaagtggaactctaatgaatgggtttagtgcccttataaacaaggtccaagtaaagaagatctacttgcttgcgcctttcaccatgaaagacaacagcaacaacatagcatctatgaaccagggaagggaacctcaccaggcattgaatctgctggcatcttcatactgtaagcagcctgcatggactaagatagtgcttcaatactctgttcaaatgtcagttacatttttgttgttgttgtttat

SEQ ID NO: 407294 - DNA, 585 bp, Homo sapiens
ccagggggaatgtcagactcaaactcaaactaggaaaagctgctaactatgtagaaagacacttgtatgttcatgtggtctacaatagttggatgtcttttagaaaacagagcaatactgctaaaatttgtatgcttctctcatgattggtaaatagttgattagaaagacaaaatgcagtcatgacagattattttgcctctttgtgatcaaacagtgcttgctgttatgtgaatgtgtgcgtcctcatcccaccatccaaaattcatatgctacaatcctaactcaaaaggatgtggtattaagagatggagccttttggaaaagataaggtcattaaagtggaactctaatgaatgggtttagtgcccttataaacaaggtccaagtaaagaagatctacttgcttgcgcctttcaccatgwaagacaacagcaacaacatagcatctatgaaccagggaagggaacctcaccaggcattgaatctgctggcatcttcatactgtaagcagcctgcatggactaagatagtgcttcaatactctgttcaaatgtcagttacatttttgttgttgttgtttat

SEQ ID NO: 407295 - DNA, 578 bp, Homo sapiens
ttaatttatttgttttacctttcttctgtatgacaggttgtgcctatagaaacagcctgaggtttctattgtttccatttgttcttaattaacatgtaataattgtacatatttgtggggtacagagtgatgttttcatacatgtttacaatgtgtaataatcaaattaggataattagcatatccatcacctcaaatatttatcatttctttgtggagaaaacattcagaattccctcttctagttattttgcaacgtacaatatattactgttaactatagtcatccwggtgtatattggaacaatagggcttagttctcctatcagactataactttgttgctttaaataacccctcccctttccccttctcccttagccttatcttgtctctgttaacaactattcaactctctactactttaagatcatttttttagattccacttttgagtgagctgatgtagtatttgtctttctgtgcctggccattccacttaacaatgtcctccaggctcatccatgttgctgcaaatgacaatatttcattcttttttatgactgaatagtattcca

SEQ ID NO: 407296 - DNA, 628 bp, Homo sapiens
aattaatcttaaataaacatattctcttaggcttgatactgtgttttacaaaagtttatcactgaattataaatctaggaggactcagaaacttgagtgaatgttgaaaccaaacattttgataccagcatataragctcacccctaaacctcagtatacagaatggggaacctgacctacttatcacttccaaaataacaccctttctaattgctatagtttcaatgtgcccctcaagatgtatatgttggtaacttagttcccaatgcaacaatatcaggaggtagggcctagtaagaggtgattgggtgattagggcaaagtcctcatgaatgaattaatgtagtcatcagttcaaggagtgtgatgctgtaaaagaagcccagacctttgggctctgtcttttgcacccacttcctggcccttccacccttctgatgtggaatgatccagtcagaaaaccattgtcagatgccagccccttgatcttggactttccagccttcagaatggtgagttaaatacatttctgttcattataaattacacaacctgtggtattctgtcacaagagccaaaagagattaagaaactaactgaaacctacttcctgtaactcatctttta

SEQ ID NO: 407297 - DNA, 493 bp, Homo sapiens
aacatctacctcttacccagttccaaagttgcttccacatttttgctttacagcagcaccccactacctggtaccaattaactgtattagtctattctcatgctgccaataaagacatacctgagatgggtaatttataaagaaaagaggtttaatggacccacagtttcacatggcttgagaggcctcacaatcatggtggaaggcaaaggaagagcaaagggacattttacatggtggcargcaagagtacaaatgcaggggaactgccctttataaaaccatcagatctcatgagacttattcattatcacgattaccgccatgggaagacaaccccctgattccattacctccccccgggtcactcttgtgacatatgagaattatgggagctacaattcaagatgagatttgggtggaacacagccaaaccgtatcaattctcttttgtcataaaaatggacaataagatgtacctgccaaccctata

SEQ ID NO: 407298 - DNA, 415 bp, Homo sapiens
acaatgaggtgcaaggagaattataggatgctttggagacacgacttttttatttcttcataatttcagtatctgtgaaatgscttttgtgctttttaccttgtcaggagtcatggtgcgtctacctgactgcttcatttgccactgtaatgccttgtatgcaattttttgttttttgtctgtttgtttgtgtgtttatttcaaataccttatatatatataaaatgaagtgttttagttcagtgagtatttctatacattggacgtaactctgaatttgctgttagtctacttcttgctgcacatatcttcccaaacttctgtgatgttatgcacagcccttctgctgtcttttcaatcaagacatgttcctcttttcaaatatactgaccagcattattctcagccacatctt

SEQ ID NO: 407299 - DNA, 654 bp, Homo sapiens
ctttggcttgtgggctagaaattgttagcttacctcctaataaatattctctccttttcttattagtaagaaagtgtttagctcagcaaatagacaacactgcattttctttttccattgaaactgtatttctgtgatgaattctatgtgtggaagtactgtgaacaacaccctgattagagtcttagaaggaaattttctcttttcatcctgcttgctggtaagaataagtacctaatgttgagccataatggttcatgaaagaaagacaataactttgcaacggtggagaaaaagatagctacatcctggatccctgggaaaccttgtggagcagagccattattccatctgttcttcctacttccagattgatattaatgagagatataaacttaacttaaaccagagctattttggctcacagttacacctacagcttaacatatatcttacctaataaacaatacctcatctttgcttatcttttattaattattaaaacacacatttaaccaaattataggcagcatacaataaaagtataaataygggcttttgacgctcctggtcctaacaattcacagaaaataaaaagcatagaagagcttgtaaaacacttctatgatgtattcagaaaaatttgcaatattg

SEQ ID NO: 407300 - DNA, 547 bp, Homo sapiens
ttcaataatttttgttatagtttattataattgttatgacttgttattagtcactgctattaatctcttattgtgcctaatttataaattaaactatatcataggcataaatgtacmcaaaaaacacagtatatatagggtttggtactacccatggtttcaggcatccactgagagtcttgaactgttcctccacagataagggggaactactgtaatagaaaataagattgctatgaaatacacacacaccacacacacacacacacactcactcaattgctcagttttggagaaaataaaattttctgagggctaaaagttaagtagaaatgagccagacaaatgtatatggaaaggtggaggaagaaattaaaactgagtggggcatggaagcatccgtttaggagagagaacaaatgcagacagctgagaaagagaatatcacagtcaaggattagaagtttatgaaattcgagagtgtgaagaaaattcactcaccctaccggttcctgagacaattctgacaaaagtggaagagatatta

SEQ ID NO: 407301 - DNA, 602 bp, Homo sapiens
  misc_feature (1)...(602): n = A,T,C or G
tcccattgaaaaggagggatttttggctagaagacccttatccagagcaaaatggggagaggaatttgtggttaggtcaatcaaggtccaaccagatgtcaagacagcagataatatcaagccttaattttaagtcttataccacagcttcaaattctttgtttattttctcttaatttgtattccatatcaagtgtgatcaaaagttattttaaaaatgtgtaatgtgtgaagtttcacagtgtctaccttcagctgggttaaggctacaattgtgtttgtccaaggtgttagtaaaatgtggagtttgagtatttttagttagagcatgtctttttcagtttcccacattcactgtgtttctctaaatgaaaataccttttaaaaaattttctttctgtatggctcaccgaatgcatttgaattggggatcattggtaccatttataaacttgtgacccatataaccaaattctcattaaggtgtgtcagtcaaagcaacattaaaataataaacagacttactttyccaatggctcgagtttcctatattgccaaataactagaannnnnnnnnnnnnnnnnnnnnnnnnnnnnnnnnn

SEQ ID NO: 407302 - DNA, 501 bp, Homo sapiens
tttcaaggttttcagtaatcactaatgttctacaataattgtctttacataaggctttcatttattttcttgcagccacagttttgctttgatttccaatttacaagccctagtataacctgtatgaaaatatagctatttaatattatatttatgttattgttcgaattcatcacaagctgtaccactgtcctttagaatgtgtttgataagcagaattctgaaaatatcatattttaaaaatagactacagtcaaatcttttagcaatttaatgmgtgatttctgatagacacaacagtgaaatatgtcattcaacctttaaaaagctgaagctgaaagtttaatgaagacatagttagactcatatttctttacaagtgccctgacattatagcccttctgtttcaacatttaattcagtgttgctgcttgaaatcttgctaaaatcaccttcaattgtttgtcctcttcctcccctttagatgaatatagaaacagc

SEQ ID NO: 407303 - DNA, 569 bp, Homo sapiens
ttttgttttgttttctcttttcttcagcactctaactatatcatcccactcccttttggccttcaaggttactgctgagcagtctgctgccaggcttattggaactcccttatatattattygcttcttttctttgactattatcagaattttctttctgtcttttaccctcgagttagattataatatgtctttgttaggcttatttgggttgaatctgctaggtgacttttgaccttcctcaacctggatatttatatattcttccaggtttggaaagttttctgttattatttctttgaataaactttttactcctttgtttttctaaattcactcctgaactcaaataactcaaattattgctctttgatgttgtcctataaatttcatatgttttcttacatctttttttaaactcctttgacagtatttttatataatgtactgtattttcaaatagcctactttgagctcactaactattcttctgtttgattgattctgccactgatgttttctattgcattatttagtttgtttattgtattttcagctccaggatttct

SEQ ID NO: 407304 - DNA, 577 bp, Homo sapiens
cttacatctggcaaaggtttcaattaaataaatgttaaattgtaatgcagtttttctcaatttataatacaatataacctcctttagattaagcattagatagcttactgaattagcatttttttgtagtgaaaagttgatttatatgctttccaaaatggatataattaagttgattttttttacttgccttaaaatttttacttaaatctctctcttcagcaacttatatgtagtgttagagttattgaagctattagaataagatctgtagattggcagctctctacagaagtcatacttgtaacaaattccttaactcytgtattctaaccaggggaaattgagtgaaattgtattgtcaaattgagaatcctaccagattattacaaataatccttgcatatttgtaaataataaatgaatataaagatgttgacttataatcattgaatttggtttctcattgacaagtacttagaaaacaatactttgggaatcatacattaaatttataaacctttatctaatatgataatccatcctaactatgttacaagaaaaggaatttgaaagt

SEQ ID NO: 407305 - DNA, 577 bp, Homo sapiens
cttacatctggcaaaggtttcaattaaataaatgttaaattgtaatgcagtttttctcaatttataatacaatataacctcctttagattaagcattagatagcttactgaattagcatttttttgtagtgaaaagttgatttatatgctttccaaaatggatataattaagttgattttttttacttgccttaaaatttttacttaaatctctctcttcagcaacttatatgtagtgttagagttattgaagctattagaataagatctgtagattggcagctctctacagaagtcatacttgtaacaaattccttaactcctgtattctaaccaggggaaattgagtgaaattgtattgtcaaattgagaatcctaccagattattacaaataatccttgcatatttgtaaataataaatgaatataaagatgttgacttataatcattgaattwggtttctcattgacaagtacttagaaaacaatactttgggaatcatacattaaatttataaacctttatctaatatgataatccatcctaactatgttacaagaaaaggaatttgaaagt

SEQ ID NO: 407306 - DNA, 539 bp, Homo sapiens
tctaatatgataatccatcctaactatgttacaagaaaaggaatttgaaagtgcttttaaatgtaaaggtctacagaaataacattggtataaaatgcaatattttcaataaccctacaattattatgcaacctgtagttatttatatragatcacaattgaactggaattacagaaaaagaaaggaattacagaattacagaaagaaagaaagaaagaaggaaagaaagaaagagaaagaaagaaagaaagaaagaaagaaagaaaggaaagaaagaaagaaagaaagaaagaaagaaagaaagaaacaaacaaacaaacaaacaaacaaagagaaagaaagaaagaaagaaggaggaagaaaagaacacactcagttctgtagaaccaaataaaaatcatttatctggccactctgctaacatccctccctagcacttgtctagcttagccacattttctgataggtttgtttacacttgctagagatcagccaccacccctggtgctcaattcagcctttagatacaggctggcag

SEQ ID NO: 407307 - DNA, 500 bp, Homo sapiens
aagtgcattcttcatattaattttttatattggcttctaaaataaaataattagaatatcaacaaaatgaggaaaatcatttgaaaggtataacacaatatggttagctcaaattgttgtactgcaaaggaggaatatagcacaatgtcagaaaaatgtctgaacttgttctcatatcatctcatacgtttaatactgacagtcacatgtcacatctctaagattcatgattttcayctgcaaaatgaaggtagaaattccccacatatgctccacagaactgatttattatactcaaaacatgtgacatgcttaaaaagcatttatgaactgtgagctttgtgaatataacgtatttttgctcatatagtcaaagtcatacattcattcgtgaatataaccagttagctttcctgtaactctggttaactgtattgaaagatgttgctctattacaaagtagggaaaaatgattgaactcagatgaatcaatgtaaatc

SEQ ID NO: 407308 - DNA, 594 bp, Homo sapiens
tataaggtggtcacataattgtattacttacaaggggggttgggaaatgtagattagctttgtgcctaaaaacaaaagtaaaatgatttggtgagcagttagccaaattttgccacatttcacttttcttgacatagaatatctacttctctcttcttgcgcacgtataatagacaccctttgtttgggatatatactaatcagtgatgatcaagaaataaaaacctctccagaatttataaaaggaaggggtttgatacaaggatttatatgctaaaaaaaacttataaaaggaaggggtttgatacaaggaattatatgcttaaaaacaaggaaaaatctacaaaagcaaatatcctggaaaactgctctgcactgtggyaaaatcagaattcttctgcgttttggagagactttttcatgattgcaattgcctgtaacatcagtgatttgtgtgtgctgactcaaaagctgctcaaaactcatgtccgctctctccttacacatctccctttctcatgaaagtgtctcattatttgtggaatctaacccagttctccctggcaagggaggctgggacatataatttcccag

SEQ ID NO: 407309 - DNA, 565 bp, Homo sapiens
catggtttagtatatgtttctgtttctttgtgggtcacattagtattctgcttctgtactagtcaaaatatgttaagtaatacagcaaaaactcctgtattgtcagtgaattaacaaaatactatcttacttctgggaaactctctaagatggctgttttgtaggaaycactctaggagtttgaatatgatgagaccttattgtttgaaaatcatggaacttccccgttggggttaaagtccacgcttggttcttctatagaacataggagggataagaacagatcattgtgccagagatccacacttgtcatctgtggcagaacacagttacctgacctctgttaaagaaaatgggatatgtagtctacccacgttcacagaaaacacacacacacacacacacacacacacacacgaaacaaaaacaaacaagcaaacaaaacttagcccatttctgcaacaagttgtttccaaaggcttagagtgaaatgtttattatacataaaaaatagctctagataatgaggccacattttaaaagaaacatgttaatgaatattatt

SEQ ID NO: 407310 - DNA, 519 bp, Homo sapiens
ggggtatagaaaaaaaatgcaacttacagactttctcactttttatatctagagagacctatatttatatatgaggacaagctgaaaactgacattctgagccccaatacaaggctagtacaatggtcatttgattcaggctttgagacctcagaagcagtttcaggagagaggggctgtaatactgctggtcctcccaggtggttctgacaaggtaagtacagctagaaccagtcctcagacccagaggtattagggytctcaagatcagaggaacaaaactctgggaagtcctctgacacaaaatttccaaaaacggctgtaagaaaacagagcggtaaatagggcatcaatatttccctccttctctggctgataagttaaagaaaagaaagttatgagttacgagcgcttggagagatcctttccaagctagaacttccacatctcccatttactgtccaaaggcttctccagctgtgcaaagccccagaattgaagggaagatttttctgtaca

SEQ ID NO: 407311 - DNA, 488 bp, Homo sapiens
tagaaaaaaaatgcaacttacagactttctcactttttatatctagagagacctatatttatatatgaggacaagctgaaaactgacattctgagccccaatacaaggctagtacaatggtcatttgattcaggctttgagacctcagaagcagtttcaggagagaggggctgtaatactgctggtcctcccaggtggttctgacaaggtaagtacagctagaaccagtcctcagacccagaggtattagggctctcaagatcagaggaacaaaactctgggaagtcctctkacacaaaatttccaaaaacggctgtaagaaaacagagcggtaaatagggcatcaatatttccctccttctctggctgataagttaaagaaaagaaagttatgagttacgagcgcttggagagatcctttccaagctagaacttccacatctcccatttactgtccaaaggcttctccagctgtgcaaagccccaga

SEQ ID NO: 407312 - DNA, 511 bp, Homo sapiens
acatgttcttggtgaaattaatattttatcattatcatgtttctttttatatatatgtcagcgtatttgtgtttgtgtgagtgtatacttgtgcacacactctaatagccattgtcttttaatttgcacaatagctgagttgaaatgaatgtaattatgtacacgtttgagtttaaatctaccatcttgctatttgctctttatttgtccccctgctctgtttttttttttyccccctcgttcctttatctttaggacaattatgtgtgcatgtgtgtgtatttaatttattctttgggacagtcatgtgtgcatatgtgtttgtatgtgtatgtatttaactatatttcctcctctattattttcagaattttttactctttcattatagtgttagtgcttagccgagagattacaacatacattttaaaatgacctatgtatactattcatgtgtacttctggcttattcctgggcaatgtaagcaacttagaacaatttaaatcaagt

SEQ ID NO: 407313 - DNA, 511 bp, Homo sapiens
acatgttcttggtgaaattaatattttatcattatcatgtttctttttatatatatgtcagcgtatttgtgtttgtgtgagtgtatacttgtgcacacactctaatagccattgtcttttaatttgcacaatagctgagttgaaatgaatgtaattatgtacacgtttgagtttaaatctaccatcttgctatttgctctttatttgtccccctgctctgttttttttttttccccctcgttcctttatctttaggacaattatgtgtgcatgtgtgtgtatttaatttattctttgggacagtcatgtgtgcatatgtgtttgtatgtgtatgtatttaactatatttcctcctctattattttcrgaattttttactctttcattatagtgttagtgcttagccgagagattacaacatacattttaaaatgacctatgtatactattcatgtgtacttctggcttattcctgggcaatgtaagcaacttagaacaatttaaatcaagt

SEQ ID NO: 407314 - DNA, 556 bp, Homo sapiens
aaacaattactgactgcacctcagtggctctgactcatttccacccatgcctaccctctaggatcagtgagagcagtactattttcctcttttttaatctcyttattggctaaaaatgtactatattttacaatgactctcaagagtctttattctaactttataggataaagatttcccagatatatataattgtttattttgatgaaaagtacttctatttctgttcatttggattttagctgacaaaacaaagtaaatttggaaaaaatacatggaactataaagaggaagttttaaaataaattatttccataaaagggtgatctccattgcctaaaggattttaagtacaccaaagaagttaataattacaatagttgattctgttgactatcataaatgacactaaaatgtggagaacaactctgactaggttaacattatttgattggttatcttacccttgttcaattcttttttttgcctatggttttgtaatttatgaagttgaaaaaataacaattacgttaacttttttttgctgttgattttg

SEQ ID NO: 407315 - DNA, 415 bp, Homo sapiens
ccatgattcaatcacctcccactgggttcctcccacaacatatgggaattgtgagagttacaattcaagatgagatttgggtggggacacagccaaaccatatgacatactaataatacagcccagtaatcacactcctgagtgtttatcctagaaagataaaatcttgtggataggaaaatctttatayaatgtactcagcagctttctttgcaaatcccaaactagaaaccacccatgtgtccttcagtgagtggatatggatggatttaaagaggcatggtacagtcatacaatggaaaactactcagcaatataagaaacaaataaattattgagataaaaacttggatcaactcaaggacattatgctcagtgaaaaaaatctcaaaaattgcatagtgttgcatgactc

SEQ ID NO: 407316 - DNA, 542 bp, Homo sapiens
tatgctcagtgaaaaaaatctcaaaaattgcatagtgttgcatgactccacttatatcatattcttcaaatgacggaaatacaatgatggaaaatgatcagatagaagttgccaagagttaggaatgggataaggatgtgacataaaaaggtagcaaatgggagtttctttgtagtgatcaagcagtctgacagtggtgattacatgaatttacccatacaataaaattccatagtactacattcctggaccacacacatactctctctctctctcwcacacacacacacacacacacacacacacacacacacacacacaaagtgtatgtaacaacctatgaattctgaaaaaatctgtaatttagttaatcattttgtaccaatgttgatgtcctggttttgaaatgacccctgggtaagtacaacatcatcattgtaaaaacatgggtgtagggtccagggactctctgtactgcttttgtcacttcttgtgattcttaaatttttcaacatgaaaatttaatctctatattaccaaga

SEQ ID NO: 407317 - DNA, 560 bp, Homo sapiens
actcattttaccacttcatatctaattggttatctaaggctttcctttattgtcttccaygagaattcaaatataacacgttcaaagttctttctcaaatttgggagaggactcaaatgctccagacctatacatctgtcagttattatccagaagattagtaaaatcaaagatccccatctgaattttttaaaaagtgctgcaaatagtagatctgaaaatgagccatggtctcctgaaaacaattcaagacactcccccaatatcatcaataatgttcttgaaagcagattttattggatgatcaaaatgttaagttttatgtatcattctataacttttttaaaaataaaagttttcattgctcaaaatccttaaaaataagtcaagtacttcatacatgttgcaaaacagttgataaatcatattctcctatagtggtattctaaatataaggcatttcaaaaatactcaccttggcatagcataaatagggcaggcaaaacatctgtgtaccataaaaaaaattgaagaatataaaaacgatgacaggatgggcc

SEQ ID NO: 407318 - DNA, 630 bp, Homo sapiens
caatttataatataagtaagttaaataaatacatttcattctcatacagtktgaccaacttgattggatatgctagaacacaaattggtattcaaaaatgttataaggaaaattaacaaaagatgttttattttcaaagtaaatacactttaaacaaaatacattataatgaatgatggaatatcaatatgtattaaaattatcaacttgaggaagatgtctgttattatcactatttgtaagattccttttgaaagttatgtttcatgaatttagaataaaacagaaataagagagctacagtggaagaagactaaaaggccattattttatacaatgtgtatatgcactaaaataccaaggaaataaattgaaaaactttggacacaaagaataattcagtacaatgcctgataataggaggtctataaataggttttctgaggcagaaaatagattgctaatattgccaaacagaaaaacactcagaagtcttatctataggaaaagggatgtatctttcttacaatacaacagaaaaaaattatatagaaagcaatatcatgatgtttttttttcttcacatacaggatttttgtttgtcactattaaacatctgaattttaaaca

SEQ ID NO: 407319 - DNA, 615 bp, Homo sapiens
ctggctgactgagctgggatgggatagggaggaagcaatctaagttcaaataccatagacttgactgttagtgaatgttagtagatgtccttgaatagatacttcttcattggctatgtgccctgaacaccattcctagacattttaattggtgcttttattaaataataattttcactaacttcactaggaggtgagtccaaaaggcttcttatgcagtcataccaaagactgttcttcaagaaatgtagtttcttctctttcttttacatttttgaataattttacttttttgagtaattgcctctaatgtctcattaacttggtctttttaaaaaatatggcatgagtcatttgtcaccactcatatggkctatatcattaactccatcttccttatttatttggaacagtacattaaaagattatattaattaagaaaatcaaatagctttataagcatcaaaaattaatgtcagcatcattactaagaaataaatggttaaaatgcagtaatatccttgttttagaggttcatagaggcaagtatgtttccaataaatgtttaacagtctccattaagctctcttagcacaataaaatcatttaatattg

SEQ ID NO: 407320 - DNA, 420 bp, Homo sapiens
aacagaagtcaccatcatacaccctgttgcatagagaataataatgtcaagagattatcaatttttggatactcacattatttgagacaataccatatcaagcattagatgaactatttcagcccaagtacccatagagaatcaacacactaccaaaaaaaatatttttctgyagctaacctagcatgaaaagcacagaaataaaataacaatccaagctggcattgttactgctgcagtcacttggatgattatgggcttttgaaagatggacatattttgaccatttcaatcatagaagatatggtcaattgacttgtagaagggatagaaatgaagtttcagattcactgttctatttttaccaaactataggacaaaaaagccatttatgactaatcagagttttgagattatttt

SEQ ID NO: 407321 - DNA, 468 bp, Homo sapiens
gttcatattagttttgaagcygaggtaatttagaggaaaacatcaaaagtccaatggatgttaataatattctttcactaatgacttagacgtgcactgatgactctcagggaaatgatgcagagcagttttctgaatctacaatatatcacacagaatactcttcaatatttcacccaaccttattttctgttgttttttttttgagtcttagtatttttttgcatattatatttttatttatctgaaaaactttgcatcttttctaagagatgtttgcacctcttctggaaatgttttgttatttatagcaccttacaacctttaaaagttggaataattaacttgagaaattcttctctttagtggctaacggcctggatttttaccccccatcatgaacaaattaaccatctctttgaaaaccaggtaatgattttttaaatgtgcaatttaaaatttcaaacc

SEQ ID NO: 407322 - DNA, 500 bp, Homo sapiens
cgtgacaaagacatttactaaagacttacaatctgccaggcaaacacaagttaatgacttaattttttattatctcctttaatatttaaaacaacctgatgtggtggctattattgcctgtttatagatgaagaaactgaaacatagattaagtaatttgcccaagcttacacagatagtccatggcaggaaatctgtctgacctcaggatctattatcttaatcacaacaacatgctgttatctaataaatttgtgtaatgttgcttttcaattaaaatcagaarccactacaaataaatgacctctgaaattcaaagctatatatctcaatttagcagcatgtaatcaagaatagatatggtatattttaatgctgaataaataacttcattttagaaagaaatcaacaacataaagagtgttatggcattaaaatatttcctgtgtcacttttgagcttttataaatgtgtgtagtaaaacaggcttgcattaattc

SEQ ID NO: 407323 - DNA, 542 bp, Homo sapiens
tgggaagtccaagattaagacagcctttgtgtctgatatgggcccacttttcagataataaagggcaccttctatctatatcctcacatgtggaaagaacagggagtctctctagggcttcttttataaagacattaatcccatttatgaaggctatgtccccatgacctaataacctccccaaagcccactytctaataccatcatgggaattaggatttcaatgtaggaattttgggggatacattcataccacaacaatattcaattggtttgaaagtgaaagtgcatttttcacccattaaacaaccctatcactagattccttattaatgaattgaatgctttaggtatacaataaatgtttttgaagaaataaacaatttcagataggagttatgcttttggttttatggaaaagtttcctccaatgagtagaagatcaaaatccctcagtaaaagagctggatagataatgtaaagagaaagctatggttaaatctaaaacaaacatttagagaatttatactatcctctttgat

SEQ ID NO: 407324 - DNA, 565 bp, Homo sapiens
tacaatttccagaatacttattgacgaatcttactgtccaggttactccttcaattctaaatattgaggattttctcttacttatggggtaaaatctgaatatttaatactggcatttaactcccacttccacaggttcttacttcaatttactgtaccactgctccccagctgtgttcatcattctactctagctrggatattaatgcattgagggtaagatctatgcttgttagacattgccttctggaatggggaaattaagacctgagtgaacctgctgcacccctaaaggcaacaaaattaggcaaaataataaaaagcaagcatttcagaactgtggaaatcaatccagttcacagaatgaatggaaagcacccattcaagaactaccactaaacctcagtcagaatagcatggtctgtgacattttaacttggggatagacccatcctgccttactccccacatcagaggcatggtaggcataaaagctagcccacttacagccaagctcccatttggagctttgttgaaaaccccattatcagagcacagcctagag

SEQ ID NO: 407325 - DNA, 565 bp, Homo sapiens
tacaatttccagaatacttattgacgaatcttactgtccaggttactccttcaattctaaatattgaggattttctcttacttatggggtaaaatctgaatatttaatactggcatttaactcccacttccacaggttcttacttcaatttactgtaccactgctccccagctgtgttcatcattctactctagctaggatattaatgcattgagggtaagatctatgcttgttagacattgccttctggaatggggaaattaagacctgagtgaacctgctgcacccctaaaggcaacaaaattaggcaaaataataaaaagcaagcatttcagaactgtggaaatcaatccagttcacagaatgaatggaaagcacccattcaagaactacyactaaacctcagtcagaatagcatggtctgtgacattttaacttggggatagacccatcctgccttactccccacatcagaggcatggtaggcataaaagctagcccacttacagccaagctcccatttggagctttgttgaaaaccccattatcagagcacagcctagag

SEQ ID NO: 407326 - DNA, 623 bp, Homo sapiens
ggcatttaactcccacttccacaggttcttacttcaatttactgtaccactgctccccagctgtgttcatcattctactctagctaggatattaatgcattgagggtaagatctatgcttgttagacattgccttctggaatggggaaattaagacctgagtgaacctgctgcacccctaaaggcaacaaaattaggcaaaataataaaaagcaagcatttcagaactgtggaaatcaatccagttcacagaatgaatggaaagcacccattcaagaactaccactaaacctcagtcagaatagcatggtctgtgacattttaacttggggatagacccatcctgccttactccccacatcagaggcatggtaggcataaaagctagcccacttacagccaagctcccatttggagctttgttgaaaamcccattatcagagcacagcctagagtatgacaagacaaaagcatttctgaaaaaaatctttattcccatggcctcataattatttagtttggggttcagctctgcaaaacaaacagccaaaagccaatgaataaaaagcctttccccaggacattactgaaaacaatagtaatttgttggtgacatcacaatag

SEQ ID NO: 407327 - DNA, 627 bp, Homo sapiens
gttccagcatcatttagtgaaaagactttccttttacctttgaattgcttccatgccttcatcaaaaaaatcagttgactatatttctgtgaatctatctctgagctccctatctgygaatctatctctgagctctctgttttgttccattgacctaagtgtctatttttgcatcaatatgatactctcttgattaccatagatttgcagtaaatggttgaaataggacaatgtgagtcctccaactttgttcttctgaagtattatgttggctatgctaagtactgtgcctttctatataacattgaaaagtaacttgtcaatattgacaaagtcactttctgggattttggcaggtattgtgttaaatttgtgcatcagttagagaagaattgacattttcatcatatggtaataattatgaacacagagcatcactccacttatttacatcttttatttgtttttttagttttatgaatagggaacttagacaatattttgttaaatttatgcctagatactccctttttggaagttattgtaaatagttttttttttagttaaaaatgtcaatagtttaataccttattgataatatatagggaaatttttgaatatggactt

SEQ ID NO: 407328 - DNA, 563 bp, Homo sapiens
tttcaccagggacccgtccctgtctgcttagtaatttgtctgtctcctgtcgctatcagtttcacaacttcatatacttactaaaatgtattgatttgtacacttgaaaagagtgaattatatgatatgcaaaatatgactgggtaaagttatttaaataaaacaattgggaggaggaagaaactattctgtcaactgagaatacaaagatgaatatggcatacataatctctgcctttattagcttgcaatgtagtaagtctagtgtgtgaaacagacatgcagaaaccagtactacaaaaaagttgaaaagagaaaagaatctaccaatgaattctagtggaattttttgtttgaaacaaggttgagtattgggattgcacatygtcttgcttgaggaactgaaagaagctgtatcttgttgaacctatagtagcatgtagcatgcagggggttgttaaaggtgaaagccaactgacaattttgaaacagaaaagcatcttttttgcagtgtgtataatagattaattcatgagtaaaatgacaattaactgagctaagat

SEQ ID NO: 407329 - DNA, 382 bp, Homo sapiens
gtgccagctacctcatcaaggccagaagtgaaaatctctccaatttattttacaaggatagcataacactgccaaagccaaaaagcagagcataagaataaatcagagctcaattttacttatgaataggaggtcaatgatcttaaataaattagtgtcaaattgattcctgcaacacattaaagaataatgccctagaaccaaacaaaatttgtttcagggtttccataatgatacaatgttctggaagcttarcatcatgtacagaggtcaaagaagaaaatccttttagttatcatagtaggacccaataaatcctcagtgtgcagctagcaaaaataaagctctaacataataaagcatatccttttcaaatgcaaag

SEQ ID NO: 407330 - DNA, 563 bp, Homo sapiens
ttgtctccagttttgtcagtttagcttctaccctaagggattgaccacagtgtaggtttattcctgaaaggaaatttcattttggttaatatcaattcatagggcccagacatctcagtaacatgaggtttacttccattcactcacatttccttcttgcacacaaatgcaatgtaaatctagcaaatctcatttcagctgattcttaaattgtstttctaaatcatctgttgactgtcttagagtgatttatgggttttagctttcaaggcacaagaaaccactttaacttccccttatgttttcttgcaaagaaaatgataccacaaaggtcttggtgatggttttcttttttttccctgcctatttcttcatatatatctattgttgttgtctgtgaacattttggttttattattgtagttgcttagtgttttgtgggagaatctgtagaaactaaaaactatcactatctctccagaattctatattctattatattataatatgataattattttattatcatataacatatcttctgtgataagatatattatgtc

SEQ ID NO: 407331 - DNA, 490 bp, Homo sapiens
caacttattggttctaagatttataccctttccaatgtgtataagactactgtgattttgggacatgggaccaagtgtagcatgtctgatcctatctttgatggcaaatacttctgctgtgagatatgggagctgctgagtgaaaatcttttactgataataaagccagttgtcagagggaagcaaaagtaagagaagaagagacttgaggtgactttaatgaaaactcctacctgccaaaactagrcaaaaatatgacatacataaatataaatttccacaaggaaatttctttcccacctttctatatctttcttactctttatcatcacatttactaatagagataatgttcttgatactcaaagtgcatttgatatactatttcttactcatctcttccccacccctgtttcatacggggagctccaggcaacctagtgggatgggaattggggactgagagcgaagaagtgtagcaatagcatta

SEQ ID NO: 407332 - DNA, 490 bp, Homo sapiens
caacttattggttctaagatttataccctttccaatgtgtataagactactgtgattttgggacatgggaccaagtgtagcatgtctgatcctatctttgatggcaaatacttctgctgtgagatatgggagctgctgagtgaaaatcttttactgataataaagccagttgtcagagggaagcaaaagtaagagaagaagagacttgaggtgactttaatgaaaactcctacctgccaaaactaggcaaaaatatgacatacataaatataaatttccacaaggaaatttctttcccacctttctatatctttcttactctttatcatcacatttactaatagagataatgttcttgatactcaaagtgcatttgatatactatttcttactcatctcttcccyacccctgtttcatacggggagctccaggcaacctagtgggatgggaattggggactgagagcgaagaagtgtagcaatagcatta

SEQ ID NO: 407333 - DNA, 490 bp, Homo sapiens
caacttattggttctaagatttataccctttccaatgtgtataagactactgtgattttgggacatgggaccaagtgtagcatgtctgatcctatctttgatggcaaatacttctgctgtgagatatgggagctgctgagtgaaaatcttttactgataataaagccagttgtcagagggaagcaaaagtaagagaagaagagacttgaggtgactttaatgaaaactcctacctgccaaaactaggcaaaaatatgacatacataaatataaatttccacaaggaaatttctttcccacctttctatatctttcttactctttatcatcacatttactaatagagataatgttcttgatactcaaagtgcatttgatatactatttcttactcatctcttccccacccctgtttcatayggggagctccaggcaacctagtgggatgggaattggggactgagagcgaagaagtgtagcaatagcatta

SEQ ID NO: 407334 - DNA, 272 bp, Homo sapiens
tgggacctggtaggaggtgtttggattatgggagccgatccctcatgaatggctctgaacatccccttggttataagggagctctcattttgagttcacatgagatctggtcatttaaatatgtgyggcatctccccccattctgtctctctcttgctcctgtctggccttgtgaacttgctggctcctccttcaccttccactatgattgtaggcttcctttggcctccccagaagccaagaagatcccagcaccatgtttcctgtaaagc

SEQ ID NO: 407335 - DNA, 598 bp, Homo sapiens
aatgcttcgtattctgaaagttttaatagggaacacaagacttgagttgaatctgatttggagaatccgaatgatctggctgaccggaaaaatgataagagatggggagaatgattgctctttgggagataaaagtttttgagaaacaagttagtagagaaacgctttcgaaacgctgatgctgacaratgtgaagcaggttcccggtgcgctgattaccaatttgtctgagtccagtgaaacagaacactcacatacagcacaagttataggaagcagatttatcacttacagataggcaatgagggacaacagaagcctaggatgcaccacaagccagtctcccatggctcaggaaagctacccagggtggatcaagtctctgctgtgcatgcccaattacaccacagtggagggaccctcaatggcagcctgccccaagtcatacacctcagggtcacattaaccactggactaaattgttgaagaataccctgttctgggaagatgagggagctgcaaaagagcctatagtattccagccacttcctccttacctcaggattttacattcccagaacattctagttattcttga

SEQ ID NO: 407336 - DNA, 588 bp, Homo sapiens
ttcgaaacgctgatgctgacagatgtgaagcaggttcccggtgcgctgattaccaatttgtctgagtccagtgaaacagaacactcacatacagcacaagttataggaagcagatttatcacttacagataggcaatgagggacaacagaagcctaggatgcaccacaagccagtctcccatggctcaggaaagctacccagggtggatcaagtctctgctgtgcatgcccaattacaccacagtggagggaccctcaatggcagcctgccccaagtcatacacctcagggtcacattaaccactggactaaattgttgaagaataccctgttctgggaagatgagggagctgcaaaagagcctatagtattccagccacttcctccttacctcaggattttacattcccagaacatyctagttattcttgaaacctacaagcaaaacggggaactgggttgatccaaggccacccaaagaacagtcttgtaacaaggaagcaatcattcttgagaaagcagaaaggccccaaattggcttcaggaagacccatgggtctttttatcaattttgtttgaatactccca

SEQ ID NO: 407337 - DNA, 588 bp, Homo sapiens
ttcgaaacgctgatgctgacagatgtgaagcaggttcccggtgcgctgattaccaatttgtctgagtccagtgaaacagaacactcacatacagcacaagttataggaagcagatttatcacttacagataggcaatgagggacaacagaagcctaggatgcaccacaagccagtctcccatggctcaggaaagctacccagggtggatcaagtctctgctgtgcatgcccaattacaccacagtggagggaccctcaatggcagcctgccccaagtcatacacctcagggtcacattaaccactggactaaattgttgaagaataccctgttctgggaagatgagggagctgcaaaagagcctatagtattccagccacttcctccttacctcaggattttacattcccagaacattctagttattcttgaaacctacaagcaaaacggggaactgggttgrtccaaggccacccaaagaacagtcttgtaacaaggaagcaatcattcttgagaaagcagaaaggccccaaattggcttcaggaagacccatgggtctttttatcaattttgtttgaatactccca

SEQ ID NO: 407338 - DNA, 568 bp, Homo sapiens
caaagattgtatcaaggtacattgctcagtgtcatagtacacctactactagataggattctttcagggacatatgtctggtgtgtaaactaacattctttctctgtttgctagttgctctgaggttactacagcagcccctgatttatctatgtggacaatatccacagaatttaagcattatggtcctgttgccttgtgataatgaaaaagcatctaactctacattactagatgtcaattttgctacaaaacttggattttgacaatcacacttccaccttatacacacttgggcaagaaagtttctattagagcccggagaaataccacctacagrcaagatccttagatttcagagattaaagatgttgtaaagcagggactccctatcacccagtggagcatgaacaagttgaaattacacgccctttctgaatgaagaatgtagcccatgcatttgttagctcagtggtacttgtggtcacagataaaccccacaataccagtgttttaaaacagataaaattcatttcttattcttacgaagttgaaaatatagttatgt

SEQ ID NO: 407339 - DNA, 576 bp, Homo sapiens
aacactccacttgggtagaaggagtgtgcttataaatccccacctcaccaaatgagaaggagctgctggcaagatctgagctcaacacctcaggagcctccagatttggaaggcttttggtttcctcacttcttttgctttctatttttgcctcgaaatatgtgcactcctagagttctctattttcaaaaagccttctgagccagtaaggaagaaaagtttgctttggggaacttccaaatatttgtgaattgccgttgactactttttcactgcaacagcaaggcaaatctgtactattaagtagtaatataatgtataaagcatatcttttcatttttgagcatggcactatgtcagtgrgagcagtgattttcagatattttccatattccaaaaatgtgatgagggtcttgaggtatggttaagtaataggaatactgtaagagtattaaaaattatctttgggagggcttataatcctgtaagtttagcacattgttctttagttgtgtagttgctcaatgtagtttaattggtcaggttcttcatggaacaacaaacaggacagtgaag

SEQ ID NO: 407340 - DNA, 592 bp, Homo sapiens
ctctctgtgatgccggctgagtcccaggaaaacacactcggagatcgacatggtgggcttttgttagggagtgctcttgggatcaacctgtaaaagggaggaaaagaagtaggattgtgcagagaaagaagctgggctgagatgcagtccagtggaaacctcagtcattcctatggggagttctgaagatggcatgacccttgggtccctagttggaatgaaagggctggtcttttacaggcctgtgttaatcagtcattggatgtgggctgttctgggactgggacaaggtgtgtgaccttggatgagtggcttccttcaagataaggtaatctctggatggtgctgatagctgagaactaataacttcattttsatgagaaatcttgatggtgtgtcactgtgacccacatattctgaaaaaaggtgcttatagaagggcaattttctatgaatgctgttttgctatcctattatggaatattctctattaactcagtattcaatatccatactattagtggttaaggggataagatcataataaaatgcatccttaatactttttttatgactctcacggtcaattaca

SEQ ID NO: 407341 - DNA, 603 bp, Homo sapiens
ttgtgtatatgaatatgtctgtctagttagagaacttccagcagttcagtttggctgcagttctggatacagatataggctcaaggatctttaacacctggatgaattaaatacttaattggtggtccaatgggaaccattcaacctattgaatgggaatatcatctggtctgagatgggtttccaaacctttcttaatccatattcccatcttccaaacaagtagggtttggggttcctgtatcagagtttaatctgmaaagccactagtatgtgtacccacacatacacacatggagacccacagacacacacgcacataggtacttgtggcagggatttggctgtatgggatgggagctggttaagtagttactgtgaagttgctgtctttgtacctgttattgacgcttaaagttcacagcccaggcaatcctgaagaaaatatgtaagtaaagcaggggagagcatgatcaagctataagccacaagtgtgagctggagcccatgaggatagactgaaacccgtgtgtgcttttattgcttctgatctgggtggtggaggtacgcttcagaacccaaggcccttcgtcttgaagttaa

SEQ ID NO: 407342 - DNA, 636 bp, Homo sapiens
cccagggctgcaccatgctaatacttgccttatctcacaaggcacatcttaggtgtgctgtgtcctttctctcccagctgcgatctaaattatctcctaggtcccatttttcttctacttctttgagttttcagacattaggattgagccctagatcatgacttcaggtttatgaggacagtcatctgtcatcagcacctgcagagccttttgtctttctctgactgcatgaattcctcrgactcttactttctgacaactgatggacttttctcatctctaaccacaaaagcccaactccattctttctttgtgcaacaccacaacatgtggggtttttattctcccacagggagaacaagaaagcatatggcctcctaaaaagaaaaggttctttatgtttttggtccagcctctttcctttataaatttcccagtctcaggtatgtctttattagcagcatgagaatgaactaatacaccttgacttttggattggccctatgacttgattcaacacatgatgtaagagaagtgaaagtgctgcagttctgagacagggcttaaaagccttgcatatttcctttttctctcttgctcctctgccgttagctgctgcccctttagcctgaggca

SEQ ID NO: 407343 - DNA, 594 bp, Homo sapiens
tgatacctgaaaggtaggacttcttccttatggctgggtaatagtgaaagtcctgtctaccagacttcctctgacacaatcgcaggaaggaaggctcacctctcataaactggtagaggtgaaaatccagccttgccatatcatctcagctgacattttggagatgaggaggtaccctctttaccaattgacagagatgraaacctggactccctacttggccttctatggcattctcctgggagtattggggtacctaagtgcagcctggtgagggtgtgagtctaggctttacaatcagcctttactgatgtggtggttgggtcacatttcttttctgtaatgtttgagtaaagcagttattatctacatgtttcctaccttgctaggctgtctctttcctggtcctttggttacagagagcaagctcttgtatattattttttttctgtgcccatagctcttcccaagttgcaggtttcttagttctaagtctgggatatacgaggcaaaaggaagctgagagaactcaccaccagattattcaaggtccttcaaggtctttagattgtcttccttctctttaccattcag

SEQ ID NO: 407344 - DNA, 540 bp, Homo sapiens
atatttacatgttgtgttatgagactctagattttatttaaaccttttatttcagctagctttttaaaatgccagtctggccagggaaaagaggagataccacttacttactgccaggtagagttataaatccaggttccccgctcaatctcagttgatacctgaaaggtaggacttcttccttatggctgggtaatagtgaaagtcctgtctaccagacttcctctgacacaatcgcaggaaggaaggctcacctctcataaactggtagaggtgaaaatccagccttgccatatcatctcagctgacattttggagatgaggaggtaccctctttaccaattgacagagatgaaaacctggactccctacttggccttctrtggcattctcctgggagtattggggtacctaagtgcagcctggtgagggtgtgagtctaggctttacaatcagcctttactgatgtggtggttgggtcacatttcttttctgtaatgtttgagtaaagcagttattatctacatgtttcctaccttg

SEQ ID NO: 407345 - DNA, 636 bp, Homo sapiens
ccagttatttacttggaatatccaaaatagttacaatatgcatgtactttgttcttgacactactcaaaggctactaaggacataaagtcttaaataaggaatatatgtttcacattatttaagcacaaatttgggctttgacaaatattgacagattctattgattatgcaaataaygaaacatatatagcgtactatattgttcaaaaaacccaaacttttcatcacatgatgcatatcatttgacatacagtttttattatataacagcacataccattttagccctctgcattttcactatagatttaccatgcactctgatagtaactcaaaacatcatatgcaaaagacatttattatggtgccattgaaattatcaaataaattgtgaataaatcataagttcaaaactaaaaaaaaattaggacacagtagtatatctacttattttaataatttataaaaccaaaaatgatagttttcaagaatatgttaaaatttcttccatgataaccccatgtataaaataaaaaggaaaagttgcaaatattggatccatactacgattagaaccaggttaaaaataattgaaaatgtaaaaatgattaatatggcaaattttatgttgtgtg

SEQ ID NO: 407346 - DNA, 543 bp, Homo sapiens
aaaaccaaataccacatgttcttacttgtaagtggtcgctaaatggtgagaacacatagacacatagttgggaacaacacatactggggtttttccaaggctgaagagtgaaaggagggagagaaccagggaaaataactaatgggtactaggcttaatacctgggtgatgaaataatctgtacaacaatgcccatgwtacaagtttacctatgtaacaaaccagcacttgtacccctgaacttaaaataaaagttaaaaaatacaaattatgttctataactagaatggaattaaaccagatattgaaaatagaaacatagccgaaaaaattttgaatattttaagttctatcaaaatgcttctaatcccttggggaataagcagatttcagagaatattataaaatattttgattttaatgaaattaaaaatacaacatttccaaagttgttagacacagcttaatcagaaattcaagggaaaattgtagcattaaatgcttatgaaacaagaaatatctccggtcaatgatcttagcttt

SEQ ID NO: 407347 - DNA, 568 bp, Homo sapiens
gtaatgtaagagcaggacagaagtaattcaggaaactagcattttgattatgtcactaaataatgtgtaactttctacaaaytacctaggttatttgtactatagttttgttatctgtaaaatcaggtgtgggctaggatgttctctaacggaacctttcatgtccgaaactttgtggttcttgctatctacatatctatgtattagtgctgccccatgataccttcaaagaagaatctgcttttctaaatatagtacttgtacctaagaacactatgaagactataacgtaataaattaaaattaggttgtaaatatttcagtccttttgttaaccagtatttcaaccaataatcactaaaattttttccttccttctttttagtctccttatctttgaataaaatttgaaatgcgtctgtttcagcctatgccacctaaagattttaattttcacagaacagatgagactatattttctggtgttactcttttaaccaaacactggatgaatataaaaatccctaccaaaactgtgtacaaagtaaatataaatgttttaatgttg

SEQ ID NO: 407348 - DNA, 568 bp, Homo sapiens
gtaatgtaagagcaggacagaagtaattcaggaaactagcattttgattatgtcactaaataatgtgtaactttctacaaattacctaggttatttgtactatagttttgttatctgtaaaatcaggtgtgggctaggatgttctctaacggaacctttcatgtccgaaactttgtggttcttgctatctacatatctatgtattagtgctgccccatgataccttcaaagaagaatctgcttttctaaatatagtacttgtacctaagaacactatgaagactataacgtaataaattaaaattaggttgtaaatatttcagtccttttgttaaccagtatttcaaccaataatcactaaaattttttccttccttctttttagtctccttatctttgaataaaatttgaaatgcgtctgtttcagcctatgccacctaaagattttaattttcacagaacagatgagactatattttctggtgttactcttttaaccaaacactggatgaatataaaaatmcctaccaaaactgtgtacaaagtaaatataaatgttttaatgttg

SEQ ID NO: 407349 - DNA, 568 bp, Homo sapiens
gtaatgtaagagcaggacagaagtaattcaggaaactagcattttgattatgtcactaaataatgtgtaactttctacaaattacctaggttatttgtactatagttttgttatctgtaaaatcaggtgtgggctaggatgttctctaacggaacctttcatgtccgaaactttgtggttcttgctatctacatatctatgtattagtgctgccccatgataccttcaaagaagaatctgcttttctaaatatagtacttgtacctaagaacactatgaagactataacgtaataaattaaaattaggttgtaaatatttcagtccttttgttaaccagtatttcaaccaataatcactaaaattttttccttccttctttttagtctccttatctttgaataaaatttgaaatgcgtctgtttcagcctatgccacctaaagattttaattttcacagaacagatgagactatattttctggtgttactcttttaaccaaacactggatgaatataaaaatcyctaccaaaactgtgtacaaagtaaatataaatgttttaatgttg

SEQ ID NO: 407350 - DNA, 538 bp, Homo sapiens
gttactcttttaaccaaacactggatgaatataaaaatccctaccaaaactgtgtacaaagtaaatataaatgttttaatgttgrtaacggtttaacataaaatcttctgtgaattcactacacaggtttaaaaaacaagaaatgaaaacaaacaaacaaacaaacaaccagaaaacccaaatcaaagcaaaccaaaaaaaacccttgaagaattagcataaatcatcaaacatggtttgagtgtcctttgtaacagtagattacaagggggttagttaaaaatagataaaataataaatccagaagaaaattctgttcctttaggaatcaagaaaataagttttaacatggtgggcacattcaatccactctattgctctaggttgtagacccatgagaggagtatgaaggcatgacaagcaagcttcagaggctgcgatcacttatgatcgtgcagctagaaagattaaaaacaaggcgtccctgaagggctcagagtggaagacagtgaaggaaataatttgttgaaattgttta

SEQ ID NO: 407351 - DNA, 538 bp, Homo sapiens
gttactcttttaaccaaacactggatgaatataaaaatccctaccaaaactgtgtacaaagtaaatataaatgttttaatgttggtaacggtttaacataaaatcttctgtgaattcactacacaggtttaaaaaacaagaaatraaaacaaacaaacaaacaaacaaccagaaaacccaaatcaaagcaaaccaaaaaaaacccttgaagaattagcataaatcatcaaacatggtttgagtgtcctttgtaacagtagattacaagggggttagttaaaaatagataaaataataaatccagaagaaaattctgttcctttaggaatcaagaaaataagttttaacatggtgggcacattcaatccactctattgctctaggttgtagacccatgagaggagtatgaaggcatgacaagcaagcttcagaggctgcgatcacttatgatcgtgcagctagaaagattaaaaacaaggcgtccctgaagggctcagagtggaagacagtgaaggaaataatttgttgaaattgttta

SEQ ID NO: 407352 - DNA, 537 bp, Homo sapiens
ctccccatgggtgcctcacacaggggagaccaactcgactggcaccctctttctcacattactgatgctctttttatttcttaaaaaaattatcctctctgtatttccttttgaatagtttttattgctgtgtcctcatgatcattaatattttattttacaamgtcaaatataccattacctcattcagaactttttcttctcaagtatcatagttttcttctttagaaaactaattttttatatttaaaaaataccttccatagctctacattttattacgattttgataactgtttaacaatttttgtttcctggggattcaaacatcaatgtcaattctgggtcttgattgattgatttatcttccctttatgggttccttttttgcctttttgcaagcctggtaatctttgaaggagttccgacattgtgaattttatcttgttgcaagacgaataattttttcttcttaaaatgtttcttgagctatgttctgagtgcaatgaagtcacttggacatggtgtgctctttgg

SEQ ID NO: 407353 - DNA, 531 bp, Homo sapiens
ccttgtaatttttagttgaaagttgagtatgttatatgaggtaataggaaactaagatatatagatctttagtgtgaggatttatattattttgatgaggatttaggctgtatttaatatttattccagccacagataccagaggtttgaaattcatctaatgtctttctttccgtctgccctccttatcttggccctccctgagtgctcctcttcagagagtgtctgcatcttgcagycctatcattctctgttcagctattggtgtggttcttggtggtttggtgataaggtgtgagggaagaggggctttctagaatcttctgatgaagtctcagtctctgattggcttgtgtctcagggctgcaactaagagacgagagaaaaaggaaccagttaggcagagagctacagcaagtccttggtcgaattccttttttaacaaaggaacagcttgaaagactaagctgcaagcaaagataaaggggctaggtccaccataaaaatgccttttgtgtaactaacaagggt

SEQ ID NO: 407354 - DNA, 531 bp, Homo sapiens
ccttgtaatttttagttgaaagttgagtatgttatatgaggtaataggaaactaagatatatagatctttagtgtgaggatttatattattttgatgaggatttaggctgtatttaatatttattccagccacagataccagaggtttgaaattcatctaatgtctttctttccgtctgccctccttatcttggccctccctgagtgctcctcttcagagagtgtctgcatcttgcagtcctatcattctctgttcagctattggtgtggttcttggtggtktggtgataaggtgtgagggaagaggggctttctagaatcttctgatgaagtctcagtctctgattggcttgtgtctcagggctgcaactaagagacgagagaaaaaggaaccagttaggcagagagctacagcaagtccttggtcgaattccttttttaacaaaggaacagcttgaaagactaagctgcaagcaaagataaaggggctaggtccaccataaaaatgccttttgtgtaactaacaagggt

SEQ ID NO: 407355 - DNA, 588 bp, Homo sapiens
acattagttgtagaattctaatgagctcagtaattatgggaatcatctggaaagaagagctgtctcacctttggattctaaaaatgccttataatggaaggagaccctgagcatagcttgtgcaaaatttggggcctttatatcagatagatttcaaagcacagagctacaaataaagattttgaatggtacatgtcaagactcaacacttyggccattcaagtggactatatgttgagtgtattatgaatcttctggaaagggcttgaagtaactagcaagttttctataaaatccatggaaatatttatttgttgcttgcaaaggtgattaattgaaggggcctggacatagagtttcagagatcaggttgagaaagtgagcttattgttaaccatccttaaatcaattgcttctaaatctctgcaggtaagatttgtgtaaattttaataagaaacattattacgttctatatttatatttttaaagatttatattgaaaataaatactgtaaaataagataaaaaaccaatgaacaagaattaaaagctaaaagtaataacagtaccaaaaaaagaaaaaagta

SEQ ID NO: 407356 - DNA, 588 bp, Homo sapiens
acattagttgtagaattctaatgagctcagtaattatgggaatcatctggaaagaagagctgtctcacctttggattctaaaaatgccttataatggaaggagaccctgagcatagcttgtgcaaaatttggggcctttatatcagatagatttcaaagcacagagctacaaataaagattttgaatggtacatgtcaagactcaacactttggccattcaagtggactatatgttgagtgtattatgaatcttctggaaagggcttgaagtaactagcaagttttctataaaatccatggaaatatttatttgttgcttgcaaaggtgattaattgaagggscctggacatagagtttcagagatcaggttgagaaagtgagcttattgttaaccatccttaaatcaattgcttctaaatctctgcaggtaagatttgtgtaaattttaataagaaacattattacgttctatatttatatttttaaagatttatattgaaaataaatactgtaaaataagataaaaaaccaatgaacaagaattaaaagctaaaagtaataacagtaccaaaaaaagaaaaaagta

SEQ ID NO: 407357 - DNA, 599 bp, Homo sapiens
cttgtcccttcaatttaggaaatgtgctggactctgcactgtggcctggaacctccttgaaagcagtagattgggcaatctcagggttcaccttatttgtttcccaattcttttccttccttgcctaaggtccagtgttctgaaaatattacrtctttttcggcattcttttgctactgttgttattatttcaggcagggtgtattcggcctctattacccattatgggccaaaagaggaattttctggccacaatttgagatgaaaaataaaagaaggaattcactttggactagctaagctatctcctatggtttattgcatgataaatacaggaaactatggtctttccaggaagttggcctcatgaagaaaggaacagaagctcttatggggcattaagcatatcctcagttaattatagatggctaagttgtaaaggcttaagaattttaaaaactagagaatattatttctactttcttactacttttcatgtgaagggcccttcattagaatagcactcgttaccattttccccagttctgtcttctcttcaaggcaggagtgattatttttttgattgaacagtttaggtg

SEQ ID NO: 407358 - DNA, 583 bp, Homo sapiens
tatttatttttactaaataattttagttgattgaattaaaacattttgtattttttcaacgtgtttattaaatcactataaagacacaaaagatgacaattcatccttatccacctgccctctttgatattagsattgttacgtattattttgttttaatatttttgttatgtgacagaaaaaagaaaggtatggggagaaaaagcacttctttttacattcattaggaacttttcctctttgttcttttctcctagtctcttttgcttccctcctgaggcacaaatctcttttgcttcccttctgttgcacaaatctctttgctcctctgttcattaattcattatctattgaataacaccatgggaaacaacacattgctccccaaggtgctttcaataaataatgaagcaaccagatgactaggtctcaccaacatgggagaggagtgaggagctgagaatttgtgaaaggcatgggattattttttgaaaggaattgtttttttcacttgtactatacagaagccttgggtcccatttcccttcatggggttccataagttttagctccaaaattttat

SEQ ID NO: 407359 - DNA, 599 bp, Homo sapiens
cttgtcccttcaatttaggaaatgtgctggactctgcactgtggcctggaacctccttgaaagcagtagattgggcaatctcagggttcaccttatttgtttcccaattcttttccttccttgcctaaggtccagtgttctgaaaatattacgtctttttcggcattcttttgctactgttgttattatttcaggcagggtgtattcggcctctattacccattatgggccaaaagaggaattttctggccacaatttgagatgaaaaataaaagaaggaattcaytttggactagctaagctatctcctatggtttattgcatgataaatacaggaaactatggtctttccaggaagttggcctcatgaagaaaggaacagaagctcttatggggcattaagcatatcctcagttaattatagatggctaagttgtaaaggcttaagaattttaaaaactagagaatattatttctactttcttactacttttcatgtgaagggcccttcattagaatagcactcgttaccattttccccagttctgtcttctcttcaaggcaggagtgattatttttttgattgaacagtttaggtg

SEQ ID NO: 407360 - DNA, 583 bp, Homo sapiens
ctacatgagacagattgtgggtcttaaaatgtgttaaataatgtaaaactgttttctgagatgattgaagcaatttacattctaattaacagaatatgaagatactaggtgcctacaatcttgccagtagttacctatcatgtggaaattttggccattctggtggataaataatagcaacatgtagtctttttaatatttatttttttttatcaccaatagtatgaaaaatatttccatgtgtttattggccttttgcattttttcacatttgaagaacttgcgctagtcctagttacctccctttttctcrttgactggtgtggattccttatatattgtaggtactattcatcctctatcttatgtgtaacaataatcttctcctttatgtgaagtttcttttaagatttaacctttttattatcatcatttattggctaagaggtaatttatttaaatgtaatgataaaattcgctattaataaattacctcttaaccaattttagtttagtaaataaatgtaatgacaaaattagctataataaattacctcctcttctagaagtcattctttgcaga

SEQ ID NO: 407361 - DNA, 566 bp, Homo sapiens
ttgtacttaattaaaattaaagacactgctaagagaacaaaagacatcccatgctgtgagaaaaatatttgcaagcttctggataaaagggcttggatccagaatatatacagtcttagcaaaactcagtaagtatgtaatcaacccattaaatatgtgcaaaaggtttgaacagataattctcccaagaagatatacgaagggtaataaacacatgaacagttggctcaacatcattagtcttcagggaagtgtaaattattacatcactacctactaccagacaactaattgaatgacttaaaacacasagagagagagaaaataccaagtgcttcgtgtttgtgaggctgcagagcaacaggcactctcatacattgatgctggaagtataaaaagtacagttgctttggaacagagtgaggcagccaagtataacgcggtcccggaagaatctccaatcagctgcgcactgggagaacagggtggagccacacacatttgcaagtgggaggagcctggcccctcctgttcctgtggtaacctgggattcaatcggtgagatg

SEQ ID NO: 407362 - DNA, 510 bp, Homo sapiens
  misc_feature (1)...(510): n = A,T,C or G
aacagcccaaatatgcttcatttattgaattaataaataaatcgttgtgcatccatacaatagtggaatagcaatatcataatgctactcctcaataaaaagaaacaaattattaatctatgcaataacataaatgaatctcaaatgggttatgccgagtaaaagaagtcacaattaaaawgttatatatgattccagttatacaacattctaaaagagaaaaaactccagtgacagaaagtggaatggagcagaagttgcttgggactgggcatgaatggaagtgttgattgcaaagagggattgtggagtttggggaatgattttgatagacatgactgcaagcatttgccaaaacttgcagaaatcttcactaaaaagagtgagttgtaccaaatatcaattataccttaatataaaaaaaaaggaanagcattgatcccttttctagttttctttacaaaaatctaggatttcagcatttactttagctccaaaatgacattttaa

SEQ ID NO: 407363 - DNA, 577 bp, Homo sapiens
catatgtgtacagatacaatgtagtttggatctgcatatgtgagaagttttattaaatatatgcattgaaaataagaacttctagtatttacagtttatatttatcccactatttcatttaccactttagcaaaatacagtatgtgcataaatagtgataaaagaaaaacttcagccaaattaaatgtaaaggagtttaattgagcaatgagtgattcatgaattgggcagcccccagaatcacggtagagtcacagagactccaggagtgccttgtggtgagaacatatttatagacaaaaawtgtaaagtgacgtacagacatcaaaagtgaggtacagaaacagcaagataggttacaactgggcatgtgccttatttgagtgcagtctatgagtggttgaagtatggccgctgggattggccaacactcaggtattgttacaagttcatgctattgagttaggtctttttttttttttttttttgagacagagttttgcttttgttgcccaggctggagtgcaacagcacaatcttggctcactacaacatccacctcccaagttcaaatgat

SEQ ID NO: 407364 - DNA, 593 bp, Homo sapiens
atgctccttacctagggtcctcataaccaaaccacataaaattaactagattaaagaatgagctagataaagagtctactcgttcgagtaagtggtcttttcattaatcccctacaactgattttttataatctacatttgatatatttctccagaggccacaagcgtcagcagctgcacaggtacttttctgtttagccaattctattatttagcataatttcacaagagaagttaaagtgtattgtgtaacaatagcctttaaagtagaatttgctgtagagcctattatgagggagacatttctaattatttcctcttttattctaaaccatggaaaaggacctaacaaatgatgtctttctagaagagtgaaggccttcactstagaagagagaaggcaatgttctctttaatctgtgatgtgggttaagaagagttttgactgattatgaggtagcatatgtaccactaaagtttctcacctacattgggctttcatctttcatctattaaagtataagtttattcatgtataaggctggctgcaaaattcttcacaaataaaagtataccctataactgcttataat

SEQ ID NO: 407365 - DNA, 579 bp, Homo sapiens
cgccatcttcttctggagagaaactttcctggttagttttactttaagggtaccaatgggtgtacagttccagggatgtggcaggacctttctcagttgtgagattaggaacccaaggttcaaaactccaaagttttgctgtagtgtggatggcgaggacagtctttctctgatgttctcagaagatccagtccttaggttctagattgtgaaggaactgtcctctgtgaaccataaaaagctttctttacctggtgaaaatacactgtagcataataatctactgttataacatcagcccccttgcatgggaaagctttatacaaccagaaaacatgcactgaaaataacaattgaatgaaatccctttataaatttttaaatggcccatcaggtagccaaatatacctgaagctttcattgtctttccaggaatatggaaccaaacactggttttaaactattyacacaatttataagtcaccatatcaatatatttgatttggattattttatcttttccatgacaagtcatggaatgcagaacctttaataacaaaacttttaggactcaggaag

SEQ ID NO: 407366 - DNA, 604 bp, Homo sapiens
aaataacaattgaatgaaatccctttataaatttttaaatggcccatcaggtagccaaatatacctgaagctttcattgtctttccaggaatatggaaccaaacactggttttaaactattcacacaatttataagtcaccatatcaatatatttgatttggattattttatcttttccatgacaagtcatggaatgcagaacctttaataacaaaacttttaggactcaggaaggacaaggtggacgtcttgggtctttatgagtccatgcttaacatcggacttatgtcctcttgaataccagttgtttctccaatgtagctgcatagcactgataactaatgggttatcataggtaatttgacttagaccatgtagctcattcaaatagtatatttaaacaattttagtattggctgatttagcatgataatctagagcttgatttttaaaggtttaaataccaaaggtttaaaacattggatatcayaaaatagaatcttaggttaccataagtcatttacttagccaaaatgataattcaaaaattttttaaaggaaaaaatattatgctgatagaggagacttagctttccaaacagg

SEQ ID NO: 407367 - DNA, 615 bp, Homo sapiens
atgagtccatgcttaacatcggacttatgtcctcttgaataccagttgtttctccaatgtagctgcatagcactgataactaatgggttatcataggtaatttgacttagaccatgtagctcattcaaatagtatatttaaacaattttagtattggctgatttagcatgataatctagagcttgatttttaaaggtttaaataccaaaggtttaaaacattggatatcataaaatagaatcttaggttaccataagtcatttacttagccaaaatgataattcaaaaattttttaaaggaaaaaatattatgctgatagaggagacttagctttccaaacaggacccagtgaagacagcatgaggccaactgattgtctcctttctttcctttccccccattttcttttgtagtttacttaaaaggtaaacaaaaacttttcattatattttactattacataaaaatcattttgagaagagaaaaacaagttttatgttttcattagtatacttcaaatattaaagctagyttttaataacattttataaatctattcagttttaattagtttgaccaaaaggtaatatttttataaacctttcataaccatt

SEQ ID NO: 407368 - DNA, 584 bp, Homo sapiens
aaaagaatttgaactgaatcagataggatttagagcacaccaggtacaggcaacacttgaacaaaggcaagaaggaagaagagcatgtttgtggaatcargagttccaatttttctgactgtaacaataataggtttctatttgctttcatataatcatgaaattttaatgtctttctactagatctaaaatctttataatgggacttttaattggacccatcttaagcatatagctttcatcaaaatatatgcatttagctagaaaataaattattttgaatttgtctgatcaaatgctttataatgttttatagtcttatgaaatattgtattagggtgacattattatttgttttatagaagagaaaaatagcattaaaatatagagatttataagtgttattctatgtaagtctagtttgattattcttattgttgtatataattccgtttaagaactgttcattaatactttgttctgttctgttaattagcatatggacagtttggggcaattacaaatagcactgatatcaatacgtttatacttggatcctagggtacaatactacagaagaatgg

SEQ ID NO: 407369 - DNA, 584 bp, Homo sapiens
aaaagaatttgaactgaatcagataggatttagagcacaccaggtacaggcaacacttgaacaaaggcaagaaggaagaagagcatgtttgtggaatcaggagttccaatttttctgactgtaacaataataggtttctatttgctttcatataatcatgaaattttaatgtctttctactagatctaaaatctttataatgggacttttaattggacccatcttaagcatatagctttcatcaaaatatatgcatttagctagaaaataaattattttgaatttgtctgatcaaatgctttataatgttttatagtcttatgaaatattgtattagggtgacattattatttgttttatagaagagaaaaatagcattaaaatatagagatttataagtgttattctrtgtaagtctagtttgattattcttattgttgtatataattccgtttaagaactgttcattaatactttgttctgttctgttaattagcatatggacagtttggggcaattacaaatagcactgatatcaatacgtttatacttggatcctagggtacaatactacagaagaatgg

SEQ ID NO: 407370 - DNA, 628 bp, Homo sapiens
atctttctctcttattgtttgcattggagtttcctgtaggggtaacattttagtcttttcctcatttgtgtatttgttctactactaagttttatgcttttatgtgttttcataatggtagatagtgatagccttcttttgcttccaggtgtaggactcccttaagtatttctggtagggctgatcgattgggtgaaatccttccrttttttcctggtctgggaaaaactttttctccttcatttgtgaaggataactttgttgggtatagtatttttgactggcagttttttttttctttcagcactttggatatatcattccattctcccctagcctataattttgccgctaagaaatctacttttagattgattaaattatcttacatgtgactagacatttttctcttgctgattttagaattctttttctatgacttgacagttttactctaatgtgctgtgatggttaatactgagtgtcaacttgattggattgaaggatacaaaatattgatcctaggtgcatctgtaagggtgttaccaagggagagtaacatttgagtcagtgggctgggaaagacacacccacccttaacatggttgggcacaatctaatcatagtt

SEQ ID NO: 407371 - DNA, 628 bp, Homo sapiens
atctttctctcttattgtttgcattggagtttcctgtaggggtaacattttagtcttttcctcatttgtgtatttgttctactactaagttttatgcttttatgtgttttcataatggtagatagtgatagccttcttttgcttccaggtgtaggactcccttaagtatttctggtagggctgatcgattgggtgaaatccttccgttttttcctggtctgggaaaaactttttctccttcatttgtgaaggataactttgttgggtatagtatttttgactggcagttttttttttctttcagcactttggatatatcattccattctcccctagcctataattttgccgctaagaaatctacttttagattgattaaattatcttacatgtgactagacatttttctcttgctgattttagaattctttttctatgacttgacagttttactctaatgtgctgtgatggttaatactgagtgtcaacttgatyggattgaaggatacaaaatattgatcctaggtgcatctgtaagggtgttaccaagggagagtaacatttgagtcagtgggctgggaaagacacacccacccttaacatggttgggcacaatctaatcatagtt

SEQ ID NO: 407372 - DNA, 570 bp, Homo sapiens
gctgtttctttaaattatgggttttggagttagtctacctagatctgaatcctaccctcatgaccagctatttttagtataactttggaaaatttaatttatctctttatacttatgtttcttcatcagaaaagtctagackgtaattagtatttttttcagtttgtttataagtatttaattgcataatctagataaaacctagataaaaacctaggcataatctagttaaaaactgtaagagtaatactaataatgaatgcttattatgattattactaagaattgcattctattttaggaatattttcatacaaatatcttactactaatgaataaaggatattattttactaatgagtgttcacatggtagttaataattcttttaaataattttaatagcatacttatgatgtgtattccaaatggtcataagatatactcaaattcataactttataatccatctgcttttgtgtttgttgtttaatattaagtaaaatgggctcaagatcaaagacagaatattacatatctgtatctgcttgttacacacacaaatgcaaaa

SEQ ID NO: 407373 - DNA, 570 bp, Homo sapiens
gctgtttctttaaattatgggttttggagttagtctacctagatctgaatcctaccctcatgaccagctatttttagtataactttggaaaatttaatttatctctttatacttatgtttcttcatcagaaaagtctagactgtaattartatttttttcagtttgtttataagtatttaattgcataatctagataaaacctagataaaaacctaggcataatctagttaaaaactgtaagagtaatactaataatgaatgcttattatgattattactaagaattgcattctattttaggaatattttcatacaaatatcttactactaatgaataaaggatattattttactaatgagtgttcacatggtagttaataattcttttaaataattttaatagcatacttatgatgtgtattccaaatggtcataagatatactcaaattcataactttataatccatctgcttttgtgtttgttgtttaatattaagtaaaatgggctcaagatcaaagacagaatattacatatctgtatctgcttgttacacacacaaatgcaaaa

SEQ ID NO: 407374 - DNA, 515 bp, Homo sapiens
tgtgagagatagatacaatgatttttcccagatgcgtagccaattatgccaaaactgtttactaagtcatctatcatatattaaatacctttatgcactgggactgattctgaaattttcctaaccattgaaatatattttgattacagcggttttgtagtatgtccctccaactattctcctttactcagatatttgtggaatagtctcagcaattattatttcatattatatgtaatattgctctatccatattaagaatcaatgttataattattattagggaaactgaaaatactataatagccctaccactgaagaacatggtacattttccatttttttatgttggtattatgtctttgtttaagtatttcctaagtgtttacacttattttttactttgaatttttctattttatatttctgagtttccatttctactctaaagaaaatgctattgtttttkaatatatttacctcatatcaaatcatattatcttgtaaattatagt

SEQ ID NO: 407375 - DNA, 571 bp, Homo sapiens
tggttaaaagctttgtattccttcattttcttctagtgttcttggaatcttgtctgtttaaagtgtatgtttagattatatatggatttggagaattttctgtctttcttacctactttgaatacatagttagattatggatagggataggtaggtaattggatggatggatagatagataggtggatagatagatagatgataagtaatctgagattccttcactctcatatacattagcaaattagccaattataaataaaagttagggccatagcagatatattgagaaaaataagcrcaattcaaattaaggaagtatttttctatgtgaatagaattttcttcttatgtgctcatttatgaggttttgagggacctctttcttgcatactataaataaaagtttaaattatcttctgtcagggatatgccagacagagttcctgccttgacagaaaagattggaccaaataacttttaaattccacacctgcatcaaattctatgattggaccaaataacttttaaatcccacccctatatcaaattctattattataacatatat

SEQ ID NO: 407376 - DNA, 589 bp, Homo sapiens
tatgggtaagtgggtggggtggggctatgtcagagtcatccatcatcctccatcaatgtcaccaccacctgcagagacccagccaatgggcagtcagtcactcaggcctgacagctggccatcagtcccaggtgggggatatgtcaaagctttcaaggtattagctactggggaggctctttttgctaagacctgtgggttctaggaaggtctccaccttcagaattattaaacatatttgtgattttactcgcctctgtgacaactggtcagagtcaggcgagtcaatgggaagattcgctctgtatttacctaaaattatggtggatcatcacttaaaatcaaatattgggcagttaaggcaagaasagtaggcactttcatgcatggcaaactataatgtttactgtagtgttagattttcatattaagcaagtctagactaaatcatggctgcctaattagacaaggtactaatgagttaaggctttctctttgtcataaactgactcttcctctgaacccctaattagtgcctctttttttaagttgaggtttatcaattataccttaatataaaataaagttt

SEQ ID NO: 407377 - DNA, 598 bp, Homo sapiens
attttagaaagacatctaggatgctgtgattcagctctacacactccataccaatgacagtcaccattacatctttctgcagatttatggaaggcatgtatcacattcagtgcatttaatttgtacagtagttggtggtataactattagatttggagtcagaaagcctggctttgattatctttgtcacttatttttgtgcctcggtttacttatctataaaatcagtatattacctctcgttgtaaaaataacacatgtgagatcactttgtaaactataaagaggtattatatgaagtaagatgtattatgatgattgttacmctatcagagggaagccacattggaaccaaagatgaaatcaaatataatcagcacagcacttaggggatggaggtcacagtcaaatgttttaaattcaaacatgatcttacaaagccaggattatcaagaatcattggaatcagagattagtttattataatgtttgctttagcagcaaatattacttaggtttccattaagtatgaatggttgccaattagtataaatagtgactgtgattgccaaataaaactctaatacaaatattatct

SEQ ID NO: 407378 - DNA, 579 bp, Homo sapiens
aattacccatcctaagaaaaaattaattttaaaatcatttatgcacgtttgcatttatgataaaaattccatgaaaaccggaactataaaatataatgttgccccaggacaaaatagcaccagtctaaagtaactgacwgtagagctgatgaaatcagaaaatcagcaaatagaaatgctgtaaaattaacactaccatttttgaacatctaactgcatagcttatcattcgctttttaaaatctctaatctccatagcaactcagtaagaagtattatgttcccaatttttatatgctgagactaggtttaaaagtggggcaactgacctaggtcacttattaatttttgtctgaccctaaagcctatctttccactatgccaactatacttctgatctcaaatatttcctttcgtttggcttccagagttaatctatgtttgtttgagaacgaaaagctaattccacaatgtgtagcagtaggcagtgaaggagaacataaagtaaggagaaaaataagttaagtcaaaatacatgagtaagacagatgcacattttatagttaattgaaacacaaa

SEQ ID NO: 407379 - DNA, 655 bp, Homo sapiens
ctttgttatctgaaaagatagcccaccagaaagtaattctacagtttgaaagtagcatgaaaacattttatgggtacatgagtgactcagagacaatatatcatgtggcgtaaatacacttcttagaaaaatacctattttacatcagtgttggagtsaagttctggaccttaagagagatttgaatatatggacactagaagcatgttctcgccctattgtcttcaccaactctttatgtttttggagagatgaaaataagagtagaggggagcggagttaaataaaatagtgaaatatgaggggagctttcaaaaatagtagatcttttttattctctttattttctccccttcttgaatgatgtcaaggcacaaaggctcggcgggcttccttcagtggacgctcagccagggttcacccctgctctgctgggagaactctacacttcccccctcccctcagcccctcacccgcacccgtcctccaggctccttgccaaaggcagtgtgctcgcaagtgtaaccccagcctgcctgcctccagagctgggcaaatgtgtgaagtggccagcttcagttaagaccaagccgctccataaagcagatatgtgcatctttaaacgcaagatgacataaaactataaacataaaac

SEQ ID NO: 407380 - DNA, 655 bp, Homo sapiens
ctttgttatctgaaaagatagcccaccagaaagtaattctacagtttgaaagtagcatgaaaacattttatgggtacatgagtgactcagagacaatatatcatgtggcgtaaatacacttcttagaaaaatacctattttacatcagtgttggagtgaagttctggaccttaagagagatttgaatatatggacactagaagcatgttctcgccctattgtcttcaccaactctttatgtttttggagagatgaaaataagagtagaggkgagcggagttaaataaaatagtgaaatatgaggggagctttcaaaaatagtagatcttttttattctctttattttctccccttcttgaatgatgtcaaggcacaaaggctcggcgggcttccttcagtggacgctcagccagggttcacccctgctctgctgggagaactctacacttcccccctcccctcagcccctcacccgcacccgtcctccaggctccttgccaaaggcagtgtgctcgcaagtgtaaccccagcctgcctgcctccagagctgggcaaatgtgtgaagtggccagcttcagttaagaccaagccgctccataaagcagatatgtgcatctttaaacgcaagatgacataaaactataaacataaaac

SEQ ID NO: 407381 - DNA, 591 bp, Homo sapiens
aaaacaagtggaagaaattctaaagcagaaataacaacactttacagcacttaaccatgtgtctggcactgttctaagggctttacaaatatttactcccttagttctcctaagaaccctgtgacgtgcacaccattattactcccaatcttacagaaaaggaaaccgaggcacggggagtttatcacttgctccagtcacatagctgccaatcggtggagttgggatgcagaccrcagcagctggatctagtccaagcataagacttctccagtggaactgagaattcccagtgggccctctgttctagtgagtcattaagcctctctgatgaactcgaagtcagatagtaactttctcctctcactcaattttcttagaagatacaatgtgatatttttgtcttattttccataataataacccatctgcacttaaaaagaaatccaccgtgtttccttaaaatgcacactattacaggcatatgtgatatatgaagactcgtcaaagagaataatgcccattttaggctttgagtcttaagacagtggaaacctaaatgtacacaaaaataaataaagactcaagcct

SEQ ID NO: 407382 - DNA, 542 bp, Homo sapiens
gacttcttcctcaatttcatcaaaacgccagtctaatggagaagcttccagaacctcttggatatcttaaatgatagatgactgttatctggcacacaaaaccatctctgactctagttgtggtcattaacatgtgggcccagaaacaggcaaaaacctaatatgaatcattaagggttgaaagaaaccaaaccatagtgggagcaatgtttgggccactggttgagctcagccatgccagtttttcaggcaccgttactgaaagatgtcgtgttcttacctgcttagcattcaaagattactgattctttaactataaataattttaaaaatcaacttttggarttctaaaaatgtatatttttataaccatctcaagttttttgaggaacaatgagtaaacaaactgcaaaaacccacaaattaggagaaattaatgaatgagttattcactagcacaattttatgcaacaggaggcatcatgaagaagagaaaaagcatggaactgataagcacattgagactggatggtaaaattgtg

SEQ ID NO: 407383 - DNA, 623 bp, Homo sapiens
gaagggacagttgttgaagtctctccttagtgaaggttagactttgctacagatggtaagcgaacatcaagttttcagacatgggattttttttatgaarttagaaaaaaatatggtgtcttattatgcaacatttaagcagattagttttttgtctataggattaggtgaactaaaagtattagttcataaatatatttgatttttctgaaaagtcacaattgcaagaaaggccaaaatattattacttgaatgtattttcattatacagtatacaatagatgaagaaaagataatgtgaaaaaattaaaatatgcaaataatgcaacttcttaatttttgagaaataattttgaatattaatgtttgaattttctaatatttaaaaacctaacaatatgtatactcatgaagcctggcacaaactaggtactaaataatatttgctgaataaatgaataagatgtttcttaaagccttgctcaaactaaaaaggttaagagaaagaaataggaaattacatgtgtgaagaaaaaaaactaatctagaaaattgtaataagatatttataggaaatatcagtgcagtggcacctgtagtgattcacaaatgaaacattaggc

SEQ ID NO: 407384 - DNA, 623 bp, Homo sapiens
gaagggacagttgttgaagtctctccttagtgaaggttagactttgctacagatggtaagcgaacatcaagttttcagacatgggattttttttatgaaattagaaaaaaatatggtgtcttattatgcaacatttaagcagattagttttttgtctataggattaggtgaactaaaagtattagttcataaatatatttgatttttctgaaaagtcacaattgcaagaaaggccaaaatattattacttgaatgtattttcattatacagtatacaatagatgaagaaaagataaygtgaaaaaattaaaatatgcaaataatgcaacttcttaatttttgagaaataattttgaatattaatgtttgaattttctaatatttaaaaacctaacaatatgtatactcatgaagcctggcacaaactaggtactaaataatatttgctgaataaatgaataagatgtttcttaaagccttgctcaaactaaaaaggttaagagaaagaaataggaaattacatgtgtgaagaaaaaaaactaatctagaaaattgtaataagatatttataggaaatatcagtgcagtggcacctgtagtgattcacaaatgaaacattaggc

SEQ ID NO: 407385 - DNA, 548 bp, Homo sapiens
tttgatttggcagcaagaaaaccattggatgaccttgataagaaccgatttagtgaagagacagagactaaaaatgtgatgagagttaattcaagaattaagagaatggaaataaaatgatcagttttagacaaactgtttaasagataaatgcaaagaaaatattctgctttttccaaaattgttccaaatactaaagagtcacatcaagtggaagaattgcatttttaagaactcattattacttaaaatatcccacttaactatttcattcactttataataattattgataaacttcttagacaatgttattagagtgataaaacaaaaaaaaaattagaaatgatggtcctaacctcatggggcttataatttactttgaaatagaaaagaatccaagaaagcataattataaatacctaaatcaagtttggtctaatagtgtctaagacacataagtactaaaaacaaatattcttgaaaccacgatagcaaaatggaatgaattgaggtcagtcacagagatgacaataaaattgaagcca

SEQ ID NO: 407386 - DNA, 638 bp, Homo sapiens
ggaatagtttcaaattcattctatgaggctagtattacactgatgccaaaagcagacagacacatcgaaaaagaaagctacaggccaatatcgctgatgaacactgatgcaaaaatttttaacaaaataccatcaagccaaattcaacaacatattggaaagataattcatcataaccaagtgggatgtatcttaaggacgcaagaatggttcaacatatgcaaatcaactaatgtgatacatcatatcaacagaataaaggaccaaaattatataatcatttcaattgaagctaaaaaagtgtttgataaaattcaaaatcctttcacgaataccctgaaaaactaagtgtagaaggaacayacatcaacattataaaaggcatatatgacagagctacagctagcatcatactgaagggagaaaaactgaaagcctttttctctaagatttgaaacgtgacaaagatgcccaccctcaccattgttattcaggatactggataaaagtggatatctgaatagaggaatcagacaggaaaaataaataaaaagctccaaattggaaaggaagacgtcaagttattcttatttgcagatacaatctcatacctagaaaaacctaaagactccaccaaa

SEQ ID NO: 407387 - DNA, 638 bp, Homo sapiens
ggaatagtttcaaattcattctatgaggctagtattacactgatgccaaaagcagacagacacatcgaaaaagaaagctacaggccaatatcgctgatgaacactgatgcaaaaatttttaacaaaataccatcaagccaaattcaacaacatattggaaagataattcatcataaccaagtgggatgtatcttaaggacgcaagaatggttcaacatatgcaaatcaactaatgtgatacatcatatcaacagaataaaggaccaaaattatataatcatttcaattgaagctaaaaaagtgtttgataaaattcaaaatcctttcacgaataccctgaaaaactaagtgtagaaggaacacacatcaacattataaaaggcatatatgacagagctacagctagcatcatactgaagggagaaaaactgaaagcctttttctctaagatttgaaacgtgacaaagatgcccaccctcaccattgttattcaggatactggataaaagtggatatctgaatagaggaatcagacaggaaaaataaataaaaagctccaaattggaaaggaagaygtcaagttattcttatttgcagatacaatctcatacctagaaaaacctaaagactccaccaaa

SEQ ID NO: 407388 - DNA, 638 bp, Homo sapiens
ggaatagtttcaaattcattctatgaggctagtattacactgatgccaaaagcagacagacacatcgaaaaagaaagctacaggccaatatcgctgatgaacactgatgcaaaaatttttaacaaaataccatcaagccaaattcaacaacatattggaaagataattcatcataaccaagtgggatgtatcttaaggacgcaagaatggttcaacatatgcaaatcaactaatgtgatacatcatatcaacagaataaaggaccaaaattatataatcatttcaattgaagctaaaaaagtgtttgataaaattcaaaatcctttcacgaataccctgaaaaactaagtgtagaaggaacacacatcaacattataaaaggcatatatgacagagctacagctagcatcatactgaagggagaaaaactgaaagcctttttctctaagatttgaaacgtgacaaagatgcccaccctcaccattgttattcaggatactggataaaagtggatatctgaatagaggaatcagacaggaaaaataaataaaaagctccaaattggaaaggaagacgtcaagttattcttatttgcagatacaatctcatayctagaaaaacctaaagactccaccaaa

SEQ ID NO: 407389 - DNA, 543 bp, Homo sapiens
ttctctttcttacaaagaaaaacacaccaacttggtttgccttgacaaccaataccttcgtaatatgcaccactcaccattcactgacacatttatgcattctttcagaccctgtcctttctcttctcctgctctttgtcagggcaaacacaagtaacaaatgtgcacctaccttgaggcatactaggctacgagatttgatgcattaaagaaggaaatgctgccttcttagagcttaaaatatacctgggaagccaggacaaatgtgtcagaggagaggggaaaaaaacgcacaatgccaaaaccctaggacagggctgttaaaactttagtgtayatctgaattacctcaacttcttgttaaatataggtcccggttcagcaagtctggagtaggcctgaaatgtttgcatttgcatagaactctaagggatgcctaggtaccatggtgatcctcgaacacatttgaagtaccaaggcccaagtttacctgttaaatcaatagttctaaaattctatgatttgattctgcatcataagtga

SEQ ID NO: 407390 - DNA, 543 bp, Homo sapiens
ttctctttcttacaaagaaaaacacaccaacttggtttgccttgacaaccaataccttcgtaatatgcaccactcaccattcactgacacatttatgcattctttcagaccctgtcctttctcttctcctgctctttgtcagggcaaacacaagtaacaaatgtgcacctaccttgaggcatactaggctacgagatttgatgcattaaagaaggaaatgctgccttcttagagcttaaaatatacctgggaagccaggacaaatgtgtcagaggagaggggaaaaaaacgcacaatgccaaaaccctaggacagggctgttaaaactttagtgtatatctgaattacctcaacttcttgttaaatataggtcccggttcagcaagtctggagtaggcctgaaatgtttgcatttgcatagaactctaagggatgcctaggtaccatggtgatcctcgaacacatttgaagtaccaaggcccaagtttacctgttaratcaatagttctaaaattctatgatttgattctgcatcataagtga

SEQ ID NO: 407391 - DNA, 629 bp, Homo sapiens
catttaatatattttacagacacatgggtttaaatttggaggtttatatgacagtgttgccactcacaggaagcaatttgcccttcctaaacctttatttcttatctgtgaagtaggtgtagcaataattaccttagaaacttgagaaaggatgaaatgagataacatatgtggaaaattctagaacattgcctggcatattgtaagcactaaatctgttactcttcaagggatgagatcatgtctcattaatatatttttgaatcacaccatctaccaaagcatcaagcttacagtgcatctcagtaagcatgtgtggaaaaaatatgttttatagttttatgcatgtaacataaaaaagacaatctggaacaaartgatttgaggaacgtgtaccatctttaagtgtatgcaaacaatatatcaagattcaacaaatgttcacttctgaggcagatttctagcttcagtatttaaagatttaaattgactatcttaaaaattccccctttatttagatggtggtagaaaatcatattttcttttactaagaaaaagatagggattctacgattatctaaccaccaaatgtaaaataatttagtcttaaagaataattttctataaaa

SEQ ID NO: 407392 - DNA, 420 bp, Homo sapiens
cctttcttaagaattccactctcatgctgcagtctggatgggtaatatctaggtcattggcccagctgtaattctaagttctctctttctcrtcattcagaatccccctttgcttctcagctgaattagatcctttagttcggggataccatatcttcctccttcttagtttagtatttcatttcactgaaagtatatctgtagtagtctatgcccaatcaggagatagaatgcaatccatactatgggttaaagagggggacatttaatgtgaataatcattaaacatggcaagagtaactgtactatgtaaggatactttatatggtaccctaagggtgagggagattacctaagaaaggtcaacttgaaggggtccatactttgtttgagttgtgttttggccagggggtaggagaa

SEQ ID NO: 407393 - DNA, 660 bp, Homo sapiens
aaaaacaaaacttaaaaaaatacagaaaatctagtcaaacatcttcatgctcatgcttactgaagagtagaaagttctcagaagactgactttcctatgatttcttataaaccagaattagatatcaatagtgctcccataaccattgctccaacgtaactaattatatatcattgctagaaatgcagctgtgggattatttggtgtgattttttcttatctgcccttagcaaataatcctttcagttttaaatccttctcagagtaggaatccgttgctatcagttgctactgtgtaagtaattatttcttcttaattgttgtgaagtaagtgtactggttgggtgacgcaggctaagcctcccacctttcttcatagcattgagacaggatttacaggtatacttatgacttgattttattcaaagggataacagataagtgggtgttctgcgtgctagtaaacaacatggtcaactcgggagaaaacctattttatctytcttatttttctctaaaaggtattgttaaactaggaacagtgctctcttcaagaatctcctttggatattaactctgcaaattgtccacacaaaattacataaaccctacatcctcttatagggcatcattacattttggcctctgatgataatcatc

SEQ ID NO: 407394 - DNA, 660 bp, Homo sapiens
aaaaacaaaacttaaaaaaatacagaaaatctagtcaaacatcttcatgctcatgcttactgaagagtagaaagttctcagaagactgactttcctatgatttcttataaaccagaattagatatcaatagtgctcccataaccattgctccaacgtaactaattatatatcattgctagaaatgcagctgtgggattatttggtgtgattttttcttatctgcccttagcaaataatcctttcagttttaaatccttctcagagtaggaatccgttgctatcagttgctactgtgtaagtaattatttcttcttaattgttgtgaagtaagtgtactggttgggtgacgcaggctaagcctcccacctttcttcatagcattgagacaggatttacaggtatacttatgacttgattttattcaaagggataacagataagtgggtgttctgcgtgctagtaaacaacatggtcaactcgggagaaaacctattttatctctcytatttttctctaaaaggtattgttaaactaggaacagtgctctcttcaagaatctcctttggatattaactctgcaaattgtccacacaaaattacataaaccctacatcctcttatagggcatcattacattttggcctctgatgataatcatc

SEQ ID NO: 407395 - DNA, 660 bp, Homo sapiens
aaaaacaaaacttaaaaaaatacagaaaatctagtcaaacatcttcatgctcatgcttactgaagagtagaaagttctcagaagactgactttcctatgatttcttataaaccagaattagatatcaatagtgctcccataaccattgctccaacgtaactaattatatatcattgctagaaatgcagctgtgggattatttggtgtgattttttcttatctgcccttagcaaataatcctttcagttttaaatccttctcagagtaggaatccgttgctatcagttgctactgtgtaagtaattatttcttcttaattgttgtgaagtaagtgtactggttgggtgacgcaggctaagcctcccacctttcttcatagcattgagacaggatttacaggtatacttatgacttgattttattcaaagggataacagataagtgggtgttctgcgtgctagtaaacaacatggtcaactcgggagaaaacctattttatctctcttatttttctctaaaaggtattgttaaactaggaacagtgctctcttcaagaatctcctttggatattaactctgmaaattgtccacacaaaattacataaaccctacatcctcttatagggcatcattacattttggcctctgatgataatcatc

SEQ ID NO: 407396 - DNA, 566 bp, Homo sapiens
gttttaaataagcacatctgcgtctttttgtgcaacccttccttacctaagtattcaaaataatgtttgttaactagtgactcatatataatttgtcctcctattctgcatttttaaaataaatacataaatgtcattcacacaccttaaagctttatggctccctttctgccttctataatattcaagaattctggaaagggtagctcatttgaattcatttaaaggaytaagtgactccttatagttctttacttgtctgatgtttcaatgccatactatacaagcctcctttaacctttccagtgtgaatgtgatcctccctaagagagaaggcagaaatacaaagggaggtttttttatgttcattgtatcacgtcttaatgttcctcaagcaatggaaccattctttcttatgctgaaaacttcaatttttgaagacatttccattgctcgttgcactttacatagcctccattcattcagcacattaggttatgtaataatgttatttttcaagataatgccaatctttatcatttgtccttcattttatatgatgcttt

SEQ ID NO: 407397 - DNA, 566 bp, Homo sapiens
gttttaaataagcacatctgcgtctttttgtgcaacccttccttacctaagtattcaaaataatgtttgttaactagtgactcatatataatttgtcctcctattctgcatttttaaaataaatacataaatgtcattcacacaccttaaagctttatggctccctttctgccttctataatattcaagaattctggaaagggtagctcatttgaattcatttaaaggattaagtgactccttatagttctttacttgtctgatgtttcaatgccatactatacaagcctcctttaacctttccagtgtgaatgtgatcctccctaagagagaaggcagaaatacaaagggaggtttttttatgttcwttgtatcacgtcttaatgttcctcaagcaatggaaccattctttcttatgctgaaaacttcaatttttgaagacatttccattgctcgttgcactttacatagcctccattcattcagcacattaggttatgtaataatgttatttttcaagataatgccaatctttatcatttgtccttcattttatatgatgcttt

SEQ ID NO: 407398 - DNA, 575 bp, Homo sapiens
gctattctcatggatactttacataatcacattattctgattcttggttgtgcctgtctttaaaagatacttatcttaaacatgaatttattttaaaagaaaattaactgtttcaccatactgcagtttctcttgacactgtcttttaaaatagcaatgccataacaggtaaacaaaaacaagtttttaaactaccataataatgaaygcaaacaataacagataaatatatactatgtaaggaaatgaattacctttgagacccagttaagtaaagaatacagtgagactaacatttaaatggaattacataagtacacagaattctaatgtgcagtccctagaatttcattttgaaccaatatagaattattatttctttcatcttccaatatactcgaactctttatcttttccttttctcccatcaaagacatacagctccagaacattatcaagatcctttttatagttaggatttatagaagtgccttatttcgctggtaataaagattacatatatttccaaacttttaattttcaaatttgaaaaagcagcttaagataggatcatc

SEQ ID NO: 407399 - DNA, 511 bp, Homo sapiens
cattatatttaatgtacttttagagtagtaaaagtgcttttaaagtatgacacaggtaactttattttcagaaaaatcattaaacagtattcaaagtaagaactttaattctaaaaaatgtggtttgaaagactattttcattaatgtggttcttgaattatctgacatcatataggcatataaaagaaaaggtgttttccaaagtagaactggcctggtgagctcacacttactgataggtcgattattacatgtgtttaggaataaaaatagtyacttgctccatcatcctcactgcccctgtggttttcccaggaaaatatcatatctctatatgctcaatttggaaagaagggactgactgcacagaacaccttattgcttcagtaaaatatctcaaagcataatgttgaactgcaatagaatttatatgaggatttaggaatttaggaatcacatccttcaggaattcctgggactagaatactctgggactagaaccacagcatt

SEQ ID NO: 407400 - DNA, 585 bp, Homo sapiens
taatccaataataatgggggacttcaacatcccattgataacactggacaggtcatggaggcagaaagttaacaagaaaactctgtacctaaactggactctagaccaaatggacctaatagacatttataaaacactctttccaacaaccacagagtatccttttttttctttcatctgaacatggaacattctttaaaactgatcatatgcttggcaataaggcaagtcttaatraattcgaaaattgaaaccatatcaagtttctgtatcatggtggaacagaattagaactgaataccaagaataactcaatattacaaaagtacatggaaactaaacaacttatttctgaatgacttttgggtaaacaacaacaataaagcagaaattaaaaaaattgaaacaaatgaaaacagagacacaacatactaaaacttctgagatgtagcaaaagtattgctaagaggaaagtgtataatgtttaaaaaactccatctaaaagacagaaaaatctcaaatataatgtcacacttccaaccccaaagctagcagaataaaagaaacaaaaattagagcagaact

SEQ ID NO: 407401 - DNA, 561 bp, Homo sapiens
ttgggaggcttaaaacctagatgatgggttgataggtgcagcaaaccaacatgacacatgtatacttacataacaaacctgcacattctgtacatgtatcccagaacttaaagcaaaataaataaataaacaaataaaactgggataactggctagccatattcagaaaaatgaaactggacccctatctttctaaatatacaaaacgtaactcaagatggattaaaaatttaaatgtaagacctcaaactaaagaaatcctagcaaaaaaatctaggaaataccattctggatatcagccttggcaaagaatttaaaaccaagtccccaaaagtaattacaacaaaaacaaaaaatggtaagtgggaccacaattaaactagagaccttctgcacagcaaaagaaactatcaatagagtaaacagtctacacaatgggagagaatattaaaaaattatgcctccaacaaaggagtaatatccagaaactrtaatgaactcaaacaactcaacaagaaaaataaccaaacccattaaaaagtgggcagaggacagaaacag

SEQ ID NO: 407402 - DNA, 607 bp, Homo sapiens
ctagcaaaaaaatctaggaaataccattctggatatcagccttggcaaagaatttaaaaccaagtccccaaaagtaattacaacaaaaacaaaaaatggtaagtgggaccacaattaaactagagaccttctgcacagcaaaagaaactatcaatagagtaaacagtctacacaatgggagagaatattaaaaaattatgcctccaacaaaggagtaatatccagaaactataatgaactcaaacaactcaacaagaaaaataaccaaacccattaaaaagtgggcagaggacagaaacagactttgcttgaaagaagacatacaagcagccagcaaacacatgaaaaaatgaycaacatcactaatcattgtagaaacacaaattaaaaccgcagtgaaatatcatcttacatcagtctgaatggctattcataaaagtcaaaaaacaacagatgctattgaggctgaagagaaaagggaacacttttacactgttagtgggaatttaaattcataaaacctctatggaaaacagcacagaggtttctcaaataactaaaaatagaactaccattcaatctactactgggtatctacccaaaggaa

SEQ ID NO: 407403 - DNA, 607 bp, Homo sapiens
ctagcaaaaaaatctaggaaataccattctggatatcagccttggcaaagaatttaaaaccaagtccccaaaagtaattacaacaaaaacaaaaaatggtaagtgggaccacaattaaactagagaccttctgcacagcaaaagaaactatcaatagagtaaacagtctacacaatgggagagaatattaaaaaattatgcctccaacaaaggagtaatatccagaaactataatgaactcaaacaactcaacaagaaaaataaccaaacccattaaaaagtgggcagaggacagaaacagactttgcttgaaagaagacatacaagcagccagcaaacacatgaaaaaatgaccaacatcactaatcattgtagaaacacaaattaaaaccgcagtgaaatatcatcttacatcagtctgaatggctattcataaaagtcaaaaaacaacagatgctattgaggctgaagagaaaagggaacacttttacactgttagtgggaattyaaattcataaaacctctatggaaaacagcacagaggtttctcaaataactaaaaatagaactaccattcaatctactactgggtatctacccaaaggaa

SEQ ID NO: 407404 - DNA, 520 bp, Homo sapiens
agaataaaaaatccactattagtatggaacaggatatagctaagagttactatgtgaagccatacacatgaaattttataatgtgaaaatgttatagaacaaaataccttttcaaataattttataagcctgttatactctaagagaaaatgtaaactgataaattatattcatttcacttgattaatgtaatatcaattagatttaaaataattcccatcaagatactgcatatcagatggaaatatggagaagagaaacatasaaagactattcacatgaacatttcttcagaaaataggataacagcagttgtgtaagataaataaaatttcctatggtatatatagagaaaaacaagctattctttttaataagaatattaccatttacataataaagtcagatgacttaaaacacttttccttgcagtatctcactgtggtaaatctggtgtggaaaagttgaaacaaaagccaaaaaaattcatgcgaatgcaaagccatgactgttgagtagt

SEQ ID NO: 407405 - DNA, 367 bp, Homo sapiens
aacctctaatctcttctccattactataatttggtaattttaaaatttatataaatggaattgtacagtatgtaatttttcataattggcatttttgtcaattagaatacatatgcagagattcatccaggttgttgtgtttattgtttgtttctttttattgaccatagtatttcatagtatgggttactacaatttgtttatctatttacccatgaaaggatatttgggttgtttccagtttggagctactacaattagggctactataaacatttgygtatatgattttgcataaatataattttcatttttctgtaataaattctcgggagttaattgctgggttatatggtagtaacacttt

SEQ ID NO: 407406 - DNA, 565 bp, Homo sapiens
cccatgttattcactccacattacattgttactattttcgatttagcatgacatcgtatttgaagacaactaaataataagatgaaaattttatatattcatccatgtagttaccatttctggtgctcctcagcctatgtacagatccacatttccatctggtattatttcctcctgtctgaaggacttcctttaatatttcttacagcgcagttgtctctctgtgctgctttcctctctggtattgtctgtcaactctagctgcattattctgcctggactcctagctctgtcttctcaacytggagttcttgggactctgcctgggatctccctcattatactgtggcttaaaatctctctcaaggcacttagccagagcagtcataaggctcacctcatttattttctcactctcaggaatcactttcccttgtgttctgctctccagtctattgcaaactattgtttcatctattttgtcctttttttgattgtttcatgaggcagggtaaattcgatccctcccttttgttatttcatctttgtcagaagtgaacatctt

SEQ ID NO: 407407 - DNA, 460 bp, Homo sapiens
aagtttatggaatatcataaaatagacagtgccaagggaatgtttgtgaccttgtcaatgtcctcaagaaagaaactgagttaagttagaacactaacttaagacaactgctatattctatattaacttagcactgaatatatattagatgtatattatatattatacataatatatattacattgatatatattkatatatcatatctataaagtgtatatatatattttagatagatagataaaattatctgtaattgaaggcctgagatagaacttgataaaacatattaaaaaaagaaaacaaaagtgatcaatacggagagactcgtgacaccgtacagtataattttaaccattctctacttctctttacaagttgttctcataatacaactttccctcttcaggatttcctctgaagatcatgtttatcccattagcaagagtatgtaaacac

SEQ ID NO: 407408 - DNA, 598 bp, Homo sapiens
tactttgtgttcttgtttaaatgtcaaagagagaaaaaccctagtgaatttaaaaaaaaaaaaaaaattagaaaatacaaattagtaaaaataagagcactgtattcacactacccagagacaactactatttagtatattattttatattattccagatctatgcatctgaggatatatttgtagacatatatgaatatgtattttttcatattgaagttctactgtttggaaacmgaatcttttcagtttgtggtgcacgtctttgtgttgcagcaaattatcttctcatctactatataatttatatttagatctttcaagttttccaaaaagactctataactggtttgtccaaactaggatctaatgcaggagtacattttatatccagttgctatgtctattaagtcttcttaagctacatcagcacctttttcatgatactcaattaataaaaagaaactgcaagttgtcttatggaatattccctcctcttgattttactggttgcttgtttgtggttaatgatttatgtttcaaacgtaaattctgtgggaataggcagaatttggcctcttataatgttcaataaaac

SEQ ID NO: 407409 - DNA, 628 bp, Homo sapiens
ggtgcaatcaacaccctgagagaaagaaacatgatttgagactcagcttatataaacatagtgggtcacgagatgtccccacatcttgattgagcttctaccaatttttgcgtttgtttcctgtttctttaaacrgtgaaactgattttgttcttacttacatttaaatttcaccttgaaattatgccactgttccttatcaaatactgacatattcctaaatttaaacacttgagaaggataaacccaaatgataaatatcacttagtaatcctccaaggtcccttgtccctgaatactttatgctcgactgctgatttgtaagtcaaatagtttaggtgtatgccagtgttcacagtcagtcttatcaacctcatagcacagagaccttgtaatgtaatatctcatcaccaaaacgacagttagataacctaggatcatgcttcaaagaatgtcttagctggcaaatacatatttttcaacagattgtttggttgacttaaatatcagaactgtctttcaccaagtcttgatcgaccgactgttaactttgaaccagcactgccttgttttgaatgcatttcacttaaggtgatgaaaataaaaccctgtagtattaatagaaata

SEQ ID NO: 407410 - DNA, 531 bp, Homo sapiens
gtaaataaatagaggctattttcccataatatcccaagttatatcacatgtaatttaacagataatatgtattttcatactatagctactaagtcattattatgtttattagaacatgccagaagtataaaaatagtattttatatttatataacacagaatagataacaagaatcatttttttaacatcctaaacaacctaggagcagttacttattaatttgcctttcaaaaccagattcgctgggctcccattgagctcccaacttgtaggtagcaggaraatttagaccaagatcttttatatcaagattctaaattcagtatttcttttacctaagaggtctcctaattagtacttataaaattctctttaaaagattaaaattgaaaaatggaactgcccacttttaaaaattttactgaattcacccaggagtttaaattaagtaaattttagacacagatgatggtaaatttctctgtacaatagacaaagtattaaataaaagaatgataatctaatgtaac

SEQ ID NO: 407411 - DNA, 508 bp, Homo sapiens
taatatcccaagttatatcacatgtaatttaacagataatatgtattttcatactatagctactaagtcattattatgtttattagaacatgccagaagtataaaaatagtattttatatttatataacacagaatagataacaagaatcatttttttaacatcctaaacaacctaggagcagttacttattaatttgcctttcaaaaccagattcgctgggctcccattgagctcccaacttgtaggtagcaggagaatttagaccaagatcttttatatcaagattctaaattcagtatttcttttacctaagaggtctcctaattagtacttataaaattctctttaaaakattaaaattgaaaaatggaactgcccacttttaaaaattttactgaattcacccaggagtttaaattaagtaaattttagacacagatgatggtaaatttctctgtacaatagacaaagtattaaataaaagaatgataatctaatgtaacaat

SEQ ID NO: 407412 - DNA, 508 bp, Homo sapiens
taatatcccaagttatatcacatgtaatttaacagataatatgtattttcatactatagctactaagtcattattatgtttattagaacatgccagaagtataaaaatagtattttatatttatataacacagaatagataacaagaatcatttttttaacatcctaaacaacctaggagcagttacttattaatttgcctttcaaaaccagattcgctgggctcccattgagctcccaacttgtaggtagcaggagaatttagaccaagatcttttatatcaagattctaaattcagtatttcttttacctaagaggtctcctaattagtacttataaaattctctttaaaagattaaaattgaaaaatggaactrcccacttttaaaaattttactgaattcacccaggagtttaaattaagtaaattttagacacagatgatggtaaatttctctgtacaatagacaaagtattaaataaaagaatgataatctaatgtaacaat

SEQ ID NO: 407413 - DNA, 586 bp, Homo sapiens
tctgtacaatagacaaagtattaaataaaagaatgataatctaatgtmacaattctgtttatttcagaagcagtggaaagactttatgcctcattaagggaagtcttttgcttcattttcagttagaaaaccctgctagcggaattatatctgggctatttctaaatatttcattctcatttgtaaacgggaatgttatttccttaatagttacacatgcccatgaagtacatagagagttcctgtacataaaaaagattactaaagagatgtagatattataagagaaaataaccagtggggaaataaaggaaatgtggatttgaaatagaaaaggaatatggatttggaaaatttttttttctataggctgttactttaaatgacaattgaattaccaagtagaagagtgggtttctctctaataaacctattgatattatttatggatctcaaaagtataaagatacactaaaaatgttgttatggtcactatatgtgagataattgtatgtacaagtgaaaagaataacagaacattttcaaaatatattcatacccataaacccagtaaaataagagaatt

SEQ ID NO: 407414 - DNA, 613 bp, Homo sapiens
taagactactcatgtctttattctcagttgtgaatgggagaatgtgaatctaaaagtgctgaatcaatatttttgaaacttaaatttgacttcaatagaacagactttagtaaatttgttaataacttttatttaatcacttagagctttactgtttactatttagtataacttgggaaagtagtatgcatttgttttcctggacactgcatcttgtttaaagggagatatctactctgcttttaatctgtaagaataatctcagttaattaatgacattcatattaaaggaacttaataacaagcaactcgacaaaattagaaaaatgctacctttatacttaataaactatatcaaacatacctgtggtaaaggagcaggcaggaytgtgtcattctgactcttccaagataaaacagtgagtgactttaattaagttttccatttttctcttatagcttcatgcttatgtaggataatttatatgtagaaatcatttgtctgtcattcacatatttttatctcctctacttttataatgaacttattaccatcatatattaaatttgaaactgtgattaatatgcaagtttttatattaaatattaatgc

SEQ ID NO: 407415 - DNA, 513 bp, Homo sapiens
ttatatgtagaaatcatttgtctgtcattcacatatttttatctcctctacttttataatgaacttattaccatcatatattaaatttgaaactgtgattaatatgcaagtttttatattaaatattaatgctggtgttattttaatattctacattgatcctgatgtcaaggggatccagttggaggtaacagcawtgagtacaaatctgcgttaatgttatttattattttatatttttaatatagtagcagtaaataatattaccacccactcaggcaaaaggggttataataaaccctgaaagaaaatatatggtgtcacaaaagactcttactgctagtgcctttgtttcagggggctgagtcaaaggaacatgtggctttttgtctagacgcacactgtgagagggtaagcaagtggcagtgggaaaaggagtacctcataaagaatctctgcaagagggcatccaattctggtccagtacttgaaaacagccactgaaaattaacc

SEQ ID NO: 407416 - DNA, 559 bp, Homo sapiens
tctctctgtgcaccctaatggattgaacagacattcaacaaatgaaagaattaactataggattgaatacagtggttcagattttaaagaaagccaactactagggagacttaagagaagacactgagtcctgagggagaagtcttcagctatgagaataatatttaggcaaaagaaagatcacacagggctctacagatgtggtgatcaagagacttatcawccaagtggaataattttaggcatgaaaggagactgtattactagttatgccaggacaacaggcacagaaaagtcctaaacagaacatattatatggttacccagtatagcaagaaaaatttgaattttattttaagtgctgtaggtagttactgaagtattttaacatgcaattgacataatctcatttatattctaaatagatcatgcagtctatgtacggaggttagattgaggcgatataagaatgaaaatgaagatactaattaggagtctggaggcaatgccaataaggagaagtagatggaattaagatatatttggggggcaaaattta

SEQ ID NO: 407417 - DNA, 500 bp, Homo sapiens
gtcaggggcaaatcagagaggactttcaatgccatataagcgttaaagctttatttctaggccacagggagctccaaaggctagaaaaatgacacaatcagagctgtcatttaggcaatttactttggaaccagtataaaggaaccatttatgtaattattcaagcaggcctttgctatgtgccaggcacagggctgggtgttaaggatacagcaatgacttacacggtctgtgctctcaagaacttgaactttaatctgctacaggatggatttgaaggaggagagacaggaatctgggagagcaattggaaagcamatccggttggatctgctttcaaaatacatcaccttccctactattaccaccaccctggcccctaccagctctcagctttcacttggactttaagagaggcctcctaactgagcccctgttccaccctcatctgccctgtagcaaccacacctactccgcacccacggtagcccttttaaaaa

SEQ ID NO: 407418 - DNA, 554 bp, Homo sapiens
caaatggcttaccccatctcttcattcgggagaggtttttcctgaccagtaaccccatacaaaaagctttagttttctttaaagaacttattatctgatayactacatatttattttctgggcccctcaccagaatgtaaatttaatcaaggtacagattatactttattgactgatatatctgatatatcactagaggccatcacagtgcctagctcagatccagatgtgttctcaacaaatatttgttgaatgaatgaaggaagctattgccatagcccaaaaaagctcagaataaagcagtggtgaggaagagagagaatctaggagatatgaagggatcacaccctgctgcctgcttttctctgactgcctctttccaaggaaactaagctgggggagggaggcaatggcaggcaagagacatttttaagcctcttggttgtagaggagactgcaagagataaattgttctttcagccttgctccagtgaggtctccctgcctccgtctgctcactggtttctgtgcctttttcatctcccctttggctg

SEQ ID NO: 407419 - DNA, 569 bp, Homo sapiens
accctctgctttggcctgattgccctttggagcaagggcaaaggtcgggtcaaacatcacatgacctttgactttgtggcacctcggccctctggggataaaaactctgggggtaaccgggtcactgccaagctcttctgacctttccttccycagtggggaacccaccaagtccgcttcagataccaaaggggaagacagaaccaaggctgcttgaaccagaacctagtcccgagcagcaccgctctcctgcacctcccgcctgcgttgtgcctcctgccggagagtctgcttcctgagcttttccggtctgaggatagcattgtcatttcttctctgagggtcccagggagctgcagatgcagaccccgtcgttagtccagcccctgcttcaccccctccacacacaaaacaggaaacataatcaaagcgctagtcagctagtctaaccactaggctttcttcacacatgcttatatcctttaataaccaattgccaaccacggctataagattatttcagaggtggggctgggaagtgccacttgctccttagagtctgtttgtca

SEQ ID NO: 407420 - DNA, 569 bp, Homo sapiens
accctctgctttggcctgattgccctttggagcaagggcaaaggtcgggtcaaacatcacatgacctttgactttgtggcacctcggccctctggggataaaaactctgggggtaaccgggtcactgccaagctcttctgacctttccttccccagtggggaacccaccaagtccgcttcagataccaaaggggaagacagaaccaaggctgcttgaaccagaacctagtcccgagcagcaccgctctcctgcacctcccgcctgcgttgtgcctcctgccggagagtctgcttcctgagcttttccggtctgaggatagcattgtcatttcttctctgagggtcccagggagctgcagatgcagaccccgtcgttagtccagccccygcttcaccccctccacacacaaaacaggaaacataatcaaagcgctagtcagctagtctaaccactaggctttcttcacacatgcttatatcctttaataaccaattgccaaccacggctataagattatttcagaggtggggctgggaagtgccacttgctccttagagtctgtttgtca

SEQ ID NO: 407421 - DNA, 608 bp, Homo sapiens
taacattttttcatattaggtctttaaaatccagtgtatattttacacttacagtacatctcaacatcgcaattcagttactaaattttcaccagaaaaatctatatttcatacaggtcactgttgagaaagtggattcacacatctaagttttttcaaacataaaacattttccaataactgaatcgaatctctgtcttaaattttaaattaaacaaatttaaaattccattcctcagctgtaccacctacctttacaagcattcaatasgcacatgtggccaatggctaccatattggacagcaaagcttcagacattgcaacctggcgtatagactaaggtctccttggcagtggtgggtggacaaagtatccctcaagaaacacatttaatctcaaggaaatgcctatggagttagtcccaccacagccccttagtctcctttcacagctttaccagaacacttttgaggggtgaagcccattcaggaaacaagcttactatgatgagcacttccacagcttgtccaagcgttagcatgccagtccctcatcttacctgtcgggaagactgccctcagctcagctgtgatggcacaggctgctg

SEQ ID NO: 407422 - DNA, 608 bp, Homo sapiens
taacattttttcatattaggtctttaaaatccagtgtatattttacacttacagtacatctcaacatcgcaattcagttactaaattttcaccagaaaaatctatatttcatacaggtcactgttgagaaagtggattcacacatctaagttttttcaaacataaaacattttccaataactgaatcgaatctctgtcttaaattttaaattaaacaaatttaaaattccattcctcagctgtaccacctacctttacaagcattcaatacscacatgtggccaatggctaccatattggacagcaaagcttcagacattgcaacctggcgtatagactaaggtctccttggcagtggtgggtggacaaagtatccctcaagaaacacatttaatctcaaggaaatgcctatggagttagtcccaccacagccccttagtctcctttcacagctttaccagaacacttttgaggggtgaagcccattcaggaaacaagcttactatgatgagcacttccacagcttgtccaagcgttagcatgccagtccctcatcttacctgtcgggaagactgccctcagctcagctgtgatggcacaggctgctg

SEQ ID NO: 407423 - DNA, 604 bp, Homo sapiens
agcatttccaagaatttgggtgactgacagttcccagctgggcttcctccaggagttacccttaagtgaaaattcattcaagattatgccccctcctaagacagtctgcatctactggtcaatgtggaagtatattcccctgcatgattctgatttccttgtctcagtgggggacaactctgcagggccacaacagttcctgagttcctgctgtccagttctaaggccttcactttctcccagtgttgttgatcctgagagcacgactcaatgaactgcttttactcaaatctccatctgagagtatatttcccgaggaacccagcctgacagtcagtgccaagagtgctgaggaagcagattctaaaatgagattctaaactggaaatacctgttggccgctgsgagggagggccacatggcagtaggtggagcatggagattccccagcaaggtatcagtgcaactgtcaaagctttcactagtgctgaactgggatgggatcctgggggaaagcaatgcttagtgggggaaatatatcaggtctgataaatatatcaggttttataaagacaatggaattggatggctagctggaggcaat

SEQ ID NO: 407424 - DNA, 604 bp, Homo sapiens
agcatttccaagaatttgggtgactgacagttcccagctgggcttcctccaggagttacccttaagtgaaaattcattcaagattatgccccctcctaagacagtctgcatctactggtcaatgtggaagtatattcccctgcatgattctgatttccttgtctcagtgggggacaactctgcagggccacaacagttcctgagttcctgctgtccagttctaaggccttcactttctcccagtgttgttgatcctgagagcacgactcaatgaactgcttttactcaaatctccatctgagagtatatttcccgaggaacccagcctgacagtcagtgccaagagtgctgaggaagcagattctaaaatgagattctaaactggaaatacctgttggccgctgcsagggagggccacatggcagtaggtggagcatggagattccccagcaaggtatcagtgcaactgtcaaagctttcactagtgctgaactgggatgggatcctgggggaaagcaatgcttagtgggggaaatatatcaggtctgataaatatatcaggttttataaagacaatggaattggatggctagctggaggcaat

SEQ ID NO: 407425 - DNA, 638 bp, Homo sapiens
aatcatttatatttaaattctggctaaacctagcaaagtgtacacacatttaagctgctgtttcctgaaagctcacaaaagtagcagtattggaattttaaaaagcgtaaacttgcaaggacaaagagaacaagggaggataccacagcaaatgacaaccgttgacagtttttagaaaatgaatgtctaagtaaaagagttttgatatttggttattgtggaggaaaaattggtgataggtacatgggaagttacaaacaaaaacacgaggcatttaacctcagaggaaataaaaaattttgcaagaaaggaagtcatagcatagtatatagcttagttgtgaatagtgtttacatatttataataatgcagttattgagtatttaattttttattgagaagttrggggaagaggaagtgggagtgtttgggtgctacaagagagttaaaaccaaatattttcaacacagtaagtcaacagtgtctaaaattggtaagtcaagaattgtcaatgtaagcatgccatttagaattatggagggattatcacaagaaattgcttaaagtgcctaaaagtagttgcttttgtggaatgacgctctgggatcagaggctgctgtttttattaggagcctttt

SEQ ID NO: 407426 - DNA, 602 bp, Homo sapiens
ggaaatattcatagtctaggaaacataaacaccaaaacaggctgggcacagtggctcatgcctgttaatcccagcactttgagaggctaaggtaggaggactgcttgagaccaagtattcaagactagcctgggcaacatagtgagactctgtttctacaaaaaaaaaaaaaaaaaaaaaaaaaaaaaaattagctaggcgtggtgttgcacacctgtagttccagctactcaggaggccgaggtgggaratggcttgagcccaggaggtggaagctgcagtaaactgatgacaccactgcactccaccctgggcaacagagcgagaatttgtctcaaggggtttaaaaaaaaaaagtatagggcaagatgtgtgtaggttatatacaaataatatgcatcttatacaagggacatgagcatctatggatttgggttctgcagggttcctggaaccaatcccctgcaaataacgaagggagggacaactgtataaattcttggtcaatgcgacagttgaaagtagctagaaccttaaggtttatttcttagatggtgtatagttgaaaatcatctcattaaaatacaactcacttttcttcc

SEQ ID NO: 407427 - DNA, 557 bp, Homo sapiens
tttattccagacgctgtcctggtccctggacggttaggaacggttgggtcctgctactgcctccgtggggcagggagcctcgcgagaccagcactgcgccctactcggtccaccctgtccccgctccgcgctaggggctcaccctgggracaggggtcgggcgatcctggtcattgggggatcttccgcactagcttccatcacaatacctggcaggtgatgagcaataaatatttgctgaaagaacgcaaggttgtatcttttgtcaattaggcagatgcctttgggcctcaggttttgctttctattaatataaaaatgtgtatgcgttttgaataagtaatacatttacattctacaaaattcagaagaaacaaggttattatagtgaataaattttccttccttcaaggcaactagggttaccagtttcttgtgaaaaatttcacaagatattctatagttaacgtgtgtatatgtgtaatatataaagtgtatatatatatacacacacatatatttttttaacccagttgataacatacatactattttgc

SEQ ID NO: 407428 - DNA, 627 bp, Homo sapiens
aggttagcagcttgacccacttccctaggttctctgaatatttagtattcatctggctcagcccagctactccatgccaggggartggataggatatccagagtcttcctattataggcatacagccttaaaattagttcacacagagcagtgattcttaatcttggtggcctgggggtggctgttaaaattcagtgcaccccttatcaattacagatggtcccagtcttatgatgagttgacttactattttttgattttatgttggtgagaaagccacttgcattcagtagaaaccatactttgaatacccatgcaaccatcctgctgttcacttttagaaccatattcaataaattacatgagctattcaacactttattataaaataggctttgtgttatatgcttttgccagactgtaggctaatgtaagcattctgagcacatttaaggtaggctaggctaagctatggtgttcagtaagttaggcgtgttaaatgcaatttcaacttaccatattttcaacttacgataggtttattgggacataaccccatcataagtcatggagcacatgtacactggaatctctggaagtgggacccaggcagcaatagtttttaaa

SEQ ID NO: 407429 - DNA, 562 bp, Homo sapiens
agataagttgggaagtgttcactcatttttaatagaaattattagcttaggttcacctccgtgtatatcaatttcttttttttcctttttttctttcatctcagacttccccgctagtgtcattttccttattcctaaaatttatattttagaagtctctttaacagaggactgctgctagaaagtatctcatttttgtttatttgaaagtgtctttattgtactctcattcttgaaagatagttttgctgggtatataattctaggttgacagttgttttamtctcagcactttgaaggtatcaatagttaccaagcttccagttttgctaatgtgtgtataaaaacagattggaaataaacacatgaacaattgtgaacattctgcccagtgcatttggagtgaactatctgtccttcttgccctcatcactttacatcctcaaatggaaaacatgattctcttgactcttgtgtctagcattctcttgcttcttaaaaaagccttactacatatatatgcttctctaaacaataaatttaaacacagaactaagaccaa

SEQ ID NO: 407430 - DNA, 525 bp, Homo sapiens
tcctctgtcagccaagatgtcaagggaacttagctatggagaccctggtaagcattttgaacaaaacaatgtctcctttcgaggctggccatgaagaagtattattcttagctgtttctatgacaaatctgcaaaactgggagcccggttattatcaatattacaaaaactttgttttartgggcaccttttgatcacatttttacaaactctgtgttgaagtataatatacatagagacacatgcatatattataagtgtacagttcaatgaattttcacacactgaacatacccatttaaaccagcattcagatgaagaacgaaaatgtcacctgcacctcaggcccactcacctcatgctcctaacaaggcactgttctccctacccaactcccagagtagccactttgctgacttctaccaagagagcttagccctgcctgcttttgtgcactctgtgcattaagcatgagttacgcagtatgcaccctttaatgtctggtatcttttgttcaactttgtg

SEQ ID NO: 407431 - DNA, 545 bp, Homo sapiens
tggggagggggtcgcctgggagcgcattgcggagtgcttgtgtgtgcagatttttctctgggctcaggactcattgtatgtgggtcaacaccttcctccgtgactgtgtttttgttctgagctgagttttttggtttgcccttaaaaaaataataatttggcatccagagactggcagactgcctcagggcctggactgcggatataytgtgttctgcttgaggtttggggaggagggcaggcggtaggaagggagagggggagctgtttgtcacactttgctgtagagctgagagcagcctgacaagcttaaggaagtcgttgggctatgtggacaagaaggagccagctcccagcggtctcacaagctctatcggagttgaaagcgtggtcatggctctaaggagcacctcacgccctccctgtagctgttattgcagtttcaggcagagatccaggagctgcagaggaagggagaggcacaataacctacatggacccaagggagacatgtgttcctttaaaaatgtgaacagaaggaaaaa

SEQ ID NO: 407432 - DNA, 576 bp, Homo sapiens
tctctctcttactgccaccatgtaagaagtgccttttgcctcctgccatgactgtgagtcctccctagccacatggaactgtgagtccattaaacctctttttcttcccagtcttgggtatgtctttatcggcaacatgaagacttactaatacagatctcatcagaatggactttagtgtccacatttctaccaacattctgcctaggattactcaggtgcctctatgaagattgaggctctccctacagctctcctcttccacagctttacsaaaatcacatttaaaggtctcttcatggcaatgtgggctttttccagcatgtacctaaaaactctcccattctccaggtccaaagctacttctacatttctaggaatttgttacaatagtatcgcatttctcagtaccaatttctgtctcagtctgttcaagctgctataacaaaataccatagactgcgtggcttataaataacagaaatgtatttctcacagttccagaggctggaaagtccgagatcaacgtgccagcagatgtggtgtctggggaaagcctgcttcctcacagatagc

SEQ ID NO: 407433 - DNA, 590 bp, Homo sapiens
ttccagttgttctacatcctcaayagtttctgttcctttctacattggttatatcttcaaatcttttaaaactagaggaggattagtatgttgtgaggtcttcatcttatccgttaataaccttcttggcccctgttcctttcctcatcacttctttgggcgttggttgccctgtgttaataaaatgctaaataaacaggtaggaacgggaatagcaaaattcagaggatcatgaagtgatacattaatggttccctctttgttctcaagcaatattgttgtgtctagtctctacgactgtaggttgggcattcaggcaaatgttttccaagctaaaagatggagagaattaaactactttttgctatgaccaacagcaactctagaaaaaaaagctacttgagttctcctgtaagatgtgtgtttgccctaaaggctggttttcttttaatttaatacaaataaacacagagttgaaaagacagcctcttttcaagtgcaacttctccatcagcaatgcagtcagcaccagactatgttgactccattctttgtggcagaatcgtattcattagaataaagacttgctg

SEQ ID NO: 407434 - DNA, 590 bp, Homo sapiens
ttccagttgttctacatcctcaatagtttctgttcctttctacattggttatatcttcaaatcttttaaaactagaggaggattagtatgttgtgaggtcttcatcttatccgttaataaccttcttggcccctgttcctttcctcatcacttctttgggcgttggttgccctgtgttaataaaatgctaaataaacaggtaggaacgggaatagcaaaattcagaggatcatgaagtgatacattaatggttccctctttgttctcaagcaatattgttgtgtctagtctctacgactgtaggttgggmattcaggcaaatgttttccaagctaaaagatggagagaattaaactactttttgctatgaccaacagcaactctagaaaaaaaagctacttgagttctcctgtaagatgtgtgtttgccctaaaggctggttttcttttaatttaatacaaataaacacagagttgaaaagacagcctcttttcaagtgcaacttctccatcagcaatgcagtcagcaccagactatgttgactccattctttgtggcagaatcgtattcattagaataaagacttgctg

SEQ ID NO: 407435 - DNA, 580 bp, Homo sapiens
tttcttcataacaatagacgacgactacattttcctctgttttatgtgatctctcaaaagaccatagtggaacaatttgcattccttcagtgtcctgataaatatgacactctggcttgtacttttggacacattgtaagtacagcaagctgttaaaaaaaaacagagtgaacttaagaaacatgcagacctacataaacaaaatgctaaaattcattgaggcaggggaaaaaaaagacttgaacaagtagagacacatagcacattcaccaataggaagactaaagatgtccatwttctccagcttatgacatagctacaagatgattccagtcaaaaccccaaaggattttggggggaaattgacaaactcactcaaaaatctatcaacaagaatgaacagggaggaaggaccaaaataattttgaaaaagaatattaacaaaggaatgtttacttcattagatgtcaaaatattttatagaaagcgctcggtttcatttagggaaatcccatcttttatttaggtaaagacaataatatttgagcagaaatgaggtgaaataggaatatctttattt

SEQ ID NO: 407436 - DNA, 580 bp, Homo sapiens
tttcttcataacaatagacgacgactacattttcctctgttttatgtgatctctcaaaagaccatagtggaacaatttgcattccttcagtgtcctgataaatatgacactctggcttgtacttttggacacattgtaagtacagcaagctgttaaaaaaaaacagagtgaacttaagaaacatgcagacctacataaacaaaatgctaaaattcattgaggcaggggaaaaaaaagacttgaacaagtagagacacatagcacattcaccaataggaagactaaagatgtccattttctccagcttatgacatagctacaagatgrttccagtcaaaaccccaaaggattttggggggaaattgacaaactcactcaaaaatctatcaacaagaatgaacagggaggaaggaccaaaataattttgaaaaagaatattaacaaaggaatgtttacttcattagatgtcaaaatattttatagaaagcgctcggtttcatttagggaaatcccatcttttatttaggtaaagacaataatatttgagcagaaatgaggtgaaataggaatatctttattt

SEQ ID NO: 407437 - DNA, 575 bp, Homo sapiens
atacttaccctgttatcattttgccggtattccctgagaacacgggctcttgcatattaatttttatagcccccaaatctaggtacactgcctggcatgttaaaggatgtttaacaagaattgtattttataattataataaattaatgtgatttttcttaccccaccatcgacagcctttactatgttgctcttgatattaaagtagccccgaggttagaaccataaagatttctcttggatttctaatatctacacattacttgggtatcacttcatcgcaacacatcttgtaggagacacggtgagaaaatgacagaacccaygtgtattcggcatatatgataattctatgattggccactagtcgatgttgtagttacaagtaaaagccaccagatggcttaaggaaatgaatttatttccaattgaggtttttagcttggaaatctgggaccaaaaaaagcagtgattggaaaggaactaaacgcctctctagtgagccccacataactaacaaaacccacttatcagtatcacctgacttcagcaataggcttgtagaggtttggcaa

SEQ ID NO: 407438 - DNA, 535 bp, Homo sapiens
tcctggaataccagaaatgaaagggttttagagatcacctagtgtaacacccccatttttacacatgagaaactgggaccctgggagcttccatggtttgctcagaggacactctgagggtgagtggcagaaccaagactggaagctgggtttctccaggctcacagtccctggctccttgtgttgagtctttggggaggaggaagaaaaatgagagcaaaatgatagggtcaggactgcagaatcaaatgagaagcaccaaccgagataggaaggtttcttgaatgacaaygactgacacctgggtctatgcagggggcctccctgctcaggactttctctgagtgtggcccaggctaaggaattctgaggcccttctgatgctaagaccttggatctgggagactaagacatgtggactggtaaatccttcctgtgtcttctaggtgtgcagaagcgcacaaggacacctcccagctggcgtcattgaggccggcagcattttgacatgtgggtcagggttctctgggtcata

SEQ ID NO: 407439 - DNA, 554 bp, Homo sapiens
tcctgcttctctgaatgactttgggtaaatcacttaatctctccgggcctcacctgcaagcatccttatcccttaaatgatgtattgtgtgagctctaaggttctttcctgccccagaatcctgcgatgccctgcagtgccagccaattcctgcctcccctgccatcatggaggctctgggttctgtttgtgacaaaggccttgggaatgtggcccttcccctccagccactgcctcctccctggacagtcwccagttcttggtagccacacaggcctaatatttgaggaaaacagtaccacctcctgacaagcagacaggatcaaaaaccaaggtatccgtacttaagcacaggcaagcaccaaatctcaggccagatacagaggtcggcattggaggttgctccagcaagtctatgcccaatataattaaatccacccaatcccaggcccagtcctttcttagtcaagcgtgctcccggggctgcacagacaccagcaaatccttcctaggttcccttggctactctggaagtcctctcctcaatgcagccc

SEQ ID NO: 407440 - DNA, 568 bp, Homo sapiens
atatatgtacatacattttcctttttttttttcatttttctaacttttattttaagttcaggggtacatgtgcaggtttgttacataggtaataaatttgtatcatgggggttcattgtgcagatgattttgtcacccaggtattaaggccagtacccattagttatttttcctgatcttctccctcctcccaccctcctccctcctataggctccagtgtgtgtcatttctattttcattttcaaagagagatctctctgaaggcctcacattacctgttccagataacttttgacaacaacagcttcaaataaggtaaatattcatcaccacatacaagctgaaacgaaaataagtcatcaatggaatcctaatgaaaataagtccttaaaacaatccttcttttcttttttcgggaactctgtggatggctatgcatttgattccttttctcatgtctgactctgtttctgggggtgtcatgtggcaaaaaataaaatraaactaaaaataaaaaaaattttaaaaaggaggaggatgggcttttaagccagagagagagaaatc

SEQ ID NO: 407441 - DNA, 577 bp, Homo sapiens
tcctgggagtacttaagctggaaacttatcaagactgggaagactatatcgggtccacatggaagtagaactgagaaatggggtctgcagaaagcaaaaatgaagcagatagccagagagaagcagatgagaatatgcacaggtcagagagagagggagagagagaatggagagaaagtcttcctgtctgagggctttctaattgctggttccagccattcataagacccagaaatgtatccttgggttctttgacagacacacgtatccttctgatggctttctctttttgcttaaattaacttgaatggagttgaatgttccttgaaagcaaagagtccctgtaacaatgcttcttatcttagytactcacccaattgggtgatgccatcaccattgccaccagcaatcacaatggaacccattcctcttgagggcagggagttgggagccagcaccccttagacagcagagccaaatgccaaaagcgcatcatactagcttgtagtagcatttgttagccaaatggtgtgctggcaaatgtctaacaaccaactcacctggagaaaaaaaaaaa

SEQ ID NO: 407442 - DNA, 298 bp, Homo sapiens
tacaagaagtctatgatagtctggaaagacttttaggataagactgtaaaatacttgaagacacttgatcaagattctcatgtaacttcttaagaaagcattagtgcccatcaaggattatgtcaaacagtctaccacattctacagctttgtttagtcttttggttataagagtcagtttcagggcagttgayatagtgtctatcctctgacttcattagaactactatcagatatgctgtacataatgtaaacaagataatggagaactgtttcaggaatgacagtgtgatcacct

SEQ ID NO: 407443 - DNA, 462 bp, Homo sapiens
acattctggttgggtgcaatgtaatatacgagtaatttagtgttaatcgagtgatcttgcatatcttgactctaagcaccgaaaggggacagccttctcgctggcctccttagatcgccctcacagaaaagagggagtttaaatgaaaaactgaaagatggrggaagtttggtaattgggaaagggagataggaaaaggcaatcagagttaaagccagaggcatagctacataagaccctctcttttaattaccaagcacaagtcgtgggctctccaatggaaagacctacccagacataagcctggaatgggaccccaagaaaggacccagggtgaggagctgaggactgagcagttccacttcccaatagtgatctaggatcaccatatcctccttagccactcacacagtccatacactggactccctctgcctacatcccaagactgaatgagaagga

SEQ ID NO: 407444 - DNA, 538 bp, Homo sapiens
cattccacttgtgggaagttgtttggtggtttgtttgtttctgcttttttttccagcagaggaacatgtgcatgctrggctcagcgaggaaagtctgtagctatagctcaacaatcaggcagccttgatgctcaagaagagtcttggataatggagacttattttccatctcatacactactgcagacacaatagtactgtactcagagccagtgtactgaggtgagtggccataaaacctactgagacaccagccaggacagctaaaggagtacttgcattaccactcccccaaccccaggcagcacagcttgcagctccaaaaaagaccgcttccttctgctagaggagattagaggaaagagtaaaaaggactttgtcttgcatcttggatatcagttgagccacagtaggatagggcactggtcagggtcatgaggcccccattgtggatgtaactaactttttttttttaattttataggctgataggcagaagggacttgtctcaaataagactttggacttggagttttga

SEQ ID NO: 407445 - DNA, 538 bp, Homo sapiens
cattccacttgtgggaagttgtttggtggtttgtttgtttctgcttttttttccagcagaggaacatgtgcatgctgggctcagcgaggaaagtctgtagctatagctcaacaatcaggcagccttgatgctcaagaagagtcttggataatggagacttattttccatctcatacactactgcagacacaatagtactgtactcaragccagtgtactgaggtgagtggccataaaacctactgagacaccagccaggacagctaaaggagtacttgcattaccactcccccaaccccaggcagcacagcttgcagctccaaaaaagaccgcttccttctgctagaggagattagaggaaagagtaaaaaggactttgtcttgcatcttggatatcagttgagccacagtaggatagggcactggtcagggtcatgaggcccccattgtggatgtaactaactttttttttttaattttataggctgataggcagaagggacttgtctcaaataagactttggacttggagttttga

SEQ ID NO: 407446 - DNA, 538 bp, Homo sapiens
cattccacttgtgggaagttgtttggtggtttgtttgtttctgcttttttttccagcagaggaacatgtgcatgctgggctcagcgaggaaagtctgtagctatagctcaacaatcaggcagccttgatgctcaagaagagtcttggataatggagacttattttccatctcatacactactgcagacacaatagtactgtactcagagccagtgtactgaggtgagtggccataaaacctactgagacaccagccaggacagctaaaggagtacttgcattaccactcccccaaccccaggcagcacagcttgcagctccaaaaaagacygcttccttctgctagaggagattagaggaaagagtaaaaaggactttgtcttgcatcttggatatcagttgagccacagtaggatagggcactggtcagggtcatgaggcccccattgtggatgtaactaactttttttttttaattttataggctgataggcagaagggacttgtctcaaataagactttggacttggagttttga

SEQ ID NO: 407447 - DNA, 488 bp, Homo sapiens
gtgcctgcttctgtcttgccttccaccatgactgtaagtttcctgaggcctccccagcgatgcagaactgtaaaktaattaaacaccttctctttgtaaattacccagtgtggggtagtgtctttacaacagtgtaaaaatggactaatacaggttccctgaaatattctgagtccctttggaggcaagaatctcttcataccagcatggtatactgatgaagtacatcctgatctcatgggctgagaaagaatttatacataccatttatgtgccagcaactctatgtgcaggcttttgagcccagaatgggctttcttgccacatctattctatctaacatgtatctaagccaactcaatatctctcatccacactgggatagtccctaaattgctgtctgttgcccacctgagataacgagatgttgttaaatcaggtgtgtgtgacccagatatgtctatctggagtggcaggagagggtctat

SEQ ID NO: 407448 - DNA, 488 bp, Homo sapiens
gtgcctgcttctgtcttgccttccaccatgactgtaagtttcctgaggcctccccagcgatgcagaactgtaaagtaattaaacaccttcyctttgtaaattacccagtgtggggtagtgtctttacaacagtgtaaaaatggactaatacaggttccctgaaatattctgagtccctttggaggcaagaatctcttcataccagcatggtatactgatgaagtacatcctgatctcatgggctgagaaagaatttatacataccatttatgtgccagcaactctatgtgcaggcttttgagcccagaatgggctttcttgccacatctattctatctaacatgtatctaagccaactcaatatctctcatccacactgggatagtccctaaattgctgtctgttgcccacctgagataacgagatgttgttaaatcaggtgtgtgtgacccagatatgtctatctggagtggcaggagagggtctat

SEQ ID NO: 407449 - DNA, 488 bp, Homo sapiens
gtgcctgcttctgtcttgccttccaccatgactgtaagtttcctgaggcctccccagcgatgcagaactgtaaagtaattaaacaccttctctttgtaaattacccagtgtggggtagtgtctttacaacagtgtaaaaatggactaatacaggttccctgaaatattctgagtccctttggaggcaagaatctcttcataccagcatggtatactgatgaagtacatcctgatctcatgggctgagaaagaatttatacataccatttatgtgccagcaactctatgtgcaggcttttgagcccagaatgggctttcttgccacatctaktctatctaacatgtatctaagccaactcaatatctctcatccacactgggatagtccctaaattgctgtctgttgcccacctgagataacgagatgttgttaaatcaggtgtgtgtgacccagatatgtctatctggagtggcaggagagggtctat

SEQ ID NO: 407450 - DNA, 623 bp, Homo sapiens
caactctatgtgcaggcttttgagcccagaatgggctttcttgccacatctattctatctaacatgtatctaagccaactcaatatctctcatccacactgggatagtccctaaattgctgtctgttgcccacctgagataacgagatgttgttaaatcaggtgtgtgtgacccagatatgtctatctggagtggcaggagagggtctatctgctcacaagagtctctgcaacattttctaagtcagttcagaagcttattgattcacctttgcaggcaacatagccatgagaaaggtgtccaaaaattcctgaacttctggaaatttttaaagtctccacaggtgtccagaggtgactgtagctgtactgaaagtcactgcctggataactggcctgttaaaacaaatgcaaaatacactaagcccactaaggatacccagaagccatggtattcarttaatttttgtctttcttgcaggtgggagaatactgaggattatgccttcctatagccagtgaaggttattccagtgcctagatgtaccagtcaacagaggccatgggagagcagatggcagaagggcagccaggtcctttcactggggtttactgcttgtcatg

SEQ ID NO: 407451 - DNA, 623 bp, Homo sapiens
caactctatgtgcaggcttttgagcccagaatgggctttcttgccacatctattctatctaacatgtatctaagccaactcaatatctctcatccacactgggatagtccctaaattgctgtctgttgcccacctgagataacgagatgttgttaaatcaggtgtgtgtgacccagatatgtctatctggagtggcaggagagggtctatctgctcacaagagtctctgcaacattttctaagtcagttcagaagcttattgattcacctttgcaggcaacatagccatgagaaaggtgtccaaaaattcctgaacttctggaaatttttaaagtctccacaggtgtccagaggtgactgtagctgtactgaaagtcactgcctggataactggcctgttaaaacaaatgcaaaatacactaagcccactaaggatacccagaagccatggtattcaattaatttttgtctttcttgcaggtgggagaatactgaggattatgccttcctatagccagtgaaggttattccagtgcctagatgtaccagtcaacasaggccatgggagagcagatggcagaagggcagccaggtcctttcactggggtttactgcttgtcatg

SEQ ID NO: 407452 - DNA, 626 bp, Homo sapiens
tctaggcatggggattgatcttaagaaaaagcagggaaagtgctttacctgtcctgggactctgctccacttgccaacatttgaatggattcatttgtgtggtagtcaagctacgggaaataaagggaccagtcagtcttccacacaatgacacagaggccaattatcacaagtccaaatctccatttgtcacccagctcacattcccgctgtggcacaaggtcacatgcactcgtgtccaactccaaatagtagcttcacatagtatgtcagcactctcccatccatcacctcttttagaaggtcttcctctggattgaaaatggcctgtgataaaagataatgaccacaggaagcagtttttttttaggatctgatccacatgagaagataggacatctaatttggtctgaggactttagctctgctaatatttaaggtaactgacccctgtgtctatagatttacaaagggaatggagtgagagatgatgaaatctgttttctttcctagtgagtatgaggaagaacccttayatcatgctctctgttgcctgttctccatacagtgccatttcccatttagggagaagacatggattgtcagtgggagcaagcctgagacat

SEQ ID NO: 407453 - DNA, 568 bp, Homo sapiens
ttattcatttgtgacctgagcgacattcctcttatcatatgataagtaaatttactggtggcactgacagtaggtacttctatcaaccaagtttggattgtaggcattaagcatcctggtgcttttcccaggcaaataggaggataatgatacccaatggaaatgtttatcatcattcctttttcttcaggttgggcagggccacggtcatctgtggggcctggtacccatgcactgttattaacatatacttcaataggattatctatccaagtgactgctcgaattaagggtgggaaaatcacataggcccagtaagtatagttagctgtagcggctcctgaagacatagggagacttaccaccgytgatacaatcattaaatctgcaagtagcatattctctggagtttgtgttacccttgtgttttccaggcttttttcagctaactgtgtcagcttctttagctgggcccaggtcggcggccccactttcttggtggatggcaacttcatctgttcttctgatatcaccatttcgttcaccctgcgagtcgatgatgttcgat

SEQ ID NO: 407454 - DNA, 535 bp, Homo sapiens
tttgctatccccaattttaatataaggcaagagcagtaaytgagcaattctatcacctggattggcactccagggaacagtacagctgatcactaactgaatttcccctttataatctgagtcaattacccagtatgaatttgaactcctttcaaatttagactagatcttcctaaaataaggcctaccatcccttgtggcagcgggccatatacccctgtaggaatcttttgcaggggctctccacggagtaaagaaatcatttgagtagaacataaatctactgcagcactgcctgctgtggcagaggataattgtcgtattgtaattggctgatttcctgaaatggtggtatttactgtgggggttgttgtccctgaaaaccctgaggaacaaatggctgaatcgggaatgccccactttgttgcggggcctggggctggcccctcttgccgtttcccgacaatggttgtccctttttatcaaatttagaacgacatgccttagcccaatgttttccttttccacatcttgg

SEQ ID NO: 407455 - DNA, 535 bp, Homo sapiens
tttgctatccccaattttaatataaggcaagagcagtaattgagcaattctatcacctggattggcactccagggaacagtacagctgatcactaactgaatttcccctttataatctgagtcaattacccagtatgaatttgaactcctttcaaatttagactagatcttcctaaaataaggcctaccatcccttgtggcagcgggccatatacccctgtaggaatcttttgcaggggctctccacggagtaaagaaatcatttgagtagaacataaatctactgcagcactgcctgctgtggcagaggataattgtcgtattgtaattggctgatttcctgaaatggtggtatttactgtgggggttgttgtccctgaaaaccctgaggaacaaatggctgaatcgggaatgccccactttgttgcggggcctggggctggmccctcttgccgtttcccgacaatggttgtccctttttatcaaatttagaacgacatgccttagcccaatgttttccttttccacatcttgg

SEQ ID NO: 407456 - DNA, 580 bp, Homo sapiens
ctatttccatgagcaatggaatttaataatattctcatataaggagagttaggtccatattgtttaactcctgcttgactgcctttcccggccggcatctgttgtaacattaccggatattgccatgcctcaagatctccctgttttctggctgtagcaatggtctcatgcagtgcactatcttgtccactaggtggtaccgtaagatcaaacgccatcgccgtgggttgttgatatastgccttgctatttgccacaggacgcaccgcctgagatccatactgaacctctggagacggcggatactgaaatgcggctggcggctggtgttgataaactaccgatggttgggttttattttctactggctggtattgcggatactgtgcctggattggcatttgagattgtgacatcacaggcatctgaaccgcgggagaaggagttggtggccatcgtggtctaaactctgatggcccaaataattctggacctccttcccccaattttgatgattcaggatatattacctcctgtaattgattatagtcaacattctgcattgaccaagtcagtacag

SEQ ID NO: 407457 - DNA, 580 bp, Homo sapiens
ctatttccatgagcaatggaatttaataatattctcatataaggagagttaggtccatattgtttaactcctgcttgactgcctttcccggccggcatctgttgtaacattaccggatattgccatgcctcaagatctccctgttttctggctgtagcaatggtctcatgcagtgcactatcttgtccactaggtggtaccgtaagatcaaacgccatcgccgtgggttgttgatatagtgccttgctatttgscacaggacgcaccgcctgagatccatactgaacctctggagacggcggatactgaaatgcggctggcggctggtgttgataaactaccgatggttgggttttattttctactggctggtattgcggatactgtgcctggattggcatttgagattgtgacatcacaggcatctgaaccgcgggagaaggagttggtggccatcgtggtctaaactctgatggcccaaataattctggacctccttcccccaattttgatgattcaggatatattacctcctgtaattgattatagtcaacattctgcattgaccaagtcagtacag

SEQ ID NO: 407458 - DNA, 580 bp, Homo sapiens
ctatttccatgagcaatggaatttaataatattctcatataaggagagttaggtccatattgtttaactcctgcttgactgcctttcccggccggcatctgttgtaacattaccggatattgccatgcctcaagatctccctgttttctggctgtagcaatggtctcatgcagtgcactatcttgtccactaggtggtaccgtaagatcaaacgccatcgccgtgggttgttgatatagtgccttgctatttgccacaggacgcaccgcctgagatccatactgaacctctggagacggcggatactgaaatgcggctggcggctggtgttgataaactaccgatggttgggttttattttctactggctggtattgcggatactgtgcctggattggcatttgagattgtgacatcacaggcatctgaaccgcgggagaaggagttggtggccatcgtgktctaaactctgatggcccaaataattctggacctccttcccccaattttgatgattcaggatatattacctcctgtaattgattatagtcaacattctgcattgaccaagtcagtacag

SEQ ID NO: 407459 - DNA, 580 bp, Homo sapiens
ctatttccatgagcaatggaatttaataatattctcatataaggagagttaggtccatattgtttaactcctgcttgactgcctttcccggccggcatctgttgtaacattaccggatattgccatgcctcaagatctccctgttttctggctgtagcaatggtctcatgcagtgcactatcttgtccactaggtggtaccgtaagatcaaacgccatcgccgtgggttgttgatatagtgccttgctatttgccacaggacgcaccgcctgagatccatactgaacctctggagacggcggatactgaaatgcggctggcggctggtgttgataaactaccgatggttgggttttattttctactggctggtattgcggatactgtgcctggattggcatttgagattgtgacatcacaggcatctgaaccgcgggagaaggagttggtggccatcgtggtctaaactctgatggyccaaataattctggacctccttcccccaattttgatgattcaggatatattacctcctgtaattgattatagtcaacattctgcattgaccaagtcagtacag

SEQ ID NO: 407460 - DNA, 587 bp, Homo sapiens
tggggagaaaccttggacaataccctgctttcaagggcagaggtccctgcggctttccacagtgtattgtgcccctggtttattgagactagagaatggcaatgacttttaccaagtatactgcttgtaaacatttggttaacaaggcacatcctgcacagccctagatccctcaaaccttgattttatacaacacatgtttttgtgaactccaagttgggtcaaagtggttggggcaaagtggctggggcaaagctacaaatgaacaacatctctgcaaagcaattgttttaagtacagrtctttttcaaaatggagtctcttatgtcttccctttcgacatagacacagtgacagtcggatctctctttcttttccctacacaaataaagagcccagtgccttttctcattgctcaagagattgaaggggtaggaagaaaagatgttaagttataaacatgtttcagttttggtaccacttgagccaatttatgttttgaagaggaaagggtcttgcctacaagtcagtccctgggttttccttctgcttatggaatccaggcaatgggcaaagagaaaaagaaa

SEQ ID NO: 407461 - DNA, 540 bp, Homo sapiens
gcagcgtcaaactggcattgggtcacatggcagccagcattaacctttatgccacatttataaaacatgaatgtcatgagcccactctcagagaccttataatttggagggttaggtcagatccacaaatctcttctatctcatggyaaaggaaacctggcgtgtagcaggagatggtgtgataacaataacatattgcatgatcagtatttgtattcttcttagcaatattaaactttttgacctcctccattgtgtcatcaatttgcttaatacagtttctgcctcagcgtctgtttttaggcctggcataagctgtttgaaacccaggcacataccccacccatcatctttggcctacttaacacctcccctccctgcgtggtggtttggagaacctgcttgttcctcatcccactgatcccaaacccaggacaccccacagctgctgaccaggattaaacctaagggagatttaatgccgttaaatcagaagaaattctgattctcagggactgacattcattcacttaaatactt

SEQ ID NO: 407462 - DNA, 540 bp, Homo sapiens
gcagcgtcaaactggcattgggtcacatggcagccagcattaacctttatgccacatttataaaacatgaatgtcatgagcccactctcagagaccttataatttggagggttaggtcagatccacaaatctcttctatctcatggtaaaggaaacctggcgtgtagcaggagatggtrtgataacaataacatattgcatgatcagtatttgtattcttcttagcaatattaaactttttgacctcctccattgtgtcatcaatttgcttaatacagtttctgcctcagcgtctgtttttaggcctggcataagctgtttgaaacccaggcacataccccacccatcatctttggcctacttaacacctcccctccctgcgtggtggtttggagaacctgcttgttcctcatcccactgatcccaaacccaggacaccccacagctgctgaccaggattaaacctaagggagatttaatgccgttaaatcagaagaaattctgattctcagggactgacattcattcacttaaatactt

SEQ ID NO: 407463 - DNA, 540 bp, Homo sapiens
gcagcgtcaaactggcattgggtcacatggcagccagcattaacctttatgccacatttataaaacatgaatgtcatgagcccactctcagagaccttataatttggagggttaggtcagatccacaaatctcttctatctcatggtaaaggaaacctggcgtgtagcaggagatggtgtgataacaataacatattgcatgatcagtatttgtattcttcttagcaatattaaactttttgacctcctccattgtgtcatcaatttgcttaatacagtttctgcctcagcgtctgtttttaggcctggcataagctgtttgaaacccaggcacataccccacccatcatctttgrcctacttaacacctcccctccctgcgtggtggtttggagaacctgcttgttcctcatcccactgatcccaaacccaggacaccccacagctgctgaccaggattaaacctaagggagatttaatgccgttaaatcagaagaaattctgattctcagggactgacattcattcacttaaatactt

SEQ ID NO: 407464 - DNA, 540 bp, Homo sapiens
gcagcgtcaaactggcattgggtcacatggcagccagcattaacctttatgccacatttataaaacatgaatgtcatgagcccactctcagagaccttataatttggagggttaggtcagatccacaaatctcttctatctcatggtaaaggaaacctggcgtgtagcaggagatggtgtgataacaataacatattgcatgatcagtatttgtattcttcttagcaatattaaactttttgacctcctccattgtgtcatcaatttgcttaatacagtttctgcctcagcgtctgtttttaggcctggcataagctgtttgaaacccaggcacataccccacccatcatctttggcctasttaacacctcccctccctgcgtggtggtttggagaacctgcttgttcctcatcccactgatcccaaacccaggacaccccacagctgctgaccaggattaaacctaagggagatttaatgccgttaaatcagaagaaattctgattctcagggactgacattcattcacttaaatactt

SEQ ID NO: 407465 - DNA, 567 bp, Homo sapiens
agaaagattgttttaatttgctgtcctacttcggtgacctgataaatacactggggacagtccccattttgagtaaggttagttgaagcccttactgtataagtccaaaatttaagaaaaatgaatctaacgatgagcttcctcrtgcttcggccatgcgtggaccagtcagcttccaggtgtgactggagcagggcttgtcgtcttcttcagggtcactctgcaagggttgtctgggcttggtcttgcctcccaggtttccggcgctgcaggttttacacagctgtggtggttccagactgggattccttctaccttcacagcggtgggagtgctcaggacgacagtctggggtcctttccacagtggacacaaagaggctactttccagtccttgatccacactcgatcacctggggagaaagggtgaactggggagaataaactaacagggcatctctcatttacccaggctgagattgtctgtgtaatttttcctaaagcctgtagctgtcgctgtaactcaatttcacctaactctcagggagtgcctggaagtccccgcaa

SEQ ID NO: 407466 - DNA, 594 bp, Homo sapiens
acctgctttctttattatttttgaaatgcacatgcaataataattgatctcactttatacatctatcgtttgccaggcaatatagtaggaactgaagtaaaattgttatacacaaacagtacataattaatggatatagtttggcaagtttgcacatatatattatcttgttaccacaccaatatccaggtaataatatatccatcacctccaaatgtttcctacgtccctttgttgttgttgttgttgttgtcagaacccctaagatcgaccctcttaacaaattgttaaatacaaaatacctcattgttaactataggtactatgttttggagcctatctctgtaattgactcattttgtatagctttaacccttgaacaataactccccatattgctctttccccactcaataaaacaccaaactcttttaaagcacattctatataatccactttatgaagcttttcctaacactcttttatctgttcccccccagtaaagggaactactaatataacaattacctattttggattattgtgtcttttacaaacattscttcatgaacccatttaacacttatctcccat

SEQ ID NO: 407467 - DNA, 376 bp, Homo sapiens
atttcaaacacatgcaaaggcacacacacrtgcgcgcgcgcacacacacacacacacacacagtattacctaaggcagaggtgcagatgacaatcttggatagacagctcaaaactcttagtactaaaataatcctaataataattttccttccaaagttaccaccaacaatcagatctcttaagggttggtgccttaggttttcgagccttgtgtatcttttggctttcttttttggttgtgtgctatttatctcatagaaagaaacctcttcttcatcctatgccagtgctgtattgtaggggcttgttgacatcttcctgatatgtagcaatccaggtgactggcctctggcttcttaagagcaaggccatca

SEQ ID NO: 407468 - DNA, 376 bp, Homo sapiens
atttcaaacacatgcaaaggcacacacacatgcgcgcgcgcrcacacacacacacacacacagtattacctaaggcagaggtgcagatgacaatcttggatagacagctcaaaactcttagtactaaaataatcctaataataattttccttccaaagttaccaccaacaatcagatctcttaagggttggtgccttaggttttcgagccttgtgtatcttttggctttcttttttggttgtgtgctatttatctcatagaaagaaacctcttcttcatcctatgccagtgctgtattgtaggggcttgttgacatcttcctgatatgtagcaatccaggtgactggcctctggcttcttaagagcaaggccatca

SEQ ID NO: 407469 - DNA, 625 bp, Homo sapiens
ttccccactcggggttagaaagattatattgatccatgatcatgatgtcgattcatagagttgattattcccatttattgataaatattactccataatatgcatataatttatcaatttcctctcaatagacatttgwgctgttcccaggcttcagctattgttaatagaactcaaggacacatttttaaaagaaaaaatttcaacccaaaatgtcctttccttttggctctccaatattgtgtcagggttatatatttgttgtcttgaaaatccaattacattgaacaggaggtgtctctagaatcaaggttcagtatatggtggtctggctgtgtcctggaatgtagcccttattagttttattgagcattttcctatataaattgaaatcaagttgaagactcatttttccacagtaggacaaatagaacagtttaggactttggagagatagcaacttgctgcttgcctgtgcaacccacctcaaaagatacaactcctccaacttttgatttctggtgacttctccaaacaattagatgtgaattgaccttattcccttacattactacatgtcgatattctgcacctggccaaatacagtataaaactgatgagcata

SEQ ID NO: 407470 - DNA, 524 bp, Homo sapiens
cagtaggacaaatagaacagtttaggactttggagagatagcaacttgctgcttgcctgtgcaacccacctcaaaagatacaactcctccaacttttgatttctggtgacttctccaaacaattagatgtgaattgaccttattcccttacattactacatgtcgatattctgcacctggccaaatacagtataaaactgatgagcatacatttcttttagtttcatattttctatttaaagctactctctttggctgggcactatggctcatgactgtaatcccagcagtttggaaggccaagataggtggatcacttgaggccaggggtttgagacctgcctgactaacatgatgaaagctgtcttcctgaaaaatacaaaaattttctgggtgtggtggcacgtgcctgtaatcccagctactcaggaggctgaggcaggagaatcacttgaacccaggaggcagaagrtgcagtgagccaagatcccacctctgcattccatcctgggtgacagaattaa

SEQ ID NO: 407471 - DNA, 497 bp, Homo sapiens
actcaggtgatcaaatggtcatctcagagattttcagtagaactgcagcattttgtcaatacctgagtgaatgcagaaactatccagaggcacgggcattctaggaagctccctgtgtaaatcaaatacaaggaatatctacttctgggctcaaaatctaacttagagaaaaaaaaattgaagtgctggcagaagacaaataactccacttcagttctcaagagaaaaatggttctgtaacctctgagtttatttagaaaaattttggagcctcaggaagaccgagtatatcattcctgatgtttccaggacagattggactgcttaggcctttgggaatattctaagtcctctcgggtttccatgggagactgtaactctactcctagagctcacaccacccctgagcaagytcattgttttctaaatattccaaggaagcccattcagggtatgtctgtattggtgagtttcactttggactggcaggagaagac

SEQ ID NO: 407472 - DNA, 349 bp, Homo sapiens
gtcttcctggtctggaaatgccagaaatgtcctccttggtccttctgagagtcaagatcttttcaaaatcacctcaggagccacagaaccactccatcctacctgaaattgcaggatgactcttcttttgaccagagtctcaaaaatatattcgttgatagtwttgattcctgggagccgccattgcttgcaaaagatgtgccagagactagacattttctgtctcctcacttgtccggggaagactgaagttttactgaaacacagagatgggaatctgaccctctgagcagccgcaggatattctaagtcttccaagaagagtagaaatactggtgaggacccattg

SEQ ID NO: 407473 - DNA, 349 bp, Homo sapiens
gtcttcctggtctggaaatgccagaaatgtcctccttggtccttctgagagtcaagatcttttcaaaatcacctcaggagccacagaaccactccatcctacctgaaattgcaggatgactcttcttttgaccagagtctcaaaaatatattcgttgatagttttgattcctgggagcygccattgcttgcaaaagatgtgccagagactagacattttctgtctcctcacttgtccggggaagactgaagttttactgaaacacagagatgggaatctgaccctctgagcagccgcaggatattctaagtcttccaagaagagtagaaatactggtgaggacccattg

SEQ ID NO: 407474 - DNA, 349 bp, Homo sapiens
gtcttcctggtctggaaatgccagaaatgtcctccttggtccttctgagagtcaagatcttttcaaaatcacctcaggagccacagaaccactccatcctacctgaaattgcaggatgactcttcttttgaccagagtctcaaaaatatattcgttgatagttttgattcctgggagccgccattgcttgcaaaagatgtgccagagactagacattttctgtctcctcacttgtccggggaagactgaagttttactgaaacacagmgatgggaatctgaccctctgagcagccgcaggatattctaagtcttccaagaagagtagaaatactggtgaggacccattg

SEQ ID NO: 407475 - DNA, 575 bp, Homo sapiens
atggtagaatttccatcattctaggtctttgagtggccatatggagcacaccatacccagccaacccattgtggacatggaatgtaagaaatcaaccttggttgctaagctgctgagactctggggttaatttgttactgcagcataacctagtccmtcctgatgcatgtagcatgcaaaccacttatgttgacccttagtcatggtcagtgctccacagatgtttgttacttttggtaggaagatagattgcctctgaaagttttgttagctgatctcatgatgccaatgttgctattttgtaattggataaattggacttggctctctttccagcatgtgggagagaaagatgactgagagacaataaggcactattatcttcagtttctgtccttggatacccttggtggcaatgaacaatgcatgcccctctgagaaagctggacctaaaggagaatgggaggtgataccagaattgggaaagtccaaggccccaggcattccctggtctggagacaactttgagtccttggtgggaagattctccaagggaacataaatgcttctactat

SEQ ID NO: 407476 - DNA, 575 bp, Homo sapiens
atggtagaatttccatcattctaggtctttgagtggccatatggagcacaccatacccagccaacccattgtggacatggaatgtaagaaatcaaccttggttgctaagctgctgagactctggggttaatttgttactgcagcataacctagtccatcctgatgcatgtagcatgcaaaccacttatgttgacccttagtcatggtcagtgctccacagatgttkgttacttttggtaggaagatagattgcctctgaaagttttgttagctgatctcatgatgccaatgttgctattttgtaattggataaattggacttggctctctttccagcatgtgggagagaaagatgactgagagacaataaggcactattatcttcagtttctgtccttggatacccttggtggcaatgaacaatgcatgcccctctgagaaagctggacctaaaggagaatgggaggtgataccagaattgggaaagtccaaggccccaggcattccctggtctggagacaactttgagtccttggtgggaagattctccaagggaacataaatgcttctactat

SEQ ID NO: 407477 - DNA, 575 bp, Homo sapiens
atggtagaatttccatcattctaggtctttgagtggccatatggagcacaccatacccagccaacccattgtggacatggaatgtaagaaatcaaccttggttgctaagctgctgagactctggggttaatttgttactgcagcataacctagtccatcctgatgcatgtagcatgcaaaccacttatgttgacccttagtcatggtcagtgctccacagatgtttgttacttttggtaggaagatagattgcctctgaaagttttgttagctgatctcatgatgccaatgttgctattttgtaattggataaattggacttggctctctttccagcatgtgggagagaaagatgactgagagacaataaggcactattatcttcagtttctgtccttggataccyttggtggcaatgaacaatgcatgcccctctgagaaagctggacctaaaggagaatgggaggtgataccagaattgggaaagtccaaggccccaggcattccctggtctggagacaactttgagtccttggtgggaagattctccaagggaacataaatgcttctactat

SEQ ID NO: 407478 - DNA, 552 bp, Homo sapiens
agctcaacatgtatgcctctgggggtacwcatccacatgccatttaaggatatttccagcatcatcatcttcactaccccaggatggcattttagagtggattacgtgcctgctggatgtgttgtacttgaacgagctagagaaaatgccacactttaagacgaattaagagtctgttcatttagctggcggctaagaaatggctaacgtttaaagttctctcggcctcgaagaaggggctagattttcttttatactttcgtttagaaaggggaggggggtctagttaaaacaattttacagaagtaggcaaaaaagttaaaaggataaattgttgcaggaaagtaaacagctctaggtctaggggctttaagactattatgaggtgatagacgcggggctttgggcgttatcaattggacgaattcctgggaactgcggatattgctcaccacagtatcttatcagttaattgcattcttcgatgtgctgggcgtcagcttgcacaagttaagtccttgaggaaggggctgtcagtgaaagagccaagat

SEQ ID NO: 407479 - DNA, 462 bp, Homo sapiens
ttcttaggcaccagctaaataaggagactcttaattcatgtgaaagtgtggcattttctccaactcattcaagtacaacatttggaggccccagcgagaaacgccatgaggagagagccgggctcccccrgaaggacggccggcttgtggggggtgccacctaaaaaaaaaccttcaggtcctcgaaaagtgaccgtcttccagaggagagcggatcgactacccggtgggtgcccataaaaattccacctctgagtcctcgacttctgaccctgaggtcacgtaggtcagatttgacttcagttctaggaagagggaagcggccctgatgagggtgtccctctttcgactctgcatgtttctctaggacgctagaaggtagagccctggttttctgttaggcacctctgtgtctctttctaggagggaagtggccctgacaggggccctcccttgactcag

SEQ ID NO: 407480 - DNA, 570 bp, Homo sapiens
acacctcagcacaaaaggctgaattgatcgccctcactcaggctctccaataaagtaagaataaacttattaacatttacactgacagcaagtacgcctttgctgctgtgcatgtacataaagccatctaccaggaaagcaggctactcacctcagcaggtagctgtgatccaccgcaaaggacatcaaaaagaaaacacggccgtggcccatagtaaccagaaagctgattcagcagctcaggtcgcagcaagactttcagtcacgcctctaaacttgctgcccacagtctcctttccacagccagatctgcctgacaatcccgtatactcaacaacaacaacaactggcttcggatctcagagccaataaaaatcaggaaagttagtagattcttcctgactctagaatcttcataccctgaactcttaaacaaactttaaccagttacgtacagtctatcacccatttaagaagagcaaagctacctcagctcctccagagccattttaagatccccrgtcttcaaagcctaaagattaagcagctctccagtgcacaacctgagcc

SEQ ID NO: 407481 - DNA, 576 bp, Homo sapiens
ttttttaaaatgtgagatatttcctctctcctgttacayaaactttgtatgcagtgttcattatgcactttaaaaataaatattttgtttcagggcatgatgctttcacacataaaaccttagaataattttaaattccattccactttcaccattcctgaactgctttgaatatattggaggttggaagccatgagaggcttgcaatcctgtcaagataataggattttccatttatagtgtaatctgacttgcaatcccgtcaagataataggattttccatttatagtgtaatctgatatatattcgttctggtttcatactttaaaaaaatctattctcttttactctgtggtgatctttgcttttctattttttcattgctagaatgtgagctgctgtttccctagcacctcagatgtcattcaacattgtatagcactggtgttgagaagtgagagaatctactaaataatagcacttttcgagactgcagttctgaattaaaaggaagggaaaggacaggcaaaacaatatagacatcagctatttttactgaagatctgttggagaac

SEQ ID NO: 407482 - DNA, 576 bp, Homo sapiens
ttttttaaaatgtgagatatttcctctctcctgttacataaactttgtatgcagtgttcattatgcactttaaaaataaatattttgtttcagggcatgatgctttcacacataaaaccttagaataattttaaattccattccactttcaccattcctgaactgctttgaatatattggaggttggaagccatgagaggcttgcaatcctgtcaagataataggattttccatttatagtgtaatctgacttgcaatcccgtcaagataataggattttccatttatagtgtaatctgatatatattcgttctggtttcatactttaaaaaaatctattctcttttactctgtggtgatctttgcttttctatttttycattgctagaatgtgagctgctgtttccctagcacctcagatgtcattcaacattgtatagcactggtgttgagaagtgagagaatctactaaataatagcacttttcgagactgcagttctgaattaaaaggaagggaaaggacaggcaaaacaatatagacatcagctatttttactgaagatctgttggagaac

SEQ ID NO: 407483 - DNA, 576 bp, Homo sapiens
ttttttaaaatgtgagatatttcctctctcctgttacataaactttgtatgcagtgttcattatgcactttaaaaataaatattttgtttcagggcatgatgctttcacacataaaaccttagaataattttaaattccattccactttcaccattcctgaactgctttgaatatattggaggttggaagccatgagaggcttgcaatcctgtcaagataataggattttccatttatagtgtaatctgacttgcaatcccgtcaagataataggattttccatttatagtgtaatctgatatatattcgttctggtttcatactttaaaaaaatctattctcttttactctgtggtgatctttgcttttctattttttcattgctagaatgtgagctgctgtttccctagcacctcagatgtcattcaacattgtatagcactggtgttgagaaktgagagaatctactaaataatagcacttttcgagactgcagttctgaattaaaaggaagggaaaggacaggcaaaacaatatagacatcagctatttttactgaagatctgttggagaac

SEQ ID NO: 407484 - DNA, 580 bp, Homo sapiens
tgggtgttccaaatgcagtcaggaggctttcaggtatctggcctccaattaagttttctcaggactctaggttgggtatcgtgtgtcaaagactcctaaattatcaatataatttctaatattacactactttattccagcccttattaagactatttacaaaaaaagatatgagaggtttcatttatatatttctttytcttctatccatcctataatctcatagggaaataattgacccattaactgtactgttggctgaaatagacttaggattgtgatgaatgcagacgacagagatgagtgaagagcagaacatcacagcccaacaatgagtctgatgttctagcagctgagttcaataaatccagtgtgataggacttgggcaagagctgtgcagtgttgagggaaaagaagagttttataaaatatatttgagcttttaaaaactttgtgaaaggacaactaaagaagtcattactattcttatccccattcattttaccttttggtaattaacttttttgccttctggtaagtgaaagtaacatataggaaatataattatttaattatggt

SEQ ID NO: 407485 - DNA, 484 bp, Homo sapiens
ttataagcagttatgtagaggtgattaagacattactgaaaaatatctgggttatattatgccacacctcatgcaatatttctttatagtaaagtttaatggattcagagtgggtatatctctgtgagtgaatctgaaaggcagataccagcttagtactgagaatgaactggctggaaccaaaaacactgagtattctgcatacccagctcctagctatatcatctcagccttcctcttccggacattgaaagggatttctctgtctaaactaaaatgtctgtgatgttttaggagaaagtgacttttgaagatgtagctattgacttcacccaggaagagtgggacatgatggacacatccaagagaaagctgtacagagwtgtgatgctggaaaatatcagtcacctggtgtccctcggtgagtccctcaacattcacgtacatatgtagacacacattcgctcattcattcaataagtgt

SEQ ID NO: 407486 - DNA, 571 bp, Homo sapiens
cagggaaacaatcagatatgcatttgtgtctggtgaacttgggatgactgcacctgtaaagacaagttatcagtttgcattgccgtggtgtaattttaacagctcatgaggaatttccttgtgggcaaaatatgggggaggcatgtagcttttcatcttgtagtcatattatttaggaaccagaagggggaggcaggtttgtgtgacccagttcccagcttgatttttccctttggttaaatgagtttggggtcccaaaatttaatttcctttcacacaagaaacattggaaagatttcaactggggtctaccactgaatggttggtctaggattcaaaggtagtgaaattaatgtayagatatatgtgggtaaaccattaagagcttttaatctttgtcccaaaggagaactctcattctggaggatccttttgaatataatgattcgggagaagattgcactcacagttccacaataactcagtgtttgttaactcacagtagaaagaaaccctatgtcagcaaacagtgtggaaaatcccttcgtaatcttttgtcccctaaaccacg

SEQ ID NO: 407487 - DNA, 606 bp, Homo sapiens
gcttgtcttctatgtgggaaggccttcagtctgtcttccgaccttagatgacatgagagaacacgcactggagaaaagccatatgaatgccatttatgtgggaaagccttcagtcaatgtactaatattaaaaagcatcagaaaattcaccctggagagaaaattataaacttcttcagaacatattckgactttagatgacacagtgttaggaatgacgaaggtaaggaatgtggaagagacttcagctgtagttgtagcatctaaacatgccaaaggactcacattttgaagaaatactgtaatcaacatggaagatacttcagttgcctttattcttcagcccacatcaataaattcatatggaagagaaattgtatgacatgtatgtaccaaagacttgttagtgatctgagcataaatgacatgagagagctgaaactgtcagcataatcaactaaaagtcttcagcaacagctttaacttaaaacatgtgggactttcaggtagagaatctctaactctgcattcagtgtgaaaatgtttttatttgcaatttattgtcaaataacatgagaaaactttacttggatgaaccctttattt

SEQ ID NO: 407488 - DNA, 523 bp, Homo sapiens
cactgggtaatcttgggcaagtttcttcctttccatcagcttatttcctcatctttaaggtaagtgactagacaagacatcctatgttcattgtaactctatcttttgttcctgaagcaaatggctggaaaagacrtagtgtccacaatatgcaatacacaaggttcacaagcaaagaacaaatgaaaacgaaagatttttaaaatccctaatgttatttgaattcttgcagatgaactatggtacataataattttaaaaagccttttgtaatttcaatttttaaaaataatttcaacctttattttagattcagggagtgcatgtgtgatttgttacatgggtatattgtgtgatattgaggtttggggtatgaataactctgtcacgcaagtagggtgtaccaaagggtaccttttcagactttactccctctccctcccctcctggtaagacccaatctctcttgttcccatttttatgtccatgtgcactcattgctcggctcccacttataactgag

SEQ ID NO: 407489 - DNA, 495 bp, Homo sapiens
gaaaacagaatgaggctcagaataccaagccttagtgctctccctatcatctgcctcactcgatcactgggtaatcttgggcaagtttcttcctttccatcagcttatttcctcatctttaaggtaagtgactagacaagacatcctatgttcattgtaactctatcttttgttcctgaagcaaatggctggaaaagacatagtgtccacaatatgcaatacacaaggttcacaagcaaagaacaaatgaaaacgaaagatttttaaaatccctaatgttatttgaattcttgcaratgaactatggtacataataattttaaaaagccttttgtaatttcaatttttaaaaataatttcaacctttattttagattcagggagtgcatgtgtgatttgttacatgggtatattgtgtgatattgaggtttggggtatgaataactctgtcacgcaagtagggtgtaccaaagggtaccttttcagactttactc

SEQ ID NO: 407490 - DNA, 523 bp, Homo sapiens
cactgggtaatcttgggcaagtttcttcctttccatcagcttatttcctcatctttaaggtaagtgactagacaagacatcctatgttcattgtaactctatcttttgttcctgaagcaaatggctggaaaagacatagtgtccacaatatgcaatacacaaggttcacaagcaaagaacaaatgaaaacgaaagatttttaaaatccctaatgttatttgaattcttgcagatgaactatggtacataataattttaaaaagccttttgtaatttcaatttttaaaaataatttcaacctttattttagattcagggagtgcatgtgtgatttgttacatgggtatattgtgtgatattgaggtttggggtatgaataactctgtcacgcargtagggtgtaccaaagggtaccttttcagactttactccctctccctcccctcctggtaagacccaatctctcttgttcccatttttatgtccatgtgcactcattgctcggctcccacttataactgag

SEQ ID NO: 407491 - DNA, 594 bp, Homo sapiens
cctctccctcccctcctggtaagacccaatctctcttgttcccatttttatgtccatgtgcactcattgctcggctcccacttataactgagaatatgtggcatttggcttcctgttcctgagctaatttgcttagaataaagtcctccagctgcatccatgttgctgaaaaggacacaatttggtcctttttatggatgcatagtattccgtgacatatatgtactacattttctttattcaatccactgttgatgaacacctagtttgattccataccttcactactgtgaataccactgtgatgaacatacaaatttaggtctttttacaagactgatttactttcctttggatatacacccagtagtgagattagtgggtcaaatggtagttctgtattaagtttcttgaaaagtggtttgaaaatataatgctcaatagaatcaggtatagtaaaatagtacacatgattcaaagacctgtgaaccgagagtaacaacaaatttccacacaaacatattgcaagttagaaaatagctgtattwtaatcaattattccacaatcatttactgaatagctattataagaca

SEQ ID NO: 407492 - DNA, 532 bp, Homo sapiens
tctaatacatttggatttcagttcaattaaataggcatttattgaatgtttattaaaattgctgtactgattgaaagctattctagaattggcttttgtgttccagaatagaaaaaaaaaaaaggtgctggtttttatacttctcttattgccaagaagttgtcatggaaaaggtgctctgtgttacatacaaagactgctcagaattaaaacacttttcaaactaaatacctcagtgtgtgtggcctatccccagagcagtgatattttcggacataaatgaaatactattcaatgttttcaacaagtatagtttytaagcctttaagaagaccttgaatgtttcactcttaatatatgcaatggtttctaaagaaaaattgcaacctcaaagaccagtgccagagatataagtagtgtgtgaagtctcagggggtaacaagtactggcacagatatatttgtgtattaaacacataggaatattgttcccttcaacaggaaaaatatcctctctaacaattaaagtatat

SEQ ID NO: 407493 - DNA, 568 bp, Homo sapiens
cactcttgaaaccgcatcaccaactgaccctttaatatatttttgcactatataacatttatttcttagagtaagtgcttccctagaaaagaagcagtttggacatgtatattaaagccgtcacctagaatattatcttctcattgctaggaggtggccttcaagatggctgactagaggtaccaggcactgtgtcctcccaaagaaagaccaaracagcaagtagataatcataccttgaagagggcatgaaagagggcactagaattcagcagcaaagtgacgaggaatctctgaggcatggaaggaaaggaaaatgaagcagcagcccagccagaatcagcttaaagccaggacaggctctgcagtgtggtgaaaaggtaaaaaagagagccccagtggtccatattcccactgtggacactgcaatcctagccaagggacggtctctcagccctcgcaggccctgagactactatagggagctgcctggagtgtatgtgatggtcattgtcccagagaaggagttggcactggatcatctgcacctgcccccagacacaggcag

SEQ ID NO: 407494 - DNA, 568 bp, Homo sapiens
cactcttgaaaccgcatcaccaactgaccctttaatatatttttgcactatataacatttatttcttagagtaagtgcttccctagaaaagaagcagtttggacatgtatattaaagccgtcacctagaatattatcttctcattgctaggaggtggccttcaagatggctgactagaggtaccaggcactgtgtcctcccaaagaaagaccaaaacagcaagtagataatcataccttgaagagggcatgaaagagggcactagaattcagcagcaaagtgaygaggaatctctgaggcatggaaggaaaggaaaatgaagcagcagcccagccagaatcagcttaaagccaggacaggctctgcagtgtggtgaaaaggtaaaaaagagagccccagtggtccatattcccactgtggacactgcaatcctagccaagggacggtctctcagccctcgcaggccctgagactactatagggagctgcctggagtgtatgtgatggtcattgtcccagagaaggagttggcactggatcatctgcacctgcccccagacacaggcag

SEQ ID NO: 407495 - DNA, 520 bp, Homo sapiens
atgattagagatggtaagaatattttcacatatttgttggccatttgtatctgttcttctgggaaatgtctactcagatctttgctcatttttattattattattatttttttgagatggagtctcgctctgtcacccaggctggagtgcagtggcgtgatctcggctcactgcaagctccgcctcccagattcacaccattctcgtgcctcagcctcccaagtagctgggactacaggcacccaccaccatgcccagctaattttttgtaattttttttttctttttttagtggagacagagtttcaccrtgttagccagatctttgagcatttaaaaaaagaattcaacttttattttagattcaggagatgcatgtgcaggtttttacattggcacattgtgtgatgctgaggcttggagtatggatgatcttgtaacccagatagaaaacataatacccaatagacagtttttaaggcctttgtccccaccttcccttccccctctagtagtcccc

SEQ ID NO: 407496 - DNA, 422 bp, Homo sapiens
agaaagccacctgactcacgcctgtaatcccagcactttggaaggctgaagggggcagatcacctgaggtcgggagttcaagaccagcctgaccaacatggagaaactccatctctactaaaaaaaaaaaaacaaacaaaaaaaaatacaaaattagccrggcatggaggtgcatgcctgtaatcccagctactcgggaggctgaggcaggagaattgcttgaacctgggaggcggaggttgcagtgagctgagaacacgccattgcacaccagcctgggcaacagagcaaaacttcatctcaaaaaaaaaaaaaaaagccacctgaaggcccaaggatggcctgcctgaaacttcaaccactggtgcccacgttcatcacccacaagttcaaagaccaatgcaactggtgcccaaggacca

SEQ ID NO: 407497 - DNA, 509 bp, Homo sapiens
ttttccattttctaattagtctgtaataactgaaggacagyctaataattcttgactcctttttctgggttactcaagcagctcctaggaattctaaagtgcacatgtaacactctatctattgcaagctgcttcatgtataaaccaatgatatacaagtagggtgcaagatattccgttaagaagaaaataagaggaatttgcctcattttcaatattttccaagataagcaatgtgactttccccttgatttggttatattcactttctgtagtaaatgttcaaaagtcatttattaggacagagggaaaatgtgctgtcactttctctgaaccaataaagaaaactttgaagtttccagcaaaagaaatttcattacagagcattggtgttttgggaagcattatagtgttgatatagcaaatgttaattaagtgaccagtaacttaaacaggatcaatctaacctcttcttgtcactgatatttgtgaggtacggttgtttataa

SEQ ID NO: 407498 - DNA, 551 bp, Homo sapiens
ctttttgtcctgtggtttgttggtttatgcttttatttatattatctttttattttcttttgtctattttattttcccgggatcctgtgttcagagcrtagatcacttatttttcatcttcttttcaaacggatacatctaagttcatacattttttttctcagacttgcctcagccctaccctcaagttttgttatatagcattttattttgttattcagatccagatagtttaccggtttcattttgatttttgctttaacctaataattatttggaattgtgtgtgttcatgcatgtgtgtgtgtgtgtgcgtctttaattttcttgtatgtgtggtttttttagtggaatttcttgtaattgtcgacaagtaattgcagcctgtatactatcacctttatggaatttgctgacatttccaatgtggtatagcacatggtaaatttttgtggctgtaatctgtgtgtttgaaaatgatatgtagtcttaagtgtatggtagacatttttgtatagctactcagtcaggcttgttaagtgcattacaca

SEQ ID NO: 407499 - DNA, 551 bp, Homo sapiens
ctttttgtcctgtggtttgttggtttatgcttttatttatattatctttttattttcttttgtctattttattttcccgggatcctgtgttcagagcgtagatcacttatttttcatcttcttttcaaacggatacatctaagttcatacattttttttctcagacttgcctcagccctaccctcaagttttgttatatagcattttattttgttattcagatccagatagtttaccrgtttcattttgatttttgctttaacctaataattatttggaattgtgtgtgttcatgcatgtgtgtgtgtgtgtgcgtctttaattttcttgtatgtgtggtttttttagtggaatttcttgtaattgtcgacaagtaattgcagcctgtatactatcacctttatggaatttgctgacatttccaatgtggtatagcacatggtaaatttttgtggctgtaatctgtgtgtttgaaaatgatatgtagtcttaagtgtatggtagacatttttgtatagctactcagtcaggcttgttaagtgcattacaca

SEQ ID NO: 407500 - DNA, 566 bp, Homo sapiens
atggtgacatttctagcctacttttaaaagtcaagaatctcttaaacactatgataccactatgatacacaatcagaaattatatccactcaagactctaaaactcttatttttttctatattatagaaaaatgaacttacaattatgtgtttgggctcattcaaaattttggttacaaaaaattccaatgatatgtaattagttattcatattgaatgactataaacctcttatataatttgaagaggtcacaaaccacagacttctaccttctgctttatttcaaagcttatagcagtctaagtaactctggaaacattcagatgatacaaaatgcacacttacttttattttgtaagcatcccttaaacatgagtcattagataaatttcttgttctaagtaaatttactggattattattaagtaataaawtattaagccaaaaatggataatgagagcacatgctctaaattgaaggaaggaaaaaataagaaaatatgtgatgtagtaaagtgcatgaacatgtaaatgttttccagccttcttaagtaggaactgtttt

SEQ ID NO: 407501 - DNA, 556 bp, Homo sapiens
ctgactttcttatacaaatcttgtgtattgtaaacaaaacaaaataaaacagctccttaaaaaattctactttcagttgtattatctcttagatgttcttttattaaagtttagagaatctcaatatttgctattcttttcattaaaactttatttgagatttgctggtaatgtctaacactggttttatttgatctcacattaaagtcacaatactttttaagagtacagatgaaatatcattcaatataatttttcacaaatctttagcaatgtatggaartagagggggcatcaaatgatatcagaagtagagttttctttcacacctttacttccttcagtttcaggggagaaaatgaagatgatgtgcttaagtaagaaataccagacagaacagaagtgagcagggtgctatagctttgctgctggttgtctatttgataaacttttattagaacaggcaaaaatatgcaaacatcaaatccatcaaactgaccaaactcagcaacagttaaccaagattacccacaagaagaaaaagataggagtggta

SEQ ID NO: 407502 - DNA, 552 bp, Homo sapiens
agtcacttctgatgacagaacctggatatgttggttgctggtgctggatttgggctgttacggttcttttcgtgggagcctccgattgctgctgcttttagtcagccattttggccccgccccctttggaattcttgatatttgtttacatcatctactggaaaagctgttatttgtatttctacttctcttcctatagaaggaggttgctgtttatacctttctgttaaaagraacttttctaattcgaagtaattgtttagttacagtgataatatacttaaaatggccaatagacttatgaatatccagtcataagttactaagtagaacaaaattttggatcaaataatttaaaaaatattcaaaagaaaaatagtgaattactcaattgttgaggttaatatctggctacattatttgaatcaggtagtttgaaatttatatataataaatatataaaattaattgcataaatgtatagataaaaaaattaacaaacttattactgcaattcacgtgaatataaaaccttgcccttagatgactagc

SEQ ID NO: 407503 - DNA, 577 bp, Homo sapiens
ggatagctcctggttctagggrtatgtggagacatacaaagcccactcgtagttaacctgaagcctgggatgcagcacagtcaactcagcctacagcagaaccatccctaacaaaccacagacctgtaggagaggaaataaacacttgtggttccagtgcactgaacttttgagtagtttgttatgtagtatcatagtagctagagctgattaatacagttacattgaattgggggaaattttcaaaagaaaggataagagcaaacaaagttaaagatgatgtcaggaaaggagcacaagagagaacttctctttttaaaagctaagagaggaatgaaagttattaaaaagaaacaaagttccatttgccttcaattcctggcctgctctcaaacactggattaaattaattgttatccccatattaaaatttcagtttttagggtgcccactagtgtgagtagtgaataaaaatatctagtagcaaaggaatagtctaattttcttaaataggaatacactgggagatgaagggtaggcacagacgggctgtgtaatttcagcctgcctgagtcac

SEQ ID NO: 407504 - DNA, 433 bp, Homo sapiens
ctttgagtatctctttgctcccatcatattaggagaaactrcatggaaaaactgatccattatttttaaaactggaaaattagaaaattactcttcaatgcttttatgaatatataactaatgagaaataaattcagttacattctttaactgctaccccctcccccaacatgagtgatgtctctaattcagcatgacctactgtcagctcaggaaatttccatcctgagattttcctagcagagtcaaaatcagtcaccgtcagaaacagataaaaaatgttttaaatgagagtgcttgaaactgcatttaaattctatcttgaaaagttgcaaagtgcttggttaataattttccatagtatcatttttaaactattttggcatgctccataaacaatacgtacatttactgttcacatagttaagaaaaa

SEQ ID NO: 407505 - DNA, 574 bp, Homo sapiens
cttccaaaattgtcccttaaacatggagacaaattctgtgcccaccattatggaggtgttaccaaatgaggccactaatagaattacacatgaatcatgtgaaaaattcaatgctaactaagtattttaaaactgtttggggatttgtgaaatatgatagactatagaaagcttttttgttaattctgtacataatagtattttaataccacaaaacatgcccaggaaaatcttcaaaacagtcaaatagggccaagtgcagtacgtcacgcctgtaatcccagcaccttgggagtccaaaacaggaggattggttgagcccaggagttcaagaccaagactgggtgacctagtgagaacttctctgtccaaaaagtaataatgataataaaatagytgggtttggcggtgtgtgcctgtagtcccagctactcatgagtcgaggtgaaaggatccttgagcccaggaattcaaggctacagtgagaggagatagcaccactgcactctaacctgggtgacagagtgagcatctgtctcaaaaacaaaaacaaaaatgtaaatatgaatttgta

SEQ ID NO: 407506 - DNA, 584 bp, Homo sapiens
gggcatccttgccttgttcctgatcttagaaaagatggtagtttttcactactgagtataatgttagctgtggatttttcacatatggcctttatctgttgaggtaaaatccttctagtcttagtttgctgagtgattttatcatgaaaatgtgttgaattttgtcaaatgctttttckgcgttgattgagatgactgtgtaatttttatccttgttctgttactgtggtatatcatattgattaattttcatattctgagccatcctagtgttttagggataatagccacttggtcatggtgtatgatctttttaatgtgctgttgagtttggtctataagacttttgttgaagatttttgcatctatattcatcaggaatattggcctacaattcaatttcttgtagtgtttggctttgttattaggataatgctggtctcataaatgaatttggaagtgttccacctctttaaagttctggaagagattgagaataatttgcattaatttttctttaaatgtttggtagaattcttcaatgaagccatctagtcctgggtttttctttgtcaagaggtttt

SEQ ID NO: 407507 - DNA, 619 bp, Homo sapiens
gttggatatatgaaagtgcctcattgtggtttaaattgcatttccatgatgagttatgatgggtagcacttttatgttttggggcattagatatccttttttgtgaagtacctgttcaaatcttatgtctatttgttattgtgttttttgtaactctaaaacttgatttatagaagttttttgaaattccrggtataggtgattggccagataatatattgtaagcattctttcccattattttgtcttttcgccctcttaatagtgacttaataaacaataattcacaattttaatggtctaaattaataatattttatctttttggttttatttaaaacatctttccctacattaaaatatttttctatttttgtatagttttaatattttacctttcccacttagattcatgatctatctcgaaataatttttgtatacaatagaaggtaggtgttttgttccccttccctgccgtggaaaagactatctttcttcactaaattgcactgatacctttgttgtaaatcaggtgaccatataggcatgatctgtttctggaatctctactatcttttattggttcagtttcagtccttgtgccaatattacactgtg

SEQ ID NO: 407508 - DNA, 619 bp, Homo sapiens
gttggatatatgaaagtgcctcattgtggtttaaattgcatttccatgatgagttatgatgggtagcacttttatgttttggggcattagatatccttttttgtgaagtacctgttcaaatcttatgtctatttgttattgtgttttttgtaactctaaaacttgatttatagaagttttttgaaattccgggtataggtgattggccagataatatattgtaagcattctttcccattattttgtcttttcgccctcttaatagtgacttaataaacaataattcacaattttaatggtctaaattaataatattttatctttttggttttatttaaaacatctttccctacattaaaatatttttctatttttgtatagttttaatattttayctttcccacttagattcatgatctatctcgaaataatttttgtatacaatagaaggtaggtgttttgttccccttccctgccgtggaaaagactatctttcttcactaaattgcactgatacctttgttgtaaatcaggtgaccatataggcatgatctgtttctggaatctctactatcttttattggttcagtttcagtccttgtgccaatattacactgtg

SEQ ID NO: 407509 - DNA, 370 bp, Homo sapiens
ctttgaatgtgtgatagaattcagctgtgaagccatctggtactggactttttttgttggcaatttttaaaaattttatttcaatcttgctgcttgttattagtctgttcagagattctatatcttcctggtttaatctagaaaggttgtatatttccaagaatgtatccatctctctaggttttctagtttatgtggataaaggtgttcatagcagccttgaataatcttttgtatttctgtggtatcygttgtaatatctcccatttcatttttaattgggcttacttggatcttcttacttctttacttggttaatcttgcaaatgatctattttatttacctttgcaaaaaaaccagctttttgtt

SEQ ID NO: 407510 - DNA, 577 bp, Homo sapiens
ttctagggtatagcttaagtccattgtttctttcttgactttctgtcttgatgacctgtctagtgctgtcagtggagtattaaaattccccatgattattgtgttgctgtctgtctcatttcttaggtctagaagtaattgttttataaatttgggagctctagtgttaggtgcatatatatttagaattgtggtattttcctgttggactagttcttttatcattatataatgtccrtttttgtctttttaaactgctgttgctttaaagtttgctttttgtgatataagaatagctacttctgctcacttttggtgtccatttgcatgaaatatctttttctacccctttaccttaatttatgtgagtccttatgtgttaggtgagtctcctgaagacagcagaaacttggttggtgaatgtgtatccattctgccattctgtatcttttaaatggagcatttaggccatttacattcaatgttagtattgagatatgaggtattatttcattcattttgctatttgttgtctgaataccttgttgttggtttctctttgtgttattgttttatg

SEQ ID NO: 407511 - DNA, 525 bp, Homo sapiens
attcttgactaataattgttttgtttaaggaggctaaaaaataggaccccaatcccttctagcttgtagggtttctgctgagaaatctgttgttaatctgataggtttttctttataggtcacctgatgcttttgcctcacagctctaaagattcttcctttcatctagacttcagataacctgatgactatttgcctaggcaatgatctttttgcaatgaattttccaggtgttctttgagcttcttgcatttgaatgtctagaatattctcccaaatatgttttccaaacttttagatttctcttcttycttgggaataccaattcttcttaggtttggatgtttaagatggtgcccaacttcttggaggctttgttcatttttaaaatttattttttcttttttcttttttaataaattgggttaatttgaaagccttgtcttgatgctctgaacttctttcttctgcttgtttgattcttctgctgagactttctagtgcattttgaatttctctaagtgt

SEQ ID NO: 407512 - DNA, 580 bp, Homo sapiens
ctcgctcacgaattaccacgggtgccacactcagcactgagcagtgttggccatggactacattacagcacagtagctgtactgttttatcgtgcctgtttatgtgttagatagcacagagatgtgacttcttaaggaaccatcactgtttgaaacacataaagcaagcctagaactgctatattatatgacaactatgtgtttgctttgtttcataatgattcgtaatggtcttttgagcattatgaatcaggctatacagcctcagtttttacttcattttaaaatgagacttctatcaataccaattctaaaaatgtccataaaacatctgcactgatgccccctaaccttgttggagctcaagcttttgccttcaagaaatcattgtacagaacaacaacagtataaaacttgaatagctgagaatgtaaatgtagaggaagtaaacaggcaaaggatagttaaaaccacatcttttctttctgttaggttggtgccttctctaacactttctatgtttcttatttcattcattctttyaatgaataattattgtgtgccttctatgtgcaaggca

SEQ ID NO: 407513 - DNA, 555 bp, Homo sapiens
tctgggaaaaagaattaactaagaggtttttcaagttttatgaatagaaaaatcacaagagaattcagatagccccaaaaagctgttgacatattatggtagaaatccctgctcactaaggagtacttacagaataatcattcagagaaaggtgaattttggctatgccacttcatagctcagaacttgtgattttatgcaaaatacttcaacattcttggccttgatgtccacatatgtaaaatgagagaaataatggatactatatagagttattataaggatgaaatgagatcatgaaaaaaagtggctgagacattgtagctttgcaataygtggtagctgtatagctgtatatgccaggaaaataaatgctgaacaataatgagtgactaaatcacaacaatcttgtgaattctgggcccgagtcctaaagaacttgtgaaaaaccacgaccttttcattgactggtatgtgttttgtgtaagaaacatgtttataatgtatgagagattgaagttcaattctcttattttctttcactcaagagacatc

SEQ ID NO: 407514 - DNA, 499 bp, Homo sapiens
attagttgctaaagtagtaattatgaacatgacaatgtcataatataatgttacttaaataaaacagaacaaasattgcatttcctcatcattacaacttcagaaaatatgtaagcatggataaattctagaagtaaaaaccaaaaatcatacatgatagtgaaaattgtgtgtatttgccctttctttttaactttcctctactgccataattatgctggtacaaaagaaataaatatagagtaagcaataaaaaattcaatgtgatctacaaaatgtatagcactgtataaaatatgttcaagtattattctgtatgtaaaagtttaacttcagactatttaaattaataattataggtatagttgaatacatacagtaatgtttgtcagttagtatatctaaaaaaaaaaaaaaccagagtaaatgaattagaagtagaagacacaaattattgcctctactaagccactaagtgacaatttaacttgagacggtt

SEQ ID NO: 407515 - DNA, 499 bp, Homo sapiens
attagttgctaaagtagtaattatgaacatgacaatgtcataatataatgttacttaaataaaacagaacaaagattgcatttcctcatcattacaacttcagaaaatatgtaagcatggataaattctagaagtaaaaaccaaaaatcatacatgatagtgaaaattgtgtgtatttgccctttctttttaactttcctctactgccataattatgctggtacaaaagaaataaatatagagtaagcaataaaaaattcaatgtgatctacaaaatgtatagcactgtataaaatatgttcaagtattattctgtatgtaaaagtttaacttcagactayttaaattaataattataggtatagttgaatacatacagtaatgtttgtcagttagtatatctaaaaaaaaaaaaaaccagagtaaatgaattagaagtagaagacacaaattattgcctctactaagccactaagtgacaatttaacttgagacggtt

SEQ ID NO: 407516 - DNA, 659 bp, Homo sapiens
acaggaaatgaaaagacagaacataaagtgtgttatagcagcttacgttgctttgatcttcagcaaaactccatttgctgcagtatcctggcattctccactttattgaatgtgagggttcgtaatggacacggcgagttactgactaatttcagtgaggaaactccacctctttctctcttattttcatgtttgacaagaagctctttctcctacagataaacaccttaaactttatctgatatggcatgaagtaaaacagtgtcaatttgaggacacagacaagtttgaatgagctacataaacatttaggctttgttggaccaactraattttattataaatctctcctcaaacacgttatagtctgcactcaaagtcgcttgtccaataaaagcctatttattttttacctctatatttacttgtaccagcacatagaaatttttaagactcaagagaagacaaatcacaaaatattcagcaccagaaaccccacattttaaaattccatggggtttggggtttgattatttagcacaagctgtgggtcagatgaaagacattctggtcagagggtttataattttagatgctttatttcctgtgtaatatttatgatgtggcatttctggaaataaatggtcagggaaggtaca

SEQ ID NO: 407517 - DNA, 613 bp, Homo sapiens
ctgttctttataaattacccagtctcaggtatcctgctatagcagcacaaaatggactatgatagaaaattggtatgaaggagtagtaccattgttataacaaatacctaaaaatggaagccactctggaactgggtaaggggtagagtatggaagaatttagaggagcaggctagaaaaagcctaaattgctgtgtattactccaggatggtaagaaataaatctctgttctttataaattgcccagactcacagcacaaaacaaattaagacattaagatttgccccattcttagaattcatttcttccattttccctttaattaaatcaatgccagcatctaagcagtgtgcaccttttgaccatagtctttctaattgaccagaagcttagatgtggaaaatgcaaaaactatgcacatttctgrtgggtttaacttctgagaaatttttacaaggttttccttattttatctgctccagtaaacctgtggtttcatgaacaggcctagaatttgagattcagcttctaaacttcaaaggtgacctttcaacccatttgtttatagactcggtattaaccttttgagttctagaatagggttttagaac

SEQ ID NO: 407518 - DNA, 556 bp, Homo sapiens
cacggccctgtcaatttagcttagtgagacccatgtcaggcttatggcctccaaaatgataagataatacatttgtattgttttatgtcattaagtttgtaggaattattatggtagcaatataaaactcatagaaatgacttctttcattttgtattattttgagatgcattcattttgttgcatggatcattctrttttattgctgagtatcattctattgtattgacaccaaactttgtttttccaatcacctgttggtgggcatttgggtcgtttccagtttttggctattgtaagtgatgattttataaacatttatgtacaaatctttttgtggatatctaaatatatgattctgtttctcttggataaatacctaagattagaattgctgagtcatatggtaaagggatacttaacttttaaaacctcccaaactgttcttcaaaatggttgtgccattttacatccccaccaataatgtataaaggttccagtttctcgaaatatttgccaacacttggtatggtcagtctttttgattctagtcatt

SEQ ID NO: 407519 - DNA, 600 bp, Homo sapiens
ggcatcctgttaagtctatatgacacaacttttactatgcttttccagctcattcttttctcgagttatggactaaaaatgcagaactaatattcccaaatgtttttactagacttcttcagaacattaggagtactatagataacaccagtattattgtattggtttctttaaatagtttttgagtttctgtttgttttttttttaactgtcacaagcaatgtattgaatatatagggagttatattttaacagaatttcaaaatagaaaaagagcattttacttttttggattcatgggaattttcaaaatcattattcaaaaataatgcttctcaaatttattgaatcatagtatatgctctttgctggcacactcaaatctgactttgaatgtcaaaactaattttttattgtttctctgtaattttcagcaagattacagaccaataatcaaaggaaataaggagattatgtgacacagtgtcctttattcttttagagcaaayttggtattgttaaatctacctgtaaccatttggcttttctttttaatgagtgaatggtcttgtaataattttaattctagtaaagatttta

SEQ ID NO: 407520 - DNA, 588 bp, Homo sapiens
ttgcaatgccattggagatatgtcatgtaaggtgagctgctgaaatcagctactcaaggactattgcatgactcccaagagttctgtgcttcctcccacagcttgtacctactaaacaacttttgttgtcaaggttcatataagacctacatttggaattcctggaaaattactcacattaattctttgaatgtttctttcttcctggaattatattttttgaccatcaactttatgcaatactctagaaagatagtaatagcattctcacattctcagcactacattttcttctctattatttgtyaagtattaaaggccccagaggggtcaccaggatgaaaactgaggatttgtcatcataaaattccagattaaaattctagttctgaaatattttgctgtgaggacaaatttcttaagctgtcatagccacactttcctcacgtataaaatacagctgagaacagaggctaaatgagtattaagtatctttacctcagaccatttaaaatgaagctaacttgtaaaagtctgagcaacaaggattagaggaagtacaatgaaatgcataacaatgaagcacat

SEQ ID NO: 407521 - DNA, 662 bp, Homo sapiens
tagtgactttataagaagaggcaccaaagagcttgccttttctctctactatgtgagaacacagtaaaatggcaatacctgcaagctaagaagagagtcctcaccagaacctgaccataccggcactctgatatcatacttctagtctccagaactgtgagaaaataaatttctgtttgttaagccacatagtttatgacattttgttaaggcaggcagagcaacctaatacagagagaaactatatcaacataataaaartcatatatgaaaaacccactgcaggcatcatactcaatggtgaaagactgaaagctttttctctaagatcagaaacaaaacaaggatgcctactttcatcccttttcttcaacatagtactgaaagtcccagccagaacaattagtcaagaaaaagaaatgaaagccattcccactggaaagaagaagtaaaatgatctctgttcataggtgatataatctaatatgtagaaaactgtaaatgttctacaaagcaggtcacagcaaacagtgtgacctcaattttgtgatacttaaagaggtggtttggaactgaaaacacttagaaggacatacaccaaaatattaatatttattctccatgtttttccaggtttgataaattctctacaatgatcaagt

SEQ ID NO: 407522 - DNA, 662 bp, Homo sapiens
tagtgactttataagaagaggcaccaaagagcttgccttttctctctactatgtgagaacacagtaaaatggcaatacctgcaagctaagaagagagtcctcaccagaacctgaccataccggcactctgatatcatacttctagtctccagaactgtgagaaaataaatttctgtttgttaagccacatagtttatgacattttgttaaggcaggcagagcaacctaatacagagagaaactatatcaacataataaaagtcatatatgaaaaacccactgcaggcatcatactcaatggtgaaagactgaaagctttttctctaagatcagaaacaaaacaaggatgcctactttcatcccttttcttcaacatagtactgaaagtcccagccagaacaattagtcaagaaaaagaaatgaaagccattcccactggaaagaagaagtaaaatgatctctgttcatagrtgatataatctaatatgtagaaaactgtaaatgttctacaaagcaggtcacagcaaacagtgtgacctcaattttgtgatacttaaagaggtggtttggaactgaaaacacttagaaggacatacaccaaaatattaatatttattctccatgtttttccaggtttgataaattctctacaatgatcaagt

SEQ ID NO: 407523 - DNA, 611 bp, Homo sapiens
tataaatatagagcaattttaggaaaatacaatctgccacagtttaccttctggccacaatttacatcccttccatgtgggaaatgtactcatttcttctctcaagacccataagtattatcacattataatcagctcaaaatccaggatcttgttaattaatcaggttgaagtgtggataaggctcaggtatagttccttaggttcagctcaatgagtatagtttcaatcaattaaaratttttaaaataaagaaaaacaaatattcaacacacagtggtgaaataggggtaggacaaccactttgcacgcacccatttaaaaagggtgaaagtatgtatgtttattgcagcccaattcacaattgcaaagatgtgtaaccaacctaagggcccatcgaccaatgagtggataaagaagtggtatatatacaccatggaatgttactacgccagaaaaaggaatgaaataatgtctttttgcagcaacttagatggagctgaaggccattattccaggtgaagtaactcaggaatggagaaccaaataccatatgttctcacttagtgagagctaagctatgaatacacaaagacacacagagtggtata

SEQ ID NO: 407524 - DNA, 611 bp, Homo sapiens
tataaatatagagcaattttaggaaaatacaatctgccacagtttaccttctggccacaatttacatcccttccatgtgggaaatgtactcatttcttctctcaagacccataagtattatcacattataatcagctcaaaatccaggatcttgttaattaatcaggttgaagtgtggataaggctcaggtatagttccttaggttcagctcaatgagtatagtttcaatcaattaaaaatttttaaaataaagaaaaacaaatattcaacacacagtggtgarataggggtaggacaaccactttgcacgcacccatttaaaaagggtgaaagtatgtatgtttattgcagcccaattcacaattgcaaagatgtgtaaccaacctaagggcccatcgaccaatgagtggataaagaagtggtatatatacaccatggaatgttactacgccagaaaaaggaatgaaataatgtctttttgcagcaacttagatggagctgaaggccattattccaggtgaagtaactcaggaatggagaaccaaataccatatgttctcacttagtgagagctaagctatgaatacacaaagacacacagagtggtata

SEQ ID NO: 407525 - DNA, 642 bp, Homo sapiens
tttctgggtgttattggctgttgatgctcaatgcctaaatctattaatttataagagactgcaaaacagtacttttaaaattctgtcmtttctttttcacatattaatggaaagaatttggtagagatagtcatcctcatatactgtttgttcactcagtgatattgtttatataggtaagtcaagataattaattgattgttttccctttatttcccctggttttaaaataatgaattattattatatccttttgaaactcaagttattccatggaaatttctaaatctttttcacatgaccttagtgttctttgataattctagattcaccctcttcatgctaagaacttgcgattttctttctaggccttttcagtgtacggggctgttatttttaaacgtacgtatataaaaatgtctcattactttattctgatacaattcaacttcaggacagagtctttatttaacttcatctgaagtgtacctatttcttcattctttcacaagtgtccttgtttctcaaagacacagaggatggtacaattaaaatactttataaaaccagatagttttatttcacattatacacacaacattctcagaataacaattctccttatgattactggaataggtc

SEQ ID NO: 407526 - DNA, 608 bp, Homo sapiens
aaatgtgtcccagctccaggagagagagagaacaaattcgtctttcctctgctttttgttctacactaccctaccctttttgttctaccctgtaatccagtcaagttgacacctaaatttaactagcacagtgaatatgcatattgtagtaagaaaaacctcttcaagcatactattaaaaacagaaattatggccagktgcagtgacttatgcctgtaatcccagagctttaagagaatagggagggaggatcccttgaagtcaagaatttgagaccagcctggacaacataaaaagactctatctctacaaaaaaaaaagttaacaaaaatgagccaggcacttggcacacacctgtagttccaactagttgggaggctgaggccagaggctgtctgggaagcttgagcccaggagcttaaggttgcagtgaatgagaccctgtctcaaaaaaaaaaaaaaaaagggaacagaaattataaagaaaagatagaaagatttgattctctgtctctctctcactgaagtttaatgtactttgttggttacagtataagataattatcttgtttagcaaaaatatgtttaaatggcttgttaattaaag

SEQ ID NO: 407527 - DNA, 629 bp, Homo sapiens
gtaactactagtccatatctcctaacagatgaaaagaaaaacagccacatttatttagcatgaagaggttataggaattttcagaacaatggccttttcaaaggtcatgaaagtgaagctcagagatgctaactttgtccagaaaaacttttctcaatctcagcactattgccatttggggcaaagtgattctttgttgcgcagggtgtcccgtgtrttgtaggatgtttagccccttccctgtcctgtaaccatgagatacccataacacatccctttcctacttgtgacaaacaaaaatgtgccagtcaatgtcaaatgtcttggcgggggttgcggggtggctaaattgcaccctattgagaagcactggtctagaaactgacagagctgcagccaaaatgatcttttagctattttattaagtaggaacaaaaactatttcctcatcgtgaaagcaaataaattttatgcacttaagcatacaggtactaaatgtttcttagaaacactccagtgatgcaggtctctaagaatatcatttggcatcatgcaataacccaaaggctgatacctaatagatttgctggagtcctggatccaaatatatgtgtatgttgactaaataa

SEQ ID NO: 407528 - DNA, 608 bp, Homo sapiens
aaatgtgtcccagctccaggagagagagagaacaaattcgtctttcctctgctttttgttctacactaccctaccctttttgttctaccctgtaatccagtcaagttgacacctaaatttaactagcacagtgaatatgcatattgtagtaagaaaaacctcttcaagcatactattaaaaacagaaattatggccaggtgcagtgacttatgcctgtaatcccagagctttaagagaatagggagggaggatcccttgaagtcaagaatttgagaccagcctggacaacataaaaagactctatctctacaaaaaaaaaagttaacaaaaatgagccaggcacttggcacacacctrtagttccaactagttgggaggctgaggccagaggctgtctgggaagcttgagcccaggagcttaaggttgcagtgaatgagaccctgtctcaaaaaaaaaaaaaaaaagggaacagaaattataaagaaaagatagaaagatttgattctctgtctctctctcactgaagtttaatgtactttgttggttacagtataagataattatcttgtttagcaaaaatatgtttaaatggcttgttaattaaag

SEQ ID NO: 407529 - DNA, 566 bp, Homo sapiens
ctcaaaatcagaagtcttactatagactctacatgtcaaatataaacgggtccagttagacatgtgagtctccctgtttcttcctagttcttaatagtgtcctcatttcattttcttggttaatagtattggttgaaccctcagcttctttcagaaatgccagaggtctcacctatagagaaattcaagatgtttatctcaagattttttctggttttctaggaatccctctcctagcctgcctcttacttttacatttcccaaagcagtcttgtcattatttggccagcygaggattggattcgctctaataaaccgaaaatttctctcactgtccacgcctagcaaagacacccagtaagaatgacaacctgcacatgcttggaattgattctaatgcatgtgtggaactgaagattacattagcatcctacttttttcccttgggaaacactgattgactaccaaagcatcaccaccaaactagggcagtgttggggttactcccagagcaacagagtccacttgctattttagccccagattagtggttactttaatatttc

SEQ ID NO: 407530 - DNA, 536 bp, Homo sapiens
taaaaacaaaggtctttggttgatagttaacccaaacaggcagcctaaatatgggaaaattgcccttttggttcatggtggtatcttgatggagtagtcctgcctttctcccccctgccttgctgccagcacactccattggctgctgtgccctggcaygttggagggtcagggatgcaagtggcagtgacagcttatttctctcggccacaacatggtgaaggagatgaaatgttatcatgacagcccataacccactttttatgaggctggacctgttctgaaatatttaaacactgctattttgaacacagaaccgtttacgaatgattaataacaacatctaggcccctgcatctgcctctagaaagaggcagaaccagcttttttgactgtcactgataaatcgccctctctgcatctctccagtgggagctgaaaacactgcatcacaggtccccatgttcgatgcggagctcagaaagagtgcccacacctggttctgcctggaggaggaactggcatgactcacaatc

SEQ ID NO: 407531 - DNA, 536 bp, Homo sapiens
taaaaacaaaggtctttggttgatagttaacccaaacaggcagcctaaatatgggaaaattgcccttttggttcatggtggtatcttgatggagtagtcctgcctttctcccccctgccttgctgccagcacactccattggctgctgtgccctggcacgttggagggtcagggatgcaagtggcagtgacagcttatttctctcggccacaacatggtgaaggagatgaaatgttatcatgacagcccataacccactttttatgaggctggacctgttctgaaatatttaaacactgctattttgaacacagaaccgtttacgaatgattaataacaacatctaggcccctgcatctgyctctagaaagaggcagaaccagcttttttgactgtcactgataaatcgccctctctgcatctctccagtgggagctgaaaacactgcatcacaggtccccatgttcgatgcggagctcagaaagagtgcccacacctggttctgcctggaggaggaactggcatgactcacaatc

SEQ ID NO: 407532 - DNA, 493 bp, Homo sapiens
acagagacataattatcttccatctctctttttatttcttttcttccttttatcctttccccrtcccttttccttcctctctctatcctttcactccagcttttcttcctgcccttcttccttacttctgtgtgacatatgttatctatagttcctgggttttaaattaaccctaagttctttaatattgaataaatttacaccccactctattaaacattgtatttgtttaaaaagtccaaatgctttatttagtgcttgagatacttttgtatctatgagcctgaccataaatgaatcagaaatatttgaattttatttctctattatcttttacacaaaacatggttttaaaattaagggaaaaattccttggcaaaatgaatttcagatttgggaaaaaaatgttggatgttccaaacccaaacactgctgagcttttatccctgttgatgtgaaatatttagtgccttaccaatttcaggatacatat

SEQ ID NO: 407533 - DNA, 539 bp, Homo sapiens
gctctactgaaaactgaagataatgtgctaaatattaagaatgatgtaaaggaattaattttaatgggttcctcaaatactrttttgaaccattgacagtggcatcttgaattgagataataaactttaattgttgacatatttgaaatacattgatggctacttttttcacttttcgtccttatctgccatgtgaacagtaatgtctatgcatgtaacaactgcagaaatgtgatattggaatagcaacatgtatggttatatttttatattgcccccaaagtcaataattcactattcgatttttcaaagtcatcattttcactattcaatttttcctaaactttactgaaactatacaagacaccgtaattaaaaatactcccactactcaatgaatcagtactttagttaaattgagactagtgttggatatcttcatataccctgctctaccttacaactgctctcattgtatatggtaagccatgcatattgcacatctctattcccatatacaccttgagcagaattttttc

SEQ ID NO: 407534 - DNA, 539 bp, Homo sapiens
gctctactgaaaactgaagataatgtgctaaatattaagaatgatgtaaaggaattaattttaatgggttcctcaaatactgttttgaaccattgacagtggcatcttgaattgagataataaactttaattgytgacatatttgaaatacattgatggctacttttttcacttttcgtccttatctgccatgtgaacagtaatgtctatgcatgtaacaactgcagaaatgtgatattggaatagcaacatgtatggttatatttttatattgcccccaaagtcaataattcactattcgatttttcaaagtcatcattttcactattcaatttttcctaaactttactgaaactatacaagacaccgtaattaaaaatactcccactactcaatgaatcagtactttagttaaattgagactagtgttggatatcttcatataccctgctctaccttacaactgctctcattgtatatggtaagccatgcatattgcacatctctattcccatatacaccttgagcagaattttttc

SEQ ID NO: 407535 - DNA, 539 bp, Homo sapiens
gctctactgaaaactgaagataatgtgctaaatattaagaatgatgtaaaggaattaattttaatgggttcctcaaatactgttttgaaccattgacagtggcatcttgaattgagataataaactttaattgttgacatatttgaaatacattgatggctacttttttcacttttcgtccttatctgccatgtgaacagtaatgtctatgcatgtaacaactrcagaaatgtgatattggaatagcaacatgtatggttatatttttatattgcccccaaagtcaataattcactattcgatttttcaaagtcatcattttcactattcaatttttcctaaactttactgaaactatacaagacaccgtaattaaaaatactcccactactcaatgaatcagtactttagttaaattgagactagtgttggatatcttcatataccctgctctaccttacaactgctctcattgtatatggtaagccatgcatattgcacatctctattcccatatacaccttgagcagaattttttc

SEQ ID NO: 407536 - DNA, 512 bp, Homo sapiens
atggttttgatttctccacatccttgtcaacacttgttattatcttttgtattttagccatcttaaagggtatgaagtggtacatcattgtggttttgatttgcatttcttttttaacataactttctaattaagcaaaaggtacttatcaaaagcagttcaaaatatctacaaaggttatatagctactaacgattagaaactgaaggaaaaaaatcacacaatggaaaatgcatctatattttcgatacccactttttaaagactagaatgaaaaatattatagaatagaaaatttatacttgaaatacactcaagccaaaagaaaaaatcccacatgataaaccgtgcatagtaatgatgatgattctctgaatggtattctartcattcattagtttgtataagacatttcactagtgagaatactaaggacactgtcaaataaattatgatgaatagttccaagcaaactttaagcaatcctgaagaacctggtcaacattttgaac

SEQ ID NO: 407537 - DNA, 549 bp, Homo sapiens
attgctactattgagaggtattcaatgacatacgttagtcagtagatggcactgtttattatggtattcccattaagaaagcagttacaaaatgtcaattgcctcacctgatcagggtaggggaggagaggaggaggctctgttcttacagaagagaacacatggatttctcagaggttagagtgacctggagaaggaatccagttcatcttatctattagatcttggaaagggaaattctattctagatatttttcagagatggatatttttaacacacttcattaaccactttcaaatttgaaacacttaagaaatctacttagatcacatcttttcttgtccttgtatttggtcctgagtgaaattcagaaaaatcatttccatttcctttctttaaaaatccttccagctctatagggagcactcttmctttacacaagcatttttttcttccttaggatcttcagtctgagaaacacttcaaatttatgggaaatgactacccaccatgccttcttaaattctaatatgcctttcatatcaggg

SEQ ID NO: 407538 - DNA, 562 bp, Homo sapiens
ttaaatacaaattaatgactttcttttctttacgtgttccaaataaatgccactcaaatatgagaaacaattaacaagatatagagcaatatttttcaaacagcaagtgatcaccccagcatggtggctcacacttgtaatcccagcactttgggaggccaatgcaggcagatcacctgaggttaggagttcaagaccagcctagccaacgtggtgaaaccctgtctgtacaaaaatacaaaaattagctgggcgtggtagtggrcacctgtaatcccaactacttgggaggctgaggcaggagaattgcttgaactcaggaggcagaggttgcagtgaactgagattgtgccactgcaacccagcctgggcgacagagtgagactctgtctcaaaaaaaaaaaaaaagcaagtgattttctctgaattgcaatgttgtacatcaaagcaaccaatctactgaaagttcttcaaaactgcaggtactctagaaaaaaaaatcaatccatctaagaaaaatatcaagttatttctatgttcttaatacaatgctaaagttcat

SEQ ID NO: 407539 - DNA, 562 bp, Homo sapiens
ttaaatacaaattaatgactttcttttctttacgtgttccaaataaatgccactcaaatatgagaaacaattaacaagatatagagcaatatttttcaaacagcaagtgatcaccccagcatggtggctcacacttgtaatcccagcactttgggaggccaatgcaggcagatcacctgaggttaggagttcaagaccagcctagccaacgtggtgaaaccctgtctgtacaaaaatacaaaaattagctgggcgtggtagtgggcacctgtaatcccarctacttgggaggctgaggcaggagaattgcttgaactcaggaggcagaggttgcagtgaactgagattgtgccactgcaacccagcctgggcgacagagtgagactctgtctcaaaaaaaaaaaaaaagcaagtgattttctctgaattgcaatgttgtacatcaaagcaaccaatctactgaaagttcttcaaaactgcaggtactctagaaaaaaaaatcaatccatctaagaaaaatatcaagttatttctatgttcttaatacaatgctaaagttcat

SEQ ID NO: 407540 - DNA, 562 bp, Homo sapiens
ttaaatacaaattaatgactttcttttctttacgtgttccaaataaatgccactcaaatatgagaaacaattaacaagatatagagcaatatttttcaaacagcaagtgatcaccccagcatggtggctcacacttgtaatcccagcactttgggaggccaatgcaggcagatcacctgaggttaggagttcaagaccagcctagccaacgtggtgaaaccctgtctgtacaaaaatacaaaaattagctgggcgtggtagtgggcacctgtaatcccaactacttgggaggctgaggcaggagaattgcttgaactcaggaggcagaggttgcagtgaactgagattgtgccactgcaacccagcctgggcracagagtgagactctgtctcaaaaaaaaaaaaaaagcaagtgattttctctgaattgcaatgttgtacatcaaagcaaccaatctactgaaagttcttcaaaactgcaggtactctagaaaaaaaaatcaatccatctaagaaaaatatcaagttatttctatgttcttaatacaatgctaaagttcat

SEQ ID NO: 407541 - DNA, 570 bp, Homo sapiens
caaaaattacaggttgaaggctgygtcaaggataaggaaaaatgaaattgggaaggtaacaactgaaagagagaaatagagacaaaaaataagaaaacaaaaagggactattcattgggtagttggggattacagttgaatttccctttgttctgtttgtaaaaaaattatgtctttcaatttgaaaaatacactaaaatatttgcagttattcttactgggaagcaaaagaataatagagacttaacttagtaataaaacccagagaactatcatataaagaaatcttaaagtccagataaaatgatctgtaagagtgaatttctagcttaatcagtttattaaaaatcctgcacatccagggtttctgggcattgctgagcaaaaagtgattctttgggttgccaaaggcatgcttcagtcatcctcttcaggaatatatctgaggagagttaatgccagaaatgtgtggaaaaggcctcaggcaggaatattcacagactctaaattgattgtggagtttctaatctctttctcaggaattttaatgtcagggaatagattaagagg

SEQ ID NO: 407542 - DNA, 557 bp, Homo sapiens
aataatatttctacatttgcagaaattgtaaatctacaattgtaaattagaaaaattagcaatggtatttcataatttattaggcttatctgcttccaatgatgaacatcaaagttaagtgtgtaaaacttacattttcctgtaatttatttcgttttgaaatcaaataaaccaatgtgtaattataaattatttcttttgcaaggcaaagcattaattccagtcttctttatcctcaaatatccackaataatatgctttacatagcattgtcaattatttgacaagataaataatccataataccaagttactgccttgttaaaaacacacatagagtgaatcctaatgtaaagtatggactttagctgatagtaatgtgtcaatgtaggttcatcgattggaagaaatgcacaactctgatgagcgatgttgataatgggacaggttgtacctgtgtgggggtgggggtttctgtgtagggactctctgtattttccactcagttttgctgtgaacctaaaactgctcttaaaaataaagtttattaattttta

SEQ ID NO: 407543 - DNA, 557 bp, Homo sapiens
aataatatttctacatttgcagaaattgtaaatctacaattgtaaattagaaaaattagcaatggtatttcataatttattaggcttatctgcttccaatgatgaacatcaaagttaagtgtgtaaaacttacattttcctgtaatttatttcgttttgaaatcaaataaaccaatgtgtaattataaattatttcttttgcaaggcaaagcattaattccagtcttctttatcctcaaatatccacgaataatatgctttacatagcattgtcaattatttgacaagataaataatccataataccaagttactgccttgttaaaaacacacatagagtgaatcctaatgtaaagtatggactttagstgatagtaatgtgtcaatgtaggttcatcgattggaagaaatgcacaactctgatgagcgatgttgataatgggacaggttgtacctgtgtgggggtgggggtttctgtgtagggactctctgtattttccactcagttttgctgtgaacctaaaactgctcttaaaaataaagtttattaattttta

SEQ ID NO: 407544 - DNA, 646 bp, Homo sapiens
tgttatattttaaaaggctgtgtggactcataaattttggaaacaccaggttaaaggagactcaatgggctttttagttcaggattttggggmctttactattttaatgagcactatgcgtcccctagagagggcagcatatggagcgctgcagaactctttcagcatggagcacgcttttctcggagcatctggactattattccgtgggaaaaactttggaaattctaacctacatcttttctctttgcatttatttcattacctcctggtgtctggtgtctattgtctaaagacaaacaacaaactgccttcttttaacatttaatttaattttcttttcattacagagggcaggattgttctgtttcgctgaagaaacaatcctaccattaatagagtctgaagtatcaaagaatattttgcaactatttgaatggaaatccccatttgtggttttagtgggcagtgtggcagcttggcattagaagagctgcattgcatttctttgattaatttctatcaaattgtgctactgtaggtaatttatctgtttttttaatcctgtgagaattggcccatctttactaaattgcaaaaagaggaagcagaaagacattttaaaaatagcttaaaagtaagaaag

SEQ ID NO: 407545 - DNA, 646 bp, Homo sapiens
tgttatattttaaaaggctgtgtggactcataaattttggaaacaccaggttaaaggagactcaatgggctttttagttcaggattttggggactttactattttaatgagcactatgcgtcccctagagagggcagcatatggagcgctgcagaactctttcagcatggagcacgcttttctcggagcatctggactattattccgtgggaaaaactttggaaattctracctacatcttttctctttgcatttatttcattacctcctggtgtctggtgtctattgtctaaagacaaacaacaaactgccttcttttaacatttaatttaattttcttttcattacagagggcaggattgttctgtttcgctgaagaaacaatcctaccattaatagagtctgaagtatcaaagaatattttgcaactatttgaatggaaatccccatttgtggttttagtgggcagtgtggcagcttggcattagaagagctgcattgcatttctttgattaatttctatcaaattgtgctactgtaggtaatttatctgtttttttaatcctgtgagaattggcccatctttactaaattgcaaaaagaggaagcagaaagacattttaaaaatagcttaaaagtaagaaag

SEQ ID NO: 407546 - DNA, 551 bp, Homo sapiens
ttcttttcttgggctcatataatatccacataattctaggattaatcttgggtccagaatcacaaggaataatattttgcttaaatataatattccacataggaaactgagtcaatattttacattttccctaggctccagcttctgattttattgtgctatagyattgcaatcaccttttattttagttgttaaatggaatatcactttggaatgaaaatacctgagagatagaatgatatagtatataggacaagtcccataatataattaaatatggcactgatgtttactgcattctatttgcttgtgttagctaaaatttaaatagccagtgtggaaaaaggaaataatttattcaaatgagttttcaaaacgttgaaataattcccttttatgcctagattaccagctctcttaaatcttcatagttctgtgattctccaacaaattttcctttctctgcttctgtttaaatcagatctccccaagagagttgtctaaactcaatgtcttcaatttctttcttttcttttgttaactaagtgaat

SEQ ID NO: 407547 - DNA, 551 bp, Homo sapiens
ttcttttcttgggctcatataatatccacataattctaggattaatcttgggtccagaatcacaaggaataatattttgcttaaatataatattccacataggaaactgagtcaatattttacattttccctaggctccagcttctgattttattgtgctatagtattgcaatcaccttttattttagttgttaaatggaatatcactttggaatgaaaatacctgagagatagaatgatatagtatataggacaagtcccataatataattaaatatggcactgatgtttactgcattctatttgcttgtgttagctaaaatttaaatagccagtgtggaaaaaggaaataatttattcaaatgagttttcaaaacrttgaaataattcccttttatgcctagattaccagctctcttaaatcttcatagttctgtgattctccaacaaattttcctttctctgcttctgtttaaatcagatctccccaagagagttgtctaaactcaatgtcttcaatttctttcttttcttttgttaactaagtgaat

SEQ ID NO: 407548 - DNA, 562 bp, Homo sapiens
cctggtaataaccaccctgaaacttgccttggcctcatggttacaaagtaacactattatcctgtatatttcatgccttgactaagggatcagtgtcatccagatacatctcctacgtttaacaaaacagctcaggccaattccaggcctgctggaattaactgacacagcacaaccctgtcagttcgctcctgaattgttgcgcttttccctgcttccattttgagcttgacagcctattcttaacataaccagagtgatcctttgagaaaacaagtgagaacgtgacactcctctacataaaaccctccataaattccttcctttcatggcctagaaggcccacaccgyctagacctctacctccttccctttccagcttggtcttctccaactttcccccttacttcctccactctcgtcacactggcctcctcactgtggaggtcatggctggaaacaggcctgtgtgccactgcccttctgcctgacacgctcttcctttagatagtgcttggcctcctccctcatctcagctaggtaaattttcaaatctcatctt

SEQ ID NO: 407549 - DNA, 562 bp, Homo sapiens
cctggtaataaccaccctgaaacttgccttggcctcatggttacaaagtaacactattatcctgtatatttcatgccttgactaagggatcagtgtcatccagatacatctcctacgtttaacaaaacagctcaggccaattccaggcctgctggaattaactgacacagcacaaccctgtcagttcgctcctgaattgttgcgcttttccctgcttccattttgagcttgacagcctattcttaacataaccagagtgatcctttgagaaaacaagtgagaacgtgacactcctctacataaaaccctccataaattccttcctttcatggcctagaaggcccacaccgtctagacctctacctccttccctttccagcttggtcttctccaactttccyccttacttcctccactctcgtcacactggcctcctcactgtggaggtcatggctggaaacaggcctgtgtgccactgcccttctgcctgacacgctcttcctttagatagtgcttggcctcctccctcatctcagctaggtaaattttcaaatctcatctt

SEQ ID NO: 407550 - DNA, 651 bp, Homo sapiens
gaggaaaccaattcaactgtactcagagtaggaaggaaacagacatgatgatctcattgttgtatttctaggaaagatgagtcatgcagtctgctcaaattcagggtagctggagggaagatggacatcaatgatgctttcttcctttttaatagagaccagggtctcaagtttcttttaaaataaaaaggaggaaagcacttagaaattagcctaaatcaagaaaatttcagaagaatattctggaaaatataagtataaataaatctgtttcaacttgaaattaattgaattgggtgtggggtgtgcggggtggggggcgcggtggatgggaaggaggggtcatagaaactatccgaactcacaggatctcctgtttctaactctagccagccatcatccctgagatcaatttcaatttccctttgatttgcttgcaaggacaaagaaccagttcagagaagtgaagggctgggagggagagggaggggccataggcaaaggacactaaagcagaggcacatgcttttttaggartagcattttttcagttgggtagtagagtatggaagccatggctctccggaagtttctttctttctaaatgtctccaaactacatgccatggttttatgattctataaactagca

SEQ ID NO: 407551 - DNA, 598 bp, Homo sapiens
tataggttgattgtagtcacctacgcttttatcctgaacatttttaactgttaattaacaaactcataaataagtttgccaaattacttgtaatgagaaagcaaggccaggagaactgktgccaaactttctacacaacaccataatttaaacgctactaggtgtcactctaacaggtatagagccgtcagttattgaaatacggttccaacaattgcaaaagaggcataattttcaagcaaatgtgaaagttttacatccgtttgtcattttggaaagcgtgaagtaattctcaacaagttttaaaataatagtatcatatttaccagtatttctcatcaaaacacagtttagaaatcaattaacaacaaatatatatttaacacaacacatatttggaatccactaccaacgggctcaggtatcaaaaaagaaatactaatggaaatacacaatttcacatttggtcttataaatatcaagaacattgagaaaaaatgagcactgaatgtgatctaaagggcccttaaaatagacactttgtacaaggcttcacaggttagtgaaggatgggaattattcaataaatgaggctata

SEQ ID NO: 407552 - DNA, 379 bp, Homo sapiens
gctgctccacccaaagatgttcacatcctaatcccttgaacctctgaatacgttactttacttagcaaaagggactttgcagatamaattaacttaagaaaattgagttgggcagcttgttttagattatccaggtgggccaaatataatcacaagagtccttataaagagggaggcaagaaggtcagagtcaggactgtgtgtaatgatgaaagagaggtcagagcgatgtgggaacatgagccaaggaatgtgggcagtctctagaagttggaaaaagcaaggaaaaataatctctgctagagcctcctgaaggaactaagtcctgctggcacctcagtttttagtaatttgttataacaaaaataggaaactaata

SEQ ID NO: 407553 - DNA, 576 bp, Homo sapiens
tataaaggaatgaaaaagctttaccaactatgaatccagttatttaccaactattaaaagaaaatatgaataaattggattacaaaaatgttatatcaaaagatgccataaatgtaattgaaagacaatgaactggcataaaatctgtagtaataygtaacagcaaagttaatactttaaataactgtagtaaaatgatacaaaaaagtaaaacaaatcctagtgaaaaaaaatcatcaaaaaatgtgactaggaaaggcataaaaaggattataaatatactatatacttatatatgtacataatatagaggtaaaaaattcaatctcactgaaaatattttcaaagacaaaaaaaaatggtggcaggaatgctggattgtcaagactttccaggaaacagtttaatatcatgtgtcaaaataatacactttgacccataaattccatttccaggcatctatctgcaaatagtgcaaaagaattctattgccatgttgtttacaaatgcaaaaattgaaaagaatctaaattattcaatagctggaagtacttatttaaattatggtatatttat

SEQ ID NO: 407554 - DNA, 576 bp, Homo sapiens
tataaaggaatgaaaaagctttaccaactatgaatccagttatttaccaactattaaaagaaaatatgaataaattggattacaaaaatgttatatcaaaagatgccataaatgtaattgaaagacaatgaactggcataaaatctgtagtaatatgtaacagcaaagttaatactttaaataactgtagtaaaatgatacaaaaaagtaaaacaaatcctagtgaaaaaaaatcatcaaaaaatgtgactaggaaaggcataaaaaggattataaatatactatatacttatatatgtacataatatagaggtaaaaaattcaatctcactgaaaatatttkcaaagacaaaaaaaaatggtggcaggaatgctggattgtcaagactttccaggaaacagtttaatatcatgtgtcaaaataatacactttgacccataaattccatttccaggcatctatctgcaaatagtgcaaaagaattctattgccatgttgtttacaaatgcaaaaattgaaaagaatctaaattattcaatagctggaagtacttatttaaattatggtatatttat

SEQ ID NO: 407555 - DNA, 588 bp, Homo sapiens
acttagttgtttctgtgtttgcatcacactttcatacccctgctataactttgtctttaaacttttccaccttccttaatagaagatttggttcttgaagacaggagctctgtctaactcagttatgtaccctcactacctagcattgtgctttacatatgacagacacactccacaatatctgagaaatagaataactggggatgaatgaatgagaaaattaatgaagaaatgaaggaagttacctggtcaaactgctaagaagtaacaaggcaaaggaaagaactatgtttcctttcttcaactcagcccttattcctacatcccgtgtctgtggttcatgttacaaaccacaccaataagaactttgtcatactatttgtcactgtgatccgttccatggaagaaaatggttcattttgctcattaatattaattaagatacatattaagtaacatagttgagcttcgttacggtagatactatggctttttctccttttgttctgttattatctgacacttastatgtcctaattcagttagcaagttctaattcattaatgttcgtcaaatgaatgaacccag

SEQ ID NO: 407556 - DNA, 378 bp, Homo sapiens
aagcatttcaccaagaatctctcttggytctgctttgcttatgtgatgatggctgtattctcaggtggggttactgcaggtattggcaaaatagccacctacagcctcaggctacccttttagcgatgtccacagagcaacagttcttccttcccatttgctttagtagggaatcctgattccattgagtaggattggtcctacttgagtaatttataaacctggagagtggagggattcagtgctgtggctggccggacttgggacacacatctttctgtagagaccgggggtaggggtcaggctaacccaacacacaagcctgagagggatggaagaagttcccagagagatgaagggatgttagcagagagggga

SEQ ID NO: 407557 - DNA, 609 bp, Homo sapiens
gtcatagaagcaattattcacttcccatttcgcggggcttctgtgtgtgaatatccacagcttgtgcagtttatacttcatggattctgtataagattcaggattttgcatgtcagtatgacggtgttggccttcccttacttgattaaggattatttcatttttccaatgaaatttgtacccttaactcaatacaggttcaaaactataaccaagtggttgctttttgatgcatttcaaaccaatattttatatatttcaaatctccaattgaagaaaacataatacagtgcagggagatacagacttggaggcagaagacttggcccttaaccctggcatgtccatttagagctatacatggatggggatgttgcttaacctcgctagcatgaccacttacccattaggcacagcaagcacagtgccagctttcaagggtccagaagaatgttttaatttwttttaaggaagaagaagaaaaaaatgaacttgtaataatttgtataatgagttataaaaataattatagattacaaacttataataatttatagattataagattgatatagattataatagtctataatattatcaattttatat

SEQ ID NO: 407558 - DNA, 604 bp, Homo sapiens
taaaattattaggtaggatgtctgtgtttcaacagcctgtgaagctttgaaaacaggaactagctcaggagggctgaggcaaactgtggttgtttgcattttagctcaaccaagtgtcagtgctccatctgcaagagttgaaagaaaaagtgcagagctgcacctgagaatgatccagaagcagcccataagaaaccaggtgccctgaatcatcacattattctgggacccaagtcctatggtaccctgggtttcagctttcccaccttccactgattaatctgtaagttccaggatactcattcaacaaagggtcattcatgggttcttgcagggtggagagactgtaaaagtgtaaaagtgtccctctctggagggaagcagggccccttcccttcaaaatcagagtggttaacagcatacattttgcaacccactgcctgagtttcagctttagatttcctagctgatgatcttgggtaagtcactctgtgcctcagtttctgcatatataaaacaggagtamttttattatccctcacagtcttgttatagacattaaataaattaatatgtggcaaagcactcagatcattgcctagtt

SEQ ID NO: 407559 - DNA, 554 bp, Homo sapiens
aatgtgaaaaagtttacagacaaatcgcatagcctaaaagtatcaaaaaagttaagcaaaagttaggtatgtcatgattgcataaaatacatatagataactagtttatttatttgttaattcactatttatgttgtcaggcttccagtcaacataggctattactagttatgttttggggcagtcaaaaagttatctgaggattttcaactgtgagaagggtcagagcctctaacccttgtgttgttcaagggccactggtgtatatacacacattctattggttctacttctctggagaagcctgactaatacaggccacaaaccagaagaatgtagtcaacaaaaagctagaagaggcaagaaagggaatcttccctagagcctttagagggaacacaaccctcctaacaccttgattttgggcttctggccttcagaagtgggagaaaacacatttctcaacttttaagtttstgataattatacagctgccacagaagactaacacagaaaggtgaggggtgaacaagaagaacagatagcacttgaac

SEQ ID NO: 407560 - DNA, 554 bp, Homo sapiens
cacttcatactaaattttataaatgtgcaatctcagaattataaattactgaggatgatgattcccattttgttgaataagtagcagacccagggaggtttgatcacttgcctaaggtcacactgatgcataggagtgtattgggactctcccttgcttrtttgtctgtctaaacttgtgggtttatttgtttttctagaaaatcatgcatattcaatttaaaagcgaagtattcccagcctgtatatttctgaatatttcaaaaggtatacccatcttcaatacagtctccagatgaaggaaattttccttctagggccaggtgatttttattgtctgtttactcccctcaggacttagaagtaaaaagctaaatatgttgttctcaagcttcatttcttccactaaattgctttgaaaactcagcttctggttcctggtttataatatagatattgcataaaccatttggtttccaaggtccttcctctgtgattacatgagtttaaatgcatctcagataatatatatataatttcataccaggcattgtg

SEQ ID NO: 407561 - DNA, 509 bp, Homo sapiens
gtttctatttttttgtttcttttggtttatttgtttgtttgcaaggaaaacttgtcagaacaaaggaatttcattaattcaatgtctttctcaagcaaataacataataattcactacacagagctttaaagtttataaagtaaattattttctcataacccttccaacagctctatgaattagacagagccaatattgttagtagtatttataagttatggataaagattggagagtcttaagtaacagataaaactgatccaggtagcaartagttgggttggtatctagtcctcagaactgcagttgagtttggtaccaggagagaggcaccaacaattacagagtattgttaaaggtacaatagccagcagtgctgccaacaatggcatatgtaagagtgccggtctcagtgatatatgatgggaactaactccattgaaaggggagctgctggtccctagcctacagatgtttgtggtactgaggtagcaagtaccacaatttg

SEQ ID NO: 407562 - DNA, 571 bp, Homo sapiens
ttattttatttatttattaaattgatagtgatggcagcagcagcccatcttgagtggctgccacaaagacgccagatgcagcaggggaggcctggctggggctgagagctacacgaagcccgtgggagccagaacaggtaggggccccaccctcttctgagttggtggggtgcccagccatagttgtggacctggacatccctgtgctctcagggctcaggaaacccctggacactgcaggcgtgggagtgcctsgttccgctgcctggcctctccctgctcctggtgtctgctctgattttggtgcaaagtttgggccgagcctgggcgctatcacgcaccttcgggtgtgtgtgcactcacggcggtgctgacatgccagccccctgccacctcatccctctccggaatttgggtgccaacgagcatgcgagggaggtcgagggggtgctgaggtctgcacagaagaaaggatgacctgcctgccaataggagctacccactctgggtctcctctctgctgagaactggacacttattgggatgacctgactgtaggtaggagctacac

SEQ ID NO: 407563 - DNA, 571 bp, Homo sapiens
ttattttatttatttattaaattgatagtgatggcagcagcagcccatcttgagtggctgccacaaagacgccagatgcagcaggggaggcctggctggggctgagagctacacgaagcccgtgggagccagaacaggtaggggccccaccctcttctgagttggtggggtgcccagccatagttgtggacctggacatccctgtgctctcagggctcaggaaacccctggacactgcaggcgtgggagtgcctcsttccgctgcctggcctctccctgctcctggtgtctgctctgattttggtgcaaagtttgggccgagcctgggcgctatcacgcaccttcgggtgtgtgtgcactcacggcggtgctgacatgccagccccctgccacctcatccctctccggaatttgggtgccaacgagcatgcgagggaggtcgagggggtgctgaggtctgcacagaagaaaggatgacctgcctgccaataggagctacccactctgggtctcctctctgctgagaactggacacttattgggatgacctgactgtaggtaggagctacac

SEQ ID NO: 407564 - DNA, 544 bp, Homo sapiens
caacagattaattactgggagttttcttcactacagaagtagcccactcattctcaagataaagatgttgaacagaagatgagtacaacagctgatattttataattttcatattgtacagcacacatttatttaatgtgtttttccctgaagctttgtactcatttttttttgcatgtatcttgatccaaacaatttataaaaaccaattagttgggatttttatatattgcctgatttagagccattaacccattttagtgtctcaggttcacaatttctaagacaagggtaaaaataatcayacactgagtgatatttaatggctaataaaagtaccatttgaaaagagaattagtagtataacctttaagctcaggctctcctaggtgtaatatatagccttaggagaaatagtttttaattaattgtgtaatttcaagttttgtcttttcatcactgtgttcccttttcagagagtcagctatgtaattacagactcagatgaacacagatacttgtgacaagtaactataaccaataa

SEQ ID NO: 407565 - DNA, 552 bp, Homo sapiens
aataaaaaaaacttaaagtaagtaacaatataactttaaggtatactttacaaagcacttaacagtttctattcagatttcctgcagatatttctaggcttgtttaataaatagactcagtccttccagtttaaaaactagccttctcaaaaaatgtatcactccctcatgatagaattatatatttttaaaactccacttatcactgaaaagtgttttttaagtatagttttaatgtactgccatcactgaaatacctcgcattcattcttcagcacactaggttgtgtgagaattctgaaacaactggcccaaagttgtcagattcaaaattaaatgtcaagtggccagttgttatacatattattaatgactctaaccttctgcaaagctgcctgttgttctagacaaatatataattaaggcatcacatcgtctttaaactgctatgtycgttgcacaaataaaatcatctgttttgggagaggttgattgaatgaataaaataatgaaaagagtggtgagctgcatgcaggtaggtattatactaaa

SEQ ID NO: 407566 - DNA, 539 bp, Homo sapiens
aatcattgcactttgataataaacatatgtgcrtattttggggaagaaaatttaataagcttgatttcaaaataaattgaatttcagtgtaacttgaaagaatcttaggcaaatagctcatatcattgaattgtctcacaaggatctacacacacatacacacatactcatgtatacagtcatgcattacttaatgagggggatatattctaagaaatgtgtcattaggcaattttatcattgtgtgaacatcatacagtgcacttacacaaacctagatggtatcacctactacacacctaggttacattttacagtctattccttctcagccacaaatttatacagcatgtccctatattaaatactgtagcctgttataactccttggtaagtatttgtgtatctaagcatagaaaagattcaataaaaatacagtcttataatcttatgggactactattttatatgcagtccatcattgaccaaaatgctgttatgtggtgcatgactgtatataaacatacactctgtgcaca

SEQ ID NO: 407567 - DNA, 595 bp, Homo sapiens
atttgtcactgtggactaatgcacgtaacctcagtagaagactcccatttcaaatggcacatttcaaatattatctgttttgtgttgtagatttctgaataaaatctgttttgagaaataattatttgctaaaaatgtttgaacagctcatagatgataggttgatgatagatagatagatagatctatcatatagatttatggatttattatatttttaatttaatcattgcactttgataataaacatatgtgcatattttggggaagaaaatttaataagcttgatttcaaaataaattgaatttcagtgtaacttgaaagaatcttaggcaaatagctcatatcattgaattgtctcacaaggatctacacacacatacacacatactcatgtatacagtcatgcattacttaatgagggggatatattctaagaaatgtgtcattaggcaattttatcattgtgtgaacatcatasagtgcacttacacaaacctagatggtatcacctactacacacctaggttacattttacagtctattccttctcagccacaaatttatacagcatgtccctatattaaatactgt

SEQ ID NO: 407568 - DNA, 552 bp, Homo sapiens
atcaattttcttctaaatctcaagtcggaatgtaggttttccaaatttcagttgaaataatcatcttttaactatgaaggttaggaagaatacaattgtgtgttcacattgatgggaaaatggcagatgaaaattggatgactttctgtactatgttctttagctttgtcatacatttatatggagcagcaggtactgaatttctacaaggaagcaataatgaaaagtaatgcagacagaaatagcttgcctccagctagactawtggcaaggtcagattacatcaattaaatcagaaagtctccaagataaagttcactaatacattcagggattttatttttccccaaatagatgtctgcttttataagtagaaaaatttcactgtagtttcatgtaggtaacaaaatacattgaaaaacagtaaagaaaaaaacaagtaaagttatataactatataaatacatatatataatttacgtgaatggtatttgcagaaagccaaataccttttttttggtaaatgtatccttacattcattgatactgtaa

SEQ ID NO: 407569 - DNA, 512 bp, Homo sapiens
tcagtacatttttagtacatttttaatgaaaaggatctcctctgaaattactcattcaattcaacctgtcatcaccaagcacttctgtgccatccctttgaaagattgcattgatatgttatacaataacacagacgttcagattaaagtttgttagtcactctaggatratttaccatagagaattaaataatgtaaaataaaaactaaatatcacttccaagcatctaggcaagcttactactagacctatacatttttgtgcttctcctggattgctctttaaggggtaaaagctcatagaagtaacaaggctcagcatgtccaatatgaaaaagtgtgtatgtgtctgcaaaaaagaataagtctggagaaagagattttgaggtttgaaaagagatagactattaatttttgaattgactaaaataaaaaatagatattagagaaaaacatttagtttgtttttaatatgactgcagattttgagttgagaagttatatatatagta

SEQ ID NO: 407570 - DNA, 201 bp, Homo sapiens
agaaaaaaaggggagcagtaagacattaaaaatgaagattaagggttaaacagataattgatataaccttaataaataayttacaaaacgagttactattgcatagtggtgagaagcactggtgatcagttagctttagataaaaatagttacttcaacggtaagggaaagaagtagtgaaaatgcaatctgaaatgttac

SEQ ID NO: 407571 - DNA, 581 bp, Homo sapiens
tgattgtaacacaatgttaartatttgtgtatcttagcataagtaaacatagaaatagttcaataaaaatatagtataaaagattttttaaagacaagcagtaactacctgtatgaggtaattactataaatgaagcttgcaggactagaagtttctctgggtgacttagcgaatgattgatgagtgaatgtgaagggctaggacattactgtacactactatagacttcataaacactgtacacttagactacactgaatttattttttaatatttgctttattcagtaaaaaattaaccttagctttctgtaatttttttactttattatactttttaattttttaaactttttgactcttttgtaatagtgcagcttagaacacacattgtaccactgtataaaatattttctttatttatatccttattctatataggtttttatatgtgaatcttattttcttttacattttatacctttttgttaaaaactatgacacaaacacacaccttagcctaggcttacacagggtcaggattatcaaagtcactgtcttgcacctccacatcttatccc

SEQ ID NO: 407572 - DNA, 563 bp, Homo sapiens
atattaaaactatatttaatcatgcttatggacctatttaacagttttcaggaaataaagggactagaaaaaaataactatcagacttgaagctaaaactgttgggaayatcctgctccagggtgactataacattcctgcatccatattagttactacaggtacaatcccagaaaaacagcccacctgaatctagttcaaatagcggaatcatgaacaaacaaatgaatgttgttttaaggcacgattctgaggtggtttctcacagagcagcagaaaattgatacttttgataaagttgggcgattgtacatggacaatattttactaatcttgctacctaaaaatatacttgatgtttttataatttttcaaaactatgccttttagaccaatctgtggctatagtattccaagttaatttggttgttaaacatgtacacttgcaaatatttgagaggtagaagtaaagaggagggtatttccttgccccttttggccactttcatgctggaaagaaaattcataaaagtgtgattatccagagataactgaaatatctg

SEQ ID NO: 407573 - DNA, 640 bp, Homo sapiens
tgttttagctcatattcgttgtatgactttaaagttaattaaatgttrtgttacagagctgcatgagaattcaatgaaagaaactatgcatgaaaatgaagcactgtaccaggctcatgttaaatactcagtacataataaccactgcacttaatgtctgttaaggaaatgtagaaaaaatattttaagactaagttttgcttttggttttatactgagattttttaatagagtacctagaagatagaaagattacttctttctctgtatgcctccaaattgtcaggagattcaaaaaatgtgccatacagtttattctccaatacctggagtgtgagaaaagtaagcctatataggttgcctataaattttaccattgtctcaacttaatacaaactcccttatactcagaaaaccatatttccaatttcttattaagtttaataattatatggtcttaataaaccattcccattaaaaatataaagtatcataccctttatttaacacattagcatacgaggcctcttccttaggtttgtaagggagtaaacatatgtctacttatacgtatgttcttgcaattttacaagcactggatgtcttgtgctaatctctgtcatatgctgtaatatagaga

SEQ ID NO: 407574 - DNA, 640 bp, Homo sapiens
tgttttagctcatattcgttgtatgactttaaagttaattaaatgttgtgttacagagctgcatgagaattcaatgaaagaaactatgcatgaaaatgaagcactgtaccaggctcatgttaaatactcagtacataataaccactgcacttaawgtctgttaaggaaatgtagaaaaaatattttaagactaagttttgcttttggttttatactgagattttttaatagagtacctagaagatagaaagattacttctttctctgtatgcctccaaattgtcaggagattcaaaaaatgtgccatacagtttattctccaatacctggagtgtgagaaaagtaagcctatataggttgcctataaattttaccattgtctcaacttaatacaaactcccttatactcagaaaaccatatttccaatttcttattaagtttaataattatatggtcttaataaaccattcccattaaaaatataaagtatcataccctttatttaacacattagcatacgaggcctcttccttaggtttgtaagggagtaaacatatgtctacttatacgtatgttcttgcaattttacaagcactggatgtcttgtgctaatctctgtcatatgctgtaatatagaga

SEQ ID NO: 407575 - DNA, 539 bp, Homo sapiens
atcctaaagaattatagtgtcctatatcagtatttttttgttttaaataaaatctacacaaatgtgaaataagaaaaaaatgttgtcataaatttatggtgggttgtgtgagatatatttcttgctgttggagtggaagctaacagataagccatgagaggaggctagaatgatccatttggtaatttttctataaaaataactctataaggaaacttcttggagaaataaatgataataggattggtgcattatacaaggaaatatmtaagatgggcatgccgcattttggagtgccaaaaattcagtgcctctcccaccaaaaaaaaaaaaaaaaaatttggatatgcgttgtgggtatgtcaaagtgatacactacccaactgaaagagtactctatatccaatggtagaacaatttgagaacaaaagtaggtagcatttgattataagctaaagtataaaatatatatcaatgagtccacactgtttaaataaatagatagataaggggaaaaatctcttgtgcagaagaattcc

SEQ ID NO: 407576 - DNA, 556 bp, Homo sapiens
tttatgttttaaagatatcaaaataacctgtacaacaaaaccccatgacacaaattacctatgtaacaaaactgcacttgtaccccgaacttaaaataaaagtaaaaaaagtggtatcacttaaaaatattattttacacttttataagggattcaattaatctgttatcaaaggaagaactattgatttattattctcattcagacaaagtgcttcatccttgtgaacattaaatttctcatgggtaaaattaatatattaattgctttaccctaaagttgttgagaaatttaatggtatcataggtattaaaagacttagaaaattataatgtgctatacaagttgtatatataatttctcccttcagattcttaacactgatatattatactcagtatttattactattttgaatatcactaaatgtttattatytttatggatatactgaaataatttaatatttgcttaatgtagaaagctccattataaaaaaatccataacatattgtattaataaagaaactccattataaatatgctggcttctagc

SEQ ID NO: 407577 - DNA, 556 bp, Homo sapiens
tttatgttttaaagatatcaaaataacctgtacaacaaaaccccatgacacaaattacctatgtaacaaaactgcacttgtaccccgaacttaaaataaaagtaaaaaaagtggtatcacttaaaaatattattttacacttttataagggattcaattaatctgttatcaaaggaagaactattgatttattattctcattcagacaaagtgcttcatccttgtgaacattaaatttctcatgggtaaaattaatatattaattgctttaccctaaagttgttgagaaatttaatggtatcataggtattaaaagacttagaaaattataatgtgctatacaagttgtatatataatttctcccttcagattcttaacactgatatattatactcagtatttattactattttgaatatcactaaatgtttattatttttatggatatactgaaataatttaatatttgcttaatgtagaaagctccattataaaaaaatccataacatattktattaataaagaaactccattataaatatgctggcttctagc

SEQ ID NO: 407578 - DNA, 569 bp, Homo sapiens
ttcaaatatcaccaagtcctgtttactttaaaaaaattccaaatgtgaccacctttcacyaactattatcgtcatactccaaatccattttcatgtcatctacactctacttattctttgtatcttctacatcttatcccttcatagccattataatcataattatgattttgctcaaaaccatcaaaccttttacaaaataaaatttaaaatctttctcaaagactgtacattcttacatgatataaccctattgatctttttgttttttcttattttttttcctaatgcaactctcattttcacacattcttccccagatacactgactcttgctgaactagaaaaatgtcaaactcatgagtgctttatatcctttgcctttgcatttactgtggagacttctgaaattgtctcaccaaaatatgtcatggctctttttgtcattttaactatgtcttttcttagagactttgtagttcatcctatataacttgacaccctgcccatacaaaatctcttttttcttttttccctgctattatgaaaataaagagaacaaatgtata

SEQ ID NO: 407579 - DNA, 608 bp, Homo sapiens
atgtaataacttatcaactatctgtattgcttatttctttttaaactgtagaatgtattttactcaactgtattgtgattctgtataatttttagggtgaacattttatagaattttatagaatcatacagagttaaacaagactagaaaagttattgaattcattctcctgactggaggcagagctgcatttattttatccaaaatagatgaagatttttcctattttaagagagtcaggaagaaagaaatttcagaactgctcttagcaatctatttgattatttaccacttgcatatttagaatgttcatctttaagtcttaaattctgcactggacggtttaatgtcattttgccctaggacaaaaatgctgatcattatcctctttgtaacaacttttcttatagtcaaaaaaccataaagacacacctcagctctttcttccctaagctaaattatctcagtttttyaaacatttgcttttgtttctatagctctttctatacctgagtggcaaaggggactatttttaaaagctctgtcatatgtgatgcctcttagagaggcactgcatattttaatttcactgtgctgatgtggaaata

SEQ ID NO: 407580 - DNA, 470 bp, Homo sapiens
ttatagaattttatagaatcatacagagttaaacaagactagaaaagttattgaattcattctcctgactggaggcagagctgcatttattttatccaaaatagatgaagatttttcctattttaagagagtcaggaagaaagaaatttcagaactgctcttagcaatctatttgattatttaccacttgcatatttagaatgttcatctttaagtcttaaattctgcactggacggtttaatgtcattttgccctaggacaaaaatgctgatcattatcctctttgtaacaacttttcttatagtcaaaaaaccataaagacacacctcagctctttcttccctaagctaaattatctcagtttttcaaacatttgcttttgtttctatagctctttctatacctgagtggcaaaggggactatttttaaaagctctgtcatatrtgatgcctcttagagaggcactgc

SEQ ID NO: 407581 - DNA, 300 bp, Homo sapiens
tctacactcctgtctccagccctcttaaataaatagcttttctgtagtgttagatgccagctcttaacatttagagacaattcacactataccaataccatacttcaagtagatgatctaattgtttctaaatcatcatattttagcaaaaagataatgggagaaatcaaagttgtctctcacatatgtatgatgcatactagaggcttggcaataaggcagaragtagatattttttgagaaagtaaataacaaaacaaaacaaaaagccaaaacacaaaaacaaactgggtattgtga

SEQ ID NO: 407582 - DNA, 562 bp, Homo sapiens
ctggactgtttcttaacattaatataaagcaaaggttgcataaacaatggatgtaggaagctcattccttcataattattaagaactgaaaaggtacattgaagaaaactagccatgaataagaaaataacttcttcacagtggttaaagagaaaaggtactgaaaraagtaaacaaacatatgaaagcctcttaatatactaaggtattactatatatatttctgacctttggctactgagaaaatgtgaaagatgacaattctatagctattctatataacggcagatgctcctcttattccaggaaacaaaatccttttatgacatttcactaaatatctaatcaaagagtattttatgtgctcatttcagatagtctcattcacttgcccttataactttaaatgagttcttttcttaagcaggccagcttgtatattatttatgataaaatactttctttaagatggattcagtgttaattttgtactatatgacttagtacagtgggacaattacatataacacttcttctatcagccctatgtttctatgttctt

SEQ ID NO: 407583 - DNA, 562 bp, Homo sapiens
ctggactgtttcttaacattaatataaagcaaaggttgcataaacaatggatgtaggaagctcattccttcataattattaagaactgaaaaggtacattgaagaaaactagccatgaataagaaaataacttcttcacagtggttaaagagaaaaggtactgaaaaaagtaaacaaacatatgaaagcctcttaatatactaaggtattactatatatatttctgacctttggctactgagaaaatgtgaaagatgacaattctatagctattctatataacrgcagatgctcctcttattccaggaaacaaaatccttttatgacatttcactaaatatctaatcaaagagtattttatgtgctcatttcagatagtctcattcacttgcccttataactttaaatgagttcttttcttaagcaggccagcttgtatattatttatgataaaatactttctttaagatggattcagtgttaattttgtactatatgacttagtacagtgggacaattacatataacacttcttctatcagccctatgtttctatgttctt

SEQ ID NO: 407584 - DNA, 582 bp, Homo sapiens
taacacgagctaactacaataggcaaactttactattaatataacattaaacttttaccatactagccctaataaaactctgagactattttctatcacaatgacagctgatgaatttaatgtgcctcacaaactataggaattgtgataggaagctgactctgtcctagaggccactgacaaacctgataaggctgtagcaggggtcagtctctataggaaacttgggctatatgagcatgtatgagttctgtggttaagaatctgaagcactcagtatagcaaacaaaattccaaagctgagtaccaatgtaatacgctggatcgctgtacctacttggacaagagtacatgcaacaggcacatacaatatacatctggttaaatgtaaaatcatccattgctaaagcattttaaacttctaggagaaatctactggcaatgtgttaacagcaaggacaaccaaaacaataaaataacatctctttcctaaaatttaagaacatcaagtaagtgccccttaggctgggttgtgattcctggaagtttcagmctatgagaaccatattggcgacatcaaag

SEQ ID NO: 407585 - DNA, 624 bp, Homo sapiens
tttatgccatagttgagaaaaagtttcatcaatgtttcttttccctctgttcctcgaagcaacataatttgtttggcaaaaaactaagaatgaaatatctcctgctttatagatagtttttatacaacattctttgtaattgtgtaaagtctgagaattgtgtctaatgaaatatctggtaaaggcaaatggtaaataaattctcatttaattgataaaattaatttggtttctccataataaaagtatacttgtattagaagtctacttagtttaaggagtcacattacatctccatgactcaacattcccctttgaggcactgggggaaaaatccaatartaataccaaaataaaataactttgaccctcaacaatgctatgcattgtaaactgatgccacccagaaagatgtaaggaaacagctggctgaaactacagttgaagcatctctggaattaacaaataaagccaatttctggataacaagacaaattgatatagtcagtcttcgagtgattgggaagaaggtgagaggtgaggttgagagatcctcaccatttgcctatataattaatttgccagtaatgctttcagtgatattcataaaggtttgaggtaaat

SEQ ID NO: 407586 - DNA, 564 bp, Homo sapiens
ctgtggataatacaaatttatccataccttgaaattttaacaagataatagccatttattttaacagtccccttttgcaaatgaaaagatggcagggttttttttgtcagctcattgtcaagcttacacaattattgaacatcctccgtgtcttcatggaagtaaggacataccaaagtcctggaaacacacctaggaaaagtacaagacctatttccaagatcatggatcatctttagaattcctccactggcattatttactcaggttttcaggttattgcctgaatccatctttttctatacatggcaaaatttttctttgtctttatcagctatttgaaaattatgtgcttagtttatttacttttactccttctttaggtaagaaaaagcatccaaggttataaattttcctctgagttcagcttcgaccacattagatagctgtttctattttcattcacttataaattatctttaactgtagtttttattttttatttgatttttagtgtgtgttaattaaamcattgtgcactatagtcggaaaatatggtacata

SEQ ID NO: 407587 - DNA, 600 bp, Homo sapiens
aaaacaagactcaaagagattagaagtgttgaactaggccacatagctgtttgctcaatattaaaaaaaaccagcattgctgaggttaggcatggtggctcacacttgtaatcccagcacattgggaggcagaagcagaaagatcacttcagcccaggagtttgagaccagcctgggaaagatggcaaaaccctgtctctacaaaaaacataaaaattagccaggtggctacatggtggcatgcacctgtagttccagctactccagaggctgagtggggtggatcacttgagcctgagaggtaaagtctccagcaagccataatcatgccacttcactccaacctgggcaacrgagtgaaaccctctcttgaaaaaaaaaattatttgctaaaatttttctgtcagagacacatttttgctctttttgttagatgcatttctatgatattgtaaataagagggaatgtgttaagtcccacttctcaccctgtcaagtagtagaatggggtttgtgagttacctgctactgcaagccatcttaaggaatatgcagaatcacatggagcaatggtttgcaaactcttttttagtcgcggaa

SEQ ID NO: 407588 - DNA, 467 bp, Homo sapiens
tgcaactgcctcttaataggataataccactcttgggggacaaaaatagtaaaaaaaaaaaaaaacaaaaagtgacccttctatgtgccacacattacaatatacgctttcacataaatatctcctttaatttgctcaacatcttttcaggtggatattattatctctgaggatcagaaaggttaaataatttgtcygaggccaccagctagtaaggaactaaattaggttgcttgtattaaaaaaaaaaaaaactatgctcttctcactatcttatcaaacgctaatagttgctttctagcttaacagctgtattatttaagatttactatttatgttctttcttgtgatgcagtggcaatataagtaaaataaatataaaataagcttgtaaatactatagctattatattttagagcacactattacatttgtagtatatctaaacttatgcaagagcaaataa

SEQ ID NO: 407589 - DNA, 641 bp, Homo sapiens
tgctgagagtagaccagactgatatcagcagcctattttaggtcaacatctctagamgcagagcctgagacaagaatcaagtacatgtggtttgctgggaaagcactcttatgagaaacctgtgaaggaaggatggtaggaagagcaagaggaagatgctgagcaagaatgtggtctcaggcatagtctggtctagccctgatatatagaggggtctggagagaaatccacacctcagaggcatcccttctgaaggaaaagaagcttataccccataactttgcaggccagatagtttccctcattccagggtaactttccagaaaagatgggtgtctgtgaaacatgagcagctgacgttcacagaagctgagaagatgggtgcacaacacaggggaactgggggaggcactaaagtgtctactacgcagtctctttgcagagtattgtcttacttggcctaatttttgtctagcaaaactgtataagaaccaatgctagaaaaatcttattccagcacctccagacccttgcaaggctctttgggaatagctcctctacatggaactaacctccaaatcctaatttcagaaatgccgtctaaaaaagaaacaacagcagcaatgtacaaaataaacaga

SEQ ID NO: 407590 - DNA, 641 bp, Homo sapiens
tgctgagagtagaccagactgatatcagcagcctattttaggtcaacatctctagaagcagagcctgagacaagaatcaagtacatgtggtttgctgggaaagcactcttatgagaaacctgtgaaggaaggatggtaggaagagcaagaggaagatgctgagcaagaatgtggtctcaggcatagtctggtctagccctgatatatagaggggyctggagagaaatccacacctcagaggcatcccttctgaaggaaaagaagcttataccccataactttgcaggccagatagtttccctcattccagggtaactttccagaaaagatgggtgtctgtgaaacatgagcagctgacgttcacagaagctgagaagatgggtgcacaacacaggggaactgggggaggcactaaagtgtctactacgcagtctctttgcagagtattgtcttacttggcctaatttttgtctagcaaaactgtataagaaccaatgctagaaaaatcttattccagcacctccagacccttgcaaggctctttgggaatagctcctctacatggaactaacctccaaatcctaatttcagaaatgccgtctaaaaaagaaacaacagcagcaatgtacaaaataaacaga

SEQ ID NO: 407591 - DNA, 597 bp, Homo sapiens
agctccacagcaatgtggagcaggtcctgaaggctccgtccccttcctgagctgaccttggattggcggaggccattcgaagtctctcattaggtcaccttctgagaatgtgtgtttttctccctatggaaatataaataatttttattagggaatgcagcccagaccccactggaggagtgggtaatatgaagattgagccttgtgttacctccataaaggacaacaaattctgatctgtagcacttctggcacctaaattttcataaagagactgattcctctactacattgcttaaggctgctaataaccactgtatgacaatagaatgtatatgtgtggggaggtgataaaactattataggcaacaggaaattcaaaatgccctaggaccctgaaaagttcacctcacttagtatttggtcyataatattccaactccctttttcaccactccttcccaaagccttgaggctctaaatcttcccctgttcttattctcctatgtgtttagataaacaactcttcctctcctgtgttctggaggctctctagaactttcactgtaggacacaggaaaaagataaataataatg

SEQ ID NO: 407592 - DNA, 333 bp, Homo sapiens
gggcagaaatgtaccttgagtgctttgcaaccctcaagtgtggccacagcctcacagctgtctccaggcccccaggccctgtccttccagacatccctttacagcagatgcagctcagctcagctcacatcctggttaatcccggaaaacatgctctccatggctggcactgyccataggaagaatcagaagatctcaaagcagcaatttaacaaaccccttctgactttcaggacttttaatctagctttttatagcatctataacaaaatagaccttatcaaagtgtaaaaagcactcttatgcttttttgtaaatgtgcataagcccctc

SEQ ID NO: 407593 - DNA, 545 bp, Homo sapiens
aagcaatttatttattttctttgttgggttgcattagacatcaaatcagccaggaccactgttggaatgtgccaagaggtgttctttcagcccagctgggtacagaaaatgactatttccaggtaaaagtatcatgaagtccctgccatgataactcttagtcttacaggggaactccagcagacaaaggggacacagaatgttctgaaagtgagcaggaaagagaaccgtggagcatcataagcaaagcaggccatcaaggtactataaacacttgaaagagaatacttcctttgagatrttaacctgtgttctgctcagcactgttttcctctcattggatttcatgcaagcagcctttgtaattctttacctcagggcatttttgcagagccagggacagaagctacttgaggtcagaaacctgttctgttctctgtaacaaccctctgatgaggaaatactgggtgtcccataaacaatggaaagagggctcttatgctggcaacgagagagtgcagggcagaactcctgatggtaaaaat

SEQ ID NO: 407594 - DNA, 602 bp, Homo sapiens
agaaactagaaaaaaaagaacaaactaaacccaaagttagcaaaagaaagaaaatgataaaaattagagcagaaataaaggagcaaacagaaaaacaataggaaagaacaagaaaactaagagttggacttttataagaccaaaaaattgataagtctttagctagattagctaagaaaagcagagagagattcaaataactaaaattagaaataaagaaggaaacattacaactgataccacagcaataaaaaagattataaaggcttactatcaataattatacaccaacaaattggataacctagaagaaatgaataaatttctagaatatacaatctaccaggactgatttatgaataaataaaaaatctgaacagagctataactaataaggaaatttaatcaataatcgaaaacctccaaacataaagccccgaaccagatggcttcactggaaaattctatgaaacattcaaagaatcaatgtcartttttttcaaactcttcttgaaaataaggagaagggaagatttccaaactcattttatgagaccagcattaccctgatgccaaagtcagacaaagataccacaagaaag

SEQ ID NO: 407595 - DNA, 602 bp, Homo sapiens
attctcttcctaaaagacaattttaaaagacacacagcaytggggaaaggaggaggaagaaaacttttggaatagagaggataaaatggagaatttgtaaaccacagcaagctattgcttgcattaccagcaaagaagagctttgagtaaaccaagatggtgctaagttgttatccttcccattgccttctgatgaggaccacaaattacctacagccaatccattactctttgtcatctgtgtggagtaatacttgtcagatcttggaaattctgtccagcctccatccaaacaattctatgtggactaccacaatctgatagcctgggttccttataagtctttttcacccctgtccccatcatggatgatagggatgaatattggggaccatggtgacatgagtggaaggtatgaaatacactccccccacatgttcttctgtcttgcctatgatcagcccgtttgaattctacatttacacaagactccaagaaacactagatgctgtttaggactgcacaagtccaccacctagagggaactcagccaatgtgcccactctactctgcccacagagttgtttgggagacgagcagtg

SEQ ID NO: 407596 - DNA, 565 bp, Homo sapiens
aaagagaactctgtaccaatgagaaaagtattcacaaacacaccgtatttctccttttacaaagaaagaggctaatgcaagcaaggcacccacctaatacttatccttccagggtataagttcggaaatctgkgggttgttgggttgggaaatggaaaaatcatgatagggaactgactggggagttatcctattggctcagtctctgttgactcttgtgaggctgaggtatgtcccataacagtcacaacttccccagatctccctcttcaggcctctgaagaccttggacttacttggacttacacaggacaaggctaaatttggcacagaaaatggccttgtgggagagagggccagtgcagctgacctgctgctgaagaaccaggtaaatcaagagaatgatgagcacagccaggcaggattacaaattacgaagtgtggcaataaaataataatcaccaacacctcctgagtgatgagtaagtgctaggcagtgatctaaacatacacacagaatacttatttgaaccctcattatcagctctctgagagagatgctatt

SEQ ID NO: 407597 - DNA, 559 bp, Homo sapiens
gtattgatttagtgcactcactcaacagtgaaatagccctgttgacatggttgtctgttttctttgtggtacttggaagcatgacctgaggagaacttaccagccttagggatttcctgcacacacagatgagacccgttctcttctgtagtgaaaaccaggaggagtttcrtatctgcttcctacatagttgtcattaggttcttattagttaagataaacagcaaagagttaacaaggacaggaattaggaagtaactggcaaagttaagtaccaagaaaagtacctagaccaaaagtactcgcttttcaaatcacaatattagaagaagaaggcctagaagtcacaccatttctggagtctacaatggctcagcatgtattttcttggccatagtatgttacattcaacccaactgagccacatggtgtagcagctgttagggttcttcatgtgctgtgtgttacatctacaccatacagggatagctgagtctcctccctcctcagatcctacctgcccagtgcaatgagctccagctgctctcttcttctcagg

SEQ ID NO: 407598 - DNA, 545 bp, Homo sapiens
taattgttgcatacctgtggcttcagacaaattttaacacctgctgtatccagatagggaaaccaaggtcaatgggctaattaagcagcttgaattaagactgcatgaatctatatttgctggaaaaacataaaaatttaaacatgtcagttaaaaatgacatccgaggtttaggaagaattcctatttaaatcatactttctgtttccagagttacctccgtgatgctcatgcataaatctctcactgtcaaatgcctgggagccttggtgatgactgacaggaaatgagagcaatctgagagccatctgtcttcccctaacctcacctcccaccaaagttcttttgggaagttagagttgagaatgtatagagcatgcttctttctatcagatcaggagagagcccaagatctcacaagtgaaatttactttcakatcatgatgaagttattggcttcctgttgacataaattacacaggtaccacaatagaagacacatcattttctctttgctgaatggcttttctaatagcagctggatt

SEQ ID NO: 407599 - DNA, 579 bp, Homo sapiens
atgagcaattatgaatataattgaaacaagtcaaaaaattagactcagcaaagaagtgaaaaaacctcagaaatagaagatataactcaactatatgttgtctacaagaaactcacttcaaatataatgatacagggaagttgaaagtaaaagaatggaaaaaggtatatcatgcaaacattattcaaaggaaagttggattatattagtataggacaaagtagactgtagaacaaagaaaattaccagaaatagagaaggacatcatacaatgataaaatgatcaatccatcaagaagatacagcaaccccaaatgcatataatctatttatataaaytgtatacatatctctgtttctacctttatccatctatctctatcaaatatatataattatagttgtggacttcaaatctctctctcaacaattgataggacaaacatacagaaaatcaccaagaatagagaataactcaacatcattatcaaccaacagaatcaaatgggtatttatagagtactccacccaacaataccagaataaacattcttttcaagtgcccatacaacatatacc

SEQ ID NO: 407600 - DNA, 529 bp, Homo sapiens
gatagttcatgttctgaaaaccacatgatctcattacagtaaataccaggccagctgtcacagctaaagtgactctgggcaaaggactcaacttcttttgatgcttcagcttccttgctccaacccctacctcacctgaccccctatgtgcagcagcaaatatgcttattagtttaatgctatctcactcccaagaaaaaataatgcacagtcactgcctcaaggacctaagccaaggaacctgttaaaagaaactttagacaaattaaatttaatgggagtttaaytgaggaagagaaaaaaagtgattcgcatatcaggcagccaccagaatcacagcagattcagagagactccagggatgcctgatggtcagaataaatttatggaacaaagaagggaaatgactacagaactcggaagtgaggtacagaaacagctggattggttacaggttggtgtttgccttatagtaacagtttgagcactcagcagtgtatgagtggtggaagtatggctgctgtatgag

SEQ ID NO: 407601 - DNA, 633 bp, Homo sapiens
cctacagaattatcagaattatgagggtggagcttaaaacctatattttaaagtatctgattacttcttagcttgagaataggtgtttctggccgactgtaaaggttaagcagacactctctctaaaaatgggtgagaaataaaggtgattataagattctggggaagacttgtaatgatttcctttcagatttgccaggrttcatcatttcaaataatagctgaagaaagcagggactctgtatctctgtgagttaataatagcataagcatttcctaatttatgtgcatctataggtaccaatctcatgattgtgccaccatttatgcctctctttctgactagtccgtgtctctgggacaatgactaaacctttgtctttagatccttagttccttgcaaagtacctatttgttatttaacaaatcaatgaatatattaacttactcatttactctagaattatgtattgagctcctaccaaagaatcaggcactgttctaggtactgcagatatagtggtgaataacacaactaaccgagcaagcaaaatcctcatctccagggctgtttcttcagaataaaatgcaatcaaagtattgtcattctgtctctcccaggatttggaagat

SEQ ID NO: 407602 - DNA, 633 bp, Homo sapiens
cctacagaattatcagaattatgagggtggagcttaaaacctatattttaaagtatctgattacttcttagcttgagaataggtgtttctggccgactgtaaaggttaagcagacactctctctaaaaatgggtgagaaataaaggtgattataagattctggggaagacttgtaatgatttcctttcagatttgccagggttcatcatttcaaataatagctgaagaaagcagggactctgtatctctgtgagttaataatagcataagcatttcctaatttatgtgcatctataggkaccaatctcatgattgtgccaccatttatgcctctctttctgactagtccgtgtctctgggacaatgactaaacctttgtctttagatccttagttccttgcaaagtacctatttgttatttaacaaatcaatgaatatattaacttactcatttactctagaattatgtattgagctcctaccaaagaatcaggcactgttctaggtactgcagatatagtggtgaataacacaactaaccgagcaagcaaaatcctcatctccagggctgtttcttcagaataaaatgcaatcaaagtattgtcattctgtctctcccaggatttggaagat

SEQ ID NO: 407603 - DNA, 411 bp, Homo sapiens
cctgccctgcattgtaaagggagttatataagccttacaacaaacataaggaagggattattctaatcacggagacatggatagagtaactaatttgcccataataggtgtcagaactgggacctaaatccagatctgttcaactccaagactggcccgtgtgaaattaaatatgcagtgatatgtcaggatatatcaaaaacatgtcatacatgggccacatctttatatagggtcaattgtgtttagtatttagtagtaattttaatgtcattttatattaaayaaaatatagatgtgctatagagtgaaacatagaatttgaatgattttaaattcaatttagatgtgagattcaaaagaaacttcatttttgaggcaagccatttcaagttatgttcccagagtctt

SEQ ID NO: 407604 - DNA, 583 bp, Homo sapiens
caacagggtggggtataaagaaaagaggttctggtgtcagacctggaagggaagcctggctctaagttgcgatttatggcaataacctctgtgaaaaagcgcatgcatatttcactgytattcctaatccagactgcttcctttgtattctgggcctagaaaaagactgttagggctgtggtacctctttcagaattctataggaaacaaaaatgtaaaggaacaccactgcttagacagaatacaaatcaagcctgtgtgaagatggacacaatttctgtgctattcaactcaactaacaggtggcagatctgggttcctggcctcatggaacacaggctgtttctattaccggtcttgatccagtatattgcaactaaaagctgaaatagtcacctctttcctcctgtgactgaacctactataaaatcacctgttatcattgactgagctgctttttctctcaacaccttacacctctctttaagccgcattgtttttccaggtgtatgctattaatattcccctaagtacagagatggaaactgagattagagaagttaaatcctcagctcacaggtaa

SEQ ID NO: 407605 - DNA, 583 bp, Homo sapiens
caacagggtggggtataaagaaaagaggttctggtgtcagacctggaagggaagcctggctctaagttgcgatttatggcaataacctctgtgaaaaagcgcatgcatatttcactgctattcctaatccagactgcttcctttgtattctgggcctagaaaaagactgttagggctgtggtacctctttcagaattctataggaaacaaaaatgtaaaggaacaccactgcttagacagaatacaaatcaagcctgtgtgaagatggrcacaatttctgtgctattcaactcaactaacaggtggcagatctgggttcctggcctcatggaacacaggctgtttctattaccggtcttgatccagtatattgcaactaaaagctgaaatagtcacctctttcctcctgtgactgaacctactataaaatcacctgttatcattgactgagctgctttttctctcaacaccttacacctctctttaagccgcattgtttttccaggtgtatgctattaatattcccctaagtacagagatggaaactgagattagagaagttaaatcctcagctcacaggtaa

SEQ ID NO: 407606 - DNA, 608 bp, Homo sapiens
gatagaggaagattggtcaacagtacaaagttatagttagatagaaggaataaattctgttgttcttttgcagagcagggtgactatgtttaataatattgtattgtatattccaaaatagctagaagaraggattttgaatattatcactacaaagaagtgataaacctatgaggtgacagatatgcaaatatacgaatttgatttatacataatgtatacatgtatcaaaatatcacactgtaccccataaatatgtacaattattatttgtcaattaaaaacaaaattttaaaaatcctggtagccagattaaaccagtaaaaaaaagaaaaagaaaaagatactaaaatactgaaaaagattaggctggcagcaaatactaaagaacaaagaggaggttattacaaaaaaaaaaggaagtgagggtctgagactgttggcagtgggagaaaagggaagggttgacgcttatgacaattgtgtgttcttgcttctgattctttaagcaagttcatatgtgaatgtgaatttccgtgaactgatgacctaactgaacacaaaaagaaacagcgagactgccatattgtcacagagcaatggttatt

SEQ ID NO: 407607 - DNA, 530 bp, Homo sapiens
agaatgaagtctttatttttcctgtgttttggtcaagtatttttccagtgagcatgttattgttcttatgtacctaaagcactggatacagccacctgctatatatatggtgataacaaattgactacaaagcaaatattaggaagtatccatgtttaataatatcaaaattacttcatcagtaatagaaatacaatagaagtctatccaattatctaycagtcattctttatctctttctctgtatctctgataagatgttgtgaatgagaaatttaattaaaatgcatgtgtttcatctatggaacaccgaaagcaacagagttaaaacttcagtatcactggccctgactgagccggctggagaggcaggcttctgggttttacttgcttctttcatcataagatgtcttccattttcccacatcagttctgaattgaaaattcctaacacgtgtccaagtctgcaacagagacacacacacagtttgcttcctactctggaattcttccctgtgcctttggctgga

SEQ ID NO: 407608 - DNA, 530 bp, Homo sapiens
agaatgaagtctttatttttcctgtgttttggtcaagtatttttccagtgagcatgttattgttcttatgtacctaaagcactggatacagccacctgctatatatatggtgataacaaattgactacaaagcaaatattaggaagtatccatgtttaataatatcaaaattacttcatcagtaatagaaatacaatagaagtctatccaattatctaccagtcattctttatctctttctctgtatctctgataagatgttgtgaatgagaaatttaattaaaatgcatgtgtttcatctatggaacaccgaaagcaacagagttaaaacttcagtatcactggccctgactgagcyggctggagaggcaggcttctgggttttacttgcttctttcatcataagatgtcttccattttcccacatcagttctgaattgaaaattcctaacacgtgtccaagtctgcaacagagacacacacacagtttgcttcctactctggaattcttccctgtgcctttggctgga

SEQ ID NO: 407609 - DNA, 636 bp, Homo sapiens
attgtgactatacttaataatactgtattattacttgaaatgtgctgacggagtagatcttaagtgttctcattacacatgcaaaacaaggtaactatatgagatgatggatgtgttacttaactgtggcaataatttcacagggtatatgtatatcaaaacatcatattgtcaccttgattacatataattttgtttgtcaattatacctcaataragctgaaaaaaagagagacagagactagataatgaatggtctctagtttgtacccttgggaataacccaggaaaattactcctacttataaacacactttgggaataaaatttagaagataataaaacaggcatgtctgatgccctaaagagagatggaataatttagctgttttcttttttagcatcttcaaactggaaagacctgataactagactagttacaagattcaaaaaggtgaactgatttgctccaaatcacacaactacttggttggcggaagagctggaaataggacataagttctagaggccaataatctagttagggcttgttatactgggcctccattattttcctcttcacattcttccaattctttttttgacattctcttccaggtcacaacttggagtcta

SEQ ID NO: 407610 - DNA, 647 bp, Homo sapiens
gctaagcctctggccaaaaaaggtgaaaaaacagaagtcaggtagctgtataggttttccagatatgaaagggatatagaacaagaaacagaactcaagaaaattttaagaactattaggacaataagaaagggagagaaagctattttgtaactgcaaagaaaaagcaagagaaygaatctgacttcctgatttggaggtgaggaagacgctgcagggaaccaatgattagctgaatgtaagatgcaatgccagtctgatacattagtctttacagaaaatttaaaagttgggagggaagtaatactctggttatggttttattctaaacagagatacattgtggctggaaaatttgtataaagatgataaggcaaattgatacaaaggaagtagcatgacttgctccaccataatgggtagcacaagtggccttgggcacagcatgagtgtgagtggaactaaccagggcaacgagtgggggcatgtcaaacaagcaaccatatcagaactcaggtacaagatcaaggggagagttgagaatgattccaattattgtcatatcaggaaagtgtgtagaataagaaatagggactcagagaaaaaaggtgaataaagcaggagatgagcaccaaatcaccaaaaat

SEQ ID NO: 407611 - DNA, 538 bp, Homo sapiens
taaattaatgtttctctttatttttttccactgcaacaataggggggttgattcttacttgatagatatagcatgcatcccaattacagtgtctgacactacaaaacaaatgagtatctcatactcaaggactctgttattcttaaaggcagagaaaagagaaacagagagtccaacttacctccaggaccctttgctgatgctatccttcgggttatagactctgagggcaggaacaggtgtgcctcatttctgtctgtatgtgcataaagcaagggccgttcctaggatacgtcttaagtgaaatatgcccactcagcaacagaggtagcactagaatacatatttattttatgtttttgaaacttctattggttgttatctgatatagacagcagactttgaaaactgrgcaaaagtagagaacctgtcactacaattacataacagatgagttgctgatatagacactgttaattgtctatgcagtagccattattccttcttcactcctttccttctaacctgatttgttcag

SEQ ID NO: 407612 - DNA, 591 bp, Homo sapiens
cattggctttcctggttctccagcttgcagacagcagatggtgggacttcctggctgcataatcaagtgagccaatgtctgtaatgaatcttcatatatatttattatatatgtttttttctattaactctatttctctgaaaaatccttactaacactgttattattattacaggcttctgatattcatgcatggtttgttgtcttagagtactcaagggcaaagcccaggtcaaarctagagaacagtgctaatatcagataatagatgcaaaggaaatttgtaaatagaccacaaagtacctgagttccctagcttcttgctttgtgttctatttacagacttctgccttctgcagtcctgggtaaagacctttgctgtccaactcagccagacattccttgacataggctttatttttctcctttccacccttgactcataccctagctgtggatgctccagcctggcaaatgggtcctaggcaaattgagcagaaagagcccctcaatactggcagagtaggccacttttttcacatcattctaatgaggttgtaacacttccttctccccaggtatgttatttat

SEQ ID NO: 407613 - DNA, 591 bp, Homo sapiens
cattggctttcctggttctccagcttgcagacagcagatggtgggacttcctggctgcataatcaagtgagccaatgtctgtaatgaatcttcatatatatttattatatatgtttttttctattaactctatttctctgaaaaatccttactaacactgttattattattacaggcttctgatattcatgcatggtttgttgtcttagagtactcaagggcaaagcccaggtcaaagctagagaacagtgctaatatcagataatagatgcaaaggaaatttgtaaatagaccacaaagtacctgagttccctagcttcttgctttgtgttctatttacagacttctgccttctgcagtcctgggtaaagacctttgctgtccaactcagccagacattccttgacataggctttatttttctcctttccacccytgactcataccctagctgtggatgctccagcctggcaaatgggtcctaggcaaattgagcagaaagagcccctcaatactggcagagtaggccacttttttcacatcattctaatgaggttgtaacacttccttctccccaggtatgttatttat

SEQ ID NO: 407614 - DNA, 574 bp, Homo sapiens
ttttacctaactcctgctcccagggattgcactctctgaaaaaatatagcacataagcttcagcttcaagctctaggttctgggggtactcargtgtagcagacactgtggatgctctgccaattttcctcttagcatttaccacaatacttcacgctggcgggattccaactgccagtttctgcatctcttttcccaagggtttttctggcagccagagcctattctgcactcattcatggcaagctgaatgtgccagagaattaatggcctgtgggagcatacctccaacaatgactgacagaaattgttgtttaaatacccagattccttacaccctttgtggggataactctgagctgtgataccttctagatgggccctggagttcctcagtggaattaagtctggtttcccacagtataatttgcataataatgcaagcttgatgggttgcttaccatttacattctctaccaataatatcctggggtcacctcccaaaataaagttgcacttgaattattagacttggggtttggatctatgggaaccaaaccaagacatcagccta

SEQ ID NO: 407615 - DNA, 519 bp, Homo sapiens
ccaggccacagcaggctttcaaaagcacctccaggattcttaataggtcatgagagagagaaytgccacccagaaaagatagaatcaactagcctgcttcttttctggtggcacacagagttcatcagcaaccccggactgtgtagttaatgcctcacccagggaacaagggagaattaagatgtctggaatgagaagcagctgagaatgggaagctttgtccctggagccaattgtagcttagactcaacctgctaatgtgtatttctctctccatgactcattttgggtaaatgctaacaaggactagtcactctcctcctctcagcagcctcaggagggactgggatcatgactgcagcctcaagctatgcaagcagctcaaagctaccctctctctgtgtggattaaatgtaggcaaagtttctcccttcaggatgaatctttggtttcttctctttaaccttctaggtctgcaacccccttgccctcctggtctggtaactctactcctgagac

SEQ ID NO: 407616 - DNA, 571 bp, Homo sapiens
aagctttgcaagatgttctctgttattgatttcatctacagactctccttggttgcaagtgtttgagagcaagttgaacttgcttaggagaaarggcaaatttattgctcatgtcattaaaccatgggaaggccagaaatgatttgaaaccagaaactcagatgcccccaagatggctgctgcctcttgtctctgcttctcttcgtgtgatgggcttctttgagagtgccagaagtaataactgcactacacttacttctctctgcttctgccaacagaggagaaaaattgccttacctttctgcttggttctagtgtttaaaatctcaagaaacgattctgtgagtctgccagggttgtatgccaatttctagatcaatcattactgccaaggaggcaaggtagaaaactggcaactcctatttaaactacatgatccaaagcagcattcccagaagcaggggaagggtgaaaaggcaatgcaaataaatgcttaccctaatctttctgtttcttcccctagtcctagcttcattttctaactatttccaatgtcagatgtcagtttaaa

SEQ ID NO: 407617 - DNA, 582 bp, Homo sapiens
gcctggtgcccacattgtaaaatccttgatgagtctcagcctgcaatttattattctttgaggatatagaaaacagaagaagacaagttgtaaatatttggtcctttaagaaaccttacagtttaaagaccaagccccttttattgcgagaaaggaaccgagtctcttgtagagaggggaagtgacttgcccaaggttgtctactagttaacagtggagctcagatgaaaatcaggtctgattgtcatttcagcccctgcctgacttcaaatcagccacagctaccagggagaaagcagctgattgagcaatcaaatatgtgttttacatttacattgcttttctctgcactctgtttgttctcatgggagttagaatctayagcgagatgttaactgccagcagcgatgaacagatttggttattgccctgatgcaacgagcagtgagagtgggggagaatagaagaatttcattttaggggtcaaattaaatttgtgcaagcccagcatgcttctgaaaactctagcaacatagcctaggttataacatgcacaaacattgaaatcacttgtggaccttc

SEQ ID NO: 407618 - DNA, 569 bp, Homo sapiens
tgacttgtgtatttatttgctatttgctatttattttctatttaatgtcatcccaagtaaagaaaaaatataattttgaatggttagcataaattttaccattcacctctatattgtgaaatgacagtttaattaagagcattgatctcacatgtagaatcagtgaaattayagaattcttgtttcatagcttgtacatgcaatattttgttcttcccagtgaaaaatatacacaaaactaacttaacatttctaaatttcatttcttgataaatatttcaccaatactttttttgaacttttttttttgttatactttaagttctgggatacatgtgcagaacgtgcaggtttgttacataagtatacacgtgctatggtagtttgctgcacccatcagcccgtcatttacattagatatttctcctaatgctatctctctcctagccactgcccccaacaggctctggtgtgtgatgttcccctccctgtgtccatgtgttcttattgttcaaatcccacttatgagtgagaacatgcggtgtttggttttctgttcctgtgttagt

SEQ ID NO: 407619 - DNA, 578 bp, Homo sapiens
agattttcaagacaataactgcagagcatataaccagggtccttctgagtgtggggccctttttgactgcacaggtggcatacctctgacaccagccctggtgctaactcagatcatttatcactgtatcataaatgtcagatgtcaccgttgagttgtttggaagttgcattaaagttgcattagtcaagattctccagttaaacaacaaataggacacacacacacacacacacacacacacacacacacacasagagagagagagagagagagagagacagacagacagacagacagacagagagcaggggttggggggcggtggtagatttttttccccaaggaatgggcttatgtgattatgggtgccggggcttgcaagtccaaaatctacagggcaggccaacaggctggagacccagggaagttttgatttttcagtcttgaagctgaaggcaatctagaggtagaattctttcttccttgggaaacctcagtctttttttgtaaagccttcaactggttggatgaacccctcatattatggaggataatctgctttattcaaattctac

SEQ ID NO: 407620 - DNA, 578 bp, Homo sapiens
agattttcaagacaataactgcagagcatataaccagggtccttctgagtgtggggccctttttgactgcacaggtggcatacctctgacaccagccctggtgctaactcagatcatttatcactgtatcataaatgtcagatgtcaccgttgagttgtttggaagttgcattaaagttgcattagtcaagattctccagttaaacaacaaataggacacacacacacacacacacacacacacacacacacacagagagagagagagagagagagagagasagacagacagacagacagacagagagcaggggttggggggcggtggtagatttttttccccaaggaatgggcttatgtgattatgggtgccggggcttgcaagtccaaaatctacagggcaggccaacaggctggagacccagggaagttttgatttttcagtcttgaagctgaaggcaatctagaggtagaattctttcttccttgggaaacctcagtctttttttgtaaagccttcaactggttggatgaacccctcatattatggaggataatctgctttattcaaattctac

SEQ ID NO: 407621 - DNA, 576 bp, Homo sapiens
gaataatctgactttccttgacgaagaggtcatagatttccctcttcagatggtttcttctttttgattaactagccaaatctattgaggaaagaggattcaactctttggaggaagaaaaatggaaatgcttaggtaaaggacatctttttttaaagctgcgttgttaggtgacttccatttgrtcttatagaacccataaagtatagatctgtgggttggaatgatagccatagaactaaactctattttttgaaagcaaataagatgtacctaatatgtcttctgcttcttggatgtcctaataacaaagaaattaaaaccaaaagtcaatatcccatgattctgtgctctgaaagttatctgtgatgtaacgggaaacagactcagatacaaatgcattttagtccacctctgtatttactagttctatgactctaaactttaattactcaactgtaaaagaggaataaaaataaatgccttgcttggctattgcttaggtcacataaaatgaaagagaaagttctctctaaacagtacagcgatttttactaaagtactttattagtcata

SEQ ID NO: 407622 - DNA, 514 bp, Homo sapiens
atggcattactgtgtggcttaaaattaaatgagtgacagtgaagttacaaaccctgtaaggcagagtttatatgtagctcatgatggtatcccacaagagtgcctgacactgggcaatctctgcataaatacataaatagatgagtaagtgtgcaagtacataatacaaagcttagcctgtaaggtaccaggacttggtgtttcaggaagtacctctatgtctctctaccctttgggtgatcttccactcaaagatcctttgaatatgtagaacctttggggtcttgctcttacactggctatctttactgggaatcactcattggagtgggtgtccagcagccttgcttataccccatgaactggtcattttggccacatttttwtggaacagagatggacatttgacccaataagttttcattcgatttttacaactcggagtttgaaattgaggctaagagagtctacctctttgcaggtcagttgctagaacagtaacacataaactgag

SEQ ID NO: 407623 - DNA, 613 bp, Homo sapiens
agtattccaatttttcctggtgatgaagtcatttccacttttaagtctaactaagtcaaataaccaattctgtataacatatttaaggctgtatttcctggaatctacactgatactaaaaaccttattaacgagagcttggtcaatatgatgattaattaaggtatttggggattatattaacacttaaattagtgaattctgagaggcagattgccctctataatgtgagtgggcctcatctatattatgttaaagttctgactagaaccaaaagactatcctgcccaaactagaggcctaccagcaaactgccttcagactttacctgcaccatcagctctcctaggtctccaggccaccggcctgtagaaaggaactacaccaccaacttttakgcgtctccagcctatcagattttggactcaccagcctccgtaattgcatgagctttttataataaaacctttttttattgcatacacacacacacacaaacacatatcctatgtgttttgtttttgtggagaaccctgaataacacagtcaaaaaatcagaagctactctagatatttcaagcaggaagagatttaatataaagagttagaaatt

SEQ ID NO: 407624 - DNA, 611 bp, Homo sapiens
ctttgctttgataaagaaaaacttctagagcctctggaaggaaatacttattttcctaacaccaaaagtattcctgaactataggaaggacagctcagaaaggcttcacactggaagtgagaccagtgatgccacaagccaacatcatgttctgattaatactgaacaccgcagaagtatgctgatgtatgtctacattccacagtttctttaaaacttgcttcaaaccataattttcatgtagtaaagaagtaggcaatccatacttgtccacatctagacagctttaatacagcattacattttggtttmtagaacaatgtcaaatacaaatgaactataaacattaatcattctcagctatttgggctgggaactcttggtcccaggttagtgttccaaggcctttccatgatacggtggcagctgctgaaaggccaggtacaatatatacgtccatataaaaatgactaccttttagaacagtattctcagtctatctgtggtgatgggccagtctttttaattgtttgctctgtttggttgtttaatgttcagcccactgcaggctagaatgtagtgccactgcacatgagcagtatgtagcttgc

SEQ ID NO: 407625 - DNA, 611 bp, Homo sapiens
ctttgctttgataaagaaaaacttctagagcctctggaaggaaatacttattttcctaacaccaaaagtattcctgaactataggaaggacagctcagaaaggcttcacactggaagtgagaccagtgatgccacaagccaacatcatgttctgattaatactgaacaccgcagaagtatgctgatgtatgtctacattccacagtttctttaaaacttgcttcaaaccataattttcatgtagtaaagaagtaggcaatccatacttgtccacatctagacagctttaatacagcattacattttggtttctagaacaatgtcaaatacaaatgaactataaacattaatcattctcagctatttgggctgggaactcttggtcccaggttagtgttccaaggcctttccatgatacggtggcagctgctgaaaggccaggtacaatatatacgtccatataaaaatgactaccttttagaacagtattctcagtctatctgtggtgatgggccagtctttttaattgtttgctctgtttgrttgtttaatgttcagcccactgcaggctagaatgtagtgccactgcacatgagcagtatgtagcttgc

SEQ ID NO: 407626 - DNA, 577 bp, Homo sapiens
gataccctaatcatcacttaatcaacttgttgataaaacagcatcaagttcattgcctactgaaataagaaagaatactcccttgacagagtcttattttctaggagggatatttatgaggtttgakgatctggtttaaggcaggtatccaaggaaggaaactaactcagattgggccaagttcctgataaagcagtttaggattaatggccatagcaaggaaagggttccaagtgaatctggaagagtaaacagtggcatggtaagtctgaagcgacctcttgtcccaaaagtgagttatttattctaacaagggatagttggatcatctttcattcagataaatgggttccaggaagtcttatagccaaataataattcgcaacatcgtattcctgggcaagaatttcttgaaataagtcatattaatgcagacagtgatctgcatggctccagatggtttgggttcccaccaggtggttgctacccatgctcaacattcatacaagctcagccacgcttactgactggctgtaagaatttgatgaaataatctatgtcaacatgtttcataagc

SEQ ID NO: 407627 - DNA, 577 bp, Homo sapiens
gataccctaatcatcacttaatcaacttgttgataaaacagcatcaagttcattgcctactgaaataagaaagaatactcccttgacagagtcttattttctaggagggatatttatgaggtttgatgatctggtttaaggcaggtatccaaggaaggaaactaactcagattgggccaagttcctgataaagcagtttaggattaatggccatagcaaggaaagggttccaagtgaatctggaagagtaaacagtggcatggtaagtctgaagygacctcttgtcccaaaagtgagttatttattctaacaagggatagttggatcatctttcattcagataaatgggttccaggaagtcttatagccaaataataattcgcaacatcgtattcctgggcaagaatttcttgaaataagtcatattaatgcagacagtgatctgcatggctccagatggtttgggttcccaccaggtggttgctacccatgctcaacattcatacaagctcagccacgcttactgactggctgtaagaatttgatgaaataatctatgtcaacatgtttcataagc

SEQ ID NO: 407628 - DNA, 532 bp, Homo sapiens
ttcatcctgaaaaaaactttcgtagacatttctgagaaagcagatctacccatgatgattctgttagcttgccttcatctaagaaaagcatcttcattttatcttcattcctgatggatattttcactggacatagaatttgaggttgacaattcatttctttcagtatttaaagttttcgtttcattctcttctgtccttcaaggtttttgatgagcaatctataatcattctaattattgcctccctgtatgtaacatgtaatttttctctagctgcttccaagacttgctkctttattttttcttacatcactttgactatgctgtatctgggtgcagctctctgagtttgtcttgtttaggtttcactgagcttcctgaatgtaaatgtatgggcttttcccctccagatttggaaagttttgctgttatttcttaaaatgtgttttctctcacaatctctttttcttctaattctagaacttccataaaatttatgttagagcttttaatattgctccacaggtctc

SEQ ID NO: 407629 - DNA, 572 bp, Homo sapiens
ttgatgagcaatctataatcattctaattattgcctccctgtatgtaacatgtaatttttctctagctgcttccaagacttgcttctttattttttcttacatcactttgactatgctgtatctgggtgcagctctctgagtttgtcttgtttaggtttcactgagcttcctgaatgtaaatgtatgggcttttcccctccagatttggaaagttttgctgttatttcttaaaatgtgttttctctcacaatctctttttcttctaattctagaacttccataaaatttatgttagagcttttaatattgctccacaggtctcaaaggctctgttcatttttttcaatcttttatttttttkttcctcagattggacaatttctattgatctatcttcaaattcacttatttatttgtcttacccaccatgctattatgcttatccagtatatttttctagtttacatattgcatttttagttctaaaattttcattttattcttacaatttttatttctcttcagagagctcacatttttttcatttacttcaagcatgtttctattagtc

SEQ ID NO: 407630 - DNA, 522 bp, Homo sapiens
acaggcattgggtaaatgctctcattccaaatgggagaaattggccaaaacaaaggggctataggccccatgcaagaccaaaaccgagagagcagttttaaatcttaaagctccaatataatgtcctttgactccatgtctcacatccagggcacactaatggacgtggtgggctcccatggccttgggaagctctgcccccatggctctgcmgggtacagccctcttggttgctttcatgggctggcattgagtggctgtggcttcaatgctggatctaccattctgaggtctataggatagtagccctcttacagccccactatgcagtgcttcagtggggactctgtgtgggggctccaacttcacatttcctctctgcactgccctagtaagaggttctctatgagggctctgcccctgcagcagaattctgcctggacatccaggcattttcatacatactctgaaatctaggcagtggctcccaagcctcaactcttgtcttttgtgcacctacag

SEQ ID NO: 407631 - DNA, 625 bp, Homo sapiens
gatcacatttttctggtactttgtatgtcaagtatcagattgttatgtcatgtagactttgggttctattaataatcctttgtgttgatgagtatgtaaaactgggtctctcatatatctccagaatattaaaaggtttagccactttacaaaacagtttttcagtatcttgtaaagttaaacrtataactgctatgtaactcagccattttattcctacatatttgcccaagatacataaaaacacatgtccatacaaggactgctacatgactgttcacagcagctttcttcatgaactcccaaaactggaaaaaaaccatatattcatcaattggccactgaataaacaaattttgatatatccataaaatggaatataaaagaaatgaactatacctacacacaaaatagatgagtctcaaaatcatatgccctttgaaataagtcaggcaaaaaagagtgcatactatatgattccactcatataaaattttatatttaaactaatgtatattagcaaaaagcagaacagtgtttgcctaaagacaggagtgaagagaggagagaatattaagaaacacaaagaaacttttgcaggtgttagaaatatttgttatcttga

SEQ ID NO: 407632 - DNA, 625 bp, Homo sapiens
gatcacatttttctggtactttgtatgtcaagtatcagattgttatgtcatgtagactttgggttctattaataatcctttgtgttgatgagtatgtaaaactgggtctctcatatatctccagaatattaaaaggtttagccactttacaaaacagtttttcagtatcttgtaaagttaaacgtataactgctatgtaactcagccattttattcctacatatttgcccaagatacataaaaacacatgtccatacaaggactgctacatgactgttcacagcagctttcttcatgaactcccaaaactggaaaaaaaccatatattcatcaattggccactgaataaacaaattktgatatatccataaaatggaatataaaagaaatgaactatacctacacacaaaatagatgagtctcaaaatcatatgccctttgaaataagtcaggcaaaaaagagtgcatactatatgattccactcatataaaattttatatttaaactaatgtatattagcaaaaagcagaacagtgtttgcctaaagacaggagtgaagagaggagagaatattaagaaacacaaagaaacttttgcaggtgttagaaatatttgttatcttga

SEQ ID NO: 407633 - DNA, 620 bp, Homo sapiens
taccagcggtcctcaaagcctaccctcaaaccctggtctccccacagctctgcctcccactagtaaggactcttctttggccctaacagcccaaaaggaaccagaaaaaaagatagtcaaggaaccgaaaggcgccaatggcccttgattgtgccccctccaagctacgggaggaagaggagactttggcccagcatgagtacatgtctccttttccctctcagacttaaaacagatcaaactggacctaggaaaattctcataatcctcatggatacatagacgtcttacagggattaggacagtcttttgatttagcatggagtaatattatgttgttgttaggtcaaacatcaactcccaatgaaaaagaggccaccttagctgcggccygggagtttgggaatctctggtacctaaggcaggtaaatgataaaatgatatcagaagaaagggaacaactccccacaggctaacaggtggttctcagtgtggatccccattaggacctcaattctgagcatggagactggagtcacaggcacttactgacttgtatactagaggaattaagaaaggacagaaaaaaagccaatgaattactcaatgatgtccaccag

SEQ ID NO: 407634 - DNA, 602 bp, Homo sapiens
cgtttaagccccctgaatatctagaaatacttgataatccagacaatacaaagaagagatagggcagagaaagccaggaagaggacgggacaaaatccgcttttcgtaaaataatataggcgacattgtcagcatcttcaacttcaacaagaaaagaatacaggaatttggaaacctagggctattcccttcctgttctttactcattccaagatgctatgagaaattggggcaattataaagattgtttagacccctaatgattgtttagggcatactctcatgaaaaaaaagaaatctgtgcatggggagaaagaggagagtgtgcacagaggttctagaaaggagaacaggtcaaagtttaaggagattaaccatgggacataaatatagcactgtcttttacatagaaaatatttagtgactccccagaaaccccctcaaaaaacatttatttagcatggcctcagtccacccatatcccttcaaagtccagccaaatcccctcatattcttatatgtcgatttttattcatgtaacatgcagacatcttatgattttatastactttataatttacaaagcattttcccactcatta

SEQ ID NO: 407635 - DNA, 629 bp, Homo sapiens
ttttctttcttaagctgaattgggttttctctctcttatcttaactgatgtatcacccaaaacatttggtatgtcccaccccgagatagtcccaatgacaaagaagatgaacttctcatacagaagattaggacacggaaggtcactcagccagaactcttaagtattctatcaccaggttcttagctcttttctctggcatcatggtgccttcctctgtgcctttgctcacggtattttcttagctttcctaatatgatctctctcttcctttcctgcataagtaaattcactcaagctctactcacaaacctaggtttgcctttttcccttctctgamatcccagagcattattatttacatagctaatcctgggaagttattacacagacttttgttgttgttcttgtttataatttcggataccttatgtttctaaacagattctaagtaatctaaggataagaacatgctcttatactacatctatatttgtcagaatgccgtggacaatgtgtacatagcaggcattataaatactcaatttttttattgaattggcaaaaggaagtgtgaagtgagtgggggatgatacagctgccagatggctaaaagataaaataatagg

SEQ ID NO: 407636 - DNA, 587 bp, Homo sapiens
cagccctgactgcacacacatgaatattcctcattacctctcctattactgrcatgaagcatttcatgtaaaatcctcaagacttggacagaagctatcagtcatagaaaggtgatccttcaaacttgcttagaaaatattcctttttctcatacccaccatttctgatgtcaagagaatcaactgtctgctataactctcagaaaaataggtcatggtttcttaatgacaattgctagtacgatagtaaaatgtgtcttgagactttagtgattgagtccaaggttaaaaagaagaaaaaaagacaaaggcagttgagagaattggacatgacaggagagtacagatagaacatggaacaaaaccaagaaaaagaaaaattagaaagggccacatgaccccttctcagcgtccctcaagttttaatgttctagagtcagcatgtttacttgcctttacaggcaggtagaaagtggcaggtataataatatgtccctggaactcatagccctccctgtaggaaaagatgtcaagtgaccaagttacagtaaggcaagctgacccatatcatttgaatggccattgcc

SEQ ID NO: 407637 - DNA, 523 bp, Homo sapiens
taagcaaaacccgttcagtagcagaatgaccagagtaatccactctactctggagggtttgcatccaagtagctaagagccactgcacagctgaccagcaggtggaagaaacaggagtttagagatttccatgagagaaaagtaagggaatcagtactgggcatttcagaggagctgtcctgcccaaatgtgaaaagtagaaatggcctttctgccttagtggtcagcgagctcagagaagcagctgggctcctctttcctgggctgtctgcttcccagagttctcgccttcygaaagtcccatttgctgttgctgttgtctgagatagagttgaaagcccaacactttggggagaaggttatttctttgcaaggtttatgacaattagttttagtggttgttaagttggctatcacagtgttcagagtttcaaggttaacatgcctttaggtcacactccacatgccacaactgcttatgagactggcaaccagtcctgggtctctgaaattgtgggtggtg

SEQ ID NO: 407638 - DNA, 626 bp, Homo sapiens
aattaaaccactctccccaaccactctctagcaatcactgacctgatttctgttcctagggtttcagctttcaataatgtcatgtacatttcatgtgaccaacaccacagtcaggatataggattccttatgctaccctttcatagtcatagccaccaccctccttcccaagtccctaattcctaccaatcactgtctgttcttcatctctgtaattttgttattttgagaatgctatataagtggaatgcagtatgaggactggcttttgcttttttaaatttttttgctcagaataatttctttgagatccattcaagttgtagcatgtatcaataatccattccattttattgccgygtagtttcccatggtacagaagaggtagcacggtttattttacccattggatgatatgaaggatatttgcgttgtttctagtttttggctatcaggaataaatctgctataaatgtgtgcataggtttgtgtgtgaacataagttttcatttttctgggataaatgtccaggagtgcagtttctgggttgcatgtgggaagtacatgtttagttttgaaagaaaatgacatactattttccggggtggccatataattttacaatt

SEQ ID NO: 407639 - DNA, 603 bp, Homo sapiens
tggtcattacaaagtatgttgttagaagtctttactatttcccagatgactggaaatatggccttacactagagtgaccctattaccagctcactcaggttagtctcagtttatatttgtagcctaggaattattaatagtgtccctcaattaytctcagagtgtcttaatttgggcaataagtttataaggtcaccacagcttgaaatgatgtctagtagtcatcctccaaattattttatgtcaggagttcacaatctaacatcagttttccgtagatcttcacattcacattacagctttgttgactctttcaacatctctattttaatagctctgagacaaaacttcaggaaagttatgttgcttatcttagaaacctaactttcatggtgaaaggatatgatgaaaataggaatctccaccacagaagaatagaaaaatctcttcctaggagatatcttttcctgaagctttttttgattgcccaagacaggaaaataaatcttctgtgattatataagataatgtatacttatcataggatatacatatcatattcaaattaattttgtcctgtgactatgctccttgaagatggga

SEQ ID NO: 407640 - DNA, 541 bp, Homo sapiens
gatctgattgatgagtcagggctggagaaggacaatttaggcacaaaaatagcattcctgaaagtcttgggatgtgggtggtagtgggaggaaactgtacaggtcaaagtaacaaggaaaacaacataggtagaaaagggaaaggagatgggcaagagtggacctagggacaccagtctggtctggaggctgtaacaataatgcaaattagggcaagggaggtggttgtggaggtcgagagaagatgctggttctcagacacaaagtcaaacctcagtatcactatatttgaacacatttagtattcaaccagccaacacattccattcaatgtttctgtataatacctgcatttatgtttttctttccattcatggccttgccmcttaattccagggctgtggcttcatgtctgaattatagctatctctgattagggtttgcttactgaaaactgctagtcctctgcccttcaattccccattttaatgagggcctcatcccaccccaggatctgcatcagcactgaggaaactggctt

SEQ ID NO: 407641 - DNA, 613 bp, Homo sapiens
ttatactggcaacaaattctattagtttttgtttgtctgagaatgtctctgtttccctttcatccctcactggatatcataatcatggttgacaattcttttctttcagcagctgaaaaatttgggaagtgttcagccattaccttttaaaatactctctcatatctttcctcagactccaatgatggatcttttgttattatccctgtttattttttttcagtctgttatatctctgttattgagatcgtgtaaattctgttgagctgacttcaaatttgctgattctttcctctgttttttccattctactgttgaacccaggcagcaaggtattatttcagttactggactttttagtttgatgacattccttttttaaataaaatatgaytattaacttaaattatactgaaatatagtttacataccataaagttaattcgtatacagtatacatttcagtagtttttgatatgtatgcagagttgtagaagcatcaccacagtttaatatttgaacattttcaataccccaaaaagaaaactgtacccactgacagacagtcctcattccatgccacctttagcctcagaaactactaacctacttt

SEQ ID NO: 407642 - DNA, 526 bp, Homo sapiens
tttttgaacctcttcctcctcccactttctaccctcaagaatgaatgccgtggtgtctgttgttcctttctttgtgttcatstatactcaatgtttagctcccacttctaagtgagaacatgtggtatttggttttctgttcctgtgttagtttgcttaggataatggtctccagctccatccacgttgctgcaaagaacatgatctcattccttttatggatgcatagttttccatggtgtttgtctgtcacattttctttatccagtctaccattgatgggtgtttgggttaattccttgtctttgatattgtgaatagtgctgcaatgaacatatgcatgcatatgtctttatggcagaatgatttatacttccttgggtaaatacccaatagtgggattgctgggttgaatggtaattctgttttaggaacttaagcaaatttacaagcaaaaaacaaacaacaacaaacaacaccattaaaaagtgggcaaagaacatgaacagacacttttcaaaagaag

SEQ ID NO: 407643 - DNA, 555 bp, Homo sapiens
tgcctcccagattcacaccattctcctgcctcagccttccaagtagctgggactacaggcgcccgccaccaagcccrgctaattttttgtatttttagtagagatggggtttcactgtgttagccaggatggtctcgatctcctgacctcgtgatctgcccaccttggcctcccaaagtgctaggattacaggcatgagccaccatgcccggcccaaagtttttaacaatgattggaatatggcagttaatagcatcttcaatttattgaatacttactatttctcaaatatttcacaggtatttttaatccttacaacaacccattttgtagatgaggaaatagttttgaagagattcagtaatttgtccagtcaggcagtcgtgtaatagttaatgttggaaatgggctttggatcgagatttataaatctatcttgaatctagaactcctgagcactattcttaaccttcttaccatgcagaaattttaaaagagaagaagtcaatattccaagtagtggaaagagcataaccctttctataggagctatag

SEQ ID NO: 407644 - DNA, 555 bp, Homo sapiens
tgcctcccagattcacaccattctcctgcctcagccttccaagtagctgggactacaggcgcccgccaccaagcccagctaattttttgtatttttagtagagatggggtttcactgtgttagccaggatggtctcgatctcctgacctcgtgatctgcccaccttggcctcccaaagtgctaggattacaggcatgagccaccatgcccggcccaaagtttttaacratgattggaatatggcagttaatagcatcttcaatttattgaatacttactatttctcaaatatttcacaggtatttttaatccttacaacaacccattttgtagatgaggaaatagttttgaagagattcagtaatttgtccagtcaggcagtcgtgtaatagttaatgttggaaatgggctttggatcgagatttataaatctatcttgaatctagaactcctgagcactattcttaaccttcttaccatgcagaaattttaaaagagaagaagtcaatattccaagtagtggaaagagcataaccctttctataggagctatag

SEQ ID NO: 407645 - DNA, 594 bp, Homo sapiens
ctgggctctcttttctgtgactgtagaaagattcctgatccaccctcaattatttagcatgtwtgtacatagagttaatcttacaaccgggctatgggaaaggaatatagtggagagaaggtgtagcaggagagggtatcaatatcttctctcttcccattagataacaaactcttggaagacaactatgtttaagattctacactgcctaatcaccaatgttgttaactggcattaaataactgacctaggacttctgttttaatatattttataacctttcctataagaacaacatacctagccatctaccatattttggccagcctgtcttcatgcctgatattgttggtggtgatatgagtggaggtgtttgatgagtttactgcccagtccacaagtgggttgatggtgcttttctataaaaaataacactgctactcattaacagataattttttgagccaatactcaatttgtatttcaattgcataatgttagaatatttaaattcaaacctagtggcagtcataaatctgaaaaaggggctttttgggaccatatcatggacagagcacatgtcaaaagaaagag

SEQ ID NO: 407646 - DNA, 292 bp, Homo sapiens
agacccctccacctgctgcagttttattgcttttaaaatctattttatattccattatgtgattccactgtcctccctctcattcagctgttktacacgctacattctaatctaggttcagaacatttcatcagatggtctccgattaaaatccaataaaatttaaagcaggggaaagtccagaataaaggagatgccatctaacatgcagggtctgaatttaattctgtttcaagccttctgaacacattttgggtactgcctctgaggcctgtattcaaaatgaaacaaa

SEQ ID NO: 407647 - DNA, 292 bp, Homo sapiens
agacccctccacctgctgcagttttattgcttttaaaatctattttatattccattatgtgattccactgtcctccctctcattcagctgttttacaygctacattctaatctaggttcagaacatttcatcagatggtctccgattaaaatccaataaaatttaaagcaggggaaagtccagaataaaggagatgccatctaacatgcagggtctgaatttaattctgtttcaagccttctgaacacattttgggtactgcctctgaggcctgtattcaaaatgaaacaaa

SEQ ID NO: 407648 - DNA, 641 bp, Homo sapiens
tttgctttcctttataatagcaaaaaatgctgcacccaagcacactgtgacgtgcacgctgacaccttcactcagaatctccattataattcttagcataaagaatttttgctttatgcagcatttctttttctaggaacttaaggaattgtcataattgccagggacaaagcatgagcaatgtggtaggagagacagagtgcaattaattttgtcattgatttggggatggtctctcttccctggtaaagtaggctagcacattcctccatcttgccttaacatacattaaaatgagagtgttgagaggtgggggtgggaaggaggcctaagtgcatgaatacagtcatactatttatgtgtaattattttctgtataggctaccagagtgggcgtgagggaagggagctgagttaaacctcagcatggttgcttttgttgtttgctaaactggaggaggggaagaactacagggaggttctgtattatctgttattcagttttaaatatttcaattatacttctccattcgtacrgaaaattgagagttggctataaaatgcttgtaaaaataaccatacttggagcagtttaattactttaatgaaatggagacaaatatttgtaagtgaagagcatg

SEQ ID NO: 407649 - DNA, 587 bp, Homo sapiens
aacacacttatcttctgattactatcaatttcaaatcgctgaggataattaagagggtgggagaacatcagcatttatagagcacctactgtatgctagacagcatactggacactttgtgtatatcccatagaatcctcaacactttcaattttagtactgtattatgctaattttacagatgaaggaacaggctttcatgggttaagtaccttgctcaaggtcataaagcttgtaagatgtagagccaagggcattgctcatctgttgccatatactgtccttccattaagatagccaataaatagtaaaggtcttggtactgcctcaaatttggcctggcatagacaagagttctttattctttctagtcattctttgcccattaaaaaaattatttaataaaattaccatctctgacttataagactattagaataattttttccatgcggtcaagctttttgagtttttctcctcttaatttctgcacactcgggggggtctcacagccgtttaattctttctcatcastttcctagggcatttgcaatttgtgtaaaacactagttcccttaccaccttca

SEQ ID NO: 407650 - DNA, 582 bp, Homo sapiens
ggagtaacaacaaagagtatcctaaatcctacgtggggtatgggctctgtctcactgttctttaatatcccacaatgccaagtgcttagtaattattcaacaattacctgctgaatggtcttcactttattgatgaaattgaggctcagagagttgaagatcttgatcaaggtacatagtaagtggcaaaaattccacccatggttgcaggtccacttcatttttcactctactacacagacactcagcattcacttagtgagttaatgatttatggaaattttaaatcactggaattaatgaaaaccatatttattatttctcaggcccattgtgatcatactagaatatacacaaatatccttattatagtggctgaaagwtctgatcttgctagccgttcctaaacaaatggctctccaggtgtattagtggtgtattagagccatattcccagtaggaactttgtctcttcctcatagaacacccctatgttaatgcaagttggacaaatcctctccatagcatcccaagcagagtcttaagttgtggtaaatgaatgcttctcctatttacctttga

SEQ ID NO: 407651 - DNA, 582 bp, Homo sapiens
ggagtaacaacaaagagtatcctaaatcctacgtggggtatgggctctgtctcactgttctttaatatcccacaatgccaagtgcttagtaattattcaacaattacctgctgaatggtcttcactttattgatgaaattgaggctcagagagttgaagatcttgatcaaggtacatagtaagtggcaaaaattccacccatggttgcaggtccacttcatttttcactctactacacagacactcagcattcacttagtgagttaatgatttatggaaattttaaatcactggaattaatgaaaaccatatttattatttctcaggcccattgtgatcatactagaatatacacaaatatccttattatagtggctgaaagatctgatcttgctagcsgttcctaaacaaatggctctccaggtgtattagtggtgtattagagccatattcccagtaggaactttgtctcttcctcatagaacacccctatgttaatgcaagttggacaaatcctctccatagcatcccaagcagagtcttaagttgtggtaaatgaatgcttctcctatttacctttga

SEQ ID NO: 407652 - DNA, 629 bp, Homo sapiens
gttggctcctcatcccttagagtggggatcactcaagagcatgggattagggcaggacagcctcctgtccaggtctaagggtagtgcttgactctgaamcctgtcaaatgaaactaggcattcttgtcactgagagtttctagcagaccaaagctctttggaaagcacgagtacttcattggttgactctcaagttttctggccatttttggcttatatcgggttccaagagttttccttcttagtttccatgtactgaccattaagttcagtgtttcttgtgcccagagatgagaagaaaccaaatatggaaaagtcgaccaggctttaaaaaaaattgtctgtactgtggcacatatggagtctgggtggcagtgctctttggtatataaaaatataattaatatgatttaacacacattttgtcatgttcacaggtaaatatctatttgctaaatttccattacaacttgtctcactcctattaattttcacatctttcccctcaaggatattcttatttctgaaacacttctcagctcagtccccactggtgctgtgacttctgagcaccatttggcatgatatatatgtcaacaagcaggccatgaatgccaggttgaggaaag

SEQ ID NO: 407653 - DNA, 629 bp, Homo sapiens
gttggctcctcatcccttagagtggggatcactcaagagcatgggattagggcaggacagcctcctgtccaggtctaagggtagtgcttgactctgaaccctgtcaaatgaaactaggcattcttgtcactgagagtttctagcagaccaaagctctttggaaagcacgagtacttcattggttgactctcaagttttctggccatttttggcttatatcgggttccaagagttttccttcttagtttccatgtactgaccattaagttcagtgtttcttgtgcccagagatgagaagaaaccaaatatggaaaagtcgaccaggctttaaaaaaaattgtctgtactgtggcacatatggagtctgggtggcagtgctctttggtatataaaaatataattaatatgatttaacacacattttgtcatgttcacaggtaaatatctatttgctaaayttccattacaacttgtctcactcctattaattttcacatctttcccctcaaggatattcttatttctgaaacacttctcagctcagtccccactggtgctgtgacttctgagcaccatttggcatgatatatatgtcaacaagcaggccatgaatgccaggttgaggaaag

SEQ ID NO: 407654 - DNA, 591 bp, Homo sapiens
aacatgttttattggtgcatgtatttcaggtttgccccattagacagaatgagtactttatattctacaattgggagagatgttttctttcctgcyctatgtgattaagaaagcccattgccccagttgcatctgccattaggcatacccacaaggtgggcctgtctcagaaagaagggaaaagaaaggccagcagagcagaaaaataaaaagagcttgcgtccttgttaacatcactaggctgctgaatcaacccctagacttcccctaatggaacttttttttttcctaattgcttagcctggttttaattgggatttcagttattttcagcagtctccctgctttccctccgtaaaaaccccgccaaataaataaaatgggcataaatacagaaggcagtccattatgaactctttttccatcttagctttttcgttggaattctctcaactctattctgtgtttaaatccagcactggactaacatgttttctgggaattccagggaagccatggtgctgcagtttgttgctgataggaagaagcagaaactgacacaggacactggaggcctggttccgccagctg

SEQ ID NO: 407655 - DNA, 563 bp, Homo sapiens
ttatgagtgcttcacggtggaattgggaggtaatagctgctgttcttcattttctccacatagtgttttattcacatactggaatgctttgtggacacaattgtcaaaggcagggaaccccagctgccatgcagtggtttatctccgctatatgaaaaatggcagattctgacttatagtttaattccagatttctctgaaaggcaggagagaggaaagggaaaaaatacaggagggtaaagataagaacaggctaagatttgcacctatgttttacaaagttatctgaaaagcataatttcacaaagtatttccctttaaattaaattactgagctgggttttacacctgtctctcttagctgctgagacaagtcccaaatggagatgacatgactgatggctttaagtgtttatycattgtgtctcctgagcaaggattaaaacagctacctcctgtcatgtttgcttgccaagttttagacagatttttaaaaagaatttgatttgagaactgttcttgacttcggttgcagtgatcaaatttaccactagacagagctg

SEQ ID NO: 407656 - DNA, 585 bp, Homo sapiens
atattgtttgttgctgagctatacactctactaygtgtatgatgtttcctcttttacataactttttgttttctcctaaagttaataattgattttttaaaaatttgcttagtttttattacctatgacctatgtgatagacctttcaactgcttattgataatattttccagataatctaacatgggatgatcaagtatttcattttttttttttttgcctagagacctcaatccatcctcctgccccaacaatctgacaggtagttttctgggtgtgctgagcaattgtcatcccagaacttccactgtcacttttcctgtgttggatccactgtttcctagtgccatgtctccctagtccttgatttaccctttaactttgttgaagcacacactctgcttgcatcataggaaaggagacacacaagtgggataaatattgtgaatcattgcatgcctgaaaaattctacattcttgattagctcagtttagtattttagactaaaatttattttcacttcaatttttgaaggctttgctctgttgttttctgacttgctgtgttgctagtgagaattcaga

SEQ ID NO: 407657 - DNA, 220 bp, Homo sapiens
gttccctgtcctcctatttcacattatacgttctggccatcctgaacttttcattccctgaatatatgatgttttcctttgcttctgagacttcacagactacttgctccaagagccttccttggtttttaaatctggattgkttcattatctttttgctcttctagcaccctctacttcccctacactgaaactgtcatcctatattccaactgtttca

SEQ ID NO: 407658 - DNA, 415 bp, Homo sapiens
cagatttgtccttctaatttctcacagcactaaaatagacaacaatttagagaagttttgagacggagagttgaactgagatcataggaactgaggccatctgttagacctagagtaaggaaagaattcgggaaagatttggaaaaataaatagataagttttagagcagcattttaagggatacagtaagtagacttctgcttctaaaaatgtgaactatacacagagcatttgtawcctgaatctccaccaaatgacaataaggcaataaaaaacggcacaagagcaaagttaagagaagaataaggagaagatctgagattttaataaatagttgaaagctagcaagaagaaggataattggaaatccacttagaaatctttagaaagctaaaacatactcttgcaatggta

SEQ ID NO: 407659 - DNA, 501 bp, Homo sapiens
tggatagttttattatatcatctatatcataagacatttctaaacctttatttttataagtataagctaaaatgcaaaatgggctacattttataaaagtaattatttcatttcattaaattgatgggagataattaartgcagagattagcacaattagaataaattaataattgttttaatattcttctggatccaaatcagtatttccatataataacagtggaatgcacaatcaggtattaaatgctaagtcaattaatcatgttaaaggtgctgatttaaatgccaaaagaattaacacgacctttcatttatcaagaactgctggcattttgaaaagatttagaaaacactgttttgaaaatacttcaagactcttaggaatcatttgaacttgtttcttttaaagatagtcttctcctctaatgaaatattgcaaaaagagctaaatgtttttatggcggaacatttaagcatccctccaaattgaaagaatca

SEQ ID NO: 407660 - DNA, 576 bp, Homo sapiens
gaggagctaatctagcagaagcaatatttgaagacataatgactaaaaattatccaaaattgacaaaacacataaggtctttaaaatagagcctgggaatactctaacttcatttactttagtaaacttatatactattatttttatstattttaaattccatatgtatttccagcgccagaaaacattatcttaattataattttattatttattcagttaatatttatttaaatgtacccacattatttctcctctccactactctttatttctttgcatattttcaagtttacatctgaaatcactttttttcaaaaaagactttcttttgtatttcctttgggtgctctgctggtgattaattctagtttttgtgtgtctgaacaaagtccttatttcctccttacttagttccttgtaaagatttaagaatccttacaaatcccaagcaggaaaataaaacagaaagctagacatatgtatataagtataaaactacaagaaaatacatacaacatgaaaatctttaaagcagtaagaaaaggtccaactaccatcaaagaaacaacaatg

SEQ ID NO: 407661 - DNA, 618 bp, Homo sapiens
ataaagggtcatttttaagcaaggaatttcagtacaaaagactaaagagaactagtgtgctaggcctttggagacagtactagagtaatgttgaaaagcaacaggatcccaaaagcaataactaatttcattatgcaatttccaatatatatatttaacattgtgtcactaaaaaagataaaaaatatatgtgatgactataatatgatcaataataatttcatattattgatcaacactatctcctcaaacagaagtcctgatccaccagtttcataatatgaaactctcttaagaaacaataaaatttagcaaaatcctcattcttcatgtgatttcattaaataatatttaattttaagtttattcaaaagaattttttattctctctattgtgaatgaacatcacaaataacaaaatagtccagatttgttattatggtaatttaataccataatcactgttgctgtcagtgaaatgattttctgaaatgatgaataattcatggtgaagtccaaacaaaatacrtataatcttcactgaattaatgttgtagttttcctggaaaattcagtatatcatacatgctgtgaagatacatagtattaacttgtaaa

SEQ ID NO: 407662 - DNA, 589 bp, Homo sapiens
gcctggccacaaggtgaaaccctatctctactaaaaatgcaaaaattagctgagtgtggtggtgtacacctgtaatcccagctactcaggtgggtaagtcatgagaatcgcttgaacccaggaggcagaggttgcactaagccaagatcacaccattgcactacagcctgggcaacagagtgaggcttttctcaaaaacgaacaaacaaaaaaaatcagaacacatagcagaataagatgaaagatggccaaaataattgtaaaacattcaacaaacgggaagaccmaattctaagcaaataaaaaataatctaaaagtcttctagaaaaatacatgtccttaaaattctcaaaagttttaaaaatggaataacatcccaaaaagccaaaacaaaaactacatacaacttaagtagctatgcatcaaagacaggagagattttgaaaaaacaatgagaaagaagaaaaggagaacgagaagatatgaatggcaggagaagcagcccttagtaatcctaggaattaaaattgtaatcattattattaaaaaattatagattatataaatcctagccaaagggtattaatg

SEQ ID NO: 407663 - DNA, 589 bp, Homo sapiens
gcctggccacaaggtgaaaccctatctctactaaaaatgcaaaaattagctgagtgtggtggtgtacacctgtaatcccagctactcaggtgggtaagtcatgagaatcgcttgaacccaggaggcagaggttgcactaagccaagatcacaccattgcactacagcctgggcaacagagtgaggcttttctcaaaaacgaacaaacaaaaaaaatcagaacacatagcagaataagatgaaagatggccaaaataattgtaaaacattcaacaaacgggaagacccaattctaagcaaataaaaaataatctaaaagtcttctagaaaaatacatgtccttaaaattctcaaaagttttaaaaatggaataacatcccaaaaagccaaaayaaaaactacatacaacttaagtagctatgcatcaaagacaggagagattttgaaaaaacaatgagaaagaagaaaaggagaacgagaagatatgaatggcaggagaagcagcccttagtaatcctaggaattaaaattgtaatcattattattaaaaaattatagattatataaatcctagccaaagggtattaatg

SEQ ID NO: 407664 - DNA, 589 bp, Homo sapiens
gcctggccacaaggtgaaaccctatctctactaaaaatgcaaaaattagctgagtgtggtggtgtacacctgtaatcccagctactcaggtgggtaagtcatgagaatcgcttgaacccaggaggcagaggttgcactaagccaagatcacaccattgcactacagcctgggcaacagagtgaggcttttctcaaaaacgaacaaacaaaaaaaatcagaacacatagcagaataagatgaaagatggccaaaataattgtaaaacattcaacaaacgggaagacccaattctaagcaaataaaaaataatctaaaagtcttctagaaaaatacatgtccttaaaattctcaaaagttttaaaaatggaataacatcccaaaaagccaaaacaaaaactacatacaacttaagtagctatgcatcaaagacaggagagattttgaaaaaacaatgagaaagaagaaaaggagaamgagaagatatgaatggcaggagaagcagcccttagtaatcctaggaattaaaattgtaatcattattattaaaaaattatagattatataaatcctagccaaagggtattaatg

SEQ ID NO: 407665 - DNA, 589 bp, Homo sapiens
gcctggccacaaggtgaaaccctatctctactaaaaatgcaaaaattagctgagtgtggtggtgtacacctgtaatcccagctactcaggtgggtaagtcatgagaatcgcttgaacccaggaggcagaggttgcactaagccaagatcacaccattgcactacagcctgggcaacagagtgaggcttttctcaaaaacgaacaaacaaaaaaaatcagaacacatagcagaataagatgaaagatggccaaaataattgtaaaacattcaacaaacgggaagacccaattctaagcaaataaaaaataatctaaaagtcttctagaaaaatacatgtccttaaaattctcaaaagttttaaaaatggaataacatcccaaaaagccaaaacaaaaactacatacaacttaagtagctatgcatcaaagacaggagagattttgaaaaaacaatgagaaagaagaaaaggagaacgagaagatatgaatggsaggagaagcagcccttagtaatcctaggaattaaaattgtaatcattattattaaaaaattatagattatataaatcctagccaaagggtattaatg

SEQ ID NO: 407666 - DNA, 528 bp, Homo sapiens
tccttttagttattttaagaagaacaattcaattatttttagtatagtcatcctgttgtgctagcaaattctaggtcttatttattctttctattttttttgtatgcattagccatacccccagaaggcctatttttgttcattgactttattatatattcagcaatccttacctctgtcattaatttgaatggtaggtttaagaattatcttgsattttctgtgtagacaattatattgtcaggatataagtgctgtttttttatattcctttcctgttactactatcgtttcatttgtttttctaggtcttccaataggctgttgaatggaagtcatgatgaatatattcttttcttgtttctaatgttaaagaaatatcttcaaagtttgtttggcttgttgatagatatcctttatcaagttatgttggtcattactgtttgttcttagatctctgcctttttcttgcaaactgcatctcccagacactcccaactgggcttctgctatgtttggccaatagaa

SEQ ID NO: 407667 - DNA, 554 bp, Homo sapiens
tgctacaaggatgcaaaggcataagaatgatacaatggactgtggggacctggggggaagagtgggaggggggcaaggaataaaagactacaaacatagtgcagtgtacactgctcagctgatgggtgcaccaaaatctcacaaatcaccactaaaaaacttacttatgtaaccaaataccacctgtatcccaataacttacggggaaaaataaaaattaaattaaattaaaacaaataaataaaaattaaaataaataaatctccaatagtcacagctttttcataccagactcatgtctcattatctatctgcttcttttgagaacaatattccagaaactacaactttgggtctttttgtgatgtcattaatctgtacttattttctcccttacccacgtgaggtttttggtgtgtttttgtttgtttgttttttctttgtatatttgtttttaacttggtggctgytaccttgaagttgctgggctactatggggagaccaaattctctatctaatcttttccctgaagatttttaggtacctgagaggt

SEQ ID NO: 407668 - DNA, 572 bp, Homo sapiens
aatagtttaaatatgtgtgtatatgtgtagaatttttattgaagaaatctattaggaaaatgtgttggcatgaaattatcctcctagtttcctaggcatattgtttattactggtgggaaatagcacgatgttgtgtaccatctcacttttttyacttactctagatctgtgtgtgcttttgatcattcatgacttcaaagcccctcagatgttcatgatttcaggccttaactttagccaacgtgtttccccagctcaagatatattcattcaattgtctataggaggtcaccaccagaatttctgcaggcagctctcttttgtcacatccaaaactgaatctattgttttctcagaagccagctccttctttccttctccaagcaaacatttatgaatgtctagtgtgttcagggctttgtcttaagaactccaaccctcaaagggtacattgtagtgaggagacagataaagcaataactatagtgttgtggctagtacagtgctagttataagaggcaagtgtgtgatcttggacattttgcatgaactctccgtagtttagtttctt

SEQ ID NO: 407669 - DNA, 572 bp, Homo sapiens
aatagtttaaatatgtgtgtatatgtgtagaatttttattgaagaaatctattaggaaaatgtgttggcatgaaattatcctcctagtttcctaggcatattgtttattactggtgggaaatagcacgatgttgtgtaccatctcacttttttcacttactctaratctgtgtgtgcttttgatcattcatgacttcaaagcccctcagatgttcatgatttcaggccttaactttagccaacgtgtttccccagctcaagatatattcattcaattgtctataggaggtcaccaccagaatttctgcaggcagctctcttttgtcacatccaaaactgaatctattgttttctcagaagccagctccttctttccttctccaagcaaacatttatgaatgtctagtgtgttcagggctttgtcttaagaactccaaccctcaaagggtacattgtagtgaggagacagataaagcaataactatagtgttgtggctagtacagtgctagttataagaggcaagtgtgtgatcttggacattttgcatgaactctccgtagtttagtttctt

SEQ ID NO: 407670 - DNA, 533 bp, Homo sapiens
acatgattgtatatctaggaaaccccgttgtctcagcccaaaatctccttaagctcataagcaacttcagcaaagtctgaggatacaaaatcaatgtgcaaaaatcacaagcattcttwtacaccaataacagacaaacagagagccaaatcatgagtgaactcccattcacaattgcttcaaagagaataaaatacctaggaatccaacttacacaattctttaaaaaataattggctggggctgggtgtggtggctcatgcctataatcccagcactttgagaggccaaggcgggcagattctttgagcccaggagttcaagaccagcctgggcaacatggtgaaaccctatctctactgaaaatacaaagaaaattagctgggcatggtggcacatgcctgtagttcaagcatgagaattgctcgaaccggggaggcggaagttgcagtgaactgagatagtgccactgcaccccagcctaggtgacagagacagaccctatctcaaaaaaaatatatatatattggctg

SEQ ID NO: 407671 - DNA, 533 bp, Homo sapiens
acatgattgtatatctaggaaaccccgttgtctcagcccaaaatctccttaagctcataagcaacttcagcaaagtctgaggatacaaaatcaatgtgcaaaaatcacaagcattcttttacaccaataacagacaaacagagagccaaatcatgagtgaactcccattcacaattgcttcaaagagaataaaatacctaggaatccaacttacacaattctttaaaaaataattggctggggctgggtgtggtggctcatgcctataatcccagcactttgagaggccaaggcgggcagattctttgagcccaggagttcaagaccagcctgggcaacatggtgaaaccctatctctactgaaaatacaaagaaaattagctgggcatggtggcacatgcctgtagttcaagcatgagaattgctygaaccggggaggcggaagttgcagtgaactgagatagtgccactgcaccccagcctaggtgacagagacagaccctatctcaaaaaaaatatatatatattggctg

SEQ ID NO: 407672 - DNA, 533 bp, Homo sapiens
acatgattgtatatctaggaaaccccgttgtctcagcccaaaatctccttaagctcataagcaacttcagcaaagtctgaggatacaaaatcaatgtgcaaaaatcacaagcattcttttacaccaataacagacaaacagagagccaaatcatgagtgaactcccattcacaattgcttcaaagagaataaaatacctaggaatccaacttacacaattctttaaaaaataattggctggggctgggtgtggtggctcatgcctataatcccagcactttgagaggccaaggcgggcagattctttgagcccaggagttcaagaccagcctgggcaacatggtgaaaccctatctctactgaaaatacaaagaaaattagctgggcatggtggcacatgcctgtagttcaagcatgagaattgctcgaaccggggaggcggaagttgcartgaactgagatagtgccactgcaccccagcctaggtgacagagacagaccctatctcaaaaaaaatatatatatattggctg

SEQ ID NO: 407673 - DNA, 552 bp, Homo sapiens
agtgccactgcaccccagcctaggtgacagagacagaccctatctcaaaaaaaatatatatatattggctgcatgtggaggcatgtgcctgtaatcccggttactcaggaggctgagatgggaggatcatttgagccctgaaggccaaggctgcagtgaaatatgatggtgctgctacacttcagcctgggctgcagagcaggaccttgctttwaaaaaaaaaacataaaaaagtaataggttggtagttttggagctgagattctgcaattatgactaagtgggcatatttaactcttgtctttgccagtaattaatcagagaaatgatattacgtacttgaacattgtattcccaggctgctgtgacctagagaaatataagtaatacattttacatataatgcctattggactcctccccaaatcaccaggcaacctattaataaagcaatgctaaatttattagagctcactgcagttagaaagacgtttaccttaatagtcataacagtgactcagaaggagaaagtcagaaatgatttaattttag

SEQ ID NO: 407674 - DNA, 552 bp, Homo sapiens
agtgccactgcaccccagcctaggtgacagagacagaccctatctcaaaaaaaatatatatatattggctgcatgtggaggcatgtgcctgtaatcccggttactcaggaggctgagatgggaggatcatttgagccctgaaggccaaggctgcagtgaaatatgatggtgctgctacacttcagcctgggctgcagagcaggaccttgcttttaaaaaaaaaacataaaaaagtaataggttggtagttttggagctgagattctgcaattatgactaagtgggcatatttaactcttgtctttgccagtaattaatcagagaaatgatattaygtacttgaacattgtattcccaggctgctgtgacctagagaaatataagtaatacattttacatataatgcctattggactcctccccaaatcaccaggcaacctattaataaagcaatgctaaatttattagagctcactgcagttagaaagacgtttaccttaatagtcataacagtgactcagaaggagaaagtcagaaatgatttaattttag

SEQ ID NO: 407675 - DNA, 555 bp, Homo sapiens
ctacacttcagcctgggctgcagagcaggaccttgcttttaaaaaaaaaacataaaaaagtaataggttggtagttttggagctgagattctgcaattatgactaagtgggcatatttaactcttgtctttgccagtaattaatcagagaaatgatattacgtacttgaacattgtattcccaggctgctgtgacctagagaaatataagtaatacattttacatataatgcctattggactcctccccaaatcaccaggyaacctattaataaagcaatgctaaatttattagagctcactgcagttagaaagacgtttaccttaatagtcataacagtgactcagaaggagaaagtcagaaatgatttaattttagtgccttgggatctgagctgacatggtttgaagtatgtctttcaaactgaggaactcatttgaattgggcaaaatttgtaatatattagttaaaaatttgtagaccctgtgaagtgagggtcttgaaacaaggcttggtaatttggtatgataagaaaatgtttgcccaggtgagcag

SEQ ID NO: 407676 - DNA, 555 bp, Homo sapiens
ctacacttcagcctgggctgcagagcaggaccttgcttttaaaaaaaaaacataaaaaagtaataggttggtagttttggagctgagattctgcaattatgactaagtgggcatatttaactcttgtctttgccagtaattaatcagagaaatgatattacgtacttgaacattgtattcccaggctgctgtgacctagagaaatataagtaatacattttacatataatgcctattggactcctccccaaatcaccaggcaacctattaataaagcaatgctaaatttattagagctcactgcagttagaaagacgtttaccttaatagtcataacagtgactcagaaggagaaagtcagaratgatttaattttagtgccttgggatctgagctgacatggtttgaagtatgtctttcaaactgaggaactcatttgaattgggcaaaatttgtaatatattagttaaaaatttgtagaccctgtgaagtgagggtcttgaaacaaggcttggtaatttggtatgataagaaaatgtttgcccaggtgagcag

SEQ ID NO: 407677 - DNA, 572 bp, Homo sapiens
aatagtttaaatatgtgtgtatatgtgtagaatttttattgaagaaatctattaggaaaatgtgttggcatgaaattatcctcctagtttcctaggcatattgtttattactggtgggaaatagcacgatgttgtgtaccatctcacttttttcacttactctagatctgtgtgtgcttttgatcattcatgacttcaaagcccctcagatgttcatgatttcaggccttaactttagccaacgtgtttccccagctcaagatatattcattcaattgtctataggaggtcaccaccagaatttctgcaggcarctctcttttgtcacatccaaaactgaatctattgttttctcagaagccagctccttctttccttctccaagcaaacatttatgaatgtctagtgtgttcagggctttgtcttaagaactccaaccctcaaagggtacattgtagtgaggagacagataaagcaataactatagtgttgtggctagtacagtgctagttataagaggcaagtgtgtgatcttggacattttgcatgaactctccgtagtttagtttctt

SEQ ID NO: 407678 - DNA, 614 bp, Homo sapiens
tcagttaaattttgtctggcaatacacatatgcttcctaagccagtawcagataaataccaatattttttttgctagaatttgctttaattagcactctaaaaaacaattttactgttggcacaatggaaatgtgaagaagaaatgggaaaagaaaaatggagagattagcaaagtccatcttcttttctcctctaaatgtattgttttcttcttataagctaagctctctttaaattccagaaaaggaaaatcttttttcttaacatgatttttaagggggtagggagaagcatttgtgcttctgcttgtggaattaaaacatttcttacactgatttttatagcaaactggtaatgcctacatttgaatttctggcaagccccagacataacactatacttgtttggcatttattcctcactggctggacgaatttttaaaacatgagggaaatcaagtgaaaagattaaaatcagatggttttgcagagactaccagtaatgaggggtaaaactggcattcttccatctgcttatttgattatacattttaaacttatttttaaggccgaactagaagagttggaacgtatcattgaagtccaaaagggaa

SEQ ID NO: 407679 - DNA, 614 bp, Homo sapiens
tcagttaaattttgtctggcaatacacatatgcttcctaagccagtaacagataaataccaatattttttttgctagaatttgctttaattagcactctaaaaaacaattttactgttggcacaatggaaatgtgaagaagaaatgggaaaagaaaaatggagagattagcaaagtccatcttcttttctcctctaaatgtattgttttcttcttataagctaagctctctttaaattccagaaaaggaaaatcttttttcttaacatgatttttaaggggrtagggagaagcatttgtgcttctgcttgtggaattaaaacatttcttacactgatttttatagcaaactggtaatgcctacatttgaatttctggcaagccccagacataacactatacttgtttggcatttattcctcactggctggacgaatttttaaaacatgagggaaatcaagtgaaaagattaaaatcagatggttttgcagagactaccagtaatgaggggtaaaactggcattcttccatctgcttatttgattatacattttaaacttatttttaaggccgaactagaagagttggaacgtatcattgaagtccaaaagggaa

SEQ ID NO: 407680 - DNA, 588 bp, Homo sapiens
gagagctttctgtctctgtcagctcagtctctggatccattcatgatgtgaaattagaaaaaatgcaagagaaggagctgacytgagaagtgaaagaaaaagaagggctgaactgagtgtccaccgtttcatttcaagagctggggacactggggtaacaggacactgcacaggcgggtgtcagagtttggtagtcggttacagtagaggcatcgtccaatagaacttcctgcagttatggacttgttctatgtctgagccgtccgataatgtagccactggctgcacatggctattgagcacttgtctgtggctcatgtgactggagtatttcaaatttcatttcattttaattattagtactttacagcttaatagctacatacagctaatgtctactatatcagacaacaaaactctagagaatcaaggggatatgagagactgagggaagacaggagaggagaggaggcaagtgtgatggattgtgaattagatttttcttatttcttgagagataaaactaaaagatcaaaatttatctgaaataagtttcgatagctggattacgtgtgtgtgtatatacat

SEQ ID NO: 407681 - DNA, 588 bp, Homo sapiens
cttctcattttgtgcatctacgggagatctttgagagttttacccttatttgtttatgttgccatgggaacatccatgtttatatctttggagggatacagtactgcttttcagagtatatatatatatatatgtatgactcacagctgaagacaagatagatggggccctgattaatattattattacatgagtaataataaaactgttctttcattaacatgatgataattgattattttcacagacataaaactcataagggaaagggattatttatataaattgttttaattttaaacacatacctatcrgtatacttttcaccttaaactcaacctgatatataaatattaagtttaaatatttgattttgaaaattagaactaaattagaatgaattctctataggcttaccagaatttgttttctcagcagcaactactacaaccatcaagatctattttctctctagtaatccaaagaatgggtcttgaaacttcaagaaactcaccccaaaatactttaaaaattgtgtgtgtgtattttttttttctaggaagaacctaacattcattcgaggtttta

SEQ ID NO: 407682 - DNA, 594 bp, Homo sapiens
aacaatgtgaatatagttaacactattgaactgtacactttaaacgatttaaaatggtaaattttatgttgcgtgcgtttaccaaaattaaacgcaaacatgtaactaaaaaaatgctataaaagagtaaaaatgtgagtcatagaatgagagaaaacatataaatctaactgaaatctcatattaggactacattaaaaacttctgcaaactaatatgaaggagagatgactatggtaaaaagcaaaaaakaatggacaggaaacttgaaaagagaattccaaagagagacatcccaatgacttgtaaacagaaaaagattctcaacctcattagtaatcaagaaaatgcaaattaaagacaaactatgttctcactacatatttatcagaatgagtaaaattaaaacaatgaaaattctcacacactgctggtgggaatataaattggtcaagaatttggaaaattatttgacattaactgccaaagttgaacatacacagatcctatcctcagcaattcagcttctaagtatgtcccctgcatgtgcaacaggagacatgtaccaagtgttcatagtaacatatttataat

SEQ ID NO: 407683 - DNA, 603 bp, Homo sapiens
atccaactgtctaaatggaagctgtgtctttgtcataaaccttactcaggatacttggaaactataatttgaaaaacagaaataaaatatgtcccagggctatggtccatttgtcagaacatttccacgtacatactttaatttgatctctctacataataaaagatatttacatatgtttggcagaagttcttgctgtattaatgtgtttttcttctcttttttccaagaaggtagacagtgtctttctaatatcctctcctcagtgtggtggccactgccaggcctgcccacagaaagcccttaaggagacttaaatggaaaactcagataaggagagaatgtccctgtgctagcaaagcaacaatttcacggcctggaacccagatttttggtctggttcacatgcttcctagagaaggttaagtattacctttcaaggtgatatgttatttctgggtgctgatgtggctggaaatacaaagaacagcaagcccatccccaacctggcaggcattcccctttkcaggggctgccaagacccctgagattggctgtgcctctgcctgatatgagggggaaagcgaggagctgcacctacat

SEQ ID NO: 407684 - DNA, 638 bp, Homo sapiens
tcaactttttaatcaaagtgctcgctactacatttcaccaattctaagattcacatttttcatattttaatattgcaaaaatgagggtgcatgatttaattgataatatcaccaaccagtcatgacacagttgtgtaaaaactttctactgggagcttctggtgacatcaaaaaaaggatcaaggcatcagagattcattaaaatgcaggttatttgtgacataatgatatgcttaaatgtttgtttcttctagtggactaaaagctacaaaaatgtagccatatctttctcattcattggtaaagctccaatttctgacacataatacattctcagtgatcatatgtggcattgtccaagtagattttactttctattctcagaatgaagaagttgmtaaaacatttaaatacaaatgacaacaacaattttctttataattaagttcttcatttccaatgagtaaaggtctttttatagattagacacaattactttaaggttattttagtatttgacagagataaacacactatagcgcagagagactggtatcctcaaacactgcaagtggttttatagattggtgccaacttttagaaagcaattttccaaattttattaataaggactgtta

SEQ ID NO: 407685 - DNA, 606 bp, Homo sapiens
tttgcaccaatatacccactgataacaacttaaaaaaaaaactaaattaagtataaaacatgtttttttgaggcatcaaacaactaacaagccagtaataaattgcagagacaaaacctaggattgaaagaaagctcagagaggtaagtctgacatttgagactactcttttcttacaggagtctgctgactttaaaagtggcarctaagagtctgagaagctgagcatagctttgagcagactacagaggctgctgggacagaagttgggattctgggatttaccaaggaaagataaccatgacaaaaaaaaaaaaaaacaacacagggatttgactgggacatgtaagggttgcatctggaagttagggtgaacaaaaaatagaccagcactaacagagactgaagcccagttttgagtcattactgcacacaactgaatgaatgttcagctaggactgctagttctgaccacttgtcagaaacaaaactaaatctctaaaagaagataaaatcttccacaatcttaaaatagccctacaaatttttacatatactgtctaggactcaataaaaaataactgaacacatgagaagacaacaatt

SEQ ID NO: 407686 - DNA, 632 bp, Homo sapiens
tctctactaaaaatgcaagagttagctgggcctggtgtcaggcacctgtcatcccacctacttgggaggctgaggcgggagaatcgcttgaacctgggaggtagagtttgcagtgagcagagatcacaccactgagctccagcctgggcgacaagaatgaaactccgtctcaaaaagaagaaaaaaaaattgccctggaattgcaagactcactatgctggaaagaaccttagagattatccagacccaatcccttgtttgctagtggagagacttggaacagaaatttaagcagttcaccaaataataaattatagctattatttatagtttatgtgctgaggacctcatctaatacttaaagcaagtcattcctatagcaaatatactattttatggtaaaattttagaaatattcctattaaaaccaggaacaaggcaatgatgacttttattactgccactctttgacatttttctagagggccaggcctaataagataagaaaaagagtattttatatataaggaacacttagaaatgtttaggtggccataargactgacagtttgaatcacatgaaaaattaaaacttttatgttaaaaaagtgacaatgtaaacaaagttaaga

SEQ ID NO: 407687 - DNA, 523 bp, Homo sapiens
ggtaacctataaaggaaaacctatcaattaacagagatttctcagcagaaaccctacaagctagcaaggattgggggcccctatcttcagcctcctcaacaaaacaattatttagccaaggattttgtatccagcaaaactaagcatcttatatgaaggaaaggtacactctttttcagacaaatgctgagagaattcaccactaccaagccacsactacaggaactgctaaaaggagttctaatttttgaaacaaatcctggaaacacatcaaatcagaacctctttaaagcataaatcacacaggacctataaaacaaaaatacaagttaagaagcaaaaacaaaaaaacaaccaaagtacacaggcaacaaatagcatgatgaatgcaatggtacctcacatctcaatactaacactgaatgtaaatagccgaaatgctccacttaaaaggtacagaactgcagaatggataagaactcatgaaccaactatctgctgccttcaggagactcacctaaca

SEQ ID NO: 407688 - DNA, 591 bp, Homo sapiens
tgtttttaagaaaacttcaaatgtataccaacatgactcagagaagctctgtttataataacttcagaaaatttaaaatattaagtaaatataattaaattactaaaattgatttaaaatattacagaaaaaggtagaaaatgaaacacaaaaagttacttataatactactgctataatgtaatcatcactataattttggcatatttctttcaactctatttttttcctatgcatccgatctcctgcaaagtaaatatcagaaaatatgtaaaactgtaatagcaagaaataagatgatttattttacaaatttaacagcccaaatatgttttcctaggcacgtggttttttttttgaggattctttgttaatgttccttgytctttttgttagaaatccatgattttctcattgatttttatgggctcagtgaaaaataagatgctagttttttttcatatttatagcatatatgttggatattttaacctataggactttaaacaatatctgtagtcaaatttagcataccttatctttcgtatttttgctttttttgcattttaacattttaagattgtaaactat

SEQ ID NO: 407689 - DNA, 564 bp, Homo sapiens
aaataaaaaagtattcattttcactgaacatgtttttgattgtygagaaaatctagaactgtaccttctgaaaccaattcatacattttctacaagacattcatctttggtccagacttcattttattctcccaagaatataatacattcaattcacaacaactttacaaaaaaattgtaataggcaatttgatattaatcatgtaatttcttcctcctaatcatacaaactttattagggagagaaagagagagagagaggagaaaaagagagagagagaggagagaaagagagagactttgtgtacataggtagtagtgtactggttaatgtttaacatctggcttctccctggagggaaaaaaaaagtgctggtttgtaacatttgctggtttccatggtgtaaatactccttctatgactgatttcaagctgccaacatgattcctaaaaatctaacaatcagctgttataagccagtgcaggccagtttcagcacaccagtgggggaaaatgcttttaaaccatcaaaattgaattgatgaaagtgtctgcattttgct

SEQ ID NO: 407690 - DNA, 564 bp, Homo sapiens
aaataaaaaagtattcattttcactgaacatgtttttgattgtcgagaaaatctagaactgtaccttctgaaaccaattcatacattttctacaagacattcatctttggtccagacttcattttattctcccaagaatataatacattcaattcacaacaactttacaaaaaaattgtaataggcaatttgatattaatcatgkaatttcttcctcctaatcatacaaactttattagggagagaaagagagagagagaggagaaaaagagagagagagaggagagaaagagagagactttgtgtacataggtagtagtgtactggttaatgtttaacatctggcttctccctggagggaaaaaaaaagtgctggtttgtaacatttgctggtttccatggtgtaaatactccttctatgactgatttcaagctgccaacatgattcctaaaaatctaacaatcagctgttataagccagtgcaggccagtttcagcacaccagtgggggaaaatgcttttaaaccatcaaaattgaattgatgaaagtgtctgcattttgct

SEQ ID NO: 407691 - DNA, 564 bp, Homo sapiens
aaataaaaaagtattcattttcactgaacatgtttttgattgtcgagaaaatctagaactgtaccttctgaaaccaattcatacattttctacaagacattcatctttggtccagacttcattttattctcccaagaatataatacattcaattcacaacaactttacaaaaaaattgtaataggcaatttgatattaatcatgtaatttcttcctcctaatcatacaaactttattagggagagaaagagagagagagaggagaaaaagagagagagagaggagagaaagagagagactttgtgtacataggtagtagtgtactggttaatgtttaacatctggcttctccctggagggraaaaaaaagtgctggtttgtaacatttgctggtttccatggtgtaaatactccttctatgactgatttcaagctgccaacatgattcctaaaaatctaacaatcagctgttataagccagtgcaggccagtttcagcacaccagtgggggaaaatgcttttaaaccatcaaaattgaattgatgaaagtgtctgcattttgct

SEQ ID NO: 407692 - DNA, 611 bp, Homo sapiens
  misc_feature (1)...(611): n = A,T,C or G
gattcctaaaaatctaacaatcagctgttataagccwgtgcaggccagtttcagcacaccagtgggggaaaatgcttttaaaccatcaaaattgaattgatgaaagtgtctgcattttgctactctgattatgcagtttagggtatataatttatgataaatgtaatcttttatattcagttatttttttacttaggtaaaatatttggcaacataaatgtcatccttttataccatcagatctcagagagagaaggttgaatataattacacatgcacaaatcaacaatataaaaattaataactgcagaatcaaagctacaaaaatagctctttcagccagaaccaccatcttccagtaattcaccaaaatgacgaacacaaagggaaacaggagagtcacctgataattgttctcttggcctttcagaaaacatagaattgttcctttggccacatacatgggaatccacaagaaaggcgatattgtagacatcaaaggaatggatactgttcaaaaaggaatgccccacaagtgctaccatggcaaacctgnaagagtctacaatgttacccagcatgcctgttggcattgttctaaacaacaaggg

SEQ ID NO: 407693 - DNA, 611 bp, Homo sapiens
  misc_feature (1)...(611): n = A,T,C or G
gattcctaaaaatctaacaatcagctgttataagccagtgcaggccagtttcagcacaccagtgggggaaaatgcttttaaaccatcaaaattgaattgatgaaagtgtctgcattttgctactctgattatgcagtttagggtatataatttatgataaatgtaatcttttatattcagttatttttttacttaggtaaaatatttggcaacataaatgtcatccttttataccatcagatctcagagagagaaggttgaatataattacacatgcacaaatcaacaatataaaaattaataactgcagaatcaaagctacaaaaatagctctttcagccagaaccaccatcttccagtaattcaccaaaatgaygaacacaaagggaaacaggagagtcacctgataattgttctcttggcctttcagaaaacatagaattgttcctttggccacatacatgggaatccacaagaaaggcgatattgtagacatcaaaggaatggatactgttcaaaaaggaatgccccacaagtgctaccatggcaaacctgnaagagtctacaatgttacccagcatgcctgttggcattgttctaaacaacaaggg

SEQ ID NO: 407694 - DNA, 611 bp, Homo sapiens
  misc_feature (1)...(611): n = A,T,C or G
gattcctaaaaatctaacaatcagctgttataagccagtgcaggccagtttcagcacaccagtgggggaaaatgcttttaaaccatcaaaattgaattgatgaaagtgtctgcattttgctactctgattatgcagtttagggtatataatttatgataaatgtaatcttttatattcagttatttttttacttaggtaaaatatttggcaacataaatgtcatccttttataccatcagatctcagagagagaaggttgaatataattacacatgcacaaatcaacaatataaaaattaataactgcagaatcaaagctacaaaaatagctctttcagccagaaccaccatcttccagtaattcaccaaaatgacgaacacaaagggaaacaggagagtcacctgataattgttctcttggcctttyagaaaacatagaattgttcctttggccacatacatgggaatccacaagaaaggcgatattgtagacatcaaaggaatggatactgttcaaaaaggaatgccccacaagtgctaccatggcaaacctgnaagagtctacaatgttacccagcatgcctgttggcattgttctaaacaacaaggg

SEQ ID NO: 407695 - DNA, 592 bp, Homo sapiens
gaaaactacaaattaaatttctttgaaaagcatggtcacctagttttgaatgggttatagctagtaacacattgctatggtttttgttatattgagtgcttttaaaatggttttattctaaaaggtcaatatttatattatactgaatattacatcccttatcattgtttatagtgatgaaaagaaattttaatgtccttttaaatgtgcaggagggtatatagctttttagaattcttttagcaggtgtgtaagaaaaaattaggagattactgtcatacacgatatgccttaagaatacaaaagacatttctgtctagaaataactatgctaagtggaggaaacttttcaagttctcaactctacagaatatattgctacaacacaaccgaaccttagagatcatcttgtgcaggttcattatgagaaaattggcccagaaaaggtaataagaggttctcttcacccaytctaatgtctttgcctacatcgtgatgtagagaccttttgctgagatgatttggcacagcatcctgctatgcagacaagactgtaagggcaaatatacagtatcagaatggtacatgtgaa

SEQ ID NO: 407696 - DNA, 624 bp, Homo sapiens
gagtcttatgtttaaatcagcttattttcatactaaaaggtgattaggaagagttcataaaagatggattttatttgagaggtatgatgggttttcayaggggagaaacaggtcatattgaagcaaggaggccttccatgagaagggcaagatcaaagattttacttataaacctaggaaagcactgaagagagcatctaaagaggttggaaagtatgagtagagagttatgatacaaaagatgctctgtgagcattataattttacccagagcagtgttttgccctggaaaagaggaggaagtgtcttctagcactgaatactacccacagaccctcttcatggatgagccctcctccctgtctaacttctattcagttattcacttaagcaacatttattaataatcctctgtttataaattacaagaagagttagatggggatttggaggactggtggataagctagctatcatctgcagctctacttcatggggaaatgtgcaccaagtaccctaatatatgaactcaacttattgtgagaaatgcatataagaaataagtcagaatatttttagaaagcatgcagaaagaggaaaaaatttagctacttataagtagct

SEQ ID NO: 407697 - DNA, 624 bp, Homo sapiens
gagtcttatgtttaaatcagcttattttcatactaaaaggtgattaggaagagttcataaaagatggattttatttgagaggtatgatgggttttcacaggggagaaacaggtcatattgaagcaaggaggccttccatgagaagggcaagatcaaagattttacttataaacctaggaaagcactgaagagagcrtctaaagaggttggaaagtatgagtagagagttatgatacaaaagatgctctgtgagcattataattttacccagagcagtgttttgccctggaaaagaggaggaagtgtcttctagcactgaatactacccacagaccctcttcatggatgagccctcctccctgtctaacttctattcagttattcacttaagcaacatttattaataatcctctgtttataaattacaagaagagttagatggggatttggaggactggtggataagctagctatcatctgcagctctacttcatggggaaatgtgcaccaagtaccctaatatatgaactcaacttattgtgagaaatgcatataagaaataagtcagaatatttttagaaagcatgcagaaagaggaaaaaatttagctacttataagtagct

SEQ ID NO: 407698 - DNA, 624 bp, Homo sapiens
gagtcttatgtttaaatcagcttattttcatactaaaaggtgattaggaagagttcataaaagatggattttatttgagaggtatgatgggttttcacaggggagaaacaggtcatattgaagcaaggaggccttccatgagaagggcaagatcaaagattttacttataaacctaggaaagcactgaagagagcatctaaagaggttggaaagtatgagtagagagttatgatacaaaagatgctctgtgagcattataattttacccagagcagtgttttrccctggaaaagaggaggaagtgtcttctagcactgaatactacccacagaccctcttcatggatgagccctcctccctgtctaacttctattcagttattcacttaagcaacatttattaataatcctctgtttataaattacaagaagagttagatggggatttggaggactggtggataagctagctatcatctgcagctctacttcatggggaaatgtgcaccaagtaccctaatatatgaactcaacttattgtgagaaatgcatataagaaataagtcagaatatttttagaaagcatgcagaaagaggaaaaaatttagctacttataagtagct

SEQ ID NO: 407699 - DNA, 624 bp, Homo sapiens
gagtcttatgtttaaatcagcttattttcatactaaaaggtgattaggaagagttcataaaagatggattttatttgagaggtatgatgggttttcacaggggagaaacaggtcatattgaagcaaggaggccttccatgagaagggcaagatcaaagattttacttataaacctaggaaagcactgaagagagcatctaaagaggttggaaagtatgagtagagagttatgatacaaaagatgctctgtgagcattataattttacccagagcagtgttttgccctggaaaagaggaggaagtgtcttctagcactgaatactacccacagaccctcttcatggatgagccctcctccctgtctaacttctattcagttattcacttaagcaacatttattaataatcctctgtttataaattacaagaagagttagatggggatttggaggactggtggataagctagctatcatctgcagctctacttcatggggaaatgtgcaccaagtaccctaatatatgaactcaamttattgtgagaaatgcatataagaaataagtcagaatatttttagaaagcatgcagaaagaggaaaaaatttagctacttataagtagct

SEQ ID NO: 407700 - DNA, 575 bp, Homo sapiens
aaaaaatttagctacttataagtagctaaatagaatgcatacattttattgtcctactgaaamaatatatattttttagtcatttatacagtaatataaattagtttaacacaattgattttttcctaattcttaagctgatactattgccaggaaggggaatttttattttggtttgagatctatgcagaagacatcattttgcaatatggatcatctttggaggttgtacaggccgagatacagagatgaagaaaaacaaacaaacaaaaacttagggcagtttaaatctaaaggtctgctgaaaacccagtaggaactcaaaaatgtttttggacaaataggctatatatgatcaactcaggagtgaaacattaagtagagagatatttcttctcgtttgtatttattagggactactctatgaaaaaagaagggaagattgctggttgatgagtttgagaaggtgccacgatccagcgtatcctacctgatatattaactcagccagaacaaaagaagcagaggggatagggtttcttatggggttataaaaagtaattcaatgctagcat

SEQ ID NO: 407701 - DNA, 557 bp, Homo sapiens
gtgtttctattaattaatgaattaactaggacttagtaaaaggccagtgrtaaggagaatgagtttcagttagaaatagcatccgtttgataggtgtacatgttttaaggcctggctttggaattttcacatttaaaaatgtaaaattgagttagtagcaggagaacatgacattcatttcttaagacaaaagcaacaagagagatatttgacattctcataggaacattttgaaattttgtgagcggactaaaaatctaatttcaagccaagccttgtaattttgttgagtggacatggattttaagtacagtggaagtgcagtcttgtagagacctctgattagttttgtttaaacagctcctggaacagatgtgataaaacatattaaaatggctactctggttaaaggttaaagccagatggagggaggaggctggttttcagccctagaacttagctgccttacaagttgtccttgaacaagtaacttaacctttctgtgactgcctcagttttccctctgtaaaaataaggaaatattttgtgtcactctt

SEQ ID NO: 407702 - DNA, 557 bp, Homo sapiens
aaaattaaccgggcatggtgctgtgttcctgtagtcccagctactcgggaggctgaggaaggaggatcacttgagccaaggaatttgaggctgcagtgagctgtgatcacgacactgcattccagcctgggtgacagagcgggattctctcagaaaaaaaaaaaaaaaaaaaaaaaaaagacagaaaagaaaagaaaaaaacaaacactggaacaacaataggaagagtcctttagggatgacagaactttccctactctactctaagcagcctaggctcccggctctgaagtttaggctcccacttggtttagaaataaaaaacccaaaacatcccaggggtctcacagacctcaggawttctctcccttccttgggaagccccagcctggttacacagaatgagttggggtggggagatatgccttccatgccttccagcagcctctcccaggtaaggcaatcaggtgtgggcaggctcaccagcctgagaagcctgttgtgagtaggcgggcccattcctggctgagaggagggcagcgtctgcctgccagggc

SEQ ID NO: 407703 - DNA, 553 bp, Homo sapiens
aaaggtcagggggactttctgtagtcatgaattaggtctcaggctcagtatgtggtgcaggagcactggccactgctggtggtggtctgcacaatcctggctaaggaggatggggatgaactgccaagtctgggattctgatccatggagagacttgtgcttctgaactagacatccttcccaatagccatggagttratacccccttggagaccctgggtacctctgttgctccagtcgccactgctggagctgctactatcccccatactaatgtttttgctgctagaagtgtggttgaccacagctgcaatgagaatggactgctcagtcacagtctgtcttcctaaatgcccattgcatgccaatccctgtctgagaaatgagtggtcaaggaaagccacagaggaaagacttgtgaaaagacactacaaaaaaaagaccaaaaaaaaaaaaagagagagagagagagacaatgctcctatgggccttccctgtctgagggaggcccaggacatacactggatgggacatcagataaagcctacctaaa

SEQ ID NO: 407704 - DNA, 519 bp, Homo sapiens
tatcttaaccccactctcccccctccaaaggctaccactgctgagttggggtcccatctgtttcctgaggttggtgatttctgcctgaagtctctgggtggctcagttcagctcatcracctccatctaaatggctttgaggtcctcacccttcctcctgtcagtgacctggagcttctggtacaggaagtgggggaaggcaagagtgaaaagatagcacagagagagtgaaagcagggctcctaaccccagatctctaagcctcggtcaaccaagacttttatgtcctggccaggctggtcactgtggccaaaaccaacacacagaggagacatattcctgtctgctaggaatgtatagtccagctgagaaaacaaaacagtcctatgtaacatacttacgtaactatcaaagatcacctagccagttcctagacaataatatggaatgctctgtcccagtcagatcttgatgaaagagatagtaacatagacaatccatagtgggaggaagatatcc

SEQ ID NO: 407705 - DNA, 532 bp, Homo sapiens
gtgacaggtcagcacttctctgcccctcagccactcagccagaccagccagcctcaggaggttcccaggatgggtgcacagccccagtgggggcaggaccccaggcaaggactccaaggaagaaaggagaggacrggggagggctgtgaaggtgacgttgtggctgacaaggagaaggaagttgcaacagaagttcaagaatgcacagcagctgcctctaggacctcatccttcagggaggaggtgcacatatgaatgcacaaagagcaagttctcagccacagggacacctagaactggggtctaaggggccttggagggagagctgcaggggaggagagaggaatcagtctgacaaggacaggaatgagcatggctggagaagaagtcaaggtcactgccaagtgccctaggagagggtgagcagagagaggggctgaggccagcctgggcagggtagagagaatggaccacttgggccaggccagaaaaaccatcagcttttcctcttccaaacttgtacaacaaaaat

SEQ ID NO: 407706 - DNA, 455 bp, Homo sapiens
gacagctccttagcatcttatctctgtgctgttttggttttgtacataaggtgtaagcaagttgtttttcttttgtggagaggtcttaaactccccatttccttgttttgctgcaataaactgcatttgaaattctccatgtctcgatcgcccttgtttacggctctgtctaacctggatgggkgttttgtgaggtaaaagaagacactagagccacatggcatatgggaaagtcatgcacacaaacatgagaaaaatgcagaggccaaccaggcaacatttcaccagactggaatcacagagagagcaagcactttcccagatggtggggatgtcatggagaaatggagagaccgggtgacaggttttgttcatttgagaaggctttcttgaaaagggcagtgagcaagcaggttgggaggaagaggtgtggcattgagaagaagggaaagtat

SEQ ID NO: 407707 - DNA, 643 bp, Homo sapiens
aacagattccactgggacttcagttcctttgttccatccccatcccagccagacacagaagcaatcctctttctgcaaacacagctcttggaatctgaaggggtcaatacataacatcttttccttgcataggttctgagccaattaaaaaataagacaaatgaatgagcagatggagggtcaatattgcctttattaccaagaaagcagatactggagcrtgtgtctttttacctcggatggaaagggtttctcctatcacaggacctcaggattaggccagattttccacctgggcaggggcagcctagggccactgtggccttccctatggggtcagatccctcatagtcgagggagagaacaagagagcagaatataatcttactggggacagccagatcctaagagatggaggggcattgctctgcaaactcaactcttccttccaaactcattgatcaggtaagagagtgggtgggagtgtaaactaggtaaaactcactccagatggatgtaaaattaggaacagggatgatgtgtgcctgccctcacaccagcgtttaccagccattctcagaaagctgaaacccaaacccagggggcacaggggtaatgagacagtcactgagagaaaccagga

SEQ ID NO: 407708 - DNA, 620 bp, Homo sapiens
gaggtgtcgattttcaaaatatcttggctcttttcttcccatgccacaccaaaaatacacaataactaggcaccgaatagagattttttataaccatgatggtttgtataaccatcaactgtcccttgtctacatgaacacccagaggttgagaggtatgagaaaagtttygctgtttctggacctgtgtgatgcgggacaccaagtgaaagtttgcaaaccaagatccaagtgtatattgattcagtcagtcagtaatcacgtattgcctggtgatcctgggaagtgattaggaagtcaggctcttcaatgacatccacagatgcttgaggataagaagaccatccagcctgcacagagcactcacacttaaactcaaccacttcctctgtccatgtggccaactatgtgggagaggttcttggagtaataaaactgaatttagtcagaaattctgggtttgagtcccagttttgctatttattggctgtgaggccttgaatgaaaccctgaggctctgtggtcccagctataaaatgggaaattcgtatgaagtgttttgaaaaccaccgtgcacaatacaatgtcagtatcattattgtttggggtgagacaaagat

SEQ ID NO: 407709 - DNA, 543 bp, Homo sapiens
ttgctgctcctggctcatgcctagacaccctgcctcgtttgggtttgcatgcttcaggctgtgtctctcccactcagatcaagaccaaagatgccaatctcattggctctccaataagaccctttggaagtctgtatggttctgcatggacccgccttccccaccaggcctccacatgggcactcagctggcacttacacactacagcctatatgctgggggcttcccaggacccctctttcagragaggctccagacacccactccttctggtcaggagtcctctggaggcccattaatatatccatgaactcagctcgctgtccatatattggaagaccagatgttgcctgcacttctctctgtacagggattaactccatgccattcatactattagggagaaataaggtttttctggtaaggaaaagagaggtgatagtgacagaattttagaatggggacatgatggcaggcttgtctgggcaaatccatgaaaccagattactgccaacattttccactgcctggtcctgtgcagac

SEQ ID NO: 407710 - DNA, 543 bp, Homo sapiens
ttgctgctcctggctcatgcctagacaccctgcctcgtttgggtttgcatgcttcaggctgtgtctctcccactcagatcaagaccaaagatgccaatctcattggctctccaataagaccctttggaagtctgtatggttctgcatggacccgccttccccaccaggcctccacatgggcactcagctggcacttacacactacagcctatatgctgggggcttcccaggacccctctttcaggagaggctccagacacccactccttctggtcaggagtcctctggaggcccattaatatatccatgaactcagctcgctgtccatayattggaagaccagatgttgcctgcacttctctctgtacagggattaactccatgccattcatactattagggagaaataaggtttttctggtaaggaaaagagaggtgatagtgacagaattttagaatggggacatgatggcaggcttgtctgggcaaatccatgaaaccagattactgccaacattttccactgcctggtcctgtgcagac

SEQ ID NO: 407711 - DNA, 566 bp, Homo sapiens
cagtgggcagtgaagggtaaatggaggaggtgggctgaggacttgccatccgcatagtacaggagtccccagcctccctggggacgagatcttggcagtgtgggaaggctgggggacagagagcttggcctcctgggggctgtttaagggaagacacctggcgggagccaccaagagagtgaatctgcctggaaggaaggaggggagccagtaaggaagcacaaaatgcgagcacccgtcctgctgccagtctctaatgctgctggaaggcatggcagggcgcctgcacagcgttttacagctccacacccttgggatttgatctcttattcaccagccaccctcctctagtttccacctctgcttctcttcttccctagaccagcagccaggagatcaagctcrgctgggtcccaggagccctccgcatcttccgaacccttgctcttgcaggagctttctagactccctcacccacctaacagccttgttgcctggcatcctggcccttcttggggacacctgctttccaaacagcaaaacaaggagcatcatactagagcagg

SEQ ID NO: 407712 - DNA, 618 bp, Homo sapiens
agcaggctccccctggttcctctgagagctagaggaaagagcactgccaggcaagggaggggcaggactggggtgagacctgatgatgaggttgggagacgccagtttatgtttcctcactggtgtttcagcagcagcgcatggcactcagctctttgcctggcattgatggggagcagcaggccctgccagagatgaccagggtcccttcaaagraccagggggcacagctcctcatcactctccccaggctgatggaaggaaagaggactgagaaggaagcttctgaggccaggttcaaggcagacctgccctgctctaccctggtggaaaacccaggctttccaacactgggctgttgggccctctgcctgtcccctgagtcttttctttgccttctgtcctcatataaaaagtgactacagtatcccaagagaaaacattgagagggatcttctgtttaggaagaaaagctgagtaatgtaattaaaagtaatagccaaaaccacaataatttttgcaccaacctaatatcacaattaattatccttgcatggtgccttgtaacaagcaaaggccgcctgtgtactggttaaggacatggatttgtccaacaca

SEQ ID NO: 407713 - DNA, 495 bp, Homo sapiens
tcaatattagagaaggcacgttattattaatttctataacctggatgattataatggtaattatctacagttcaatagtgaactggtgtaatgaagggctcaaagcagtttggcaactggcgagcaaaacacactttggagggatgttaactccggaaagaaaaccctggggcagaggctcagcattgagactggcactgtcctaggttttggccatcagcaacagcaacacttggaattcctgttctggagaaagtattatccagcctcacagccctgagaaggcaccaccattcctcactttcytggctccatctcctctcttcatagctccactgccctgctcaccttcttcagaaccatgaagtcattatcagcctctgagtacttgttaaattcatcctcatacctaccaggaagaaaagaaataaggctcaggtggcagcagagccaaggttatatgcacagatgtgcagagaaaggtgtttatcccag

SEQ ID NO: 407714 - DNA, 456 bp, Homo sapiens
acagggggaagggtggccccttttataggtccagtggattgatttattcatttgacaatttcctgggtttcattatctggctgaaactaatccccatagcaacttcctgtactgtaatcctgaaatctccatttcagatctttcctataattaatcctacatagacttcctgcaggaacaaacccaggccctcccttgctaagtgagcttggttcctgccagacatggcccagccccaaccccagcaccmtgggcactggcttctcaggaggcagcaggtccaataaggtgagttggtggctttttcattccaccttaaccctgggcgtccactcctgtcattctgctgtctgcctctcagaatgaacaaggctcacccgggaatctggaaagagttgagaggatcaaatgaaagggtagtttcctcctaattttagcacctccaagtctcacacc

SEQ ID NO: 407715 - DNA, 523 bp, Homo sapiens
tcaaacatgcccccttagtccccttttcaggcccctgtgtattctgctgcctgcattcccttcctgcctctcccctgcagtgagggctgcacccttgtccacctgacaacagatgccatgatgacaggatcctctctgcctggttctccagggctccccattgcctagcacagtgcctggcccatggtaggctcccagattttgtgggatcagcaactattcggttcctcctgcttatagcattgtcctctgtgtgggtagttgtgtgtcccgcctccactgtcatgctggagaagaaaagtcttggccctccagacagccttctacccaatcatctcctgccccaaacccaggacaggarcctgtatgcatgaacttaagatggggttttgagatacagactgactaaatcagctgccacttgtaggagtggctgccctctctgctaaacatgcccacctgtgtaccaagcccatgttaagcacatgggaaatgcagccaaatcatccaactggagggaaaa

SEQ ID NO: 407716 - DNA, 446 bp, Homo sapiens
gctgtcccagatgcagtcagacaccagcgacacgtctgtggttctttccatggacaaaaaccgctgcctggacctggacagtatcattgccaaggtctgcacccagtatgaggagattgcccagaggagctaggccgaggcygaggccctgtaccagaccaagatgggtgacagcatcatgtagctttggagaatcttgctcccccatcaatctgcctagacagtccacacaggagggcagaccctgcctccaagccattcttcccacacctccatttggcagttatctcatcttcccactggtctggtcttattaacagagagctttcttcccagtcagaaagctctgactttgctctaacccagtgcttctcaacagagagtggggaaggtacgattttcccccatgggacatttggaaatatctgcaggcatttttgattgtc

SEQ ID NO: 407717 - DNA, 446 bp, Homo sapiens
gctgtcccagatgcagtcagacaccagcgacacgtctgtggttctttccatggacaaaaaccgctgcctggacctggacagtatcattgccaaggtctgcacccagtatgaggagattgcccagaggagctaggccgaggccgaggccctgtaccagaccaagatgggtgacagcatcatgtagctttggagaatcttgctcccccatcaatctgcctagacagtccacacaggagggcagaccctgcctccaagccattcttcccacacctccatttggcagttayctcatcttcccactggtctggtcttattaacagagagctttcttcccagtcagaaagctctgactttgctctaacccagtgcttctcaacagagagtggggaaggtacgattttcccccatgggacatttggaaatatctgcaggcatttttgattgtc

SEQ ID NO: 407718 - DNA, 528 bp, Homo sapiens
ggcacgccccgctctgagctcccccgcacccccgcggggccccttccctccgctgcttctgacctgtgccccggagccccaccttcccagactgctggcatcrcagcagcccgaaagttgccgcgaaggatgagtaggcggtaaaccctcaacggcggactcggcggctcatgcctgtaatcccggcactttgggaggcggaggcgggagggtcacttgagcccaggagttcgaggctgcattgagctagcatggcaccactgcactccagcctgggcaagtgagcgagaccctatctctaaacaaacaaacagaatctgaaaaaacatccacccacacaaggcagtggccaggagctgggcccccgtgtcaccacttgtgccctgaaggtgccctcacccccgccaatgtcccactgccttatgggacagttccaatcggcccattcccctccctgtaggcagggcctccccggtcaccacttcctgctggtactttgatttcccgtcttggcttcaagaaaggaat

SEQ ID NO: 407719 - DNA, 528 bp, Homo sapiens
ggcacgccccgctctgagctcccccgcacccccgcggggccccttccctccgctgcttctgacctgtgccccggagccccaccttcccagactgctggcatcacagcagcccgaaagttgccgcgaaggatgagtaggcggtaaaccctcaacggcggactcggcggctcatgcctgtaatcccggcactttgggaggcggaggcgggagggtcacttgagcccaggagttcgaggctgcattgagctagcatggcaccactgcactccagcctgggcaagtgagcgagaccctatctctaaacaaacaaacagaatctgaaaaaacatccacccacacaaggcagtggccaggagctgggcccccrtgtcaccacttgtgccctgaaggtgccctcacccccgccaatgtcccactgccttatgggacagttccaatcggcccattcccctccctgtaggcagggcctccccggtcaccacttcctgctggtactttgatttcccgtcttggcttcaagaaaggaat

SEQ ID NO: 407720 - DNA, 510 bp, Homo sapiens
gtgtctttctttcatccagtcatgataccatggcaacagttagatgaaatatttatctgcatttataagacactgtttataatatcttttacaaacaaatggctagttttgttaatctacaaagagtatgtacagattatttagaaaaacaaaatgatcactcaaagagaaaatggactgaataagtgaagagacaattcacagaaaatgaaagctaaatagcgaataaacatatttgtaatgctcaacctcattagcaatcagataatgaaaataaaacagaaaactgtcaaaaaaaaaaactaaaaagaataccacacagtgttcagaagactgtggagaaataggaagtcttataygttacttacaaaagcatgaattggtacaatctttctggagagcggcctgaccatataaatcaaaaattttaagtggccttgcaattccaataacttctaaaaagttaccttaaagaatgaataggaccagtgtccagagaactgtgtgttc

SEQ ID NO: 407721 - DNA, 554 bp, Homo sapiens
taagtggcgatttagtggtgacttcgttgtgcaaaacaccttccacgccagctatccaaaacaatctgtggcactagcttgcatctccaggcagtgggagacttctggacatcataggcccagtaggcggggagaggcgtctgttcttaatgacagaatatgtcttggaaagactgactgcagctcttcattaatgttaagcattgatgaatcaaaaagataattacctgaccctccagggacctctgcttttcctgaarcaccttcttgtattcagtaacactactgcccctgccaaagtagacacacctctctcaggaacttctgagggtcagactactctgtgacaagagattgtgtcaagcaatccacctggaagaccccttttctcaccatacatgttcctgtgtcaacaacgtggaaaataacaccatcacaaaccctccctgtcccagataccacaggcaggctttgcactaaactttcgtgtgctcacagctctttcacttgggtaagatttgtagtccatcaaccctagggatccacctgggcag

SEQ ID NO: 407722 - DNA, 458 bp, Homo sapiens
tgacataatgtgggttcagtctactgtttttaattctagtctgctcctgggtcttgcaggagccccttctgattactgtctccatgcccacgtttcttttgttgtgtgttctggtccacaaggctccctcaggtagggactcctgttggcagacaggctgaatccttgcccgtcagccttaatctgctgtccaaatgcctcctgggagaacatgrggttgcacctgcccagagagttcaggcagaagtggtaccattgggctggaagctctagcagatgtgggccatctggctatgagaagctgggacaggtagagctgcccaccctgcctttgggtcatttccagagtaacaggaggctaggcccctcacttaattcaggcagtgtaggactctggtctagaagctgtagctggcatggttcccctggttatcagtgacggggataggtgggttcac

SEQ ID NO: 407723 - DNA, 588 bp, Homo sapiens
ggagctccaccctcatgacctatcatctcctaataccatcacattgagggttagaatttcaatataaaaattttggaggggagggcacaaacatccagtccacagcagtgagtttcttgtaatctcagaagtcttcttacataactaaattgttgttcagaattgatttgggtcctttgtgatttattgatcattaatttaaaattcaattaacttggggatgtattgaaaacttgacaatgtgaaactaattttgctatacattaactactwaaaaaaccactaccgttcattaagtcaccacccaatcccaatcacttttcttacattatctcatttaatcctcaaaacaactagaggtattcatttttactctggttttgccaaaaatgaagttaaagctcagatatattacataacttaaagtcattcagttagaaaatagcagagctggtatctgagtttaattctgtttgactccaagacaaacattttttccatttcattgtgtaagcttaattatatctctccttgcaaagggataaataccacataatcagacttgaaagttttccatggtgttattct

SEQ ID NO: 407724 - DNA, 588 bp, Homo sapiens
ggagctccaccctcatgacctatcatctcctaataccatcacattgagggttagaatttcaatataaaaattttggaggggagggcacaaacatccagtccacagcagtgagtttcttgtaatctcagaagtcttcttacataactaaattgttgttcagaattgatttgggtcctttgtgatttattgatcattaatttaaaattcaattaacttggggatgtattgaaaacttgacaatgtgaaactaattttgctatacattaactacttaaaaaaccactaccgttcattaagtcaccacccaatcccaatcacttttcttacattatctcatttaatcctcaaaacaactagaggtattcatttttactcyggttttgccaaaaatgaagttaaagctcagatatattacataacttaaagtcattcagttagaaaatagcagagctggtatctgagtttaattctgtttgactccaagacaaacattttttccatttcattgtgtaagcttaattatatctctccttgcaaagggataaataccacataatcagacttgaaagttttccatggtgttattct

SEQ ID NO: 407725 - DNA, 588 bp, Homo sapiens
ggagctccaccctcatgacctatcatctcctaataccatcacattgagggttagaatttcaatataaaaattttggaggggagggcacaaacatccagtccacagcagtgagtttcttgtaatctcagaagtcttcttacataactaaattgttgttcagaattgatttgggtcctttgtgatttattgatcattaatttaaaattcaattaacttggggatgtattgaaaacttgacaatgtgaaactaattttgctatacattaactacttaaaaaaccactaccgttcattaagtcaccacccaatcccaatcacttttcttacattatctcatttaatcctcaaaacaactagaggtattcatttttactctggttttgccaaaaatgaagttaaagctcagatatattacataacttaaagtcattcagttagaaaatagcagagctgrtatctgagtttaattctgtttgactccaagacaaacattttttccatttcattgtgtaagcttaattatatctctccttgcaaagggataaataccacataatcagacttgaaagttttccatggtgttattct

SEQ ID NO: 407726 - DNA, 554 bp, Homo sapiens
aagacaaatcgtttgcatgtcatcagcatctctttctgaaggggtttcagttttgatttgctctgctcttcaatttagttacatcactacttcatctgtttaccatttccaacaaccttgttgatttccagcatattttactatctcttactccaatctttgtcctgttaggtttgtattatgatatttgtgatgttttcaaaagaaaaatcatatgttaaatcagccaagctcacttagaaacttgtttaaataagaagctggatcaagtgtgatgatraagtatcatataaataaaagactcagtacttcaattccaagttaacataacaaagaatttttcattatagtttcaccctttagatatggttctgctaccagacactgggacagccatgatttttgttctatttacctatatttgctatttggaggattaaaacattagactacattaaacacagactctacagaataggtaatacgggtcttgtggggtcattttgacaactaaagaaaagacttatccttgttatgaacaagtgtcctaccct

SEQ ID NO: 407727 - DNA, 554 bp, Homo sapiens
aagacaaatcgtttgcatgtcatcagcatctctttctgaaggggtttcagttttgatttgctctgctcttcaatttagttacatcactacttcatctgtttaccatttccaacaaccttgttgatttccagcatattttactatctcttactccaatctttgtcctgttaggtttgtattatgatatttgtgatgttttcaaaagaaaaatcatatgttaaatcagccaagctcacttagaaacttgtttaaataagaagctggatcaagtgtgatgatgaagtatcatataaataaaagactcagtacttcaattccaagttaacataacaaagaatttttcattatagtttcaccctttagatatggttctgctaccagacactgggacagccatgatttttgttctatttacctatatttgctatttggaggattaaaacattagactacattaaacacagactctacagaataggtaataygggtcttgtggggtcattttgacaactaaagaaaagacttatccttgttatgaacaagtgtcctaccct

SEQ ID NO: 407728 - DNA, 601 bp, Homo sapiens
tgaaaagctaacaagcgcagacaagaagagtctagtttctctagccaaaggagcagccttgcaagacagaaaactaactatgccagccaaatgcaacagaaaaaactgtgatccttcccctacctaagccagcaaggccaagtgagaatcttagacttttacccccaccaggtagagtggattaaataacaagcaaatacacaacagcaaaaaaacgtgaygcaacaaaatgctatttataaaaaactcacttcaaatacaacaatgtgggtaggttgaaagggaaaaaaaatgaaaaaagagatatcatgtaacaataaccccacaaagttaagagtagctatataaatatcaaataaagcagattttagagtaaagttaacagagacagagaaggacattacataattataaaagaatcaaccctccaggaagacataatgatcctacatatatgtgcaccgaacaagagaggctcaaaatacatgaagcaaaacttgacagacctgaaaggagataggcaatagaaaattatagctgggaacttcaacagcccactctcagcaatggatagaactgctagacagaacatcagcaagga

SEQ ID NO: 407729 - DNA, 510 bp, Homo sapiens
tacgtacatatgtaagtatttgtagaggcgggtctcattctgtcaactaggctggagtgtattggtgtgatcatagttcaccgcatcctcaaattcaggctcaagcaaacayctaggctcaagggatcctccagcctcagcctcccaagtagctgggactacaggctcttgccaccatgcccggctaattttttttttaaaatagagacgaggtattgctatgttgcctaggctggtctcaaactcctggcctcaagagatcctccctcctcagcctcctaaagtactgtgattgcacggatgaaccaccacatccagcctaaggggtcccatttctaaaaacaaaccaccacaccaccacctctcaaagctgctctggtagacgtagtggtggagatccagaatccctactgtctggatcacacaacttcataaaagaggtcctcttaggtggtaagagacataaagtaaaaatctgctgctatggcagaggaacagggcaaaggagtt

SEQ ID NO: 407730 - DNA, 579 bp, Homo sapiens
gactagaacgtgggtagcttgaggtccggaccaacgtgctgtcccactgcatgacacgcaacacagacgacttggggtggcagaagagaggaagagaaggtgaccccacagcccctagcaacraaaacaacaagaaggacttgaggcactcataaataattaagcaattagctgcagcagctactcccctcccctccagcatccagtcaccaaggcaacttgggcagggtgcctgctggttgcctagtaacagtgtggtctgctcccctgacaagctccctaggcatcaaaggatttgagagccgggaagaaccttagacagggatcacttttccaacaccttcattttccaaatgagaaaagaaaggcccagagaagctgggtaacctgcccaaggtcacacagctattcagacacacagccaggctccattcccagttgctttccattgcactagggctgcctcagggaggctgcagatggaggagagggggaaatcgctctacagttcctagaagaatgagaaagtcagagcgagcaagcaggcaagaaagagacagaaacctgagcactcatatg

SEQ ID NO: 407731 - DNA, 579 bp, Homo sapiens
gactagaacgtgggtagcttgaggtccggaccaacgtgctgtcccactgcatgacacgcaacacagacgacttggggtggcagaagagaggaagagaaggtgaccccacagcccctagcaacaaaaacaacaagaaggacttgaggcactcataaataattaagcaattagctgcagcagctactcccctcccctccagcatccagtcaccaaggcaacttgggcagggtgcctgctggttgcctagtaacagtgtggtctgctcccctgacawgctccctaggcatcaaaggatttgagagccgggaagaaccttagacagggatcacttttccaacaccttcattttccaaatgagaaaagaaaggcccagagaagctgggtaacctgcccaaggtcacacagctattcagacacacagccaggctccattcccagttgctttccattgcactagggctgcctcagggaggctgcagatggaggagagggggaaatcgctctacagttcctagaagaatgagaaagtcagagcgagcaagcaggcaagaaagagacagaaacctgagcactcatatg

SEQ ID NO: 407732 - DNA, 498 bp, Homo sapiens
ttcattataaaaagctgtcttcaactaatggtaattttytattccaatgttttcctttgggatgctctaaatttcatatattgtcttactaaaacatgtcatgtaactcctacaattaacatgctcaaactattcttaagaaaaagaaattagcgaggccctgggtcagcaaatgacgtacaagctgggggtaatctaatgaagagtgtagaaactgtagtgtatctgatagtgcaagcacatcacaggtgtgtagagatactgattccattcactctctggatgctgaacgaagctgaggcagcagaacccctaggctggtatctgctaccagctgccttgtccatttaccttggtgggtgataaaaatattatcattttctatgtgtgccatgatgtgagaaagactggaagcactgtactaatactaatgtccttgaatattatatgatataacacatgaatggtattcacagcatagtcaagggagttcatgaa

SEQ ID NO: 407733 - DNA, 498 bp, Homo sapiens
ttcattataaaaagctgtcttcaactaatggtaattttttattccaatgttttcctttgggatgctctaaatttcatatattgtcttactaaaacatgtcatgtarctcctacaattaacatgctcaaactattcttaagaaaaagaaattagcgaggccctgggtcagcaaatgacgtacaagctgggggtaatctaatgaagagtgtagaaactgtagtgtatctgatagtgcaagcacatcacaggtgtgtagagatactgattccattcactctctggatgctgaacgaagctgaggcagcagaacccctaggctggtatctgctaccagctgccttgtccatttaccttggtgggtgataaaaatattatcattttctatgtgtgccatgatgtgagaaagactggaagcactgtactaatactaatgtccttgaatattatatgatataacacatgaatggtattcacagcatagtcaagggagttcatgaa

SEQ ID NO: 407734 - DNA, 566 bp, Homo sapiens
ataagggcacaaaaattttgtcctatttcttctagaatttttatggttacttgtgtttgggtctgtgattcattttcagttaatatttgtacatggtatggggtaagaatcgaggttcacttttttgcatatggatgtccaattgttccagcatcatatattgaagactgtcctttccctattgagttatcttggcacctatgctgaaaataaatactccaaaaacgtgtaggtctatttggactctctcatctgtttcactgatctgcatttctatctgtgccaataccatactgacttgattactttagctttaaaattaggtagtgtgcctcctcccaactttgttctttttctgtgcatgtgtgtgtgtgtgtgtgtgtgtgtgtgtgygcgtgtgtgtgtgtgtgtgtgtgtttggctgttcaaggtcctttgagtttttatttggaatcagtttatcactttctacagaaaagcctggtaggatttagaaaagaattacaccgactctatagataagtctatggaaaaatatctttacaatattgtcttctgatccctta

SEQ ID NO: 407735 - DNA, 572 bp, Homo sapiens
atactatacactattcttaaagttagtttggaaaataagcagtagttgagaaagcctccaaagtgaagatgatttagatttaaggtccattgtctgtactcggaagtattatacctggctgatttagcttaaatttgaaataaaattgtaatttaccctttaagtgatgtttagcaagaaytgagtttgttaggactaagagaatatgtgtatctacagtgctctgggtggaattggggcaggggactgtctggtttgttttgtttattgtaagacaatgtagtataatgaaaagaacacaggccctgggttttaaatccaaaatctactcttttactaattgtggtaaggctcaaattagatacagacatgaaaatatttcataaaccataaaaccatgtatctcagcattttttaatctttgcccctccctactttgagaaatagacaaatctcatgcctttcgaaagtgtaagtaagttcaaattaaatattgtgattagaagcaaaaaaacaaaagcctgctttgttttctccctcctttctcactttgagaatgacctctcagtgca

SEQ ID NO: 407736 - DNA, 656 bp, Homo sapiens
gtcaggtttcttagtacatagtaactaccaaaaactggccagcttttaaaatatgacagtagctaagttagaaagaattgcacaaaagtatctgaaaaaccattgaaaagaacagttttccaatattcgccacattatgccccaaaggcacaacaggaaattgaaatttggcatcaggccagctttaaagctttcatcattttaatcttgaaagattatgattccagctttaagaagcttatgtgatttatcttcataggccaaaccaaaaagtccgcagtcatttggaaataggccctgccattgtgttcagtgacatcttatattgtcaggaagtgatcaagtatgcaattattttgtgtaatccttgcattcctgttagtataagctagagaaaagaaaaaaaaattgatgatcatgttccttagtgtgaaactgcacaaaatgctgtcccattgctgatcccttctttccactaagaaataattatgccactgcggtagctacaactaaggtacaaygagaaaataattttcttgaaatgaacaggaagcttgagatggaaacacattttcattacttttccattttacttcaccaggattcaatttttccttgaaatagtatctacttataaaactaacataaagacacaa

SEQ ID NO: 407737 - DNA, 656 bp, Homo sapiens
gtcaggtttcttagtacatagtaactaccaaaaactggccagcttttaaaatatgacagtagctaagttagaaagaattgcacaaaagtatctgaaaaaccattgaaaagaacagttttccaatattcgccacattatgccccaaaggcacaacaggaaattgaaatttggcatcaggccagctttaaagctttcatcattttaatcttgaaagattatgattccagctttaagaagcttatgtgatttatcttcataggccaaaccaaaaagtccgcagtcatttggaaataggccctgccattgtgttcagtgacatcttatattgtcaggaagtgatcaagtatgcaattattttgtgtaatccttgcattcctgttagtataagctagagaaaagaaaaaaaaattgatgatcatgttccttagtgtgaaactgcacaaaatgctgtcccattgctgatcccttctttccactaagaaataattatgccactgcggtagctacaactaaggtacaacgagaaaataattytcttgaaatgaacaggaagcttgagatggaaacacattttcattacttttccattttacttcaccaggattcaatttttccttgaaatagtatctacttataaaactaacataaagacacaa

SEQ ID NO: 407738 - DNA, 620 bp, Homo sapiens
ttaaatgagggtttttctttatctggattcatccacccatgtgcaggtgagagagtaagcagagagttggatttaactggtatgtgattttgccagagaaagacaaggaaaaagaggagtaaagtcatcgaaggtgtrtgcaacaatttgatgataataattgctggtggaattttgcctgagtaaagtggcctgagtaataaagagggcacagtgtctcatgcctgtaattccagcaatttgggaggccaaggcgggaggattgcttgtgcccaggagttcgagaccagcctgggcaacatcaccagaccttgtctcaataaataataacaataaaaataaaacagggatgtagaatgtagggggtgttcaaaatatcatggtggtgaggataatggattggaagtgctggtgaattctaaggattgtgtgaattggggtgttagaggaagtgagctagaaagacccaaggtggtaataaaacagtaggaatcttgacattgagattgtaaagaaaatgctgttattgctagtgacaaagtctgaaatggccatgggaatgactgtaaactcataggttgtatgtgtttgcgcatgtgtgtgtgtgtgtgtgtatgcgt

SEQ ID NO: 407739 - DNA, 620 bp, Homo sapiens
ttaaatgagggtttttctttatctggattcatccacccatgtgcaggtgagagagtaagcagagagttggatttaactggtatgtgattttgccagagaaagacaaggaaaaagaggagtaaagtcatcgaaggtgtatgcaacaatttgatgataataattgctggtggaattttgcctgagtaaagtggcctgagtaataaagagggcacagtgtctcatgcctgtaattccagcaatttgggaggccaaggcgggaggattgcttgtgcccaggagttcgagaccagcctgggcaacatcaccagaccttgtctcaataaataataacaataaaaayaaaacagggatgtagaatgtagggggtgttcaaaatatcatggtggtgaggataatggattggaagtgctggtgaattctaaggattgtgtgaattggggtgttagaggaagtgagctagaaagacccaaggtggtaataaaacagtaggaatcttgacattgagattgtaaagaaaatgctgttattgctagtgacaaagtctgaaatggccatgggaatgactgtaaactcataggttgtatgtgtttgcgcatgtgtgtgtgtgtgtgtgtatgcgt

SEQ ID NO: 407740 - DNA, 589 bp, Homo sapiens
tagtttgatttgcatttcttaggctggaagtgagaatgagcaacttttcaaatgtttgctggcatttcctcttcataaattacctcattatgcccttcctatttttctattgagttgtttgtcatttatatctagatctgtatttgttccttgggcataaattcttttttctgcgtgttgcatgtattattctcctagtctctgcatacctttgaactttatttataaaatattttatcttaattttatttttatttgtaatactgtgaactcatgaaaattgttctctgtggaattaaatattatgccttaatcatatgttctctcatacagtttgtatttatttttattctttaatttttgagacagagttttgctcttgttgcccaagctggagtacaatggtgtggtctcagctcgctgcaacctccgcctcccaggttcaagtgattctcctgccycagcctcccaagtagctgggattacaggtgcccacccctacaccctgctaatttttgtattttttagtagagacagggtttcactgtgttggccaggctggtcttgaactcctgacctcaagtgattc

SEQ ID NO: 407741 - DNA, 574 bp, Homo sapiens
gcactcccctttaaccctaggacctctcttctgaagtcttcttttcttctgttcttcctgtatggattgatttctatccacctgctgcaccactgttaatgttctcccctttattgtcttttgctttgacttcactactgatctttcttttcctgatactgtttggtttgctcctcacttggctgggtggtatcctcaaccgactttctaagtaaagtgtgtaaaatgtaaaatttaggtgcccttgttatacctgaaaatgaaatattactttacctgtrtaatttataattttagctgggtagacaattttaggttgaaaatgaattttttcttcattgtcttatgatacccagtgattatacttaaacgttaaatttaagtataattcttgttcctttgtatgtgacttgttttaacttcctactcaatgtcttatggaagatgagaacatattctccttatcctgttcttaaattttactatgagatgtagaacttaaaaaaaacctacatggcatttgctaagttgtttaaattttaaaatttatgtctctttttaacttttgttaaat

SEQ ID NO: 407742 - DNA, 532 bp, Homo sapiens
tagccagttatctcacaccggcaagaacagtttctacatatgctgtcaggttctataactgtgtcttcaatctcagcccaaattcacatagaaaggatgaggytagggagagaggaaggtgagaagaagaaacaaggaagagaaaataatacttaaagataactcttatactttaggcaaagggtgctacttgagttttcacatttcatgatataatccgtttccaactcacaaatttaaacaaatgcctttgaactcacatattttaatttcttttttttttaacttaattttaagttccagaatacatgtgcaggacgtgcaggtttgttacataggtaaacgtgtgccatggtggcttgctgcacctactaacccatcacctaggtattaagccccacaggcattaactatttatcctgatgttctccctcctcctgccccatccccgaatggccccagtgtgtgttattcccctccctgtgtctatgtgttctcattgttcaactcccacttataagtaagaacatgc

SEQ ID NO: 407743 - DNA, 571 bp, Homo sapiens
caagaacaaaaaccttcagaatccaattttcaattcaaactctttttgactgctttgatttttaaatttccatttaacaagaatctcatgtaaagtaaacaaaaagggaatatttttaaagaagcaaggtatattatgcttttcggaattctgtaatatcagtttaattgggcctttggtatacggaccagggtgtatatgtctatatctacacagactgtccccagcttatgatggtttaactcaagctcatccaacctgcagcccataggctgcatgaagcccaggacggcttcgaatgtggcccaacataaattgggccttyttaaaacgttacaagatgttttcgagctttcttttttttttttttttttttttttttttttttagcttatcagctattgttagcgttagagtattttatgtgtggcccaagacaattcttctttcaatgtggcccagggaagccaaaagatttgacacccctgatttaacttaacaatttttcaactttatgatggtgcaaaagcaatacacattcagtataaactgcacttcgactactcatgca

SEQ ID NO: 407744 - DNA, 434 bp, Homo sapiens
tattattccaaatagtatgaatgtgctagagaggcaatactagactaaaaaaaacccacaggggtaggctttgagaaagaacaaaagtgtaaaagtgcctagggacaggaagtccccagaaactttaatcaaatattcccacccaaaggagaagtccctacctgtgagaagactcttttgagattgaacagagtatgattattatgaaagggtagagacagtatgtccagaaagtacccagaagtgagcaaaaagtaagttcagaaaatacaagagatagcagatgtayctgcacttgaaagcttcagcaaaacccaacttctaaaggtgagtccaatattttggaaataaagaatgtgaagagatctgaaaagctcagagctggggatagaaactcttctgtattcatgtaaggtctgaaagccagagaaaaa

SEQ ID NO: 407745 - DNA, 434 bp, Homo sapiens
tattattccaaatagtatgaatgtgctagagaggcaatactagactaaaaaaaacccacaggggtaggctttgagaaagaacaaaagtgtaaaagtgcctagggacaggaagtccccagaaactttaatcaaatattcccacccaaaggagaagtccctacctgtgagaagactcttttgagattgaacagagtatgattattatgaaagggtagagacagtatgtccagaaagtacccagaagtgagcaaaaagtaagttcagaaaatacaagagatagcagatgtacctgsacttgaaagcttcagcaaaacccaacttctaaaggtgagtccaatattttggaaataaagaatgtgaagagatctgaaaagctcagagctggggatagaaactcttctgtattcatgtaaggtctgaaagccagagaaaaa

SEQ ID NO: 407746 - DNA, 560 bp, Homo sapiens
gatcctagaaatatacatatacagatatatgtatatctgcagatacacacacacgcacacacacacacacagacatacacacacacacacattaaaaaccctctccttcacatcgaagggctctgacctaatttctgggcaccgtgccacatttctagtcattcaaatagatgagtcagtactccctgggcctcactctggctagrtccactcagagaccaaaacctcttcatctcctggcagacattctcaatgatgttctcatttcatttaaaagcaagattccttcgatccgcctgtgaggactaaggaagaaagcattctcactccatttaatcattttacgccaccacagactacccagcaggggactcacggcccactctctgtactttcaggtaactaccctcgttcacaggtcaatagttgctctcttccttcagaaataaaaatatttacctcccacataaaagagtagtcattcgacaagtagattttgcttttcattacataggaaataggtgaaaaaacttataaaaggacagtatctgctgttaacc

SEQ ID NO: 407747 - DNA, 560 bp, Homo sapiens
gatcctagaaatatacatatacagatatatgtatatctgcagatacacacacacgcacacacacacacacagacatacacacacacacacattaaaaaccctctccttcacatcgaagggctctgacctaatttctgggcaccgtgccacatttctagtcattcaaatagatgagtcagtactccctgggcctcactctggctagatccactcagagaccaaaacctcttcatctcctggcagacattctcaatgatgttytcatttcatttaaaagcaagattccttcgatccgcctgtgaggactaaggaagaaagcattctcactccatttaatcattttacgccaccacagactacccagcaggggactcacggcccactctctgtactttcaggtaactaccctcgttcacaggtcaatagttgctctcttccttcagaaataaaaatatttacctcccacataaaagagtagtcattcgacaagtagattttgcttttcattacataggaaataggtgaaaaaacttataaaaggacagtatctgctgttaacc

SEQ ID NO: 407748 - DNA, 535 bp, Homo sapiens
ttatagaacagccgggactagcttggcaaagttactggcaatggctgtgaagtggcaagtaaattgcctaaagagaagcaactgcctcagttaccagggctctgccaaaccttcatgagcaatatggtttgccttgcactgctgctagcatttgctagtgaatgtcaggttttttgctttacatgaactcatgaaacaattgctttcataggcaaagacaatcatctggtcactcaagactaaktatgagttaccctgggatcataggggcaaagagtgcaggaaatttctcactttgcaatttcctacctaccctaaagtcatttcgaatctaataggagagatgaaagcataaataattctaactctaccaacatacatggaggtatatagcttgcacagggcactccgtgggcatatgcattctcctttttcttttgtttgtttgtttttgagacaaggtcttggtatatcacccaggctggagtgcagtggcacaatcatagctcactgtaacctcaaatatcagggctct

SEQ ID NO: 407749 - DNA, 547 bp, Homo sapiens
gtaggcttcgaaataaattcaggattatttccaacttgaagggtttctccaattattccaaattttaggtgtcataggaccagaggtcaaggagataggcatgttagatatcagcttttttctacttttattcacttagagccccagaggcagaagggaaactacgagaagtttcattcatgatttttatttattgaaaagtaaagcttatgcttttatgtctgatcccacacaaattgcctcctacatatcatttctaatcatctaaaaccaaggaagatcatggatcaaccactttggttttacaggtgaggaaactgagacaggggcttccttctagttgtgacttactgatcgaggtgrgattggtacctaaatcctgaacctaaagttgacccacaacccctctgatttccttccacctccagccaggatttctttctggcccattgtattcatctcacatcccacagacccatctggcctatcgataaaaggaaagctagaattcaacagaagacccctctccccatttgaggtccaatgg

SEQ ID NO: 407750 - DNA, 530 bp, Homo sapiens
ccactgcactctagcctgggcgacaagagtgagataccgtctcaataaaaaaaaaattaaaaataaataaaaatagagattttgcaaaaaggcaagcatactattaaaatgatgctacctcttattaaaagtagatatctttaaatgtaaagaagacaataaaaatgatgcttgtatggaaactttacttggttatcaaactccaaggattctgttttcaacatactaagaatgaattaattatactgataaaaaaattttactttatgttctaatacttctcagtattaatggtttaagtagccaaaggtataaataattaagagaccttatttaaaggtgcctctttttatccaacagtgcattttaagtaaatttagataatgtaaaaagtggtaatacgwagaaattaaaagttcggtctacatggttaaattgaagatgccaaatatgaacctgaacctcctccagtattattaatccattccatcaccccctaaacttttttttcctttctgcccctgcccatt

SEQ ID NO: 407751 - DNA, 507 bp, Homo sapiens
aatttctttgacaatagtatcatcatcaaaaccaagcgcaaaaagagagcatgaagctcaagaaaaatactgcattaaacaacattttcttacccaagaatgaaccccccacaagtcagaagtacgagaattttgttagcaatttacattatctgcaaaaccagacgcaaagtaaccatcagtaccattatccgaaggtaatagttctagatcatttgcaggtggggcattaagtctatggattataagattgtaatattagactggtattaaatcatctctgcacagttgaaatgatagttattactaggacagctgaaaagagaaaacagtttagtaggttttgaagggcagataattgactagaaaaaggataaggcatctaaggatragcttaaaataatgcaattgaaacacacctgaccagcagtctaccactatttagacacaaaatctacatttacattgcctgaagctatccaagaataactaaatccttaattagtg

SEQ ID NO: 407752 - DNA, 542 bp, Homo sapiens
ctcaagagtttctgaattgtcttcttccttccctcttgacttttctaatgcataattctggttctcatatttttataaccactcctgcacatctttcactagtttctttttcttttcctgtggacagctcaagactacagcacaatgtctcatatggtcagcagctaagaaactaagatggaagaaaaatatgaaaggtaatagatcaagtcattagtccataactaatggaaatcaaggagttgtagattatggaggtcagaataagagccatgatcctcaacttgagagtttagcaagacttgaaaaaggaaggcaaaacaggtagtcaaaataacaaagagayagaaatgatgttataaaagtgaagttatttgaataggtaatgaatgtagattgaggagcaaaggacttttctgacaaattcaaagccctctgttctccttatcttatagtctcttctttaatgagctcatctatttccacagtttcaatccttatctctaatctatttatagttacagttctagccactcacttaa

SEQ ID NO: 407753 - DNA, 542 bp, Homo sapiens
ctcaagagtttctgaattgtcttcttccttccctcttgacttttctaatgcataattctggttctcatatttttataaccactcctgcacatctttcactagtttctttttcttttcctgtggacagctcaagactacagcacaatgtctcatatggtcagcagctaagaaactaagatggaagaaaaatatgaaaggtaatagatcaagtcattagtccataactaatggaaatcaaggagttgtagattatggaggtcagaataagagccatgatcctcaacttgagagtttagcaagacttgaaaaaggaaggcaaaacaggtagtcaaaataacaaagagatagaaatgatgttataaaagtgaagttatttgaataggtaatgaatgtagattgaggagcaaaggacttttctgacaaattcaaagccctctgttctccttatcttatagtctcttctttaatgagctcatctatttccasagtttcaatccttatctctaatctatttatagttacagttctagccactcacttaa

SEQ ID NO: 407754 - DNA, 615 bp, Homo sapiens
ggtctcgctggctcagtagtgaagctgcagaccttcgcggtgagtgttacarctcttaaggcagcgcgtctggagttgtttgttcttcctgctgggctcctgatctcgctggcctcaggagtgaagctgcagatcttcgcggtgagtgttacagctcataaaagcagcgtggacccaaagagtgagcagtagcaagatttattgtaaagagtgaacgaacaaagcttccacagtgtggaagaccacctgaaccagttgccgatgctagctccggcagcctgcttttattctcttatctggccccacccacatcctgctgattggtagagccgagtggcctgttttgtcagggtgctgattggtgcgtttataatccctgagctagatacaaaggttctccacttccccatcagattagttagatacagagttttgacacacaggttttccaaggccccaccagagcagctagatacagattgtcgattggtgcatttacaaaccttgagctaaacacagggtgctgactggtgtgtttacaaaccttgagctagatacagagtgccgattggtgtatttacaatcgttgagctagacataaaggttctccacgtc

SEQ ID NO: 407755 - DNA, 615 bp, Homo sapiens
ggtctcgctggctcagtagtgaagctgcagaccttcgcggtgagtgttacagctcttaaggcagcgcgtctggagttgtttgttcttcctgctgggctcctgatctcgctggcctcaggagtgaagctgcagatcttcgcggtgagtgttacagctcataaaagcagcgtggacccaaagagtgagcagtagcaagatttattgtaaagagtgaacgaacaaagcttccacagtgtggaagacsacctgaaccagttgccgatgctagctccggcagcctgcttttattctcttatctggccccacccacatcctgctgattggtagagccgagtggcctgttttgtcagggtgctgattggtgcgtttataatccctgagctagatacaaaggttctccacttccccatcagattagttagatacagagttttgacacacaggttttccaaggccccaccagagcagctagatacagattgtcgattggtgcatttacaaaccttgagctaaacacagggtgctgactggtgtgtttacaaaccttgagctagatacagagtgccgattggtgtatttacaatcgttgagctagacataaaggttctccacgtc

SEQ ID NO: 407756 - DNA, 485 bp, Homo sapiens
caaaacaataaccccccacatttgcactgtagtccagcttattcaagcaaagctatctccagtagggaatttccccggtagggagcatgtgcactttgattttatctgtcctcagactgaccctgtgctcactataatactaaaaaacacacaccctgggtggagatttaagatgctaatgagacacgtgacatatgaacaggcatgtacagctactgtgcatgtgtgcccagaggrccacccagacacctcttcccacttgctcatggatgattacgtaagattcccataaagggagtctccctagtgccagtctttgctgtctcatcctcacgggcaggtcactctgactcccctctcagtgtgtattgcctattctgcacttaactttcaaaatattttttttcctttgcaataaattactctatgttgcatctcttttcctgtgtgttgcttgtgtaaattatttcaaactaagaagaaaa

SEQ ID NO: 407757 - DNA, 485 bp, Homo sapiens
caaaacaataaccccccacatttgcactgtagtccagcttattcaagcaaagctatctccagtagggaatttccccggtagggagcatgtgcactttgattttatctgtcctcagactgaccctgtgctcactataatactaaaaaacacacaccctgggtggagatttaagatgctaatgagacacgtgacatatgaacaggcatgtacagctactgtgcatgtgtgcccagagggmcacccagacacctcttcccacttgctcatggatgattacgtaagattcccataaagggagtctccctagtgccagtctttgctgtctcatcctcacgggcaggtcactctgactcccctctcagtgtgtattgcctattctgcacttaactttcaaaatattttttttcctttgcaataaattactctatgttgcatctcttttcctgtgtgttgcttgtgtaaattatttcaaactaagaagaaaa

SEQ ID NO: 407758 - DNA, 564 bp, Homo sapiens
tggaatagagattgtcagtttcttacaaaattaaacaaatatttactatatgatccaagagcagtagaagttcttggtacttccccaaaggaatcagaagcttattttcacaaaaaaaaccctacacatagatatttatagtagctttgttcataattgctaatgcttggaaacaatcaagatatccttcagtagrtgaatggataaagtattgtatattcagagaatgcaacattatacagcactaaaaaaaaataaactattatgccatgtaaagatatggaagaaacttttacatccattactatgtgaaataagccaatctgagaaaagttacatattgtatttcaacaatataatattctggaaaaggcaaaactgtggagactaaaaagatcactagctgtccagagttgagttgagggttgaggaaggcagaattagtagacagagcatagagcattttcaaggcagccaaagtatttggtatgatactataatggtggttacatgaaattcgttatacagttgtccaaatccacagaatgtacaacaccaaagtga

SEQ ID NO: 407759 - DNA, 564 bp, Homo sapiens
tggaatagagattgtcagtttcttacaaaattaaacaaatatttactatatgatccaagagcagtagaagttcttggtacttccccaaaggaatcagaagcttattttcacaaaaaaaaccctacacatagatatttatagtagctttgttcataattgctaatgcttggaaacaatcaagatatccttcagtaggtgaatggataaagtattgtatattcagagaatgcaacattatacagcactaaaaaaaaataaactattatgccatgtaaagatatggaagaaacttttacayccattactatgtgaaataagccaatctgagaaaagttacatattgtatttcaacaatataatattctggaaaaggcaaaactgtggagactaaaaagatcactagctgtccagagttgagttgagggttgaggaaggcagaattagtagacagagcatagagcattttcaaggcagccaaagtatttggtatgatactataatggtggttacatgaaattcgttatacagttgtccaaatccacagaatgtacaacaccaaagtga

SEQ ID NO: 407760 - DNA, 513 bp, Homo sapiens
agggtgtggtggcagatgcctgtaatcccagctactcaggaggctgaagcaggagaatcgcttgaacccaggaggcggaggttgcagagagctgagattgcaccacgcactccagcytaagggatagagagaatgagactctgtctcaaaaaaaaaaaaaaaaggaaaatcttgggagaaatccttgagaatttcatgcagcaggatgaaatgcaacaagttgtgtttatttcaagaaaaaaaggataactaaaccttataaaaatatttttattaaatccattatacaaatacatttataagactttttaaaagttataatcaatttgaatcatttgataaatttaacatcttttccctaatctcagaagcactcataaacttgtgtttccaaaaacatacttctgataacgtgattaaaaattttccatttggaccaacagtaagcatcaagtttaatggtgaaattctatagcaatgctgtccaatagaatttaaatcaatattgataat

SEQ ID NO: 407761 - DNA, 390 bp, Homo sapiens
ggtgggtggatcatctgaggtcagaagtttgtgaccagcctggccaacatggtgaaaccctaactctactaaaaatacaaaaattagctggggtttggtggcacgtgcttgtgattctagctactcaggaaggctgaggcaggagaatcgcatgaacccaagaggcagcagttgcggtgagctgagatcacaccactgcactccagcctgggcaacagagckagactctgtctcaaaaaaaaaaaaaaaaagtcatgaaatgcctgagtctatttctatggtatagaaaatctaaatatatttagatattttaataaacaaaaattgtgaaaatgtctttctagaaattatgaaatgatttcatctacaaatactgatataaaacagttc

SEQ ID NO: 407762 - DNA, 571 bp, Homo sapiens
atgccaaaataaaaaaggaagtataggacaaaactgaaggtttaaacaatttgtagaaagtttgtgaaagactaatctcgtgaaagattcagtatgtgatccaataggytaaaattaaaagggaatacttagattttttctttttttttttttttttttttttgagatggagtctggccctgtcacccaggctgaagtgcagtggcgcaatctcggctcacttcaatctcagcctcccgagttcaagagattctcctgcctcaccctcctgagtagctgggactacaggtgcccacaaccatgtctggttaattttttttgtagttttagtagagatggggtttaaccatattggcctggctggtcttgaacccctgaccttgtgatcttcccaccttggccttccaaagtgctggaactacaggcgtgggccacctcaactggctagggaatacttaatttttctaaatatttataattaatatcaaaatcatgctgacatagagagtgtgagagcctgtgttagaataacaggattttcttagagcattgatctgctctttaattgaaa

SEQ ID NO: 407763 - DNA, 650 bp, Homo sapiens
tatttgtttattgctctgagcaatatacctgtcgactgttagtaagcctctgatttggtatgaagtggctgcttacagaagtgacaggtctgaattacatagggcagtaattaataaatatgtactgatgtagtcataaggattcaattagtaaatacagtgaatttaatggaaaaattatcatcatttggggagctctctgtatctgactctaaacaataaaaagggtttatrtacatccactaatttttcttttaaattgcctatttttggttttgagatattacttgtatacgtgttagtatttaagtcacccacctacttatcaggcgaatttgggaattgtattactctttataaacagaaggtttcattcatagagaagagtaaataattatgtgaatgagatatattttatcaataaatgcagcacatgacactttccttcttttgtagacactacctactttgctttttaaatgtcatccatatttatcagaccacatgcttcttgacatttaggaattttaaaaatcaaattgtaactgaagctttgacaacaggagctgattaccaagggactgaagagtaacagtttttttttcaagcagtaggctacagtagaagtgtgaattatcagtcatttgtga

SEQ ID NO: 407764 - DNA, 600 bp, Homo sapiens
gtctctcagtcatatttttttttyctggatgtatctctagtcactctacacagtaacttctctaatgagtatttatcatgtgactgacacaaaaatttgtaaaaacctctgtatattgagatctatcaaattatgtattgatatagtatcaattcacttaccatactttaggaatgatatgtaaaaatcctcacattcctacatcaagggaaactttattgttctgaacagtacacaaatcagccatctttctttgatttaataattctggcttctattaccaattctcttgtttaggaaatccagttcatttcttttttattaaagatattattaatgcagttatttatgtgtaataaatatagagaatctaagattaaaagtgatcatcagtagttaaaacaatacacagaaaaggaacaatccaaaatccacaaccatctattcctctattaatggactacaattcataaaggctcggctaaaaatcctttaagctgattaaggtatcttaaatatgaatctttagaaggatgttttattaattttaagataatgctgagcagcagctatgtactagaaaaaaatgtagctgaaaag

SEQ ID NO: 407765 - DNA, 600 bp, Homo sapiens
gtctctcagtcatatttttttttcctggatgtatctctagtcactctacacagtaacttctctaatgagtatttatcatgtgactgacacaaaaatttgtaaaaacctctgtatattgagatctatcaaattatgtattgatatagtatcaattcacttaccatactttaggaatgatatgtaaaaatcctcacattcctacatcaagggaaactttattgttctgaacagtacacaaatcagccatctttctttgatttaataattctggcttctattaccaattctcttgtttaggaaatccagttcatttcttttttattaaagatattattaatgcagttatttatgtgtaataaatatagagaatctaagattaaaagtgatcatcagtagttaaaacaatacacagaaaaggaacaatccaaaatccacaaccatctattcctctattaatggactacaattcataaaggctcggctaaaaatcctttaagctgattaaggtatcttaaatatgaatytttagaaggatgttttattaattttaagataatgctgagcagcagctatgtactagaaaaaaatgtagctgaaaag

SEQ ID NO: 407766 - DNA, 551 bp, Homo sapiens
gctgtttgtaatattggtaatcattccttcacttattcactcatttattcaaaaaatattcaatgcaaattgtgttctgagcactgtgctttgtgccaggcaaacagtggtaaggaaagtaaggcacaatcacttcagtcaaggaatatacaaagtaatggggagacagaacttagtcaaataactacataaatgaatatatgagttcattgtgagataaatacttttaagaaaagtaatggaaagggaactttcctgaggatgtgtctttttgaatcaagagtgatggacagagaatgttctagtcaagggaatcagtcatgttaagttccctgtgccttagcctaagaactaaagaaagtaatttaatggtggagaatggatagaagaggagaagagctgaatgaagaaagagtaagcataagtgacaattgaagtcagacagaagagaaacaggggtgtcttgggttargtggtagtgttggagattgggagaaataaatatgtaggagataaaatgtaaaagacttattgataaattagatatgaga

SEQ ID NO: 407767 - DNA, 603 bp, Homo sapiens
tgtatctaattggataattggaattggaacatagacctaaacgtgaaagttaaacagtaaatcttctggtgtaacatatagaaaaatatcttcgcatggtacagataggcaaacatttcttaaatggaaataactaagtattgatggaaaattgacataatgaactttgttaaattaagaacttcagatcatcagaaaacattattaaaagattgaaaaggcacatcrcaaactgagataaatcatttatactgcacatttctaataaaatactgaaatctagagcatttaaagagttcttaactgtgcagaacacataaaataataactattaaaggaaaatattgacaaatcagtctaccaatattaaaaatctcttcaaaagatacttaagaaattaaataggcaagccacattggtacccaagagatatgaacaaatcctaaaacccaataataaaaatatagttaagcaatttaaaaaatgaggaacagatttcaacagacatgtcacaaaagaatatgtttagtacatttaaaagtgctcaaatcatttatgttttggaaattgcaaattaaaacaatgtaaaatatccctacaaag

SEQ ID NO: 407768 - DNA, 653 bp, Homo sapiens
acacgttcatgtcagcttgaaaattaaatgcctagatatttcctactggaatcaatactctatcatttctttttctcttttcaaaaagattatatcctttaaaaatgaaatactactaaaacctcctgtgtaatattggagtgttttttataaaaacaaacaaaaaaaggcaattgaaaattttaagcttmcaaacataggctacataacacagaattggtccttaagtttcttaaatttataaaaaatggtaaagagagaaatagagaaaattttctctgaattggacagtgtgtgcaatcccagttgcatagaaaattgtcttagactggaagctgctttgacaaacacaaaagactcctgcttaaacgccaggagactctgccaatctacccatagtactgcagttagctgacagacagatattaaacaaagttccttcactctgtgacttcctgttgatatgcttcataaacacctttcttcctaaaacaatgggcaaagaaaaacctggaagccttctttgcaattcatacatgataatgttgacagtcctaatcctagctcctccttaagggtgtttgtccgtcaactatcaaactgtaaaatacagtttacatcataaaatttctgcttccacacatgcaagtcac

SEQ ID NO: 407769 - DNA, 443 bp, Homo sapiens
ctaaccccttttggctttggagatccccacagggcagaatgagacaagtgtgaaaagtggtaacttgaggtaggcttgatctagttacgttaataaggtgactagttacaaagtgaggaaaggtgataagtttttcttagctttaatttggtagggctttcccctggaacaatggcccatgactgtggaggtggcaacactttgactygggtataatgagtccatcctttctctgctgtctggatgatggttacagtggtcaggagcactaggtaaggtccttcccaagctgatttgagctttgcttctttccatcctttgatgaggacatgaactccagggctggtgcctgtgctaagagacttttggttttaagagaagagaaagtggaagatagaacaagtatataaattttgaggaactgatctattgtttcaaatgta

SEQ ID NO: 407770 - DNA, 567 bp, Homo sapiens
accttgcgtttttcttattactagcttaggctgagcatgtctttatattgttactagctactcatatgaccttttctaagagttgtcatttttctaatgggtttttcattttcttagtggtttagtttakttaacaaatacacattgtggttattatgtgccaagtactgttctaacagcttgaaaagtatgaatttattaaaacttataacaactctgtgaggtaggtactattactatttctattctgcaaaatgaagagactgagcctagagaagttgaaacactttctcagggttatacagatggtaagtagctgaactgggattcaaactcctgcgggtggctagaaagtctgtactctcatttactatcttatatacaaaggttttctttaaatctattgtctgttttctatatcacagatatttttcacagtatatttgtttttgaatatcatttatgttttgacttagtcatatatttaaatcacatatcagtctatttaattacaaatgcctattttgatttgatcacacaccagtctacacagtgttttatttaaga

SEQ ID NO: 407771 - DNA, 567 bp, Homo sapiens
accttgcgtttttcttattactagcttaggctgagcatgtctttatattgttactagctactcatatgaccttttctaagagttgtcatttttctaatgggtttttcattttcttagtggtttagtttagttaacaaatacacattgtggttattatgtgccaagtactgttctaacagcttgaaaagtatgaatttattaaaacttataacaactctgtgaggtaggtactattactatttctattctgcaaaatgaagagactgagcctagagaagttgaaacactttctcagggttatacagatggtaagtagctgaactgggattcaaactcctgcgggtggctagaaagtctgtactctcatttactatcttatatacaaaggttttctttaaatctattgtctgttttctatatcacagatatttttcacagtatatttgtttttgaatatcatttatgttttgacttagtcatatatttaaatcacatatcagtctatttaattacamatgcctattttgatttgatcacacaccagtctacacagtgttttatttaaga

SEQ ID NO: 407772 - DNA, 545 bp, Homo sapiens
aactgatatggtcagaattaacattcaaaatacaagatgatgaagtcttagaggtctgctgtatacacartgtctgtagttaacatattgtgtactgaaaattttggtatgagggtagatcatatattgcgttactattacttctactactaataataaataaagggggtaggaggaaacctctggaggtgatgcataggtttacgacgtagattgcagtgctggtttcatgggtgtatacaaatccccaaactcaacaatctgtataagttaaatatgttcacctttccatatgtaaatcataccttagtaaactttaaaaatagttaaacttcagtaagattaatctgataataaggtcttgagtgggttggagagaatctggatgagacaagttaggaaactggggcaacctattggggggaagataaagagaatatgaacaagcacaagatgcaagaaggaaatgagaagcagaatgagaaccagcagggcttggtcaccaattagaaattgaaggtaaagagaaggagtcagagatgatt

SEQ ID NO: 407773 - DNA, 541 bp, Homo sapiens
acaaaacacagaaaatttcttttaactttttgtggtctcagaggtttgagggtgtaaggtaaggattacttaagaacaattaaagtggtatttgggaatggttttcttgtggagatctggctttaggtatacatggtaaactactgaggtgatttaagtctkcagcatatcaagtgtcctagtcactttgaactgctattacaaaatactgtagactgggtggcttataaacaacataaatttatttcttaaatttctggaggcaggaagtctgaggtcacttgggtgccagcattgcctggttctagtgagggccctccttcaagttacagacagccttcttctccttttatcctcacatggtagaaatatgggaagacaactctgcagtctcttttataaggacattaattccttccaaaagtttcaccactgaataccatcacattttgcattaggatttcaacatatggattttggggggacacaagcatttagtgcacaacaccaggctcctccttctctatatgtagttttatgg

SEQ ID NO: 407774 - DNA, 529 bp, Homo sapiens
acaacactccactacatagttactgctcagagagagaaatcactttaggtgcctctcttttgtgctccttaagcaccatgagcctctatctacaataacatgcatttaattagagctcaatttgagcagaagtcctatctgtattttccccatcattgtacccttagcacagatcacacagatgcttgattaaaacatagttggacaaatggaagatgggaatgagtgtgtcactgactgccttgcctgtgtgctctaatgcctagtactctgttagcacagagaaggtgcttagtaagagatatgtgttggccagaagaggaagacaactgtgagggcacgagaaaagacaatccattcattattctcattgccattagaataaagttagtaatacctatggctgttaaagttcatcttggttcaraccttgcttgtctatcctgcttcatcttttgcctcttaccagacatctgctttccctgcacaccactgcaaactgcataactgcaggcctaatcattcaagc

SEQ ID NO: 407775 - DNA, 541 bp, Homo sapiens
ccaactggtaagctggcttcactggggaaaaggagacggtaccatttcagctagcacagaaacttccatataaatgagagaatacgcacaattactggacatagcatgttgcccatgtgaataatatctttagatgataaaggcagaaataatattgaatacctctgcttggttatgctcggttgcctgctccttagctaccaggtctgtgattttagtagacacgtcctgtttttgctgacctccttggctttacttggtctagaatacactgaatgtgaatytccatgttctcttttttgttgaaaagaagcttcaagttcctaaagtctaggcacaagaaatgagcaaattatcttgcccctgagatttggaacagaaaagaatagacagtgttactaagaagactacccagtgtgattagtaaaatttaggctatgatctatctttttttttgtatcccaagtttaaaaacttatgcaagactgctaagtaaaggataaaatatttaatccataaatgagactcacattctaaatcc

SEQ ID NO: 407776 - DNA, 541 bp, Homo sapiens
ccaactggtaagctggcttcactggggaaaaggagacggtaccatttcagctagcacagaaacttccatataaatgagagaatacgcacaattactggacatagcatgttgcccatgtgaataatatctttagatgataaaggcagaaataatattgaatacctctgcttggttatgctcggttgcctgctccttagctaccaggtctgtgattttagtagacacgtcctgtttttgctgacctccttggctttacttggtctagaatacactgaatgtgaatctccatgttctcttttttgttgaaaagaagcttcaagttcctaaagtctaggcacaagaaatgagcaaattatcttgcccctgagatttggaacagaaaagaatagacagtgttactaagaagactacccagtgtgattagtaaaatttaggctatgatctatctttttttttgtatcccaagtttaaaaayttatgcaagactgctaagtaaaggataaaatatttaatccataaatgagactcacattctaaatcc

SEQ ID NO: 407777 - DNA, 606 bp, Homo sapiens
gatctcccgaattgctctttcggtaagggaacaattatttaaccctaactgactgtagatgtctccttggaactcagcctttgacatagatcctgaatgaaccacatgatgagctttaaatagtctgcttaaattgattaagatagtaagtgtttgctggcttttctgagaagattataaattatttttagaaaaacacaaaaatcaggttgagagagagacggagagatgcttcaattgggcaaagctttctggagaagtacattagaaaaatatatgtgatgaggcccatcctccctgtgtaactacaacagtggttatatctggatagcatcatttcacataggtttattttcttcctttttgttttcctattttattagatttctgtgttttgcttttgcaatcaatgaaaaataaaattgaaattaaaatattttaaattaaaaatatctgctgtctcgyagatagctataagcaaagatctcatcgttaagaaatcctgttctacatttagaattctctcttaaactacagaaatgacaattatttcctatttagttatgactctaggagataaaggtttagggcacagtttcccaaatt

SEQ ID NO: 407778 - DNA, 516 bp, Homo sapiens
gaagattaaaaactgcattgatcttttcaatcccacatctgtttgaaataattcaactaagtttctttttgtttcacccttcaattatggaccgtaaaacagtcacttgttgattgatttaatggaaaaaaaactattaaaatctttctttgtgcatraaaagccataagatacatcagaaatcttagatcccatgactgttgtttgtagtcaacagagaatataaactataggcagttttcctgataataaaaagtgagagtagtgtttctggaattaaaaaaataaaaagttggcaaaatagaattggttttcttttttctatgcttctctgccatccacatttagtgctaattctatctgaatggcagaaagtacaaatgaaaaatcacagtctaatcacatgctggccttataatatgttaccccagtcaatttcctgtacaatatatgcttcccttattcactttgcccctgtctgtgtatcagccactcctttacctgatagtttattaa

SEQ ID NO: 407779 - DNA, 408 bp, Homo sapiens
taatacttgtttttacattttctttgttaataataatgatcatgacgataactyatatttccaagtatccctctttatattctgtacattgatacacagagttctgtaaacacattttatttccatcatctcacttgctttcacttttgaattactgtaagattctcctgtgtactactgggagtcctttttccctgagaattactgtaattattcttctgccttattagctgctccctcacaggtgcctttgctggttcctactcatatccccagcctgttgatactgaagcatctcatgtctcagtatttgagtcttttctcttttatatcttgattatataatctaatctcttaccattaaatgctgtctatagggtgatgacccccacagttataacttcatcc

SEQ ID NO: 407780 - DNA, 547 bp, Homo sapiens
tcaacacttcatgacagatactttctcaggttttctgtcaacagctggccatttggtgtatactcatgtattttttcagtcagatgacagaaatgttttaaggggcttctccaatcacaaccaaaatagttttttctaaatatccgataccagcaacaataacttttcatggttttaagtttctattatatttcagaacatgaagaaggaagggaagaagggaggcctgttaaagrgttgcttgttgtgacctaagtaaaacacagggatggcatacattaaacgggtacagtgagattggagggaaatgaaagaatttaaatatataaggagctataaattatgtgacttggtgctatatttgtgtctttataaaaagagacactagagatcatgcttcgtatctctatccccaccccgtggaaagatgacagtgtggatgtggatgaccatgtggacatataaggagatgacagccatctctaaaccaggagaaggtccttcactagatgccatatctgctgccaacttgatctttgcaccagaa

SEQ ID NO: 407781 - DNA, 583 bp, Homo sapiens
aatccctgtgtcccaggactcttttagatagtctataatatcaaagttggttttagaatactgaggtatatttggcagacactatcttgaaaataaatgcagtgaacttgtcaacggcaagaaaaacagctgacaataattgttaccaatgataaaattcaaactttcaagaaaaaaattagaactttggaaaacttacatctgcttctgtgagcttgacagcttccattatttaaaacttttctgctgagatttggggtgatatcaatgaatgtgaattttaaaaatattgtataatgaaatggatcaacattttgaatattggtattatttagtgaaccagtattttatatataaccaaatcrtaatattacagagtgatacataagtaaaatttattttaaagtgtgaattagaccaattgattttaacttaacagaatgaaaaatatcattgatattttggattataccttccaactatcctgtaagaaactaccatttgttgagattgatgtagtagcaaagaatattcacaattacctaaaagagatgactaaatagatgtagttgtttatcaacta

SEQ ID NO: 407782 - DNA, 581 bp, Homo sapiens
acctctgctttctcctttgctagcatccttcatgctgcttttgttcctggcctcaaagcatcacatcagacaaccagagatgagaggaacatttttagaaatcctaatcaatctttgtaattcttagtagtctaagctgtattacaaattcatcaataaaatgcagagcacaacagcaaagaagagaggttctcagaagctaatataggtaggtacttttgacagaaaaaaggaggcaatagaagttgaagaggctgtcaagatccattcttttcagcacagctygcagttcactgaacatcaaataacgtcacggtacagtctacctttgaaggtgggaaaatgaaaggcaatacttttataaaatatttggttttatggtactcttatagataaaataatatagttataaaatattatattacgtgttttccaggaagtttttcaccatgtttaaacattcatttttctcttcacagttccttggcaggcattgtaagtagagaaactctgacactgaactattacaacatttacacaaattcaaacctggttgataccagtgcctttcatgattgcat

SEQ ID NO: 407783 - DNA, 581 bp, Homo sapiens
acctctgctttctcctttgctagcatccttcatgctgcttttgttcctggcctcaaagcatcacatcagacaaccagagatgagaggaacatttttagaaatcctaatcaatctttgtaattcttagtagtctaagctgtattacaaattcatcaataaaatgcagagcacaacagcaaagaagagaggttctcagaagctaatataggtaggtacttttgacagaaaaaaggaggcaatagaagttgaagaggctgtcaagatccattcttttcagcacagcttgcagttcactgaacatcaaataacrtcacggtacagtctacctttgaaggtgggaaaatgaaaggcaatacttttataaaatatttggttttatggtactcttatagataaaataatatagttataaaatattatattacgtgttttccaggaagtttttcaccatgtttaaacattcatttttctcttcacagttccttggcaggcattgtaagtagagaaactctgacactgaactattacaacatttacacaaattcaaacctggttgataccagtgcctttcatgattgcat

SEQ ID NO: 407784 - DNA, 609 bp, Homo sapiens
acatacagtttctcaaacttttatccagggtaatttttttactaacatagagaaaaataagaacaaatcttttccaatagtctatcaatataaagatctaagtaatagtctggtttttattatttattatatctgagtttccaaataagtttttatctcaggtttttggagacaaaactaatttcaaatatctgtttgcggtccccataaaccattaaaatatcctaaaaactccatcattacagcacttaaactacctttcccagacagtttctcatatccagtaatggcacaaaaataatttattggaacatgggtcctgattttggttttgtaacatatggttatacatttatataacacaatacagcactttaaaatagatggaacttgcataatttgcataggcttgcatgcttgccaatatcctcaggctcttttgtattacctcctttgtatattaaaattgcattgtttaggaattatacctagagttcatctgggatagaacagacccctactagttgcttgctgattaactagattgattattgatctgaytggatggaaaaacagaatgaagtttctattagagcaaagcttcttaag

SEQ ID NO: 407785 - DNA, 579 bp, Homo sapiens
ctgactggatggaaaaacagaatgaagtttctattagagcaaagcttcttaaggtcaatgattctatgaatataaaattaataatataaaccattctgaaaatggctgaaaatatccagcwaaagtaacatagaagaaaataaaacatcaatttctgattccatgtttttctgaaatttatgaattttttgatcatcttctataaacaatgaaaactactaatttgtgcaaactcagaactttctcccctctgcactaagaagtgatcacttccgtgctctccaggcctcacaccaaattgataatatactatgcttgcagcaaaaaaatggttctcctgctttcagggttacatcagaaatctttctttcttatttcaaaaatagtaaaaacatagcctagaaaattgctttggaggtgaaatagcaagacctttgtttatgagaaaaagaccaagtgtgtcattctcttgctctgccctgggccaaacatgtttatgtgctgaaagggaagaatcctcttcttcttacctaaaaatgtatagctttgtacatgtgccctatttaatatccccttggg

SEQ ID NO: 407786 - DNA, 579 bp, Homo sapiens
ctgactggatggaaaaacagaatgaagtttctattagagcaaagcttcttaaggtcaatgattctatgaatataaaattaataatataaaccattctgaaaatggctgaaaatatccagcaaaagtaacatagaagaaaataaaacatcaatttctgattccatgtttttctgaaatttatgaattttttgatcatcttctataaacaatgaaaactactaatttgtgcaaactcagaactttctcccctctgcactaagaagtgatcacttccgtgctctccaggcctcacaccaaattgataatayactatgcttgcagcaaaaaaatggttctcctgctttcagggttacatcagaaatctttctttcttatttcaaaaatagtaaaaacatagcctagaaaattgctttggaggtgaaatagcaagacctttgtttatgagaaaaagaccaagtgtgtcattctcttgctctgccctgggccaaacatgtttatgtgctgaaagggaagaatcctcttcttcttacctaaaaatgtatagctttgtacatgtgccctatttaatatccccttggg

SEQ ID NO: 407787 - DNA, 579 bp, Homo sapiens
ctgactggatggaaaaacagaatgaagtttctattagagcaaagcttcttaaggtcaatgattctatgaatataaaattaataatataaaccattctgaaaatggctgaaaatatccagcaaaagtaacatagaagaaaataaaacatcaatttctgattccatgtttttctgaaatttatgaattttttgatcatcttctataaacaatgaaaactactaatttgtgcaaactcagaactttctcccctctgcactaagaagtgatcacttccgtgctctccaggcctcacaccaaattgataatatactatgcttgcagcaaaaaaatggttctcctgctttcagggttacatcagaaatctttctttctyatttcaaaaatagtaaaaacatagcctagaaaattgctttggaggtgaaatagcaagacctttgtttatgagaaaaagaccaagtgtgtcattctcttgctctgccctgggccaaacatgtttatgtgctgaaagggaagaatcctcttcttcttacctaaaaatgtatagctttgtacatgtgccctatttaatatccccttggg

SEQ ID NO: 407788 - DNA, 559 bp, Homo sapiens
gacaatttggtgggcaagggactagggaattgtgcagctgatgggttggggatgcaatccagaggtgtggaaaacggtcctcatgcactgagcccatctcggtgggagactgaccacaggaccatttgagtcgtaagtccagatggaattgrtctgaaaaatatctcaaaagaccagtcttaggttctacaatactgatgttatctataggagcaactggggaagttacaaatcttgtgacctgtggccacatgactcctgagcagtaagggatcagagaaactacacctacattttagtaaaattcaggccctcccataatctcatggcctttcattagttttacaaaggcagttttggtccctgagaaagaagggggttcgttttagagaacgactattattatcctcattttcaagttaaactatcaactaaattcctcccatggttagcttggcctaggcccaggaatgagcacagtagccggcctgtgaggctagaagcaagatggagttagccatgctagacttctctcactgtcataatccttgtaaaagca

SEQ ID NO: 407789 - DNA, 559 bp, Homo sapiens
gacaatttggtgggcaagggactagggaattgtgcagctgatgggttggggatgcaatccagaggtgtggaaaacggtcctcatgcactgagcccatctcggtgggagactgaccacaggaccatttgagtcgtaagtccagatggaattggtctgaaaaatatctcaaaagaccagtcttaggttctacaatactgatgttatctataggagcaactggggaagttacaaatcttgtgacctgtggccacatgactcctgagcagtaagggatcagagaaactacacctacattttagtaaaattcaggccctcccataatctcatggcctttcattagttttacaaaggcagttttggtccctgagaaagaagggggttcgttttagagaacractattattatcctcattttcaagttaaactatcaactaaattcctcccatggttagcttggcctaggcccaggaatgagcacagtagccggcctgtgaggctagaagcaagatggagttagccatgctagacttctctcactgtcataatccttgtaaaagca

SEQ ID NO: 407790 - DNA, 559 bp, Homo sapiens
gacaatttggtgggcaagggactagggaattgtgcagctgatgggttggggatgcaatccagaggtgtggaaaacggtcctcatgcactgagcccatctcggtgggagactgaccacaggaccatttgagtcgtaagtccagatggaattggtctgaaaaatatctcaaaagaccagtcttaggttctacaatactgatgttatctataggagcaactggggaagttacaaatcttgtgacctgtggccacatgactcctgagcagtaagggatcagagaaactacacctacattttagtaaaattcaggccctcccataatctcatggcctttcattagttttacaaaggcagttttggtccctgagaaagaagggggttcgttttagagaacgactattattatcctcattttcaagttaaactatcaactaaattcctcccatggttagcttggcctaggcccaggaatgagcacagtagccrgcctgtgaggctagaagcaagatggagttagccatgctagacttctctcactgtcataatccttgtaaaagca

SEQ ID NO: 407791 - DNA, 591 bp, Homo sapiens
tcttctccactgaaataaacatgctgccaggacaggaaagagtggggtgtttttgttttgcctcatctaccacctagcatagtgctttgctgaaacgaaatgatctgaattaaattctagtgaaattagaaagcaactgcttcataagatcccctttttcctcaaaaatcagagcattggctcatggcaacytgcttccctatgtgtattttcttaatgcctccaatcctagtggagctaaatacactgaattagcaattaccgtagagcacatttagcagacttagaagcctctttgcccaccattggaatgcagccaccaggatacagcacaacagctgttcagcagctacagtaacacaacataaaaatttatgatgaataacccaactggcatgtatctcccatataacaggttgcatatttgcaatctcagagtctcttctagaccactttggaacttctagtaaagagaaagcatgataatattcttaaagtaattattttctaggaaaataaaagcaattcataatgtccttcaatcttgcccattagaaccagaggtgaaagtgacaggccacaaaaggccta

SEQ ID NO: 407792 - DNA, 609 bp, Homo sapiens
aagtcccttttgccctgtaaagtgacatattcataggttccagtgattaggacatatgcaagtttgggagcctattattcttcctaccacagcaagtaaaatctcaaatagacttaacaaaaaccacaaaaaacacttccctaaataatctctttccagtgtcagcttttttttttttttwatcaatagtaagatattttgtggagtatacacactaccattgtgcctttaaatacacaattatataactgttgctatctaatttcagaatgattttttctcctccatttatggaagcagcccactcatagtggttgctcaataagttttgtaacaaatttaattacaaatgagggctgtctccttaatctcttttgtcctcaaactaagagaatattgttgaatccagaataaagatctagtatgggatagatagacatatcagagggcttatagaatgatttgtagatggttcattcaaacatggattgttggtacatctgttgcattttgtgcctttcatgatgcagagtatgcttttcatgtataaaatcttgtgttgttgttttaaatttgatattaaaaaccccttgaaagcagaatcattca

SEQ ID NO: 407793 - DNA, 570 bp, Homo sapiens
  misc_feature (1)...(570): n = A,T,C or G
aagatcagtgttgagtatgacatagactagcaaaaattttgttgtgtttacwttaagggatatcatttttttacttcaagcctcctcattnttgaagccattatgagttgtagggaggaagcagaaaaattattaatctcctaactctgtaccttaacttcatctttcatgcttggtcagtacaataagtagcattcatattctttagaagtcagtaagacaattgaaagatctttaaatgtctctcaggagaccacatttgtagggaaagtgttggagattacatccaagtataaaacattaagagttagaaaaaattatcttccccataattgaggtgaactagcttaacttggtcaacttatttgataaagttggcaagtgtagcagagatagctagttgtccgctaactcatgctctccttcctccctagagaaagaagtgtagccagcgacatgactactcatttggaggtcatttcccaccttttctttcagtgaccaagtacttgctaatgaaatatgaatggaagtgataactggcatttcttggtctgggcctggagacat

SEQ ID NO: 407794 - DNA, 335 bp, Homo sapiens
ggggatagtttctaagctgtttaccagaagtttatgttggttcattaaaataacatcagctattgattggctatatattgtttyttatattataaatttcaggaacttgaagatagtggttgagggtcacattgtgtaacttgtagtaacatttgaagaaatttatcagctagtctggaaactacaggaaagaaagtaaaaacaaaatacctttcagcaattacccctgggcatggttgcaaaggatgtgactgaatcctcaagctcctgtttctctgggcctgataaattttgcagacctcacattcttcagactgctccaagtcacttttctt

SEQ ID NO: 407795 - DNA, 608 bp, Homo sapiens
taatgagaatagcatggaaaaaaatcacccacgtgattcagttacctcccaccaggtccctcccgtgacacatggggattattacaattcaaggtgagatttaggtggggacacagagccaaatcatatcagggtctgtgcaaagggagagcttggaagcttaagtcttattagctttatgacaatctcatcaaaaggtaatttttggcatttcttaggatttgcttgcagctgtgaggctgtcctataaaatgaagacaagcaactgtctatattccttctcaactccaaaayacttttataactttctagctaacccaaaagcattgttattaaatatttacagtaatctcatgttttaaagatgttaaacatccctggtaattattcctttgtttctagtctctgggcatttcagtatctcttaatgtggctgcctcctcacataattctcccctttgctgtctagccaggaaggactgcttctcttttcaaaccaatagagcatcactaaactgcctagctcttacctgcagggctaaggaaatctgtaaggacactgattggagaggaaaagccattgaaaaggtaggagcaagagggagaaa

SEQ ID NO: 407796 - DNA, 549 bp, Homo sapiens
ttaaaattgtaaattttaattgcttgctgataatttcctatactattataacaaaaatcccacagatttatgctgtataaattctaaagtgccatacaaaaggaaggtgaccagcatttattgaagactcgacaacactcagagttctttgcacattttgtttctatttctttctcacattgtcaggtgtatatcatcaatctcattttttattgctgggggagggtgttgcagctcagtgagtttcagtttcttaccagagatcacacacctaagtgggaacagaatctaaactcagttctgtgtgactttgagccctgtcttgtttccaatgcatctgaagcaactgaatctatactaacacagagcattattgagggtagaatgyctaaaaatgttcagaaaatcaagggccccacctctgacacaggttggccagcttaagctatgggaaacactaacagatctgctacttccaccagttcttggtcttcccttcttcttcctcattctcttgtcccagtagcaatatgctttatctcactatga

SEQ ID NO: 407797 - DNA, 581 bp, Homo sapiens
aacattaaaaaataccaaacattatcattaattggattattgctgagatcataagggattctttatctattgaaagagctgggattgtgttattacttagatagatttaagatatgctaattgtcctcattataataaaatttgggagtaaaaagaaatcgttgcaggcttttgtcagtgtgctgatgatctgtctcctgttttgtagccaactggacacggttgtggagattttacataggttcactagattttcttgagtagaaaagaaacccacagtctctctgtgtactaaacagaccgttggcaatatctaaacagctgttggctgtatgatacatatttggctaaaaacaaacccatctgtatttaatgcattattgccaamgtgtactaacatgctgtttccagtctgaaaacactggtaccctcatgtgagacgatcaaattgaaaatctcgcaacatggctcttgcacttcttggctatgcaaacagaaatcctaggagtgtgccagcggatggcagaacctgtttccagaggtttcagttgggaggtgaaggggaaggcagtggatagaca

SEQ ID NO: 407798 - DNA, 610 bp, Homo sapiens
tatctgtttgtgtataattttaatcttcttccctggttgtttaaaactcaattttttttaacttagtgaaaaccaaatttagttatgtaaaatatgtttttcttcaattctgagacttacatactgcaaacttttcaagaaaaagttaatttagttttggaaggaatgctttctctaatgagggctgtgttyattacacgggaagattctaggaaaaagaaaaaaaaagatttgaaagcaaaagaaaatattttatatttgttttgttttgtttagacatttaaaaaatatctgtttaatagaaaacattttttggggatgagtttttattacaaaacattgcacaccccttttgtagaaataaaaaaggtgacaaaggtacatttcagctgtgagagattttccctttgttggaatctgtaaaacacattataatcatgttgctgcatctagctactttctatggagaactggtgtcaaaaagggtcaaaaagtgcagcaagggcttccctttcttccatcctttaggggcagtatttctattaaaaattttgaaattgttagaattttttaaaaatctcaggcaaaatacattattggcgttttttga

SEQ ID NO: 407799 - DNA, 610 bp, Homo sapiens
tatctgtttgtgtataattttaatcttcttccctggttgtttaaaactcaattttttttaacttagtgaaaaccaaatttagttatgtaaaatatgtttttcttcaattctgagacttacatactgcaaacttttcaagaaaaagttaatttagttttggaaggaatgctttctctaatgagggctgtgttcrttacacgggaagattctaggaaaaagaaaaaaaaagatttgaaagcaaaagaaaatattttatatttgttttgttttgtttagacatttaaaaaatatctgtttaatagaaaacattttttggggatgagtttttattacaaaacattgcacaccccttttgtagaaataaaaaaggtgacaaaggtacatttcagctgtgagagattttccctttgttggaatctgtaaaacacattataatcatgttgctgcatctagctactttctatggagaactggtgtcaaaaagggtcaaaaagtgcagcaagggcttccctttcttccatcctttaggggcagtatttctattaaaaattttgaaattgttagaattttttaaaaatctcaggcaaaatacattattggcgttttttga

SEQ ID NO: 407800 - DNA, 509 bp, Homo sapiens
ctagggtttttctttgaacttccctttaatctgcatgatttctagtgggcagcctatctttaacttccatttacatgcaggggaatgtcttttctatcttgagcaccgatcccctcttgagygcagaccactgaattcaaccaccagctagacatagtcacctgagcaactcaaaacccagtgtccctaactgagctctttatctgcacccatttccagccaacgttctcttcctcctgttgtccagtaatatttgtcaaataaataaaagaggaaaacaaagggggaacataggaagatgagaaggcagaaaggtagaaactgtgtatttagagagtaaaatattcacatccattaaactattatacaatacttactgatggtcatgaaaaactgtgatttaagaaaatggtttaattcttatttaaggaaaactccctcccgtcccattgactttccctatcaagtgcccccttaaattcgttatactttaaagaatgtcattgtaa

SEQ ID NO: 407801 - DNA, 526 bp, Homo sapiens
ctcttcctcctgttgtccagtaatatttgtcaaataaataaaagaggaaaacaaagggggaacataggaagatgagaaggcagaaaggtagaaactgtgtatttagagagtaaaatattcacatccattaaactattatacaatacttactgatggtcatgaaaaactgtgatttaagaaaatggtttaattcttatttaaggaaaactccctcccgtcccattgactttccctatcaagtgcccccttaaattcgttatactttaaagaatgtcattgtaacctctctgtctaatccaccctaatcagggatccaactgcacagtctagtcctcgagaataactaagacatcttcagagatttcaggcttgtttttgacagaaagaccacaaagattcagagtcagccacactagtatttattttatatattaaacacatccagagcactaaccatgtaggtggtattttctaagctttccacawgcatcaaatcatgggattttataatctacaactctatgat

SEQ ID NO: 407802 - DNA, 569 bp, Homo sapiens
ttataacctctctattctctcccattattctgcctgcctattggtatgtcaatatcaaactatatatttaatacttggatttaaaaatatttcttactatctgaaagattccccaccctcccaaattattttggaaattttcagggtattttaatgtcactgtttctagaaagactttagttcataytattttttaaagttttcccaaagccttattcatcttttgagattgcaattatacatttttggggcatactgttatttttataaaattgaatcttcctattctcaaatagggtatgcattttcgttcatccatgacatttttattcctcagtagaggtgtaacattttctttttattggatctacacattgcttatgaagcttgctctaagatatcgtatctttctgaccgttttagtgaattgaatttttcttccactaactttccatttgtttctaattactgtgtatcttaataccataaccagtcaccttttaagatttattatttctactagtttttagctgacttatatgtgactagacatgtataatgtacaaata

SEQ ID NO: 407803 - DNA, 610 bp, Homo sapiens
tatctgtttgtgtataattttaatcttcttccctggttgtttaaaactcaattttttttaacttagtgaaaaccaaatttagttatgtaaaatatgtttttcttcaattctgagacttacatactgcaaacttttcaagaaaaagttaatttagttttggaaggaatgctttctctaatgagggctgtgttcattacacgggaagattctaggaaaaagaaaaaaaaagatttgaaagcaaaagaaaatattttatatttgttttgttttgtttagacatttaaaaaatatctgtttaatagaaaacattttttggggatgagtttttattacaaaacattgcacwccccttttgtagaaataaaaaaggtgacaaaggtacatttcagctgtgagagattttccctttgttggaatctgtaaaacacattataatcatgttgctgcatctagctactttctatggagaactggtgtcaaaaagggtcaaaaagtgcagcaagggcttccctttcttccatcctttaggggcagtatttctattaaaaattttgaaattgttagaattttttaaaaatctcaggcaaaatacattattggcgttttttga

SEQ ID NO: 407804 - DNA, 571 bp, Homo sapiens
ctgagtaacagagaagataagaaaagggaaaggagagaaggaaagtattgcctgtggcagggtggggaaggtgaatggtatagggaagccagagaaaagacccactcattgcascaacactgaaaagttcaggtggctgcttctcggtagcaaagggatctttttcagcagtctcgttagctctcattttccgttttatgaaggaaaaagttccccatgtcccacgatcctgtacatgcctaaccctgtcacccgcagccatcagcaaagagtgcaaggcagattaattagcagtaacctgttcttagtcaagagagactttacccagagaggcctctaaccccctaaatctttacaagggactctaaccttcctaagtcgggcctctaacccgaggtgggtcaagtgttcttgccttttattaagaggtgcctctaacctactttgtcttaggagagacgctagctcccctaagttaggcctttaacctaatctcattctttaccctggtaccccaccacttacccaaagttgttcaatcagcgctgaagtctatttcttttgggttggg

SEQ ID NO: 407805 - DNA, 498 bp, Homo sapiens
tgtggcagggtggggaaggtgaatggtatagggaagccagagaaaagacccactcattgcagcaacactgaaaagttcaggtggctgcttctcggtagcaaagggatctttttcagcagtctcgttagctctcattttccgttttatgaaggaaaaagttccccatgtcccacgatcctgtacatgcctaaccctgtcacccgcagccatcagcaaagagtgcaaggcagattaattagcagtaacctgttcttagtcaagagagactttacccagagaggcctctaaccccctaaatctttacaagggactctaaccttcctaagtcgggcctctaacccgaggtgggtcaagtgttcttgccttttattaagaggtgcctctaacctaytttgtcttaggagagacgctagctcccctaagttaggcctttaacctaatctcattctttaccctggtaccccaccacttacccaaagttgttcaatcagcgctgaa

SEQ ID NO: 407806 - DNA, 571 bp, Homo sapiens
ctgagtaacagagaagataagaaaagggaaaggagagaaggaaagtattgcctgtggcagggtggggaaggtgaatggtatagggaagccagagaaaagacccactcattgcagcaacactgaaaagttcaggtggctgcttctcggtagcaaagggatctttttcagcagtctcgttagctctcattttccgttttatgaaggaaaaagttccccatgtcccacgatcctgtacatgcctaaccctgtcacccgcagccatcagcaaagagtgcaaggcagattaattagcagtaacctgttcttagtcaagagagactttacccagagaggcctctaaccccctaaatctttacaagggactctaaccttcctaagtcgggcctctaacccgaggtgggtcaagtgttcttgccttttattaagaggtgcctctaacctactttgtcttaggagagacgctarctcccctaagttaggcctttaacctaatctcattctttaccctggtaccccaccacttacccaaagttgttcaatcagcgctgaagtctatttcttttgggttggg

SEQ ID NO: 407807 - DNA, 498 bp, Homo sapiens
tgtggcagggtggggaaggtgaatggtatagggaagccagagaaaagacccactcattgcagcaacactgaaaagttcaggtggctgcttctcggtagcaaagggatctttttcagcagtctcgttagctctcattttccgttttatgaaggaaaaagttccccatgtcccacgatcctgtacatgcctaaccctgtcacccgcagccatcagcaaagagtgcaaggcagattaattagcagtaacctgttcttagtcaagagagactttacccagagaggcctctaaccccctaaatctttacaagggactctaaccttcctaagtcgggcctctaacccgaggtgggtcaagtgttcttgccttttattaagaggtgcctctaacctactttgtcttaggagagacgctagctcccctaarttaggcctttaacctaatctcattctttaccctggtaccccaccacttacccaaagttgttcaatcagcgctgaa

SEQ ID NO: 407808 - DNA, 633 bp, Homo sapiens
tggataagaggccaagagcagaagaacccaggcagagagagctgcgtatttatcagaaaaatccagtaacatgacaggggtgcatgcagaaggatctcagatgcgtgcatatgttcagttttcttaattcccacgtcctaactccttaactgcaagctaaagggaagaactatttcttgaactagagcaatcaggtattagtcaggatccatctatttcattctcctttcacttcaaactgacaacaatctccgtatgatgggagggctaactgccccgtgccgtagttttcctcatacataaaggagggaacaatgcaatggttaataatatttgtgatatggaaggaaatgaccttgaacagaataaaatacaattaagcacatggtaatctttcttaaggtgactagagggtctcaattaattgtatttttctcatagaatataaaagtataaatcttttacctcttatgcttggtgtggggatggtaggtagaaagatttctacaaaaaaaccccaaaactaaacaacaacaaagcrtagatatcaagcagaaatttaatgttcttaaaaattctttagtcatgatttatcaaaacagaaactacagaggaggaagccagatgttacag

SEQ ID NO: 407809 - DNA, 606 bp, Homo sapiens
ttcacctacttatggatttcgctttgcacttgtccactctctctcctgcacatcatcaactttctcctctatagcagatttttatcagaatattaacaygtggcaatatcttctatgatgtaaaatttaaattgttcctcggcctgatgttcaagtgactctctcactcctgccccatttctctgctcctattttgaacgaatcacttctcaagagttacgtatatttgctgcctaaacttcattgtttgccattctgtccttaacccattcatttcagtacttcgtctgtatcattttagggaaaccactcttgtcagataaacaatgatttctaccttgtttaattcaatggtaaattctttgtgcctttcttattctacttctcagaaacatttgacacaaaagaaatactattttcacttggcttccaagataacagattcctctagtttaattttctattttggtggcagctgtttttggtctttgctggagtctcttcctgacccctaaattttgggatggtccaaaactcaaacctcttccatcttctcatgtctaattgctctcttcctagataattttgaacagatccatggtttta

SEQ ID NO: 407810 - DNA, 606 bp, Homo sapiens
ttcacctacttatggatttcgctttgcacttgtccactctctctcctgcacatcatcaactttctcctctatagcagatttttatcagaatattaacatgtggcaatatcttctatgatgtaaaatttaaattgttcctcggcctgatgttcaagtgactctctcactcctgccccatttctctgctcctattttgaacgaatcacttctcaagagttacgtatatttgctgcctaaacttcattgtttgccattctgtccttaacccattcatttcartacttcgtctgtatcattttagggaaaccactcttgtcagataaacaatgatttctaccttgtttaattcaatggtaaattctttgtgcctttcttattctacttctcagaaacatttgacacaaaagaaatactattttcacttggcttccaagataacagattcctctagtttaattttctattttggtggcagctgtttttggtctttgctggagtctcttcctgacccctaaattttgggatggtccaaaactcaaacctcttccatcttctcatgtctaattgctctcttcctagataattttgaacagatccatggtttta

SEQ ID NO: 407811 - DNA, 606 bp, Homo sapiens
ttcacctacttatggatttcgctttgcacttgtccactctctctcctgcacatcatcaactttctcctctatagcagatttttatcagaatattaacatgtggcaatatcttctatgatgtaaaatttaaattgttcctcggcctgatgttcaagtgactctctcactcctgccccatttctctgctcctattttgaacgaatcacttctcaagagttacgtatatttgctgcctaaacttcattgtttgccattctgtccttaacccattcatttcagtacttcgtctgtatcattttagggaaaccactcttgtcagataaacaatgatttctaccttgtttaattcaayggtaaattctttgtgcctttcttattctacttctcagaaacatttgacacaaaagaaatactattttcacttggcttccaagataacagattcctctagtttaattttctattttggtggcagctgtttttggtctttgctggagtctcttcctgacccctaaattttgggatggtccaaaactcaaacctcttccatcttctcatgtctaattgctctcttcctagataattttgaacagatccatggtttta

SEQ ID NO: 407812 - DNA, 529 bp, Homo sapiens
attctgataaactacaacctatctatcaacaaacctggtttgtttacctattaaggtagatgggatttgatcactgctcaccatttccagagctatcaccctcactcaagctgccatcacttttcacctaaactaccttagaaaccccctacctcatcttgttttgcccattcttgcttcaaagagtaatgttcatatggtagtgtggtgatttttaactcactttatgccattcccttgatcacccctttaatgtgctcttccccatttctgaaaacaggcagagtctgtgctatggacaagactctgtgtggttagtcttctgcttacctgtccagactcaattgctataaatattcctcttgctcacccactgatatggtttgactatgtccccacccaaatctcatcttgaattctagttcctataatccccacstgttgtgggaagaacccagtgggaggtaatttaatcatgggggcggttaccctcatgctgttcttatgatagcaagtgagttctcatgag

SEQ ID NO: 407813 - DNA, 529 bp, Homo sapiens
attctgataaactacaacctatctatcaacaaacctggtttgtttacctattaaggtagatgggatttgatcactgctcaccatttccagagctatcaccctcactcaagctgccatcacttttcacctaaactaccttagaaaccccctacctcatcttgttttgcccattcttgcttcaaagagtaatgttcatatggtagtgtggtgatttttaactcactttatgccattcccttgatcacccctttaatgtgctcttccccatttctgaaaacaggcagagtctgtgctatggacaagactctgtgtggttagtcttctgcttacctgtccagactcaattgctataaatattcctcttgctcacccactgatatggtttgactatgtccccacccaaatctcatcttgaattctagttcctataatccccacctgttgtgggaagaacccagtgggaggtaatttaatcatgggggcggttaccctcatgctgttctyatgatagcaagtgagttctcatgag

SEQ ID NO: 407814 - DNA, 613 bp, Homo sapiens
acctgtttgaccccttttgttccttctatgtgaggacacagcaacaaggcaccatcttggaagcagagagcagccctcaccagacattgaatcttctggcaccttaatcttggacttcccagcctctagaactgtgagaaataaatttctgttatttataaattaccaagtgtaaggtatgttgtgatagcagccctacctaactaggacaaatattttagcaatgaggaaaaaattattttcaataaagtgatcctggaacaaaaggatatctrtatgtgaaaaaaaaaaaaaccacccctagtttactacacataaaaaataattcaagaaaaatcacagacctaaacataaaagccaaaagtataaagcttcttagaagaaaacataagagaatattgtaagaccttgggataagcagtgatgttttatataggacagagaaacactaactataaaaaaattggataatttgggcttgcgcagtggctcacacctgtaatcccagcactttgggaagccgaggtccaaagatgtgtgaatggaaagtttactagagtccctgtagaaataaacagacatttaaccagactcttgaaagtcttataagttc

SEQ ID NO: 407815 - DNA, 611 bp, Homo sapiens
taactataaaaaaattggataatttgggcttgcgcagtggctcacacctgtaatcccagcactttgggaagccgaggtccaaagatgtgtgaatggaaagtttactagagtccctgtagaaataaacagacatttaaccagactcttgaaagtcttataagttccttgccaatctagccaattgaattctgcatccatatatatatatatrtataaatttatatatatatatataaatttatatatgtataaatttatatatatataaatttatatatatataaatttgttatggctgatggcttaaagcatggagaggatggcaagatagaacctggaaccaagaaagtgagaagattgagaggtgtagagaaggaaaaagttggtcctctaaaagtgcagtagaatgtccttgggtgtcccaatacacctttattgttcagatcaaaaatttaatgacattataggatattacaaaggcatttcaatatttgtgatattgtaatcagatagaattatgaaagtcattagttagagaacagactgtcctgaatgtcatgtctgttttacaaaggaagataatacaacaacaaatagtcataagaaaagaa

SEQ ID NO: 407816 - DNA, 603 bp, Homo sapiens
gttaaatccgtgacatatcattttacacttactagactgaaaaaaaacgttaaaaattgagaatgtggagcatccagaactctcagttattgcaggtaaagagtgcacaatggcactattaattttagaaaatttggaggtaacttttcttataaagttaaacatttgtatgccctatatccaagcaatttcattccccccaaaaagaaaatatattaatcttgatcaagaatgtttatagcagctttatttataattgccctaaacagaaaacacccaaatgtttataagccagagaatgagtaaacattttagtatattcctacaatggaaaactactcaggagtaagaaggaacaaacaacaacataagaaaatgtcaaaaacattattttgagcaaaagaagccaggcaccaaagagyatataccattggattttacctgtataaggttctagaacaggaaaactaacccacagtggtggaaaagcagaacagtggttgtcgctgggctagaagtagaattgactaagtattggcatgaggaaaccttttgtggaatggaaatgttccacattttgagaagccatgcattaaatgagta

SEQ ID NO: 407817 - DNA, 603 bp, Homo sapiens
gttaaatccgtgacatatcattttacacttactagactgaaaaaaaacgttaaaaattgagaatgtggagcatccagaactctcagttattgcaggtaaagagtgcacaatggcactattaattttagaaaatttggaggtaacttttcttataaagttaaacatttgtatgccctatatccaagcaatttcattccccccaaaaagaaaatatattaatcttgatcaagaatgtttatagcagctttatttataattgccctaaacagaaaacacccaaatgtttataagccagagaatgagtaaacattttagtatattcctacaatggaaaactactcaggagtaagaaggaacaaacaacaacataagaaaatgtcaaaaacattattttgagcaaaagaagccaggcaccaaagagcatataccattggattttacctgtataaggttctagaacaggaaaactaacccacagtggtggaaaagcagaacagtggttgtcgytgggctagaagtagaattgactaagtattggcatgaggaaaccttttgtggaatggaaatgttccacattttgagaagccatgcattaaatgagta

SEQ ID NO: 407818 - DNA, 483 bp, Homo sapiens
tcagtttggtggccagatcctgtaagccaacttttctggtactttctactttattctcctgaaatcttgttgcccttttcagcaatttctcatttgctgggcctttccctgctaagtctcgaaatagaaaagataaatacagtgataacaaaatccatggaaaatttttacaagaatttcctctccctttgagtccagtatccccagaaatggctactctgagaattaccccttctctttggctgtcctcatgcaccacaaagtttatacaaattttaattatttgtccaaagcactcagcccattatttctccagaatgtacaaaaacaatgacaaaaggcamccttgtagaaataattatacaatcatgaggaactaggggagttcatgccaaaaaaaaaaaaaaaaaaaaaaaaaaaaaaaaggacggaaaattttactgaaaatagagagaaaaaaattcaaatgaaagagaatcgtgt

SEQ ID NO: 407819 - DNA, 679 bp, Homo sapiens
ttggctgtcctcatgcaccacaaagtttatacaaattttaattatttgtccaaagcactcagcccattatttctccagaatgtacaaaaacaatgacaaaaggcaaccttgtagaaataattatacaatcatgaggaactaggggagttcatgccaaaaaaaaaaaaaaaaaaaaaaaaaaaaaaaaggacggaaaattttactgaaaakagagagaaaaaaattcaaatgaaagagaatcgtgtgttcctttctgaagatcaaagctattctgtcttgctagtgagcatccatttggaaatttcaagatacatatctcattttctatcttgcaaagtagaaaagcaaaagtactgtttctcttcatttagtaatcagagatttatttctgagatagttttacaatataccaatcaaatgaattgtagctaagtattcattttattcaggtgctaaaggtccagtgaactaatgaacaagaggaccatttgcttcattcaagagtgtagaattcctataccaaaaaaaaaggtgaaaagaaaagaaaaaaacaaaaacactgattcacaaacggtgttaaggaaatctgtaaaccagttttaaaaaaagatcaatcacctcctgcaatctaaaaattggggtataaagcaatttttataattccagatagcgctaaaga

SEQ ID NO: 407820 - DNA, 644 bp, Homo sapiens
gagagtttcatgtgaattgcattaatcatactcttttctggaaataatgattcaaagttaatttctacaatttctcatcttcgttggctccaattatttaaaacaattatgatttttgggtgaatggaatactctatgctaaatatcctatacaagattaactttcttgggaacttagttggtgtgtgagtacagctttacctctgatagaaacatgggggcagttattcaggatgctcccttttcaggttcctcaatttttaatgaatgttaatgtgtccctcaactgtcctacttgttacaccctatacaacctcatacatatgtaggaacagaaaaaacttcccctcctttaatggaatgtaagttcaaactcattgtccctggatagctttagaggttcaacagagagaagtaatcatttcacaatggatcaaactacagaatatttctgtaactgatttttattttgatataatatcaggtcctataagggacatcacaagacaggaawcattcttataaaattgatcgtttcacttattctttgtacatatattgttgagattgttgtcatagttgtatgtccccactataaatgacttttgtattatgtatctggatgagctacgattttcctgaaa

SEQ ID NO: 407821 - DNA, 481 bp, Homo sapiens
gaaaattactccatacctgatttatttctttgcttccatcactgccttttccacctataacaatgtgtggctcaacactgaatgagtgagataatacattttggctctaagacttctttatcgttctgttcccttctccctatatttaatatttatgttattgcctgtgtacttgtccscccgcaaaaggctgatatgtgtgcatgtgcatatgcatatgtgtatattaaattataaggtcttcgtgcctgggatttaactgtctatcccataatgtataggtgaataatagttctgaatgcaggtaagtatttaactaaatgtttataattgattttgataaattaactgcaagcaaacttcttgattgtgtggtatatgctcctattctctctatagaaaaaatgaatagggaaaaaaccataaacatattctcccattagtcactataaataaactttcacatttgccttcatctttc

SEQ ID NO: 407822 - DNA, 481 bp, Homo sapiens
gaaaattactccatacctgatttatttctttgcttccatcactgccttttccacctataacaatgtgtggctcaacactgaatgagtgagataatacattttggctctaagacttctttatcgttctgttcccttctccctatatttaatatttatgttattgcctgtgtacttgtccccccgcaaaaggctgatatgtgtgcatgtgcatrtgcatatgtgtatattaaattataaggtcttcgtgcctgggatttaactgtctatcccataatgtataggtgaataatagttctgaatgcaggtaagtatttaactaaatgtttataattgattttgataaattaactgcaagcaaacttcttgattgtgtggtatatgctcctattctctctatagaaaaaatgaatagggaaaaaaccataaacatattctcccattagtcactataaataaactttcacatttgccttcatctttc

SEQ ID NO: 407823 - DNA, 611 bp, Homo sapiens
caggtcgtatcaggcctggcaactttccatgcaaacaagaacatcaaagcaatgttcctgactcaayttgtctagaaatgtaactactaaacaataagataaaggtgaagagaaagccacaagtgaggagattgggagcattgtgtaattttaccccaatacatagattggatgaaaatcctctgggttgtaaaagtatagatattaaggtatttaagatatacatttagaattgcctcagccattattgattaattcctgcatttacaattcttgccctaaactcagaacttttataaaatttttgagttgatatgtctttgatatttccagctcaatcaacatcccctgacacataagtaggagcccaataaatatttgttaaataaatgcatgactgaataaatcgatggactgacatttaacactcatctcatctttgctttatccctatagtgatgaggaactcaccagttcataagaaaacccatcccactattgaagagtgttttattttttagtctattttttccttataatgagccaatattttcttcatggcaacttccattaggaattgccatggctagaagtcaatagttttgatttga

SEQ ID NO: 407824 - DNA, 582 bp, Homo sapiens
atggctacacatagtcctaattcatatcattttctgtaccattttttaaaaatgtacactttataggaatctgtgaagtggatatatttcagtcttgctgaggctgaataagccgaatgtagggcaacggtttttaacatcgcctagacaatagaaggaccaaacatgtactctagtattaaattctgagcaggtatcttcaagaacaattttcctgagcattctgttytgggaacacgctcctctcaaaccttcttccatatccttctgccatttctatgatagagcccactgggaaacatgaacaatacaatagaaatatatagagatacacaagttaaagcccctgtcctaaagctttacagcacatacaatgaatagcttgctaaacgtctacacctacatgatcctggcagataaaactgagcactaagaaaaaaaaaaaaaaagctccattccctgggcttctttttggctagtgctcttgttacttgcatcaacaatcacacgaatacttgtgtgactttaattgggaactggaacggtggggtagtcacagcatatctatagttttagtaagga

SEQ ID NO: 407825 - DNA, 648 bp, Homo sapiens
cctgccgttcttggccccctcctgcctatagataaccattgatctgttttctgtcactatagattaatctgaactttctagaattttatatatatgaaattatacagtttgtagtggtttttgtctggcttcattcacttagtgtaatgactttgacaattcatccatgttgttacatgtatcaagcatctattcctttctacttctgagtactcttccactgtatggatataccacatattattgatctattcatttatgatggacatgtggattctttcctgtttgaggctattagaaataaaattgataagcrcattcatgtacaattatttatgtggacatagtctcatttttttctcttgggtaatagctaggagaagagtaattggatcataggggaggtttatgttaaactttagacttctttactatggagagaagaagggtggtgatgctggttcagttgaaatagaagctctcggcaagctttatgatgactggattcagcgttgggatactcatagccttttttctcagctttgggttcttaggcaaatcatttaagctttctaggcctcagtttccttttcaataaggcaaaaattttggatgagatcagcctcctcaaagtttattcttagaaac

SEQ ID NO: 407826 - DNA, 575 bp, Homo sapiens
catttttttctcttgggtaatagctaggagaagagtaattggatcataggggaggtttatgttaaactttagacttctttactatggagagaagaagggtggtgatgctggttcagttgaaatagaagctctcggcaagctttatgatgactggattcagcgttgggatactyatagccttttttctcagctttgggttcttaggcaaatcatttaagctttctaggcctcagtttccttttcaataaggcaaaaattttggatgagatcagcctcctcaaagtttattcttagaaacatcatctttcaagatttttaattaaagtaattatgtatggccgagcacagtggctcacacctgtaatcccagcactttgggaggctgaggtgggcagatcacttgaggtcaggagttcgagaccagcctggtcaagatggcaaaaccccatctctagtaaaaatataaaaattagccaaacaaggtggtggtgcgtgcctgtaatcccggttactggggtggctgaggcatgagaatcacttgaaccccagaggtagaggctgcagtgagccaagat

SEQ ID NO: 407827 - DNA, 573 bp, Homo sapiens
tattcttagaaacatcatctttcaagatttttaattaaagtaattatgtatggccgagcacagtggctcacacctgtaatcccagcactttgggaggctgaggtgggcagatcacttgaggtcaggagttcgagaccagcctggtcaagatggcaaaaccccatctctagtaaaaatataaaaattagccaaacaaggtggtggtgcgtgcctgtaatcccggttactggggtggctgaggcatgagaatcacttgaaccccagaggtagaggctgcagtgagccaagattatgccactgccctccagcctgggtgacagagcgagactttgtctcaaaaaaaaaaaaaaaaaaaaaaaatagaaaagaaaaaaaatktatgtagtcaaacatgattgggaaaaatggcatatttaactcccttctggagagtcacaacataattaccttatgaagggccctgagaattcccataggaaagaggcctgtttaactttgggtcacctagcatttcccaaaattatttgccccagaacccttttcagattaatattctggaactgacacttcatg

SEQ ID NO: 407828 - DNA, 564 bp, Homo sapiens
gattgggaaaaatggcatatttaactcccttctggagagtcacaacataattaccttatgaagggccctgagaattcccataggaaagaggcctgtttaactttgggtcacctagcatttcccaaaattatttgccccagaacccttttcagattaatattctggaactgacacttcatgtaattcttattcaaaaaaaaaagaaagaaagaaatgatctttcccattagctccaaagatattgctttgctttgaaagatattactcctccacactsacaaagaaaagcaggaagaatggaaatgagaagctgagttttctaacttctgtttattgcttttttcatactattacaacactcatcaactctttccctgtgccttttaagatggcaagtctaaagctgctagcctaggctaaggggcaagagtttcatgacagccaggtccctgggcctaattcttactaagaaagaatttactagcatttatcggctcttctagttacatttcctccctaagcagtgcttacaggactgaagattctgtggaaagtgctaaatta

SEQ ID NO: 407829 - DNA, 610 bp, Homo sapiens
catagaaagatcagaagaaggaggcagacgtaataattattgcaagagaagacatatagtctaaaaattgtgatgttttagtgtgttttggtgcagggtatatactctagccttgccataaatactaatctttgtccatgtatatacaagaaatgtgcatttctaaacttaacaggattgctatagatcatgaaagagctcacaaaactaccaaagcctctgaacgtggctctttagttaaaagccctgaacgactgggtccttctcagttttggaacttttactgtgctactacagaatagggactcagtacacttgtccaggggagttgaaataagtggaatatagttgaatgatctggtgtttagaactagctattactgaactcagcatgtgcatcctgttgatgctgcacatgctcactgatgtagtaaaaaagaaaaatgaatcgttgggtttaaatgtcgaggatcttaccayggaaaggtagaaggtttgtgtacaggaagaaggatatggaaggccattccaaagactcctgataagtaatttattatgtgcaagagagcactaatctagaccacagcaagtagtaaatggaaagagcatc

SEQ ID NO: 407830 - DNA, 610 bp, Homo sapiens
catagaaagatcagaagaaggaggcagacgtaataattattgcaagagaagacatatagtctaaaaattgtgatgttttagtgtgttttggtgcagggtatatactctagccttgccataaatactaatctttgtccatgtatatacaagaaatgtgcatttctaaacttaacaggattgctatagatcatgaaagagctcacaaaactaccaaagcctctgaacgtggctctttagttaaaagccctgaacgactgggtccttctcagttttggaacttttactgtgctactacagaatagggactcagtacacttgtccaggggagttgaaataagtggaatatagttgaatgatctggtgtttagaactagctattactgaactcagcatgtgcatcctgttgatgctgcacatgctcactgatgtagtaaaaaagaaaaatgaatcgttgggtttaaatgtcgaggatcttaccacggaaargtagaaggtttgtgtacaggaagaaggatatggaaggccattccaaagactcctgataagtaatttattatgtgcaagagagcactaatctagaccacagcaagtagtaaatggaaagagcatc

SEQ ID NO: 407831 - DNA, 610 bp, Homo sapiens
catagaaagatcagaagaaggaggcagacgtaataattattgcaagagaagacatatagtctaaaaattgtgatgttttagtgtgttttggtgcagggtatatactctagccttgccataaatactaatctttgtccatgtatatacaagaaatgtgcatttctaaacttaacaggattgctatagatcatgaaagagctcacaaaactaccaaagcctctgaacgtggctctttagttaaaagccctgaacgactgggtccttctcagttttggaacttttactgtgctactacagaatagggactcagtacacttgtccaggggagttgaaataagtggaatatagttgaatgatctggtgtttagaactagctattactgaactcagcatgtgcatcctgttgatgctgcacatgctcactgatgtagtaaaaaagaaaaatgaatcgttgggtttaaatgtcgaggatcttaccacggaaaggtagaaggtttgtgtacaggaagaaggatatggaaggccattccaaagactcctgataagtaatttattaygtgcaagagagcactaatctagaccacagcaagtagtaaatggaaagagcatc

SEQ ID NO: 407832 - DNA, 607 bp, Homo sapiens
tctctcatggctcaacatctaaccatctggataagccacttcatccgtttaggccttcatttcccgatctatgagaggagtgagttggattaaattgatgagtggaatccttaggccttaaaattctgttctgcgtctgttatgggaagtttagtaaagagcaggggtgccagagactgtgctaaactttttcaaaggcttcatatcccttaatccttatttcatccctatacattacgtattattgccacccctccttttaaaataggagacccaaggcataatggtttagaacatgttcaaggtcacacagttagtaaatgttaaagctgggactctaactctgagcatatttattgttgcaagttttataggcagattaatgggaagcagccccagtcttatcctgaaaacaacaataaaaggatgatcactttagattgcatcctggtgcttaaaatagaactgtgacaygaattgtcatgaagtgattattttctcccttgtgccagatttaaataagtgggaagtgcagtcaaaacctgagaaaaatctccgtagggttttgaaatcatcattgggcatataatatgatggcactaaactc

SEQ ID NO: 407833 - DNA, 552 bp, Homo sapiens
gttgtgggtcacgatagcatagtggttaagagtgtaggctgaaggccaggtgaggtggctcatgcctgtaactccagcactttggaggctgaggcgggcagatcacctgaggtcaggagctcgaaaccagcctgaccaacatggtgaaaccccatctctactaaaaatacaaaattagccaggcatggtggcaagcgcctgcaatcccagctactcaggaagctgaggcaggagaatcgcttgrccccagcaggcagaggttgcagtgagccaagatcatgccattgcactccagcctgggcaacaagagcgaaactctgcctcaaaaaggaaaggaaaggaaaaggaaaaggaaaaggaaagaaaaaagaaaagaaaagaaaagaaaagaaaagaaaagaaaaggaaaggaaagaaaaaaaacatagagtgtaggctgagagctggcttgcctgggttggaatccaggctctgccacgtattagctgtgtgatactgaacaaattgtttcacttctctgtgccacactttaaattggaaataatattactg

SEQ ID NO: 407834 - DNA, 546 bp, Homo sapiens
ttaattcaggacatatttctcaccagccatcatgatttggggacagtcttcaattaatgggaatcatcacactatataacagatattatatatatatatatacatattacagatgttcttgctttattccttaaatatgttaaactctctgagagaagagcctatctatctctgtatcccaacacctcatcttaacccctaatcagttcttggcacaaacgagcagttagcacgtggtttttggattcaggaacaaatacatcaatgtgtggataaagggtgaaagtctggactttacaagatgtgatgctctgggcagtactctaagtttaaaacacttgtagatgatgtggaatttkcagatgctaaaaatatccacctcaagttattatttaaatataatgtaagaaaaagagtacattttcaccatctctttgtgtagctgccttcccatgaaacggacaattcgtaatctcctgatttttaggggaaaccttccttcctgaccatgataattagtctggatcttgtccagcttcattccgt

SEQ ID NO: 407835 - DNA, 590 bp, Homo sapiens
gttaaactctctgagagaagagcctatctatctctgtatcccaacacctcatcttaacccctaatcagttcttggcacaaacgagcagttagcacgtggtttttggattcaggaacaaatacatcaatgtgtggataaagggtgaaagtctggactttacaagatgtgatgctctgggcagtactctaagtttaaaacacttgtagatgatgtggaattttcagatgctaaaaatatccacctcaagttattatttaaatataatktaagaaaaagagtacattttcaccatctctttgtgtagctgccttcccatgaaacggacaattcgtaatctcctgatttttaggggaaaccttccttcctgaccatgataattagtctggatcttgtccagcttcattccgtatgctggagagggatgagcaaatgcatgatgcactcaggtgctgttgtaccatgttttgttttgttttgtttccagtgcaagtatggtcaatgctttttgttctgtttatacaaaactccatgaggaagcacagcatttcataggtctcttggctctggcagcattttcagccattaccttc

SEQ ID NO: 407836 - DNA, 590 bp, Homo sapiens
gttaaactctctgagagaagagcctatctatctctgtatcccaacacctcatcttaacccctaatcagttcttggcacaaacgagcagttagcacgtggtttttggattcaggaacaaatacatcaatgtgtggataaagggtgaaagtctggactttacaagatgtgatgctctgggcagtactctaagtttaaaacacttgtagatgatgtggaattttcagatgctaaaaatatccacctcaagttattatttaaatataatgtaagaaaaagagtacattttcaccatctctttgtgtagctgccttcccatgaaacggacaattcgtaatctcctgatttttaggggaaaccttccttcctgaccatgataattartctggatcttgtccagcttcattccgtatgctggagagggatgagcaaatgcatgatgcactcaggtgctgttgtaccatgttttgttttgttttgtttccagtgcaagtatggtcaatgctttttgttctgtttatacaaaactccatgaggaagcacagcatttcataggtctcttggctctggcagcattttcagccattaccttc

SEQ ID NO: 407837 - DNA, 626 bp, Homo sapiens
aatgccatggcaacatcaagaagttagcctatatagtctaaaaaggtgaggcatgaagaatccaccccttgtttagcatatcatcaagaagtaaccataaaaatgggcaaccagcagccctcagggctgctctatggaatagccattcttttattcctttacttttttaacaaacttgctttcactttgcactgtggacttgccctgaattctttcttgcacgagatccaagaaccctcttccggggtcaggrttgggattcccttcctgtaacaaatgtacttctgaatgtactctactgggggatgggtaaatacattgtactatatctgtacaatgggatattacttggtaataaaaatgaacaaagtactgatacatgctacaacatggatggatctcaaatgcattacactaattgaataagccagacatgaagctctaatattgtgttactccgtttatataacattctgacaaaggaaaactatagggacagagacaaattagtaattgtcagggggtaaaggcttaactgaaaaaggctagcacctgtgtgtgtggtgtgtgtgtgtgtgtgtgtgttgtgtatgtgtgtgcatatgggttgacagaaatattctgta

SEQ ID NO: 407838 - DNA, 626 bp, Homo sapiens
aatgccatggcaacatcaagaagttagcctatatagtctaaaaaggtgaggcatgaagaatccaccccttgtttagcatatcatcaagaagtaaccataaaaatgggcaaccagcagccctcagggctgctctatggaatagccattcttttattcctttacttttttaacaaacttgctttcactttgcactgtggacttgccctgaattctttcttgcacgagatccaagaaccctcttccggggtcagggttgggattcccttcctgtaacaaatgtacttctgaatgtactctactgggggatgggtaaatacattgtastatatctgtacaatgggatattacttggtaataaaaatgaacaaagtactgatacatgctacaacatggatggatctcaaatgcattacactaattgaataagccagacatgaagctctaatattgtgttactccgtttatataacattctgacaaaggaaaactatagggacagagacaaattagtaattgtcagggggtaaaggcttaactgaaaaaggctagcacctgtgtgtgtggtgtgtgtgtgtgtgtgtgtgttgtgtatgtgtgtgcatatgggttgacagaaatattctgta

SEQ ID NO: 407839 - DNA, 626 bp, Homo sapiens
aatgccatggcaacatcaagaagttagcctatatagtctaaaaaggtgaggcatgaagaatccaccccttgtttagcatatcatcaagaagtaaccataaaaatgggcaaccagcagccctcagggctgctctatggaatagccattcttttattcctttacttttttaacaaacttgctttcactttgcactgtggacttgccctgaattctttcttgcacgagatccaagaaccctcttccggggtcagggttgggattcccttcctgtaacaaatgtacttctgaatgtactctactgggggatgggtaaatacattgtactatatctgtacaatgggatwttacttggtaataaaaatgaacaaagtactgatacatgctacaacatggatggatctcaaatgcattacactaattgaataagccagacatgaagctctaatattgtgttactccgtttatataacattctgacaaaggaaaactatagggacagagacaaattagtaattgtcagggggtaaaggcttaactgaaaaaggctagcacctgtgtgtgtggtgtgtgtgtgtgtgtgtgtgttgtgtatgtgtgtgcatatgggttgacagaaatattctgta

SEQ ID NO: 407840 - DNA, 626 bp, Homo sapiens
aatgccatggcaacatcaagaagttagcctatatagtctaaaaaggtgaggcatgaagaatccaccccttgtttagcatatcatcaagaagtaaccataaaaatgggcaaccagcagccctcagggctgctctatggaatagccattcttttattcctttacttttttaacaaacttgctttcactttgcactgtggacttgccctgaattctttcttgcacgagatccaagaaccctcttccggggtcagggttgggattcccttcctgtaacaaatgtacttctgaatgtactctactgggggatgggtaaatacattgtactatatctgtacaatgggatattacttggtaataaaaatgaacaaagtactgatacatgctacaacatggatggatctcaaatgcattacactaattgaataagccagacatgaagctctaatattgtgttactccrtttatataacattctgacaaaggaaaactatagggacagagacaaattagtaattgtcagggggtaaaggcttaactgaaaaaggctagcacctgtgtgtgtggtgtgtgtgtgtgtgtgtgtgttgtgtatgtgtgtgcatatgggttgacagaaatattctgta

SEQ ID NO: 407841 - DNA, 509 bp, Homo sapiens
cgtacattgtttgtttctggtttactctgtcttcttgtagaggggggtctgacagttgttgcagggagggggaggtccaggatgacagctcaggaatgtgtaaattgaacaaaacaaaaacacaaacaaaacaaaataagaaagaaagagaggaagaaaaaaaagacttccccacccactgccagagcaggaatgtaagcactttcactggagttgctgaagcatcttgcaggctgcagrcagagaatgacagccaaggacagatgcagctgggatgcctgaagctgtcacagaggaagtggcctgctggagacaggttctagggagagcagagggacaagcccaggggaggagcagagaggcagagcaggagagggactctgccctctactccactccccaggattttaaaagcataagaatcctgaggctgaaatagtttaggctccccacatgccaagcagagaatacacagcacatctgttttgatgtgtatactttctacatgg

SEQ ID NO: 407842 - DNA, 509 bp, Homo sapiens
cgtacattgtttgtttctggtttactctgtcttcttgtagaggggggtctgacagttgttgcagggagggggaggtccaggatgacagctcaggaatgtgtaaattgaacaaaacaaaaacacaaacaaaacaaaataagaaagaaagagaggaagaaaaaaaagacttccccacccactgccagagcaggaatgtaagcactttcactggagttgctgaagcatcttgcaggctgcaggcagagratgacagccaaggacagatgcagctgggatgcctgaagctgtcacagaggaagtggcctgctggagacaggttctagggagagcagagggacaagcccaggggaggagcagagaggcagagcaggagagggactctgccctctactccactccccaggattttaaaagcataagaatcctgaggctgaaatagtttaggctccccacatgccaagcagagaatacacagcacatctgttttgatgtgtatactttctacatgg

SEQ ID NO: 407843 - DNA, 534 bp, Homo sapiens
ctccgcctcctgggttcgagcgattcttgtgtttcagcctccagagtagctgggattacaagtatgcaccacaacatctggttaatttttgtattttttggtagagatkggggggtttcaccatattgaccaggctggtctcgaactcctgacctcaagtgatccacccacttcagcctcccaaagtcctgtgataacaggcataagccactgcgcctggcccctgacaatattttcaattatatgaaatacaaaatgaaaatttagacatagccagaaatagcacagcaattaagaaaagaaaaaaaaatactacaaccaactattcactaatacgtgtgaaaacacagatgagctatctatctgaaaaaatatataaattaccgtggctgattattctttctataaacattcacaactgcttccagaagcttgccactcctccatggaagcaaagtctatttccactcctttgaacctgggcaggtatgtgcctgatctgaagagtagaatgtggctatagatagctatggg

SEQ ID NO: 407844 - DNA, 583 bp, Homo sapiens
ggactaaacaaatatccaataagagtgaggaaagaaaaaagacaatattttctttcttttctttttttttttttttttttgagacaaggtatcactttgttgcccaggctgaagtgcaatggcatgatctcagctcactgcaacctccgcctcctgggttcgagcgattcttgtgtttcagcctccagagtagctgggattacaagtatgcaccacaacatctggttaatttttgtattttttggtagagatgggggggtttcaccatattgaccaggctggtctcgaactcctgacctcaagtgatccacccacttcagcctcccaaagtcctgtgataacaggcataagccactgcgcctggcccctgacaatattttcaattataygaaatacaaaatgaaaatttagacatagccagaaatagcacagcaattaagaaaagaaaaaaaaatactacaaccaactattcactaatacgtgtgaaaacacagatgagctatctatctgaaaaaatatataaattaccgtggctgattattctttctataaacattcacaactgcttccagaagcttgccac

SEQ ID NO: 407845 - DNA, 575 bp, Homo sapiens
aaggtgtggttgctcacgcctaatcccagcactttgggaggccgaggtgagcagatcacttgaggtcaggagttcgagacctgcctggccaacatggcaaaacctggtctctactaaaaatacaaaaattagctgggcatagtggctcatgcctgtaatcccagctactcaggaggctgaggcaggagaatcacttgaacccrggaggcagaggttgcagtcagccaaggtcatgccactgtgacactgcactccatcctgggcgacacagtaagactctatctcagaaaaaaaaaaaaaaaagtaaaggcagtacaaaatattaacaatttcacttaagagcatagatgagcaaatcctaaataatagttatctgacaaaattggagagactgctaagaaaataaattcatcaagcaatattgatcctgagacagaaacgattgtttaacctcagaacatccatcaacataaggcatcctattagtggcctaaaggaggaaacaaagagtcatatatattttttcaataaatgtagaaaaatgacttttgatttagtttaatacacacttataa

SEQ ID NO: 407846 - DNA, 575 bp, Homo sapiens
aaggtgtggttgctcacgcctaatcccagcactttgggaggccgaggtgagcagatcacttgaggtcaggagttcgagacctgcctggccaacatggcaaaacctggtctctactaaaaatacaaaaattagctgggcatagtggctcatgcctgtaatcccagctactcaggaggctgaggcaggagaatcacttgaacccgggaggcagaggttgcagtcagccaaggtcatgccactgtgacactgcactccatcctgggcgacacagtaagactctatctcagaaaaaaaaaaaaaaaagtaaaggcagtacaaaatattaacaatttcacttaagagcatagatgagcaaatcstaaataatagttatctgacaaaattggagagactgctaagaaaataaattcatcaagcaatattgatcctgagacagaaacgattgtttaacctcagaacatccatcaacataaggcatcctattagtggcctaaaggaggaaacaaagagtcatatatattttttcaataaatgtagaaaaatgacttttgatttagtttaatacacacttataa

SEQ ID NO: 407847 - DNA, 575 bp, Homo sapiens
aaggtgtggttgctcacgcctaatcccagcactttgggaggccgaggtgagcagatcacttgaggtcaggagttcgagacctgcctggccaacatggcaaaacctggtctctactaaaaatacaaaaattagctgggcatagtggctcatgcctgtaatcccagctactcaggaggctgaggcaggagaatcacttgaacccgggaggcagaggttgcagtcagccaaggtcatgccactgtgacactgcactccatcctgggcgacacagtaagactctatctcagaaaaaaaaaaaaaaaagtaaaggcagtacaaaatattaacaatttcacttaagagcatagatgagcaaatcctaaataatagttatctgacaaaattggagagactrctaagaaaataaattcatcaagcaatattgatcctgagacagaaacgattgtttaacctcagaacatccatcaacataaggcatcctattagtggcctaaaggaggaaacaaagagtcatatatattttttcaataaatgtagaaaaatgacttttgatttagtttaatacacacttataa

SEQ ID NO: 407848 - DNA, 547 bp, Homo sapiens
tcacagatgaacactacattgttaagtaaaacaaaagaaaacacaacttttatgaaacgtgtttttattttttgaacatttatttagatccttaggagaaaaataacttttatgaagtcatttctatgaggttaacttgtatgaagttcattaacttttatgaagtttatgtaggctatgaacccatttaagacttggagacatgattacatgaaataacgaaaaagttaaatgtataaattttgtcatagtgagttctgataagatgatcaataacataatttcaaacatatttcattagaataaaaatcatgaggaaaatgaaatgggaacaaaagtgcaagagaaaaaagaacaatgtaagattggtgacagtttaaaragcttttattcagtgaagatgcaaatcgtatggtgtgcttagattgtttgttctaaatgccatttatgttttgactaacagaacaaaacaaaacaaaaaacttgtctgttggaaaaatggctgattctgggtctgcagcagagcatttataaggtgaggcttgcc

SEQ ID NO: 407849 - DNA, 587 bp, Homo sapiens
catgcctgaaagaaaggtgatattaaagaccactagggtcacatcaaaagaagacaaaagctaacagaaagaaatttctatggtcaaaaatggaaaaatctgagcaccaaaaagaataatgaccacaatcgattgaaacacatataaagtctagaagttcacagtgaccaaaaaaaaattcatttataaccatggaaggttgccagggcaacaactcattattctgaaaactgattaagggaacacatcaagtacttgtcttgtcttttctactgacctgtttttcaaagtaaccaaatagttgataaggaaaaaatttttataggaaagcaggaataataaatgcagaatgatagaaagtcactattttgcaaccttaatgsaatattggatctgatcacaggcagctgctgaaactatttaactgactgatgatgaattttaaatggatggatcaggctgacagcacctgaaccactgatcaatcttaacatcactaataatacggcaaagtgcctcatgatatgatatgacagaaaatactaagcatcacccatgaagtattcttgcaaacaaaacaaaataat

SEQ ID NO: 407850 - DNA, 552 bp, Homo sapiens
tatggcttaagaggctagccaggtatggtgcagttgaaattctgcatataactttttactctccaaaaactgtactgataatctattgttgacaagaagccttacgaataacataaaagtcaacatatactttgtatgtcatatgtattatatactgtattcttaccataatgtaagctagagcaaacaaaagttctggagaaattcattagaaatataaaatatatttactattcattacatggaaatggatcatcattaaatgtctttgtcctcataatcttcatattgagaaggagaagaaagagtaggggttgatcttattgtctcagaggtggcagaggcagaagaaaatcaatgtgtaggtagatctgtacagttcaaactcatattgttctagggttttatatatataattatatatataattagcaaaattatatatacgcaaawttccatgtatatacagtacacatatgtatgatacgtatgagtataaacctatatatatgtgtgagtgtgtgtgtgtatctggtttatatgatatattta

SEQ ID NO: 407851 - DNA, 390 bp, Homo sapiens
aggctttgacaatgaagttaccttgaagtcttcaacttttacttttaaggatctcaccaagwctagagagggaattaacagatatactctgtacccagcttctcatacagcagtgtggcacagaagcacaacagacaactgaccaactgggagaggcatatactgttggcagtctttgggtaacttaagattcttttaagctttcatcaattatagcagaggtttgactgtcaaatttgccagtactttggaaatttctactttctcagatcacataacagggcatagagaaaaaaatgtgtagatgaataaacatgttaacagtggttactactggggagtgggattatggggtatttcagaagagacttccatttttactttacattc

SEQ ID NO: 407852 - DNA, 627 bp, Homo sapiens
caatttgaaacaatggccttgttttcagaaatccttcaccataaaatattttgctatttcattagtcaccattaaaagtgttaaaaatgattcattcaatactttgtattttctattaaggaggaataaaagtattgactcattcaatactttttattttcctattaaggaggaaggtttacatgcttggtgttttctctccagggttcagagttcatgagaatcacattctcttgatatgggctatttcctagcctgaaacagagaaaggccaygcatacatcccaggattttagccattgttaccagcagtagaaactttgacaggccttcctggagaccatccaccactagccagagttcatgggcaagactaggtaccccggaatcagggcctcgagcatggcaagcaagcatggggtccaggttggtgggcaaatgtcatagcctcagtatgacaatggccagcaaaggccagtgatagagttggatgaagcttaggtatcagtatataggagcaaggcaaggggtcacttattgtagacttagtgcatagaaacatttaaaaagcacagtaccaggcattatgccaggcactgggaggcacacagatgagtgaagaggggt

SEQ ID NO: 407853 - DNA, 521 bp, Homo sapiens
ttcatgtactctaacaaaaccttttcagttatacagacaggtaactatctcctatttcccaaattttcagaatgagtaaattccagaggcactgatgataccaatatactcatattacctcaagtgaagaaagaaaggaacacacgaacacagatagtacctggaatagtgattatttaatagtaagtgatggattagtaagtgaatgtgtaagtgacatcagcaaaattgagtgaagatcccagtgacatctagatgtgattagaaactcttaccatttcaacacttrtaagttcaggacattcatttattttatatttatttattgagtcacttgtcatttatgtgccactttctgttttctaaatgctttacaatattagaatctaggaagacagtggtgaggaagacagattcagtccttgttcttgtgaagtttacattccagtagaaggggcaggaccacaccctcccatcgcacacacatacacacagaacatgaacacggaccacaagagagc

SEQ ID NO: 407854 - DNA, 521 bp, Homo sapiens
ttcatgtactctaacaaaaccttttcagttatacagacaggtaactatctcctatttcccaaattttcagaatgagtaaattccagaggcactgatgataccaatatactcatattacctcaagtgaagaaagaaaggaacacacgaacacagatagtacctggaatagtgattatttaatagtaagtgatggattagtaagtgaatgtgtaagtgacatcagcaaaattgagtgaagatcccagtgacatctagatgtgattagaaactcttaccatttcaacacttataagttcaggacattcatttattttatatttatttattgartcacttgtcatttatgtgccactttctgttttctaaatgctttacaatattagaatctaggaagacagtggtgaggaagacagattcagtccttgttcttgtgaagtttacattccagtagaaggggcaggaccacaccctcccatcgcacacacatacacacagaacatgaacacggaccacaagagagc

SEQ ID NO: 407855 - DNA, 574 bp, Homo sapiens
attttcttaatccagtctttgtatatgccaagaggtaggggtcttgttttattcttctgcatatggatatccagttttcccagcaccrtttattgaagagactgttctatctccaatatatgttcttggtacctttgttttaaggtatgaattcactgttgataagtggatttgttttgtgggttccccattctgttccattggtctatgtgtctgtttttatgccagtaaaatgctgttttggttactgtagctttgttgtaaaatttgaagtcaggtaatgtgattcctccagctttgttctttttgctcaagacagctttggtattctgggtcttttgtgatttcatataaattttaggattgtttcttctatttctgtgaagaatatctttggtattttgataaggattgcactgagtccgtagattgctttggatagtatggacattttaataatgttgattcttccatcctatgaacatggaatattcttgcattgttttgtattctcctaaattctttcatcagtgttttataggtttcatcatagagatctaaaaattcattggtt

SEQ ID NO: 407856 - DNA, 637 bp, Homo sapiens
catcttgatagtgataggtctctgagacatgaaaaataaacacgtattccacaaatagattttagtatcttacagatgtctgaaaaawtcaagttatcaaatagcaatagaagtttctagcttctaaattatttctgacataaaaagtatagaacggcaaaatagttaagatttatctcagaacacactaacttgagaagatttatagaatattaaaatagaaaaatagccaacaggattaaaaggcttgtttgtacctgtcctttggaaggctctccaggtattggtattcataaatttgagtattatgatctaagtttttctgtcactatgggcatatctgtattaggcggtaccccaagcccagcaattctgtgaggtgattctgctcttgcagaatcacagaggtgctgccttggtggtctcggagaagatcgggaaaaattttctagattgccaggcaaagactcttgttctcctctcttactttctcccaaacaaacagagtctttctctgtgctgagctgcctggagctgggagagaggtgacacaagctcacctgtggccgccaccaccactgggactgtgctgggtcagacctgaagccagcatggtactgggtctcacccaaggccc

SEQ ID NO: 407857 - DNA, 637 bp, Homo sapiens
catcttgatagtgataggtctctgagacatgaaaaataaacacgtattccacaaatagattttagtatcttacagatgtctgaaaaaatcaagttatcaaatagcaatagaagtttctagcttctaaattatttctgacataaaaagtatagaacggcaaaatagttaagatttatctcagaacacactaacttgagaagatttatagaatattaaaatagaaaaatagccaacaggattaaaaggcttgtttgtacctgtcctttggaakgctctccaggtattggtattcataaatttgagtattatgatctaagtttttctgtcactatgggcatatctgtattaggcggtaccccaagcccagcaattctgtgaggtgattctgctcttgcagaatcacagaggtgctgccttggtggtctcggagaagatcgggaaaaattttctagattgccaggcaaagactcttgttctcctctcttactttctcccaaacaaacagagtctttctctgtgctgagctgcctggagctgggagagaggtgacacaagctcacctgtggccgccaccaccactgggactgtgctgggtcagacctgaagccagcatggtactgggtctcacccaaggccc

SEQ ID NO: 407858 - DNA, 637 bp, Homo sapiens
catcttgatagtgataggtctctgagacatgaaaaataaacacgtattccacaaatagattttagtatcttacagatgtctgaaaaaatcaagttatcaaatagcaatagaagtttctagcttctaaattatttctgacataaaaagtatagaacggcaaaatagttaagatttatctcagaacacactaacttgagaagatttatagaatattaaaatagaaaaatagccaacaggattaaaaggcttgtttgtacctgtcctttggaaggctctccaggtattggtattcataaatttgagtattatgatctaagtttttctgtcactatgggcatatctgtattaggcggtaccccaagcccagcaatkctgtgaggtgattctgctcttgcagaatcacagaggtgctgccttggtggtctcggagaagatcgggaaaaattttctagattgccaggcaaagactcttgttctcctctcttactttctcccaaacaaacagagtctttctctgtgctgagctgcctggagctgggagagaggtgacacaagctcacctgtggccgccaccaccactgggactgtgctgggtcagacctgaagccagcatggtactgggtctcacccaaggccc

SEQ ID NO: 407859 - DNA, 583 bp, Homo sapiens
cctggctaccacgtatatttgctcaaggccctagggctctacaatcaggaggcagcaaagccagctaggcttgtatcctacccttcaggatggcaagttcccctttgtcctggggaggtctagggacacaatccaggagccagggcctggagtcagatactttagaaatcaacctgatgccctattgtactgcagctgagctggtactcacaagtcaaagtcyttcccactgttccctcccttttccacaagcagaagaacctctctccatggccaccactgcccaaggcccgtgatgagtactgccagggtactgctggtggtcactcaaggtccaagggctcttgagttagcttgtggtgagtgctgccaggcctgggactcactcttcagggcagcaggttcccctctggcccagggaaggtccagaaatgccagtcaagagacaaggcctggtactgggtaccccaagcctgcttggtgctctactccactgtgagcaagctagtacctatggtgcaagacaaagtccactttactttcccctctcattttcacaagcagaaatggtctctacccctag

SEQ ID NO: 407860 - DNA, 503 bp, Homo sapiens
gcccctgctgggagacagggaaggggtgctgtaggcaattcaacactgtttttcagtgcctcttttagtgatatgaagttaacaccaggtactgtgaccactcacctgatttttagttcttataaaggtgatttttttttgtgcagatagtcgcttaatgtggtgatcctgcagagaggatgatagtggaggcatctatccagctatcttgctccacctcccttactatgcaattttgctaatgtctattttttaacacggtatcattgtttctctaaacatagcctttaaataaataagacaggtaaaaattttaggtgaaaatgtctagcatatgataagaatatgcaaaaggaaaataaatccagtcaatgtgccttttcttccaagttgcacctttttactgcatagtcaaatgttgtcctcgaacattcttacagtataaacaaatactcaaatatgtgatttstaataaactctattatactcttattttacgaaga

SEQ ID NO: 407861 - DNA, 552 bp, Homo sapiens
gtcaacgcacaccattatctgaaataatcagagtttttttttaaaaaaaaacataatatcattctgttttgagctagtcgcaaagtactctttgttgtcttccatgatgttaaatgcttgagtctgactcgcccactgctaagagtgttgagtaggtatagctgatattctgtccccattgtaggccagcactaagacatctttactaatgtccagcaatagaaagacatctaaacccaagatatagtttaatgttacaaattcataaccactcatctttgctcataagcttgtctatgggctgaattgctggacatatatcttctaatatacatatacccactcttcagtagtgtacttttgtctttaatgaattccttattcactactttggaagggcaattatacacaactttacattcagaaaatatactaaatggtaactgtgggagaaaagtctatgagcttagcaatcgtagttgaacmacgttgtatatctgtacgcactactattctttacagtgccttagacggcccagtgaggaaaaggtg

SEQ ID NO: 407862 - DNA, 487 bp, Homo sapiens
ctaagtgaaataaaccaaacacacaaaaagataaatattgtatgtttccatttacacaaggttcctaaaataggcaaattcagagagacaaaaagtagaatagtcattagcatgggcttggagaaggaggaaatgttcttgcttgttggatacagagtttcagtttggaatgaygaaaaatatctgaagatagataatgtttgcataataatgtgaatgtacttcataccagtgaattgtacacttaatgatggttaaaatgataaaccttacattatgtatattttaccataataaatagacactacaaattaatcaagacagactccaaaaaatgttcaaataacaggaaagcaagtaaagagaaagagaaaaaagaaccagaggaaataaacaaaacaagtaattaaatggccaacttatatgccgacatttcaataattatcttaaatataaattatctaaatacaccaattaaaagataatt

SEQ ID NO: 407863 - DNA, 567 bp, Homo sapiens
tgccccaaacataatgcttaaccatttgccctaaaccatgcttgtttctggtgtttattttgttttctctcatttccttctctcataaactccatgaggcagagcccgtgcccatttttgaatcttggagtacctgatatacaaggcaccaaaattcccagcatgataaatcaaacaattaacaattctgtacatcagggtaaaactgcagataaagatatgctcatttgcagtttgcttttyaggtgattcactatagttagacaactaattcttcagcaacaacaatggaagtcaggagttagtggagtaatataaaaactaaaagaaaatactatcaacttagaatagtatattgagtaaaaatatcttccaagaacaaggcagaattaaggactttttaatataaattaaaaaaaatgaagagtttgttttgccagtggtgtttccctatagggaattccaaaagatatgttttagacagaaaaaaaaaaatgatacaagatggaaggctgagatgcaagaataatgatagacaagaaagtggcaaaaatgtgggtaaactga

SEQ ID NO: 407864 - DNA, 549 bp, Homo sapiens
ttagtacaaccacaatggaaaacagtttgccagtttctccaaatctaaaaatagagctattatatgacccagcaatctcactgctagatatattatgcaaagaaagtgaattcgtattatcgaagagatatctgcactctgcactcccgtgtttactgcagcactgttcacaatagacaaaktttggaaacaacctcagtgtccatcaacagatgaatgaagaaaatgtggtatataaatacaatggagtactgttagccataaaaaatgagatcttgtcatttgcaacaacatagatggaactggaggtcattatgttaagtaaaatatcctggcacaaaaagacaaacttcacatgttctcacttatttgtaggagctaaaattaaaacacttgagctcatggagatagaaaatagaatgatggttgtcagatgctgggaagtggaaggtggggaggaaatggggatggttaatgggtacataaatagaaagaatgactaagatctagtatgtgaccgcaaaacagggtgactacagtcaataataa

SEQ ID NO: 407865 - DNA, 549 bp, Homo sapiens
ttagtacaaccacaatggaaaacagtttgccagtttctccaaatctaaaaatagagctattatatgacccagcaatctcactgctagatatattatgcaaagaaagtgaattcgtattatcgaagagatatctgcactctgcactcccgtgtttactgcagcactgttcacaatagacaaagtttggaaacaacctcagtgtccatcaacagatgaatgaagaaaatgtggtatataaatacaatggagtactgttagccataaaaaatgagatcttgtcatttgcaacaacatagatggaactggaggtcattatgttaagtaaaatatcctggcacaaaaagacaaacttcacatgttctcacttatttgtaggagctaaaattaaaacacttgagctcatggagatagaaaatagaatgayggttgtcagatgctgggaagtggaaggtggggaggaaatggggatggttaatgggtacataaatagaaagaatgactaagatctagtatgtgaccgcaaaacagggtgactacagtcaataataa

SEQ ID NO: 407866 - DNA, 613 bp, Homo sapiens
aaatacaacccattttcagtgttttgagaaataaaagataaacccaagttatgtctgtcaacatggtttacagttttataaatttcaatttcaatggctttttttttttttttttttttttttttttttgagacrgagtctcactctgttgcccatgctggagtgcagtggcatgatcttggctcactgcaacctccgcctcccgggttcaagcaattctcctgcctcagcctcccgagtagctgggattgcaggcatgcgccaccatgcctggctaatttttgtatttttagtagagacggggtttggccaagttggccaggctggtctctaatgcctgacctcaggtgatccgcctgccttagccttccaaagtgctgggattacagacatgagccaccatgcctggcctcaatgttttttctctatcttcatgtagcatgaactttaggaccagattgcctgggttcaaatcttgcctcagccacttagttttctgacttgggcaagccatttaaagcctctgatccttgttaactttatctgtaaaatgaggataaaataatattacctgcctcataggattttgtgaggtttcaatcagtaagtacat

SEQ ID NO: 407867 - DNA, 613 bp, Homo sapiens
aaatacaacccattttcagtgttttgagaaataaaagataaacccaagttatgtctgtcaacatggtttacagttttataaatttcaatttcaatggctttttttttttttttttttttttttttttttgagacagagtctcactctgttgcccatgctggagtgcagtggcatgatcttggctcactgcaacctccgcctcccgggttcaagcaattctcctgcctcagcctccckagtagctgggattgcaggcatgcgccaccatgcctggctaatttttgtatttttagtagagacggggtttggccaagttggccaggctggtctctaatgcctgacctcaggtgatccgcctgccttagccttccaaagtgctgggattacagacatgagccaccatgcctggcctcaatgttttttctctatcttcatgtagcatgaactttaggaccagattgcctgggttcaaatcttgcctcagccacttagttttctgacttgggcaagccatttaaagcctctgatccttgttaactttatctgtaaaatgaggataaaataatattacctgcctcataggattttgtgaggtttcaatcagtaagtacat

SEQ ID NO: 407868 - DNA, 613 bp, Homo sapiens
aaatacaacccattttcagtgttttgagaaataaaagataaacccaagttatgtctgtcaacatggtttacagttttataaatttcaatttcaatggctttttttttttttttttttttttttttttttgagacagagtctcactctgttgcccatgctggagtgcagtggcatgatcttggctcactgcaacctccgcctcccgggttcaagcaattctcctgcctcagcctcccgagtagctgggattgcaggcatgcgccaccatgcctggctaatttttgtatttttagtagagacggggtttggccaagttggccaggctggtctctaatgcctgacctcaggtgatccgcctgccttagccttccaaagtgctgggattacagrcatgagccaccatgcctggcctcaatgttttttctctatcttcatgtagcatgaactttaggaccagattgcctgggttcaaatcttgcctcagccacttagttttctgacttgggcaagccatttaaagcctctgatccttgttaactttatctgtaaaatgaggataaaataatattacctgcctcataggattttgtgaggtttcaatcagtaagtacat

SEQ ID NO: 407869 - DNA, 613 bp, Homo sapiens
aaatacaacccattttcagtgttttgagaaataaaagataaacccaagttatgtctgtcaacatggtttacagttttataaatttcaatttcaatggctttttttttttttttttttttttttttttttgagacagagtctcactctgttgcccatgctggagtgcagtggcatgatcttggctcactgcaacctccgcctcccgggttcaagcaattctcctgcctcagcctcccgagtagctgggattgcaggcatgcgccaccatgcctggctaatttttgtatttttagtagagacggggtttggccaagttggccaggctggtctctaatgcctgacctcaggtgatccgcctgccttagccttccaaagtgctgggattacagacatgagccaccatgcctggcctcaatgttttttctctatcttcatgtagcakgaactttaggaccagattgcctgggttcaaatcttgcctcagccacttagttttctgacttgggcaagccatttaaagcctctgatccttgttaactttatctgtaaaatgaggataaaataatattacctgcctcataggattttgtgaggtttcaatcagtaagtacat

SEQ ID NO: 407870 - DNA, 540 bp, Homo sapiens
tccaggttcctgccttttctgagactgactctgcggccytctcttcaaatttgttagtttcctcaagatccttctaatacattcttgcttgcttatgttatccagagttagtttcttttttcagcaagaggccctaaaagactccatttataaagaaaaaaaaaaaaggaagcaatttttgcctgagttatgagtagattaaattcaatatgtacaaatggctccagtgacagcgggaattattgaacttaaactaagttatgttaacatgaatcactttgtaattatttcatatcactgatcatgactactgccaaatgagttatgagttgtaaagctataataaaaatattatgatgcaatattatcatacatgccaagtgaaacattccgttaaatctcttacctgaagaaaaatctgtagatgccatatgccatttaaagtatttcaggtatagcatcctggttgagcatcccaaattcaaaaatctgaaatccataatgctccagtaagcatttcttttaagcatcctgttggtg

SEQ ID NO: 407871 - DNA, 597 bp, Homo sapiens
atcctgttggtgcccaaaatgttttggattttggagcattttagatgtcagatttttggatttgggatgctcaatttgtatttctatttgtacaaggtaggcttcctctctgtttcatcaattataaaagataatgctattttcttcaaaatattgtgagttaaatgagatggtatctgtaaacgttcttagaagaacttctgtgaattatgaccccaatctaaatagacattccaaactattttctactgaaaacccaaggtcaggtttatatccytgatacatagaataaaaaagcctgatatctgaagttacttagatcatcagaaagcataaagctagctttttaatttaagtcaatttgacaacttcttgacaacattttgatgaattgtgttctcctttaattaaatagaagcagaaaagacgtctcagtgttgaaattttttaactatgtaaatacaccgtagaagttttgagaaataatacctctttttcactctcgatttttggtatccttccttcaaaaaacttactcagtaactacttgctgagaagttttattcagtaaatatgaacatgatgatacaagataat

SEQ ID NO: 407872 - DNA, 597 bp, Homo sapiens
atcctgttggtgcccaaaatgttttggattttggagcattttagatgtcagatttttggatttgggatgctcaatttgtatttctatttgtacaaggtaggcttcctctctgtttcatcaattataaaagataatgctattttcttcaaaatattgtgagttaaatgagatggtatctgtaaacgttcttagaagaacttctgtgaattatgaccccaatctaaatagacattccaaactattttctactgaaaacccaaggtcaggtttatatccctgatacatagaataaaaaagcctgatatctgaagttacttagatcatcagaaagcataaagctagctttttaatttaagtcaatttgacaacttcttgacaacattttgatgaattgtgttctcctttaattaaatagaagcagaaaagacgtctcagtgttgaaattttttaactatgtaaatacaccgtagaagttttgagaaataatacctctttttcactctcgatttttggtatccttccttcaaaaaacttactcagtaactacttrctgagaagttttattcagtaaatatgaacatgatgatacaagataat

SEQ ID NO: 407873 - DNA, 422 bp, Homo sapiens
ttgttttgaaatatacatacattgtggaaagggtaaatcaagctatcccttatagtcatttatctgggatggtcatctgccattatatagaaaaatgatacattattttgcttccatcatgaaaaccatcaggcgccagacatatctgcttctcaaaagcagttccccttcatcctcaaagccctcgacctagtaatgtatgattctgattttttgtagaatgtgtcttttcatyacaataaaatacactccatttctttgttttaggaagattatagctttctccccaggctttttaggggacaaagactattctccatatgacgaacctatcaagattcatcttgaaatattttatgcattctttttttaatccactggaattaattttgttcttggatcaccttttcaaggacacaatc

SEQ ID NO: 407874 - DNA, 587 bp, Homo sapiens
gtgttgtcctgaatattttggaaagaaacttaggcaatacttccattgactattgacaggccaatgatactgttctaagatttttttccttatcattagttttctaaacatttttaaatttatttttaattgataataaaaattgtatatatttatcatgtaccacatgttgttttgaaatatacatacattgtggaaagggtaaatcaagctatcccttatagtcatttatctgggatggtcatctgccattatatagaaaaatgatacattattttgcttccatcatgaaaaccatcaggcgccagacatatctgcttctcaaaagcagttccccttcatcctcaaagccctcgacctagtaatgtatgattctgattttttgtagaatgtgtcttttcatcacaataaaatacactccatttctttgttttrggaagattatagctttctccccaggctttttaggggacaaagactattctccatatgacgaacctatcaagattcatcttgaaatattttatgcattctttttttaatccactggaattaattttgttcttggatcaccttttcaaggacac

SEQ ID NO: 407875 - DNA, 611 bp, Homo sapiens
ttaactaactgcctaactgcctgttttaacattttcttatagagactgccgaatctgttcaattactcaaggggggaaaggggagacatttagacacgtkgacttaccatgactgtagacaaagcgagctagaaatatcgatggagagctgccctgaactccagactcatctgccgcctagtcatctccacctggatgtctattaccattctcaagcttaaaaacgaccttccaatctctccctctcagactattctcagcacagcagcagagcaatcctgttaaaaagtcagtcgaatcacgttactcctttcttaaaaacctaccgaatggcttcctttgttcctcagagtaaggcctaagtcatcattgagtccctgcctgaccttcataccccgccggccacatccttgtccatcactcccactgcttcagggcactggttcacatgcagtgccttgaattggtcaggcaccctccggcctcccgcccatgtatgtgctgcctttgcctggaatgctcagatacccacatagggcacttgtgcatctatttatgtctctatgcaaatatgccttgctcagcgaggctgtacccttcactcccctatt

SEQ ID NO: 407876 - DNA, 452 bp, Homo sapiens
tgggaacaaatggaaggtgtaattcacccattctgtgtggttaggggaagtttctaaggatgtgaattttaaacccaaacagaactgctaaagataatttaagctgaattagggcatgttcaagtcccatgaaaaaccatataatggctcaggaagagaagtattattggagtagagtggaagtcagattgcaatgaacgaaggagtaggcggcaggccaggaaatacagatattgaatattttgtgtccttgctttggcttttctattatttctgctatgccttatcttccaagagggcaagaactgtgtctttcttatacactatwatattcactccacctaacatagatcttggcaccaatttgtaccccccaaaattttgtatgatgaattaacctttataaatgatagttaaaattcaaacacgtattaagtaatgtagtatcctgc

SEQ ID NO: 407877 - DNA, 654 bp, Homo sapiens
gactttttaaaattacgattcatgagagaggacgtggagcattccatgggaacaaatggaaggtgtaattcacccattctgtgtggttaggggaagtttctaaggatgtgaattttaaacccaaacagaactgctaaagataatttaagctgaattagggcatgttcaagtcccatgaaaaaccatataatggctcaggaagagaagtattattggagtagagtggaagtcagattgcaatgaacgaaggagtaggcggcaggccaggaaatacagatattgaatattttgtgtccttgctttggcttttctattatttctgctatgccttatcttccaagagggcaagaactgtgtctttcttatacactataatattcactccacctaacatagatcttggcaccaatttgtaccccccaaaattttgtatgatgaattaacctttataaatgatagttaaaattcaaacacgtattaagtaatgtagtatcctgctttatagtatatttgtttatacatgttcttgttcccctcaaaaggatttacatttgatataaacaaattaartatatttaaatatgaggcctatgatctcctttaattttactaaattaaaacaggagagtatatacctcaaatgcgtgatagctg

SEQ ID NO: 407878 - DNA, 572 bp, Homo sapiens
attgtgtagaaattttctccgtgcagctgtactttcactgaaagtgaaaaatattatacagatgaggattcttagggtgaggtaacattgtaagtatttgaactaaaatggacacctggtatcatttagaagaagtaacaggttcattatttcaaaaaaatgcggatgatttctagtagataatacaatatgaggcatttattctgctccacacacataaatgatttttyagtaggggaaaaaagaaagcttaaaagacagacctagaattcaaaccaagataaacacattcctggacagaaatacaaatctgggatttgggtccccaaacaggcagtggtggatagcagtttggctctttggtggttagctggactaaaagcggctcatgtggagaagcgggtggatccagaggcagatctgtgtttggcctctcccaaggctgcagaagctgctcccaaaccctcccagaagtcaagatacctgtgaagctacatgaatagggggccaagctgagccacaccgcaggtgggcttgtgactacctcagatggtaaattccgttgaagcctt

SEQ ID NO: 407879 - DNA, 572 bp, Homo sapiens
attgtgtagaaattttctccgtgcagctgtactttcactgaaagtgaaaaatattatacagatgaggattcttagggtgaggtaacattgtaagtatttgaactaaaatggacacctggtatcatttagaagaagtaacaggttcattatttcaaaaaaatgcggatgatttctagtagataatacaatatgaggcatttattctgctccacacacataaatgatttttcartaggggaaaaaagaaagcttaaaagacagacctagaattcaaaccaagataaacacattcctggacagaaatacaaatctgggatttgggtccccaaacaggcagtggtggatagcagtttggctctttggtggttagctggactaaaagcggctcatgtggagaagcgggtggatccagaggcagatctgtgtttggcctctcccaaggctgcagaagctgctcccaaaccctcccagaagtcaagatacctgtgaagctacatgaatagggggccaagctgagccacaccgcaggtgggcttgtgactacctcagatggtaaattccgttgaagcctt

SEQ ID NO: 407880 - DNA, 572 bp, Homo sapiens
attgtgtagaaattttctccgtgcagctgtactttcactgaaagtgaaaaatattatacagatgaggattcttagggtgaggtaacattgtaagtatttgaactaaaatggacacctggtatcatttagaagaagtaacaggttcattatttcaaaaaaatgcggatgatttctagtagataatacaatatgaggcatttattctgctccacacacataaatgatttttcagtaggggaaaaaagaaagcttaaaagacagacctagaattcaaaccaagataaacacattcctggacagaaatacaaatctgggatttgggtccccaaacaggcagtggtggatagcagtttggctctttggtggttagctggactaaaagcrgctcatgtggagaagcgggtggatccagaggcagatctgtgtttggcctctcccaaggctgcagaagctgctcccaaaccctcccagaagtcaagatacctgtgaagctacatgaatagggggccaagctgagccacaccgcaggtgggcttgtgactacctcagatggtaaattccgttgaagcctt

SEQ ID NO: 407881 - DNA, 601 bp, Homo sapiens
aacaagcaggaaattgatggagatgaatgaaggtaacagaatttagaagtggagggtacctctattttctttgtgatgtggaagacttagtcaaaagtgaaagagaggtgaaggggcataaagaaggaggaaatagaacactatggcttttaactgtcgtatgcaaggaattcccttatctgacagtaggcagagccaygcatgctgatgtgggccctctccaaactagtgtaaagactggaagacacggtttctttatcctggcctgaggagttttccctcccatgggcatcactgaccctcagatcttggaactagggtgacatcagggaagagcagccacttcccggtgccctcagctggcatagttcctttgcactgcttgtttgcaggtttggtagcaaaatggagtgaaaaagccttaaacccagactcagtcatttttgcaaacttcaacctcaactctcctttcttgtttaacctagcttaaaaacttccggaatcatgagaaactcacaatgcttgtttggggcagttgagaaaggaagtggattgtaaaggaaaaggactggaaattacttttgagacctattcacttaaa

SEQ ID NO: 407882 - DNA, 404 bp, Homo sapiens
gaccttcatggaacatccaacatgtccctttacaattctaaactgaattttttttacctcttacttcatctatatttcaaatgtattcctgtttgatgtcaaacctcttaaaactaattaagtaatagatttttcaattgagcacaccatatatctttcaaggttaagcaagaataaaacactttgcctggattttccactgtgaaattgatggtgaggagggagrgtgtttttaatgtgatgcactgcggtcagaaaaaaaaacaaaaacagaaaaaaaaccacaacagtcctgtcagttaaaactgctagatacagccatccttatgaatgttttataatcattgtaaaagatcaaagtgaattaatgatatttttgaaatttcctgagaaaatgacttcct

SEQ ID NO: 407883 - DNA, 404 bp, Homo sapiens
gaccttcatggaacatccaacatgtccctttacaattctaaactgaattttttttacctcttacttcatctatatttcaaatgtattcctgtttgatgtcaaacctcttaaaactaattaagtaatagatttttcaattgagcacaccatatatctttcaaggttaagcaagaataaaacactttgcctggattttccactgtgaaattgatggtgaggagggagagtgtttttaatgtgatgcactgcggtcagaaaaaaaaacaaaaacaraaaaaaaaccacaacagtcctgtcagttaaaactgctagatacagccatccttatgaatgttttataatcattgtaaaagatcaaagtgaattaatgatatttttgaaatttcctgagaaaatgacttcct

SEQ ID NO: 407884 - DNA, 501 bp, Homo sapiens
tcccttgtcagatgtatgctttgcaaataccttcttccattctataggttgtctttctgttgacgacttttttttgttgttcagaagctttttagtttagttcmgtcccgtttatttattcttgcttttgaggcatttgcttttgggatttactcacaaattctttgcctaggccaatgtccagaagagtttttcctccagaagtttttatgattttaggtctttaatccatcttcagttagttttgtatatgttgagaaatagggatgcagttttattcttccacatgtggctatccaatttttccagcaccgtttattgaatagggggtcctttccccaatgtatgattttttcagctttgttgaagatcagttggttgtaggtatttggctttatttctgggttctctattctgttccattggtctgtgtgtctatttttgtacctgcaccacactgttttggtaactatatccttgtaatataatttgaagttgggt

SEQ ID NO: 407885 - DNA, 501 bp, Homo sapiens
tcccttgtcagatgtatgctttgcaaataccttcttccattctataggttgtctttctgttgacgacttttttttgttgttcagaagctttttagtttagttcagtcccgtttatttattcttgcttttgaggcatttgcttttgggatttactcacaaattctttgcctaggccaatgtccagaagagtttttcctccagaartttttatgattttaggtctttaatccatcttcagttagttttgtatatgttgagaaatagggatgcagttttattcttccacatgtggctatccaatttttccagcaccgtttattgaatagggggtcctttccccaatgtatgattttttcagctttgttgaagatcagttggttgtaggtatttggctttatttctgggttctctattctgttccattggtctgtgtgtctatttttgtacctgcaccacactgttttggtaactatatccttgtaatataatttgaagttgggt

SEQ ID NO: 407886 - DNA, 540 bp, Homo sapiens
aatgtctgtttagtatatggttcagtaaatattttttcatacccatttctttgcatattaaccaatgacactcactagagtttagaatgatattattttatactgactgtaaaggacatgctttttatagtcatattttatattatgaaaacattccaagagctttttccaagaatcttaaaatatacagagcttgataaatctcatgtaacttaaataataaatagtaagtatatattaaggtcaatgtaytttcatattacattttagagtatgaacatattgttataaagagtatgcaatatagaaatgtctaaactaatatctactgaaaatgattacatatatgatgctagattatcttgaaatagaactttattcataacatttttatttataataaacccacccattgcaaggaaaattatgtgtttagtgtaaaaatcacagtatgctaggaacatgattcctatcctaaaacaataaaacatttacatgttgagagcaatttgtgtaaaggtagctccttcgcaggacaac

SEQ ID NO: 407887 - DNA, 540 bp, Homo sapiens
aatgtctgtttagtatatggttcagtaaatattttttcatacccatttctttgcatattaaccaatgacactcactagagtttagaatgatattattttatactgactgtaaaggacatgctttttatagtcatattttatattatgaaaacattccaagagctttttccaagaatcttaaaatatacagagcttgataaatctcatgtaacttaaataataaatagtaagtatatattaaggtcaatgtactttcatattacattttagagtatgaacatattgttataaagagtatgcaatatagaaatgtctaaactaatatctactgaaaatgattacatayatgatgctagattatcttgaaatagaactttattcataacatttttatttataataaacccacccattgcaaggaaaattatgtgtttagtgtaaaaatcacagtatgctaggaacatgattcctatcctaaaacaataaaacatttacatgttgagagcaatttgtgtaaaggtagctccttcgcaggacaac

SEQ ID NO: 407888 - DNA, 612 bp, Homo sapiens
gagtcagccactgaatagaactagaattcagtgttatcaagtgcattggtatagtccatgagatttgttaaggactcaaatgctaggacaataagtcttctcaggagcatgctgcagagaagagactcagctggacgtgggcctggcctggatttcagtactgatacacggccagctctggctagaattcatatttgatctcattttttatatgtttaccttatatattccaaattttgcatagattattgaaactaggtcaaaagtaaaatcatcagttaataatttatgacacttctgcaatttgtcccatccaaatagaacggcctagagaaactctgtggctgtatgaaagttgagccaacatcacaactctgtgaaactgcccaaaaacaacagctttgggggaaaaaamcagtcaaatgctaggctgccaccaatttccatcctggaatctacaaaaagactcatttaacaatataaaatgaaacaattttgtagtttttggttagaaaagacttgattacagaaacaagcatatcttgtagaattttataaatggatacattttttatggtatttggagaaaaatatgacttctgttagtgtttt

SEQ ID NO: 407889 - DNA, 543 bp, Homo sapiens
ggatcaaccttggttcttcaattgtaacaaatgtatcacattaatataagatgttaatagtgagagaaactgggtatggggcatatggaaactctctgtactatcttcccaatttttccataaagctaaaactgttctttttgttgttgttgttgttgttgttgtttgttttgttttgttttataaggtcttactctgttacccaggccagaatgcagtggtaggatctccgctcactgcaactccgcctcctgggctcaagccatcttcccacctcagcctcccaagtaactgggactacaggcacacgccaccatatctagctaactcttgtattttttgtagagatggggttttgtcatgttgccmaggcctgtctcaaactcccaagctcaagccattcacccacctggcttcctgaagtgctgggattacaggtgtgagccaccacacctggcctaaaactgttctttaaaaattaatttgtatttttttttaaaaaaaaggaaaacaagtatcaggaactgctagaagctttgaggc

SEQ ID NO: 407890 - DNA, 620 bp, Homo sapiens
ggggcctgaagccagaagaggacgtcagaggtatcagagtgggcttcacgattaacttcaggaaaggtgcactataaatgtttgaagaattgtatggaattaaacagtggctgctcaataaatacttgttgattgattgttggcaaagacttcagagatcctgagaaagggccgcaggtccccatcattcttattacataattattttagtgcatttaaagcttcccatttttcatcttatrctttaaacatcagggaaaactgatgggccaactttataatatttttaaatgactctatggtgttttgaaatattacatggctataagagtttatgtatatttaatatacttattaaaatatgcagtaagcccatagctgattttctctaaggatgtctcagtgccgaggtgggacttaaatgtttaatactaatactaatactcataactcatatttctctagtgcttttcatctttaggatccgtaaagtctgtgagtaccacatcaagtggatgcagctgggctttccagcaggctgacagggaccacatatggcctcttgccttcctctggagggagaaggggtgactagagcttaaggtttcactccttctcca

SEQ ID NO: 407891 - DNA, 351 bp, Homo sapiens
tggttattatggacattgccgataatagctaacaccttaatagtacttaagtgtcaggcagacactgtactgaagttttacacaaataaactcatttgatcytataaggtaagtaggtttgttattttatagacgctgagttgaaagcccagagaggctaagtaacttgcccaagaccacacagctagtaactaggggagctggcattctaatcaagtttagaccccgagtccacattctttattactatggtatccagaaaaataacaatataaacaaataaataatttcaagtgctgataatgaagaagataaaatagagtattgtcagacagagtgactgaggcatcg

SEQ ID NO: 407892 - DNA, 527 bp, Homo sapiens
gccttcaatttgttgctattttctataaaccaccaattggagagtttgaatgtcattaaaaatttgataatttctgaaaacatcttccatgtgaagtctagaggtgactgggtcccaccagcatccaaaggtctcgcactgtatagttcctgtggtctgaatctagggtcatggccaaggagagtaatgaagtgatactctgctgtatactaagagtcctggctcctaccgacagcaaaccacaaagagcaagggccaagggagtcattttacccaagaaacaaaactgtggcttgcactcctggcatgctttccttctctctagaacaygcactacgcatgttaaggaggaaggatagattgggaaatttaggtagtctgatggcattagacacacagatttcttctggtttctcattctggtactgctaccagccagctctgtcatcgtgaggaagtctctccacttctctgacccccagtttgctcccctatggaagaggaagttggagttcccatgcaggtac

SEQ ID NO: 407893 - DNA, 539 bp, Homo sapiens
atcctgccttcaatttgttgctattttctataaaccaccaattggagagtttgaatgtcattaaaaatttgataatttctgaaaacatcttccatgtgaagtctagaggtgactgggtcccaccagcatccaaaggtctcgcactgtatagttcctgtggtctgaatctagggtcatggccaaggagagtaatgaagtgatactctgctgtatactaagagtcctggctcctaccgacagcaaaccacaaagagcaagggccaagggagtcattttacccaagaaacaaaactgtggcttgcactcctggcatgctttccttctctctagaacatgcactaygcatgttaaggaggaaggatagattgggaaatttaggtagtctgatggcattagacacacagatttcttctggtttctcattctggtactgctaccagccagctctgtcatcgtgaggaagtctctccacttctctgacccccagtttgctcccctatggaagaggaagttggagttcccatgcaggtactaattgt

SEQ ID NO: 407894 - DNA, 610 bp, Homo sapiens
ctgtggcaattaaagcataatatgagcctggaacatttttttgtgtgtgacaaacagtagtgtgctggtgaatttttaacacccagagctgggggaaaaagctctgattgtaacatgtgcagacttctgtgatgtaaatacctttaccatactaggttccaagctactgacttgataggattagctcacaaatatcctgaaaattttacaatgggctcttctaagctagtgtgaaaccaactccagcacaccaataaatttttttttttttttgagacagagtcttgctctgtcgcccrggctggagtgcaggggcacaatctcagctcactgcaagctccgcctcctgggttcacaccattctcctacctcagcctcccaagtagctgggactacaggtgcccgccaccatggctggctaattttttgtattttcagtagagatggggtttcactgtgttagctgggatggtctcgatctcctgaccttgtgatccgcccacctcagcctcccaaagtgctgggattacaggcgtgagccaccgcgcctggcctaaatgttttaaataccctaaaaataatgggtgtatgtcaaaaggacacagatcca

SEQ ID NO: 407895 - DNA, 493 bp, Homo sapiens
gtggggatgggacaagccagaaacctcagagggacagctctgccaagtgagctgactgtgaggagggggagatgatcagaagcgtttcccattgcagggcttgaatgtccaagagacaagagccttttgtgagctggggtctcaatccatgaactctacacagtattgagaaatatggatgataacagcaggctctcrccaatctccccaattctcccatgggaagaaaagagtaaagtgacaaagaaaatagatggtctgaaaaaataaaaaatagttggtcaaaatttctatttaacttagggaaagaaagcattctctctgtactatgagatattaatgacattaatgaatactagtagctaatatatattaaatgctcatcatatgcacattttactaagtactttattaacattaattaaaattatcctagtaagaaccccacaagggtctgctatttgtacacttatataacagatgaggacactga

SEQ ID NO: 407896 - DNA, 583 bp, Homo sapiens
ctctggccaagcccctgtccacagtgaatgttgtagagaggtgacagaatgattcatttggtcgctgccactctcttccagaaaaggaccatagccaacgatggcaaattacctctggggtggccatttacccttagacttgttacagatccaaacaatcagagtactaatctgttcttcttaacacagacttaccctgtctggagstaagacatgttttgatcttttacctccagcaactgtgtcaatataaatacttctcaacttagaaactaggtaacattgataattactttaaacagaggcctccacattgagatgttttgtcctcatagagcctgatggagtaagacattgtgcagctgccactctccagagagactgtcactaaagcaggttgtctatctcctgtctcctaaggcaaccttatgaataaaccatcttaacgttaagtcatgtgcataaataatttaaaattggcttgcaagcaaaaaggaaaggggtgtatgtgggacactgatcacatcatcagtgtgctctcagccaagactgaggagggtccatggagcttggtaacaggtgg

SEQ ID NO: 407897 - DNA, 528 bp, Homo sapiens
tatttacaggaatgtgcttcaagttttggaggcacttccaaaaatattattgggccattgccatatccctgtaataaaacagtgtacctaagggacttttgtgataagcaaacttctccttttggatgtttcagttctagcatattttgcaaagactgttactattttatagcctaatcttaygctcacatactcaggagcagcccaaggcagacacgctaaggacaaagcacgagtccagcgccctgcctttcctttcagcatttttctccctcttctgtgaccgctctcaacctcaaatcaccaagtcctcctatgccgtttcttacttcaactgagtttgaatcttcaactgtcactcactgattttatggctttaggcaagttatttaacccctctggctcaagcaaagtcaaaccaacaccaacgctggcaagtggggggggaatcaatccctgaaaagcagctgacagacagccaagccaatcttgggatgtcaaggggcaaagcagacatcattgagcagc

SEQ ID NO: 407898 - DNA, 591 bp, Homo sapiens
aatttttggaaagggactctactttctctctgactgctttaccctaatatgtagaatagtcccttttccttacttcttcatgacatagagaacatttrtgaagattttaccaaaggcttgaccacactagaagaaaatacagcatagaaaataattcacaattattacacagttgcagccctttaccgcagagtttttatcagccctacttcttcctgtttacacccaggttgcctccaccaatgtgagaactacctgtgtctcactgaatctaggccaaatgtccaaaacatttagagaaaatgaaagatgttcacacttctcagctgtggtgcgcctcttgaggctcttgaggaattttcttccccaggattgacaatttgtccagtataattgactgtgggaatattcatgaaggaaagttctactcccatccataacacacttgtatccaaacaatcccacagtagtgtgaaatcagtatatttccagaattttgaattatataatgttagatagtatcatgttgagtcaaaaattgtccaggtcaggttgtggtgtaacagtcactgaatttattttctactcttt

SEQ ID NO: 407899 - DNA, 587 bp, Homo sapiens
tgcataatgccagccacgggcaggtggtggaccccgaggggcagtgtagggactctctccaccccaccacgcatatccctgtgccctgatgggacgcccccctgcccttcccctcctgcagtgctggttgggggcagagggggccaggaccacccaccagcttggacccctaggccagctgggtccctgtgcagcgtctgtcaccacagccgggacagcagggtaaccactgctttggccaacctggctccctctccgcctgcaggagaagccactgccttgccagcaggtgctctgggctccgtggtgtcttcctgagaactccgcacttggtttaaatgtatattgctgtgtttgcatgaatcccacagaatgccagctcacaggccacctcgatctgggcttcacagcttttgttttcttttaktggtagggggtagggcttgatttgtcctgagactgggagctttgctagctacggaattggcccttcctgagggcagagcacaccgggctccggctcaccacagaggccgtacaggatgtcagtgcttgtggacccggctggctgaggcctccggggaatc

SEQ ID NO: 407900 - DNA, 447 bp, Homo sapiens
aatatacaggatctaccgctgcacggtctcacgcacagggatcctatgagaagcaaaagggcagtaggaggcagcagggtggtggtcccgtggggccaggatggggtagacgactctgtgcaaagaaccccagggtaacattstacaggagggaactgttctgtatgttgattgcaacattgcacttgattgcacagtgaactcactgatggcacactttgtaaaggatacaaatacttttggtttttgttttttggttggggacagggtctcgctctgtcaccaggctggagtgcagtggcgcaatctcagctcactgcagcctctgcctccttgttcaagtgatcctcctgcctcagcctccagagtagctgggactacaagcgtgcatcaccacacccggctaatttttgtattttcagtagagaaggggtttcgccatgttgg

SEQ ID NO: 407901 - DNA, 614 bp, Homo sapiens
gagtgaattttatataattatagatgctgtgagggcaaaataactttaaaactaaatagagagtagaatgctagtggttgtgggagagggagtagcaagagttggattccttgctttaggtaaggaggtcagagcatcctttctgggaaactgatgttatgacaaagatctgtgtgacacagaatcaagtttgtgcatatttagagtraacattccaagcaaaagtaataattagtgtaaaactctgttgaaggatgaacttgacaatttcgagactagaaagggatgatatggctgaagcctaacgaaggagaagagtaataagttaatctgaggtcagagaggtagcaaaaagtcaaattgtacaggacattatgaaccatggaacatacttgaattttattttaatttaagtagaacacttctggggagagtttaagcacagaaggagaaatttttgaaagacttttgtttttataaattattttttaaaaataaaactggctgcagctatactgagagtggacaatagaggaagatgagtgcctctctgaaactcttctttcaggagatgtgttgtccggggtggggatgataacagtagaaattgtagt

SEQ ID NO: 407902 - DNA, 672 bp, Homo sapiens
ctgctctagcaaattaccacaaatttggcagcttaaaacaacagaaataaattttttcatagttgcaaaggccagtagtctgaaatcaaggtgtcaggagggctacactccctccagaggcactgggagtcaatccattctttacatcttccaatatctggtagatccaaacattctttggctggtgaccacatcacttccatgtctgcctcaagaataatattgcttccttttcttctctgagtgtcttctatctgtttgtttctcataagaacatttgtcattggatttagtgctcacctgtgtcatttagggtagtctcctaatcttgagaccctttaattatatctgcaaagatccattttacaaatatggtagtattcacaggttatagggttaagacaaggacataaattttagggaccatgattgagccacyacaaatgataaatagtgattgtcagcagatcagggagaaatgaaaggttgaaaaactaaaggaccagtggtttttctttagggttgtaaaactataatactggaatggtgtacataaaacactatgtatatatcaaaaatttataaaactttatggcacagatattgaactttaatatacaaaattttaaaaaccatgttggaggatggagaaaccaaagatggagtgaagag

SEQ ID NO: 407903 - DNA, 594 bp, Homo sapiens
ataacacaaaatacaaaataagcatcctaacattaacactgacataaataaatatttaacatataagtatatatgggagaatagacaagtatcccataaaacacgaatttcaagtttatgtagataccccaccagtgacaaggtggaacrtaagcatccgccgttagcatgggtaacagatagtgacttccttgcaaagagtacagtatgaggataagagtgactttatggtggagaaatctgacaaattgtcacccaggtgatcaaggttaacattgacagggataagtcatgttgatagcatgtattcttgatatgatgtgactcaaatggcactttatttctgtgatcttactcccagcaacacatactcccagtctagtcatgacagaaacttcagataaatgttaactgagaaacattttgcacaatacctgcaaagtactcttctaaaagtgtcaaggttatcaaagtcaaagaaatgctgagaaactgtcacaaccaaaagaagcctagggagacatgatacttacgttcaaagtgatgtcctggatggattatggctgaaaaagtacattaagaaaatgtgtagga

SEQ ID NO: 407904 - DNA, 594 bp, Homo sapiens
ataacacaaaatacaaaataagcatcctaacattaacactgacataaataaatatttaacatataagtatatatgggagaatagacaagtatcccataaaacacgaatttcaagtttatgtagataccccaccagtgacaaggtggaacataagcatccgccgttagcatgggtaacagatagtgacttccttgcaaagagtacagtatgaggataagagtgactttatggtggagaaatctgacaaattgtcacccaggtgatcaaggttaacattgacagggataagtcatgttgatagcatgtattcttgatatgatgtgactcaaatggcactttatttctgtgatcttactcccagcaacacatactcccagtctagtcatgacagaaacttcagataaatgttaactgagaaacattttgcacaatacctgcaaagtactcttctaaaagtgtcaaggttatcaaagtcaaagaaatgctgagaaaytgtcacaaccaaaagaagcctagggagacatgatacttacgttcaaagtgatgtcctggatggattatggctgaaaaagtacattaagaaaatgtgtagga

SEQ ID NO: 407905 - DNA, 594 bp, Homo sapiens
ataacacaaaatacaaaataagcatcctaacattaacactgacataaataaatatttaacatataagtatatatgggagaatagacaagtatcccataaaacacgaatttcaagtttatgtagataccccaccagtgacaaggtggaacataagcatccgccgttagcatgggtaacagatagtgacttccttgcaaagagtacagtatgaggataagagtgactttatggtggagaaatctgacaaattgtcacccaggtgatcaaggttaacattgacagggataagtcatgttgatagcatgtattcttgatatgatgtgactcaaatggcactttatttctgtgatcttactcccagcaacacatactcccagtctagtcatgacagaaacttcagataaatgttaactgagaaacattttgcacaatacctgcaaagtactcttctaaaagtgtcaaggttatcaaagtcaaagaaatgctgagaaactgtcacaaccaaaagaagcctagggagacatgatacttacgttcaawgtgatgtcctggatggattatggctgaaaaagtacattaagaaaatgtgtagga

SEQ ID NO: 407906 - DNA, 613 bp, Homo sapiens
attgggcatctattatttttcttctcaagtttaataaacactgtggaattaaatgcagccagtttattgatattcatgaatctgtgatgtgaatttacaaaataagtttaaagaattgtaaactccaaatctcatccatatagtaggtttttccgcccaccccactaaagctgaaggaatccaataaatattttctcacagagcatgagtaataggagaatgacaaaggctgttaaataaactggataggtttctattatgttaagaaacaatattgttgggagtttgacaagatgactttcacacaaagaaaaaacagttgcccctttagtaagacaaaatgttaattagcccagagaccccctcgacttgaatgtatgagatatgggtatggtattttatacttcatatgcatgataagttattttggaatatataaaacaaggggctggggcagtggctcattcctgtgttcccaacactttgggaggcyaagtgaggaggattgcttgagcccaggaattcaacaccagcctgagaaacataacaataactcatctccaccaaaacaaacaaacaaacaaacaaaaattagcccagtgtgatggtgtga

SEQ ID NO: 407907 - DNA, 553 bp, Homo sapiens
gcataaccaaactagaaagagcacagccttcatgaatactatagtacgtgttcaaatcaattctttgattaaggtaatcaggatggctagcgcctctactcatctatgagaagttaacagaaatatttaatggggtaattccaaaacttatttaattttaacattttttcctattaacacataacagtaaaaaatttaarcatataacgagacattatttgtaatgaaaatccaaaaatagtgacattaaaaggaacgcacattgaacccacgtgcaaaattatcagagacttcaaataattcagattaatactctcaatttaaaaaaaaatattagagaacagaaagctctataagcaaatagaaattctagaactgaaaaatataatacttaaaattaagttgttaaaggatagacttaccaacaaatgagctacagtttaagagaattaggaaagcagaaaacatatgaaataaaattatgtaaaaaacatgaaataaaaaaatgtaattaagcattacatgttagttttctactactgttataataata

SEQ ID NO: 407908 - DNA, 447 bp, Homo sapiens
gagtgacactgaaatatacagttaagagctccccagtgttcttcaggactacctgtaggggggttgcaataccaccsctgcataaatcagctgttgccatcatagcatatggagtcatataaaccaaactagaattaaatttttattcgtcagttaaaatgccctaaagaaatccacatgaggctatcagtatggattaagggagggcaagagtacagcagaaattggcacactaggaatgtgaataacctggtaatgtgactttcttgtactttaaagaaatacctgggttcagtcttttatatagcccacatccctctgatgatgaagtgctactatgagatctggatctaatagctgagtggattcgtttacatccagtacaggatgaactactagaagcaacaacaacaacaacaacaacaacgacaaaccaagcagtcactt

SEQ ID NO: 407909 - DNA, 447 bp, Homo sapiens
gagtgacactgaaatatacagttaagagctccccagtgttcttcaggactacctgtaggggggttgcaataccacccctgcataaatcagctgttgccatcatagcatatggagtcatataaaccaaactagaattaaatttttattcgtcagttaaaatgccctaaagaaatccacatgaggctatcagtatggattaagggagggcaagagtacagcagaaattggcacactaggaatgtgaataacctggtaatgtgactttcttgtactttaaakaaatacctgggttcagtcttttatatagcccacatccctctgatgatgaagtgctactatgagatctggatctaatagctgagtggattcgtttacatccagtacaggatgaactactagaagcaacaacaacaacaacaacaacaacgacaaaccaagcagtcactt

SEQ ID NO: 407910 - DNA, 587 bp, Homo sapiens
gataattgtaataaataatttttcatgcatttactgtattatacatttttattttataattttaaagtgcacttctatgtatctatgcatgtatctatctataaaattaactgtaaaaatagcctcaggcaggtctttcaggagatattttagaagaaggcatttttataatggartatggcagctccacagatgttactgcccctgaagaactttcaatgcgatgtggaggtggtagatagtgatacagattatcctaaccctgtgtaggcctaggttaatatatgtgtttgtgcattagtttttccaaaaaaaaaaacatgaaaagtttaaaaaaatagaaaaaatcttacagaataagtattaaaaattatttatgtacagcatacaatgtgtttgtgttttaagttgtgctattacaaaagaattaaaaagttaaaagagttaaaatatttaaatttataaggaaaaaatatagtaggttaaggtgaatttattattgaagatgtttttgtaaatttagtgtaccctaagtgtacagtgtttataaaatctatagtagtgtacaccaatgttctagaccttct

SEQ ID NO: 407911 - DNA, 587 bp, Homo sapiens
gataattgtaataaataatttttcatgcatttactgtattatacatttttattttataattttaaagtgcacttctatgtatctatgcatgtatctatctataaaattaactgtaaaaatagcctcaggcaggtctttcaggagatattttagaagaaggcatttttataatggaatatggcagctccacagatgttactgcccctgaagamctttcaatgcgatgtggaggtggtagatagtgatacagattatcctaaccctgtgtaggcctaggttaatatatgtgtttgtgcattagtttttccaaaaaaaaaaacatgaaaagtttaaaaaaatagaaaaaatcttacagaataagtattaaaaattatttatgtacagcatacaatgtgtttgtgttttaagttgtgctattacaaaagaattaaaaagttaaaagagttaaaatatttaaatttataaggaaaaaatatagtaggttaaggtgaatttattattgaagatgtttttgtaaatttagtgtaccctaagtgtacagtgtttataaaatctatagtagtgtacaccaatgttctagaccttct

SEQ ID NO: 407912 - DNA, 598 bp, Homo sapiens
tcaccttataccataatcaaacccccaaggacatcaaataagataaaagcaaaacaaaaacaaacccatcaaaaggacatcagtgtcaaaaatggaaggaatgtcaggccacacagatgagaaagaatcagcacaagacaagaactctggaaactcaaaaagccgaaatgtcttcttacctctaaacgagtgcactagttccccagaaatggttattaaccaagctgaaatgcctgaaattacagaaatggaattcagactatagataggaaaggagatcagtagcattaaggagatagaagaatttcagagctcaaagaactgctctctgacataacctggtcagacaaaataaagaaaaaaaaagtaaagaataatgaacaaaatacagatttatgtaaagagaccaaatctttgactcactggcatttctgagaggcagggaaagaaagcaagctggttgggaaaatacattttagtatatcgttcacgaaaatttttccaacctcactagagaggccaacrttcaagttcaggaagtggaaagaacccctgtgaaatactacacaagtagaagatccccaagacacatagtcat

SEQ ID NO: 407913 - DNA, 550 bp, Homo sapiens
gcccaaagaaatctacatattcaatgctatttctatcaaactgccaataacattctctacagaataagaaaactattttaaaatccttttttttttttttttcggaaacagggatgctctctgtcatccaggctagagtgcaatgacacgatcatggctcatgacagtctttacctcccaggctcaagtgacactcccaccttagcctcccaattagctgggactacaggcatgggccacaaccctcgactaacttttgtaatttttagaagagacagggtttcatcatgtttcccaggttagtctcaaactcctgggctcaagccatccgctcttctcagactaycaaagttttggaattacaggcatgagccactgtgcctggcttaaaattcttacaaaatgagaaacaagaacagatagccaaagtaattgcaagtgaaaagaccagaactggaagcatcacattatcccacttcaaactgtacaagcctgcagtaaccagaataacaacagacatgtaggctaacggaacagaagagagagccca

SEQ ID NO: 407914 - DNA, 547 bp, Homo sapiens
cctcatatactgcacagttaggctaggtataaaattctgaattggaaatagattttccttatatttaaaaaagtttcatttttcctacttttccatattgttgttaagaggtttaaagtcattattattactttatatttgtatatgacatacattttcttcttgaaacatttagattttctctgccaggaaatcgtagaattaaaaactttagggatggtctactttctgctattgttcctgactcttaattaatattttcaagccataatcatagcttcaattctagaagatattcttaaattatttatttgatgatatcctccattacattatagtgtagcagataatagcacagcacctggagtcacaatgcctatttgcagatacmacttctgcccttagtagcagtgtgtttaggacaacttgtcttaacttctctgtacttagaatttttcatctgccaaatgtagatcataataatattatctgctagcaaaacttgttttgctttgaatgaattgttttggtaaaccacttaaaatag

SEQ ID NO: 407915 - DNA, 581 bp, Homo sapiens
tgctccaccaaaaaccagtgcaacatagcttatgtaaacaaagacagatttcctaaataaaagtttgaccttaaaagaaaaaaattaatttcaaggaaaaaagtaaaagccttattgcaggaagttttttctcttctaaccatttcatacattttatctttatatttaatatgcatctttagagggagaaaataattataatttataaatatatgcaatgctgtgtaaacaaaacatgccagcaygcaatgtcatctaaagtctcaagctggtataatctcaaatagacttccaaacagaaatttaggcctctagcttcaaaacttaagattatacctaaaatacatcattcatacatcgttaccaatatcagaactcacccattaaatcctacagtgaaggagtgtctgcgctcagatatacacaaaggtaatttgacagttgtgcagtaaatatttagctgcagggacctaaaattgccagagtttataggcttgggcatttgatgtcacttctggcttgcttttcagggctaacattttgcagtgtaagctgaattgttaactcctattttttttttc

SEQ ID NO: 407916 - DNA, 581 bp, Homo sapiens
tgctccaccaaaaaccagtgcaacatagcttatgtaaacaaagacagatttcctaaataaaagtttgaccttaaaagaaaaaaattaatttcaaggaaaaaagtaaaagccttattgcaggaagttttttctcttctaaccatttcatacattttatctttatatttaatatgcatctttagagggagaaaataattataatttataaatatatgcaatgctgtgtaaacaaaacatgccagcacgcaatgtcatctaaagtctcaagctggtataatctcaaatagacttccaaacagaaatttaggcctctagcttcaaaacttaagattatacctaaaatacatcattcatacatcgttaccaatatcagaactcacccattaaatcctacagtgaaggagtgtctgcgctcrgatatacacaaaggtaatttgacagttgtgcagtaaatatttagctgcagggacctaaaattgccagagtttataggcttgggcatttgatgtcacttctggcttgcttttcagggctaacattttgcagtgtaagctgaattgttaactcctattttttttttc

SEQ ID NO: 407917 - DNA, 639 bp, Homo sapiens
gctttttcctttaaataagataatatacttaatttgtcttacacaaaggaaataccaaataaatatttgttcatttccctggaaatatttcacattttatatattcttaatattaattttgatgaaaaatcataattgcatttacttttatatatggcacagtaaatataygtgtgtggaagatatcttagatagaactaataatggctaatcaaacttatggaagcaagaattagtctgttgttaatagcacacagagcagagatatcctactgggattaaatgaagccaacaaggctttcttgtgaagttattcaacctatcatgtatagctgtacttattattttcagttttgtacagcagagaaatagaatgtaatcagtgatttcaatttaatgtgataagtcacacatcatattctgaaaagtatctatttgtgattgtgcaatgccataatatagaatctcacctctggacatattttgggtgaaaagggataactaaattagtatgttccaagatatatacatagttaaaatataaattttttcttacatgctactaacagaagtgagttataaaacacaaattttatcgtaaaattttcttggagaaacattgattgcccctaacttcat

SEQ ID NO: 407918 - DNA, 551 bp, Homo sapiens
attcttaatttacagagtcaagatgaaagcagcatatagtatgatcacataaaccacgaatacatggaagcttttgtattatgaatatagaggcacacatggacataaatatctagaaggagagttattaacctgtactcatggttgtttgagtgtaatgggatcacrtgtaattttctctctctttgcaatactgcatcttcactattttctacaattaaaatggaatacttgtaagacaagtatgtaccttttcctggaaaagattccacagctttctgcaacatacagaaaatccacaagaattatgaggtttaaggaaatgttacatataggaaatgtattacacatacaaagaggtgtaggaacccccttagaagaaagagacatatttagtattggttatagtgatacagagcctaatgagggcatgtgcttttgttctggaatgctctgttcatatttgtcccaatttttaatctttctcttctctatcatatactttacttggaacatgtgtgtaatgaacattttctttttgtcccccaccc

SEQ ID NO: 407919 - DNA, 636 bp, Homo sapiens
tagcttcagaatgttgattgaaaataaccatcattatagcttatatagtcaacctatcagtcaagacttaggagcaagtaaggaaaaaaatcaattagacctgtaaaattaaatgggagtttatcacccatagactttcttgaaataaataccaaaggaggtgcttccacattaagaaaagtcagcagtacagaagtctggtgcaaacaaaaagatagtgcaattaaaaaaatgctgaaatgtatttgtaaattaaattcaatattgtctgtaaaataataatcaatttttcacttaaagcatttagaaaagagcaggaggtacagaaaattctactcaaaaaaagcaaaaaaaagtagaaaaaatcaatttatataaacatattaacagcaataaatgataactgagaaagtttgtggcaatacagcctcttagattggacttttaaaattctagctacatgcagcttgcaggagttacttcttggacacacatttataggattcttaaacaaaaataggargtatagacaggatagcaaaagtaaataaaattaaaccacaaaatatattacaatattaaatcagacaaatagaattttaagaaaaagacatcagcagttacaaagggtaatat

SEQ ID NO: 407920 - DNA, 622 bp, Homo sapiens
tcagaattgatgtggcttctaataaacacagatgttctccaacaaattgatcttttgtcttagactgtactgtgtttctccattcaaagctgattttattccttctgtcagtctttgccctgttcttcatttccactggtgctatataggttttcatttttctctgcctctcaattggtctttcttgtactccctctctgccccaatgtctcatttgcagtatagacagagtagtatttctaatctgtaaaagtgactatattgctgctttaaagtataattagatgcatamaatacaatgtgcagaaaaaaaaaaaagagtaaagtcaaagttccttgacatggtatgaaaagtctcaatggtgtaacatttccatatgcctgtcaagtttcttctactgtccctaccctaaatgtgtgacatataaccagacctatttgctaacatttctctgaatacatcagtgacttttacttgtctgtctttgagaactctctttccaaagctgaggatcttttaaccattttcaacttactgtaactcttctaaggaatcttcttgtgaatggtcatggcccttaacaagaggaattaactgtaacctacaatgctattccataac

SEQ ID NO: 407921 - DNA, 622 bp, Homo sapiens
tcagaattgatgtggcttctaataaacacagatgttctccaacaaattgatcttttgtcttagactgtactgtgtttctccattcaaagctgattttattccttctgtcagtctttgccctgttcttcatttccactggtgctatataggttttcatttttctctgcctctcaattggtctttcttgtactccctctctgccccaatgtctcatttgcagtatagacagagtagtatttctaatctgtaaaagtgactatattgctgctttaaagtataattagatgcatacaatacaatgtgcagaaaaaaaaaaaagagtaaagtcaaagttccttgacatggtatgaaaagtctcaatggtgtaacatttccatatgcctgtcaagtttcttctacygtccctaccctaaatgtgtgacatataaccagacctatttgctaacatttctctgaatacatcagtgacttttacttgtctgtctttgagaactctctttccaaagctgaggatcttttaaccattttcaacttactgtaactcttctaaggaatcttcttgtgaatggtcatggcccttaacaagaggaattaactgtaacctacaatgctattccataac

SEQ ID NO: 407922 - DNA, 547 bp, Homo sapiens
aagactctactttgcatccagttttggagtctaggaagtctattggattttgccattagaaggtaatcagaggagggttgaaggggtaaaagaagaaaaaaaagatataaaaatattaggactactgaagtgtacatttttaaatggtaaggatggtaaattatatatgttattttatctcagtaaaaattaatgaaaaaataataactagagggtaaaattagagagtaggtaatcaataagggtgaaagccacattgtaattgcacattttgggttttgcctaggtagaagytggagaaatggaaatatcaagtgacctcttacaagaaatttagcagccatacaataaaatgtaaggtgatagttgaggaggaaaggaagggcacagaaatgattcttgttttgttgtgtgttactttgaagcataaaggtcacctgagaatattttgggcaagaaaacaatcaatagaaagaaaaagaatttctacagaaaagccaataatggagcaaaggttttctgttaaaaaaaaaaaaaagagaataaa

SEQ ID NO: 407923 - DNA, 569 bp, Homo sapiens
gtctgtggatcctttcttgagtaaggaactcagattttaaaaatgtaagttttaagcattaagacaagaagagtcaatttctggttttctaagaaaacacctctatgcagtttcatattcagcagtctgaaaaaagaaatttcaaccaggaatttcatattgagacaaactaaacttcataagtgaaggagaaaatgcttttcagacaatcaaatgctatgggaattcattaccagcagacctgccttataagaggtctgtaagggagtactaaatatggaaacaaaagactggccaccacaaaaacacacttaaatacatagaccatagacactatagagcaacttcgcaatcaagtctgcataataaccagcgggcatcacaaagacaggatcaaatctgcataaaacagtatgtaaatgggctaaatgccccacttaaaaggcaycgagtggcaagttgaattaacaaacaagactctacactatgctgtcttcaagagacccacctgacctgcaatgacatccataggctcaaagtaaagggatgaaaaaatatataccaagcaa

SEQ ID NO: 407924 - DNA, 430 bp, Homo sapiens
tgaactgggcagagcccaccacagctcagccaggcctactgcctctatagamtctacctctgtgggcagggcatagctaaataaaaggcagcagaaacagctacagacttaaacatccctgtctgacagctctgaagagaaaagtggttctcccagcatgacgtttgagtgttgagaatggacagactgccttttcaagtgggtccctgacccccgtgtaaactaactgggagacatctagtaggggctgacagacacctcatgcaggtggttgcccctctgggatgaagcttccagacaaggatcaggcagcaatatttgctgttctgcaatatttgcggttccgcagcctctgctggtgatacctaggcaaacagggtctggagtggacctccagcaaacaccaacagacctgcagctgaaggacctg

SEQ ID NO: 407925 - DNA, 572 bp, Homo sapiens
gttatatgcttctactatgaactttgcagacattaaaaataatgtaaacatttctaaaatgcagagaatataatacattgttaaataaaaatagttacacaagtatgacatattattaaaatatatgggagatatatatgaatatatgtgcataggtgcaaaaagtttatttaacaaaatattaactatttttagatgataacattatgacttcttattatgagttacttttgttgtgggctttaaaattttccttttgcaaattttatacaatgaaaatagaaaactttataatcaaagcrcactacatgttataatttttaaaactgctacttctcactcacaaacgtaggcaaatacattatattctaactgcactggtttatttttatacattccactaatatatcagttttattaagataatcacatcaatgtttaggaagactctgaagtcagagcaatgaagaaataatacactgctttcaaaaagcacacattttacatacttactttacatatttaccttactcttaaccatatttatcccactgtgcaatagaacactagaa

SEQ ID NO: 407926 - DNA, 572 bp, Homo sapiens
gttatatgcttctactatgaactttgcagacattaaaaataatgtaaacatttctaaaatgcagagaatataatacattgttaaataaaaatagttacacaagtatgacatattattaaaatatatgggagatatatatgaatatatgtgcataggtgcaaaaagtttatttaacaaaatattaactatttttagatgataacattatgacttcttattatgagttacttttgttgtgggctttaaaattttccttttgcaaattttatacaatgaaaatagaaaactttataatcaaagcacactacatgttataatttttaaaactgctacttctcactcacaaacrtaggcaaatacattatattctaactgcactggtttatttttatacattccactaatatatcagttttattaagataatcacatcaatgtttaggaagactctgaagtcagagcaatgaagaaataatacactgctttcaaaaagcacacattttacatacttactttacatatttaccttactcttaaccatatttatcccactgtgcaatagaacactagaa

SEQ ID NO: 407927 - DNA, 448 bp, Homo sapiens
attcatcacaaagttgagaccatgcaaccacaaccctactcaagcaaaagaatattgacaataccctggaaaccttttgatgctcttttccaatcattatctcctccttcccacacaaaartaatctttatctaacttttatatgaaaccattcttcactttttcattattttaatatctggattttcttccctaaatattataacttacttttactactcttttgctataaattaaaatgaaataatatatattcttctttgtttagcttcttgtatatgcaacattatgtttgtgagatgtagccatgttgttctttattttcagagttgtatagtacacttgtagcaatatgcccatctttgtcagcttgagggactgatctagtttgtatatttgtccccaccaaaatgtcatactgaattgtaatccccagtagtggaagtgg

SEQ ID NO: 407928 - DNA, 566 bp, Homo sapiens
catgcaagaaaaaaattaacattagatatcatgaataagatggtggtgctaagtgaaatcaagtgaaaaaatattttttaatttaaatgtatttaaaaattggaggcccagatatgttcagtggtgtattctagcaaacatttaagaaaaaaataccaattctctacaatctcttccagaagataaatactttgtaactcattctgaatccagaattgtccyaatatcaacaccagatgaatacattacaggaaaagaaaaatataggcaataaatctaataaatatagacgtaaaaaccctcaacaaaattttagcaaaccaaatccaacaatgtacacaaagaataatatattctgaccaagtgggatctcttctgaatatgaatatgcaaagttggtcctacattagaaacttaatgtattctattgaataaacgggttaaggaagataaatcacgtgaccatataaacagatgtagactgaacatttgaagaaaatccaacatttatttgtgataaaagctatcagcacactaggaatagaggagtatttttataacttgat

SEQ ID NO: 407929 - DNA, 588 bp, Homo sapiens
ggtctgggctggagatagagagtttaaaatatggaaccctttgcagataagcatctaagggaagctgatggcaagagtatggaaggaacataacaagctagaaattgggaagcagagtgcagtactggagatcatttaaaaaaaatgagaaaatggcatagcaagtatcaactcagaagttgggtaggctcagaagtaacaagagtacaaagaattatatccaatggctttgggaggccagaggccaaaaataaacctttggtaacccccaaaatacatcagaaaaatgataaaaggagacataggaacaagaattaatgccagcaatcagcaattgcaccacctacactcacgtagtactttaagtattttacgatttctaattctcttccatttttttcctcaactaaatgagtataaaatgtgaaaggaaaacaartatctccttgttcattctaggagcttgtgtctgcttcttattaaggtagtagcctgatgttcacagggggagagaattgaaaacacctatctctacagccaaaatagtcactaaacatgaacagttttggaaatacgcctttcaccata

SEQ ID NO: 407930 - DNA, 601 bp, Homo sapiens
tattcagcaacaacaaggaaccaactactgatatatgccacaacaggaatgaagtttaaaaacattatgctaagsaatgaagccggactaaaaatgtacatgctaaatgttttcatttatataatattctagaatatgcaaagtatagggacaaagatcagatcatcacttgccaaggactgagagtagaatttgagagactgactacaaaaaggaataaggtaattttgcaaagtgcttgaaatatttcatatcatgattatgttgtttgttatacatcctgtgttacatttctgaagcctaatggaagtgtacatctgtgttattgctataaagaactacctgagactgggtaatttataaagaaaataagtttaattggctccatagttctgcaggctgtactgaaggtacagtacagcccttataatggcctcagcttttgtagtgtcatcaggaagcttccaataatggcagaaggcaaaggaagagcaagcatctcacatgatggcagcaggaacaatagagagagcaaccagatcttgtgatagctcactcactatcataagaacagcaccaagaggatgttgtcaaaccattc

SEQ ID NO: 407931 - DNA, 601 bp, Homo sapiens
tattcagcaacaacaaggaaccaactactgatatatgccacaacaggaatgaagtttaaaaacattatgctaagcaatgaagccggactaaaaatgtacatgctaaatgttttcatttatataatattctagaatatgcaaagtatagggacaaagatcagatcatcacttgccaaggactgagagtagaatttgagagactgactacaaaaaggaataaggtaattttgcaaagtgcttgaaatatttcatatcatgattatgttgtttgttatacatcctgtrttacatttctgaagcctaatggaagtgtacatctgtgttattgctataaagaactacctgagactgggtaatttataaagaaaataagtttaattggctccatagttctgcaggctgtactgaaggtacagtacagcccttataatggcctcagcttttgtagtgtcatcaggaagcttccaataatggcagaaggcaaaggaagagcaagcatctcacatgatggcagcaggaacaatagagagagcaaccagatcttgtgatagctcactcactatcataagaacagcaccaagaggatgttgtcaaaccattc

SEQ ID NO: 407932 - DNA, 601 bp, Homo sapiens
tattcagcaacaacaaggaaccaactactgatatatgccacaacaggaatgaagtttaaaaacattatgctaagcaatgaagccggactaaaaatgtacatgctaaatgttttcatttatataatattctagaatatgcaaagtatagggacaaagatcagatcatcacttgccaaggactgagagtagaatttgagagactgactacaaaaaggaataaggtaattttgcaaagtgcttgaaatatttcatatcatgattatgttgtttgttatacatcctgtgttacatttctgaagcctaatggaagtgtacatctgtgttattgctataaagaactacctgagactgggtaatttataaagaaaataagtttaattggctccatagttctgcaggctgtactgaaggtacagtacagcccttataatggcctcagcttttgtagtgtcatcaggaagcttccaataatggcagaaggcaaaggaagagcaagcatctyacatgatggcagcaggaacaatagagagagcaaccagatcttgtgatagctcactcactatcataagaacagcaccaagaggatgttgtcaaaccattc

SEQ ID NO: 407933 - DNA, 603 bp, Homo sapiens
attattcagtaagtgtattacttcaataaatattcaatatatatcctcttcttccaagctctctctttggacataacaaaataatacccttaaatattagaaaagaaaatttagtcctttctgtctcaatttcttaaaaattagaaaaagatttttattttctttctggtgacttcactgaacacaaagatcaatgttatctctacagccaatgaaatccaggaataattttctgcaatgattaattgrtatttttaagtctttcattcttattaatgttttctgtacatatattctacctcaagacagcacccaccattcatgctctaaactcctcaaggacaaaagccctgtattatgtgtgtttggatctcaaccttgatgctgtatatgttttaggttttcgaaaaacatgttgaattgttgactaaactgttggaaagcattcagttatacactcagaaattgattatcaaaggagaagaagtattttaaaagaaatttgcttcaaattttggcagtattaattcatatttaagaccattgagtagggatattcaagaagtttttcctttaatcgtcataaggtgtaagtccccttga

SEQ ID NO: 407934 - DNA, 603 bp, Homo sapiens
attattcagtaagtgtattacttcaataaatattcaatatatatcctcttcttccaagctctctctttggacataacaaaataatacccttaaatattagaaaagaaaatttagtcctttctgtctcaatttcttaaaaattagaaaaagatttttattttctttctggtgacttcactgaacacaaagatcaatgttatctctacagccaatgaaatccaggaataattttctgcaatgattaattggtatttttaagtctttcattcttattaatgttttctgtacatatattytacctcaagacagcacccaccattcatgctctaaactcctcaaggacaaaagccctgtattatgtgtgtttggatctcaaccttgatgctgtatatgttttaggttttcgaaaaacatgttgaattgttgactaaactgttggaaagcattcagttatacactcagaaattgattatcaaaggagaagaagtattttaaaagaaatttgcttcaaattttggcagtattaattcatatttaagaccattgagtagggatattcaagaagtttttcctttaatcgtcataaggtgtaagtccccttga

SEQ ID NO: 407935 - DNA, 530 bp, Homo sapiens
ccagttgttaccttttctaccattaaaaattaccattcaggactagcctgaagaccttactccattcctgcctaactacaggactgctttctggggatctcataacaggaaggaatcatctctactcctcaattccacagggagcagatgtccaaccaggagttcacagagaarcaagcactagagtcctgaactccttaaagattagaagaccgggaaagtgactgaacaccttgggactttattttgtccatctgtaattggcaaaatgcactccgtgtctactttgtagctcctctcctcagagagagggtaatcaaagaaaatgaaatgtgaaggagacagccacatatcctgctagcgagtggagtacccgggagataataaacaggctctcaagtgccaggctgaatgtatcaagggacaagtgaagtatcacagacagaaatgaagtaaaagaggaactgagatgtgttaagtctctgaaattgacagaaagagacagaatagtcttgtcggggaacctgttg

SEQ ID NO: 407936 - DNA, 573 bp, Homo sapiens
gactcagtcctctcctggttgagggaaaagacttgggaagggaaagggattctctgtgtgatgtagatttttcccacaagagatggctttgcagggccatttcaaaatatgtcaaagaaatatattttagggtaaaatactttgatttccttcagggtcggctatctgtcatgtgatgccatactcatgtcacaccagaatttggtgtcttattgctacaaaaagtcttaagagctctgttttaatgctaaygctggtccattgtgcctgaatttcaaagggaggagggtaaaatgaggcatatcaaaccccaacttcccactatggcccgaactagtttttcaggttaactttagaatgcccttggccaagagcaggggtccattcagatagttgtgggacttagaattttattttcagtgtacacaaccaatcaacatgatctaattggcatatgtggaactctgtctaacaacagcagaatacagttgactcaaacaacatggtgaacaattgcacaagtcaactagtacaaggattttttttctaaaatacagtattcatgggatatga

SEQ ID NO: 407937 - DNA, 573 bp, Homo sapiens
gactcagtcctctcctggttgagggaaaagacttgggaagggaaagggattctctgtgtgatgtagatttttcccacaagagatggctttgcagggccatttcaaaatatgtcaaagaaatatattttagggtaaaatactttgatttccttcagggtcggctatctgtcatgtgatgccatactcatgtcacaccagaatttggtgtcttattgctacaaaaagtcttaagagctctgttttaatgctaatgctggtccattgtgcctgaatttcaaagggaggarggtaaaatgaggcatatcaaaccccaacttcccactatggcccgaactagtttttcaggttaactttagaatgcccttggccaagagcaggggtccattcagatagttgtgggacttagaattttattttcagtgtacacaaccaatcaacatgatctaattggcatatgtggaactctgtctaacaacagcagaatacagttgactcaaacaacatggtgaacaattgcacaagtcaactagtacaaggattttttttctaaaatacagtattcatgggatatga

SEQ ID NO: 407938 - DNA, 589 bp, Homo sapiens
tatggtagttgcatgtttacttttattttaagaaactgcctaaatatttcccagagtggttgtatattgctttttatactctcattaccaatttgtgcgtaatccagtttctctgtgtcatggtcaacactsggtggtgtctctattttttttcactttagccattcagttagatatctagtgatgtctcattgtggttttaatttgtattccccattgcctaatgatgccgaacatctcatgaggtcatttgtggttatttccaacctgtatactctttggtgaaatgtttcttcatgactttttttttttttgagactgagtctcactttctcacccaggctggagtgcagtggtgcaatctcaaatcactgcaccctccatttccagggttcaagtgattatcctgcctcagcctcctgagtagctgggattacagttgtatgctaccacgtccagccaatttttgtatttttagtagagacagggtttcaccatgttggccaggctggtcttgcacttctgacctcaggtgatccacccgccttggcctcccaaagtgctgggattacaggtgtaagccaaggtg

SEQ ID NO: 407939 - DNA, 589 bp, Homo sapiens
tatggtagttgcatgtttacttttattttaagaaactgcctaaatatttcccagagtggttgtatattgctttttatactctcattaccaatttgtgcgtaatccagtttctctgtgtcatggtcaacactcggtggtgtctctattttttttcactttagccattcagttagatatctagtgatgtctcattgtggttttaatttgtattccccattgcctaatgatgccgaacatctcatgaggtcatttgtggttatttccaacctgtatactctttggtgaaatgtttcttcatgactttttttttttttgagactgagtctcactttctcacccaggctggagtgcagtggtgcaatctcaaatcactgcaccctccatttccagggttcaagtgattatcctgcctcagcctcctgagtagctgggattacagttgtatgctaccacgtccagccaatttttgtatttttagtagagacagggtttcaccatgttggccaggctggtcttgsacttctgacctcaggtgatccacccgccttggcctcccaaagtgctgggattacaggtgtaagccaaggtg

SEQ ID NO: 407940 - DNA, 589 bp, Homo sapiens
tatggtagttgcatgtttacttttattttaagaaactgcctaaatatttcccagagtggttgtatattgctttttatactctcattaccaatttgtgcgtaatccagtttctctgtgtcatggtcaacactcggtggtgtctctattttttttcactttagccattcagttagatatctagtgatgtctcattgtggttttaatttgtattccccattgcctaatgatgccgaacatctcatgaggtcatttgtggttatttccaacctgtatactctttggtgaaatgtttcttcatgactttttttttttttgagactgagtctcactttctcacccaggctggagtgcagtggtgcaatctcaaatcactgcaccctccatttccagggttcaagtgattatcctgcctcagcctcctgagtagctgggattacagttgtatgctaccacgtccagccaatttttgtatttttagtagagacagggtttcaccatgttggccaggctggtcttgcacttctgacctcaggtgatccacccrccttggcctcccaaagtgctgggattacaggtgtaagccaaggtg

SEQ ID NO: 407941 - DNA, 592 bp, Homo sapiens
tctttccttttcctgtcacttaaatcatctcttgtgttttgcatccccacagctggtcctgaaggtcagcaatctggcactagaaggttctgacccatcctgggaatgctgtgggagaagatacctgattccagggcggttcaggagcaggtatcatcctcactgctggcctgccgctccgggacgcccctcccagcccttggacccaccttcacatggtgaccagcactcctgtcaaagcaggcccaggcccgcccaccactccttcccatctagttcctctccatggtcaccattctattcctgctcctgacatcaccttagctaaactgctctctrtgtgctgatcattgcggattgacagcctggaggacagcccagggaacggctgcccctccactgacctcttccatctggcctgtcccttggaacaacagtgggaagacggtcagtgaagaaacagttcttggcaccttcaccagaaggcgggcaaaccgtgccaagattgcttgtccccaggccagaggatgggtggcacagcgcccaggaggtttcgaaggcccttgttatgatacgagacaatgaaaccact

SEQ ID NO: 407942 - DNA, 570 bp, Homo sapiens
aaacacacacacgcacaagcacgcacacttactatgtttttttctcatctcaaaggtaatatttcctcattgtaaaacaaattagaaaatacataaagcacaaggaagaagatatcatttgtaatcatcacactgcccagatgcctggatgaccactgagaacatttaggctcatatacttttagtcgcataggaataaatccacacatattttttaataaaaatgcaagtgttccctgcacactgttttgtagcctctttttctctctgaatatattgttgtgaatatttttccacctcattaaattttcttctaccctgtcattttaaatgactacataacattccactatatggacatgccataattggaacttcatttttcacaaataaataagtaaatcttgggtaatttctcccgcaggtcaagcataattgctgcaagaggtggtagagyaatgctgaggccaggatgggaggaaaggaggagcgcagggagtgggaatattggttggagttttgatttgaggatctaccaggggctttaagaaatgggagctggtgagagac

SEQ ID NO: 407943 - DNA, 582 bp, Homo sapiens
aacctattaaactaaccttgcattcctggaataaatccaactaggttytgacatattattttctttctcctaagttgctgtctttagttcgctaatactgtgttttgttgagtatttccttgttgccattcatgagaaagattggcttgtaatgcctttgtcaggttggggatcaaatttgtgctagcctcgtaaaacaaattagagctggtttcctctttcactattctctggaagaatgtattaaagataagtattatttcttccttaaatgtttgatagattgtgccaattaagcattttggacccagaggtttctttattggtaagttttaaactatggattaattacgaatctaatatccagattctatttcttctgtcagctatagcaaatgagtttttctaggaattcatctatttcatctaactgttcgaatttattggcataatattgttcatgatattctctttggatctttttcaagtccattggatctgtaagagtgttctcattttcattcctgatattgattatttgtatctttgctcttttttctaccctttgatcatgttggcaac

SEQ ID NO: 407944 - DNA, 596 bp, Homo sapiens
aggacaaaaatacaagagtggttactgcagtattgttcatagtgagaaaaaaaattarcaaaactaaacaaacaaaaaaccactgaatgctcatcaatatgggaatcattgaacaaactgtaatatacctatattgcagaatattatgaaactacttaaagaaaagcaagttcgttattatgggaacttttaggcactgattctcaacagcctgttttaagcctattgctgaaacgtatattgtgtgatcccatttttttcctccaaatagcacacacaaaaaactacataattaggaatttatgtttgtatgaacatggaggaaaattttggaaagatatacacactaggctgttaccactgaagagcaatttaatggtaaggaaagtaaactgtaccagtactaacaggaagggatttgggttctctcttctgcctctcccacccctcaggggactgattggtgggaagtagggcttgagtgcaagcatccttcttccagagagcatgaggctttgactttcaacctcctcttgtttttaagtcttctactgcctgcttctactgttgaccttaggtgctggacaacaaatggg

SEQ ID NO: 407945 - DNA, 596 bp, Homo sapiens
aggacaaaaatacaagagtggttactgcagtattgttcatagtgagaaaaaaaattaacaaaactaaacaaacaaaaaaccactgaatgctcatcaatatgggaatcattgaacaaactgtaatatacctatattgcagaatattatgaaactacttaaagaaaagcaagttcgttattatgggaactttyaggcactgattctcaacagcctgttttaagcctattgctgaaacgtatattgtgtgatcccatttttttcctccaaatagcacacacaaaaaactacataattaggaatttatgtttgtatgaacatggaggaaaattttggaaagatatacacactaggctgttaccactgaagagcaatttaatggtaaggaaagtaaactgtaccagtactaacaggaagggatttgggttctctcttctgcctctcccacccctcaggggactgattggtgggaagtagggcttgagtgcaagcatccttcttccagagagcatgaggctttgactttcaacctcctcttgtttttaagtcttctactgcctgcttctactgttgaccttaggtgctggacaacaaatggg

SEQ ID NO: 407946 - DNA, 580 bp, Homo sapiens
ctagcaggaaggggcagaaagttagcaaacactgggaagggttagcaagatcccagagggaggcggaaagtattcctgcctagacacaccaccataatcttcgcgtgcccaccaggtgctgaacactacgtgttgttctctgcccaccctgttcccaaggggttgctggatgatctgtttttgccattttatataaataatctggcatttgtggtaccatcaaagaaaaaggctagtttttataggggagtttcaatatttgtcaataatagaaggcaactctctgtttagacctgggtgtgacctggagggaaaaatggtcctagaagtggtgggaaaaccgagagtgtggacaggcctgtgtcatctctggtctatgaggtggcacgtatgctgcggtatcttccctcctgtcactggacctgcagctgatagtgtgccagatgaggtctgggcacacacaccccacacatggygtgcttagccctgccacatcctcctgccctccacagtcctctctccagccacactgcccagctggggtcctgtctggacaattccaccaacgtcccagaaacat

SEQ ID NO: 407947 - DNA, 397 bp, Homo sapiens
cataccctgcaccctgcagttaacagacccggtgaaatggctgttttgagctaacaaattgaatgaaccatctgttgactttatgaaatcataaagtcaaaagcctgcatttgctattgttgaatcttccgtgatagcctcagaacttggcaaagttgatgcactggtaaaattygtcttcactggccttgtccctctttaggtcctctgccccaccaggaacccaggggctttctgtggcttcaggcttcccaagacatttcctcactcctgtgctctcctcttctaaagacttaaagtgtgactctccctgtactctgggttttcccaccccatcaaaacttagctttgctacaccccatcttctgctttaaatggtgataataagccagagcct

SEQ ID NO: 407948 - DNA, 403 bp, Homo sapiens
agctttgctacaccccatcttctgctttaaatggtgataataagccagagcctaggtaacttactgaagtcttcattgttgcaaaaatgaatgaatgaatgaawggagaaagggcttccttcctcctctcccagtgattccttagcttcagtgggttgtgtgcctttcagcagggctcttggggaaagagtgttttgactcacaagagtagctctacaggattagcattttagtccacacagcaggccagaggaggaggggtttggcggtagatggaagagtttaggggtagatgaggcctacccctgagctcccgctataccggcaatcacctctgccaacttgtaggcccagatctgtgcacagaagctggggtaacaagaaagtgtcaccaagaatgtca

SEQ ID NO: 407949 - DNA, 403 bp, Homo sapiens
agctttgctacaccccatcttctgctttaaatggtgataataagccagagcctaggtaacttactgaagtcttcattgttgcaaaaatgaatgaatgaatgaaaggagaaagggcttccttcctcctctcccagtgattccttagcttcagtgggttgtgtgcctttcagcagggctcttggggaaagagtgttttgactcacaagagtagctctacaggattagcattttagtccacacagcaggccagaggaggaggggtttggcggtagatggaagagtttaggggwagatgaggcctacccctgagctcccgctataccggcaatcacctctgccaacttgtaggcccagatctgtgcacagaagctggggtaacaagaaagtgtcaccaagaatgtca

SEQ ID NO: 407950 - DNA, 403 bp, Homo sapiens
agctttgctacaccccatcttctgctttaaatggtgataataagccagagcctaggtaacttactgaagtcttcattgttgcaaaaatgaatgaatgaatgaaaggagaaagggcttccttcctcctctcccagtgattccttagcttcagtgggttgtgtgcctttcagcagggctcttggggaaagagtgttttgactcacaagagtagctctacaggattagcattttagtccacacagcaggccagaggaggaggggtttggcggtagatggaagagtttaggggtagatgaggcctwcccctgagctcccgctataccggcaatcacctctgccaacttgtaggcccagatctgtgcacagaagctggggtaacaagaaagtgtcaccaagaatgtca

SEQ ID NO: 407951 - DNA, 493 bp, Homo sapiens
cctgttggtactaagcgtgagctggagacctgatgttttggagcctctaggaaagtagccaggttttgttagagaccttaatgtagaggacagttgaacaaaatcctgtaaaaaagtacaattaaaccaactgtagcaggtgctcttggcgccctgcccgtatccctttgccctaatcaattcagtacacagctgcttaacttcttaccacaagtgcatgcatttctttgctggttctctggttcctgaagcccacttgttcgttgaaatgcaggccataagtgccatgaaattaatgtgccttggaagtcaccttcaatcgatgactggcaagatttggtatgtttctataccaactcccttggtcttggggttagttgactctgaggattccagagcttccccagtggrcttaagctccagcttcccaccatggtagctggcttgataacccatgctttatttgtgctaagtgctcccttaccctaccgat

SEQ ID NO: 407952 - DNA, 493 bp, Homo sapiens
cctgttggtactaagcgtgagctggagacctgatgttttggagcctctaggaaagtagccaggttttgttagagaccttaatgtagaggacagttgaacaaaatcctgtaaaaaagtacaattaaaccaactgtagcaggtgctcttggcgccctgcccgtatccctttgccctaatcaattcagtacacagctgcttaacttcttaccacaagtgcatgcatttctttgctggttctctggttcctgaagcccacttgttcgttgaaatgcaggccataagtgccatgaaattaatgtgccttggaagtcaccttcaatcgatgactggcaagatttggtatgtttctataccaactcccttggtcttggggttagttgactctgaggattccagagcttccccagtggamttaagctccagcttcccaccatggtagctggcttgataacccatgctttatttgtgctaagtgctcccttaccctaccgat

SEQ ID NO: 407953 - DNA, 430 bp, Homo sapiens
ccagattcttctgtgtgggcactttcctgggatatgctaaatgatgggaaatctgggtctcatgtttctgtgtggtcctcacctcaagcgacttctctttctgttcactctgggcttcygtgctctcattaatgtagttctcagtcttccattggtccgtatcccattctatctcagatgcctttacttcctgctgcccactgagaagcttcatcaggtggcctgtcctggagatgagcttggcacaggtcacttgcacatgggccccagagcagtccatcttcaaggtccggataacatgagaaatgagccttctcacattgttgttggggataagggactgtagctgctgggttagctgaatttcaaactgagcaatgggtaattgaagcttttgggctcgggggacaggtcagtgcccacgttgttg

SEQ ID NO: 407954 - DNA, 430 bp, Homo sapiens
ccagattcttctgtgtgggcactttcctgggatatgctaaatgatgggaaatctgggtctcatgtttctgtgtggtcctcacctcaagcgacttctctttctgttcactctgggcttccgtgctctcattaatgtagttctcartcttccattggtccgtatcccattctatctcagatgcctttacttcctgctgcccactgagaagcttcatcaggtggcctgtcctggagatgagcttggcacaggtcacttgcacatgggccccagagcagtccatcttcaaggtccggataacatgagaaatgagccttctcacattgttgttggggataagggactgtagctgctgggttagctgaatttcaaactgagcaatgggtaattgaagcttttgggctcgggggacaggtcagtgcccacgttgttg

SEQ ID NO: 407955 - DNA, 430 bp, Homo sapiens
ccagattcttctgtgtgggcactttcctgggatatgctaaatgatgggaaatctgggtctcatgtttctgtgtggtcctcacctcaagcgacttctctttctgttcactctgggcttccgtgctctcattaatgtagttctcagtcttccattggtccgtatcccattctatctcrgatgcctttacttcctgctgcccactgagaagcttcatcaggtggcctgtcctggagatgagcttggcacaggtcacttgcacatgggccccagagcagtccatcttcaaggtccggataacatgagaaatgagccttctcacattgttgttggggataagggactgtagctgctgggttagctgaatttcaaactgagcaatgggtaattgaagcttttgggctcgggggacaggtcagtgcccacgttgttg

SEQ ID NO: 407956 - DNA, 430 bp, Homo sapiens
ccagattcttctgtgtgggcactttcctgggatatgctaaatgatgggaaatctgggtctcatgtttctgtgtggtcctcacctcaagcgacttctctttctgttcactctgggcttccgtgctctcattaatgtagttctcagtcttccattggtccgtatcccattctatctcagatgcctttacttcctgctgcccactgagaagcttcatcaggtggcctgtcctggagatgagcttggcacaggtcacttgcacatgggccccagagcagtccatcttcaaggtccggataacatgagmaatgagccttctcacattgttgttggggataagggactgtagctgctgggttagctgaatttcaaactgagcaatgggtaattgaagcttttgggctcgggggacaggtcagtgcccacgttgttg

SEQ ID NO: 407957 - DNA, 468 bp, Homo sapiens
ctctccttgtgccctactccctcatccctgaagtaatgctactctgcatttagtatacatgcttccagacttttcctcatttacctacatacatatttacataaagcaaaatagatttgttttgtggttttaaaattttttcttcgcataaagggtaacatcttgcaacttrattctttcacttcatgatatgccttagatttctttccttcccagtacttagagggtcaccccattcatttaaactcctgcataatccatagtatggatgcatcatggtttatttaataattcccccattgatgaatgtttagattatgcttagttttcttgttacatgcattgctgcaatgaaatccctgtacatgcttctttgtgaacatgtgcaagtattcctgtagcatagatatctggaaatggaattcttggggtgaagactatgtagatataaaattttaattgccttca

SEQ ID NO: 407958 - DNA, 468 bp, Homo sapiens
ctctccttgtgccctactccctcatccctgaagtaatgctactctgcatttagtatacatgcttccagacttttcctcatttacctacatacatatttacataaagcaaaatagatttgttttgtggttttaaaattttttcttcgcataaagggtaacatcttgcaacttaattctttcacttcatgatatgccttagatttctttccttcccagtactkagagggtcaccccattcatttaaactcctgcataatccatagtatggatgcatcatggtttatttaataattcccccattgatgaatgtttagattatgcttagttttcttgttacatgcattgctgcaatgaaatccctgtacatgcttctttgtgaacatgtgcaagtattcctgtagcatagatatctggaaatggaattcttggggtgaagactatgtagatataaaattttaattgccttca

SEQ ID NO: 407959 - DNA, 632 bp, Homo sapiens
aagtttttaaaattcatggcttaatttgcacagttaaaaaaaataggaccaattcttttgctttatagccaaagaagaaggaataaatctaagaggaggaactggtcaaaaccatactcccacttgtcttcttgtatgacatcacagcctttcttacattgcatgtaatcacctgtccacttgtsaggctcctggactatgagcgctttgagggcagagaccacatttttttattttcctgagatggagtctcactctgtcgcccgggctggagtgcagtggcgcaatcttggctcactgcaatctccgcctcccgggttcaagcaattctcctgccttagcctcccgagtagctgggattacaggtgcccgccaccatgccctgtcatccccgtgcctggcatgatgtctgaaatgtattaggcatttaacaaatgtttattgaataaacaaatgacattttgtttgtatgtcaataaaatgaataaattgattttgatgcaaatttttattccaaaatgctagaatcgattttctttttaattctttaaggtgaacaagaaaaataaaagaaacaggaagaaataaaagaaaatctgcctttaggttgacccaagaatcatctttgtact

SEQ ID NO: 407960 - DNA, 632 bp, Homo sapiens
aagtttttaaaattcatggcttaatttgcacagttaaaaaaaataggaccaattcttttgctttatagccaaagaagaaggaataaatctaagaggaggaactggtcaaaaccatactcccacttgtcttcttgtatgacatcacagcctttcttacattgcatgtaatcacctgtccacttgtgaggctcctggactatgagcgctttgagggcagagaccacatttttttwttttcctgagatggagtctcactctgtcgcccgggctggagtgcagtggcgcaatcttggctcactgcaatctccgcctcccgggttcaagcaattctcctgccttagcctcccgagtagctgggattacaggtgcccgccaccatgccctgtcatccccgtgcctggcatgatgtctgaaatgtattaggcatttaacaaatgtttattgaataaacaaatgacattttgtttgtatgtcaataaaatgaataaattgattttgatgcaaatttttattccaaaatgctagaatcgattttctttttaattctttaaggtgaacaagaaaaataaaagaaacaggaagaaataaaagaaaatctgcctttaggttgacccaagaatcatctttgtact

SEQ ID NO: 407961 - DNA, 632 bp, Homo sapiens
aagtttttaaaattcatggcttaatttgcacagttaaaaaaaataggaccaattcttttgctttatagccaaagaagaaggaataaatctaagaggaggaactggtcaaaaccatactcccacttgtcttcttgtatgacatcacagcctttcttacattgcatgtaatcacctgtccacttgtgaggctcctggactatgagcgctttgagggcagagaccacatttttttattttcctgagatggagtctcactctgtcgcccgggctggagtgcagtggcgcaatcttggctcactgcaatctccgcctcccgggttcaagcaattctcctgccttagcctcccgagtagctgggattacaggtgcccgccaccatgccctgtcatccccgtgcctggcatgatgtctgaaatgtattaggcatttaacaaatgtttattgaataaacaaatgacattttgtttrtatgtcaataaaatgaataaattgattttgatgcaaatttttattccaaaatgctagaatcgattttctttttaattctttaaggtgaacaagaaaaataaaagaaacaggaagaaataaaagaaaatctgcctttaggttgacccaagaatcatctttgtact

SEQ ID NO: 407962 - DNA, 632 bp, Homo sapiens
aagtttttaaaattcatggcttaatttgcacagttaaaaaaaataggaccaattcttttgctttatagccaaagaagaaggaataaatctaagaggaggaactggtcaaaaccatactcccacttgtcttcttgtatgacatcacagcctttcttacattgcatgtaatcacctgtccacttgtgaggctcctggactatgagcgctttgagggcagagaccacatttttttattttcctgagatggagtctcactctgtcgcccgggctggagtgcagtggcgcaatcttggctcactgcaatctccgcctcccgggttcaagcaattctcctgccttagcctcccgagtagctgggattacaggtgcccgccaccatgccctgtcatccccgtgcctggcatgatgtctgaaatgtattaggcatttaacaaatgtttattgaataaacaaatgacattttgtttgtatgtcaataaaatgaataaattgattttgatgcaaatttttattccaaaatgctrgaatcgattttctttttaattctttaaggtgaacaagaaaaataaaagaaacaggaagaaataaaagaaaatctgcctttaggttgacccaagaatcatctttgtact

SEQ ID NO: 407963 - DNA, 521 bp, Homo sapiens
ttcccctccctgtatccatgtattctcattgttcaatttccacttatgagtgagaacatgcggtgtttggttttctgttcctgtgttagtttgctgaggatgatggtttccagcttcatccatgtccctgcaaaggacatgaactcattcttttttatggctgcaaaaatatgatttttaaaaatcattatatagatttgcagcctaagaaaccatttacttaatcaacctccattgatatttaggttatttctgttatatttaaatgaagcaaatcgtggacagagcttttggtcatgaaaatacgtttacttctctgatggttttgtgtaatggaatccagagagtcaagtgtctgcctgagtgtgtgcagcctgttagggtagttacgctcatcgcccactgggcccaccaggtggggaacatgacattgcctgcctgagtcaccgtggracacgtctctattccagtttcctaatacctggcagcacagttgtctcctctaataggtacacccagaa

SEQ ID NO: 407964 - DNA, 597 bp, Homo sapiens
ccctcttcccttcttctcctgctgttgttgggaacacagtcataacagccagatctccacctaccatcttggtttaggaggatgaaggcaacacactagggacacaggtggcgagctagatggagacagctgagggtttcatggatcacatctgccgcaccaccataaagtgyctaccctggaatgtatacgtaagacaaaaagagctatgttacttctgtaagccactgtcacacgacgttcctaaggacaactgcatttctaaccaagggctcagcattagctctgtccattggattagcagcagcatctaagccaatgcaagttaataaccacagactaaagtacaaaacctttcccacaggaagcaagctgccatctgataagactcagcattcatttctgattaaaaaaaaaaaaagacgaagtagctcattcacattataaagattccacgtgaaattcacatccaatctcaaaaccctcaaggcccaagcagcagtaaacattagtgtcaagaacagatcatatgtcaataagctctagccaacaaaataatttaaatagccagaaatcaaaagtataaaagctaatatg

SEQ ID NO: 407965 - DNA, 597 bp, Homo sapiens
ccctcttcccttcttctcctgctgttgttgggaacacagtcataacagccagatctccacctaccatcttggtttaggaggatgaaggcaacacactagggacacaggtggcgagctagatggagacagctgagggtttcatggatcacatctgccgcaccaccataaagtgtctaccctggaatgtatacgtaagacaaaaagagctatgttacttctgtaagccactgtcacacgacgttcctaaggacaactgcatttctaaccaagggctcagcattagctcygtccattggattagcagcagcatctaagccaatgcaagttaataaccacagactaaagtacaaaacctttcccacaggaagcaagctgccatctgataagactcagcattcatttctgattaaaaaaaaaaaaagacgaagtagctcattcacattataaagattccacgtgaaattcacatccaatctcaaaaccctcaaggcccaagcagcagtaaacattagtgtcaagaacagatcatatgtcaataagctctagccaacaaaataatttaaatagccagaaatcaaaagtataaaagctaatatg

SEQ ID NO: 407966 - DNA, 644 bp, Homo sapiens
tatgggagttacagaagaagagtgagcaacagaaccagattgtacacacaacacatacacattatatatatattttcatcatatattacatatatgatgtaaaaatatatcattaaatatgaatatgtatacacacaatgaaaatttcccaaatctggttaaagaaatggacatccagctacaagaaactgagatgacaccaaataagatgaataccccaaaattcacacctagatacatttaaccaaattctcaaaagccaaggacaaagggagaattttgaaaacagaaaggaaaaagtgatttgtcacatacaacagaaccagcgtaggataatggattttccagcagaaaccttgcaggccagaagggagtgggatgatatgtttaaagtgctgaaagraaataactgctgagcaagaatactatgcctagcaaaagtctccataaaaacatgaaggaataaagaccttcccagacaattaaaagctgaggaagttcatgactaaacctgccttacaagcaaggcaaaaaggagttcttacattgaaatgaaaggatgcaaaacaacaacacaatagcataagaaaatacgatacttattggtaaagttttatacatcaacaaatacaaaatactgtatt

SEQ ID NO: 407967 - DNA, 580 bp, Homo sapiens
cacacacacttattaatcagaaactattaaggaagtagaaaaatggggaaggaatgaaaacagggtagaaaaaggaaagggcagtagcatttctatgaagatacatttttgaatggtcctgacatttagagccatattaatatttcatatagtccaaacataaataattaaaatcaaccagggcatgtggggaatgaaaagttaaatccaaacacaactaattttgtagtttaattatataattgttagtttaaccctgaggagggggggtgttrtgggtaaaattgtgtcccctaaaaagatgcttgagacccactccccagtacctgtgaatgtgacttagagagagtctctgcagaggtggccaagttcagatggagtcatcctgtcttagggtgggccttaaatccaatgggactcatgtccttctagggagaggaacatttggacaccgagacacagacacacagggagaacacgtggccgtgtgggtggaaatgggagtgacacatctaaaaaccaggcagtgtgaggatcgccggccatcaccagaagctggaagaacaaagatggactctgc

SEQ ID NO: 407968 - DNA, 659 bp, Homo sapiens
gattaaaattcttaaccttcactttagagatgaggactctcgagattgggtgaatttatctactctgcagcggatccttaattcaagacaaggtgygacagagcctttagagcgccggcaggtcccacagtcagacagacagacagagcctttagagcgccggcaggccccacagtcagacagacagactgacagagcctttagagaaccggcaggccgcccacagtcagacagacagacagacagaacctttagagcaccggcaggccgtccacagacagacagacagagcctttagagcaccggcaggccgtccacagtcagacagacagacagagcctttagagcgccggcaggccgccccacagtcagacagacagacagagcctttagagcgccggcaggccccacagtcagacagacagactgacagaacctttagagcaccggcaggccgcccacagtcagacagacagacagacagaacctttagagcaccggcaggccgtccacagtcagacagacagacagagcctttagagcgccggcaggccgcccacagtcagacagacagacagaacctttagagcaccggcaggccgcccacagtcagacagacagacagacagagactttagagcgccggcaggccccacagt

SEQ ID NO: 407969 - DNA, 659 bp, Homo sapiens
gattaaaattcttaaccttcactttagagatgaggactctcgagattgggtgaatttatctactctgcagcggatccttaattcaagacaaggtgcgacagagcctttagagcgccggcaggtcccacagtcagacagacagacagagcctttagagcgccggcaggccccacagtcagacagacagactgacagagcctttagagaaccggcaggccgcccacagtcagacagacagacagacagaacctttagagcaccggcaggccgtccacagacagacagacagagcctttagagcaccggcaggccgtccacagtcagacagacagacagagcctttagagcgccggcaggccgccccacagtcagacagacagacagagcctttagagcgccggcaggccccacagtcagacagacagactgacagaacctttagagcaccggcaggccgcccacagtcagacagacagacagacagaamctttagagcaccggcaggccgtccacagtcagacagacagacagagcctttagagcgccggcaggccgcccacagtcagacagacagacagaacctttagagcaccggcaggccgcccacagtcagacagacagacagacagagactttagagcgccggcaggccccacagt

SEQ ID NO: 407970 - DNA, 634 bp, Homo sapiens
gtgagactgcagtgcctaggggaaagtgtggaaacagagaccagcacgttycccattaaaatatgtctaacagcaaggaatgagaaaagcagcaatgattacactacccaacccaggagtacaaggctggccatctcagccactggacagggagtctgcaacacaaagccaaggccaccaggatgaggtgcaacctgggctgagagaggcaatgcccccataaatggaacaaagcagttgcattgaagaaaagtcaaaagttctgtcttcctccatgattcccttcctccctggttaaaaaaaaaaaaaatagaaatcctgaggaaaatgagatacacaagacagaaagacagggcagacatttatctactctaccagggccaagtgtccaagctggtgacacgcttgctgttggttcccaatggtggcaccacatggcatgtgtttctctgtgtgtatgagttctctagagtgagagattttactatattagtaaaatctgagacttcaagtgtgtgtatctgcaatttcacctattttttgcaaagttgtttttaatcatttctatcctctctgtcagtgtataagcacacttattgatccataatttcgtcaatgattgttatcattaggt

SEQ ID NO: 407971 - DNA, 634 bp, Homo sapiens
gtgagactgcagtgcctaggggaaagtgtggaaacagagaccagcacgtttcccattaaaatatgtctaacagcaaggaatgagaaaagcagcaatgattacactacccaacccaggagtacaaggctggccatctcagccactggacagggagtctgcaacacaaagccaaggccaccaggatgaggtgcaacctgggctgagagaggcaatgcccccataaatggaacaaagcagttgcattgaagaaaagtcaaaagttctgtcttcctccatgattcccttcctccctggttaaaaaaaaaaaaaatagaaatcctgaggaaaatgagayacacaagacagaaagacagggcagacatttatctactctaccagggccaagtgtccaagctggtgacacgcttgctgttggttcccaatggtggcaccacatggcatgtgtttctctgtgtgtatgagttctctagagtgagagattttactatattagtaaaatctgagacttcaagtgtgtgtatctgcaatttcacctattttttgcaaagttgtttttaatcatttctatcctctctgtcagtgtataagcacacttattgatccataatttcgtcaatgattgttatcattaggt

SEQ ID NO: 407972 - DNA, 586 bp, Homo sapiens
ttcttcaacaaacaattgccaggacgcacttaacgggagtgggagcaagcagcagatttcccagacatggatccctgggcaacctctcaatcctccttgtggtgggatggggaaggcgttgatctggggacacgtagctcatgattgagccgtgtttccttaggaggcttttgctktttttggaggactgtgatcttgcccacagtggcttgatatgctctgaccctgaaaggacagagggtttttgtgaggttgtatagaacaggatgtcaaagaggactgaaacccaaaggagaccggaatgcttcctgtgccgtcccactgacaaccagagactgggtttggggatcactggcttcgggtgagggtgcttgctgtcctgcagactgttctggatttggccttggaattggcgtttttataaaatctccaggagactctgatatacatgatttgcaaaactgcacactttgtgaagcaacactgccctaaggtacggatcctcattgggtgctaaatcagccgtgagctttaaaagatacaagtacctgggatcctccccatgggctgatgcagtgggtttggt

SEQ ID NO: 407973 - DNA, 586 bp, Homo sapiens
ttcttcaacaaacaattgccaggacgcacttaacgggagtgggagcaagcagcagatttcccagacatggatccctgggcaacctctcaatcctccttgtggtgggatggggaaggcgttgatctggggacacgtagctcatgattgagccgtgtttccttaggaggcttttgctgtttttggaggactgtgatcttgcccacagtggcttgatatgctctgaccctgaaaggacagagggtttttgtgaggttgtatagaacaggatgtcaaagaggactgaaacccaaaggagaccggaatgcttcctgtgccgtcccactgacaaccagagacygggtttggggatcactggcttcgggtgagggtgcttgctgtcctgcagactgttctggatttggccttggaattggcgtttttataaaatctccaggagactctgatatacatgatttgcaaaactgcacactttgtgaagcaacactgccctaaggtacggatcctcattgggtgctaaatcagccgtgagctttaaaagatacaagtacctgggatcctccccatgggctgatgcagtgggtttggt

SEQ ID NO: 407974 - DNA, 546 bp, Homo sapiens
gttggtgattcaacaccatttctccgaccctcttcagtgcctccttcagtgatatgaagttaaaaccaggtactattattattaacctgattttttggttctcatcaagttgcttttttgtgtagatagttgttcgatttggtgttcttgctgtagtgatgattggtgaaggcttctatcttgctatcttgctctcccctctcctcaggcacctcttgttggaagtgcatagcacccccacaggctgacttaccaaaaatgtgataggaaagatgacttcattcctggagttggagagcaaggccytgactgatagactcaatcaaggattcacctgggcgatggtgaagagtagacatcaacacttccaggtacaactgggagattatttccaccaccgaggaagactgttcctattagataaggcagtttcagggactggctggtgtgccgtggagagcatatgaatgctgtcgggggttataccaaaacactcccggaatggccaagacgagaagcagagagacagaaaacgtaaaagaaaca

SEQ ID NO: 407975 - DNA, 432 bp, Homo sapiens
cccagcattctccactggatcctctgcacccagcgagaaagagagatgtgcattggacctgatgctggtgacggcatggaacagcttcctcacagccaggctgcagggctaatagcgagattctgctgaactctgtaaaaaccaggaatcgtggatcacacyggaaaatgatggatggagaactttggtcttcattgttgttgtttctaaaatttatttgtatgactttttcattgataaactcccctctgataccatggctcctacagcaggtatagcagggaaatgaggctacctggaggacccacccttacatgagcagctcggagggtgacctctgaaccatctcctcatgacggcagccgttctgggtcctgctcacagcacagaggtgcaaacttcagacctgggagtcttgctctgctggcactg

SEQ ID NO: 407976 - DNA, 569 bp, Homo sapiens
aaactaggtgtatcagtaatcgatgcctctgctggctgccttacaaacaaccccaacacagcacctcaatcacgatcattcacttaacttacaatgtgggagttgaagaagcactgccagctgctttttatttaaagtcactcaatgaaaccgcggccagactttacagaggtctgctggtcatctggaaggctgaagcgtccttcatgcacctacctgtgacccaggcaggtaaactcaaacagctgagggtccctgggcctgccccccacttcttaatctttatctgtctatctgtttctttatcttctctgtctgtatctccctctctcaaactgcatctgtctctstatctttgtctctctgtctctatcttctccatttatctgaatctctatgtctctctctctctctctctctctctctctcactttgccacatgacagcttcgtggaagccagcaggaggcaccccctgccagtattgcgaaggcacccgtgtccgtgtccagaagggagtcttcaggagctccacggggttttctacccaagctcggaagtgatgctgca

SEQ ID NO: 407977 - DNA, 569 bp, Homo sapiens
aaactaggtgtatcagtaatcgatgcctctgctggctgccttacaaacaaccccaacacagcacctcaatcacgatcattcacttaacttacaatgtgggagttgaagaagcactgccagctgctttttatttaaagtcactcaatgaaaccgcggccagactttacagaggtctgctggtcatctggaaggctgaagcgtccttcatgcacctacctgtgacccaggcaggtaaactcaaacagctgagggtccctgggcctgccccccacttcttaatctttatctgtctatctgtttctttatcttctctgtctgtatctccctctctcaaactgcatctgtctctgtatctytgtctctctgtctctatcttctccatttatctgaatctctatgtctctctctctctctctctctctctctctcactttgccacatgacagcttcgtggaagccagcaggaggcaccccctgccagtattgcgaaggcacccgtgtccgtgtccagaagggagtcttcaggagctccacggggttttctacccaagctcggaagtgatgctgca

SEQ ID NO: 407978 - DNA, 569 bp, Homo sapiens
aaactaggtgtatcagtaatcgatgcctctgctggctgccttacaaacaaccccaacacagcacctcaatcacgatcattcacttaacttacaatgtgggagttgaagaagcactgccagctgctttttatttaaagtcactcaatgaaaccgcggccagactttacagaggtctgctggtcatctggaaggctgaagcgtccttcatgcacctacctgtgacccaggcaggtaaactcaaacagctgagggtccctgggcctgccccccacttcttaatctttatctgtctatctgtttctttatcttctctgtctgtatctccctctctcaaactgcatctgtctctgtatctttgtctctctgtctctatcttctccatttatctgaatctctatgtctctctctctctctctctctctctctctcactttgccacatgacagcttcgtggaagccagcaggaggcaccccctgccagtattgcraaggcacccgtgtccgtgtccagaagggagtcttcaggagctccacggggttttctacccaagctcggaagtgatgctgca

SEQ ID NO: 407979 - DNA, 615 bp, Homo sapiens
aaaaagtaacccacatgacacacgagtgtgaggcttcagtattcacacactcacagggggagggtgcatgctgtgtcattttgccttatcagcctgttttcctttttccccgggtgacttgtaataggtagatggattgtttcttggactgagtctgtgtcatggttttgcagcccttcaactttgcttatgacatacctgccaccacagtgagtttctcaatgatccaactctgccctacaaaacctttccattccttaagaaatatccttaatgcaatttttctatggagactttcctgaccactccccacacagcattcctttccaccttgtgtataattttcctattctttgagctctgtatgcagtaccttactttgattgttttgtgactatctataaactcctctcctcattaaactacagatctcttgagggcagaaactccaatggattcatcttcttaatgcctttattccttaacacaaatcctgggacatggcacacaacaatacacatgtggtgaattgattgtaatatttagtgcaaaaacaycaatgtgccaacccacttatcaaatccataggttgccagatcctgtaggtgatgaaag

SEQ ID NO: 407980 - DNA, 582 bp, Homo sapiens
gagtttctcaatgatccaactctgccctacaaaacctttccattccttaagaaatatccttaatgcaatttttctatggagactttcctgaccactccccacacagcattcctttccaccttgtgtataattttcctattctttgagctctgtatgcagtaccttactttgattgttttgtgactatctataaactcctctcctcattaaactacagatctcttgagggcagaaactccaatggattcatcttcttaatgcctttattccttaacacaaatcctgggacatggcacacaacaatacacatgtggtgaattgattgtaatatttagtgcaaaaacatcaatgtgccaacccacttatcaaatccataggttgccagmtcctgtaggtgatgaaagtcctctgcatacacaaaactcaaaatcctgctagatttacactgacataaaattgataagacaaatataataataacaataaaagtgtccagttttagataacagtctaaatttcatcaaccccacatgatttgttttcagtgctaactaaccaaatgagtaaatattctttgtaaac

SEQ ID NO: 407981 - DNA, 476 bp, Homo sapiens
ctttaccctgcttagacgagcttcagctgctcctgttttatctagcgtttgtattagaaatgaaaggctgaatagtagcctatgctttttggccactgataggtatatagtaactataatattttcccctttaattttccaatgcaatgatctatagcattgttttatctaataacaaattattcttgcattccagtcaaatttgctataggggtgtcgaargtggattagaatttggtgcctctcctttctgtttcagtaaaacctctcccttaggatgttctctctcagtcagggcctcatagtgaaatcagacaacttgaatttggatttcagcttgatgggatgagaatagctcttacttcaaaagcccatggaagagacaaaatgatataatgtgtgtgaaggactcaggtcagtgcctagcacgtgacaaaaccacagtaaatggtcgcatcaaggcagaaagaagatat

SEQ ID NO: 407982 - DNA, 580 bp, Homo sapiens
cccactatggtcaaacctgagatgttgtattagtctgttctcatactgctaataaagacatacccaagactgsgtaatgtataaagaaaggaggtttaattgactcacagttccgcatggctggggaggcctcacaatcatggtgggaggcaaaggaggagcaaagtcatgccttacatggcggcaggcaagagggcatgtgcaggggaactgccctttataaaaccatcagatctcttgagacatattcactatcacaagaacaccaatggaaagacctgccctcgtgattcaattacctcccaccaggtccctcccatgacacacggggattataggagctacagatcaagataagatttgagtggggacacagccaaaccacatcagaagtgctcctccctgtgtcttctgtttcaatcctgggaaaattccccaggagcccagtgtagtttcattctgtggaatccaagtcaacaaatatttaaaatgcctgtgagacagacagagggtaatgcaatcagcctgaaacccaagggctgcccagaaaaacagcagacatacagagtaaagctcctca

SEQ ID NO: 407983 - DNA, 540 bp, Homo sapiens
atggctaaacgttatcagttatcaaaccattaagattacaatggagtgtcaccaatgaagagaaaggggcttcccctggctcccatatcccgagccagaggggctatttccaaccactgctggtataaaaaacccatgatgccaatgtggcaaaggatgctgaccacagtcccagattacctgcagctacgctaacaaagctgagctctagtactggaaataccgatgagtcctccacctttttataacatgacctccctgaaagttctgctgaagcttatttacctcgtgtatgaataatgtttatatatacatataacaaaacccacaggcttacaaaagaagccaaccatagtgaaatccaggtaggtaaatacaaagaacaaatattttatagtggtacccatgcatctttattaacacattataggagatctttctttgagtgtcatmtctaccataactttaaagtaacaatgaacgcaaatattttgaagtatctataactgttgtaatgtgatagagatgcacctgtgtttt

SEQ ID NO: 407984 - DNA, 595 bp, Homo sapiens
atttttctggttatcatatagacactttttactgtaatagattatctactgcttcccttttaaagacaaagcattccatatgcagcatccatatgggtgatttccaggattctctgagtttttcctaccctggtttaaatatttgatgtaggaacacattacagtctatacagcacatactgacacacagacatacacwgacacccaccaagtcatttgattttcatgggaaccctgagtttgctagagcagtaatatagctatctgtaatttataggtgaaggaacagtaggtaaaggccatgccagggatatatagctaatagctatcagagccacaactcccaacagttcttctaaatcttagccaattgcttttattatttctgagtcaactcagccagatcttataaatctgttgttgtattgctacttatttcacccagaatggaacttcatgtattgttttaactattcctttcctgctcctcatttttccagttggttggaagttcttgggtatactaagaatgttaaggatatcaatacatatctgttaaaaaaaagttattttttaataacactatgaatattct

SEQ ID NO: 407985 - DNA, 520 bp, Homo sapiens
ttttcttccttttgtacttcaacttggagtaagtcagttaaactttacagggctcagcctcctaccaataaatgcacaggtggaatacatgtgctcttaaggtttttttcaagctccaccgtcctatacattcaatttgaaaatgaagattttttatcagaaatctgctaggtaaaaaggtttctaggccmcctacttagaaaaaaagaccttcaaaatcacagtgtttttgtaaaaagcaaataaacttaattgattaaaagtccctaatagtttataatcaagcttataatctacaatatagtctgtaactttgaagtgtaaatgtaactatgttaattaatcagattatgtattttttcatgtaattaccacaataaggtagataccttagtctcattctacagacaagaaaaacaaacttagaaacttgactgaggttacactgatgataaatgacaaaatcaaagttaaaagcccatctgactgcacagcttggacacttcactgctgaacttaa

SEQ ID NO: 407986 - DNA, 627 bp, Homo sapiens
atggccagtaattcaaaagaaaaaggtcgaagtctacaaataaacagactgtagatgagtaaatccatttttcttaaagtaaaaactctgtattttgtagaattctgtcctctcataccttaagctgtcatgggcaaggtattttcccattcctggctacaggcagatcattcctagtccagtagtgtgctggagcaagcttgcactggcttacaagagccaactgtgaacattttttctgccttcagtgctgtcaagttggtagtttgaaattggccatggtgagagtatttacaccaaaaaaattagtaaacactgcaaatcagatcttttttttttttttttccttgaaagccagctgttaaacatacatcagcacaccctagaggccacattcccatttctattcctacagatacgaaagtaaagaacagaacacattttgtgaaataaaagaaagcatatgaggtaaatccccatcgacccacccaaaactgmatctggctctttcccttgtgggtattatggttcatggttatcttctgaccaacaaatctctatttaatcatgttttgaccacagaaaatctctctaggctgtcaccaagctgtaaatccactaaagact

SEQ ID NO: 407987 - DNA, 634 bp, Homo sapiens
cccccctccaccccgttgtgtttagcttttcatctcagtccaagtgtgtggctcagggccgcatttgtggcaggcactctgtcaataaatgtatgttacagttcaaggttaagctgcctggattcttgcccttgcatctgggaagttgctgggtgatttcccacccagctcygtgcgcaagatgtgcactcattcataaaccccctccccacacacagtccccttccccggcattgttggcggtccttgtctttgccactgggaatctggtttcctcagactctacgtccacgtttcaggattgatccagagtcagtgtcctgcttacgcttttgaatgaatgatcccacctcagctgcaggatttctgcttagtttcctaaaaatttcactttgggttatgagcttccaattctaaacctgctaaagtcctatgcaatttttcattaaaagtcaccgtggtgtctcccccctctgtagtattaacccacaggccagctttttaacatatgcgggcatgacttttgagtaattaattctacaaataaactgggagataaatgctgagacataaagccagcaagaactgagttttcatttggttgcctccgtgggtctgaagtctttgaccctta

SEQ ID NO: 407988 - DNA, 472 bp, Homo sapiens
tgacctgggaagtcataatggcagatatttaracccagctctcaagcaagcatccaagttgttccggtgaacccgtaactttgagtaacctctgattgaaccagagagtaggaactaggtgcagaaccttgttgaatagaattgtttagcatcgtccatttgttagagcatttcaggatgcctgtcctaaaatttggtatcataatggtatttacctctcactcacctccatctcagcccagtaattaataacaagggacttgcttcttcacctgtttctttattggttgtaggaagtcttttccttaccacagaggaaggagcttctggatccctttgctacgtccagagagttttcatctaatctgggtgtattagtccattttcacactgctgataaagacatactcaagactgggcaatttacaaaagaaagaagtttattggactcacagtttcatgtgactggaga

SEQ ID NO: 407989 - DNA, 472 bp, Homo sapiens
tgacctgggaagtcataatggcagatatttagacccagctctcaagcaagcmtccaagttgttccggtgaacccgtaactttgagtaacctctgattgaaccagagagtaggaactaggtgcagaaccttgttgaatagaattgtttagcatcgtccatttgttagagcatttcaggatgcctgtcctaaaatttggtatcataatggtatttacctctcactcacctccatctcagcccagtaattaataacaagggacttgcttcttcacctgtttctttattggttgtaggaagtcttttccttaccacagaggaaggagcttctggatccctttgctacgtccagagagttttcatctaatctgggtgtattagtccattttcacactgctgataaagacatactcaagactgggcaatttacaaaagaaagaagtttattggactcacagtttcatgtgactggaga

SEQ ID NO: 407990 - DNA, 558 bp, Homo sapiens
gctaatcatgaaggaggcatttagtccactaaaacagaactttcctaaaagttcttttttttgagacagggtctctgttgcctgtgctggagtgcagtgaggcgattttggcttatttcggccttgacctcaagggctcaggtgatcctcccacttgcaactcccaaggagctgagactacaggtgtgtgccaccamgccaaactaatttttttttaatcttttgtacagatggggtttgcatgttgcccaggctggtcttgaacccatggcctcaagggatctgcccaccttggcctcccaaagtgttgggattacaggcgtgagcccctaaaagttctttactctgctccaggaaagggaacagcaaccccaaatctccaatcttcttttgctttcaaagttatagttatcacatttttaaacaatgctaacatcttattttcaaaagcataaaccaatgacaaatttatagaagtccagttgacatgtacaaaagggcatatggcatttgttataacgaacttctcttttttttttttttttttggagacagagt

SEQ ID NO: 407991 - DNA, 558 bp, Homo sapiens
gctaatcatgaaggaggcatttagtccactaaaacagaactttcctaaaagttcttttttttgagacagggtctctgttgcctgtgctggagtgcagtgaggcgattttggcttatttcggccttgacctcaagggctcaggtgatcctcccacttgcaactcccaaggagctgagactacaggtgtgtgccaccaagccaaactaatttttttttaatcttttgtacagatggggtttgcatgttgcccaggctggtcttgaacccatggcctcaagggatctgcccaccttggcctcccaaagtgttgggattacaggcgtgagcccctaaaagttctttactctgctccaggaaagggaacagcaaccccaaatctccaatcttcttttgctttcaaagttatagttatcacatttttaaacaatgctaacatcttattttcaaaagcataaaccaatgacaaatttatagaagtccagttgacaygtacaaaagggcatatggcatttgttataacgaacttctcttttttttttttttttttggagacagagt

SEQ ID NO: 407992 - DNA, 557 bp, Homo sapiens
gtttacatctattatgtcttatttattgaccatggttcattgaatgcttaatacctaattgctacacgacattctgactccacattgtgagctctagaacacagctctcaagggaggtaaaggtcaggaatagtcttacaagtgggcaaaaaatagggtgagcccagcaggctgttggctgagggctgctgcccaaaaggcatcttgtggctccccaaccatttccccatctcttggggacccagtgcctgaaatttcacctccagagatcttttcggttcattagtccctgtctagataattttgcaaatgcctgcaagagaggaaacacagcagcacacatgcttccctgatgaaagagaaggcgctgtgtgtgagcactagggcccagagtggaacccgaaactgggagagtcggggmacccctgagaggtgcaacttcccaaggctggtctggggtatggagtaatcatctgtgattacagatgtcagtgtagagtccagggacctaattaatggcatctcaaactggctcacagcctgcaggcccaggcagg

SEQ ID NO: 407993 - DNA, 573 bp, Homo sapiens
ttccatgctatttatttatttatttatttatttatttatttatttatttttgagacggagttttgctcttgttgcccaggctggagtgcgatggcacgatctcagttcactgcaacctctgcctcccaggttcaagtgattctcctgccttagcatcccaagtagctgggattacaggcatttgccaccacatctggctaatttttgtatttttagtagagatggggttttgccatgttagtcatgctggtgtcgaactcctgacctcaagtgatccactcacctcggcctcccaaagtgctgggattacaggtgtgaaccaccatgcctggcccatgctatttatttttaatgtatctctaayaggtttttcttttgtgattaccatgaggcttataaaaaaattggatagttataataagttatttttaaatgataacaactgaacatggattgcaaagaaaagtatcaaaaacaaactacaatttaacaccaaccttcacccacatttttgactttttagtgtttcagttttatctttttatgttgcctatctctcaaccaactgtagta

SEQ ID NO: 407994 - DNA, 585 bp, Homo sapiens
acaagtctcccttgggtggcagtgctccctcctcaggctttgtgggtgttgcattgccacttctgcgtatgtttcactgaggttagaggctggtccgagaattaatgtggcatttcctgtggttgcagatacgtctgtgattatacctattacctgtctctgcatcatggaaagggctgcgcggcactcatccatgtccctccactatcgcgcgggctcccggccagcctgctgggaagagccttgagagtcatcatccagsaaatgctggaagaggtgggaaagcccaagcacagagcccagttcgaagaaaactcaaccatggtccttccagccaaagggaactgaccgggggattgctcctctagagaaaattgaatgtttcaatcctgtatgtagcactcaactgtgcattgagaaactttttcaaaaattgcttgtaagacaaagagggtggaaaactctgaattagcccaacaaaatcacaaagggttattttattgtcaggagaaagaacactctgaaaggtggacatttcacaggggatgaactagcttcagttatggttttcatgacaataaaatg

SEQ ID NO: 407995 - DNA, 608 bp, Homo sapiens
ccttctactctatgcatttagtcagatggcagaaattccctcccattgagaaagaaatccatttaattatggaagtcagttatacttctctgaaggcatagcaaaaattcctctatgttgaggacaatatctataagtctaggaagggcaagaaacaaaatcattaacagaacccttgacttaccctaaaatagacactgagtttaaaaccatcttaaaggtgtcaagagcagtaagtcagatgattataaaattaatggttcaggccagtcacaatggctcatgcctgtaatcccagcactttgggaggctgaggcaggtggatcacctgaggttaggagttcgagaccagcctggccaacatggtgaaaccctgtctctactaaaaatacaaaaaaattagccaggcgtggtggtacatgcctgtaatcccagctacttgggaggctgagacaggagaatcgcttgmatccaggaggcggaggttgcagtgagccgaaatcgagctactgcactccagcctgagtgacagagatgagactcagtctcaaaaaaaaaaaaaaattaaattaatggttcaggaggtacagcttgtttcatttttgaca

SEQ ID NO: 407996 - DNA, 585 bp, Homo sapiens
ataattttattatatataatatatgtgattgttcattttatgtccaatatctatytactcagcaggaataatgaaaaaattacatcaaatgttaggttctcttttcttagcaaagaaacttaaattagtaatttttaaaaatactctaaacttggggctaggcacggtggctcatgcctgtaatcctagcacattgggaggctgaggtggaaggattgcttgagcccaggagtttgagaccagcctgggcaacatagacccactactaaaaaaaaaagtactctgagcttgaagggcttcaaagacaaagtgttccaaagggaaaacatgggtctattttactttttgaaagagtcatgcaattttttccttccttgtccattatttgttaatatttaattttgaaagggtatggtaccttttaacttcttaaatgaataaagtaaaacttcttcagtaatctacattccattttttttaaaaaagcatttttaaaaagggacagagtaactgtacgtttaatcagaggtctttcatcaacctcagtcatctgaacctggaagtgagttgaaaaaaaaaacccca

SEQ ID NO: 407997 - DNA, 585 bp, Homo sapiens
ataattttattatatataatatatgtgattgttcattttatgtccaatatctatctactcagcaggaataatgaaaaaattacatcaaatgttaggttctcttttcttagcaaagaaacttaaattagtaatttttaaaaatactytaaacttggggctaggcacggtggctcatgcctgtaatcctagcacattgggaggctgaggtggaaggattgcttgagcccaggagtttgagaccagcctgggcaacatagacccactactaaaaaaaaaagtactctgagcttgaagggcttcaaagacaaagtgttccaaagggaaaacatgggtctattttactttttgaaagagtcatgcaattttttccttccttgtccattatttgttaatatttaattttgaaagggtatggtaccttttaacttcttaaatgaataaagtaaaacttcttcagtaatctacattccattttttttaaaaaagcatttttaaaaagggacagagtaactgtacgtttaatcagaggtctttcatcaacctcagtcatctgaacctggaagtgagttgaaaaaaaaaacccca

SEQ ID NO: 407998 - DNA, 585 bp, Homo sapiens
ataattttattatatataatatatgtgattgttcattttatgtccaatatctatctactcagcaggaataatgaaaaaattacatcaaatgttaggttctcttttcttagcaaagaaacttaaattagtaatttttaaaaatactctaaacttggggctaggcacggtggctcatgcctgtaatcctagcacattgggaggctgaggtggaaggattgcttgagcccaggagtttgagaccagcctgggcaacatagacccactactaaaaaaaaaagtactytgagcttgaagggcttcaaagacaaagtgttccaaagggaaaacatgggtctattttactttttgaaagagtcatgcaattttttccttccttgtccattatttgttaatatttaattttgaaagggtatggtaccttttaacttcttaaatgaataaagtaaaacttcttcagtaatctacattccattttttttaaaaaagcatttttaaaaagggacagagtaactgtacgtttaatcagaggtctttcatcaacctcagtcatctgaacctggaagtgagttgaaaaaaaaaacccca

SEQ ID NO: 407999 - DNA, 585 bp, Homo sapiens
ataattttattatatataatatatgtgattgttcattttatgtccaatatctatctactcagcaggaataatgaaaaaattacatcaaatgttaggttctcttttcttagcaaagaaacttaaattagtaatttttaaaaatactctaaacttggggctaggcacggtggctcatgcctgtaatcctagcacattgggaggctgaggtggaaggattgcttgagcccaggagtttgagaccagcctgggcaacatagacccactactaaaaaaaaaagtactctgagcttgaagggcttcaaagacaaagtgttccaaagggaaaacatgggtctattttactttttgaaagagtcatgcaattttttccttccttgtccattatttgttaatatttaattttgaaagggtatggtaccttttaacttyttaaatgaataaagtaaaacttcttcagtaatctacattccattttttttaaaaaagcatttttaaaaagggacagagtaactgtacgtttaatcagaggtctttcatcaacctcagtcatctgaacctggaagtgagttgaaaaaaaaaacccca

SEQ ID NO: 408000 - DNA, 597 bp, Homo sapiens
aatgaatacgctagattattagtgctagttagggtggggttaattttctattaagtctaattgggtttctacagacaactgctggtgtagctatctccaattcaaataacctaaaattttaatttgagaactactcagattctaatttaaacctctgggtgctccccttttctatgtggcagcttctgctggtatatstaaccgcacaaaagccaaacaaatgtataacgcataataaaaaaaccaaaaccctttacacaatgtcaaagtggaaaatgaatgtgcaaatattagaaacaaatacacatgtatctactcatggaaagatcaaacaaaagcataaactataatatttttgtagcagtgaaagagcaaatgttttaaagaagaaaacaatcttgtttatcttaatatattaataatgtcactacatggaaggaataggaaaaagcaaaggacaggtatttggccccgagttacaaactccaagcaaataataatcaaaatattctgtcaacttttctgcatttctttgtggaaggtaaagtctaatagttgcttgcagccatgcttactttttttccattcattcattaa

SEQ ID NO: 408001 - DNA, 597 bp, Homo sapiens
aatgaatacgctagattattagtgctagttagggtggggttaattttctattaagtctaattgggtttctacagacaactgctggtgtagctatctccaattcaaataacctaaaattttaatttgagaactactcagattctaatttaaacctctgggtgctccccttttctatgtggcagcttctgctggtatatgtaaccgcacaaaagccaaacaaatgtataacrcataataaaaaaaccaaaaccctttacacaatgtcaaagtggaaaatgaatgtgcaaatattagaaacaaatacacatgtatctactcatggaaagatcaaacaaaagcataaactataatatttttgtagcagtgaaagagcaaatgttttaaagaagaaaacaatcttgtttatcttaatatattaataatgtcactacatggaaggaataggaaaaagcaaaggacaggtatttggccccgagttacaaactccaagcaaataataatcaaaatattctgtcaacttttctgcatttctttgtggaaggtaaagtctaatagttgcttgcagccatgcttactttttttccattcattcattaa

SEQ ID NO: 408002 - DNA, 597 bp, Homo sapiens
aatgaatacgctagattattagtgctagttagggtggggttaattttctattaagtctaattgggtttctacagacaactgctggtgtagctatctccaattcaaataacctaaaattttaatttgagaactactcagattctaatttaaacctctgggtgctccccttttctatgtggcagcttctgctggtatatgtaaccgcacaaaagccaaacaaatgtataacgcataataaaaaaaccaaaaccctttacacaatgtcaaagtggaaaatgaatgtgcaaatattagaaacaaatacacatgtatctactcatggaaagatcaaacaaaagcataaactataatatttttgtagcagtgaaagagcaaatgttttaaagaagaaaacaatcttgtttatcttaatatattaataatgtcactacatggaaggaataggaaaaagcaaaggacaggtatttggcccygagttacaaactccaagcaaataataatcaaaatattctgtcaacttttctgcatttctttgtggaaggtaaagtctaatagttgcttgcagccatgcttactttttttccattcattcattaa

SEQ ID NO: 408003 - DNA, 486 bp, Homo sapiens
tacttaactatttttaattttctaccttttagaagtgagtatggactacttaagcaatagaaattaactagggctggaaaaaaagaatgatttgctggaagtacttcagcagcataacctttatgtaagaacaaatatcatmatttattgagggcctacctaatgtgtgccaggcattttggatacactattctaatctttatacatccctgcaaggttaatactattattcccaatttataaggttcaaagtagctaagtaattagatctacgtcttgaagctgaaaagtggcaaaaatatctacccatattccttacctaattttttttccttatttttaaaacaatgacccaagaatttctcttccctctctgattcctttttctccaatcctactcaggtcataactgcattgggaatctcatttctttcttctttctcttctttatccagtttaacgttcctgaatccactcaccaacctc

SEQ ID NO: 408004 - DNA, 486 bp, Homo sapiens
tacttaactatttttaattttctaccttttagaagtgagtatggactacttaagcaatagaaattaactagggctggaaaaaaagaatgatttgctggaagtacttcagcagcataacctttatgtaagaacaaatatcatcatttattgagggcctacctaatgtgtgccaggcattttggatacactattctaatctttatacatccctgcaaggttaatactattattcccaatttataaggttcaaagtagctaagtaattagatctacgtcttgaagctgaaaagtggcaaaaatatctacccatattccttacctaattttttttycttatttttaaaacaatgacccaagaatttctcttccctctctgattcctttttctccaatcctactcaggtcataactgcattgggaatctcatttctttcttctttctcttctttatccagtttaacgttcctgaatccactcaccaacctc

SEQ ID NO: 408005 - DNA, 486 bp, Homo sapiens
tacttaactatttttaattttctaccttttagaagtgagtatggactacttaagcaatagaaattaactagggctggaaaaaaagaatgatttgctggaagtacttcagcagcataacctttatgtaagaacaaatatcatcatttattgagggcctacctaatgtgtgccaggcattttggatacactattctaatctttatacatccctgcaaggttaatactattattcccaatttataaggttcaaagtagctaagtaattagatctacgtcttgaagctgaaaagtggcaaaaatatctacccatattccttacctaattttttttcctyatttttaaaacaatgacccaagaatttctcttccctctctgattcctttttctccaatcctactcaggtcataactgcattgggaatctcatttctttcttctttctcttctttatccagtttaacgttcctgaatccactcaccaacctc

SEQ ID NO: 408006 - DNA, 571 bp, Homo sapiens
acactggttagagacgtgaaaacatatcttctctgttcaatgccatgagattggctcacctgagtaggctgcagaatcttcttcccaaatgcttaataacaaaagtgagagaaccatccaaaatattctgaaaaaaatctcacagaagttaggatgggctaaattaaccatcctcaaccccattactctttcctaagagtactckatggctatgtttccaaattattcaaaacatgttccctaatgtgttaatgggggagagtgaggaagcagagacagattaaaaagactcaagagatataacaaccaatgtaatgtgtggactttgtcgggatcctgattgacacaaacctacttggaaaaggctgttttgggacaattgagttaatttgattatgggttaggtattagatgatactaatattgttaggcttgataatagcatcattgttatatgagaactctccatttttctgagaaataacctaaagtaaataagggtgaaatgacacatctgagatttttactttgacaaaaaagagggagacgacagatgaactgagtatgacaa

SEQ ID NO: 408007 - DNA, 591 bp, Homo sapiens
taggagaaaaatgggcagtcctgtacatagtttactgacatctctggaagaagaaggatgaggaatttaatagtaaaatagagttatatggagttattttctgaatatcgctgtgagactaatggccaactgttgttaaagaagttttmctgcccatttggttgagataggaatataaggcatttctctctctcatgcatgcacgtgcacacacacacacacacattcactcattcactcactcaccctggtgtgagtgtcatagaagggatccagtgtaagaacctgttttgcatgttaaatagtaattcttggatatatttgaagtacttgtgtgattactgttccctgtttgttaagtaacagtcctgtcttatactcttgagcttaaaaaggctaaattctgttgtctttttccacattacccatcttggagaactgtgaaatcaatcaaacagacatcagactcttataaagaggaacatatttaaaactcactgtcaagattttcatagtgtctaccttttaagtctcccaaatagctttacatttttcactctattattcaaaggctgatggttgagttttcag

SEQ ID NO: 408008 - DNA, 434 bp, Homo sapiens
aagtctgaaaagtacatgggggctttacagctagtaagcttcaatatttttcttagtataatcaaaaacttttgcaaaagttttaagctgggacaaaacctgatccaatttgcatttccataattttgtttgtgtggaaaaggggaagaacagggcaacaatgggatcaaggagacccaaaggaggccattcaccagataagagtgacttagactaaagcgacaaatgtggaataggaaagaaatgaccagattcattacacattcggatacattttgaaagtcaactagaaagtcctcttttcaattttgctctatgaatttgttaatgrtgacattattgtaataattcgacgacatattactagtattcacttctccaaatggtccacttgatcatagagcagactccaacctgcacggttaaattaggac

SEQ ID NO: 408009 - DNA, 434 bp, Homo sapiens
aagtctgaaaagtacatgggggctttacagctagtaagcttcaatatttttcttagtataatcaaaaacttttgcaaaagttttaagctgggacaaaacctgatccaatttgcatttccataattttgtttgtgtggaaaaggggaagaacagggcaacaatgggatcaaggagacccaaaggaggccattcaccagataagagtgacttagactaaagcgacaaatgtggaataggaaagaaatgaccagattcattacacattcggatacattttgaaagtcaactagaaagtcctcttttcaattttgctctatgaatttgttaatggtracattattgtaataattcgacgacatattactagtattcacttctccaaatggtccacttgatcatagagcagactccaacctgcacggttaaattaggac

SEQ ID NO: 408010 - DNA, 552 bp, Homo sapiens
acaataacttcttatttgtattttctaatatttaaaatttccattattactactttccttaaggtcttcttatttcttgatattaatattaaatgaaccactgaatggaaataagaagtaacacacatagatacaaggtgagacttcaaccagagtgatttatacaatctacagtaggagagttatattgagaaaaagtatataacaatgttacatttcatagaaagttagcagaaaagtaaacattaggaaaatctcactcaatttaagactttggacacttgtcttactctaaattggccacaaacttcactccatagtgagaataatcttytaaaaaatagaaattacattgcattacacttcaaatcctccaatcatgttctacctcttgtatgacactatctgaactccttagctttatatatcgaaggatttctttcatctgtttatctcttcaacctcatccatcaacactttccatttcatctttttcttccattctaacagaattatacaactctaattgtgatgtgaatctgttaatagcaa

SEQ ID NO: 408011 - DNA, 646 bp, Homo sapiens
ccaatctcactcagtctctgctttctccctgctttggataatcccagaaccacagagagagtgcatttctctaaaaacagtttcccttctcagtcagaaaaggtcctgaacctcattgctttgctgctggatactgtwtctcttcctgtgcctgcccaactctaatggcgccgccacggcagagttgtagaactctcactaccgtttctttccattcttcatgtatcctccttctccaacgtggctgccttgaggtagggccctttgtagaacccataatcttgatcttcttcttcacagtgctgctaatttattttttatactaaatacaacaaatattcatgtcattctctacttccatgatatcttctgaggactcatgtggaaggcctgtggctaactctaacttcaggcattagaagccagaacagtgaaaaagcccctttttaatggaaacaattctagtataataccattctgtatactttcacttaagagttaataatcattttatattttaacattgattttataattaaaatttattccactattgcattaaataatttttaaaatttattgtttttatgtcttagtatagaactataaaatcttgactattttatagaacttttttgtatatttt

SEQ ID NO: 408012 - DNA, 506 bp, Homo sapiens
ttttttttttcactcacaagtatrtgtcttatgatgagaacttcccgactcaaaaacagtacagatagaattgttgcagaattatggggtatgtgaaaacacaaaacatgttacatcagcaatttcaaataaatgaatatagaggacaaattgataaactggttaaatggaactgctctaagatgaaaaacaatttcttgtttttttctttgatacataacagggaatgaagaaattcatgatgaagaaaatcacacgtgacctatctcaagggtagatgctgttgcccaacttcagctactcatttccacctaaggatgcagacccacagtcatcttatcctacagaattttttttttttttttgagacggcatctcgcactgtcgctcaggctggagtgcagtggcgtgatctcagcttactgcaagctccgccttccaggttcacggcattctcctgcttcagcctcccgggtagctggaactacaggcgcccgccaccacac

SEQ ID NO: 408013 - DNA, 506 bp, Homo sapiens
ttttttttttcactcacaagtatatgtcttatgatgagaacttcccgactcaaaaacagtacagatagaattgttgcagaattatggggtatgtgaaaacacaaaacatgttacatcagcaatttcaaataaatgaatatagaggacaaattgataaactggttaaatggaactgctctaagatgaaaaacaatttcttgtttttttctttgatacataacagggaatgaagaaattcatgatgaagaaaatcacacgtgacctatctcaagggtagatgctgttgcccaacttcagctactyatttccacctaaggatgcagacccacagtcatcttatcctacagaattttttttttttttttgagacggcatctcgcactgtcgctcaggctggagtgcagtggcgtgatctcagcttactgcaagctccgccttccaggttcacggcattctcctgcttcagcctcccgggtagctggaactacaggcgcccgccaccacac

SEQ ID NO: 408014 - DNA, 536 bp, Homo sapiens
gagtgcttgacttgcttctccttgtttatgtaggacacaaaagttatccctctattttttggacctgctgggtttacagttacatgaataaatcactgaattcctgaaagccagagagcaactgtggaagctaagttggttgctcctttcayggcgcagagctctacaggcagtcaaggatgcaatcacagacattagaccaacaagcaaggcagctcctgttttgaggtggagaaaaataagctgccacaaatgccttaacactttattattgcaattgatcatatttatgaagacctcataaagttgcaaacagttataatacaaaaaggcagttagaataatgcaaagtggtctatcatagcctcttgttgacaactttattattgctatggaccaatattgtacagaggaacccagtagccataagttatcttgaagtgaagcagcacagcaggctggagtattactgtattaaaaaaaatttattttttatgagacacagtaattatatcaaacagttaccaaaacatgtg

SEQ ID NO: 408015 - DNA, 527 bp, Homo sapiens
tttgcttttctatttacctgatgaaaaatgtttgatttgtttgtagtatttagcaaaaaacaccataagcatttaaataagtattttatgtgtatgtgtgtgagaacattagttattttttcttgaagaaaagaaagaggcactgaaactctccctggggctttgggagaaggcatcaatagcgtcctcagcactgtctgaattctgaccatgtgcatgtattaattttttgattaaaaaaagtttacattggccaataacaagtcaaccttatggcctagaaagtttctttctccccagtattatcacmtttttttcgctctttctatatatcccattcttcaatttgtttcttaaatgttgaagaaatcctttacacaagttcttcattccatttggaaacttttcctctgctcccattttttctcttttgcgtggcttattcttacacacctttcacatctcagttttgatatcattacttttaggtaactctccttctttgatcctttagggcaggttaagat

SEQ ID NO: 408016 - DNA, 527 bp, Homo sapiens
tttgcttttctatttacctgatgaaaaatgtttgatttgtttgtagtatttagcaaaaaacaccataagcatttaaataagtattttatgtgtatgtgtgtgagaacattagttattttttcttgaagaaaagaaagaggcactgaaactctccctggggctttgggagaaggcatcaatagcgtcctcagcactgtctgaattctgaccatgtgcatgtattaattttttgattaaaaaaagtttacattggccaataacaagtcaaccttatggcctagaaagtttctttctccccagtattatcacatttttttcgctctttctatatatcccattcttcaatttgtttcttaaatgttgaagaaatcctttacacaagttcttcattccatttggaaacttttcctctgctcccattttttctcttttgcgtggcttattcttacacacctttcacatctcagtttygatatcattacttttaggtaactctccttctttgatcctttagggcaggttaagat

SEQ ID NO: 408017 - DNA, 447 bp, Homo sapiens
aatcagtggaattaggggatgaaatgctgtgggaaggccatctacaaatatgtaggacctacttcagcagtagaaaggaggcttgccttcaaagcaagaccagggacagaaagtccatcttttgaactgagtaaaggggcattcctataactgatccagggaatgttaagactaggcttagaaccaaaatgttatttagtaaaccctctcatttagcaaggtagacagtattcagtaattgtagcagggcaatcgtaggagaaaacaggaactataaaakcataaagactttatattctaagaaatctttttaaagaatcaacaattataatttaggagaagcaaactgaccctggaataaggaccctacgtatccacagaggctgaaacactcagaaacctttttattgcaaaataaaagcaaatataccttacacaacacattca

SEQ ID NO: 408018 - DNA, 447 bp, Homo sapiens
aatcagtggaattaggggatgaaatgctgtgggaaggccatctacaaatatgtaggacctacttcagcagtagaaaggaggcttgccttcaaagcaagaccagggacagaaagtccatcttttgaactgagtaaaggggcattcctataactgatccagggaatgttaagactaggcttagaaccaaaatgttatttagtaaaccctctcatttagcaaggtagacagtattcagtaattgtagcagggcaatcgtaggagaaaacaggaactataaaatcataaagactttatattctaagaaatctttttaaagaatcaacaattataatttaggagaagcaaactgaccctggaataaggaccctacrtatccacagaggctgaaacactcagaaacctttttattgcaaaataaaagcaaatataccttacacaacacattca

SEQ ID NO: 408019 - DNA, 557 bp, Homo sapiens
gaacatagcatcatcagatatatttttcaagatataatatcaatatatgcccttcaattttaatacaatattgaatatgtgcaaaattatccatcaaccagggatggttaaatgagtatgggacatctaaaaatgcaacwttgtggagataataaatggatggtgaagattgttcactctctcactgtcttgctttttaatgttcaccaaaataagtcatattctcatggttggcttcagaatatttatttttaaattattttttctttttacttttgaaagatatttttcttatgaagttaattttaacaatccaaatatttgaaattaactctatcaatctgattgtttaatcttccagtttttctatatatgctttttcataccttattggagttaaataaaaagtattataacatttatattccatgtcctaatttgtgtttgtggatatttgatatttctacttgccctacttttgtttatataacttaaggttccaatcattactttcatatgggccattgaatttcaaaataatttcataaattgatttg

SEQ ID NO: 408020 - DNA, 567 bp, Homo sapiens
aagaacatagcatcatcagatatatttttcaagatataatatcaatatatgcccttcaattttaatacaatattgaatatgtgcaaaattatccatcaaccagggatggttaaatgagtatgggacatctaaaaatgcaactttgtgragataataaatggatggtgaagattgttcactctctcactgtcttgctttttaatgttcaccaaaataagtcatattctcatggttggcttcagaatatttatttttaaattattttttctttttacttttgaaagatatttttcttatgaagttaattttaacaatccaaatatttgaaattaactctatcaatctgattgtttaatcttccagtttttctatatatgctttttcataccttattggagttaaataaaaagtattataacatttatattccatgtcctaatttgtgtttgtggatatttgatatttctacttgccctacttttgtttatataacttaaggttccaatcattactttcatatgggccattgaatttcaaaataatttcataaattgatttgctaaaatt

SEQ ID NO: 408021 - DNA, 547 bp, Homo sapiens
aatctgattgtttaatcttccagtttttctatatatgctttttcataccttattggagttaaataaaaagtattataacatttatattccatgtcctaatttgtgtttgtggatatttgatatttctacttgccctacttttgtttatataacttaaggttccaatcattactttcatatgggccattgaatttcaaaataatttcataaattgatttgctaaaattgatgaagcctctcaggaatataaaagcgtttttaatggacttcatgttagagcaaatgctactattaaacctgaaatgttaaattgtttacaaaaaacagctcattgaaccccctcttccaaactgtcttttttgcctcataaaatttaccagaatccaatgacaatgtgtatacattttttktgttgtgttgttatagttaacatgtaaagacacataatcggttatatatttaaatgtcaaattttcaaatcataccagtcactatcttttatctcactctctaagtcaggagttttcaatttattcatactttagtc

SEQ ID NO: 408022 - DNA, 625 bp, Homo sapiens
tgtgtgtaccacattctctttattcaatccaccatttatgggcacctaaattgattccatatctttgctttaaatacttttaaagtgattgtgtattttgaagttttatttttcctttgtgtaggttttaactgttctcctttgctgttttttaaattataatagatctattattcttttcatatttttttttgccctatgtgtaacttaaatcatctagtttgakttttttggttaattctcttaggttattatattttaaaattatattagaccacactatacacaatgttctccatgatgcttttttaacataagaaaataagatgattgcccttttatattgatcacttcagtgtaatacccacatacttactttaattgcttcctagtaagctttagtttgtcatttttttaagaaaatctcctcatttcactgatttatttttaaatgcaatattgaaatgaatatttttgtgcatggagatttttgtgaagcaacctaagtatttctttaatggaaatcactgtaactttatattataggtcaaacagtataagtttttttaaagcctttgctacactttgccaacttactctccagaatagttccaccaataaacac

SEQ ID NO: 408023 - DNA, 625 bp, Homo sapiens
tgtgtgtaccacattctctttattcaatccaccatttatgggcacctaaattgattccatatctttgctttaaatacttttaaagtgattgtgtattttgaagttttatttttcctttgtgtaggttttaactgttctcctttgctgttttttaaattataatagatctattattcttttcatatttttttttgccctatgtgtaacttaaatcatctagtttgatttttttggttaattctcttaggttattatattttaaaattatattagaccacactatacacaatgttctccatgatgcttttttaacataagaaaataagatgattgcccttttatattgatcacttcagtgtaatacccacatacttactttaattgcttcctagtaagctttagtttgtcatttttttaaraaaatctcctcatttcactgatttatttttaaatgcaatattgaaatgaatatttttgtgcatggagatttttgtgaagcaacctaagtatttctttaatggaaatcactgtaactttatattataggtcaaacagtataagtttttttaaagcctttgctacactttgccaacttactctccagaatagttccaccaataaacac

SEQ ID NO: 408024 - DNA, 522 bp, Homo sapiens
ccgttattaattgattatacttttatacatcattaatgatacttttatgcaagtggcagtgcattaggtttgtttacaccagcagcaccacaaacatgagtcatgtgttgcacgatgacattaccatagctgtaatgtcactaagctctactacaatgttaagggacaaccattgtakatgcaatccattgatgaccaaaaccacattttgtggcatatgattgtacttaagttaaagaaggaatctattatctaattctgagaagaaattacaaaaacgtataatgttagtaattgaaaagataatagagattatctagttcagggataagcaagttacagcctgtggattaaaatcttttttgcctataaaggtttattggaacacagatacacttactcatttacatattacctatgtttgctttcatgccacagaggcagagtgtaatcgttgagacaaggattatatggctcacaaaaccaaaaatgtttactttccggctctttatataaaatgtt

SEQ ID NO: 408025 - DNA, 600 bp, Homo sapiens
aagtgacaatttaattatagtttactraagattactaatactaagcttctttgcatatacctattgttcgtttgtatgtcttgtttggaggaatgtctgttccatcctttgcccatttttaatgagtttattttaatttattccattttattttatttgctattatcagatatacctcttggaaatattaactccatttccctgggtttcggtcacattctgttgattattttctttgctgtgcagaagtcttgcagtttgatgtcctcccacttgcttatttttttcttctgctgcttgtgcttttcacattaatccaaagaaaccattgccataataaatatcatgaagcattcccctatgttttcctttaggagttttacagtttcaggtctatacttaaatctttaattcatttgagttgatttttatatatggtgtaagtatctagtctcattctttcacatgtggatatttattttcctcagcaccactccttgaagaaaccattctttctccaatgtgtagccatcatcccttcagaactagaaatctgtagctaatcaaagtgaccttttgacttcttcaccacacatgcct

SEQ ID NO: 408026 - DNA, 600 bp, Homo sapiens
aagtgacaatttaattatagtttactgaagattactaatactaagcttctttgcatatacctattgttcgtttgtatgtcttgtttggaggaatgtctgttccatcctttgcccatttttaatgagtttattttaatttattccattttattttatttgctattatcagatatacctcttggaaatattaactccatttccctgggtttcggtcacattctgttgattattttctttgctgtgcagaagtcttgcagtttgatgtcctcccacttgcttatttttttcttctgctgcttgtgcttttcacattaatccaaagaaaccattgccataataaatatcatgaagcattcccctatgttttcctttargagttttacagtttcaggtctatacttaaatctttaattcatttgagttgatttttatatatggtgtaagtatctagtctcattctttcacatgtggatatttattttcctcagcaccactccttgaagaaaccattctttctccaatgtgtagccatcatcccttcagaactagaaatctgtagctaatcaaagtgaccttttgacttcttcaccacacatgcct

SEQ ID NO: 408027 - DNA, 569 bp, Homo sapiens
ccttccttccttcttcctttctgtaatgtaccaaatatgaactgttctcctttacatgatgtattttctttacccccttcactcctgactcctctactcctttcttatatcttgcagstatcaatttgtccattcctcaggaaaaccttcctttaaccttcaaatctggtatcctaacaatatatcctacttgtctcattataccatatttttaacacatatacattattcttaaaatacatatttgaacaaatatgtttctcataaatttattctctatattttacatatatatttgtctctacaaatctctcattttcacaaataaaaaagttcaattaattactcaaaataggaataatataaactattttctctcaaaaacactagatgctgagagagagagagagagagacagagagacagagagagagaggagagacagagagaactgaaaattaaatatgtttttcataagcaactattgaataaaagaaaaaagataaaagttgagattgcaaaataggacataatgatagtgactaaaatgatcctgaaaaaaattcata

SEQ ID NO: 408028 - DNA, 569 bp, Homo sapiens
ccttccttccttcttcctttctgtaatgtaccaaatatgaactgttctcctttacatgatgtattttctttacccccttcactcctgactcctctactcctttcttatatcttgcagctatcaatttgtccattcctcaggaaaaccttcctttaaccttcaaatctggtatcctaacaatatatcctacttgtctcattataccatatttttaacacatatacattattcttaaaatacatatttgaacaaatatgtttctcataaatttattctctatattttacatatatatttgtctctacaaatctctcattttcacaaataraaaagttcaattaattactcaaaataggaataatataaactattttctctcaaaaacactagatgctgagagagagagagagagagacagagagacagagagagagaggagagacagagagaactgaaaattaaatatgtttttcataagcaactattgaataaaagaaaaaagataaaagttgagattgcaaaataggacataatgatagtgactaaaatgatcctgaaaaaaattcata

SEQ ID NO: 408029 - DNA, 587 bp, Homo sapiens
taatgtactctagaacttttcccctatcattctgatggactgaaaactgccttttagacaaaataagattgaaacttttttcataccattttgtatccattcttctcactgtaaaaatgcaacacattgaawaatcatgtataggatataattaggatataattcttctgaagtactttcataaccatgcttaaaatttatcataatgtattttcagaatgtcacttaatatttgaaaagtttttaagttatatatttatatttcttatagaagcataaaatccaagtattaagtttatttcaacttccagctctctttatgaaaatgaatatgagcatagataaactacatttcagtaacagactagaggtttttcagcagcccttttcaaactattcacattattttctgatggcaatgacatctcaaaagaagcacgatatggtctttgaataccatcaaacctccttgctgtcttacattcaacaataggtggtaaattttctttttataagaagatgaatatattccaaatgcaattgttataaaagtagctgacattatgaataaaaaatgggaggaaggg

SEQ ID NO: 408030 - DNA, 552 bp, Homo sapiens
tatgtttacattccaaagtgtgcttgaagtaaatcttaacattatgatgctattttgtgacagagccattctttaaaatttaaccaagtatggattataggagaaacaaggtgaacataaatactagcattgctcaattgtgtcatattactcttttgtcaacatttgcttagttcaaactattggagtgtgcttacagatttaagatagcagaatccagcatctttaagggctaaatctaaattctaagataaaaattagtaaggataagaagattatctgtcagattctagtagacatttatgttggaagtgcgccatgttgtgtattttgcagtaactcctggtgacttgggaaattgcacattagctgatcaaacatagtgcattcattgatccttctggatactcacagtgtggagcagcctcacttcagcatatctgtccatctgcttatcaagcatctttgtgkgtaactgcaacatctgaatataagcaaataacacgtttcaaacgttttcggcataaaatgggtattaactgagaagctaat

SEQ ID NO: 408031 - DNA, 597 bp, Homo sapiens
tctaactttgcttgctaaggtctcctcagaagccaagcagatgccagcatcatgcttcctgtacagcctgcagaactatgagccaattaaatctcttttctttatatattacccagtctcaggtatttctttatagcaatgcaagagcagactaatacagggaatattcattttctagccaataataaccaayttagttgctaaactaataatttaacattttgctatcaaggagacgttgaaattgtggttattgttaacttatgtggaatgttaagaagctctgaatagtggaaaaggaaccaagagttgagaagcttgggtttaaggtttggtgctaactcactttgttgctgctggcaagatccataattttgtagggctttagttttctcatatggaaaatgagtttggactaagttttctgcttgctttaagactcctgtgattctaagtctgtaaatatgaaatgaataatgctgtaatttgtctattatgggggttggggatgttaaatgaattcattcccccaaatgaatgaatccagtttatggctttattataagtttcctgaggcataaacagtgtcacaggtgc

SEQ ID NO: 408032 - DNA, 597 bp, Homo sapiens
tctaactttgcttgctaaggtctcctcagaagccaagcagatgccagcatcatgcttcctgtacagcctgcagaactatgagccaattaaatctcttttctttatatattacccagtctcaggtatttctttatagcaatgcaagagcagactaatacagggaatattcattttctagccaataataaccaacttagttgctaaactaataatttaacattttgctatcaaggagaygttgaaattgtggttattgttaacttatgtggaatgttaagaagctctgaatagtggaaaaggaaccaagagttgagaagcttgggtttaaggtttggtgctaactcactttgttgctgctggcaagatccataattttgtagggctttagttttctcatatggaaaatgagtttggactaagttttctgcttgctttaagactcctgtgattctaagtctgtaaatatgaaatgaataatgctgtaatttgtctattatgggggttggggatgttaaatgaattcattcccccaaatgaatgaatccagtttatggctttattataagtttcctgaggcataaacagtgtcacaggtgc

SEQ ID NO: 408033 - DNA, 522 bp, Homo sapiens
tgttccagctgggtgcggtggctcacacctgtaaacctgtaatcccagcactttgggaggctgaggtaagcagattatctgaggtcaggagttcaagaccagcctggccaacatggcaaaaccccatctctatccaaaatacagaaattagcaaggcctggtggtgtgtgcctggtcccagctagtcaggaggctgaggcaagagagttgcttgaacccaggaggtggaggttgcagtgagccaagattgtgaccactgcactccagcctgggtgacagagagagattctgtctcaaaaaaaaaaaagaaaagaaaagaaaagaaaagaagaaagaaagtaagtgtttcttactttcaatragatttttgctgttgtttttgttagaatatgttttatttcatgtctgaggatgaaattactgaaaagacctaattcctaatttagggatatacaaatacagatatcaaattgcattaatattaacattctgaatgttttcagatacttttacatagtacac

SEQ ID NO: 408034 - DNA, 590 bp, Homo sapiens
ccccacagaaatcatctttgactaatatattactagagcgacatatgactatattacaagctaaaagaaaaaaacaacacagggtcaataaactatctggaggaacattgcaaagcttggaaaaactaaaaatgattgccaagacacacataagaagaaacagggaaaaaaagcacaaatatcttaagggtataggacaagaattgggaattctgtcacatctatgcctggaaaataagggtggtacacagcacaacatgaaacttgtatgattacagaaaaccgtctccaggtgactgcccagaggtattcacctgtcggaaacatatgactgtcaagatgaatcagagctgtgtaaattaaccagtgggtacagtgtaggcagaaatatgttttagagagaaaggctgtagccttggatttgtgggcaggagtaggcrtgcagagaatgaaaaacagaactaggaaagagaacaaaacaaattcctaattcttttcttcaactgcttgtgcaattcagtagctgggcttaagtttccaaacaggataagagatggaaagtaatgacatcacctaaagtattaacataa

SEQ ID NO: 408035 - DNA, 595 bp, Homo sapiens
gtctattcatatcctttgccattttcataattgggtaatttgtctttttattgtttagctatggaagttctttatatattctagatataagaaccttatcaggtacatgatttgcagaacttttctcccattctgtgggttgtttttttactttcttgatggtgtccattgaaatacaaaastttttaattttgatgaagtccagaatatgtatttttccttggttcacatgtacttttggtgtcatatacaagtaaccattgtctaatccaagttcgtgaagatttaaacctatgttttcttctaagagttttatagttttagcttttgcatttagttctgtaatcagtcatgagttaattcttgcatatgacgtgaggtaggtgtccaactttagtcttttcatatgtatagccagttgtcccagaactattcattgaaaagactattctgtcctcattgaattatgctggcatctgtaatgtcttttttctgattccttttcttacaccaaatgtgtggtattttccagcaccaacaaccagttctccaattctctagtactaactgggtgtccaacaattccattcaattc

SEQ ID NO: 408036 - DNA, 608 bp, Homo sapiens
agatatttctcaaaagaagactacaaagggccaacagatatataaaaaaaatcaaaatcactaattataaggcaaatgcaaattgaaaccacagtgagatatcactccacacctgacagaatgacaattatccaaaagataaaagataaagatattggcaaagatgtggaggraaaaaaaacacttttacactgttagtggcaaggtaaactggtacagacattatgaaacacaatatagaggttcctcaaagaattaaaaataggacaagcatatgatccagcaatcccactactggatgcatagcccaaggaaattaagagcttcatgccctacctactgagctagccaggcttctagcccaaggaaattaaatcagatgttgaagagatatctgcactcccatgtttaccccagcaatattcccagtggccaagatatgaaatcaacgtaagtattcatcaacagataaataaagaaaatgtaatatatgcactcattggaatactatttagatataaaagagaagaaaattctgtaatttgtgacatcaatgaacctggagaacattatgctaaatgaggtaagctaagcactggaaaacaaat

SEQ ID NO: 408037 - DNA, 507 bp, Homo sapiens
tgtatccataagcaaccagtgtattgccacaactgtgataagacagtggctctttgttgatacttcccttgtaattgaaaggcatggccttttcaaagaacrtgatgtttgcttatagaagacaagatatctgttttacttaattataaaatatgaagccatgttctggtccatcagtcttctaaaatggcttactgttcctggagggtgagaccatccctagcatgagaaggtcactactgtatttctatgccaccatgcttgttccacctgtcatacataatcaccacacttcctaacttggagaagcagaaaatcatgggtgaaataatgcctacattttggtgttccaacataaagtgtatatgctttaggtttaattgtagtttttaaatgagtatattgacatctgccatatcttacctgttagtttgctgtttggtagtgtgcttttggactattagtttgctttttgtgcactagaacatgaatatcttagatccactg

SEQ ID NO: 408038 - DNA, 602 bp, Homo sapiens
caaagatttgatatcttaccttactcctggacctaaaaagaaaaatctgaaccatgcgagatctgtgttcttttcctctctcagctstactgcttggcacttctcttaaattttaaaactcatctttagaaaaaaaggaccaatcattgttcaaaaaggaccagtgattcagtgggtttcagacaatggcttagctaataacctctttcctaatcatttaagtggtatatggattcccacacttttagtaatgttattaaattatcccctgagaaatgttttcctgtgatcatttctggcttctggtttggttatgagtaattctcctagaataattctcctaggataattctattctactcttttataattcttaaactggatactctaattgaataaaactggatactgtaactgaataaaagttaatatctttaataaagtcaaggataaatgggtgattatttttacttcaagggcgaaatacagaattgttaggaatcataggtctgaaaagcaaaacttcaaagcctacttagcagaattctttgcttactcaatgctgggctaagtaaatgtgggctagtttcctttagatttga

SEQ ID NO: 408039 - DNA, 570 bp, Homo sapiens
tcagttcaccttgccccaatatgtaaaagctgtttatcaatatcacaaaattatgaaaccatggaaaaacatgaagacaaatgcttaccaagttatccccactctggtgagtgctctctttttatttgcaacttaaaaatagttatctgttgtgctaaaagtaagctagggggatgaaactgacataatcccaataaactcaagtagaagytgaaacaaataaaaatgcctaagctaaaaattaaataataaatcatatgcaaatacagcataataaataaaaataataatgttacaaaagtagatgaaattgtaaaaagtagctggaccaagttctagttaacatttatcctttatcttatttaaaaaaaaaaaaagagatttgacctagggaacatttcttctaacatgaagaatgaatgagagaacaggacattgaacccacagaactaaaatgtattataaacaacatgggttttggaatcagaagacctaatataaataggcttttgaacataggcaagtcacatcatttctctggaattttttaatatgatttagttttttaga

SEQ ID NO: 408040 - DNA, 555 bp, Homo sapiens
taaaggtacgatttaatttttttgcatgtggatgtctactttttctaacaccattattgatgagactatcatttccctatggtatattcttggtacttttgtcaaagattagttgaccttatatgcttgggtttatctccagtctattaaamcctgtttcactggtttatctttgtttttatgccatgctaacattttgataactatagctttgtaatatattttaaaaatactccagtaaaatatttagtatatagtagatattttgaatgactccagttttgctgtttttgatcaagattgctttagctatttgtgatcatttgtggtactacagaaactttaggattgtttttctatttctgtgaaaagtgccattggaatttggatagaaatttcacagaatctgcagatcattttggatagtatggatgttttgacattattgaattttcctatccattagcatggaatatctttccatttatttgtgtcgtcttcagtttgtttcattgacgtttaatgtacagctctttcactttcttgattaattta

SEQ ID NO: 408041 - DNA, 555 bp, Homo sapiens
taaaggtacgatttaatttttttgcatgtggatgtctactttttctaacaccattattgatgagactatcatttccctatggtatattcttggtacttttgtcaaagattagttgaccttatatgcttgggtttatctccagtctattaaaccctgtttcaytggtttatctttgtttttatgccatgctaacattttgataactatagctttgtaatatattttaaaaatactccagtaaaatatttagtatatagtagatattttgaatgactccagttttgctgtttttgatcaagattgctttagctatttgtgatcatttgtggtactacagaaactttaggattgtttttctatttctgtgaaaagtgccattggaatttggatagaaatttcacagaatctgcagatcattttggatagtatggatgttttgacattattgaattttcctatccattagcatggaatatctttccatttatttgtgtcgtcttcagtttgtttcattgacgtttaatgtacagctctttcactttcttgattaattta

SEQ ID NO: 408042 - DNA, 532 bp, Homo sapiens
ttgaaacattcttgcatcccagggataaatcccacttattcgtggtgcatgatccttttaatatgctattgaatttagtttgttagtgtttatggtaatcagggatattgccctgtatttattttcttgtagtatccttgtgtggctttagttatcaggatagttgcttgttaaaatgactttggaaakttttttctctaatttttttgcgagagtttgagaaggtttggtattaattcttctttaaataatataattcattggcgaagccatcaaacccgggtctttgataagagattcaacctttcttattccattataggtctatcagattgtctatttcttcataattcagtcttggcaggttgtatgtttctggaagtttaaccattccttctaggttacccaatttgttggggtataattgttcatagtagactcttgatcctttgtatttctcccttcagatctactaatatttgctttatttatttaggtgctttgatgctgggtgtatatatatttactatca

SEQ ID NO: 408043 - DNA, 575 bp, Homo sapiens
aatcaaccatgttgaaatgcatttttaaaatgtcatagcagtgaatattttaaaagtcagacatattccaatagttatgcgtagggaacctgcatatttatgatacttaaaagttagaagccaaaataacttgatttaattatcttgctctcacaatcgtatatatgtatttatttccttatgatccagaaaaatgtcgatttccaatggggagaatgagttactaattcattgtggtgaaaacttggaagactttattatcctaaaatmtaatgtatatttaaaattatacttataatatataataattaatttatactttgtcctcaaggtaaattcaggatgtgagtatgtatatgtatgtgtatgtatatacatatgtttgtatgtgtgcgtgtttgtgtatgtgtttgtgtatgtgtataatctcttgcttagaataaatgatcttttcacaaaattatttattgtattaaagtatcacttgactctttctaagttattttattcccacatttaagttttgtctcctatttttattttatttctgtcgttaaaaagtttattttgcaaaa

SEQ ID NO: 408044 - DNA, 502 bp, Homo sapiens
tacatacatacatacatacaccagtcccagctaccctggaggctgaggcaagagaatcacttgagttcaggaattggaggccagcctgggcaacatagtgaaacccctgtctcttttttttttttttttttaaagcatatgccatatgacagcagtactacatgtccatatagggaaatacttgcacaagtccagggaaggaagtaggaatgtgctccttgaaacattttttgtagtagcaaaaaattgtcattaatagggaaatgcctaaataattgtgatatagccaaacaatggaatactgtgccgcagttcaaaaagaattatgtagatctcttatactgatatgcatagatttagctttaraacaatttaaatgaaaaaaacaagttacagatatatgtataatatgatgtcttttatgttaaaaatacttatatatttctatgggaacaaatatctatgaaaatgcattgaaaaaagattggaaggatatctgtca

SEQ ID NO: 408045 - DNA, 565 bp, Homo sapiens
ggaaataatcccctccaaagctgtatcaaagacatgcagtttcagagtaaataggctgcccttatggctttgggtgaaatgtgagaatgcagcaaagaccttgagaatgctyagaaggagtggaaaccttttttatccgcttttacaaaagtcactgcctgaggggaattcacgaactctagaaacaaatcgcagctgttcattgctgaatgagactgtagtcctttgaaattaactataggcctctgtatttctagacactaatgttctcctctgtctgcagccttgacgttgtggcctaatgttcttgatcatattatatgttttatacataataatttcatgattccaaagatacaatcctttctcctaagacttgtattcagcagaacagagtaataaaaaggttctgtacccatttatctcctgttctggggatctctgggtagtatctgagaaggcttcatgtgctgtgagggacatctgtgttgtcaaatagaagaggaattctctcacaacaaggggaaacattgagcgcaccctgcatagtgatttctcacacagc

SEQ ID NO: 408046 - DNA, 565 bp, Homo sapiens
ggaaataatcccctccaaagctgtatcaaagacatgcagtttcagagtaaataggctgcccttatggctttgggtgaaatgtgagaatgcagcaaagaccttgagaatgctcagaaggagtggaaaccttttttatccgcttttacaaaagtcactgcctgaggggaattcacsaactctagaaacaaatcgcagctgttcattgctgaatgagactgtagtcctttgaaattaactataggcctctgtatttctagacactaatgttctcctctgtctgcagccttgacgttgtggcctaatgttcttgatcatattatatgttttatacataataatttcatgattccaaagatacaatcctttctcctaagacttgtattcagcagaacagagtaataaaaaggttctgtacccatttatctcctgttctggggatctctgggtagtatctgagaaggcttcatgtgctgtgagggacatctgtgttgtcaaatagaagaggaattctctcacaacaaggggaaacattgagcgcaccctgcatagtgatttctcacacagc

SEQ ID NO: 408047 - DNA, 595 bp, Homo sapiens
atgttgttactattgttactttaaacagtttcctttagatcagtggggaatatgaaaaataaaagattcttattttactttcatcttttcttttatgattttttaaggcaagctatgcattgtctgtaagaaactcactttaaatataaagaataggtaaggtaaaaaggagcgagatggagaaagatataccatataatcactaaccaaaaggaagctgaagtagctgtatacatttcagagaaaacaaacttcagagcaataaacatcagggatttaaaaaggttgggggagcattacatacgtatttggcagtcaattctccaaaaagtcttatcaatcctaaatatatgaacttaacaacaaagtatcaaaatacttgaagcaaaagctgacagaagtgaaatgaaaaacagccaactccactattatagttgaagacttcaacactcttctttcaataattgatayagattaagcaggcagaaaatcagtgtaagtaggtaattgacctgagcagtactatcaatttgatgtaattagcattcattaaatgctccatttaacaagagcaaaatatacatttttttcttca

SEQ ID NO: 408048 - DNA, 556 bp, Homo sapiens
gatttatatgcacattaaggtgtgagaagcactttttccctaataacattttaatatgatttccaaatgtatatcttcactggagaaaattttgaaactacaggaaaaaacaaaaaggtaaaaaaaagtatacataattctgccaaaaggtaatgactgttaatttttgtatatatactctattttgtgtatagacacacaaatttctaccagctccaattttttttttttaaacagagtcttaccgtgtcacccaggctggagtgcagtggtgggatttcgactcrctgcagcctctgcctcccaggctcaagcgatcctcccatctcagtttcccaagtagctgggactataggcatgtgccaccatacccggctaattttttgtatttttggtagaggtggagtttcaccatgttgcccaggtcgatcttgaactcctgaactcaagtgatctgcctgccttggcctcccaaagtgctgggaatacaggcctgagccactgcacccagcccagctccagaatttggatctttcaaaacataatgtttagttaa

SEQ ID NO: 408049 - DNA, 563 bp, Homo sapiens
ttcttagctcatcagctatcattagtgttagtgtattttacgtgtggcccaagacaatttttcttccactgtggcccaaggaagccaaaagtttggaaacgcctgcctagatcctattcctttaattgagcagccacctatcgtatgctttatagaattagagaaactttccagcatggtttgggtggagtgatggtttatgatctgatgtgtgagagatagcaaatagaaagcaggaacaaggtcatgaatccacatatgcagtggtgtgaaaaaagggtcaaatgccctcttgctggtaaatatagatgtctacatattggcaatgttttcartgtttttcctaaaactctcttcttgtttttgctatttctgaagaaatgtgaggaaatgctttcattcacttaaaaaattagcaaattgttcattttcttgtcacagaaaaatgccagcatcttgcattagcaagatggcttttgaagcttaagattgatgcaaagggagttttaccgcagcagcatttttcactagaagggataaaagggaggggagagatgaaagat

SEQ ID NO: 408050 - DNA, 595 bp, Homo sapiens
agtagaaaatctgattttttaatgatctttcccagatgttaaatattgacattaagatttccaaatgttaaatattggggaaaaaaaaaacaaaacaaaaaaccaactgtggagatcaaacaaatcacatcagccaggtgactctggcctaagggctgctggttggttcaccacctctttctcagacaggcactgaggagtgttgtctagaaaacaaagagcagtgggaaggactgaatgatgggcacctgcattgtgggscttctgctgaacacatttagtgctttccaaagtcccattttccctcctttgttacaaaagccaaaatccatgtgcctgacctgtgtttaccttggcaatgaaagcaaatgatatatttggctttatttaagggagggcctcacctggtggtggggcggtcagagaaaatttcccatcatctgaatgagagacattgagccctttgccctactctactacttttcaccagcaaatattcctttgtaaggcatctgttgactcactctgtttacagaaggggaaaatggcacgttgatatggaagtatattaactagataactcaagaagacagca

SEQ ID NO: 408051 - DNA, 595 bp, Homo sapiens
agtagaaaatctgattttttaatgatctttcccagatgttaaatattgacattaagatttccaaatgttaaatattggggaaaaaaaaaacaaaacaaaaaaccaactgtggagatcaaacaaatcacatcagccaggtgactctggcctaagggctgctggttggttcaccacctctttctcagacaggcactgaggagtgttgtctagaaaacaaagagcagtgggaaggactgaatgatgggcacctgcattgtggggcttctgctgaacacatttagtgctttccaaagtcccattttccctcctttgttacaaaagccaaaatccatgtgcctgacctgtgtttaccttggcaatgaaagcaaatgatatatttggctttatttaagggagggcctcacctggtggtggggcggtcagagaaaatttcccatcatctgaatgagagacattgagccctttgccctactctacwacttttcaccagcaaatattcctttgtaaggcatctgttgactcactctgtttacagaaggggaaaatggcacgttgatatggaagtatattaactagataactcaagaagacagca

SEQ ID NO: 408052 - DNA, 530 bp, Homo sapiens
cgtgcaccattgaggggcctgagtaaatgcctgcactgcctggcactgcaaccccaatgctcaagcatgccatctgagggcctggggattgcyctgccccacccactactggcctgaggctgggcctgcccagtctgccaccactaccactgctggcgcttacccacatatgccacctgagggtttagggtctggcttgcccaatctgttgctaccatcactagcagcagtgtgtactgcctgggagcctgagggttggcctgccatcactattacaatcgcttatgccacacatgctgcacaggagactaaggtctcatccatatgctcagcctaccactgccactgctggtacctgagcaagccacatagaggcctaagaattggcccttgcagacctgctaaaattgatgccagtgtatggccaccaggggcaggtatgcttggcctgctgctaccaccactggggcctgaggatcaggatgcctggtgtccctgtccccagcaaagcctcaccacaggctacacca

SEQ ID NO: 408053 - DNA, 538 bp, Homo sapiens
gatggtcaaaatagcatatatgctttctttttaagctaggtaaggccaggtgtgatgactcatgcctgtaatcccagctctttgggaggccgaggtgggcagatcacttgaggtcaggagttcaagaccagcctagccaacatagtgaaaccctgtctctactaaaaatacaaaaaaatcatccagatgtgatggcatgcacccatagtcccagctactcgagaggctgaagcaggagaatcacttgaactgaggtggcggaggttgcagtgagcagagattgtgccactgcactccagcgtggactacagagtgagactccmcctcaaaaaaaaaaaaaaaaaaaaattctagggggaaactcatttttaagttatgggctgtaaagtactttagatcctgcacaagattaattcaaaaggtaaaaaaattaaaactatgtgttaagttgaaaatatctccaccacatataatttaaacaccaactttaaaaaagcttttaaattaaaaaagaaagtctcaccttcctctggtaaat

SEQ ID NO: 408054 - DNA, 583 bp, Homo sapiens
aaatgtctttcacatgaaaatttcctgaatctatgacatcctgcctcttcggtgtgcgcattttgttgtattaaatggagacattatatagcttatgaagatatgaagccctatagttaattatgcttattgagatcatgtttattgagattactaraaaaactctgtcaaatagtgttccctagtttttgaatctaaggggcaggggcaactttgctttgtctttgcatctcagtccctagtatatgttgaatgaatgaatgcttttagacagaaggggaaattacagagtacatttgaaaggcctcagctatatttttttctatcatacttgagctccagtaagaatatctactttgagaatactttaatccttaacaggaaaaattcagtttccttatggagaattctgtaatgctcttggttaggaggcagttattgttccctttttaccttgttccaaagttctttacacagtcaaccaaattgagtacatatctgttccttttcctccaatattaaattaaaagatttggagaattctatagatggagaggatatttggggatcatttaaaatttca

SEQ ID NO: 408055 - DNA, 546 bp, Homo sapiens
tggtttctttttcagtccctactttttacagagaatgctccttttaaatattttagcttctctgatggatctgaattagctatggtcatttttgtagatgaagaagaaacgaaattctaatggcatataaactctagaaagacagggacttttctgtcttcttgctgtatccccagcaattagaactgcacctggcaaatagttggcattcagcaaatctttgttgaataaagaaatgaataaagaaaagcttgaataaattgctgaatttaaaggggaaaaataaattagacaggaatcttttctttctacttgtttttatatcaaaattcattttgtcaggtgaaacctaataaaaatgttggsagaaacttttcttcctcggggtgcaactcttgtctaatacactctttctctggtgtcacagttaacctcttgttgaccattcatgacattgactaagcattaacagatttttatcttaggttcctacagattttatggggtctacatttctcacccattcttcatactctttgctgggga

SEQ ID NO: 408056 - DNA, 596 bp, Homo sapiens
acattcttttaggttgataccaaagtaatcatggtttttgccactactttcaatggcaaaaacttacttttgcatcaagctcatagtagaacattacagagagataaaataaatctttctcatctcgccttttggtgacatcacactttaaaaataggtatgagcaggagcccaaaggaggaatttcagttaggctaatcggcttacaagtagaatgtcttccaggattcaagaacttttggcaaacattagttagcacattcttactaaaaggtaaaaaccttttttttctttgtcaggttttaaatgacacttgaragggaaactctccaaaccatagccaaaagcaggttaatccaacttcccccagccagctcaagatcaatgaaaaagttagccctgaggagttcaggatgttaattgtgaaacataattccattacatttatggctgtataaactgagcagagctcctcttgaatattatgaggtgttctttgcagtgcgggcaattggttatactggatgctgtaacagatactttattgaaaagaaccacagtttaatcacaagctgttcattaggactgtggttctc

SEQ ID NO: 408057 - DNA, 596 bp, Homo sapiens
acattcttttaggttgataccaaagtaatcatggtttttgccactactttcaatggcaaaaacttacttttgcatcaagctcatagtagaacattacagagagataaaataaatctttctcatctcgccttttggtgacatcacactttaaaaataggtatgagcaggagcccaaaggaggaatttcagttaggctaatcggcttacaagtagaatgtcttccaggattcaagaacttttggcaaacattagttagcacattcttactaaaaggtaaaaaccttttttttctttgtcaggttttaaatgacacttgaaagggaaactctccaaaccatagccaaaagcaggttaatcyaacttcccccagccagctcaagatcaatgaaaaagttagccctgaggagttcaggatgttaattgtgaaacataattccattacatttatggctgtataaactgagcagagctcctcttgaatattatgaggtgttctttgcagtgcgggcaattggttatactggatgctgtaacagatactttattgaaaagaaccacagtttaatcacaagctgttcattaggactgtggttctc

SEQ ID NO: 408058 - DNA, 606 bp, Homo sapiens
gtccctaggccctgggtaattctgatatgggtggtccacaggccacatttggggaacactgatatagtgggtcagggaaggctgccttgagagtgaaaaaggtcgaaaggatgagaagtagttgtgtttctaactggtggttggaggacaagatgtctaggcagacagaaagagcaaaaagggccaagatggccagaagggtagactacattccttggtcggggcgggggtgggggtgttaagcctgcttgtccaggggcagagccttggtgttgttgcttccaggggttagtctaaggaaggtaacatttagggttgcattctcaggtragcatttggaaagcaaggcctagttttccaggaaatacttcctaataccaaaaaggaaagaaaaaaatagaaagaaagaaaagtatgcaccccgggtctaatttcaccctcagactattcccactactggaaatgaagtggttggaaaatgcctttataagcaaaatttggtgttataattagaaaattatctctccctagaacattttgtgaaattctgctgtgaggtgtcaacaggtccttgtggggccctatccagcagagatcaactaacat

SEQ ID NO: 408059 - DNA, 592 bp, Homo sapiens
gggtggttaccagagtctaggaagggtagtggggggctcagggaaaggttgggaaggttcatgggtaccaaaaaaatagaaagagtaaataaatcctactatttgattggacgatagggtgactatagtcaataatcactcaatcatacatttttaaataacttaaaaagtataattggactgtttgtaactcaaaagataaatgcttgaaggaatggatatcccattctccatgatgtgcttatttcacattgcttgcctatatcaaaatatctcatgtaccctataaatatattaacctactatrtacccacaaaaattagaaaatttgtttaatagtttaatatagctccttgagggtaagaatcagtgtatttcctcactgtacccaaaccacccctcccagcaacatacacaatagtttgcactaagtagagaagatcaataaataggtaataaaaattagatgccccagaaaaataatcaattacttttaccttctagacaactgattgatgaccaaagtattaaaagagaatttcaaaaattcaaaaagatcttttctataaaagcatacagacatgtaaaatga

SEQ ID NO: 408060 - DNA, 632 bp, Homo sapiens
tatccctttggtaccattctcttgaaacgttataataaagcacactggaaaactaataacaaaatctgggttctgttcctaattagctgtttggtttcaggaaatcaactttacctctctgggcctcagttaccttacctgttgaaagagagggcttggattactagaggcttttttttttttttttttaaaaaaaaaaaaagctcactgctaattcttcccttaraatgaagccccatgagggtggctgggtggcagtgaggtaggtagagagtggtctgaggggccaggaagagagttagcaaacctgtgtactggcccacctgggggtcttataaaaaggcagattctggggtgaggcctgagtttctacatttcttccaagaagatcccaggtgatgctgatgctgctggtccatggaccacactttgagtagcaagacgctagatgacttcttccccaactttctcattccataggtgaaactggatcctagaaaagcaaagtgatttacccaagctcacacaacagttgggtagtacaccctatataagaattcatggtatcatgactatcagtttgatgacaatatcacttgctacatctctcatatggcttctgctgctaaaag

SEQ ID NO: 408061 - DNA, 480 bp, Homo sapiens
tagagagagatttagagaaagagaaataaaatgtcacaaaatggtaacaattgaagaatttatgtgaaaaatrtatcagtattattttcactattcctgaaacattttgtaatctgataattttaaaaattaaaagttttgggaaagaagataatagagtcaaataaaaactaaaaatggaaatactgcattagaggactgctccaaatgccttgaaataattaaattggactatattattctggttatagcaacaaatggctttaaaataaaataaaaggcagtggtaaacagtgacaaagacacaagagattcacgtaagatgaagacaataaaaattcattgatgttagctacatgaaagacatcagtgacttaaatgaaagtagtttcaatggggtactaggaatgggaaccaaatttcagtagagtgagggtcaaataagcactgaaataaaacacagccttgtaataaactttt

SEQ ID NO: 408062 - DNA, 480 bp, Homo sapiens
tagagagagatttagagaaagagaaataaaatgtcacaaaatggtaacaattgaagaatttatgtgaaaaatgtatcagtattattttcactattcctgaaacattttgtaatctgataattttaaaaattaaaagttttgggaaagaagataatagagtcaaataaaaactaaaaatggaaatactgcattagaggactgctccaaatgccttgaaataattaaattggactatattattctggttatagcaacaaatggctttaaaataaaataaaaggcagtggtaaacagtgacaaagacacaagagattcacgtaagatraagacaataaaaattcattgatgttagctacatgaaagacatcagtgacttaaatgaaagtagtttcaatggggtactaggaatgggaaccaaatttcagtagagtgagggtcaaataagcactgaaataaaacacagccttgtaataaactttt

SEQ ID NO: 408063 - DNA, 631 bp, Homo sapiens
aagtaagtgggggcatgaacggaatcactggggtgagtacaatactgtttcttgatcttggggttggttactccagtatatgtaatatctgagagtccattgagttgtgcacacttggtttgtacacttttcttaatgtatgccatacttcaataaaaggtggagaaaagaaaagaaactggaaattaccaatgcaaaataggaaatggagaacaaccaaataaggaatatggaaactctctgctgttttactgtttctaggatgtttttaaaaagcatttatgtctcagaaattcaacattcagtagtgatttgtgacctacaacacccaaactcttgaaagtaatatcattcttaaatagacatttattcatccaaaaaagaagttcagktaagagtgttcaatgaatatggatgagtttgagctaagtatatatcaacacttggggttctattcctaactctgattgctccttttctatcccatcgactggctccactagctccttctcctcctacaatcttggttcaactcttttctttctccccctataaattaatccattctcacctcttcaaccatctaatttgtcaggttttctgaagtgaaatctctggctataattgttct

SEQ ID NO: 408064 - DNA, 574 bp, Homo sapiens
cttacacaattagcaaatattagaactgtcaatgaagtcatcttttgtaactcagcacccaggaatacttactaaacttttccagtgaaatgtatatttaacatgctttgaaaactcccagtgacagaaaggtaataatcaccctgtgctggatatctttatatccctctacccattgggctcctggcacacagcaggctgttctattagcgaagtgaaaacatgctctagttgttaggatgacactttcttctacggatctactaccagtgcctcttccctsaaacaagtgaaacaacctctactttagtgaaataggaaatacattgtgtttccactatgacatatacaaaccacccatatttctattttctaccttctttctcttcaattaaattaggaaattttcccttctttcctttagggcctgcccttctaactgtgcttggtctttgtaggaggctgaataattcccccgccttcaccccatgtcagtgtcctaattcctggaagctgtgaatatgtaatcttacattgtaaaagggattttgcacatgtgattatgttaatggtc

SEQ ID NO: 408065 - DNA, 574 bp, Homo sapiens
cttacacaattagcaaatattagaactgtcaatgaagtcatcttttgtaactcagcacccaggaatacttactaaacttttccagtgaaatgtatatttaacatgctttgaaaactcccagtgacagaaaggtaataatcaccctgtgctggatatctttatatccctctacccattgggctcctggcacacagcaggctgttctattagcgaagtgaaaacatgctctagttgttaggatgacactttcttctacggatctactaccagtgcctcttccctgaaacaagtgaaacaacctctactttagtgaaataggaaatacattgtrtttccactatgacatatacaaaccacccatatttctattttctaccttctttctcttcaattaaattaggaaattttcccttctttcctttagggcctgcccttctaactgtgcttggtctttgtaggaggctgaataattcccccgccttcaccccatgtcagtgtcctaattcctggaagctgtgaatatgtaatcttacattgtaaaagggattttgcacatgtgattatgttaatggtc

SEQ ID NO: 408066 - DNA, 540 bp, Homo sapiens
gacattctctgcatcccacagtccggaaggtagttggtgctgagtgtagcacaactggttagacttaaagtggccttcccataatctgaaagcaaaccaagggtcttatcacagtatctttctactctttgagatttgaatactgtagaaatggaatcagctgcttctaatggagatttaacctaatttgattttaaatcattatctgttttctggtcacccctatccaacatcctacctgaatacacacacacaaaaaaacatgcacacacatacacactgtttattccatgtatttccaaagatttaagcgggatgaaagtgagagagctaagccaggctagagctagggcagctgaagctgtcacggagctctctcyccctgacatataagtctgccaaattgaacagccaactagcaatcatttatcttttccctcatctcctcagagcagaagctgatgttcagggtagttttagaatatggacaggggtctccacggccaagaaaagacatctgacgcttccccctccccttcc

SEQ ID NO: 408067 - DNA, 598 bp, Homo sapiens
ggagtttgaacaattagcctaggggaaattggttatgggaaaacttggctagaaaaataacttctagcactgtttgccaagtaggaaaacaagattactctggaaagcggtggttattattgatgttacatctgagctgccaatggtcacctcattgtgatttatcgtggtattttaataataagcttcttgtcaagtttctgttataatatttataaaagtcaaaattccctagactcaagtctatgctatttttttcagtgagtgcacatattttggtgtttatataatttagcacaccattatgtgcttctcstgatattttaactccgaaaatacccatttgattgttctgaagatcttaatgtcttttattttaggagttgggtattttctgatttaaaaatcatccatctgccctggtcacaccatgattaattttttcttccaatataagaagttatttcatacttgtaattaatttattttccatatatgccataattttaaatgatcttataaatcagtacaagcatttctcagagaatttggggagcaacttattttcccatgaaggcaggtgctttttccacaggtt

SEQ ID NO: 408068 - DNA, 488 bp, Homo sapiens
ctgcttgatcacagaataatattaaaacacttttaagtttaagagcacatttaggtcacttttgatgacagatatactttttaaaggttcttaatattggcctataaagcaagtgtcaatgagcttgagctgcatacaaatgacttttctgccttccacagggttcttcaaagctgtgggcactagagggtgctcttggaactaatactaacaatgagtggcctaaacttgttytttcaaatcaatactatcaagatccaaaaatgtttcgaatgaaatactatatcattattagtttttaacactgggctctgtgattgtcatcagcccaacttccaaaacaaatcacaaaaacagcaattaaagccaagaactccgtagcgtgacaattatttgttgttaaaatcaagattcttctcctactcttttaagtattctcccactttttattcaggatgtatacatttttataaatgacaaggaaaacg

SEQ ID NO: 408069 - DNA, 623 bp, Homo sapiens
acaatagggatgtaaacacacaaaaaaataagtgttcaaaacacttaagaaacagctttttacttaatacatgttgcatcatacctaaaaaaatacatttgacataatgtcataatataaaccatacttygaaatcatatgttcaaatcaaaatattgacacttaaaaagaagttcattttcccccatcaattgatatctgagatgctagaatcaggacataatgggtaatattagtgatcactggttaagaacaagatactctattccgttatttgtccatttatatacaaataccagacacacactatgtaccaggtataatatagatactgttagaatacagtgatgacctcatttatagaacaatgtcacttctgttttatgataagcccaaatcaagaactctttgtggctatggaataaataatttctgcttataggagaaatccaattcacaagtactcaaaattaaaaataccaaacttacccatccacaagtccttgctgaataatcaatcgctgagcctcatctctagaaattttgtggtgaaaccatggctgggaccggtggatagctaaagaaataggatggatgaatgcaaagctttgtttgagatgact

SEQ ID NO: 408070 - DNA, 623 bp, Homo sapiens
acaatagggatgtaaacacacaaaaaaataagtgttcaaaacacttaagaaacagctttttacttaatacatgttgcatcatacctaaaaaaatacatttgacataatgtcataatataaaccatacttcgaaatcatatgttcaaatcaaaatattgacacttaaaaagaagttcattttcccccatcaattgatatctgagatgctagaatcaggacataatgggtaatattagtgatcactggttaagaacaagataytctattccgttatttgtccatttatatacaaataccagacacacactatgtaccaggtataatatagatactgttagaatacagtgatgacctcatttatagaacaatgtcacttctgttttatgataagcccaaatcaagaactctttgtggctatggaataaataatttctgcttataggagaaatccaattcacaagtactcaaaattaaaaataccaaacttacccatccacaagtccttgctgaataatcaatcgctgagcctcatctctagaaattttgtggtgaaaccatggctgggaccggtggatagctaaagaaataggatggatgaatgcaaagctttgtttgagatgact

SEQ ID NO: 408071 - DNA, 601 bp, Homo sapiens
atatcatttatgggtagttacataagtagtagaaatataaaaatagacataaaatttgtgaatgttattacctttggaaaggaaagaagggagaaggytataaagttttatttctttaaaaaaacagcatgaagtaaatgtgacaaaatattatttattaattttggagagtgtgtaaaatgtctgctgtggaaaataaagcagaggggaggaagtatgtaatatttctgcctgttacatactcaggaagttaaggtcttatctcatttatcacatgttttacctttctgaactagagctatggttatttttcacattaacacttgaataaatttaactttaaaaaatatctaccctttaagaagcaactgatttctgagcttagatgcacatgagctaatggagaaggtttaggtgttcaggaagcactagtctttattggaaccacagacaaaaataagtacgggctttcactctgaattaccttcccctatcagtcagctgtagggctacaatattccgccaacagttatttccttgggtaacaacatggcttctcatcgcctctttcctaccaccaaggggtatctgtatctatgca

SEQ ID NO: 408072 - DNA, 601 bp, Homo sapiens
atatcatttatgggtagttacataagtagtagaaatataaaaatagacataaaatttgtgaatgttattacctttggaaaggaaagaagggagaaggctataaagttttatttctttaaaaaaacagcatgaagtaaatgtgacaaaatattatttattaattttggagagtgtgtaaaatgtctgctgtggaaaataaagcagaggggaggaagtatgtaatatttctgcctgttacatactcaggaagttaaggtcttatctcatttmtcacatgttttacctttctgaactagagctatggttatttttcacattaacacttgaataaatttaactttaaaaaatatctaccctttaagaagcaactgatttctgagcttagatgcacatgagctaatggagaaggtttaggtgttcaggaagcactagtctttattggaaccacagacaaaaataagtacgggctttcactctgaattaccttcccctatcagtcagctgtagggctacaatattccgccaacagttatttccttgggtaacaacatggcttctcatcgcctctttcctaccaccaaggggtatctgtatctatgca

SEQ ID NO: 408073 - DNA, 620 bp, Homo sapiens
tctcattaattattataaatgactttgccactcactaaccttgtcacttgacccttaattttcttcagttgcaaaaatgaggataaaaaactatgaccaaaactttcagaactgctgtgasgatcaaaggaaatcaagtttgcagaaggcctggaagagcccaaggcagacactaacaaaacactccttaaactcccgctgcagagaattggtcttttatctccaaaaacgaaactaacattataagatgtttttaacacaacagagtcaacaataaaatattacagaatagcagtgtacattatttagaattttatttgataattggatagaacaagagtaaatgtgtcacttaaaatattttcatatcaatatttcaattaggaaaaataaaaataactattattgtgattatcaataatatttatgtgagcacccattatgtgccaggcactgagctagttttcacttaatgctcacaactctataaggtactagctattgaatagatgaggaaattaaggccagaagagcaggcagctaagaaatggtcttgggtttaagcacatactgcaaaagaacttgaccaagttcacaaagtccatagccactaagccagg

SEQ ID NO: 408074 - DNA, 380 bp, Homo sapiens
tgtgaaacaaatggatttttaaagagaaaggaaaataatttaggttgaattaaataaattgtcaatatctgagtatttttgtctgacaacattgacaatttcatatggttcagcctaatggttacacagctgttgtttacactaaagcaatggtagggagaataaaaagatgtagatgcctttcataccttctgtagctatttatgagaagacagatagcactcaaagattgattgaatatgctaagggaggcaaaacggagcaccaagaatgaccccccaaamagcttctaaatagagcaactgaatagataatgatgtcaaccatctatgtagaaaaagaggtgaaagaattaggaggagaacataaacaagtcaact

SEQ ID NO: 408075 - DNA, 517 bp, Homo sapiens
tttgcctagttttcttggcatctgccttccccaatcaaaaatgagagcagaaggagccgtaatgtttagggaagtgtgggattgataatagttggtgagggcaggtgttgatggaacctgaagtaagatttcttagagacaagagtacttcagtcttttagcctgtccatagctgcctttgctgttgtttccctcgttcactctcttgcttaaaaccctggagtaggttcttactgctaaccagcaagataaagttgaactcttcagcttagcactcttagccctcagcagttataatgactaccctgtaaaagtcaggcctcaggaacttctattctctrtaaaattctaattgaactcttacaactatcttatgagataaatattgttggtcctgtttatagacaaggcatagattggttatgtaacttgctcaaagttatacacattatatggtgagaataggctgtgagtccaggcctctcattccaaagacagagagctgattcacattgcc

SEQ ID NO: 408076 - DNA, 517 bp, Homo sapiens
tttgcctagttttcttggcatctgccttccccaatcaaaaatgagagcagaaggagccgtaatgtttagggaagtgtgggattgataatagttggtgagggcaggtgttgatggaacctgaagtaagatttcttagagacaagagtacttcagtcttttagcctgtccatagctgcctttgctgttgtttccctcgttcactctcttgcttaaaaccctggagtaggttcttactgctaaccagcaagataaagttgaactcttcagcttagcactcttagccctcagcagttataatgactaccctgtaaaagtcaggcctcaggaacttctattctctgtaaaattctaattgaactcttacaactatcttatgagataaatattgttggtcctgtttatagacaaggcatagattggttatgtaacttgctcaaagttayacacattatatggtgagaataggctgtgagtccaggcctctcattccaaagacagagagctgattcacattgcc

SEQ ID NO: 408077 - DNA, 519 bp, Homo sapiens
  misc_feature (1)...(519): n = A,T,C or G
nnnnnnnnngaactcctgggctcaagtgatccacccrccttggcctcccaatgtatttcaatccctgttctacaaataaccccacaaaaaaggagcaaaggacatgaacaggcacttctcaaaagaagacatccatgcagccagcaatcatacgaaaaaaaaaattctcattatcactaatcaccatctcactaaaccacagtgaaatagtttctcacaccagtcaatatggctattattaaaaagtcaaataataacagatgctggcaaggctgcaaagaataaagaatgctcatactctgttggtgagaatataaattcgttcagccactgtggaaagcagtttggagattttcaaataatttagaactaccattcaacccagcaatcccattactgggtatgtgcccaaaagaaaataaatcattctaccaaaaaaagacacaggcactcactcatatgtttattgcagcactactcacattagcagagacatggaatcaacctaggtgtcaatca

SEQ ID NO: 408078 - DNA, 598 bp, Homo sapiens
gcttcatgtgcaggtgggtggatgggcagggggacatgctggctacacctgccacactaccacttatgcccttcttcagctgcaccatattggcaagtgggctaggatagaagggcttcttgtccttctgccatgtttatgctcatttcataaatgagtaagtgggacttacagaggccagtttactggcgcaaagtcatgaagctactaaatggaaagccagttttcagcctaatggtatttaaggccagagcccaagctcctaacatggacctactatgtgtcagacaccatgccgtgggctgggaatacaaggaaaaataagatacaatagctggtcctgtgttgctgggtctgctaatgatacaaactactatttgtctgctgctgctgcctgcagtgatatttctgtgaggtgagaaacaatgatttatcctttgaaatctacttgataactacttactcatcagcaatgttgtttactgcraagatcacaggacttaaggtctaaagcttctggttctagccttctctgctacctattagtaatcagttcagtatgggcctccatttccaatctgaaaaagaataaaatatg

SEQ ID NO: 408079 - DNA, 555 bp, Homo sapiens
cttaaatgaaaaacccaaaacaatgaaactactagaagaaaatagagggaatgtttcaggacattggtcttctttaaaaacccaaaactatgaaactactagaagaaaataggagaaatgcttcaggacattgttctgagcaaaaaatttatgaattagaccttaaaagcacaggaaacaaaagcaaaaataaacaaatggaatcatatataactaaaatgcttctgcacagcacagaaaacaataaatggattaaagagacaacctgcagaatgggaaaagatttttgcagactaatcatctgacaagggaatttttttttttttttttttgagcagggtgtcactgtcacccaggctagagtgcagtgatcatagctcactgcagcttcaaacttctgagctcaagtgatccttctgcttcagccttacaaatagttagarctacagatatgcaccaccatacccagctgatataaaaaaaaaattgtagagacggggtctcactgtgttgcccaggctgatctcaaattcctggcctcaagctattctctca

SEQ ID NO: 408080 - DNA, 594 bp, Homo sapiens
attgtctctacctctttatgccagaggcagaacctacaggtgccctttttggcttttgttgttgttgtaacattagccccatggattgtaaggtggtttactgagttaaaacagattctgcttttgtaaaatgatggcatcactgtggactgaatgaaatatttgtatagaaaaaagtgcttgaaaagtgtgtttggaactcatcgatagggtaattctccaaaaatgcccaaactctytttctgtaattagccttgccactttcttcagtcacttaaatggtgagattacacatcagtgcaagatgaccattatggttatggtctactgcaaggttgaaaggaaaaatggaggattgtatttaggaaaagggacaactttgtggccacctgctctgaaagtcaaaaggaaatgtaaattagtgtcattagtgtgttggaagagaaatactattcagtaagcttcgccaaagaaaagtgagtcaaagttaatgtgtgtgcgcatttatatgtaggcagctcgtagaccacattttagccagcaactggtaacaaagagcttagttttccttgtttgaatgctgtagatctgtac

SEQ ID NO: 408081 - DNA, 594 bp, Homo sapiens
attgtctctacctctttatgccagaggcagaacctacaggtgccctttttggcttttgttgttgttgtaacattagccccatggattgtaaggtggtttactgagttaaaacagattctgcttttgtaaaatgatggcatcactgtggactgaatgaaatatttgtatagaaaaaagtgcttgaaaagtgtgtttggaactcatcgatagggtaattctccaaaaatgcccaaactctttttctgtaattagccttgccactttcttcagtcacttaaatggtgagattacacatcagtgcaagatgaccattatggttatggtctactgcaaggttgaaaggaaaaatggaggattgtatttaggaaaagggacaactttgtggccacctgctctgaaagtcaaaaggaaatgtaaattagtgtcattagtgtgttggaagagaaatactattcagtaagcttcgccaaagaaaagtgagtcaaagttaatgtgtgtgygcatttatatgtaggcagctcgtagaccacattttagccagcaactggtaacaaagagcttagttttccttgtttgaatgctgtagatctgtac

SEQ ID NO: 408082 - DNA, 454 bp, Homo sapiens
atacttagcatctgttaaatacttactatttgccagacaggtttcttatatcttctaacccctattacggttttataatagaaatattggtatctctttcttaaagatgaagaaactgaggctmaatgaggttaagcaacctgatgaaagccacaaagctagtaagcacaaaggctaggtttggagtccaactttgcctggcagacaagcccacatttcctactgttatactttcccatagataagtccatatgtttaaaagttgtttttattctctcaaaattttctaaaacagtggaaaatgttgtgctactgagattctttctgatggctgaaaggagaggaacaatggataactgacatggttgtgtggccttatcagacattataacatataatttacgcttttagatatctcttcactttttatccagatctgccaatatcgtctcaa

SEQ ID NO: 408083 - DNA, 454 bp, Homo sapiens
atacttagcatctgttaaatacttactatttgccagacaggtttcttatatcttctaacccctattacggttttataatagaaatattggtatctctttcttaaagatgaagaaactgaggctcaatgaggttaagcaacctgatgaaagccacaaagctagtaagcacaaaggctaggtttggagtccaactttgcctggcagacaagcccacatttcctacygttatactttcccatagataagtccatatgtttaaaagttgtttttattctctcaaaattttctaaaacagtggaaaatgttgtgctactgagattctttctgatggctgaaaggagaggaacaatggataactgacatggttgtgtggccttatcagacattataacatataatttacgcttttagatatctcttcactttttatccagatctgccaatatcgtctcaa

SEQ ID NO: 408084 - DNA, 630 bp, Homo sapiens
ctacatgttgttctcttccagcgtttaccaaaggcatgataattgtaatatcccatatgttatggaagtttgcaccttgcaaactgctttcagttcctttcaaaaaaaaaaaaatctgtttcagacacagccctgtaatgctgacctggcagatatctttattataattttacatctaaggaaaccaggcctaaggtcttgtggctaatcaggtgaaccttgtgctggaatctagatctatttacccgttcttcatatgtcactcccaaaaattgtttaagacaatttcttcrggcaaaactattgtcagtgaaccattaaattggctgaaaaaagtaaacaatccaaacttgagcaataggtcttaaggctgtattttagaaagaatttgttttgatcattatataatacttgaatatatcatgaatggtaagttgacaataaaatacaagcaaacgtgcaatacaacaatattgtaaatactgaatttgattttttaaaaatctattactcatcctatagccactgtcattcagctatggctttttaaaaatcaagcttgcttgctaaactcttatctgtaatgcacaaacatttattaatagacttaattttactggtaaaagttta

SEQ ID NO: 408085 - DNA, 467 bp, Homo sapiens
taatatgtgcaataataaattcargttagaaaaatatatattaatacaagaatattaatttaaattttcctcataatgtatacatattttatggattgtattgatggtatactagcaggcactgtttttattacttttagaaaaccactaaggcaactctacaagctataaaattaaacagttgcctcaaattaataagtcaatcaaccttgacattttggacttgattattctttgcctagtggtgggtgtgggaggtgggaagaaagggctgtctggtgcatgtatgatgtctaccagcaacccagatgtctacccactagatgccagtatcaccctccacccctcaccaaagatgacaaccacaaatatctccagacattgccagatgtcttctggaaagcaaaacaccccagttgagaaccactgttttggacctatgtgaacaatattataacctgacaccc

SEQ ID NO: 408086 - DNA, 580 bp, Homo sapiens
tgtgcaataataaattcaggttagaaaaatatatattaatacaagaatattaatttaaattttcctcataatgtatamatattttatggattgtattgatggtatactagcaggcactgtttttattacttttagaaaaccactaaggcaactctacaagctataaaattaaacagttgcctcaaattaataagtcaatcaaccttgacattttggacttgattattctttgcctagtggtgggtgtgggaggtgggaagaaagggctgtctggtgcatgtatgatgtctaccagcaacccagatgtctacccactagatgccagtatcaccctccacccctcaccaaagatgacaaccacaaatatctccagacattgccagatgtcttctggaaagcaaaacaccccagttgagaaccactgttttggacctatgtgaacaatattataacctgacacccatcaagatatatgaaatcacaggtgctaacataatttatttgaagattaaaaacatattaagcacacagaaaaacatattaggtacatgtacctgctatccatatttaacagatatac

SEQ ID NO: 408087 - DNA, 467 bp, Homo sapiens
taatatgtgcaataataaattcaggttagaaaaatatatattaatacaagaatattaatttaaattttcctcataatgtatacatattttatggattgtattgatggtatactagcaggcactgtttttattacttttagaaaaccactaargcaactctacaagctataaaattaaacagttgcctcaaattaataagtcaatcaaccttgacattttggacttgattattctttgcctagtggtgggtgtgggaggtgggaagaaagggctgtctggtgcatgtatgatgtctaccagcaacccagatgtctacccactagatgccagtatcaccctccacccctcaccaaagatgacaaccacaaatatctccagacattgccagatgtcttctggaaagcaaaacaccccagttgagaaccactgttttggacctatgtgaacaatattataacctgacaccc

SEQ ID NO: 408088 - DNA, 579 bp, Homo sapiens
ggttgatgcaattatggaggctgagaagttccacaacaggctgcctataagctgaagaccctcggatgctggtgacctggctcagcacctcggaggctggtgacctggccttcaagtttgaaggcctcagaaccagagaagctaatggtgtacctctcagtctgggatcaaaggccttagggtgcagggagccactgttctaagtcctgcagtccaaagaccagggagcctgaaattggtgtcccgcaagagagaaagagtgtgtactggcttcagatgaatgtattcacctttcctctgtttttgttcctcttggtccccagaagattggctgttgcccacccgcattgagagcatatcttacctacttaactctactcagactcacaaactcatctcctctgaaacaccttcatagacatgctctaaaataaagctttaccaggtttccgggtatttcttaatccagtcaaggtgacrtctaaagttaaccatcactgtaggttactatgattctttctattttgaagataagtaaactggacttaaaaatattaagtaatataccacaaggagggc

SEQ ID NO: 408089 - DNA, 421 bp, Homo sapiens
atttaaatggtaaaaatgtataaaagtagctcaagcattaaatttttgccagttattgagccaatttttattttccatatttctatttttcaatatgttaaagataactctaagctgggctcagtggctcatgcctataatcccagcactttgggagtccaaggcgggagattgtttgaatccaggagttcaagaccagccaaggcaacatagcaagtcctcaattctacttaaaaaataaatacataaataacactaaaaactacatattaggattgcaaaaawttgcttctataaaactatggcctgccactgaaaaggagaaaaaaaagaaagaacaaaattgccaacttaatttaaacctgtacaagcatacaaacagactcaagttctgaaatagataatcaaaaatgttcaccta

SEQ ID NO: 408090 - DNA, 462 bp, Homo sapiens
tgtattaatttagcagtcatttaaggccattgcctggacctattacttcattaggggttgcaaagttatgacattataattctatcatctccaatctattttattgactggaatgcttttagaaaamcaaaacaaaacaaaacttcctttatcaaccatttcggttaccgtgaagaataaatttatacaggaaagttaggatccaaaggtgaccaattagggttgttttttagtataattatgaacttgtgcacttaaaaatatttgatatgttttaattcattgcagttattgttcttattactactcaaattgtcttatctctagccaggattgtctttggaatccttttcacatgaccccagaagcttttgataacatttttctgatacaacaagatattttaggctcatcctgtacatttttccctcaaacatggaatcagccacacttccaaaaagt

SEQ ID NO: 408091 - DNA, 482 bp, Homo sapiens
ctcagaatgctttataaaagtgttacctacaaatgtatcctcaagctatttaaggtttttagagtttttattgcctcatacactaagaataaaatacatattcttcttaaataataccaattaagcttttctcacaattctcagcctactgcctgtagtagttactttactgatatttgtcttccatttgttaataattcagatcattcaacaygcaattggtatcacagaaacaaagtcttctttcaagtttccattttggtgccattaggtaattttcaggaattattctatgtcacttattactaaacaggtttttgttatagttcatattttttttactgctaccagattttcttatcattaaaatcatatgtctacataaaaaggtaagaagaggtaatcataatgtatttatggattacatagaatagacagatccatatactttacattgatgaatctagttttagaatataaaa

SEQ ID NO: 408092 - DNA, 525 bp, Homo sapiens
attttcctttttcttttactgacagtctaacaacacctatcacttcctacttacctctcactctcttcatgtgttgtcctccaaatctgtggataaatcatgtgacatattcaacsacataaaaaggaaaagagtcaagtattcaaacagaaagggttgactgagcaggtggcctaaaatcaatcctaaaatctacactctagagagtaaaattatattggagtctgatgtgatatgaatatcaaaatgtagtaaccaaggaccttggattcaggacaatttagttcacattccatgctatcctttccttgatgtgtgatattcagcaaattaccaagattccctgagctgtcttctctataaataagggctaccagtacctcctttaaaaagttactgtaaaataaacatgtaccattaatgtaagcatatagtagacacctaataaatggcagcaaatatgattgttagtattaaagttggcagtttagagaaaggagaggtcatatagcttttagacatact

SEQ ID NO: 408093 - DNA, 525 bp, Homo sapiens
attttcctttttcttttactgacagtctaacaacacctatcacttcctacttacctctcactctcttcatgtgttgtcctccaaatctgtggataaatcatgtgacatattcaacgacataaaaaggaaaagagtcaagtattcaaacagaaagggttgactgagcaggtggcctaaaatcaatcctaaaatctacactctagagagtaaaattatattggagtctgatgtgatatgaatatcaaaatgtagtaaccaaggaccttggattcaggacaatttagttcacattccatgcyatcctttccttgatgtgtgatattcagcaaattaccaagattccctgagctgtcttctctataaataagggctaccagtacctcctttaaaaagttactgtaaaataaacatgtaccattaatgtaagcatatagtagacacctaataaatggcagcaaatatgattgttagtattaaagttggcagtttagagaaaggagaggtcatatagcttttagacatact

SEQ ID NO: 408094 - DNA, 619 bp, Homo sapiens
tactactccttccttagaaatttctgcataaattgccccttaatctgcatgtaattaaaagtgggtataaatatgacagcaaaactgccctgagctactactccctgcctatagggtagtcctgctctgcagaaggagtcacagagctgtaatactgccagagctgtaacactgcctcttcaataaagctgttttcttctacctccatcttgcccttgaattctttcctgggyaaagccctggaaagaaaattctttcgtgggctaagctccactttggggcttccctgccctgcatcagtaggatcatactagcagccttctacatttcctaagcagaagctttgagtaacacccaaacataactaactcctattgtctagattataaagggcttgatatctgtgtatgtttttataagagtaccatttaaaaaaggatttaagattgtatttagggtttaacttcctaaagcaatcagcatgtacaaaaagataagttctgaatattcatgacatcgtgctttctataatttgcaatatctgagttgtaggttttaaaagacaagaatgcagacttgatttagatgcattcatctcatacagtcttccaaaagattg

SEQ ID NO: 408095 - DNA, 291 bp, Homo sapiens
ttatgtatttaatgctcaggataataccgagtgtgtaatctataccayatctgaaatgatgtgacaaaattttcagtcaaattctacaatccccactctaacaagccttctcatttgcctcgtatattccttagcttaatctgtacttttctgccacataaggttttgcaagttttgcactgtactatcaagatgagccattcaggcataccaggctgtgactatttcacataaatagcacttgttgggcttacacaaaggatagcctgcatcctgactacaggtggtatc

SEQ ID NO: 408096 - DNA, 291 bp, Homo sapiens
ttatgtatttaatgctcaggataataccgagtgtgtaatctataccacatctgaaatgatgtgacaaaattttcagtcaaattctacaatccccactctaacaagccttctcatttgcctcktatattccttagcttaatctgtacttttctgccacataaggttttgcaagttttgcactgtactatcaagatgagccattcaggcataccaggctgtgactatttcacataaatagcacttgttgggcttacacaaaggatagcctgcatcctgactacaggtggtatc

SEQ ID NO: 408097 - DNA, 509 bp, Homo sapiens
atatatccttggcagagatgaacatttgtagctatatctctaagcacaaggacagagatgtcaaaccctcctactttgtatcaccaatatattctatggaataaaccgtcttagactcactggtattcagggattctctcattcaagctatcacaattctcatgatccaccrtttgcctctgaagatgacaatttggataaatgagtaaagatgggaaacccaatccatgttaatttttttcagacatgtgaagtggagaagagaacctgaaaataatgctgttgaacagaaatatgcgaaatctaaaaatggagagacctaattttttatgagacataataaaaaagcaaaaggaaatagaatcacagcagtttggtgctacgagacacctaagagaataaactaatcccttcactttacagatgagggacctaggccccagagaggtgaagcccattaaccatgtttgcacatagtaaacagtagcacagctagagaagttcagttt

SEQ ID NO: 408098 - DNA, 608 bp, Homo sapiens
ctaatgaaaatgcctgacatataattaattcaatgattgtataattttattccctttttcatccaagctgtattgtaccattacattgcatgtattaaatatwaaatattatattccaatgtcccaagacaattatttcatgtaaaattcctgaatatcctataccaattaaaactttcttacacaataaatatagcttgtcttgtgtatgagaattggattaactaaagccattaattagtatttcttttaaaaaaaatcccatggaagaattttctagagtataacacttttatattttttaagtgctttaattttaagaaaactttcttaaattgttttatgctcagtttcatcatggctgagaagagaatagatgtgttatcatgaaaagagccctataatttaaactaatacttgggtttgattcttagttctacaatttagctaggaacttgaacaaattaatactgtcctaagatgtgatggattgcttcaagaaattgccaggacctctacgaccagcaaattttaaacaaggtataaaatattgtttggttagaggaaaggagactaaggcactgggcagatggttgcgctaggacaag

SEQ ID NO: 408099 - DNA, 560 bp, Homo sapiens
ttttcacataactggcttaaaaatatttctagacattgataaatcttgttgaatgtaaaaaaataatcatgctttgattgtgtaagtatagcctccatcttttctgatttacttgttcaagtctgatggataaattacatatattgtttgtctctcactgaacctgcctcccgcccagatccactcatcactcttcttcaccctgctctgtgcaccaagaaattttcctgtgtgcactgcatcaagaagactcctggttttctgactttcagttgtatttagccaatgggagacactatcaggtgaatgagaactagtgtttatcctctgactcactccctgcagggtgactagctacctgggctgcttttgttttatatattgttctggccacaatggtgtgtgaatattgtatatatacagcctcatagaatcmctgtcaagacccttattaaatatacaattaactttcaccaatggattaattagtctcataacttcactttctgcctccattctagctatgtcttccttgtatagtaattgggaaattttaaatg

SEQ ID NO: 408100 - DNA, 395 bp, Homo sapiens
ctgaaacactgtacataatctatggtttatcatatgtaataatatttatgctaattgtatagtgaactacatatacayactttttttcttacaagaatggattaggtctttctccacataatttatgctttaccgtatttataaagttgagagttgcagaagctctttaagtgtggttgaagatgaacatctgaattgaatactaaagcagttcttaccctattacccagcatggctttaaggctgggaagggtgctctttatgcacagtttaagggcattgcttaattagacttctctctggataagtttcaaattttttatttgcattttaaaaaaccataaaataggtatttctgtggggtcagtggtaatattcccattgtcattttttac

SEQ ID NO: 408101 - DNA, 530 bp, Homo sapiens
aaaaagccagtgtttgggattttaaaatacattattttcaaccaaaacattccctcaagaagaagcaactggtcaattattctttactaatattattctatttaaatgttatcctaacattattttctgtacttaaccagggatgtttaacaatattttatttaaataattcttgtataacatattcttaataatgcaaaccattatagttcatttcattcttactatgttgcactaatctgtggaaatgggcagagaagttttattttcttctattgttgaaattaaagttaactcatgggaggtttacacatttacataatatgttctttgcatcagttattccactggaattttatatccaagctgaatcaattataatagataaatctgtaataaagtataactctaaaccagaatttcatcacccattctctggggaatgaggaaagatacctgaggccaaatttacttaattgttcagtgataaagmctgtgtttaatcacagactgcttcaaatgaattcccg

SEQ ID NO: 408102 - DNA, 533 bp, Homo sapiens
caacacagagttaagttggaagtctttcccttaaacttccagctataagaatatgtccctttttggcttgaaaaagaacatgagactgtcagaaagaaagatgatgaagtagtcttgtgtattacatatattaggtttgtaacttttagccaagtcctttgctaaaacaaatctattattttttgtttgtttgttttgacaactttcccaattytttgccgtaacttctcagagtgccttttttccctcttggcactttctcttttaggccttactttgttaagatattgactttaaaaaaaaaaaaaaaagtaacttggctgggtccggtggctcatacctgtaatcctagcgctttgggagcccaaggcggtgagtcacctgaggtcagtagctcgagaccagcctggccaaaatggtgaaaccccatctctactaaaaatacaaaaaattagctgggcgtggtggaccagctaattttttaaatagctgtaatcccagctaccctggaggctgaggcaggagaatcgcgt

SEQ ID NO: 408103 - DNA, 603 bp, Homo sapiens
gtgatagactgaagagggaagtaaagaaagaaggaagggagtaagagaggaagggaaggaatgaaaaaataatctattggaaaaaaagtctttttctttactcttaatttactatcgaatcattagatttttcggtatttgtaatacttstgttaagtacagtaaattcaagcataaacatgggaatatgcctaagattgctttctagaacaactccagcagaacagcttcaaagcctcattgaccaaattgaccatcagtaaaagggttcataagtggcaaatacagaactcattacagatgtgagtagaagaaattattaagtactaaaaacatctaaatgccaagtcagcgaagtcactgcaccagttccataaaactagtgtctcttatgtattagaaggatgaaaggggaaaatataatttaatttaaattattataaaataatttattattttggatatttttcaaaaaatatccaaatgtaaacaaaaatttatttaaaaatactcaaataattccaaatcttatgggcagtcatactaaaaatcttgcttaagagaaaattgaaaatactactaaagctctaaagtcatcacatt

SEQ ID NO: 408104 - DNA, 578 bp, Homo sapiens
tagataatgcatgacatgtatactatgtgagtttcaatgacttactcatctaaataaacttgaggaaatgtgagccctcagtaagccaccacttttattttattttgaagaacaaaacggtcctttaarctttgttttcataactaagatgagaacttctgatctcatcttaatgcctcctaatatataacatatgagatatgttatttaacattttcaccaagttctctaaggatatcctgtagttacgatggcatactcctttattttctattttttttctaattaacttttaacttgtaatttgacttgcacaaaggctatgctgttatcaatctactaaagttctaaaatctgggatttaataaacacctatttctcagattttgcctcctctataccattgtaactgacctcttaaaccctttttcttcaattcatgtccaaacctgagcttttctctgtgaagcacaactctcattttccttttataaattaaaagttttttcaaactatgacattgtttgcagtgtgagtcttctcttttccttcccttagcttattatcaatttgatcaa

SEQ ID NO: 408105 - DNA, 601 bp, Homo sapiens
caggaagcatggcaccagcacctgcttagcttctgatgaggcctcaggaagctttcgatcatgacagaaggtaaccggggagcctgcgaatcacatggtgagagcaggagcaagagaggsaggcggaggtgccaggttctttttttttttatttttttattttcatattttatttaactgtagccatgccacaataatttagagttttaaagaacaagtttgattgaaatctaaactttgtacaatcctgaattgagaagtttcctgtattttattatgacacaatctttacctaaaaatagagtaattatgaattgagaaaacatagctattaatttcatactgttaagtagattttgtctggaaaactattcatatttaaaggagctttgtacctttgtattctttttgtttttccttgtttatgtaatttaattttattttattttattattattattttttattattattatactttaaagccaggttcttttaaacaaccttatctcacatgaactcatgaccacagggcgggcaccaagccatttatgagaggttcaccccatcagtgaaaagcctcccaccaggccccacctca

SEQ ID NO: 408106 - DNA, 601 bp, Homo sapiens
caggaagcatggcaccagcacctgcttagcttctgatgaggcctcaggaagctttcgatcatgacagaaggtaaccggggagcctgcgaatcacatggtgagagcaggagcaagagaggcaggcggaggtgccaggttctttttttttwtatttttttattttcatattttatttaactgtagccatgccacaataatttagagttttaaagaacaagtttgattgaaatctaaactttgtacaatcctgaattgagaagtttcctgtattttattatgacacaatctttacctaaaaatagagtaattatgaattgagaaaacatagctattaatttcatactgttaagtagattttgtctggaaaactattcatatttaaaggagctttgtacctttgtattctttttgtttttccttgtttatgtaatttaattttattttattttattattattattttttattattattatactttaaagccaggttcttttaaacaaccttatctcacatgaactcatgaccacagggcgggcaccaagccatttatgagaggttcaccccatcagtgaaaagcctcccaccaggccccacctca

SEQ ID NO: 408107 - DNA, 601 bp, Homo sapiens
caggaagcatggcaccagcacctgcttagcttctgatgaggcctcaggaagctttcgatcatgacagaaggtaaccggggagcctgcgaatcacatggtgagagcaggagcaagagaggcaggcggaggtgccaggttctttttttttttatttttttattttcatattttatttaactgtagccatgccacaataatttagagttttaaagaacaagtttgattgaaatctaaactttgtacaatcctgaattgagaagtttcctgtattttattatgacacaayctttacctaaaaatagagtaattatgaattgagaaaacatagctattaatttcatactgttaagtagattttgtctggaaaactattcatatttaaaggagctttgtacctttgtattctttttgtttttccttgtttatgtaatttaattttattttattttattattattattttttattattattatactttaaagccaggttcttttaaacaaccttatctcacatgaactcatgaccacagggcgggcaccaagccatttatgagaggttcaccccatcagtgaaaagcctcccaccaggccccacctca

SEQ ID NO: 408108 - DNA, 597 bp, Homo sapiens
caagttatcttactattcattttatttctatttcttttatttatttatttattttcattgtctcttactggaaggaaaggttatcttactattcagtaacagygtgataacttacataatttatttctctggaaatacttatttttttctgatgtgtcagagaattaaaatatctatgttttccctaatcatccttaatggcagctatttattatataaaagcaatcaaatggcatgataatagcatgtctttatatatttataatgtgtttactgactgctgagtatatgtcacaattaactcaggattattataacaccacaaggtgagaactatcaattttcccattttaaatatgaaaatccctaaatacgacaatgttggataaattggctgagagttcacagtttattaatggcagagccaagatttaaacccaggcagttggcttcattgttttcatttgtaattttttttgctgttatcctcctcatcattgtaattcttttttagttgtacttctctcacaccattgagttatagatgtcagatgggttccaagagtttagttaggttcgaggttcatcttgcatctt

SEQ ID NO: 408109 - DNA, 597 bp, Homo sapiens
caagttatcttactattcattttatttctatttcttttatttatttatttattttcattgtctcttactggaaggaaaggttatcttactattcagtaacagcgtgataacttacataatttatttctctggaaatacttatttttttctgatgtgtcagagaattaaaatatctatgttttccctaatcatccttaatggcagctatttattatataaaagcaatcaaatggcatgataatagcatgtctttatatatttataatgtgtttactgactgctgagtrtatgtcacaattaactcaggattattataacaccacaaggtgagaactatcaattttcccattttaaatatgaaaatccctaaatacgacaatgttggataaattggctgagagttcacagtttattaatggcagagccaagatttaaacccaggcagttggcttcattgttttcatttgtaattttttttgctgttatcctcctcatcattgtaattcttttttagttgtacttctctcacaccattgagttatagatgtcagatgggttccaagagtttagttaggttcgaggttcatcttgcatctt

SEQ ID NO: 408110 - DNA, 533 bp, Homo sapiens
aatctgtagaaatgatagtaatattatccacttcataggactttcattaagtttaaatgacctaatgtattaaaaagcacatagcacaaggttaagtacttgataagcaaatccaaattgttatgacataaatcattctctggagatactttccattgggatgtgctcgcctatatcctctgatagggtctattctgaagttatagttcctgctttctggaatagaaaaaagtatggaagcattttccatgtaaaagagaggaaaaaggccatctagctccacatttggtagttaagcaaactgaggtgatcagacatgtgaagtaacatcctagaattcrtatcaataatttccctgtgtttctgtattgcctaattttttcttattatactttaaattctggagtacatgtgcagaatgtgcaggtttgttacattggtatacacgtgccacgttggtttgctgcacccatcaactcatcatctgcattaggtatttctcctaatgctatccctcccctagccccctgaca

SEQ ID NO: 408111 - DNA, 686 bp, Homo sapiens
ggaacttgtatttcccaaagtggaattcccagacatctattttattagtatatttttactttgaaatttcaaattcattaagcttatatattatgaagtcaattttaaaaaataaagctattttaattgatacaaaatgtgaaatcaggttggtatttgtatatagtcttatattagcttttaatgtatttttctatttgctttcctttgtcaactattgacaaaattaatatacatgcagatcagtagtagcaaatggaaaccccagttttattattgttattattatttcagaattctactttacatatttgtttgtttttgtttctgtattttcaggtccccctcatcttttcctagaatttgagctttctctgagcagggaatctggttgcttttggttactgctgtaaactgagtgtctaatagcgtacctggtacatgagaatgcttaacacatgtccrttgtatgaatcaatgaataaaccatttttgtatttgtaattttttaatttaaaatagaattcagacacataaaagctatttcttataggcatttaagtaatttctatgaattatgtgtcttttcacttgttagattctcaagttcctggtcataaccaccatatttgtagctttctcactggcaatggtgtttcttgaagtagaactgtatcaaccacaaa

SEQ ID NO: 408112 - DNA, 574 bp, Homo sapiens
atttaccttcatgattatcttttgtgtagatgatattccctacatacacttcaactgcactcatgagagaaggaaagacctataagtgtgttcattgtcaaagaataggcaggttgtagtggatcttttttttttttttcctgtgaacaatccatatggagaaaatagagaattgaatgtataaagtcactctataaagatatgcgttgttctgtttgggataccatacagaaaatcagaatttggtttaaactgtcatttctaaactcccttctgtttatagatctgctgagatttagacatgaattaaaatctggagataaatattttaaagcagtttccagaatgctttacttatgggattgtgcaatccwatgttgtcaacctattttgccaggtttgtctggcattgttttttttgggggggaggggtggtaataaatccaaactatcttttaacatacacttgccttttagtgcgggcagtctctcgtgtagtcttattttatgttccagcccacattctcttgactattttactgtcctgcgtttatggtgccttccaatttagtgt

SEQ ID NO: 408113 - DNA, 576 bp, Homo sapiens
gttcctacaacttccttctccaatattcctcaggcaaatgtatccacttcacccctgtgtacacacagggtgctgtcgatacccccattatggtcttcattactttctaatattcagaatcttaatcatggttccatcgttgcatcttaaacgtgttattcctttgctcctttccatgtttgtctttcacagtggttgtaaactactaaggggccaggtcatgttttatacatctccatgtccccagagcaaggaatagctttgaatatactacaagtacagattgctgaatgaatgacaccaaaataggcaaaaaggtgatattttaagaagatatttaaaatcaatatattttataccttgcaagtaatctatatgcagccttagaaggtactataatgattgcttctctgtaaaattcctatagaggggaaacatagagaaaaatgtttcataattaagttgtttacttgaaagtcctgaagacaaacacacaaacataggcacaaagtgcctctctaagtaacaattatgwcaaaagaaaaatgcatttttttttccaaaatggaaggtgcc

SEQ ID NO: 408114 - DNA, 587 bp, Homo sapiens
tgttgggcaggaatggggaactgggatccctttgctgctcctttgacggaaggaggggctggcaagagggtagggaaggagctatagccagttttgtcactggctctcagtatggctttggaaagtktcttccctgttgtaatttcctcccctgaaaagcagctggactttagagagacaaatataagctccatgaaaacaggaactacctttttgcttcacatggtctccccagccgcttgcatagcatttgatgctaatcatttgcaagatgaatgaatgaaaaaatgaatgaatgaaaggatgggcatgtcctttatgccttcatgtcctgttccatgctcctgtcagccattatgaaccaattaggaccttttttcctctcagtctcaatgtagctttttcttagagtggctacaacaagcactggtaatcaattggtgttggtgccaggaacatcagttgattaccaggaaacctgtttgcagctctgtattaggagtccttgagttccctagagggagtcctgccagagcttgttttgtgagttctggtcccaagcaggttcatggcctgctctcctgaag

SEQ ID NO: 408115 - DNA, 587 bp, Homo sapiens
tgttgggcaggaatggggaactgggatccctttgctgctcctttgacggaaggaggggctggcaagagggtagggaaggagctatagccagttttgtcactggctctcagtatggctttggaaagtttcttccctgttgtaatttcctcccctgaaaagcagctggactttagagagacaaatataagctccatgaaaacaggaactayctttttgcttcacatggtctccccagccgcttgcatagcatttgatgctaatcatttgcaagatgaatgaatgaaaaaatgaatgaatgaaaggatgggcatgtcctttatgccttcatgtcctgttccatgctcctgtcagccattatgaaccaattaggaccttttttcctctcagtctcaatgtagctttttcttagagtggctacaacaagcactggtaatcaattggtgttggtgccaggaacatcagttgattaccaggaaacctgtttgcagctctgtattaggagtccttgagttccctagagggagtcctgccagagcttgttttgtgagttctggtcccaagcaggttcatggcctgctctcctgaag

SEQ ID NO: 408116 - DNA, 587 bp, Homo sapiens
tgttgggcaggaatggggaactgggatccctttgctgctcctttgacggaaggaggggctggcaagagggtagggaaggagctatagccagttttgtcactggctctcagtatggctttggaaagtttcttccctgttgtaatttcctcccctgaaaagcagctggactttagagagacaaatataagctccatgaaaacaggaactacctttttgcttcacatggtctccccagccrcttgcatagcatttgatgctaatcatttgcaagatgaatgaatgaaaaaatgaatgaatgaaaggatgggcatgtcctttatgccttcatgtcctgttccatgctcctgtcagccattatgaaccaattaggaccttttttcctctcagtctcaatgtagctttttcttagagtggctacaacaagcactggtaatcaattggtgttggtgccaggaacatcagttgattaccaggaaacctgtttgcagctctgtattaggagtccttgagttccctagagggagtcctgccagagcttgttttgtgagttctggtcccaagcaggttcatggcctgctctcctgaag

SEQ ID NO: 408117 - DNA, 526 bp, Homo sapiens
atggcatcccacgtacattgctgatgatcacccagccaccatgtgaggttcaatgcctgaggactattcttgccactggacagatgagcaaaccaaagcccagataatctatcttgcttgtgtaatctcttaatagtctaacttctttaactggctgtgggctccggggaggcagggatcatgtctggtgtgtttgctgttgtagcctcagtgcccacctcagtgcctactttggggctggcattcaatgaaggttgattctcttaataaaaagaatccttgttaccggtttttttttttttttttttttttttttttcccaaaactcaascaaaatgggggttctcaccctggggtcctttcaagggcaaaaattactggaaccacattggaaattttgcccccctcctcccccaggggactgggggcaatgttcacttggggcaatgacactttcaattgtaaaaactggaaaacaggggctactggcttttagtatttaaaggccaaaaatgctgctaaacat

SEQ ID NO: 408118 - DNA, 526 bp, Homo sapiens
atggcatcccacgtacattgctgatgatcacccagccaccatgtgaggttcaatgcctgaggactattcttgccactggacagatgagcaaaccaaagcccagataatctatcttgcttgtgtaatctcttaatagtctaacttctttaactggctgtgggctccggggaggcagggatcatgtctggtgtgtttgctgttgtagcctcagtgcccacctcagtgcctactttggggctggcattcaatgaaggttgattctcttaataaaaagaatccttgttaccggtttttttttttttttttttttttttttttcccaaaactcaaccaaaatgggggttctcaccctggggtmctttcaagggcaaaaattactggaaccacattggaaattttgcccccctcctcccccaggggactgggggcaatgttcacttggggcaatgacactttcaattgtaaaaactggaaaacaggggctactggcttttagtatttaaaggccaaaaatgctgctaaacat

SEQ ID NO: 408119 - DNA, 412 bp, Homo sapiens
cttactaacagcgtataataagtgtggtttattcatatactggaatattatacaacaatggaaatgaagtaattatgttatacgcaacaaccaggattaaaaaaagagtttatccttagcctagaaattaatttttacttaatttttttttttartacttagtatgtgccacactttgttctaagtgttggggatacagtagtggacaaaagaaagtccctgcttgagtagaatttagattttagtgacataatacaaacagtgaatcaataaatatataacatgtctgatgatagagagggaaatacagggtaagaaaatagagattgtctagtgcaacagtaggaggatctctggggattgatattttatatatatgggaatatatattttatatatagggatatactct

SEQ ID NO: 408120 - DNA, 561 bp, Homo sapiens
tgatagtgctgatgctaatgctaacacttcagtgcttactatgagccaggcacagttctaaatactttataagaattaacttacttaagcctcatatttaaccctttgaggtacgtactattattatacccrttttacagatgaaataactaaggcacagagtaactcttccatgttcaagcagcttttaggttacaagagctaagatttgaatgcaaacgtgtcctgtgccagagtttgtggtcttaactgtcatataacattaccatttccttgggaatggctccagtatgaacctctccagggtgcttcaatagctttaagctaatgcaaattccttagcctgccccctaggccctctgtgatccagagggaagcctcaaccccactctgctcctcttcgctgtctgcccaccaccattctcttcatggctccctacgcctgccatgctgtcccacactgccctgcctttgtccatacttttctcttgggagggagtaagaggcaagtgggttcacttttccaggcccagctcaaatgtcctatcccttgaggaagcc
